United States Patent Application Publication US 2005/0255487 A1 - sequence listing, part 27

SEQ ID NO: 727805 - RNA, 19 nt, Homo sapiens
  misc_RNA (1)...(19): siRNA sense strand
uaucugggaaggaggaaga

SEQ ID NO: 727806 - RNA, 19 nt, Homo sapiens
  misc_RNA (1)...(19): siRNA sense strand
gggcugacacgcgagauuc

SEQ ID NO: 727807 - RNA, 19 nt, Homo sapiens
  misc_RNA (1)...(19): siRNA sense strand
aagugauccuaaacaagaa

SEQ ID NO: 727808 - RNA, 19 nt, Homo sapiens
  misc_RNA (1)...(19): siRNA sense strand
cuaaacaagaagagucuca

SEQ ID NO: 727809 - RNA, 19 nt, Homo sapiens
  misc_RNA (1)...(19): siRNA sense strand
gcaauucgauuagcugugu

SEQ ID NO: 727810 - RNA, 19 nt, Homo sapiens
  misc_RNA (1)...(19): siRNA sense strand
gcucuucaaugaugcaauu

SEQ ID NO: 727811 - RNA, 19 nt, Homo sapiens
  misc_RNA (1)...(19): siRNA sense strand
ggaaguaugaugcugauga

SEQ ID NO: 727812 - RNA, 19 nt, Homo sapiens
  misc_RNA (1)...(19): siRNA sense strand
gcaucgugguggccaauaa

SEQ ID NO: 727813 - RNA, 19 nt, Homo sapiens
  misc_RNA (1)...(19): siRNA sense strand
gauuagcugugucuuacaa

SEQ ID NO: 727814 - RNA, 19 nt, Homo sapiens
  misc_RNA (1)...(19): siRNA sense strand
auacagagcuucgggaguu

SEQ ID NO: 727815 - RNA, 19 nt, Homo sapiens
  misc_RNA (1)...(19): siRNA sense strand
gggcaaauccaaacucaug

SEQ ID NO: 727816 - RNA, 19 nt, Homo sapiens
  misc_RNA (1)...(19): siRNA sense strand
ggaaagucaccuauaggaa

SEQ ID NO: 727817 - RNA, 19 nt, Homo sapiens
  misc_RNA (1)...(19): siRNA sense strand
ccaaacucauggagagauu

SEQ ID NO: 727818 - RNA, 19 nt, Homo sapiens
  misc_RNA (1)...(19): siRNA sense strand
agaggaaagucaccuauag

SEQ ID NO: 727819 - RNA, 19 nt, Homo sapiens
  misc_RNA (1)...(19): siRNA sense strand
gaccauccuuguggacuuu

SEQ ID NO: 727820 - RNA, 19 nt, Homo sapiens
  misc_RNA (1)...(19): siRNA sense strand
caaugaugcaauucgauua

SEQ ID NO: 727821 - RNA, 19 nt, Homo sapiens
  misc_RNA (1)...(19): siRNA sense strand
gacauaaacgugacccaaa

SEQ ID NO: 727822 - RNA, 19 nt, Homo sapiens
  misc_RNA (1)...(19): siRNA sense strand
gaaguaugaugcugaugac

SEQ ID NO: 727823 - RNA, 19 nt, Homo sapiens
  misc_RNA (1)...(19): siRNA sense strand
ggccagagaucccaugcau

SEQ ID NO: 727824 - RNA, 19 nt, Homo sapiens
  misc_RNA (1)...(19): siRNA sense strand
gaugacaacgugaagauca

SEQ ID NO: 727825 - RNA, 19 nt, Homo sapiens
  misc_RNA (1)...(19): siRNA sense strand
gcacacagccacgguagau

SEQ ID NO: 727826 - RNA, 19 nt, Homo sapiens
  misc_RNA (1)...(19): siRNA sense strand
ggacgugccagaccaggaa

SEQ ID NO: 727827 - RNA, 19 nt, Homo sapiens
  misc_RNA (1)...(19): siRNA sense strand
guaccaauguugugaagcu

SEQ ID NO: 727828 - RNA, 19 nt, Homo sapiens
  misc_RNA (1)...(19): siRNA sense strand
cagaggaaagucaccuaua

SEQ ID NO: 727829 - RNA, 19 nt, Homo sapiens
  misc_RNA (1)...(19): siRNA sense strand
ucaaugaugcaauucgauu

SEQ ID NO: 727830 - RNA, 19 nt, Homo sapiens
  misc_RNA (1)...(19): siRNA sense strand
uucaggagcucgagaacuu

SEQ ID NO: 727831 - RNA, 19 nt, Homo sapiens
  misc_RNA (1)...(19): siRNA sense strand
gaacucccaggacuucaug

SEQ ID NO: 727832 - RNA, 19 nt, Homo sapiens
  misc_RNA (1)...(19): siRNA sense strand
gauauacagaggaaaguca

SEQ ID NO: 727833 - RNA, 19 nt, Homo sapiens
  misc_RNA (1)...(19): siRNA sense strand
guaugaugcugaugacaac

SEQ ID NO: 727834 - RNA, 19 nt, Homo sapiens
  misc_RNA (1)...(19): siRNA sense strand
aaccugagcaccugguaua

SEQ ID NO: 727835 - RNA, 19 nt, Homo sapiens
  misc_RNA (1)...(19): siRNA sense strand
cguacgcccugacccugua

SEQ ID NO: 727836 - RNA, 19 nt, Homo sapiens
  misc_RNA (1)...(19): siRNA sense strand
gaaccugagcaccugguau

SEQ ID NO: 727837 - RNA, 19 nt, Homo sapiens
  misc_RNA (1)...(19): siRNA sense strand
gugggcaaauccaaacuca

SEQ ID NO: 727838 - RNA, 19 nt, Homo sapiens
  misc_RNA (1)...(19): siRNA sense strand
ucgauuagcugugucuuac

SEQ ID NO: 727839 - RNA, 19 nt, Homo sapiens
  misc_RNA (1)...(19): siRNA sense strand
ccaauguugugaagcucuu

SEQ ID NO: 727840 - RNA, 19 nt, Homo sapiens
  misc_RNA (1)...(19): siRNA sense strand
gaugguaccaauguuguga

SEQ ID NO: 727841 - RNA, 19 nt, Homo sapiens
  misc_RNA (1)...(19): siRNA sense strand
aaaccaaaccgagugaguu

SEQ ID NO: 727842 - RNA, 19 nt, Homo sapiens
  misc_RNA (1)...(19): siRNA sense strand
gcugaugguaccaauguug

SEQ ID NO: 727843 - RNA, 19 nt, Homo sapiens
  misc_RNA (1)...(19): siRNA sense strand
gaccaagggaaguaugaug

SEQ ID NO: 727844 - RNA, 19 nt, Homo sapiens
  misc_RNA (1)...(19): siRNA sense strand
ggaaccugagcaccuggua

SEQ ID NO: 727845 - RNA, 19 nt, Homo sapiens
  misc_RNA (1)...(19): siRNA sense strand
acauaaacgugacccaaaa

SEQ ID NO: 727846 - RNA, 19 nt, Homo sapiens
  misc_RNA (1)...(19): siRNA sense strand
gcagugggcaaauccaaac

SEQ ID NO: 727847 - RNA, 19 nt, Homo sapiens
  misc_RNA (1)...(19): siRNA sense strand
cuucaaugaugcaauucga

SEQ ID NO: 727848 - RNA, 19 nt, Homo sapiens
  misc_RNA (1)...(19): siRNA sense strand
caucgugguggccaauaaa

SEQ ID NO: 727849 - RNA, 19 nt, Homo sapiens
  misc_RNA (1)...(19): siRNA sense strand
gaggaaagucaccuauagg

SEQ ID NO: 727850 - RNA, 19 nt, Homo sapiens
  misc_RNA (1)...(19): siRNA sense strand
agaccauccuuguggacuu

SEQ ID NO: 727851 - RNA, 19 nt, Homo sapiens
  misc_RNA (1)...(19): siRNA sense strand
ucucauggauggcuuucag

SEQ ID NO: 727852 - RNA, 19 nt, Homo sapiens
  misc_RNA (1)...(19): siRNA sense strand
agacagcgcagugggcaaa

SEQ ID NO: 727853 - RNA, 19 nt, Homo sapiens
  misc_RNA (1)...(19): siRNA sense strand
caaacucauggagagauuu

SEQ ID NO: 727854 - RNA, 19 nt, Homo sapiens
  misc_RNA (1)...(19): siRNA sense strand
ggaguucaggccagagauc

SEQ ID NO: 727855 - RNA, 19 nt, Homo sapiens
  misc_RNA (1)...(19): siRNA sense strand
uguuugauauacagaggaa

SEQ ID NO: 727856 - RNA, 19 nt, Homo sapiens
  misc_RNA (1)...(19): siRNA sense strand
aaccaaaccgagugaguug

SEQ ID NO: 727857 - RNA, 19 nt, Homo sapiens
  misc_RNA (1)...(19): siRNA sense strand
cgucucggcugcugauggu

SEQ ID NO: 727858 - RNA, 19 nt, Homo sapiens
  misc_RNA (1)...(19): siRNA sense strand
aggaaagucaccuauagga

SEQ ID NO: 727859 - RNA, 19 nt, Homo sapiens
  misc_RNA (1)...(19): siRNA sense strand
gcaauucgauuagcugugu

SEQ ID NO: 727860 - RNA, 19 nt, Homo sapiens
  misc_RNA (1)...(19): siRNA sense strand
gcucuucaaugaugcaauu

SEQ ID NO: 727861 - RNA, 19 nt, Homo sapiens
  misc_RNA (1)...(19): siRNA sense strand
ggaaguaugaugcugauga

SEQ ID NO: 727862 - RNA, 19 nt, Homo sapiens
  misc_RNA (1)...(19): siRNA sense strand
gcaucgugguggccaauaa

SEQ ID NO: 727863 - RNA, 19 nt, Homo sapiens
  misc_RNA (1)...(19): siRNA sense strand
gauuagcugugucuuacaa

SEQ ID NO: 727864 - RNA, 19 nt, Homo sapiens
  misc_RNA (1)...(19): siRNA sense strand
auacagagcuucgggaguu

SEQ ID NO: 727865 - RNA, 19 nt, Homo sapiens
  misc_RNA (1)...(19): siRNA sense strand
gggcaaauccaaacucaug

SEQ ID NO: 727866 - RNA, 19 nt, Homo sapiens
  misc_RNA (1)...(19): siRNA sense strand
ggaaagucaccuauaggaa

SEQ ID NO: 727867 - RNA, 19 nt, Homo sapiens
  misc_RNA (1)...(19): siRNA sense strand
ccaaacucauggagagauu

SEQ ID NO: 727868 - RNA, 19 nt, Homo sapiens
  misc_RNA (1)...(19): siRNA sense strand
agaggaaagucaccuauag

SEQ ID NO: 727869 - RNA, 19 nt, Homo sapiens
  misc_RNA (1)...(19): siRNA sense strand
gaccauccuuguggacuuu

SEQ ID NO: 727870 - RNA, 19 nt, Homo sapiens
  misc_RNA (1)...(19): siRNA sense strand
caaugaugcaauucgauua

SEQ ID NO: 727871 - RNA, 19 nt, Homo sapiens
  misc_RNA (1)...(19): siRNA sense strand
gacauaaacgugacccaaa

SEQ ID NO: 727872 - RNA, 19 nt, Homo sapiens
  misc_RNA (1)...(19): siRNA sense strand
gaaguaugaugcugaugac

SEQ ID NO: 727873 - RNA, 19 nt, Homo sapiens
  misc_RNA (1)...(19): siRNA sense strand
ggccagagaucccaugcau

SEQ ID NO: 727874 - RNA, 19 nt, Homo sapiens
  misc_RNA (1)...(19): siRNA sense strand
gaugacaacgugaagauca

SEQ ID NO: 727875 - RNA, 19 nt, Homo sapiens
  misc_RNA (1)...(19): siRNA sense strand
gcacacagccacgguagau

SEQ ID NO: 727876 - RNA, 19 nt, Homo sapiens
  misc_RNA (1)...(19): siRNA sense strand
ggacgugccagaccaggaa

SEQ ID NO: 727877 - RNA, 19 nt, Homo sapiens
  misc_RNA (1)...(19): siRNA sense strand
guaccaauguugugaagcu

SEQ ID NO: 727878 - RNA, 19 nt, Homo sapiens
  misc_RNA (1)...(19): siRNA sense strand
cagaggaaagucaccuaua

SEQ ID NO: 727879 - RNA, 19 nt, Homo sapiens
  misc_RNA (1)...(19): siRNA sense strand
ucaaugaugcaauucgauu

SEQ ID NO: 727880 - RNA, 19 nt, Homo sapiens
  misc_RNA (1)...(19): siRNA sense strand
uucaggagcucgagaacuu

SEQ ID NO: 727881 - RNA, 19 nt, Homo sapiens
  misc_RNA (1)...(19): siRNA sense strand
gaacucccaggacuucaug

SEQ ID NO: 727882 - RNA, 19 nt, Homo sapiens
  misc_RNA (1)...(19): siRNA sense strand
gauauacagaggaaaguca

SEQ ID NO: 727883 - RNA, 19 nt, Homo sapiens
  misc_RNA (1)...(19): siRNA sense strand
guaugaugcugaugacaac

SEQ ID NO: 727884 - RNA, 19 nt, Homo sapiens
  misc_RNA (1)...(19): siRNA sense strand
aaccugagcaccugguaua

SEQ ID NO: 727885 - RNA, 19 nt, Homo sapiens
  misc_RNA (1)...(19): siRNA sense strand
cguacgcccugacccugua

SEQ ID NO: 727886 - RNA, 19 nt, Homo sapiens
  misc_RNA (1)...(19): siRNA sense strand
gaaccugagcaccugguau

SEQ ID NO: 727887 - RNA, 19 nt, Homo sapiens
  misc_RNA (1)...(19): siRNA sense strand
gugggcaaauccaaacuca

SEQ ID NO: 727888 - RNA, 19 nt, Homo sapiens
  misc_RNA (1)...(19): siRNA sense strand
ucgauuagcugugucuuac

SEQ ID NO: 727889 - RNA, 19 nt, Homo sapiens
  misc_RNA (1)...(19): siRNA sense strand
ccaauguugugaagcucuu

SEQ ID NO: 727890 - RNA, 19 nt, Homo sapiens
  misc_RNA (1)...(19): siRNA sense strand
gaugguaccaauguuguga

SEQ ID NO: 727891 - RNA, 19 nt, Homo sapiens
  misc_RNA (1)...(19): siRNA sense strand
aaaccaaaccgagugaguu

SEQ ID NO: 727892 - RNA, 19 nt, Homo sapiens
  misc_RNA (1)...(19): siRNA sense strand
gcugaugguaccaauguug

SEQ ID NO: 727893 - RNA, 19 nt, Homo sapiens
  misc_RNA (1)...(19): siRNA sense strand
gaccaagggaaguaugaug

SEQ ID NO: 727894 - RNA, 19 nt, Homo sapiens
  misc_RNA (1)...(19): siRNA sense strand
ggaaccugagcaccuggua

SEQ ID NO: 727895 - RNA, 19 nt, Homo sapiens
  misc_RNA (1)...(19): siRNA sense strand
acauaaacgugacccaaaa

SEQ ID NO: 727896 - RNA, 19 nt, Homo sapiens
  misc_RNA (1)...(19): siRNA sense strand
gcagugggcaaauccaaac

SEQ ID NO: 727897 - RNA, 19 nt, Homo sapiens
  misc_RNA (1)...(19): siRNA sense strand
cuucaaugaugcaauucga

SEQ ID NO: 727898 - RNA, 19 nt, Homo sapiens
  misc_RNA (1)...(19): siRNA sense strand
caucgugguggccaauaaa

SEQ ID NO: 727899 - RNA, 19 nt, Homo sapiens
  misc_RNA (1)...(19): siRNA sense strand
gaggaaagucaccuauagg

SEQ ID NO: 727900 - RNA, 19 nt, Homo sapiens
  misc_RNA (1)...(19): siRNA sense strand
agaccauccuuguggacuu

SEQ ID NO: 727901 - RNA, 19 nt, Homo sapiens
  misc_RNA (1)...(19): siRNA sense strand
ucucauggauggcuuucag

SEQ ID NO: 727902 - RNA, 19 nt, Homo sapiens
  misc_RNA (1)...(19): siRNA sense strand
agacagcgcagugggcaaa

SEQ ID NO: 727903 - RNA, 19 nt, Homo sapiens
  misc_RNA (1)...(19): siRNA sense strand
caaacucauggagagauuu

SEQ ID NO: 727904 - RNA, 19 nt, Homo sapiens
  misc_RNA (1)...(19): siRNA sense strand
ggaguucaggccagagauc

SEQ ID NO: 727905 - RNA, 19 nt, Homo sapiens
  misc_RNA (1)...(19): siRNA sense strand
uguuugauauacagaggaa

SEQ ID NO: 727906 - RNA, 19 nt, Homo sapiens
  misc_RNA (1)...(19): siRNA sense strand
aaccaaaccgagugaguug

SEQ ID NO: 727907 - RNA, 19 nt, Homo sapiens
  misc_RNA (1)...(19): siRNA sense strand
cgucucggcugcugauggu

SEQ ID NO: 727908 - RNA, 19 nt, Homo sapiens
  misc_RNA (1)...(19): siRNA sense strand
aggaaagucaccuauagga

SEQ ID NO: 727909 - RNA, 19 nt, Homo sapiens
  misc_RNA (1)...(19): siRNA sense strand
gcaauucgauuagcugugu

SEQ ID NO: 727910 - RNA, 19 nt, Homo sapiens
  misc_RNA (1)...(19): siRNA sense strand
gcucuucaaugaugcaauu

SEQ ID NO: 727911 - RNA, 19 nt, Homo sapiens
  misc_RNA (1)...(19): siRNA sense strand
ggaaguaugaugcugauga

SEQ ID NO: 727912 - RNA, 19 nt, Homo sapiens
  misc_RNA (1)...(19): siRNA sense strand
gcaucgugguggccaauaa

SEQ ID NO: 727913 - RNA, 19 nt, Homo sapiens
  misc_RNA (1)...(19): siRNA sense strand
gauuagcugugucuuacaa

SEQ ID NO: 727914 - RNA, 19 nt, Homo sapiens
  misc_RNA (1)...(19): siRNA sense strand
auacagagcuucgggaguu

SEQ ID NO: 727915 - RNA, 19 nt, Homo sapiens
  misc_RNA (1)...(19): siRNA sense strand
gggcaaauccaaacucaug

SEQ ID NO: 727916 - RNA, 19 nt, Homo sapiens
  misc_RNA (1)...(19): siRNA sense strand
ggaaagucaccuauaggaa

SEQ ID NO: 727917 - RNA, 19 nt, Homo sapiens
  misc_RNA (1)...(19): siRNA sense strand
ccaaacucauggagagauu

SEQ ID NO: 727918 - RNA, 19 nt, Homo sapiens
  misc_RNA (1)...(19): siRNA sense strand
agaggaaagucaccuauag

SEQ ID NO: 727919 - RNA, 19 nt, Homo sapiens
  misc_RNA (1)...(19): siRNA sense strand
gaccauccuuguggacuuu

SEQ ID NO: 727920 - RNA, 19 nt, Homo sapiens
  misc_RNA (1)...(19): siRNA sense strand
caaugaugcaauucgauua

SEQ ID NO: 727921 - RNA, 19 nt, Homo sapiens
  misc_RNA (1)...(19): siRNA sense strand
gacauaaacgugacccaaa

SEQ ID NO: 727922 - RNA, 19 nt, Homo sapiens
  misc_RNA (1)...(19): siRNA sense strand
gaaguaugaugcugaugac

SEQ ID NO: 727923 - RNA, 19 nt, Homo sapiens
  misc_RNA (1)...(19): siRNA sense strand
ggccagagaucccaugcau

SEQ ID NO: 727924 - RNA, 19 nt, Homo sapiens
  misc_RNA (1)...(19): siRNA sense strand
gaugacaacgugaagauca

SEQ ID NO: 727925 - RNA, 19 nt, Homo sapiens
  misc_RNA (1)...(19): siRNA sense strand
gcacacagccacgguagau

SEQ ID NO: 727926 - RNA, 19 nt, Homo sapiens
  misc_RNA (1)...(19): siRNA sense strand
ggacgugccagaccaggaa

SEQ ID NO: 727927 - RNA, 19 nt, Homo sapiens
  misc_RNA (1)...(19): siRNA sense strand
guaccaauguugugaagcu

SEQ ID NO: 727928 - RNA, 19 nt, Homo sapiens
  misc_RNA (1)...(19): siRNA sense strand
cagaggaaagucaccuaua

SEQ ID NO: 727929 - RNA, 19 nt, Homo sapiens
  misc_RNA (1)...(19): siRNA sense strand
ucaaugaugcaauucgauu

SEQ ID NO: 727930 - RNA, 19 nt, Homo sapiens
  misc_RNA (1)...(19): siRNA sense strand
uucaggagcucgagaacuu

SEQ ID NO: 727931 - RNA, 19 nt, Homo sapiens
  misc_RNA (1)...(19): siRNA sense strand
gaacucccaggacuucaug

SEQ ID NO: 727932 - RNA, 19 nt, Homo sapiens
  misc_RNA (1)...(19): siRNA sense strand
gauauacagaggaaaguca

SEQ ID NO: 727933 - RNA, 19 nt, Homo sapiens
  misc_RNA (1)...(19): siRNA sense strand
guaugaugcugaugacaac

SEQ ID NO: 727934 - RNA, 19 nt, Homo sapiens
  misc_RNA (1)...(19): siRNA sense strand
aaccugagcaccugguaua

SEQ ID NO: 727935 - RNA, 19 nt, Homo sapiens
  misc_RNA (1)...(19): siRNA sense strand
cguacgcccugacccugua

SEQ ID NO: 727936 - RNA, 19 nt, Homo sapiens
  misc_RNA (1)...(19): siRNA sense strand
gaaccugagcaccugguau

SEQ ID NO: 727937 - RNA, 19 nt, Homo sapiens
  misc_RNA (1)...(19): siRNA sense strand
gugggcaaauccaaacuca

SEQ ID NO: 727938 - RNA, 19 nt, Homo sapiens
  misc_RNA (1)...(19): siRNA sense strand
ucgauuagcugugucuuac

SEQ ID NO: 727939 - RNA, 19 nt, Homo sapiens
  misc_RNA (1)...(19): siRNA sense strand
ccaauguugugaagcucuu

SEQ ID NO: 727940 - RNA, 19 nt, Homo sapiens
  misc_RNA (1)...(19): siRNA sense strand
gaugguaccaauguuguga

SEQ ID NO: 727941 - RNA, 19 nt, Homo sapiens
  misc_RNA (1)...(19): siRNA sense strand
aaaccaaaccgagugaguu

SEQ ID NO: 727942 - RNA, 19 nt, Homo sapiens
  misc_RNA (1)...(19): siRNA sense strand
gcugaugguaccaauguug

SEQ ID NO: 727943 - RNA, 19 nt, Homo sapiens
  misc_RNA (1)...(19): siRNA sense strand
gaccaagggaaguaugaug

SEQ ID NO: 727944 - RNA, 19 nt, Homo sapiens
  misc_RNA (1)...(19): siRNA sense strand
ggaaccugagcaccuggua

SEQ ID NO: 727945 - RNA, 19 nt, Homo sapiens
  misc_RNA (1)...(19): siRNA sense strand
acauaaacgugacccaaaa

SEQ ID NO: 727946 - RNA, 19 nt, Homo sapiens
  misc_RNA (1)...(19): siRNA sense strand
gcagugggcaaauccaaac

SEQ ID NO: 727947 - RNA, 19 nt, Homo sapiens
  misc_RNA (1)...(19): siRNA sense strand
cuucaaugaugcaauucga

SEQ ID NO: 727948 - RNA, 19 nt, Homo sapiens
  misc_RNA (1)...(19): siRNA sense strand
caucgugguggccaauaaa

SEQ ID NO: 727949 - RNA, 19 nt, Homo sapiens
  misc_RNA (1)...(19): siRNA sense strand
gaggaaagucaccuauagg

SEQ ID NO: 727950 - RNA, 19 nt, Homo sapiens
  misc_RNA (1)...(19): siRNA sense strand
agaccauccuuguggacuu

SEQ ID NO: 727951 - RNA, 19 nt, Homo sapiens
  misc_RNA (1)...(19): siRNA sense strand
ucucauggauggcuuucag

SEQ ID NO: 727952 - RNA, 19 nt, Homo sapiens
  misc_RNA (1)...(19): siRNA sense strand
agacagcgcagugggcaaa

SEQ ID NO: 727953 - RNA, 19 nt, Homo sapiens
  misc_RNA (1)...(19): siRNA sense strand
caaacucauggagagauuu

SEQ ID NO: 727954 - RNA, 19 nt, Homo sapiens
  misc_RNA (1)...(19): siRNA sense strand
ggaguucaggccagagauc

SEQ ID NO: 727955 - RNA, 19 nt, Homo sapiens
  misc_RNA (1)...(19): siRNA sense strand
uguuugauauacagaggaa

SEQ ID NO: 727956 - RNA, 19 nt, Homo sapiens
  misc_RNA (1)...(19): siRNA sense strand
aaccaaaccgagugaguug

SEQ ID NO: 727957 - RNA, 19 nt, Homo sapiens
  misc_RNA (1)...(19): siRNA sense strand
cgucucggcugcugauggu

SEQ ID NO: 727958 - RNA, 19 nt, Homo sapiens
  misc_RNA (1)...(19): siRNA sense strand
aggaaagucaccuauagga

SEQ ID NO: 727959 - RNA, 19 nt, Homo sapiens
  misc_RNA (1)...(19): siRNA sense strand
gcaauucgauuagcugugu

SEQ ID NO: 727960 - RNA, 19 nt, Homo sapiens
  misc_RNA (1)...(19): siRNA sense strand
gcucuucaaugaugcaauu

SEQ ID NO: 727961 - RNA, 19 nt, Homo sapiens
  misc_RNA (1)...(19): siRNA sense strand
ggaaguaugaugcugauga

SEQ ID NO: 727962 - RNA, 19 nt, Homo sapiens
  misc_RNA (1)...(19): siRNA sense strand
gcaucgugguggccaauaa

SEQ ID NO: 727963 - RNA, 19 nt, Homo sapiens
  misc_RNA (1)...(19): siRNA sense strand
gauuagcugugucuuacaa

SEQ ID NO: 727964 - RNA, 19 nt, Homo sapiens
  misc_RNA (1)...(19): siRNA sense strand
auacagagcuucgggaguu

SEQ ID NO: 727965 - RNA, 19 nt, Homo sapiens
  misc_RNA (1)...(19): siRNA sense strand
gggcaaauccaaacucaug

SEQ ID NO: 727966 - RNA, 19 nt, Homo sapiens
  misc_RNA (1)...(19): siRNA sense strand
ggaaagucaccuauaggaa

SEQ ID NO: 727967 - RNA, 19 nt, Homo sapiens
  misc_RNA (1)...(19): siRNA sense strand
ccaaacucauggagagauu

SEQ ID NO: 727968 - RNA, 19 nt, Homo sapiens
  misc_RNA (1)...(19): siRNA sense strand
agaggaaagucaccuauag

SEQ ID NO: 727969 - RNA, 19 nt, Homo sapiens
  misc_RNA (1)...(19): siRNA sense strand
gaccauccuuguggacuuu

SEQ ID NO: 727970 - RNA, 19 nt, Homo sapiens
  misc_RNA (1)...(19): siRNA sense strand
caaugaugcaauucgauua

SEQ ID NO: 727971 - RNA, 19 nt, Homo sapiens
  misc_RNA (1)...(19): siRNA sense strand
gacauaaacgugacccaaa

SEQ ID NO: 727972 - RNA, 19 nt, Homo sapiens
  misc_RNA (1)...(19): siRNA sense strand
gaaguaugaugcugaugac

SEQ ID NO: 727973 - RNA, 19 nt, Homo sapiens
  misc_RNA (1)...(19): siRNA sense strand
ggccagagaucccaugcau

SEQ ID NO: 727974 - RNA, 19 nt, Homo sapiens
  misc_RNA (1)...(19): siRNA sense strand
gaugacaacgugaagauca

SEQ ID NO: 727975 - RNA, 19 nt, Homo sapiens
  misc_RNA (1)...(19): siRNA sense strand
gcacacagccacgguagau

SEQ ID NO: 727976 - RNA, 19 nt, Homo sapiens
  misc_RNA (1)...(19): siRNA sense strand
ggacgugccagaccaggaa

SEQ ID NO: 727977 - RNA, 19 nt, Homo sapiens
  misc_RNA (1)...(19): siRNA sense strand
guaccaauguugugaagcu

SEQ ID NO: 727978 - RNA, 19 nt, Homo sapiens
  misc_RNA (1)...(19): siRNA sense strand
cagaggaaagucaccuaua

SEQ ID NO: 727979 - RNA, 19 nt, Homo sapiens
  misc_RNA (1)...(19): siRNA sense strand
ucaaugaugcaauucgauu

SEQ ID NO: 727980 - RNA, 19 nt, Homo sapiens
  misc_RNA (1)...(19): siRNA sense strand
uucaggagcucgagaacuu

SEQ ID NO: 727981 - RNA, 19 nt, Homo sapiens
  misc_RNA (1)...(19): siRNA sense strand
gaacucccaggacuucaug

SEQ ID NO: 727982 - RNA, 19 nt, Homo sapiens
  misc_RNA (1)...(19): siRNA sense strand
gauauacagaggaaaguca

SEQ ID NO: 727983 - RNA, 19 nt, Homo sapiens
  misc_RNA (1)...(19): siRNA sense strand
guaugaugcugaugacaac

SEQ ID NO: 727984 - RNA, 19 nt, Homo sapiens
  misc_RNA (1)...(19): siRNA sense strand
aaccugagcaccugguaua

SEQ ID NO: 727985 - RNA, 19 nt, Homo sapiens
  misc_RNA (1)...(19): siRNA sense strand
cguacgcccugacccugua

SEQ ID NO: 727986 - RNA, 19 nt, Homo sapiens
  misc_RNA (1)...(19): siRNA sense strand
gaaccugagcaccugguau

SEQ ID NO: 727987 - RNA, 19 nt, Homo sapiens
  misc_RNA (1)...(19): siRNA sense strand
gugggcaaauccaaacuca

SEQ ID NO: 727988 - RNA, 19 nt, Homo sapiens
  misc_RNA (1)...(19): siRNA sense strand
ucgauuagcugugucuuac

SEQ ID NO: 727989 - RNA, 19 nt, Homo sapiens
  misc_RNA (1)...(19): siRNA sense strand
ccaauguugugaagcucuu

SEQ ID NO: 727990 - RNA, 19 nt, Homo sapiens
  misc_RNA (1)...(19): siRNA sense strand
gaugguaccaauguuguga

SEQ ID NO: 727991 - RNA, 19 nt, Homo sapiens
  misc_RNA (1)...(19): siRNA sense strand
aaaccaaaccgagugaguu

SEQ ID NO: 727992 - RNA, 19 nt, Homo sapiens
  misc_RNA (1)...(19): siRNA sense strand
gcugaugguaccaauguug

SEQ ID NO: 727993 - RNA, 19 nt, Homo sapiens
  misc_RNA (1)...(19): siRNA sense strand
gaccaagggaaguaugaug

SEQ ID NO: 727994 - RNA, 19 nt, Homo sapiens
  misc_RNA (1)...(19): siRNA sense strand
ggaaccugagcaccuggua

SEQ ID NO: 727995 - RNA, 19 nt, Homo sapiens
  misc_RNA (1)...(19): siRNA sense strand
acauaaacgugacccaaaa

SEQ ID NO: 727996 - RNA, 19 nt, Homo sapiens
  misc_RNA (1)...(19): siRNA sense strand
gcagugggcaaauccaaac

SEQ ID NO: 727997 - RNA, 19 nt, Homo sapiens
  misc_RNA (1)...(19): siRNA sense strand
cuucaaugaugcaauucga

SEQ ID NO: 727998 - RNA, 19 nt, Homo sapiens
  misc_RNA (1)...(19): siRNA sense strand
caucgugguggccaauaaa

SEQ ID NO: 727999 - RNA, 19 nt, Homo sapiens
  misc_RNA (1)...(19): siRNA sense strand
gaggaaagucaccuauagg

SEQ ID NO: 728000 - RNA, 19 nt, Homo sapiens
  misc_RNA (1)...(19): siRNA sense strand
agaccauccuuguggacuu

SEQ ID NO: 728001 - RNA, 19 nt, Homo sapiens
  misc_RNA (1)...(19): siRNA sense strand
ucucauggauggcuuucag

SEQ ID NO: 728002 - RNA, 19 nt, Homo sapiens
  misc_RNA (1)...(19): siRNA sense strand
agacagcgcagugggcaaa

SEQ ID NO: 728003 - RNA, 19 nt, Homo sapiens
  misc_RNA (1)...(19): siRNA sense strand
caaacucauggagagauuu

SEQ ID NO: 728004 - RNA, 19 nt, Homo sapiens
  misc_RNA (1)...(19): siRNA sense strand
ggaguucaggccagagauc

SEQ ID NO: 728005 - RNA, 19 nt, Homo sapiens
  misc_RNA (1)...(19): siRNA sense strand
uguuugauauacagaggaa

SEQ ID NO: 728006 - RNA, 19 nt, Homo sapiens
  misc_RNA (1)...(19): siRNA sense strand
aaccaaaccgagugaguug

SEQ ID NO: 728007 - RNA, 19 nt, Homo sapiens
  misc_RNA (1)...(19): siRNA sense strand
cgucucggcugcugauggu

SEQ ID NO: 728008 - RNA, 19 nt, Homo sapiens
  misc_RNA (1)...(19): siRNA sense strand
aggaaagucaccuauagga

SEQ ID NO: 728009 - RNA, 19 nt, Homo sapiens
  misc_RNA (1)...(19): siRNA sense strand
ggagacggcucaagaguuu

SEQ ID NO: 728010 - RNA, 19 nt, Homo sapiens
  misc_RNA (1)...(19): siRNA sense strand
gcagaagguugugacuuua

SEQ ID NO: 728011 - RNA, 19 nt, Homo sapiens
  misc_RNA (1)...(19): siRNA sense strand
ugaggaaauuggaaacauu

SEQ ID NO: 728012 - RNA, 19 nt, Homo sapiens
  misc_RNA (1)...(19): siRNA sense strand
ugcagaagguugugacuuu

SEQ ID NO: 728013 - RNA, 19 nt, Homo sapiens
  misc_RNA (1)...(19): siRNA sense strand
aaagugaaguggcauuuua

SEQ ID NO: 728014 - RNA, 19 nt, Homo sapiens
  misc_RNA (1)...(19): siRNA sense strand
gaaguggcauuuuaacuau

SEQ ID NO: 728015 - RNA, 19 nt, Homo sapiens
  misc_RNA (1)...(19): siRNA sense strand
gguauccucucccucauuc

SEQ ID NO: 728016 - RNA, 19 nt, Homo sapiens
  misc_RNA (1)...(19): siRNA sense strand
gguugugacuuuaguauac

SEQ ID NO: 728017 - RNA, 19 nt, Homo sapiens
  misc_RNA (1)...(19): siRNA sense strand
uauguaaguuccucucaga

SEQ ID NO: 728018 - RNA, 19 nt, Homo sapiens
  misc_RNA (1)...(19): siRNA sense strand
gaagguugugacuuuagua

SEQ ID NO: 728019 - RNA, 19 nt, Homo sapiens
  misc_RNA (1)...(19): siRNA sense strand
uuggaaacauucuggcuuu

SEQ ID NO: 728020 - RNA, 19 nt, Homo sapiens
  misc_RNA (1)...(19): siRNA sense strand
acacaccgaugcacuugga

SEQ ID NO: 728021 - RNA, 19 nt, Homo sapiens
  misc_RNA (1)...(19): siRNA sense strand
gaggaaauuggaaacauuc

SEQ ID NO: 728022 - RNA, 19 nt, Homo sapiens
  misc_RNA (1)...(19): siRNA sense strand
gcuccuaauuuccgaaugg

SEQ ID NO: 728023 - RNA, 19 nt, Homo sapiens
  misc_RNA (1)...(19): siRNA sense strand
caaauggggugaugaaugg

SEQ ID NO: 728024 - RNA, 19 nt, Homo sapiens
  misc_RNA (1)...(19): siRNA sense strand
caugugugcugcccugaau

SEQ ID NO: 728025 - RNA, 19 nt, Homo sapiens
  misc_RNA (1)...(19): siRNA sense strand
aggaggagcucaaguugca

SEQ ID NO: 728026 - RNA, 19 nt, Homo sapiens
  misc_RNA (1)...(19): siRNA sense strand
cagcaucauucagaaagug

SEQ ID NO: 728027 - RNA, 19 nt, Homo sapiens
  misc_RNA (1)...(19): siRNA sense strand
cuuuacagguugcccauga

SEQ ID NO: 728028 - RNA, 19 nt, Homo sapiens
  misc_RNA (1)...(19): siRNA sense strand
ugacagcaucauucagaaa

SEQ ID NO: 728029 - RNA, 19 nt, Homo sapiens
  misc_RNA (1)...(19): siRNA sense strand
cagcagccauggccuucug

SEQ ID NO: 728030 - RNA, 19 nt, Homo sapiens
  misc_RNA (1)...(19): siRNA sense strand
gcaaauggggugaugaaug

SEQ ID NO: 728031 - RNA, 19 nt, Homo sapiens
  misc_RNA (1)...(19): siRNA sense strand
cuaugacacuaccugcauu

SEQ ID NO: 728032 - RNA, 19 nt, Homo sapiens
  misc_RNA (1)...(19): siRNA sense strand
gaauucacagcuuccuaug

SEQ ID NO: 728033 - RNA, 19 nt, Homo sapiens
  misc_RNA (1)...(19): siRNA sense strand
ggaaauuggaaacauucug

SEQ ID NO: 728034 - RNA, 19 nt, Homo sapiens
  misc_RNA (1)...(19): siRNA sense strand
ugaaguggcauuuuaacua

SEQ ID NO: 728035 - RNA, 19 nt, Homo sapiens
  misc_RNA (1)...(19): siRNA sense strand
gaguuugacagcaucauuc

SEQ ID NO: 728036 - RNA, 19 nt, Homo sapiens
  misc_RNA (1)...(19): siRNA sense strand
gaggagacggcucaagagu

SEQ ID NO: 728037 - RNA, 19 nt, Homo sapiens
  misc_RNA (1)...(19): siRNA sense strand
ggaggagacggcucaagag

SEQ ID NO: 728038 - RNA, 19 nt, Homo sapiens
  misc_RNA (1)...(19): siRNA sense strand
gacagcaucauucagaaag

SEQ ID NO: 728039 - RNA, 19 nt, Homo sapiens
  misc_RNA (1)...(19): siRNA sense strand
ucaggaggagcucaaguug

SEQ ID NO: 728040 - RNA, 19 nt, Homo sapiens
  misc_RNA (1)...(19): siRNA sense strand
agaagguugugacuuuagu

SEQ ID NO: 728041 - RNA, 19 nt, Homo sapiens
  misc_RNA (1)...(19): siRNA sense strand
gugcugcccugaaucucau

SEQ ID NO: 728042 - RNA, 19 nt, Homo sapiens
  misc_RNA (1)...(19): siRNA sense strand
uggaggagacggcucaaga

SEQ ID NO: 728043 - RNA, 19 nt, Homo sapiens
  misc_RNA (1)...(19): siRNA sense strand
gaaagugaaguggcauuuu

SEQ ID NO: 728044 - RNA, 19 nt, Homo sapiens
  misc_RNA (1)...(19): siRNA sense strand
uaucugcuccugccagugu

SEQ ID NO: 728045 - RNA, 19 nt, Homo sapiens
  misc_RNA (1)...(19): siRNA sense strand
agaaagugaaguggcauuu

SEQ ID NO: 728046 - RNA, 19 nt, Homo sapiens
  misc_RNA (1)...(19): siRNA sense strand
gagacccuguggugggaau

SEQ ID NO: 728047 - RNA, 19 nt, Homo sapiens
  misc_RNA (1)...(19): siRNA sense strand
ucgaggaguucaccuugca

SEQ ID NO: 728048 - RNA, 19 nt, Homo sapiens
  misc_RNA (1)...(19): siRNA sense strand
gguugcccaugaggaaauu

SEQ ID NO: 728049 - RNA, 19 nt, Homo sapiens
  misc_RNA (1)...(19): siRNA sense strand
uguaaguuccucucagaug

SEQ ID NO: 728050 - RNA, 19 nt, Homo sapiens
  misc_RNA (1)...(19): siRNA sense strand
acagguugcccaugaggaa

SEQ ID NO: 728051 - RNA, 19 nt, Homo sapiens
  misc_RNA (1)...(19): siRNA sense strand
gauggagugcagcuuggaa

SEQ ID NO: 728052 - RNA, 19 nt, Homo sapiens
  misc_RNA (1)...(19): siRNA sense strand
auucacagcuuccuaugac

SEQ ID NO: 728053 - RNA, 19 nt, Homo sapiens
  misc_RNA (1)...(19): siRNA sense strand
ucacacaccgaugcacuug

SEQ ID NO: 728054 - RNA, 19 nt, Homo sapiens
  misc_RNA (1)...(19): siRNA sense strand
guugugacuuuaguauaca

SEQ ID NO: 728055 - RNA, 19 nt, Homo sapiens
  misc_RNA (1)...(19): siRNA sense strand
ugaguuugacagcaucauu

SEQ ID NO: 728056 - RNA, 19 nt, Homo sapiens
  misc_RNA (1)...(19): siRNA sense strand
ccuccaggccauacgcuuu

SEQ ID NO: 728057 - RNA, 19 nt, Homo sapiens
  misc_RNA (1)...(19): siRNA sense strand
ggagacggcucaagaguuu

SEQ ID NO: 728058 - RNA, 19 nt, Homo sapiens
  misc_RNA (1)...(19): siRNA sense strand
gcagaagguugugacuuua

SEQ ID NO: 728059 - RNA, 19 nt, Homo sapiens
  misc_RNA (1)...(19): siRNA sense strand
ugaggaaauuggaaacauu

SEQ ID NO: 728060 - RNA, 19 nt, Homo sapiens
  misc_RNA (1)...(19): siRNA sense strand
ugcagaagguugugacuuu

SEQ ID NO: 728061 - RNA, 19 nt, Homo sapiens
  misc_RNA (1)...(19): siRNA sense strand
aaagugaaguggcauuuua

SEQ ID NO: 728062 - RNA, 19 nt, Homo sapiens
  misc_RNA (1)...(19): siRNA sense strand
gaaguggcauuuuaacuau

SEQ ID NO: 728063 - RNA, 19 nt, Homo sapiens
  misc_RNA (1)...(19): siRNA sense strand
gguauccucucccucauuc

SEQ ID NO: 728064 - RNA, 19 nt, Homo sapiens
  misc_RNA (1)...(19): siRNA sense strand
gguugugacuuuaguauac

SEQ ID NO: 728065 - RNA, 19 nt, Homo sapiens
  misc_RNA (1)...(19): siRNA sense strand
uauguaaguuccucucaga

SEQ ID NO: 728066 - RNA, 19 nt, Homo sapiens
  misc_RNA (1)...(19): siRNA sense strand
gaagguugugacuuuagua

SEQ ID NO: 728067 - RNA, 19 nt, Homo sapiens
  misc_RNA (1)...(19): siRNA sense strand
uuggaaacauucuggcuuu

SEQ ID NO: 728068 - RNA, 19 nt, Homo sapiens
  misc_RNA (1)...(19): siRNA sense strand
acacaccgaugcacuugga

SEQ ID NO: 728069 - RNA, 19 nt, Homo sapiens
  misc_RNA (1)...(19): siRNA sense strand
gaggaaauuggaaacauuc

SEQ ID NO: 728070 - RNA, 19 nt, Homo sapiens
  misc_RNA (1)...(19): siRNA sense strand
gcuccuaauuuccgaaugg

SEQ ID NO: 728071 - RNA, 19 nt, Homo sapiens
  misc_RNA (1)...(19): siRNA sense strand
caaauggggugaugaaugg

SEQ ID NO: 728072 - RNA, 19 nt, Homo sapiens
  misc_RNA (1)...(19): siRNA sense strand
caugugugcugcccugaau

SEQ ID NO: 728073 - RNA, 19 nt, Homo sapiens
  misc_RNA (1)...(19): siRNA sense strand
aggaggagcucaaguugca

SEQ ID NO: 728074 - RNA, 19 nt, Homo sapiens
  misc_RNA (1)...(19): siRNA sense strand
cagcaucauucagaaagug

SEQ ID NO: 728075 - RNA, 19 nt, Homo sapiens
  misc_RNA (1)...(19): siRNA sense strand
cuuuacagguugcccauga

SEQ ID NO: 728076 - RNA, 19 nt, Homo sapiens
  misc_RNA (1)...(19): siRNA sense strand
ugacagcaucauucagaaa

SEQ ID NO: 728077 - RNA, 19 nt, Homo sapiens
  misc_RNA (1)...(19): siRNA sense strand
cagcagccauggccuucug

SEQ ID NO: 728078 - RNA, 19 nt, Homo sapiens
  misc_RNA (1)...(19): siRNA sense strand
gcaaauggggugaugaaug

SEQ ID NO: 728079 - RNA, 19 nt, Homo sapiens
  misc_RNA (1)...(19): siRNA sense strand
cuaugacacuaccugcauu

SEQ ID NO: 728080 - RNA, 19 nt, Homo sapiens
  misc_RNA (1)...(19): siRNA sense strand
gaauucacagcuuccuaug

SEQ ID NO: 728081 - RNA, 19 nt, Homo sapiens
  misc_RNA (1)...(19): siRNA sense strand
ggaaauuggaaacauucug

SEQ ID NO: 728082 - RNA, 19 nt, Homo sapiens
  misc_RNA (1)...(19): siRNA sense strand
ugaaguggcauuuuaacua

SEQ ID NO: 728083 - RNA, 19 nt, Homo sapiens
  misc_RNA (1)...(19): siRNA sense strand
gaguuugacagcaucauuc

SEQ ID NO: 728084 - RNA, 19 nt, Homo sapiens
  misc_RNA (1)...(19): siRNA sense strand
gaggagacggcucaagagu

SEQ ID NO: 728085 - RNA, 19 nt, Homo sapiens
  misc_RNA (1)...(19): siRNA sense strand
ggaggagacggcucaagag

SEQ ID NO: 728086 - RNA, 19 nt, Homo sapiens
  misc_RNA (1)...(19): siRNA sense strand
gacagcaucauucagaaag

SEQ ID NO: 728087 - RNA, 19 nt, Homo sapiens
  misc_RNA (1)...(19): siRNA sense strand
ucaggaggagcucaaguug

SEQ ID NO: 728088 - RNA, 19 nt, Homo sapiens
  misc_RNA (1)...(19): siRNA sense strand
agaagguugugacuuuagu

SEQ ID NO: 728089 - RNA, 19 nt, Homo sapiens
  misc_RNA (1)...(19): siRNA sense strand
gugcugcccugaaucucau

SEQ ID NO: 728090 - RNA, 19 nt, Homo sapiens
  misc_RNA (1)...(19): siRNA sense strand
uggaggagacggcucaaga

SEQ ID NO: 728091 - RNA, 19 nt, Homo sapiens
  misc_RNA (1)...(19): siRNA sense strand
gaaagugaaguggcauuuu

SEQ ID NO: 728092 - RNA, 19 nt, Homo sapiens
  misc_RNA (1)...(19): siRNA sense strand
uaucugcuccugccagugu

SEQ ID NO: 728093 - RNA, 19 nt, Homo sapiens
  misc_RNA (1)...(19): siRNA sense strand
agaaagugaaguggcauuu

SEQ ID NO: 728094 - RNA, 19 nt, Homo sapiens
  misc_RNA (1)...(19): siRNA sense strand
gagacccuguggugggaau

SEQ ID NO: 728095 - RNA, 19 nt, Homo sapiens
  misc_RNA (1)...(19): siRNA sense strand
ucgaggaguucaccuugca

SEQ ID NO: 728096 - RNA, 19 nt, Homo sapiens
  misc_RNA (1)...(19): siRNA sense strand
gguugcccaugaggaaauu

SEQ ID NO: 728097 - RNA, 19 nt, Homo sapiens
  misc_RNA (1)...(19): siRNA sense strand
uguaaguuccucucagaug

SEQ ID NO: 728098 - RNA, 19 nt, Homo sapiens
  misc_RNA (1)...(19): siRNA sense strand
acagguugcccaugaggaa

SEQ ID NO: 728099 - RNA, 19 nt, Homo sapiens
  misc_RNA (1)...(19): siRNA sense strand
gauggagugcagcuuggaa

SEQ ID NO: 728100 - RNA, 19 nt, Homo sapiens
  misc_RNA (1)...(19): siRNA sense strand
auucacagcuuccuaugac

SEQ ID NO: 728101 - RNA, 19 nt, Homo sapiens
  misc_RNA (1)...(19): siRNA sense strand
ucacacaccgaugcacuug

SEQ ID NO: 728102 - RNA, 19 nt, Homo sapiens
  misc_RNA (1)...(19): siRNA sense strand
guugugacuuuaguauaca

SEQ ID NO: 728103 - RNA, 19 nt, Homo sapiens
  misc_RNA (1)...(19): siRNA sense strand
ugaguuugacagcaucauu

SEQ ID NO: 728104 - RNA, 19 nt, Homo sapiens
  misc_RNA (1)...(19): siRNA sense strand
ccuccaggccauacgcuuu

SEQ ID NO: 728105 - RNA, 19 nt, Homo sapiens
  misc_RNA (1)...(19): siRNA sense strand
gaacuaauggcaacacaua

SEQ ID NO: 728106 - RNA, 19 nt, Homo sapiens
  misc_RNA (1)...(19): siRNA sense strand
gcaaaguucucaucaaggu

SEQ ID NO: 728107 - RNA, 19 nt, Homo sapiens
  misc_RNA (1)...(19): siRNA sense strand
acaaagauguggacaagga

SEQ ID NO: 728108 - RNA, 19 nt, Homo sapiens
  misc_RNA (1)...(19): siRNA sense strand
gagcaguggcccaaauaua

SEQ ID NO: 728109 - RNA, 19 nt, Homo sapiens
  misc_RNA (1)...(19): siRNA sense strand
agaggucacugaacuauga

SEQ ID NO: 728110 - RNA, 19 nt, Homo sapiens
  misc_RNA (1)...(19): siRNA sense strand
aagaagagcugucaagucu

SEQ ID NO: 728111 - RNA, 19 nt, Homo sapiens
  misc_RNA (1)...(19): siRNA sense strand
agaaacagcucagcauuca

SEQ ID NO: 728112 - RNA, 19 nt, Homo sapiens
  misc_RNA (1)...(19): siRNA sense strand
caaacaugcagaacucaua

SEQ ID NO: 728113 - RNA, 19 nt, Homo sapiens
  misc_RNA (1)...(19): siRNA sense strand
caacuaccgugacaaugug

SEQ ID NO: 728114 - RNA, 19 nt, Homo sapiens
  misc_RNA (1)...(19): siRNA sense strand
ccagguggcuacuuauuuc

SEQ ID NO: 728115 - RNA, 19 nt, Homo sapiens
  misc_RNA (1)...(19): siRNA sense strand
gauccuggcuuuguucaug

SEQ ID NO: 728116 - RNA, 19 nt, Homo sapiens
  misc_RNA (1)...(19): siRNA sense strand
cgacaaugcaccuguguuu

SEQ ID NO: 728117 - RNA, 19 nt, Homo sapiens
  misc_RNA (1)...(19): siRNA sense strand
acagggaaauccauucauu

SEQ ID NO: 728118 - RNA, 19 nt, Homo sapiens
  misc_RNA (1)...(19): siRNA sense strand
gaaaugaagcccaccucuu

SEQ ID NO: 728119 - RNA, 19 nt, Homo sapiens
  misc_RNA (1)...(19): siRNA sense strand
gaccaaacaugcagaacuc

SEQ ID NO: 728120 - RNA, 19 nt, Homo sapiens
  misc_RNA (1)...(19): siRNA sense strand
ccaaaccaccgaggaaaua

SEQ ID NO: 728121 - RNA, 19 nt, Homo sapiens
  misc_RNA (1)...(19): siRNA sense strand
gagagcaguggcccaaaua

SEQ ID NO: 728122 - RNA, 19 nt, Homo sapiens
  misc_RNA (1)...(19): siRNA sense strand
gccgagaggugcugcaaga

SEQ ID NO: 728123 - RNA, 19 nt, Homo sapiens
  misc_RNA (1)...(19): siRNA sense strand
gacaauagcccugcguuug

SEQ ID NO: 728124 - RNA, 19 nt, Homo sapiens
  misc_RNA (1)...(19): siRNA sense strand
gguggcuacuuauuucuuu

SEQ ID NO: 728125 - RNA, 19 nt, Homo sapiens
  misc_RNA (1)...(19): siRNA sense strand
gaagaagagcugucaaguc

SEQ ID NO: 728126 - RNA, 19 nt, Homo sapiens
  misc_RNA (1)...(19): siRNA sense strand
ucacugaacuaugaagaga

SEQ ID NO: 728127 - RNA, 19 nt, Homo sapiens
  misc_RNA (1)...(19): siRNA sense strand
cccaguugcucacuuagua

SEQ ID NO: 728128 - RNA, 19 nt, Homo sapiens
  misc_RNA (1)...(19): siRNA sense strand
guggaguucuuccucagua

SEQ ID NO: 728129 - RNA, 19 nt, Homo sapiens
  misc_RNA (1)...(19): siRNA sense strand
gaagaugcugcaccuggua

SEQ ID NO: 728130 - RNA, 19 nt, Homo sapiens
  misc_RNA (1)...(19): siRNA sense strand
gccaagagcugggccacuu

SEQ ID NO: 728131 - RNA, 19 nt, Homo sapiens
  misc_RNA (1)...(19): siRNA sense strand
cuggacaccuucaguauug

SEQ ID NO: 728132 - RNA, 19 nt, Homo sapiens
  misc_RNA (1)...(19): siRNA sense strand
gaggaagugccaucuggua

SEQ ID NO: 728133 - RNA, 19 nt, Homo sapiens
  misc_RNA (1)...(19): siRNA sense strand
caagaaacagcucagcauu

SEQ ID NO: 728134 - RNA, 19 nt, Homo sapiens
  misc_RNA (1)...(19): siRNA sense strand
ggaccucucugugaagcaa

SEQ ID NO: 728135 - RNA, 19 nt, Homo sapiens
  misc_RNA (1)...(19): siRNA sense strand
ggacagggaaauccauuca

SEQ ID NO: 728136 - RNA, 19 nt, Homo sapiens
  misc_RNA (1)...(19): siRNA sense strand
gacccucaguuuagacuug

SEQ ID NO: 728137 - RNA, 19 nt, Homo sapiens
  misc_RNA (1)...(19): siRNA sense strand
ucagugacaucaacgacaa

SEQ ID NO: 728138 - RNA, 19 nt, Homo sapiens
  misc_RNA (1)...(19): siRNA sense strand
cugguacgcuucucauaaa

SEQ ID NO: 728139 - RNA, 19 nt, Homo sapiens
  misc_RNA (1)...(19): siRNA sense strand
cuaacacccugcacaccua

SEQ ID NO: 728140 - RNA, 19 nt, Homo sapiens
  misc_RNA (1)...(19): siRNA sense strand
agacacagauggcccaagu

SEQ ID NO: 728141 - RNA, 19 nt, Homo sapiens
  misc_RNA (1)...(19): siRNA sense strand
ugaaauaccaagugucaga

SEQ ID NO: 728142 - RNA, 19 nt, Homo sapiens
  misc_RNA (1)...(19): siRNA sense strand
gcgucgaccucuagacuau

SEQ ID NO: 728143 - RNA, 19 nt, Homo sapiens
  misc_RNA (1)...(19): siRNA sense strand
ggugaaauaccaaguguca

SEQ ID NO: 728144 - RNA, 19 nt, Homo sapiens
  misc_RNA (1)...(19): siRNA sense strand
aaacagcucagcauucaga

SEQ ID NO: 728145 - RNA, 19 nt, Homo sapiens
  misc_RNA (1)...(19): siRNA sense strand
aaauauacccucacucugu

SEQ ID NO: 728146 - RNA, 19 nt, Homo sapiens
  misc_RNA (1)...(19): siRNA sense strand
ccaaauauacccucacucu

SEQ ID NO: 728147 - RNA, 19 nt, Homo sapiens
  misc_RNA (1)...(19): siRNA sense strand
acaaugcaccuguguuuga

SEQ ID NO: 728148 - RNA, 19 nt, Homo sapiens
  misc_RNA (1)...(19): siRNA sense strand
gcagaugacuuggauucag

SEQ ID NO: 728149 - RNA, 19 nt, Homo sapiens
  misc_RNA (1)...(19): siRNA sense strand
caagacaggccaggucauu

SEQ ID NO: 728150 - RNA, 19 nt, Homo sapiens
  misc_RNA (1)...(19): siRNA sense strand
ccaacuaccgugacaaugu

SEQ ID NO: 728151 - RNA, 19 nt, Homo sapiens
  misc_RNA (1)...(19): siRNA sense strand
caaccauuguggcaagaga

SEQ ID NO: 728152 - RNA, 19 nt, Homo sapiens
  misc_RNA (1)...(19): siRNA sense strand
gcccuuaucagccaagaaa

SEQ ID NO: 728153 - RNA, 19 nt, Homo sapiens
  misc_RNA (1)...(19): siRNA sense strand
aauauacccucacucuguu

SEQ ID NO: 728154 - RNA, 19 nt, Homo sapiens
  misc_RNA (1)...(19): siRNA sense strand
ugggaucccugccugguuu

SEQ ID NO: 728155 - RNA, 19 nt, Homo sapiens
  misc_RNA (1)...(19): siRNA sense strand
gguguuaacugccuaugac

SEQ ID NO: 728156 - RNA, 19 nt, Homo sapiens
  misc_RNA (1)...(19): siRNA sense strand
ccaccagccuccucugcaa

SEQ ID NO: 728157 - RNA, 19 nt, Homo sapiens
  misc_RNA (1)...(19): siRNA sense strand
ggagcuggagauaguagua

SEQ ID NO: 728158 - RNA, 19 nt, Homo sapiens
  misc_RNA (1)...(19): siRNA sense strand
gggcagcuguucgucaaug

SEQ ID NO: 728159 - RNA, 19 nt, Homo sapiens
  misc_RNA (1)...(19): siRNA sense strand
ggacaaggaggcgaugaug

SEQ ID NO: 728160 - RNA, 19 nt, Homo sapiens
  misc_RNA (1)...(19): siRNA sense strand
ggaggcagcaggagugcaa

SEQ ID NO: 728161 - RNA, 19 nt, Homo sapiens
  misc_RNA (1)...(19): siRNA sense strand
ucaagguucuggaugucaa

SEQ ID NO: 728162 - RNA, 19 nt, Homo sapiens
  misc_RNA (1)...(19): siRNA sense strand
ggacuccaaugacaauagc

SEQ ID NO: 728163 - RNA, 19 nt, Homo sapiens
  misc_RNA (1)...(19): siRNA sense strand
caaaccaccgaggaaauaa

SEQ ID NO: 728164 - RNA, 19 nt, Homo sapiens
  misc_RNA (1)...(19): siRNA sense strand
cagcucagcauucagauca

SEQ ID NO: 728165 - RNA, 19 nt, Homo sapiens
  misc_RNA (1)...(19): siRNA sense strand
gaagugccaucugguacag

SEQ ID NO: 728166 - RNA, 19 nt, Homo sapiens
  misc_RNA (1)...(19): siRNA sense strand
cauggcagaugacuuggau

SEQ ID NO: 728167 - RNA, 19 nt, Homo sapiens
  misc_RNA (1)...(19): siRNA sense strand
gucgaccucuagacuauga

SEQ ID NO: 728168 - RNA, 19 nt, Homo sapiens
  misc_RNA (1)...(19): siRNA sense strand
ggaagugccaucugguaca

SEQ ID NO: 728169 - RNA, 19 nt, Homo sapiens
  misc_RNA (1)...(19): siRNA sense strand
agagagcaguggcccaaau

SEQ ID NO: 728170 - RNA, 19 nt, Homo sapiens
  misc_RNA (1)...(19): siRNA sense strand
ccuacgagguggauguuca

SEQ ID NO: 728171 - RNA, 19 nt, Homo sapiens
  misc_RNA (1)...(19): siRNA sense strand
gcuggacaccuucaguauu

SEQ ID NO: 728172 - RNA, 19 nt, Homo sapiens
  misc_RNA (1)...(19): siRNA sense strand
ccugguacgcuucucauaa

SEQ ID NO: 728173 - RNA, 19 nt, Homo sapiens
  misc_RNA (1)...(19): siRNA sense strand
acagauggcccaagugcaa

SEQ ID NO: 728174 - RNA, 19 nt, Homo sapiens
  misc_RNA (1)...(19): siRNA sense strand
guucgucaaugucaccaau

SEQ ID NO: 728175 - RNA, 19 nt, Homo sapiens
  misc_RNA (1)...(19): siRNA sense strand
ggagaggucacugcucaga

SEQ ID NO: 728176 - RNA, 19 nt, Homo sapiens
  misc_RNA (1)...(19): siRNA sense strand
caacuuacccucucuucac

SEQ ID NO: 728177 - RNA, 19 nt, Homo sapiens
  misc_RNA (1)...(19): siRNA sense strand
ucagaucagugacaucaac

SEQ ID NO: 728178 - RNA, 19 nt, Homo sapiens
  misc_RNA (1)...(19): siRNA sense strand
uugcaaaguucucaucaag

SEQ ID NO: 728179 - RNA, 19 nt, Homo sapiens
  misc_RNA (1)...(19): siRNA sense strand
ccgaggaaauaaguacuug

SEQ ID NO: 728180 - RNA, 19 nt, Homo sapiens
  misc_RNA (1)...(19): siRNA sense strand
aaaccaaaccaccgaggaa

SEQ ID NO: 728181 - RNA, 19 nt, Homo sapiens
  misc_RNA (1)...(19): siRNA sense strand
ggagcucacuguggauucu

SEQ ID NO: 728182 - RNA, 19 nt, Homo sapiens
  misc_RNA (1)...(19): siRNA sense strand
acaaggaggcgaugaugga

SEQ ID NO: 728183 - RNA, 19 nt, Homo sapiens
  misc_RNA (1)...(19): siRNA sense strand
gagaaaagcagguaugaag

SEQ ID NO: 728184 - RNA, 19 nt, Homo sapiens
  misc_RNA (1)...(19): siRNA sense strand
gcauucagaucagugacau

SEQ ID NO: 728185 - RNA, 19 nt, Homo sapiens
  misc_RNA (1)...(19): siRNA sense strand
ugacaauagcccugcguuu

SEQ ID NO: 728186 - RNA, 19 nt, Homo sapiens
  misc_RNA (1)...(19): siRNA sense strand
caaaguguccccugagaaa

SEQ ID NO: 728187 - RNA, 19 nt, Homo sapiens
  misc_RNA (1)...(19): siRNA sense strand
gguugauccuggcuuuguu

SEQ ID NO: 728188 - RNA, 19 nt, Homo sapiens
  misc_RNA (1)...(19): siRNA sense strand
agugggagcuggagauagu

SEQ ID NO: 728189 - RNA, 19 nt, Homo sapiens
  misc_RNA (1)...(19): siRNA sense strand
gugcuggacaccuucagua

SEQ ID NO: 728190 - RNA, 19 nt, Homo sapiens
  misc_RNA (1)...(19): siRNA sense strand
agccaucacuggugucaga

SEQ ID NO: 728191 - RNA, 19 nt, Homo sapiens
  misc_RNA (1)...(19): siRNA sense strand
ccaagaaacagcucagcau

SEQ ID NO: 728192 - RNA, 19 nt, Homo sapiens
  misc_RNA (1)...(19): siRNA sense strand
gcccaaauauacccucacu

SEQ ID NO: 728193 - RNA, 19 nt, Homo sapiens
  misc_RNA (1)...(19): siRNA sense strand
guuaacugccuaugacaau

SEQ ID NO: 728194 - RNA, 19 nt, Homo sapiens
  misc_RNA (1)...(19): siRNA sense strand
acugaacuaugaagagaug

SEQ ID NO: 728195 - RNA, 19 nt, Homo sapiens
  misc_RNA (1)...(19): siRNA sense strand
uaucccagcccauugcaaa

SEQ ID NO: 728196 - RNA, 19 nt, Homo sapiens
  misc_RNA (1)...(19): siRNA sense strand
cugcacaccuacacucugu

SEQ ID NO: 728197 - RNA, 19 nt, Homo sapiens
  misc_RNA (1)...(19): siRNA sense strand
ccagaaacacauucagaag

SEQ ID NO: 728198 - RNA, 19 nt, Homo sapiens
  misc_RNA (1)...(19): siRNA sense strand
guacagugaucgggaagcu

SEQ ID NO: 728199 - RNA, 19 nt, Homo sapiens
  misc_RNA (1)...(19): siRNA sense strand
ugagcucacugcuggagau

SEQ ID NO: 728200 - RNA, 19 nt, Homo sapiens
  misc_RNA (1)...(19): siRNA sense strand
gcuagaagaagagcuguca

SEQ ID NO: 728201 - RNA, 19 nt, Homo sapiens
  misc_RNA (1)...(19): siRNA sense strand
ggacaacagggccuacaac

SEQ ID NO: 728202 - RNA, 19 nt, Homo sapiens
  misc_RNA (1)...(19): siRNA sense strand
uaguagcuauugacuccaa

SEQ ID NO: 728203 - RNA, 19 nt, Homo sapiens
  misc_RNA (1)...(19): siRNA sense strand
gacuugggcauuaauggaa

SEQ ID NO: 728204 - RNA, 19 nt, Homo sapiens
  misc_RNA (1)...(19): siRNA sense strand
cagccacgguuucccaaag

SEQ ID NO: 728205 - RNA, 19 nt, Homo sapiens
  misc_RNA (1)...(19): siRNA sense strand
ggacaaaguuuaccaaaug

SEQ ID NO: 728206 - RNA, 19 nt, Homo sapiens
  misc_RNA (1)...(19): siRNA sense strand
caacgacuaugaagaauuc

SEQ ID NO: 728207 - RNA, 19 nt, Homo sapiens
  misc_RNA (1)...(19): siRNA sense strand
gaucagaauugaggucuuu

SEQ ID NO: 728208 - RNA, 19 nt, Homo sapiens
  misc_RNA (1)...(19): siRNA sense strand
gaagugagcagaucagaau

SEQ ID NO: 728209 - RNA, 19 nt, Homo sapiens
  misc_RNA (1)...(19): siRNA sense strand
gaggaaaucuccaaaugca

SEQ ID NO: 728210 - RNA, 19 nt, Homo sapiens
  misc_RNA (1)...(19): siRNA sense strand
ggaaaucuccaaaugcaaa

SEQ ID NO: 728211 - RNA, 19 nt, Homo sapiens
  misc_RNA (1)...(19): siRNA sense strand
caaacuggaugaugacaug

SEQ ID NO: 728212 - RNA, 19 nt, Homo sapiens
  misc_RNA (1)...(19): siRNA sense strand
agacuggauuugcugauua

SEQ ID NO: 728213 - RNA, 19 nt, Homo sapiens
  misc_RNA (1)...(19): siRNA sense strand
gacaugaaccugcuggaua

SEQ ID NO: 728214 - RNA, 19 nt, Homo sapiens
  misc_RNA (1)...(19): siRNA sense strand
gaagauaaucaacgacuau

SEQ ID NO: 728215 - RNA, 19 nt, Homo sapiens
  misc_RNA (1)...(19): siRNA sense strand
gacaaaguuuaccaaauga

SEQ ID NO: 728216 - RNA, 19 nt, Homo sapiens
  misc_RNA (1)...(19): siRNA sense strand
cagcagaaaucuuuaugau

SEQ ID NO: 728217 - RNA, 19 nt, Homo sapiens
  misc_RNA (1)...(19): siRNA sense strand
gaaaggaggagauggaaag

SEQ ID NO: 728218 - RNA, 19 nt, Homo sapiens
  misc_RNA (1)...(19): siRNA sense strand
gauaaucaacgacuaugaa

SEQ ID NO: 728219 - RNA, 19 nt, Homo sapiens
  misc_RNA (1)...(19): siRNA sense strand
gaucuggccucccucaagu

SEQ ID NO: 728220 - RNA, 19 nt, Homo sapiens
  misc_RNA (1)...(19): siRNA sense strand
gaauugaggucuuuuaagu

SEQ ID NO: 728221 - RNA, 19 nt, Homo sapiens
  misc_RNA (1)...(19): siRNA sense strand
aagaggaaaucuccaaaug

SEQ ID NO: 728222 - RNA, 19 nt, Homo sapiens
  misc_RNA (1)...(19): siRNA sense strand
gcaagaacccaucaaggau

SEQ ID NO: 728223 - RNA, 19 nt, Homo sapiens
  misc_RNA (1)...(19): siRNA sense strand
ggaaagggaacuucagaca

SEQ ID NO: 728224 - RNA, 19 nt, Homo sapiens
  misc_RNA (1)...(19): siRNA sense strand
gcccaaacuucacagcauu

SEQ ID NO: 728225 - RNA, 19 nt, Homo sapiens
  misc_RNA (1)...(19): siRNA sense strand
acaugaaccugcuggauau

SEQ ID NO: 728226 - RNA, 19 nt, Homo sapiens
  misc_RNA (1)...(19): siRNA sense strand
gucaugcucuaucagauuu

SEQ ID NO: 728227 - RNA, 19 nt, Homo sapiens
  misc_RNA (1)...(19): siRNA sense strand
ucauagagauggagaagag

SEQ ID NO: 728228 - RNA, 19 nt, Homo sapiens
  misc_RNA (1)...(19): siRNA sense strand
ucuaucagauuucagaaga

SEQ ID NO: 728229 - RNA, 19 nt, Homo sapiens
  misc_RNA (1)...(19): siRNA sense strand
ugaagauaaucaacgacua

SEQ ID NO: 728230 - RNA, 19 nt, Homo sapiens
  misc_RNA (1)...(19): siRNA sense strand
acaagagccugcugaagau

SEQ ID NO: 728231 - RNA, 19 nt, Homo sapiens
  misc_RNA (1)...(19): siRNA sense strand
aaugcaaacuggaugauga

SEQ ID NO: 728232 - RNA, 19 nt, Homo sapiens
  misc_RNA (1)...(19): siRNA sense strand
uggauuugcugauuaccua

SEQ ID NO: 728233 - RNA, 19 nt, Homo sapiens
  misc_RNA (1)...(19): siRNA sense strand
gugagcagaucagaauuga

SEQ ID NO: 728234 - RNA, 19 nt, Homo sapiens
  misc_RNA (1)...(19): siRNA sense strand
gaauggaacacacuuggau

SEQ ID NO: 728235 - RNA, 19 nt, Homo sapiens
  misc_RNA (1)...(19): siRNA sense strand
gggagaaagugcccaaacu

SEQ ID NO: 728236 - RNA, 19 nt, Homo sapiens
  misc_RNA (1)...(19): siRNA sense strand
aaucaacgacuaugaagaa

SEQ ID NO: 728237 - RNA, 19 nt, Homo sapiens
  misc_RNA (1)...(19): siRNA sense strand
ccaggcagggcucaaauuu

SEQ ID NO: 728238 - RNA, 19 nt, Homo sapiens
  misc_RNA (1)...(19): siRNA sense strand
gcaagaggaaaucuccaaa

SEQ ID NO: 728239 - RNA, 19 nt, Homo sapiens
  misc_RNA (1)...(19): siRNA sense strand
gaaaguuggacauccugaa

SEQ ID NO: 728240 - RNA, 19 nt, Homo sapiens
  misc_RNA (1)...(19): siRNA sense strand
gaucaucaacaaucacaau

SEQ ID NO: 728241 - RNA, 19 nt, Homo sapiens
  misc_RNA (1)...(19): siRNA sense strand
gacuucagcagaaaucuuu

SEQ ID NO: 728242 - RNA, 19 nt, Homo sapiens
  misc_RNA (1)...(19): siRNA sense strand
cagaagaagugagcagauc

SEQ ID NO: 728243 - RNA, 19 nt, Homo sapiens
  misc_RNA (1)...(19): siRNA sense strand
aacaagagccugcugaaga

SEQ ID NO: 728244 - RNA, 19 nt, Homo sapiens
  misc_RNA (1)...(19): siRNA sense strand
cugauuaccuaccuaaaca

SEQ ID NO: 728245 - RNA, 19 nt, Homo sapiens
  misc_RNA (1)...(19): siRNA sense strand
ggucaugcucuaucagauu

SEQ ID NO: 728246 - RNA, 19 nt, Homo sapiens
  misc_RNA (1)...(19): siRNA sense strand
gaagcaagaacccaucaag

SEQ ID NO: 728247 - RNA, 19 nt, Homo sapiens
  misc_RNA (1)...(19): siRNA sense strand
uuaccuaccuaaacacuag

SEQ ID NO: 728248 - RNA, 19 nt, Homo sapiens
  misc_RNA (1)...(19): siRNA sense strand
aggcagggcucaaauuucu

SEQ ID NO: 728249 - RNA, 19 nt, Homo sapiens
  misc_RNA (1)...(19): siRNA sense strand
cgaauuaauagacuggauu

SEQ ID NO: 728250 - RNA, 19 nt, Homo sapiens
  misc_RNA (1)...(19): siRNA sense strand
caagaggaaaucuccaaau

SEQ ID NO: 728251 - RNA, 19 nt, Homo sapiens
  misc_RNA (1)...(19): siRNA sense strand
ccaaaugcaaacuggauga

SEQ ID NO: 728252 - RNA, 19 nt, Homo sapiens
  misc_RNA (1)...(19): siRNA sense strand
ggacuucagcagaaaucuu

SEQ ID NO: 728253 - RNA, 19 nt, Homo sapiens
  misc_RNA (1)...(19): siRNA sense strand
aagagaauguuggaggaaa

SEQ ID NO: 728254 - RNA, 19 nt, Homo sapiens
  misc_RNA (1)...(19): siRNA sense strand
ggaauggaacacacuugga

SEQ ID NO: 728255 - RNA, 19 nt, Homo sapiens
  misc_RNA (1)...(19): siRNA sense strand
uggacaaaguuuaccaaau

SEQ ID NO: 728256 - RNA, 19 nt, Homo sapiens
  misc_RNA (1)...(19): siRNA sense strand
aaaguuggacauccugaaa

SEQ ID NO: 728257 - RNA, 19 nt, Homo sapiens
  misc_RNA (1)...(19): siRNA sense strand
gcucaaauuucugccuaca

SEQ ID NO: 728258 - RNA, 19 nt, Homo sapiens
  misc_RNA (1)...(19): siRNA sense strand
uagacuggauuugcugauu

SEQ ID NO: 728259 - RNA, 19 nt, Homo sapiens
  misc_RNA (1)...(19): siRNA sense strand
ggacuacauuccgcaaagg

SEQ ID NO: 728260 - RNA, 19 nt, Homo sapiens
  misc_RNA (1)...(19): siRNA sense strand
uaucagauuucagaagaag

SEQ ID NO: 728261 - RNA, 19 nt, Homo sapiens
  misc_RNA (1)...(19): siRNA sense strand
uuaauagacuggauuugcu

SEQ ID NO: 728262 - RNA, 19 nt, Homo sapiens
  misc_RNA (1)...(19): siRNA sense strand
gggauacugucugaucauc

SEQ ID NO: 728263 - RNA, 19 nt, Homo sapiens
  misc_RNA (1)...(19): siRNA sense strand
aagagucugugcccaaauc

SEQ ID NO: 728264 - RNA, 19 nt, Homo sapiens
  misc_RNA (1)...(19): siRNA sense strand
caagagccugcugaagaua

SEQ ID NO: 728265 - RNA, 19 nt, Homo sapiens
  misc_RNA (1)...(19): siRNA sense strand
cuagaaaggaggagaugga

SEQ ID NO: 728266 - RNA, 19 nt, Homo sapiens
  misc_RNA (1)...(19): siRNA sense strand
ggagauggaaagggaacuu

SEQ ID NO: 728267 - RNA, 19 nt, Homo sapiens
  misc_RNA (1)...(19): siRNA sense strand
aggaugccuugauguuauu

SEQ ID NO: 728268 - RNA, 19 nt, Homo sapiens
  misc_RNA (1)...(19): siRNA sense strand
ucaacgacuaugaagaauu

SEQ ID NO: 728269 - RNA, 19 nt, Homo sapiens
  misc_RNA (1)...(19): siRNA sense strand
gaauguuggaggaaagcaa

SEQ ID NO: 728270 - RNA, 19 nt, Homo sapiens
  misc_RNA (1)...(19): siRNA sense strand
gagaaggaaaguuggacau

SEQ ID NO: 728271 - RNA, 19 nt, Homo sapiens
  misc_RNA (1)...(19): siRNA sense strand
gaagaagugagcagaucag

SEQ ID NO: 728272 - RNA, 19 nt, Homo sapiens
  misc_RNA (1)...(19): siRNA sense strand
gacuggauuugcugauuac

SEQ ID NO: 728273 - RNA, 19 nt, Homo sapiens
  misc_RNA (1)...(19): siRNA sense strand
agcaagaacccaucaagga

SEQ ID NO: 728274 - RNA, 19 nt, Homo sapiens
  misc_RNA (1)...(19): siRNA sense strand
caacaagagccugcugaag

SEQ ID NO: 728275 - RNA, 19 nt, Homo sapiens
  misc_RNA (1)...(19): siRNA sense strand
ucagcagaaaucuuuauga

SEQ ID NO: 728276 - RNA, 19 nt, Homo sapiens
  misc_RNA (1)...(19): siRNA sense strand
cugcucuuccgaauuaaua

SEQ ID NO: 728277 - RNA, 19 nt, Homo sapiens
  misc_RNA (1)...(19): siRNA sense strand
ggaagcaagaacccaucaa

SEQ ID NO: 728278 - RNA, 19 nt, Homo sapiens
  misc_RNA (1)...(19): siRNA sense strand
ucagauuucagaagaagug

SEQ ID NO: 728279 - RNA, 19 nt, Homo sapiens
  misc_RNA (1)...(19): siRNA sense strand
gcugauuaccuaccuaaac

SEQ ID NO: 728280 - RNA, 19 nt, Homo sapiens
  misc_RNA (1)...(19): siRNA sense strand
cccaaacuucacagcauua

SEQ ID NO: 728281 - RNA, 19 nt, Homo sapiens
  misc_RNA (1)...(19): siRNA sense strand
ucaacaagagccugcugaa

SEQ ID NO: 728282 - RNA, 19 nt, Homo sapiens
  misc_RNA (1)...(19): siRNA sense strand
ccugggagaaggaaaguug

SEQ ID NO: 728283 - RNA, 19 nt, Homo sapiens
  misc_RNA (1)...(19): siRNA sense strand
ugaaccugcuggauauuuu

SEQ ID NO: 728284 - RNA, 19 nt, Homo sapiens
  misc_RNA (1)...(19): siRNA sense strand
gcaaucuguccuuccugaa

SEQ ID NO: 728285 - RNA, 19 nt, Homo sapiens
  misc_RNA (1)...(19): siRNA sense strand
agagaauguuggaggaaag

SEQ ID NO: 728286 - RNA, 19 nt, Homo sapiens
  misc_RNA (1)...(19): siRNA sense strand
gcaaacuggaugaugacau

SEQ ID NO: 728287 - RNA, 19 nt, Homo sapiens
  misc_RNA (1)...(19): siRNA sense strand
aaagcaaucuguccuuccu

SEQ ID NO: 728288 - RNA, 19 nt, Homo sapiens
  misc_RNA (1)...(19): siRNA sense strand
cuaucagauuucagaagaa

SEQ ID NO: 728289 - RNA, 19 nt, Homo sapiens
  misc_RNA (1)...(19): siRNA sense strand
gggucaugcucuaucagau

SEQ ID NO: 728290 - RNA, 19 nt, Homo sapiens
  misc_RNA (1)...(19): siRNA sense strand
aaaagagucugugcccaaa

SEQ ID NO: 728291 - RNA, 19 nt, Homo sapiens
  misc_RNA (1)...(19): siRNA sense strand
caaaagcacgggagaaagu

SEQ ID NO: 728292 - RNA, 19 nt, Homo sapiens
  misc_RNA (1)...(19): siRNA sense strand
gugcccaaaucaacaagag

SEQ ID NO: 728293 - RNA, 19 nt, Homo sapiens
  misc_RNA (1)...(19): siRNA sense strand
uggacuacauuccgcaaag

SEQ ID NO: 728294 - RNA, 19 nt, Homo sapiens
  misc_RNA (1)...(19): siRNA sense strand
uaaucaacgacuaugaaga

SEQ ID NO: 728295 - RNA, 19 nt, Homo sapiens
  misc_RNA (1)...(19): siRNA sense strand
agagccugcugaagauaau

SEQ ID NO: 728296 - RNA, 19 nt, Homo sapiens
  misc_RNA (1)...(19): siRNA sense strand
aagagccugcugaagauaa

SEQ ID NO: 728297 - RNA, 19 nt, Homo sapiens
  misc_RNA (1)...(19): siRNA sense strand
gcucuuccgaauuaauaga

SEQ ID NO: 728298 - RNA, 19 nt, Homo sapiens
  misc_RNA (1)...(19): siRNA sense strand
ccgaauuaauagacuggau

SEQ ID NO: 728299 - RNA, 19 nt, Homo sapiens
  misc_RNA (1)...(19): siRNA sense strand
ggacaaaguuuaccaaaug

SEQ ID NO: 728300 - RNA, 19 nt, Homo sapiens
  misc_RNA (1)...(19): siRNA sense strand
caacgacuaugaagaauuc

SEQ ID NO: 728301 - RNA, 19 nt, Homo sapiens
  misc_RNA (1)...(19): siRNA sense strand
gaucagaauugaggucuuu

SEQ ID NO: 728302 - RNA, 19 nt, Homo sapiens
  misc_RNA (1)...(19): siRNA sense strand
gaagugagcagaucagaau

SEQ ID NO: 728303 - RNA, 19 nt, Homo sapiens
  misc_RNA (1)...(19): siRNA sense strand
gaggaaaucuccaaaugca

SEQ ID NO: 728304 - RNA, 19 nt, Homo sapiens
  misc_RNA (1)...(19): siRNA sense strand
ggaaaucuccaaaugcaaa

SEQ ID NO: 728305 - RNA, 19 nt, Homo sapiens
  misc_RNA (1)...(19): siRNA sense strand
caaacuggaugaugacaug

SEQ ID NO: 728306 - RNA, 19 nt, Homo sapiens
  misc_RNA (1)...(19): siRNA sense strand
agacuggauuugcugauua

SEQ ID NO: 728307 - RNA, 19 nt, Homo sapiens
  misc_RNA (1)...(19): siRNA sense strand
gacaugaaccugcuggaua

SEQ ID NO: 728308 - RNA, 19 nt, Homo sapiens
  misc_RNA (1)...(19): siRNA sense strand
gaagauaaucaacgacuau

SEQ ID NO: 728309 - RNA, 19 nt, Homo sapiens
  misc_RNA (1)...(19): siRNA sense strand
gacaaaguuuaccaaauga

SEQ ID NO: 728310 - RNA, 19 nt, Homo sapiens
  misc_RNA (1)...(19): siRNA sense strand
cagcagaaaucuuuaugau

SEQ ID NO: 728311 - RNA, 19 nt, Homo sapiens
  misc_RNA (1)...(19): siRNA sense strand
gaaaggaggagauggaaag

SEQ ID NO: 728312 - RNA, 19 nt, Homo sapiens
  misc_RNA (1)...(19): siRNA sense strand
gauaaucaacgacuaugaa

SEQ ID NO: 728313 - RNA, 19 nt, Homo sapiens
  misc_RNA (1)...(19): siRNA sense strand
gaucuggccucccucaagu

SEQ ID NO: 728314 - RNA, 19 nt, Homo sapiens
  misc_RNA (1)...(19): siRNA sense strand
gaauugaggucuuuuaagu

SEQ ID NO: 728315 - RNA, 19 nt, Homo sapiens
  misc_RNA (1)...(19): siRNA sense strand
aagaggaaaucuccaaaug

SEQ ID NO: 728316 - RNA, 19 nt, Homo sapiens
  misc_RNA (1)...(19): siRNA sense strand
gcaagaacccaucaaggau

SEQ ID NO: 728317 - RNA, 19 nt, Homo sapiens
  misc_RNA (1)...(19): siRNA sense strand
ggaaagggaacuucagaca

SEQ ID NO: 728318 - RNA, 19 nt, Homo sapiens
  misc_RNA (1)...(19): siRNA sense strand
gcccaaacuucacagcauu

SEQ ID NO: 728319 - RNA, 19 nt, Homo sapiens
  misc_RNA (1)...(19): siRNA sense strand
acaugaaccugcuggauau

SEQ ID NO: 728320 - RNA, 19 nt, Homo sapiens
  misc_RNA (1)...(19): siRNA sense strand
gucaugcucuaucagauuu

SEQ ID NO: 728321 - RNA, 19 nt, Homo sapiens
  misc_RNA (1)...(19): siRNA sense strand
ucauagagauggagaagag

SEQ ID NO: 728322 - RNA, 19 nt, Homo sapiens
  misc_RNA (1)...(19): siRNA sense strand
ucuaucagauuucagaaga

SEQ ID NO: 728323 - RNA, 19 nt, Homo sapiens
  misc_RNA (1)...(19): siRNA sense strand
ugaagauaaucaacgacua

SEQ ID NO: 728324 - RNA, 19 nt, Homo sapiens
  misc_RNA (1)...(19): siRNA sense strand
acaagagccugcugaagau

SEQ ID NO: 728325 - RNA, 19 nt, Homo sapiens
  misc_RNA (1)...(19): siRNA sense strand
aaugcaaacuggaugauga

SEQ ID NO: 728326 - RNA, 19 nt, Homo sapiens
  misc_RNA (1)...(19): siRNA sense strand
uggauuugcugauuaccua

SEQ ID NO: 728327 - RNA, 19 nt, Homo sapiens
  misc_RNA (1)...(19): siRNA sense strand
gugagcagaucagaauuga

SEQ ID NO: 728328 - RNA, 19 nt, Homo sapiens
  misc_RNA (1)...(19): siRNA sense strand
gaauggaacacacuuggau

SEQ ID NO: 728329 - RNA, 19 nt, Homo sapiens
  misc_RNA (1)...(19): siRNA sense strand
gggagaaagugcccaaacu

SEQ ID NO: 728330 - RNA, 19 nt, Homo sapiens
  misc_RNA (1)...(19): siRNA sense strand
aaucaacgacuaugaagaa

SEQ ID NO: 728331 - RNA, 19 nt, Homo sapiens
  misc_RNA (1)...(19): siRNA sense strand
ccaggcagggcucaaauuu

SEQ ID NO: 728332 - RNA, 19 nt, Homo sapiens
  misc_RNA (1)...(19): siRNA sense strand
gcaagaggaaaucuccaaa

SEQ ID NO: 728333 - RNA, 19 nt, Homo sapiens
  misc_RNA (1)...(19): siRNA sense strand
gaaaguuggacauccugaa

SEQ ID NO: 728334 - RNA, 19 nt, Homo sapiens
  misc_RNA (1)...(19): siRNA sense strand
gaucaucaacaaucacaau

SEQ ID NO: 728335 - RNA, 19 nt, Homo sapiens
  misc_RNA (1)...(19): siRNA sense strand
gacuucagcagaaaucuuu

SEQ ID NO: 728336 - RNA, 19 nt, Homo sapiens
  misc_RNA (1)...(19): siRNA sense strand
cagaagaagugagcagauc

SEQ ID NO: 728337 - RNA, 19 nt, Homo sapiens
  misc_RNA (1)...(19): siRNA sense strand
aacaagagccugcugaaga

SEQ ID NO: 728338 - RNA, 19 nt, Homo sapiens
  misc_RNA (1)...(19): siRNA sense strand
cugauuaccuaccuaaaca

SEQ ID NO: 728339 - RNA, 19 nt, Homo sapiens
  misc_RNA (1)...(19): siRNA sense strand
ggucaugcucuaucagauu

SEQ ID NO: 728340 - RNA, 19 nt, Homo sapiens
  misc_RNA (1)...(19): siRNA sense strand
gaagcaagaacccaucaag

SEQ ID NO: 728341 - RNA, 19 nt, Homo sapiens
  misc_RNA (1)...(19): siRNA sense strand
uuaccuaccuaaacacuag

SEQ ID NO: 728342 - RNA, 19 nt, Homo sapiens
  misc_RNA (1)...(19): siRNA sense strand
aggcagggcucaaauuucu

SEQ ID NO: 728343 - RNA, 19 nt, Homo sapiens
  misc_RNA (1)...(19): siRNA sense strand
cgaauuaauagacuggauu

SEQ ID NO: 728344 - RNA, 19 nt, Homo sapiens
  misc_RNA (1)...(19): siRNA sense strand
caagaggaaaucuccaaau

SEQ ID NO: 728345 - RNA, 19 nt, Homo sapiens
  misc_RNA (1)...(19): siRNA sense strand
ccaaaugcaaacuggauga

SEQ ID NO: 728346 - RNA, 19 nt, Homo sapiens
  misc_RNA (1)...(19): siRNA sense strand
ggacuucagcagaaaucuu

SEQ ID NO: 728347 - RNA, 19 nt, Homo sapiens
  misc_RNA (1)...(19): siRNA sense strand
aagagaauguuggaggaaa

SEQ ID NO: 728348 - RNA, 19 nt, Homo sapiens
  misc_RNA (1)...(19): siRNA sense strand
ggaauggaacacacuugga

SEQ ID NO: 728349 - RNA, 19 nt, Homo sapiens
  misc_RNA (1)...(19): siRNA sense strand
uggacaaaguuuaccaaau

SEQ ID NO: 728350 - RNA, 19 nt, Homo sapiens
  misc_RNA (1)...(19): siRNA sense strand
aaaguuggacauccugaaa

SEQ ID NO: 728351 - RNA, 19 nt, Homo sapiens
  misc_RNA (1)...(19): siRNA sense strand
gcucaaauuucugccuaca

SEQ ID NO: 728352 - RNA, 19 nt, Homo sapiens
  misc_RNA (1)...(19): siRNA sense strand
uagacuggauuugcugauu

SEQ ID NO: 728353 - RNA, 19 nt, Homo sapiens
  misc_RNA (1)...(19): siRNA sense strand
ggacuacauuccgcaaagg

SEQ ID NO: 728354 - RNA, 19 nt, Homo sapiens
  misc_RNA (1)...(19): siRNA sense strand
uaucagauuucagaagaag

SEQ ID NO: 728355 - RNA, 19 nt, Homo sapiens
  misc_RNA (1)...(19): siRNA sense strand
uuaauagacuggauuugcu

SEQ ID NO: 728356 - RNA, 19 nt, Homo sapiens
  misc_RNA (1)...(19): siRNA sense strand
gggauacugucugaucauc

SEQ ID NO: 728357 - RNA, 19 nt, Homo sapiens
  misc_RNA (1)...(19): siRNA sense strand
aagagucugugcccaaauc

SEQ ID NO: 728358 - RNA, 19 nt, Homo sapiens
  misc_RNA (1)...(19): siRNA sense strand
caagagccugcugaagaua

SEQ ID NO: 728359 - RNA, 19 nt, Homo sapiens
  misc_RNA (1)...(19): siRNA sense strand
cuagaaaggaggagaugga

SEQ ID NO: 728360 - RNA, 19 nt, Homo sapiens
  misc_RNA (1)...(19): siRNA sense strand
ggagauggaaagggaacuu

SEQ ID NO: 728361 - RNA, 19 nt, Homo sapiens
  misc_RNA (1)...(19): siRNA sense strand
aggaugccuugauguuauu

SEQ ID NO: 728362 - RNA, 19 nt, Homo sapiens
  misc_RNA (1)...(19): siRNA sense strand
ucaacgacuaugaagaauu

SEQ ID NO: 728363 - RNA, 19 nt, Homo sapiens
  misc_RNA (1)...(19): siRNA sense strand
gaauguuggaggaaagcaa

SEQ ID NO: 728364 - RNA, 19 nt, Homo sapiens
  misc_RNA (1)...(19): siRNA sense strand
gagaaggaaaguuggacau

SEQ ID NO: 728365 - RNA, 19 nt, Homo sapiens
  misc_RNA (1)...(19): siRNA sense strand
gaagaagugagcagaucag

SEQ ID NO: 728366 - RNA, 19 nt, Homo sapiens
  misc_RNA (1)...(19): siRNA sense strand
gacuggauuugcugauuac

SEQ ID NO: 728367 - RNA, 19 nt, Homo sapiens
  misc_RNA (1)...(19): siRNA sense strand
agcaagaacccaucaagga

SEQ ID NO: 728368 - RNA, 19 nt, Homo sapiens
  misc_RNA (1)...(19): siRNA sense strand
caacaagagccugcugaag

SEQ ID NO: 728369 - RNA, 19 nt, Homo sapiens
  misc_RNA (1)...(19): siRNA sense strand
ucagcagaaaucuuuauga

SEQ ID NO: 728370 - RNA, 19 nt, Homo sapiens
  misc_RNA (1)...(19): siRNA sense strand
cugcucuuccgaauuaaua

SEQ ID NO: 728371 - RNA, 19 nt, Homo sapiens
  misc_RNA (1)...(19): siRNA sense strand
ggaagcaagaacccaucaa

SEQ ID NO: 728372 - RNA, 19 nt, Homo sapiens
  misc_RNA (1)...(19): siRNA sense strand
ucagauuucagaagaagug

SEQ ID NO: 728373 - RNA, 19 nt, Homo sapiens
  misc_RNA (1)...(19): siRNA sense strand
gcugauuaccuaccuaaac

SEQ ID NO: 728374 - RNA, 19 nt, Homo sapiens
  misc_RNA (1)...(19): siRNA sense strand
cccaaacuucacagcauua

SEQ ID NO: 728375 - RNA, 19 nt, Homo sapiens
  misc_RNA (1)...(19): siRNA sense strand
ucaacaagagccugcugaa

SEQ ID NO: 728376 - RNA, 19 nt, Homo sapiens
  misc_RNA (1)...(19): siRNA sense strand
ccugggagaaggaaaguug

SEQ ID NO: 728377 - RNA, 19 nt, Homo sapiens
  misc_RNA (1)...(19): siRNA sense strand
ugaaccugcuggauauuuu

SEQ ID NO: 728378 - RNA, 19 nt, Homo sapiens
  misc_RNA (1)...(19): siRNA sense strand
gcaaucuguccuuccugaa

SEQ ID NO: 728379 - RNA, 19 nt, Homo sapiens
  misc_RNA (1)...(19): siRNA sense strand
agagaauguuggaggaaag

SEQ ID NO: 728380 - RNA, 19 nt, Homo sapiens
  misc_RNA (1)...(19): siRNA sense strand
gcaaacuggaugaugacau

SEQ ID NO: 728381 - RNA, 19 nt, Homo sapiens
  misc_RNA (1)...(19): siRNA sense strand
aaagcaaucuguccuuccu

SEQ ID NO: 728382 - RNA, 19 nt, Homo sapiens
  misc_RNA (1)...(19): siRNA sense strand
cuaucagauuucagaagaa

SEQ ID NO: 728383 - RNA, 19 nt, Homo sapiens
  misc_RNA (1)...(19): siRNA sense strand
gggucaugcucuaucagau

SEQ ID NO: 728384 - RNA, 19 nt, Homo sapiens
  misc_RNA (1)...(19): siRNA sense strand
aaaagagucugugcccaaa

SEQ ID NO: 728385 - RNA, 19 nt, Homo sapiens
  misc_RNA (1)...(19): siRNA sense strand
caaaagcacgggagaaagu

SEQ ID NO: 728386 - RNA, 19 nt, Homo sapiens
  misc_RNA (1)...(19): siRNA sense strand
gugcccaaaucaacaagag

SEQ ID NO: 728387 - RNA, 19 nt, Homo sapiens
  misc_RNA (1)...(19): siRNA sense strand
uggacuacauuccgcaaag

SEQ ID NO: 728388 - RNA, 19 nt, Homo sapiens
  misc_RNA (1)...(19): siRNA sense strand
uaaucaacgacuaugaaga

SEQ ID NO: 728389 - RNA, 19 nt, Homo sapiens
  misc_RNA (1)...(19): siRNA sense strand
agagccugcugaagauaau

SEQ ID NO: 728390 - RNA, 19 nt, Homo sapiens
  misc_RNA (1)...(19): siRNA sense strand
aagagccugcugaagauaa

SEQ ID NO: 728391 - RNA, 19 nt, Homo sapiens
  misc_RNA (1)...(19): siRNA sense strand
gcucuuccgaauuaauaga

SEQ ID NO: 728392 - RNA, 19 nt, Homo sapiens
  misc_RNA (1)...(19): siRNA sense strand
ccgaauuaauagacuggau

SEQ ID NO: 728393 - RNA, 19 nt, Homo sapiens
  misc_RNA (1)...(19): siRNA sense strand
ggacaaaguuuaccaaaug

SEQ ID NO: 728394 - RNA, 19 nt, Homo sapiens
  misc_RNA (1)...(19): siRNA sense strand
caacgacuaugaagaauuc

SEQ ID NO: 728395 - RNA, 19 nt, Homo sapiens
  misc_RNA (1)...(19): siRNA sense strand
gaucagaauugaggucuuu

SEQ ID NO: 728396 - RNA, 19 nt, Homo sapiens
  misc_RNA (1)...(19): siRNA sense strand
gaagugagcagaucagaau

SEQ ID NO: 728397 - RNA, 19 nt, Homo sapiens
  misc_RNA (1)...(19): siRNA sense strand
gaggaaaucuccaaaugca

SEQ ID NO: 728398 - RNA, 19 nt, Homo sapiens
  misc_RNA (1)...(19): siRNA sense strand
ggaaaucuccaaaugcaaa

SEQ ID NO: 728399 - RNA, 19 nt, Homo sapiens
  misc_RNA (1)...(19): siRNA sense strand
caaacuggaugaugacaug

SEQ ID NO: 728400 - RNA, 19 nt, Homo sapiens
  misc_RNA (1)...(19): siRNA sense strand
agacuggauuugcugauua

SEQ ID NO: 728401 - RNA, 19 nt, Homo sapiens
  misc_RNA (1)...(19): siRNA sense strand
gacaugaaccugcuggaua

SEQ ID NO: 728402 - RNA, 19 nt, Homo sapiens
  misc_RNA (1)...(19): siRNA sense strand
gaagauaaucaacgacuau

SEQ ID NO: 728403 - RNA, 19 nt, Homo sapiens
  misc_RNA (1)...(19): siRNA sense strand
gacaaaguuuaccaaauga

SEQ ID NO: 728404 - RNA, 19 nt, Homo sapiens
  misc_RNA (1)...(19): siRNA sense strand
cagcagaaaucuuuaugau

SEQ ID NO: 728405 - RNA, 19 nt, Homo sapiens
  misc_RNA (1)...(19): siRNA sense strand
gaaaggaggagauggaaag

SEQ ID NO: 728406 - RNA, 19 nt, Homo sapiens
  misc_RNA (1)...(19): siRNA sense strand
gauaaucaacgacuaugaa

SEQ ID NO: 728407 - RNA, 19 nt, Homo sapiens
  misc_RNA (1)...(19): siRNA sense strand
gaucuggccucccucaagu

SEQ ID NO: 728408 - RNA, 19 nt, Homo sapiens
  misc_RNA (1)...(19): siRNA sense strand
gaauugaggucuuuuaagu

SEQ ID NO: 728409 - RNA, 19 nt, Homo sapiens
  misc_RNA (1)...(19): siRNA sense strand
aagaggaaaucuccaaaug

SEQ ID NO: 728410 - RNA, 19 nt, Homo sapiens
  misc_RNA (1)...(19): siRNA sense strand
gcaagaacccaucaaggau

SEQ ID NO: 728411 - RNA, 19 nt, Homo sapiens
  misc_RNA (1)...(19): siRNA sense strand
ggaaagggaacuucagaca

SEQ ID NO: 728412 - RNA, 19 nt, Homo sapiens
  misc_RNA (1)...(19): siRNA sense strand
gcccaaacuucacagcauu

SEQ ID NO: 728413 - RNA, 19 nt, Homo sapiens
  misc_RNA (1)...(19): siRNA sense strand
acaugaaccugcuggauau

SEQ ID NO: 728414 - RNA, 19 nt, Homo sapiens
  misc_RNA (1)...(19): siRNA sense strand
gucaugcucuaucagauuu

SEQ ID NO: 728415 - RNA, 19 nt, Homo sapiens
  misc_RNA (1)...(19): siRNA sense strand
ucauagagauggagaagag

SEQ ID NO: 728416 - RNA, 19 nt, Homo sapiens
  misc_RNA (1)...(19): siRNA sense strand
ucuaucagauuucagaaga

SEQ ID NO: 728417 - RNA, 19 nt, Homo sapiens
  misc_RNA (1)...(19): siRNA sense strand
ugaagauaaucaacgacua

SEQ ID NO: 728418 - RNA, 19 nt, Homo sapiens
  misc_RNA (1)...(19): siRNA sense strand
acaagagccugcugaagau

SEQ ID NO: 728419 - RNA, 19 nt, Homo sapiens
  misc_RNA (1)...(19): siRNA sense strand
aaugcaaacuggaugauga

SEQ ID NO: 728420 - RNA, 19 nt, Homo sapiens
  misc_RNA (1)...(19): siRNA sense strand
uggauuugcugauuaccua

SEQ ID NO: 728421 - RNA, 19 nt, Homo sapiens
  misc_RNA (1)...(19): siRNA sense strand
gugagcagaucagaauuga

SEQ ID NO: 728422 - RNA, 19 nt, Homo sapiens
  misc_RNA (1)...(19): siRNA sense strand
gaauggaacacacuuggau

SEQ ID NO: 728423 - RNA, 19 nt, Homo sapiens
  misc_RNA (1)...(19): siRNA sense strand
gggagaaagugcccaaacu

SEQ ID NO: 728424 - RNA, 19 nt, Homo sapiens
  misc_RNA (1)...(19): siRNA sense strand
aaucaacgacuaugaagaa

SEQ ID NO: 728425 - RNA, 19 nt, Homo sapiens
  misc_RNA (1)...(19): siRNA sense strand
ccaggcagggcucaaauuu

SEQ ID NO: 728426 - RNA, 19 nt, Homo sapiens
  misc_RNA (1)...(19): siRNA sense strand
gcaagaggaaaucuccaaa

SEQ ID NO: 728427 - RNA, 19 nt, Homo sapiens
  misc_RNA (1)...(19): siRNA sense strand
gaaaguuggacauccugaa

SEQ ID NO: 728428 - RNA, 19 nt, Homo sapiens
  misc_RNA (1)...(19): siRNA sense strand
gaucaucaacaaucacaau

SEQ ID NO: 728429 - RNA, 19 nt, Homo sapiens
  misc_RNA (1)...(19): siRNA sense strand
gacuucagcagaaaucuuu

SEQ ID NO: 728430 - RNA, 19 nt, Homo sapiens
  misc_RNA (1)...(19): siRNA sense strand
cagaagaagugagcagauc

SEQ ID NO: 728431 - RNA, 19 nt, Homo sapiens
  misc_RNA (1)...(19): siRNA sense strand
aacaagagccugcugaaga

SEQ ID NO: 728432 - RNA, 19 nt, Homo sapiens
  misc_RNA (1)...(19): siRNA sense strand
cugauuaccuaccuaaaca

SEQ ID NO: 728433 - RNA, 19 nt, Homo sapiens
  misc_RNA (1)...(19): siRNA sense strand
ggucaugcucuaucagauu

SEQ ID NO: 728434 - RNA, 19 nt, Homo sapiens
  misc_RNA (1)...(19): siRNA sense strand
gaagcaagaacccaucaag

SEQ ID NO: 728435 - RNA, 19 nt, Homo sapiens
  misc_RNA (1)...(19): siRNA sense strand
uuaccuaccuaaacacuag

SEQ ID NO: 728436 - RNA, 19 nt, Homo sapiens
  misc_RNA (1)...(19): siRNA sense strand
aggcagggcucaaauuucu

SEQ ID NO: 728437 - RNA, 19 nt, Homo sapiens
  misc_RNA (1)...(19): siRNA sense strand
cgaauuaauagacuggauu

SEQ ID NO: 728438 - RNA, 19 nt, Homo sapiens
  misc_RNA (1)...(19): siRNA sense strand
caagaggaaaucuccaaau

SEQ ID NO: 728439 - RNA, 19 nt, Homo sapiens
  misc_RNA (1)...(19): siRNA sense strand
ccaaaugcaaacuggauga

SEQ ID NO: 728440 - RNA, 19 nt, Homo sapiens
  misc_RNA (1)...(19): siRNA sense strand
ggacuucagcagaaaucuu

SEQ ID NO: 728441 - RNA, 19 nt, Homo sapiens
  misc_RNA (1)...(19): siRNA sense strand
aagagaauguuggaggaaa

SEQ ID NO: 728442 - RNA, 19 nt, Homo sapiens
  misc_RNA (1)...(19): siRNA sense strand
ggaauggaacacacuugga

SEQ ID NO: 728443 - RNA, 19 nt, Homo sapiens
  misc_RNA (1)...(19): siRNA sense strand
uggacaaaguuuaccaaau

SEQ ID NO: 728444 - RNA, 19 nt, Homo sapiens
  misc_RNA (1)...(19): siRNA sense strand
aaaguuggacauccugaaa

SEQ ID NO: 728445 - RNA, 19 nt, Homo sapiens
  misc_RNA (1)...(19): siRNA sense strand
gcucaaauuucugccuaca

SEQ ID NO: 728446 - RNA, 19 nt, Homo sapiens
  misc_RNA (1)...(19): siRNA sense strand
uagacuggauuugcugauu

SEQ ID NO: 728447 - RNA, 19 nt, Homo sapiens
  misc_RNA (1)...(19): siRNA sense strand
ggacuacauuccgcaaagg

SEQ ID NO: 728448 - RNA, 19 nt, Homo sapiens
  misc_RNA (1)...(19): siRNA sense strand
uaucagauuucagaagaag

SEQ ID NO: 728449 - RNA, 19 nt, Homo sapiens
  misc_RNA (1)...(19): siRNA sense strand
uuaauagacuggauuugcu

SEQ ID NO: 728450 - RNA, 19 nt, Homo sapiens
  misc_RNA (1)...(19): siRNA sense strand
gggauacugucugaucauc

SEQ ID NO: 728451 - RNA, 19 nt, Homo sapiens
  misc_RNA (1)...(19): siRNA sense strand
aagagucugugcccaaauc

SEQ ID NO: 728452 - RNA, 19 nt, Homo sapiens
  misc_RNA (1)...(19): siRNA sense strand
caagagccugcugaagaua

SEQ ID NO: 728453 - RNA, 19 nt, Homo sapiens
  misc_RNA (1)...(19): siRNA sense strand
cuagaaaggaggagaugga

SEQ ID NO: 728454 - RNA, 19 nt, Homo sapiens
  misc_RNA (1)...(19): siRNA sense strand
ggagauggaaagggaacuu

SEQ ID NO: 728455 - RNA, 19 nt, Homo sapiens
  misc_RNA (1)...(19): siRNA sense strand
aggaugccuugauguuauu

SEQ ID NO: 728456 - RNA, 19 nt, Homo sapiens
  misc_RNA (1)...(19): siRNA sense strand
ucaacgacuaugaagaauu

SEQ ID NO: 728457 - RNA, 19 nt, Homo sapiens
  misc_RNA (1)...(19): siRNA sense strand
gaauguuggaggaaagcaa

SEQ ID NO: 728458 - RNA, 19 nt, Homo sapiens
  misc_RNA (1)...(19): siRNA sense strand
gagaaggaaaguuggacau

SEQ ID NO: 728459 - RNA, 19 nt, Homo sapiens
  misc_RNA (1)...(19): siRNA sense strand
gaagaagugagcagaucag

SEQ ID NO: 728460 - RNA, 19 nt, Homo sapiens
  misc_RNA (1)...(19): siRNA sense strand
gacuggauuugcugauuac

SEQ ID NO: 728461 - RNA, 19 nt, Homo sapiens
  misc_RNA (1)...(19): siRNA sense strand
agcaagaacccaucaagga

SEQ ID NO: 728462 - RNA, 19 nt, Homo sapiens
  misc_RNA (1)...(19): siRNA sense strand
caacaagagccugcugaag

SEQ ID NO: 728463 - RNA, 19 nt, Homo sapiens
  misc_RNA (1)...(19): siRNA sense strand
ucagcagaaaucuuuauga

SEQ ID NO: 728464 - RNA, 19 nt, Homo sapiens
  misc_RNA (1)...(19): siRNA sense strand
cugcucuuccgaauuaaua

SEQ ID NO: 728465 - RNA, 19 nt, Homo sapiens
  misc_RNA (1)...(19): siRNA sense strand
ggaagcaagaacccaucaa

SEQ ID NO: 728466 - RNA, 19 nt, Homo sapiens
  misc_RNA (1)...(19): siRNA sense strand
ucagauuucagaagaagug

SEQ ID NO: 728467 - RNA, 19 nt, Homo sapiens
  misc_RNA (1)...(19): siRNA sense strand
gcugauuaccuaccuaaac

SEQ ID NO: 728468 - RNA, 19 nt, Homo sapiens
  misc_RNA (1)...(19): siRNA sense strand
cccaaacuucacagcauua

SEQ ID NO: 728469 - RNA, 19 nt, Homo sapiens
  misc_RNA (1)...(19): siRNA sense strand
ucaacaagagccugcugaa

SEQ ID NO: 728470 - RNA, 19 nt, Homo sapiens
  misc_RNA (1)...(19): siRNA sense strand
ccugggagaaggaaaguug

SEQ ID NO: 728471 - RNA, 19 nt, Homo sapiens
  misc_RNA (1)...(19): siRNA sense strand
ugaaccugcuggauauuuu

SEQ ID NO: 728472 - RNA, 19 nt, Homo sapiens
  misc_RNA (1)...(19): siRNA sense strand
gcaaucuguccuuccugaa

SEQ ID NO: 728473 - RNA, 19 nt, Homo sapiens
  misc_RNA (1)...(19): siRNA sense strand
agagaauguuggaggaaag

SEQ ID NO: 728474 - RNA, 19 nt, Homo sapiens
  misc_RNA (1)...(19): siRNA sense strand
gcaaacuggaugaugacau

SEQ ID NO: 728475 - RNA, 19 nt, Homo sapiens
  misc_RNA (1)...(19): siRNA sense strand
aaagcaaucuguccuuccu

SEQ ID NO: 728476 - RNA, 19 nt, Homo sapiens
  misc_RNA (1)...(19): siRNA sense strand
cuaucagauuucagaagaa

SEQ ID NO: 728477 - RNA, 19 nt, Homo sapiens
  misc_RNA (1)...(19): siRNA sense strand
gggucaugcucuaucagau

SEQ ID NO: 728478 - RNA, 19 nt, Homo sapiens
  misc_RNA (1)...(19): siRNA sense strand
aaaagagucugugcccaaa

SEQ ID NO: 728479 - RNA, 19 nt, Homo sapiens
  misc_RNA (1)...(19): siRNA sense strand
caaaagcacgggagaaagu

SEQ ID NO: 728480 - RNA, 19 nt, Homo sapiens
  misc_RNA (1)...(19): siRNA sense strand
gugcccaaaucaacaagag

SEQ ID NO: 728481 - RNA, 19 nt, Homo sapiens
  misc_RNA (1)...(19): siRNA sense strand
uggacuacauuccgcaaag

SEQ ID NO: 728482 - RNA, 19 nt, Homo sapiens
  misc_RNA (1)...(19): siRNA sense strand
uaaucaacgacuaugaaga

SEQ ID NO: 728483 - RNA, 19 nt, Homo sapiens
  misc_RNA (1)...(19): siRNA sense strand
agagccugcugaagauaau

SEQ ID NO: 728484 - RNA, 19 nt, Homo sapiens
  misc_RNA (1)...(19): siRNA sense strand
aagagccugcugaagauaa

SEQ ID NO: 728485 - RNA, 19 nt, Homo sapiens
  misc_RNA (1)...(19): siRNA sense strand
gcucuuccgaauuaauaga

SEQ ID NO: 728486 - RNA, 19 nt, Homo sapiens
  misc_RNA (1)...(19): siRNA sense strand
ccgaauuaauagacuggau

SEQ ID NO: 728487 - RNA, 19 nt, Homo sapiens
  misc_RNA (1)...(19): siRNA sense strand
ggacaaaguuuaccaaaug

SEQ ID NO: 728488 - RNA, 19 nt, Homo sapiens
  misc_RNA (1)...(19): siRNA sense strand
caacgacuaugaagaauuc

SEQ ID NO: 728489 - RNA, 19 nt, Homo sapiens
  misc_RNA (1)...(19): siRNA sense strand
gaucagaauugaggucuuu

SEQ ID NO: 728490 - RNA, 19 nt, Homo sapiens
  misc_RNA (1)...(19): siRNA sense strand
gaagugagcagaucagaau

SEQ ID NO: 728491 - RNA, 19 nt, Homo sapiens
  misc_RNA (1)...(19): siRNA sense strand
gaggaaaucuccaaaugca

SEQ ID NO: 728492 - RNA, 19 nt, Homo sapiens
  misc_RNA (1)...(19): siRNA sense strand
ggaaaucuccaaaugcaaa

SEQ ID NO: 728493 - RNA, 19 nt, Homo sapiens
  misc_RNA (1)...(19): siRNA sense strand
caaacuggaugaugacaug

SEQ ID NO: 728494 - RNA, 19 nt, Homo sapiens
  misc_RNA (1)...(19): siRNA sense strand
agacuggauuugcugauua

SEQ ID NO: 728495 - RNA, 19 nt, Homo sapiens
  misc_RNA (1)...(19): siRNA sense strand
gacaugaaccugcuggaua

SEQ ID NO: 728496 - RNA, 19 nt, Homo sapiens
  misc_RNA (1)...(19): siRNA sense strand
gaagauaaucaacgacuau

SEQ ID NO: 728497 - RNA, 19 nt, Homo sapiens
  misc_RNA (1)...(19): siRNA sense strand
gacaaaguuuaccaaauga

SEQ ID NO: 728498 - RNA, 19 nt, Homo sapiens
  misc_RNA (1)...(19): siRNA sense strand
cagcagaaaucuuuaugau

SEQ ID NO: 728499 - RNA, 19 nt, Homo sapiens
  misc_RNA (1)...(19): siRNA sense strand
gaaaggaggagauggaaag

SEQ ID NO: 728500 - RNA, 19 nt, Homo sapiens
  misc_RNA (1)...(19): siRNA sense strand
gauaaucaacgacuaugaa

SEQ ID NO: 728501 - RNA, 19 nt, Homo sapiens
  misc_RNA (1)...(19): siRNA sense strand
gaucuggccucccucaagu

SEQ ID NO: 728502 - RNA, 19 nt, Homo sapiens
  misc_RNA (1)...(19): siRNA sense strand
gaauugaggucuuuuaagu

SEQ ID NO: 728503 - RNA, 19 nt, Homo sapiens
  misc_RNA (1)...(19): siRNA sense strand
aagaggaaaucuccaaaug

SEQ ID NO: 728504 - RNA, 19 nt, Homo sapiens
  misc_RNA (1)...(19): siRNA sense strand
gcaagaacccaucaaggau

SEQ ID NO: 728505 - RNA, 19 nt, Homo sapiens
  misc_RNA (1)...(19): siRNA sense strand
ggaaagggaacuucagaca

SEQ ID NO: 728506 - RNA, 19 nt, Homo sapiens
  misc_RNA (1)...(19): siRNA sense strand
gcccaaacuucacagcauu

SEQ ID NO: 728507 - RNA, 19 nt, Homo sapiens
  misc_RNA (1)...(19): siRNA sense strand
acaugaaccugcuggauau

SEQ ID NO: 728508 - RNA, 19 nt, Homo sapiens
  misc_RNA (1)...(19): siRNA sense strand
gucaugcucuaucagauuu

SEQ ID NO: 728509 - RNA, 19 nt, Homo sapiens
  misc_RNA (1)...(19): siRNA sense strand
ucauagagauggagaagag

SEQ ID NO: 728510 - RNA, 19 nt, Homo sapiens
  misc_RNA (1)...(19): siRNA sense strand
ucuaucagauuucagaaga

SEQ ID NO: 728511 - RNA, 19 nt, Homo sapiens
  misc_RNA (1)...(19): siRNA sense strand
ugaagauaaucaacgacua

SEQ ID NO: 728512 - RNA, 19 nt, Homo sapiens
  misc_RNA (1)...(19): siRNA sense strand
acaagagccugcugaagau

SEQ ID NO: 728513 - RNA, 19 nt, Homo sapiens
  misc_RNA (1)...(19): siRNA sense strand
aaugcaaacuggaugauga

SEQ ID NO: 728514 - RNA, 19 nt, Homo sapiens
  misc_RNA (1)...(19): siRNA sense strand
uggauuugcugauuaccua

SEQ ID NO: 728515 - RNA, 19 nt, Homo sapiens
  misc_RNA (1)...(19): siRNA sense strand
gugagcagaucagaauuga

SEQ ID NO: 728516 - RNA, 19 nt, Homo sapiens
  misc_RNA (1)...(19): siRNA sense strand
gaauggaacacacuuggau

SEQ ID NO: 728517 - RNA, 19 nt, Homo sapiens
  misc_RNA (1)...(19): siRNA sense strand
gggagaaagugcccaaacu

SEQ ID NO: 728518 - RNA, 19 nt, Homo sapiens
  misc_RNA (1)...(19): siRNA sense strand
aaucaacgacuaugaagaa

SEQ ID NO: 728519 - RNA, 19 nt, Homo sapiens
  misc_RNA (1)...(19): siRNA sense strand
ccaggcagggcucaaauuu

SEQ ID NO: 728520 - RNA, 19 nt, Homo sapiens
  misc_RNA (1)...(19): siRNA sense strand
gcaagaggaaaucuccaaa

SEQ ID NO: 728521 - RNA, 19 nt, Homo sapiens
  misc_RNA (1)...(19): siRNA sense strand
gaaaguuggacauccugaa

SEQ ID NO: 728522 - RNA, 19 nt, Homo sapiens
  misc_RNA (1)...(19): siRNA sense strand
gaucaucaacaaucacaau

SEQ ID NO: 728523 - RNA, 19 nt, Homo sapiens
  misc_RNA (1)...(19): siRNA sense strand
gacuucagcagaaaucuuu

SEQ ID NO: 728524 - RNA, 19 nt, Homo sapiens
  misc_RNA (1)...(19): siRNA sense strand
cagaagaagugagcagauc

SEQ ID NO: 728525 - RNA, 19 nt, Homo sapiens
  misc_RNA (1)...(19): siRNA sense strand
aacaagagccugcugaaga

SEQ ID NO: 728526 - RNA, 19 nt, Homo sapiens
  misc_RNA (1)...(19): siRNA sense strand
cugauuaccuaccuaaaca

SEQ ID NO: 728527 - RNA, 19 nt, Homo sapiens
  misc_RNA (1)...(19): siRNA sense strand
ggucaugcucuaucagauu

SEQ ID NO: 728528 - RNA, 19 nt, Homo sapiens
  misc_RNA (1)...(19): siRNA sense strand
gaagcaagaacccaucaag

SEQ ID NO: 728529 - RNA, 19 nt, Homo sapiens
  misc_RNA (1)...(19): siRNA sense strand
uuaccuaccuaaacacuag

SEQ ID NO: 728530 - RNA, 19 nt, Homo sapiens
  misc_RNA (1)...(19): siRNA sense strand
aggcagggcucaaauuucu

SEQ ID NO: 728531 - RNA, 19 nt, Homo sapiens
  misc_RNA (1)...(19): siRNA sense strand
cgaauuaauagacuggauu

SEQ ID NO: 728532 - RNA, 19 nt, Homo sapiens
  misc_RNA (1)...(19): siRNA sense strand
caagaggaaaucuccaaau

SEQ ID NO: 728533 - RNA, 19 nt, Homo sapiens
  misc_RNA (1)...(19): siRNA sense strand
ccaaaugcaaacuggauga

SEQ ID NO: 728534 - RNA, 19 nt, Homo sapiens
  misc_RNA (1)...(19): siRNA sense strand
ggacuucagcagaaaucuu

SEQ ID NO: 728535 - RNA, 19 nt, Homo sapiens
  misc_RNA (1)...(19): siRNA sense strand
aagagaauguuggaggaaa

SEQ ID NO: 728536 - RNA, 19 nt, Homo sapiens
  misc_RNA (1)...(19): siRNA sense strand
ggaauggaacacacuugga

SEQ ID NO: 728537 - RNA, 19 nt, Homo sapiens
  misc_RNA (1)...(19): siRNA sense strand
uggacaaaguuuaccaaau

SEQ ID NO: 728538 - RNA, 19 nt, Homo sapiens
  misc_RNA (1)...(19): siRNA sense strand
aaaguuggacauccugaaa

SEQ ID NO: 728539 - RNA, 19 nt, Homo sapiens
  misc_RNA (1)...(19): siRNA sense strand
gcucaaauuucugccuaca

SEQ ID NO: 728540 - RNA, 19 nt, Homo sapiens
  misc_RNA (1)...(19): siRNA sense strand
uagacuggauuugcugauu

SEQ ID NO: 728541 - RNA, 19 nt, Homo sapiens
  misc_RNA (1)...(19): siRNA sense strand
ggacuacauuccgcaaagg

SEQ ID NO: 728542 - RNA, 19 nt, Homo sapiens
  misc_RNA (1)...(19): siRNA sense strand
uaucagauuucagaagaag

SEQ ID NO: 728543 - RNA, 19 nt, Homo sapiens
  misc_RNA (1)...(19): siRNA sense strand
uuaauagacuggauuugcu

SEQ ID NO: 728544 - RNA, 19 nt, Homo sapiens
  misc_RNA (1)...(19): siRNA sense strand
gggauacugucugaucauc

SEQ ID NO: 728545 - RNA, 19 nt, Homo sapiens
  misc_RNA (1)...(19): siRNA sense strand
aagagucugugcccaaauc

SEQ ID NO: 728546 - RNA, 19 nt, Homo sapiens
  misc_RNA (1)...(19): siRNA sense strand
caagagccugcugaagaua

SEQ ID NO: 728547 - RNA, 19 nt, Homo sapiens
  misc_RNA (1)...(19): siRNA sense strand
cuagaaaggaggagaugga

SEQ ID NO: 728548 - RNA, 19 nt, Homo sapiens
  misc_RNA (1)...(19): siRNA sense strand
ggagauggaaagggaacuu

SEQ ID NO: 728549 - RNA, 19 nt, Homo sapiens
  misc_RNA (1)...(19): siRNA sense strand
aggaugccuugauguuauu

SEQ ID NO: 728550 - RNA, 19 nt, Homo sapiens
  misc_RNA (1)...(19): siRNA sense strand
ucaacgacuaugaagaauu

SEQ ID NO: 728551 - RNA, 19 nt, Homo sapiens
  misc_RNA (1)...(19): siRNA sense strand
gaauguuggaggaaagcaa

SEQ ID NO: 728552 - RNA, 19 nt, Homo sapiens
  misc_RNA (1)...(19): siRNA sense strand
gagaaggaaaguuggacau

SEQ ID NO: 728553 - RNA, 19 nt, Homo sapiens
  misc_RNA (1)...(19): siRNA sense strand
gaagaagugagcagaucag

SEQ ID NO: 728554 - RNA, 19 nt, Homo sapiens
  misc_RNA (1)...(19): siRNA sense strand
gacuggauuugcugauuac

SEQ ID NO: 728555 - RNA, 19 nt, Homo sapiens
  misc_RNA (1)...(19): siRNA sense strand
agcaagaacccaucaagga

SEQ ID NO: 728556 - RNA, 19 nt, Homo sapiens
  misc_RNA (1)...(19): siRNA sense strand
caacaagagccugcugaag

SEQ ID NO: 728557 - RNA, 19 nt, Homo sapiens
  misc_RNA (1)...(19): siRNA sense strand
ucagcagaaaucuuuauga

SEQ ID NO: 728558 - RNA, 19 nt, Homo sapiens
  misc_RNA (1)...(19): siRNA sense strand
cugcucuuccgaauuaaua

SEQ ID NO: 728559 - RNA, 19 nt, Homo sapiens
  misc_RNA (1)...(19): siRNA sense strand
ggaagcaagaacccaucaa

SEQ ID NO: 728560 - RNA, 19 nt, Homo sapiens
  misc_RNA (1)...(19): siRNA sense strand
ucagauuucagaagaagug

SEQ ID NO: 728561 - RNA, 19 nt, Homo sapiens
  misc_RNA (1)...(19): siRNA sense strand
gcugauuaccuaccuaaac

SEQ ID NO: 728562 - RNA, 19 nt, Homo sapiens
  misc_RNA (1)...(19): siRNA sense strand
cccaaacuucacagcauua

SEQ ID NO: 728563 - RNA, 19 nt, Homo sapiens
  misc_RNA (1)...(19): siRNA sense strand
ucaacaagagccugcugaa

SEQ ID NO: 728564 - RNA, 19 nt, Homo sapiens
  misc_RNA (1)...(19): siRNA sense strand
ccugggagaaggaaaguug

SEQ ID NO: 728565 - RNA, 19 nt, Homo sapiens
  misc_RNA (1)...(19): siRNA sense strand
ugaaccugcuggauauuuu

SEQ ID NO: 728566 - RNA, 19 nt, Homo sapiens
  misc_RNA (1)...(19): siRNA sense strand
gcaaucuguccuuccugaa

SEQ ID NO: 728567 - RNA, 19 nt, Homo sapiens
  misc_RNA (1)...(19): siRNA sense strand
agagaauguuggaggaaag

SEQ ID NO: 728568 - RNA, 19 nt, Homo sapiens
  misc_RNA (1)...(19): siRNA sense strand
gcaaacuggaugaugacau

SEQ ID NO: 728569 - RNA, 19 nt, Homo sapiens
  misc_RNA (1)...(19): siRNA sense strand
aaagcaaucuguccuuccu

SEQ ID NO: 728570 - RNA, 19 nt, Homo sapiens
  misc_RNA (1)...(19): siRNA sense strand
cuaucagauuucagaagaa

SEQ ID NO: 728571 - RNA, 19 nt, Homo sapiens
  misc_RNA (1)...(19): siRNA sense strand
gggucaugcucuaucagau

SEQ ID NO: 728572 - RNA, 19 nt, Homo sapiens
  misc_RNA (1)...(19): siRNA sense strand
aaaagagucugugcccaaa

SEQ ID NO: 728573 - RNA, 19 nt, Homo sapiens
  misc_RNA (1)...(19): siRNA sense strand
caaaagcacgggagaaagu

SEQ ID NO: 728574 - RNA, 19 nt, Homo sapiens
  misc_RNA (1)...(19): siRNA sense strand
gugcccaaaucaacaagag

SEQ ID NO: 728575 - RNA, 19 nt, Homo sapiens
  misc_RNA (1)...(19): siRNA sense strand
uggacuacauuccgcaaag

SEQ ID NO: 728576 - RNA, 19 nt, Homo sapiens
  misc_RNA (1)...(19): siRNA sense strand
uaaucaacgacuaugaaga

SEQ ID NO: 728577 - RNA, 19 nt, Homo sapiens
  misc_RNA (1)...(19): siRNA sense strand
agagccugcugaagauaau

SEQ ID NO: 728578 - RNA, 19 nt, Homo sapiens
  misc_RNA (1)...(19): siRNA sense strand
aagagccugcugaagauaa

SEQ ID NO: 728579 - RNA, 19 nt, Homo sapiens
  misc_RNA (1)...(19): siRNA sense strand
gcucuuccgaauuaauaga

SEQ ID NO: 728580 - RNA, 19 nt, Homo sapiens
  misc_RNA (1)...(19): siRNA sense strand
ccgaauuaauagacuggau

SEQ ID NO: 728581 - RNA, 19 nt, Homo sapiens
  misc_RNA (1)...(19): siRNA sense strand
ggacaaaguuuaccaaaug

SEQ ID NO: 728582 - RNA, 19 nt, Homo sapiens
  misc_RNA (1)...(19): siRNA sense strand
caacgacuaugaagaauuc

SEQ ID NO: 728583 - RNA, 19 nt, Homo sapiens
  misc_RNA (1)...(19): siRNA sense strand
gaucagaauugaggucuuu

SEQ ID NO: 728584 - RNA, 19 nt, Homo sapiens
  misc_RNA (1)...(19): siRNA sense strand
gaagugagcagaucagaau

SEQ ID NO: 728585 - RNA, 19 nt, Homo sapiens
  misc_RNA (1)...(19): siRNA sense strand
gaggaaaucuccaaaugca

SEQ ID NO: 728586 - RNA, 19 nt, Homo sapiens
  misc_RNA (1)...(19): siRNA sense strand
ggaaaucuccaaaugcaaa

SEQ ID NO: 728587 - RNA, 19 nt, Homo sapiens
  misc_RNA (1)...(19): siRNA sense strand
caaacuggaugaugacaug

SEQ ID NO: 728588 - RNA, 19 nt, Homo sapiens
  misc_RNA (1)...(19): siRNA sense strand
agacuggauuugcugauua

SEQ ID NO: 728589 - RNA, 19 nt, Homo sapiens
  misc_RNA (1)...(19): siRNA sense strand
gacaugaaccugcuggaua

SEQ ID NO: 728590 - RNA, 19 nt, Homo sapiens
  misc_RNA (1)...(19): siRNA sense strand
gaagauaaucaacgacuau

SEQ ID NO: 728591 - RNA, 19 nt, Homo sapiens
  misc_RNA (1)...(19): siRNA sense strand
gacaaaguuuaccaaauga

SEQ ID NO: 728592 - RNA, 19 nt, Homo sapiens
  misc_RNA (1)...(19): siRNA sense strand
cagcagaaaucuuuaugau

SEQ ID NO: 728593 - RNA, 19 nt, Homo sapiens
  misc_RNA (1)...(19): siRNA sense strand
gaaaggaggagauggaaag

SEQ ID NO: 728594 - RNA, 19 nt, Homo sapiens
  misc_RNA (1)...(19): siRNA sense strand
gauaaucaacgacuaugaa

SEQ ID NO: 728595 - RNA, 19 nt, Homo sapiens
  misc_RNA (1)...(19): siRNA sense strand
gaucuggccucccucaagu

SEQ ID NO: 728596 - RNA, 19 nt, Homo sapiens
  misc_RNA (1)...(19): siRNA sense strand
gaauugaggucuuuuaagu

SEQ ID NO: 728597 - RNA, 19 nt, Homo sapiens
  misc_RNA (1)...(19): siRNA sense strand
aagaggaaaucuccaaaug

SEQ ID NO: 728598 - RNA, 19 nt, Homo sapiens
  misc_RNA (1)...(19): siRNA sense strand
gcaagaacccaucaaggau

SEQ ID NO: 728599 - RNA, 19 nt, Homo sapiens
  misc_RNA (1)...(19): siRNA sense strand
ggaaagggaacuucagaca

SEQ ID NO: 728600 - RNA, 19 nt, Homo sapiens
  misc_RNA (1)...(19): siRNA sense strand
gcccaaacuucacagcauu

SEQ ID NO: 728601 - RNA, 19 nt, Homo sapiens
  misc_RNA (1)...(19): siRNA sense strand
acaugaaccugcuggauau

SEQ ID NO: 728602 - RNA, 19 nt, Homo sapiens
  misc_RNA (1)...(19): siRNA sense strand
gucaugcucuaucagauuu

SEQ ID NO: 728603 - RNA, 19 nt, Homo sapiens
  misc_RNA (1)...(19): siRNA sense strand
ucauagagauggagaagag

SEQ ID NO: 728604 - RNA, 19 nt, Homo sapiens
  misc_RNA (1)...(19): siRNA sense strand
ucuaucagauuucagaaga

SEQ ID NO: 728605 - RNA, 19 nt, Homo sapiens
  misc_RNA (1)...(19): siRNA sense strand
ugaagauaaucaacgacua

SEQ ID NO: 728606 - RNA, 19 nt, Homo sapiens
  misc_RNA (1)...(19): siRNA sense strand
acaagagccugcugaagau

SEQ ID NO: 728607 - RNA, 19 nt, Homo sapiens
  misc_RNA (1)...(19): siRNA sense strand
aaugcaaacuggaugauga

SEQ ID NO: 728608 - RNA, 19 nt, Homo sapiens
  misc_RNA (1)...(19): siRNA sense strand
uggauuugcugauuaccua

SEQ ID NO: 728609 - RNA, 19 nt, Homo sapiens
  misc_RNA (1)...(19): siRNA sense strand
gugagcagaucagaauuga

SEQ ID NO: 728610 - RNA, 19 nt, Homo sapiens
  misc_RNA (1)...(19): siRNA sense strand
gggagaaagugcccaaacu

SEQ ID NO: 728611 - RNA, 19 nt, Homo sapiens
  misc_RNA (1)...(19): siRNA sense strand
aaucaacgacuaugaagaa

SEQ ID NO: 728612 - RNA, 19 nt, Homo sapiens
  misc_RNA (1)...(19): siRNA sense strand
ccaggcagggcucaaauuu

SEQ ID NO: 728613 - RNA, 19 nt, Homo sapiens
  misc_RNA (1)...(19): siRNA sense strand
gcaagaggaaaucuccaaa

SEQ ID NO: 728614 - RNA, 19 nt, Homo sapiens
  misc_RNA (1)...(19): siRNA sense strand
gaaaguuggacauccugaa

SEQ ID NO: 728615 - RNA, 19 nt, Homo sapiens
  misc_RNA (1)...(19): siRNA sense strand
gaucaucaacaaucacaau

SEQ ID NO: 728616 - RNA, 19 nt, Homo sapiens
  misc_RNA (1)...(19): siRNA sense strand
gacuucagcagaaaucuuu

SEQ ID NO: 728617 - RNA, 19 nt, Homo sapiens
  misc_RNA (1)...(19): siRNA sense strand
cagaagaagugagcagauc

SEQ ID NO: 728618 - RNA, 19 nt, Homo sapiens
  misc_RNA (1)...(19): siRNA sense strand
aacaagagccugcugaaga

SEQ ID NO: 728619 - RNA, 19 nt, Homo sapiens
  misc_RNA (1)...(19): siRNA sense strand
cugauuaccuaccuaaaca

SEQ ID NO: 728620 - RNA, 19 nt, Homo sapiens
  misc_RNA (1)...(19): siRNA sense strand
gaagcaagaacccaucaag

SEQ ID NO: 728621 - RNA, 19 nt, Homo sapiens
  misc_RNA (1)...(19): siRNA sense strand
ggucaugcucuaucagauu

SEQ ID NO: 728622 - RNA, 19 nt, Homo sapiens
  misc_RNA (1)...(19): siRNA sense strand
uuaccuaccuaaacacuag

SEQ ID NO: 728623 - RNA, 19 nt, Homo sapiens
  misc_RNA (1)...(19): siRNA sense strand
aggcagggcucaaauuucu

SEQ ID NO: 728624 - RNA, 19 nt, Homo sapiens
  misc_RNA (1)...(19): siRNA sense strand
cgaauuaauagacuggauu

SEQ ID NO: 728625 - RNA, 19 nt, Homo sapiens
  misc_RNA (1)...(19): siRNA sense strand
caagaggaaaucuccaaau

SEQ ID NO: 728626 - RNA, 19 nt, Homo sapiens
  misc_RNA (1)...(19): siRNA sense strand
ccaaaugcaaacuggauga

SEQ ID NO: 728627 - RNA, 19 nt, Homo sapiens
  misc_RNA (1)...(19): siRNA sense strand
ggacuucagcagaaaucuu

SEQ ID NO: 728628 - RNA, 19 nt, Homo sapiens
  misc_RNA (1)...(19): siRNA sense strand
aagagaauguuggaggaaa

SEQ ID NO: 728629 - RNA, 19 nt, Homo sapiens
  misc_RNA (1)...(19): siRNA sense strand
uggacaaaguuuaccaaau

SEQ ID NO: 728630 - RNA, 19 nt, Homo sapiens
  misc_RNA (1)...(19): siRNA sense strand
aaaguuggacauccugaaa

SEQ ID NO: 728631 - RNA, 19 nt, Homo sapiens
  misc_RNA (1)...(19): siRNA sense strand
gcucaaauuucugccuaca

SEQ ID NO: 728632 - RNA, 19 nt, Homo sapiens
  misc_RNA (1)...(19): siRNA sense strand
uagacuggauuugcugauu

SEQ ID NO: 728633 - RNA, 19 nt, Homo sapiens
  misc_RNA (1)...(19): siRNA sense strand
ggacuacauuccgcaaagg

SEQ ID NO: 728634 - RNA, 19 nt, Homo sapiens
  misc_RNA (1)...(19): siRNA sense strand
uaucagauuucagaagaag

SEQ ID NO: 728635 - RNA, 19 nt, Homo sapiens
  misc_RNA (1)...(19): siRNA sense strand
uuaauagacuggauuugcu

SEQ ID NO: 728636 - RNA, 19 nt, Homo sapiens
  misc_RNA (1)...(19): siRNA sense strand
gggauacugucugaucauc

SEQ ID NO: 728637 - RNA, 19 nt, Homo sapiens
  misc_RNA (1)...(19): siRNA sense strand
aagagucugugcccaaauc

SEQ ID NO: 728638 - RNA, 19 nt, Homo sapiens
  misc_RNA (1)...(19): siRNA sense strand
caagagccugcugaagaua

SEQ ID NO: 728639 - RNA, 19 nt, Homo sapiens
  misc_RNA (1)...(19): siRNA sense strand
cuagaaaggaggagaugga

SEQ ID NO: 728640 - RNA, 19 nt, Homo sapiens
  misc_RNA (1)...(19): siRNA sense strand
ggagauggaaagggaacuu

SEQ ID NO: 728641 - RNA, 19 nt, Homo sapiens
  misc_RNA (1)...(19): siRNA sense strand
ucaacgacuaugaagaauu

SEQ ID NO: 728642 - RNA, 19 nt, Homo sapiens
  misc_RNA (1)...(19): siRNA sense strand
gaauguuggaggaaagcaa

SEQ ID NO: 728643 - RNA, 19 nt, Homo sapiens
  misc_RNA (1)...(19): siRNA sense strand
aggaugccuugauguuauu

SEQ ID NO: 728644 - RNA, 19 nt, Homo sapiens
  misc_RNA (1)...(19): siRNA sense strand
gagaaggaaaguuggacau

SEQ ID NO: 728645 - RNA, 19 nt, Homo sapiens
  misc_RNA (1)...(19): siRNA sense strand
gaagaagugagcagaucag

SEQ ID NO: 728646 - RNA, 19 nt, Homo sapiens
  misc_RNA (1)...(19): siRNA sense strand
gacuggauuugcugauuac

SEQ ID NO: 728647 - RNA, 19 nt, Homo sapiens
  misc_RNA (1)...(19): siRNA sense strand
caacaagagccugcugaag

SEQ ID NO: 728648 - RNA, 19 nt, Homo sapiens
  misc_RNA (1)...(19): siRNA sense strand
agcaagaacccaucaagga

SEQ ID NO: 728649 - RNA, 19 nt, Homo sapiens
  misc_RNA (1)...(19): siRNA sense strand
ucagcagaaaucuuuauga

SEQ ID NO: 728650 - RNA, 19 nt, Homo sapiens
  misc_RNA (1)...(19): siRNA sense strand
ucagauuucagaagaagug

SEQ ID NO: 728651 - RNA, 19 nt, Homo sapiens
  misc_RNA (1)...(19): siRNA sense strand
ggaagcaagaacccaucaa

SEQ ID NO: 728652 - RNA, 19 nt, Homo sapiens
  misc_RNA (1)...(19): siRNA sense strand
cugcucuuccgaauuaaua

SEQ ID NO: 728653 - RNA, 19 nt, Homo sapiens
  misc_RNA (1)...(19): siRNA sense strand
gcugauuaccuaccuaaac

SEQ ID NO: 728654 - RNA, 19 nt, Homo sapiens
  misc_RNA (1)...(19): siRNA sense strand
cccaaacuucacagcauua

SEQ ID NO: 728655 - RNA, 19 nt, Homo sapiens
  misc_RNA (1)...(19): siRNA sense strand
ucaacaagagccugcugaa

SEQ ID NO: 728656 - RNA, 19 nt, Homo sapiens
  misc_RNA (1)...(19): siRNA sense strand
ccugggagaaggaaaguug

SEQ ID NO: 728657 - RNA, 19 nt, Homo sapiens
  misc_RNA (1)...(19): siRNA sense strand
ugaaccugcuggauauuuu

SEQ ID NO: 728658 - RNA, 19 nt, Homo sapiens
  misc_RNA (1)...(19): siRNA sense strand
cuaucagauuucagaagaa

SEQ ID NO: 728659 - RNA, 19 nt, Homo sapiens
  misc_RNA (1)...(19): siRNA sense strand
aaagcaaucuguccuuccu

SEQ ID NO: 728660 - RNA, 19 nt, Homo sapiens
  misc_RNA (1)...(19): siRNA sense strand
agagaauguuggaggaaag

SEQ ID NO: 728661 - RNA, 19 nt, Homo sapiens
  misc_RNA (1)...(19): siRNA sense strand
gcaaucuguccuuccugaa

SEQ ID NO: 728662 - RNA, 19 nt, Homo sapiens
  misc_RNA (1)...(19): siRNA sense strand
gcaaacuggaugaugacau

SEQ ID NO: 728663 - RNA, 19 nt, Homo sapiens
  misc_RNA (1)...(19): siRNA sense strand
gggucaugcucuaucagau

SEQ ID NO: 728664 - RNA, 19 nt, Homo sapiens
  misc_RNA (1)...(19): siRNA sense strand
aaaagagucugugcccaaa

SEQ ID NO: 728665 - RNA, 19 nt, Homo sapiens
  misc_RNA (1)...(19): siRNA sense strand
caaaagcacgggagaaagu

SEQ ID NO: 728666 - RNA, 19 nt, Homo sapiens
  misc_RNA (1)...(19): siRNA sense strand
gugcccaaaucaacaagag

SEQ ID NO: 728667 - RNA, 19 nt, Homo sapiens
  misc_RNA (1)...(19): siRNA sense strand
uggacuacauuccgcaaag

SEQ ID NO: 728668 - RNA, 19 nt, Homo sapiens
  misc_RNA (1)...(19): siRNA sense strand
uaaucaacgacuaugaaga

SEQ ID NO: 728669 - RNA, 19 nt, Homo sapiens
  misc_RNA (1)...(19): siRNA sense strand
agagccugcugaagauaau

SEQ ID NO: 728670 - RNA, 19 nt, Homo sapiens
  misc_RNA (1)...(19): siRNA sense strand
aagagccugcugaagauaa

SEQ ID NO: 728671 - RNA, 19 nt, Homo sapiens
  misc_RNA (1)...(19): siRNA sense strand
gcucuuccgaauuaauaga

SEQ ID NO: 728672 - RNA, 19 nt, Homo sapiens
  misc_RNA (1)...(19): siRNA sense strand
ccgaauuaauagacuggau

SEQ ID NO: 728673 - RNA, 19 nt, Homo sapiens
  misc_RNA (1)...(19): siRNA sense strand
ggacaaaguuuaccaaaug

SEQ ID NO: 728674 - RNA, 19 nt, Homo sapiens
  misc_RNA (1)...(19): siRNA sense strand
caacgacuaugaagaauuc

SEQ ID NO: 728675 - RNA, 19 nt, Homo sapiens
  misc_RNA (1)...(19): siRNA sense strand
gaucagaauugaggucuuu

SEQ ID NO: 728676 - RNA, 19 nt, Homo sapiens
  misc_RNA (1)...(19): siRNA sense strand
gaagugagcagaucagaau

SEQ ID NO: 728677 - RNA, 19 nt, Homo sapiens
  misc_RNA (1)...(19): siRNA sense strand
gaggaaaucuccaaaugca

SEQ ID NO: 728678 - RNA, 19 nt, Homo sapiens
  misc_RNA (1)...(19): siRNA sense strand
ggaaaucuccaaaugcaaa

SEQ ID NO: 728679 - RNA, 19 nt, Homo sapiens
  misc_RNA (1)...(19): siRNA sense strand
caaacuggaugaugacaug

SEQ ID NO: 728680 - RNA, 19 nt, Homo sapiens
  misc_RNA (1)...(19): siRNA sense strand
agacuggauuugcugauua

SEQ ID NO: 728681 - RNA, 19 nt, Homo sapiens
  misc_RNA (1)...(19): siRNA sense strand
gacaugaaccugcuggaua

SEQ ID NO: 728682 - RNA, 19 nt, Homo sapiens
  misc_RNA (1)...(19): siRNA sense strand
gaagauaaucaacgacuau

SEQ ID NO: 728683 - RNA, 19 nt, Homo sapiens
  misc_RNA (1)...(19): siRNA sense strand
gacaaaguuuaccaaauga

SEQ ID NO: 728684 - RNA, 19 nt, Homo sapiens
  misc_RNA (1)...(19): siRNA sense strand
cagcagaaaucuuuaugau

SEQ ID NO: 728685 - RNA, 19 nt, Homo sapiens
  misc_RNA (1)...(19): siRNA sense strand
gaaaggaggagauggaaag

SEQ ID NO: 728686 - RNA, 19 nt, Homo sapiens
  misc_RNA (1)...(19): siRNA sense strand
gauaaucaacgacuaugaa

SEQ ID NO: 728687 - RNA, 19 nt, Homo sapiens
  misc_RNA (1)...(19): siRNA sense strand
gaucuggccucccucaagu

SEQ ID NO: 728688 - RNA, 19 nt, Homo sapiens
  misc_RNA (1)...(19): siRNA sense strand
gaauugaggucuuuuaagu

SEQ ID NO: 728689 - RNA, 19 nt, Homo sapiens
  misc_RNA (1)...(19): siRNA sense strand
aagaggaaaucuccaaaug

SEQ ID NO: 728690 - RNA, 19 nt, Homo sapiens
  misc_RNA (1)...(19): siRNA sense strand
gcaagaacccaucaaggau

SEQ ID NO: 728691 - RNA, 19 nt, Homo sapiens
  misc_RNA (1)...(19): siRNA sense strand
ggaaagggaacuucagaca

SEQ ID NO: 728692 - RNA, 19 nt, Homo sapiens
  misc_RNA (1)...(19): siRNA sense strand
gcccaaacuucacagcauu

SEQ ID NO: 728693 - RNA, 19 nt, Homo sapiens
  misc_RNA (1)...(19): siRNA sense strand
acaugaaccugcuggauau

SEQ ID NO: 728694 - RNA, 19 nt, Homo sapiens
  misc_RNA (1)...(19): siRNA sense strand
gucaugcucuaucagauuu

SEQ ID NO: 728695 - RNA, 19 nt, Homo sapiens
  misc_RNA (1)...(19): siRNA sense strand
ucauagagauggagaagag

SEQ ID NO: 728696 - RNA, 19 nt, Homo sapiens
  misc_RNA (1)...(19): siRNA sense strand
ucuaucagauuucagaaga

SEQ ID NO: 728697 - RNA, 19 nt, Homo sapiens
  misc_RNA (1)...(19): siRNA sense strand
ugaagauaaucaacgacua

SEQ ID NO: 728698 - RNA, 19 nt, Homo sapiens
  misc_RNA (1)...(19): siRNA sense strand
acaagagccugcugaagau

SEQ ID NO: 728699 - RNA, 19 nt, Homo sapiens
  misc_RNA (1)...(19): siRNA sense strand
aaugcaaacuggaugauga

SEQ ID NO: 728700 - RNA, 19 nt, Homo sapiens
  misc_RNA (1)...(19): siRNA sense strand
uggauuugcugauuaccua

SEQ ID NO: 728701 - RNA, 19 nt, Homo sapiens
  misc_RNA (1)...(19): siRNA sense strand
gugagcagaucagaauuga

SEQ ID NO: 728702 - RNA, 19 nt, Homo sapiens
  misc_RNA (1)...(19): siRNA sense strand
gaauggaacacacuuggau

SEQ ID NO: 728703 - RNA, 19 nt, Homo sapiens
  misc_RNA (1)...(19): siRNA sense strand
gggagaaagugcccaaacu

SEQ ID NO: 728704 - RNA, 19 nt, Homo sapiens
  misc_RNA (1)...(19): siRNA sense strand
aaucaacgacuaugaagaa

SEQ ID NO: 728705 - RNA, 19 nt, Homo sapiens
  misc_RNA (1)...(19): siRNA sense strand
ccaggcagggcucaaauuu

SEQ ID NO: 728706 - RNA, 19 nt, Homo sapiens
  misc_RNA (1)...(19): siRNA sense strand
gcaagaggaaaucuccaaa

SEQ ID NO: 728707 - RNA, 19 nt, Homo sapiens
  misc_RNA (1)...(19): siRNA sense strand
gaaaguuggacauccugaa

SEQ ID NO: 728708 - RNA, 19 nt, Homo sapiens
  misc_RNA (1)...(19): siRNA sense strand
gaucaucaacaaucacaau

SEQ ID NO: 728709 - RNA, 19 nt, Homo sapiens
  misc_RNA (1)...(19): siRNA sense strand
gacuucagcagaaaucuuu

SEQ ID NO: 728710 - RNA, 19 nt, Homo sapiens
  misc_RNA (1)...(19): siRNA sense strand
cagaagaagugagcagauc

SEQ ID NO: 728711 - RNA, 19 nt, Homo sapiens
  misc_RNA (1)...(19): siRNA sense strand
aacaagagccugcugaaga

SEQ ID NO: 728712 - RNA, 19 nt, Homo sapiens
  misc_RNA (1)...(19): siRNA sense strand
cugauuaccuaccuaaaca

SEQ ID NO: 728713 - RNA, 19 nt, Homo sapiens
  misc_RNA (1)...(19): siRNA sense strand
ggucaugcucuaucagauu

SEQ ID NO: 728714 - RNA, 19 nt, Homo sapiens
  misc_RNA (1)...(19): siRNA sense strand
gaagcaagaacccaucaag

SEQ ID NO: 728715 - RNA, 19 nt, Homo sapiens
  misc_RNA (1)...(19): siRNA sense strand
uuaccuaccuaaacacuag

SEQ ID NO: 728716 - RNA, 19 nt, Homo sapiens
  misc_RNA (1)...(19): siRNA sense strand
aggcagggcucaaauuucu

SEQ ID NO: 728717 - RNA, 19 nt, Homo sapiens
  misc_RNA (1)...(19): siRNA sense strand
cgaauuaauagacuggauu

SEQ ID NO: 728718 - RNA, 19 nt, Homo sapiens
  misc_RNA (1)...(19): siRNA sense strand
caagaggaaaucuccaaau

SEQ ID NO: 728719 - RNA, 19 nt, Homo sapiens
  misc_RNA (1)...(19): siRNA sense strand
ccaaaugcaaacuggauga

SEQ ID NO: 728720 - RNA, 19 nt, Homo sapiens
  misc_RNA (1)...(19): siRNA sense strand
ggacuucagcagaaaucuu

SEQ ID NO: 728721 - RNA, 19 nt, Homo sapiens
  misc_RNA (1)...(19): siRNA sense strand
aagagaauguuggaggaaa

SEQ ID NO: 728722 - RNA, 19 nt, Homo sapiens
  misc_RNA (1)...(19): siRNA sense strand
ggaauggaacacacuugga

SEQ ID NO: 728723 - RNA, 19 nt, Homo sapiens
  misc_RNA (1)...(19): siRNA sense strand
uggacaaaguuuaccaaau

SEQ ID NO: 728724 - RNA, 19 nt, Homo sapiens
  misc_RNA (1)...(19): siRNA sense strand
aaaguuggacauccugaaa

SEQ ID NO: 728725 - RNA, 19 nt, Homo sapiens
  misc_RNA (1)...(19): siRNA sense strand
gcucaaauuucugccuaca

SEQ ID NO: 728726 - RNA, 19 nt, Homo sapiens
  misc_RNA (1)...(19): siRNA sense strand
uagacuggauuugcugauu

SEQ ID NO: 728727 - RNA, 19 nt, Homo sapiens
  misc_RNA (1)...(19): siRNA sense strand
ggacuacauuccgcaaagg

SEQ ID NO: 728728 - RNA, 19 nt, Homo sapiens
  misc_RNA (1)...(19): siRNA sense strand
uaucagauuucagaagaag

SEQ ID NO: 728729 - RNA, 19 nt, Homo sapiens
  misc_RNA (1)...(19): siRNA sense strand
uuaauagacuggauuugcu

SEQ ID NO: 728730 - RNA, 19 nt, Homo sapiens
  misc_RNA (1)...(19): siRNA sense strand
gggauacugucugaucauc

SEQ ID NO: 728731 - RNA, 19 nt, Homo sapiens
  misc_RNA (1)...(19): siRNA sense strand
aagagucugugcccaaauc

SEQ ID NO: 728732 - RNA, 19 nt, Homo sapiens
  misc_RNA (1)...(19): siRNA sense strand
caagagccugcugaagaua

SEQ ID NO: 728733 - RNA, 19 nt, Homo sapiens
  misc_RNA (1)...(19): siRNA sense strand
cuagaaaggaggagaugga

SEQ ID NO: 728734 - RNA, 19 nt, Homo sapiens
  misc_RNA (1)...(19): siRNA sense strand
ggagauggaaagggaacuu

SEQ ID NO: 728735 - RNA, 19 nt, Homo sapiens
  misc_RNA (1)...(19): siRNA sense strand
aggaugccuugauguuauu

SEQ ID NO: 728736 - RNA, 19 nt, Homo sapiens
  misc_RNA (1)...(19): siRNA sense strand
ucaacgacuaugaagaauu

SEQ ID NO: 728737 - RNA, 19 nt, Homo sapiens
  misc_RNA (1)...(19): siRNA sense strand
gaauguuggaggaaagcaa

SEQ ID NO: 728738 - RNA, 19 nt, Homo sapiens
  misc_RNA (1)...(19): siRNA sense strand
gagaaggaaaguuggacau

SEQ ID NO: 728739 - RNA, 19 nt, Homo sapiens
  misc_RNA (1)...(19): siRNA sense strand
gaagaagugagcagaucag

SEQ ID NO: 728740 - RNA, 19 nt, Homo sapiens
  misc_RNA (1)...(19): siRNA sense strand
gacuggauuugcugauuac

SEQ ID NO: 728741 - RNA, 19 nt, Homo sapiens
  misc_RNA (1)...(19): siRNA sense strand
agcaagaacccaucaagga

SEQ ID NO: 728742 - RNA, 19 nt, Homo sapiens
  misc_RNA (1)...(19): siRNA sense strand
caacaagagccugcugaag

SEQ ID NO: 728743 - RNA, 19 nt, Homo sapiens
  misc_RNA (1)...(19): siRNA sense strand
ucagcagaaaucuuuauga

SEQ ID NO: 728744 - RNA, 19 nt, Homo sapiens
  misc_RNA (1)...(19): siRNA sense strand
cugcucuuccgaauuaaua

SEQ ID NO: 728745 - RNA, 19 nt, Homo sapiens
  misc_RNA (1)...(19): siRNA sense strand
ggaagcaagaacccaucaa

SEQ ID NO: 728746 - RNA, 19 nt, Homo sapiens
  misc_RNA (1)...(19): siRNA sense strand
ucagauuucagaagaagug

SEQ ID NO: 728747 - RNA, 19 nt, Homo sapiens
  misc_RNA (1)...(19): siRNA sense strand
gcugauuaccuaccuaaac

SEQ ID NO: 728748 - RNA, 19 nt, Homo sapiens
  misc_RNA (1)...(19): siRNA sense strand
cccaaacuucacagcauua

SEQ ID NO: 728749 - RNA, 19 nt, Homo sapiens
  misc_RNA (1)...(19): siRNA sense strand
ucaacaagagccugcugaa

SEQ ID NO: 728750 - RNA, 19 nt, Homo sapiens
  misc_RNA (1)...(19): siRNA sense strand
ccugggagaaggaaaguug

SEQ ID NO: 728751 - RNA, 19 nt, Homo sapiens
  misc_RNA (1)...(19): siRNA sense strand
ugaaccugcuggauauuuu

SEQ ID NO: 728752 - RNA, 19 nt, Homo sapiens
  misc_RNA (1)...(19): siRNA sense strand
gcaaucuguccuuccugaa

SEQ ID NO: 728753 - RNA, 19 nt, Homo sapiens
  misc_RNA (1)...(19): siRNA sense strand
agagaauguuggaggaaag

SEQ ID NO: 728754 - RNA, 19 nt, Homo sapiens
  misc_RNA (1)...(19): siRNA sense strand
gcaaacuggaugaugacau

SEQ ID NO: 728755 - RNA, 19 nt, Homo sapiens
  misc_RNA (1)...(19): siRNA sense strand
aaagcaaucuguccuuccu

SEQ ID NO: 728756 - RNA, 19 nt, Homo sapiens
  misc_RNA (1)...(19): siRNA sense strand
cuaucagauuucagaagaa

SEQ ID NO: 728757 - RNA, 19 nt, Homo sapiens
  misc_RNA (1)...(19): siRNA sense strand
gggucaugcucuaucagau

SEQ ID NO: 728758 - RNA, 19 nt, Homo sapiens
  misc_RNA (1)...(19): siRNA sense strand
aaaagagucugugcccaaa

SEQ ID NO: 728759 - RNA, 19 nt, Homo sapiens
  misc_RNA (1)...(19): siRNA sense strand
caaaagcacgggagaaagu

SEQ ID NO: 728760 - RNA, 19 nt, Homo sapiens
  misc_RNA (1)...(19): siRNA sense strand
gugcccaaaucaacaagag

SEQ ID NO: 728761 - RNA, 19 nt, Homo sapiens
  misc_RNA (1)...(19): siRNA sense strand
uggacuacauuccgcaaag

SEQ ID NO: 728762 - RNA, 19 nt, Homo sapiens
  misc_RNA (1)...(19): siRNA sense strand
uaaucaacgacuaugaaga

SEQ ID NO: 728763 - RNA, 19 nt, Homo sapiens
  misc_RNA (1)...(19): siRNA sense strand
agagccugcugaagauaau

SEQ ID NO: 728764 - RNA, 19 nt, Homo sapiens
  misc_RNA (1)...(19): siRNA sense strand
aagagccugcugaagauaa

SEQ ID NO: 728765 - RNA, 19 nt, Homo sapiens
  misc_RNA (1)...(19): siRNA sense strand
gcucuuccgaauuaauaga

SEQ ID NO: 728766 - RNA, 19 nt, Homo sapiens
  misc_RNA (1)...(19): siRNA sense strand
ccgaauuaauagacuggau

SEQ ID NO: 728767 - RNA, 19 nt, Homo sapiens
  misc_RNA (1)...(19): siRNA sense strand
ggacaaaguuuaccaaaug

SEQ ID NO: 728768 - RNA, 19 nt, Homo sapiens
  misc_RNA (1)...(19): siRNA sense strand
caacgacuaugaagaauuc

SEQ ID NO: 728769 - RNA, 19 nt, Homo sapiens
  misc_RNA (1)...(19): siRNA sense strand
gaucagaauugaggucuuu

SEQ ID NO: 728770 - RNA, 19 nt, Homo sapiens
  misc_RNA (1)...(19): siRNA sense strand
gaagugagcagaucagaau

SEQ ID NO: 728771 - RNA, 19 nt, Homo sapiens
  misc_RNA (1)...(19): siRNA sense strand
gaggaaaucuccaaaugca

SEQ ID NO: 728772 - RNA, 19 nt, Homo sapiens
  misc_RNA (1)...(19): siRNA sense strand
ggaaaucuccaaaugcaaa

SEQ ID NO: 728773 - RNA, 19 nt, Homo sapiens
  misc_RNA (1)...(19): siRNA sense strand
caaacuggaugaugacaug

SEQ ID NO: 728774 - RNA, 19 nt, Homo sapiens
  misc_RNA (1)...(19): siRNA sense strand
agacuggauuugcugauua

SEQ ID NO: 728775 - RNA, 19 nt, Homo sapiens
  misc_RNA (1)...(19): siRNA sense strand
gacaugaaccugcuggaua

SEQ ID NO: 728776 - RNA, 19 nt, Homo sapiens
  misc_RNA (1)...(19): siRNA sense strand
gaagauaaucaacgacuau

SEQ ID NO: 728777 - RNA, 19 nt, Homo sapiens
  misc_RNA (1)...(19): siRNA sense strand
gacaaaguuuaccaaauga

SEQ ID NO: 728778 - RNA, 19 nt, Homo sapiens
  misc_RNA (1)...(19): siRNA sense strand
cagcagaaaucuuuaugau

SEQ ID NO: 728779 - RNA, 19 nt, Homo sapiens
  misc_RNA (1)...(19): siRNA sense strand
gaaaggaggagauggaaag

SEQ ID NO: 728780 - RNA, 19 nt, Homo sapiens
  misc_RNA (1)...(19): siRNA sense strand
gauaaucaacgacuaugaa

SEQ ID NO: 728781 - RNA, 19 nt, Homo sapiens
  misc_RNA (1)...(19): siRNA sense strand
gaucuggccucccucaagu

SEQ ID NO: 728782 - RNA, 19 nt, Homo sapiens
  misc_RNA (1)...(19): siRNA sense strand
gaauugaggucuuuuaagu

SEQ ID NO: 728783 - RNA, 19 nt, Homo sapiens
  misc_RNA (1)...(19): siRNA sense strand
aagaggaaaucuccaaaug

SEQ ID NO: 728784 - RNA, 19 nt, Homo sapiens
  misc_RNA (1)...(19): siRNA sense strand
gcaagaacccaucaaggau

SEQ ID NO: 728785 - RNA, 19 nt, Homo sapiens
  misc_RNA (1)...(19): siRNA sense strand
ggaaagggaacuucagaca

SEQ ID NO: 728786 - RNA, 19 nt, Homo sapiens
  misc_RNA (1)...(19): siRNA sense strand
gcccaaacuucacagcauu

SEQ ID NO: 728787 - RNA, 19 nt, Homo sapiens
  misc_RNA (1)...(19): siRNA sense strand
acaugaaccugcuggauau

SEQ ID NO: 728788 - RNA, 19 nt, Homo sapiens
  misc_RNA (1)...(19): siRNA sense strand
gucaugcucuaucagauuu

SEQ ID NO: 728789 - RNA, 19 nt, Homo sapiens
  misc_RNA (1)...(19): siRNA sense strand
ucauagagauggagaagag

SEQ ID NO: 728790 - RNA, 19 nt, Homo sapiens
  misc_RNA (1)...(19): siRNA sense strand
ucuaucagauuucagaaga

SEQ ID NO: 728791 - RNA, 19 nt, Homo sapiens
  misc_RNA (1)...(19): siRNA sense strand
ugaagauaaucaacgacua

SEQ ID NO: 728792 - RNA, 19 nt, Homo sapiens
  misc_RNA (1)...(19): siRNA sense strand
acaagagccugcugaagau

SEQ ID NO: 728793 - RNA, 19 nt, Homo sapiens
  misc_RNA (1)...(19): siRNA sense strand
aaugcaaacuggaugauga

SEQ ID NO: 728794 - RNA, 19 nt, Homo sapiens
  misc_RNA (1)...(19): siRNA sense strand
uggauuugcugauuaccua

SEQ ID NO: 728795 - RNA, 19 nt, Homo sapiens
  misc_RNA (1)...(19): siRNA sense strand
gugagcagaucagaauuga

SEQ ID NO: 728796 - RNA, 19 nt, Homo sapiens
  misc_RNA (1)...(19): siRNA sense strand
gaauggaacacacuuggau

SEQ ID NO: 728797 - RNA, 19 nt, Homo sapiens
  misc_RNA (1)...(19): siRNA sense strand
gggagaaagugcccaaacu

SEQ ID NO: 728798 - RNA, 19 nt, Homo sapiens
  misc_RNA (1)...(19): siRNA sense strand
aaucaacgacuaugaagaa

SEQ ID NO: 728799 - RNA, 19 nt, Homo sapiens
  misc_RNA (1)...(19): siRNA sense strand
ccaggcagggcucaaauuu

SEQ ID NO: 728800 - RNA, 19 nt, Homo sapiens
  misc_RNA (1)...(19): siRNA sense strand
gcaagaggaaaucuccaaa

SEQ ID NO: 728801 - RNA, 19 nt, Homo sapiens
  misc_RNA (1)...(19): siRNA sense strand
gaaaguuggacauccugaa

SEQ ID NO: 728802 - RNA, 19 nt, Homo sapiens
  misc_RNA (1)...(19): siRNA sense strand
gaucaucaacaaucacaau

SEQ ID NO: 728803 - RNA, 19 nt, Homo sapiens
  misc_RNA (1)...(19): siRNA sense strand
gacuucagcagaaaucuuu

SEQ ID NO: 728804 - RNA, 19 nt, Homo sapiens
  misc_RNA (1)...(19): siRNA sense strand
cagaagaagugagcagauc

SEQ ID NO: 728805 - RNA, 19 nt, Homo sapiens
  misc_RNA (1)...(19): siRNA sense strand
aacaagagccugcugaaga

SEQ ID NO: 728806 - RNA, 19 nt, Homo sapiens
  misc_RNA (1)...(19): siRNA sense strand
cugauuaccuaccuaaaca

SEQ ID NO: 728807 - RNA, 19 nt, Homo sapiens
  misc_RNA (1)...(19): siRNA sense strand
ggucaugcucuaucagauu

SEQ ID NO: 728808 - RNA, 19 nt, Homo sapiens
  misc_RNA (1)...(19): siRNA sense strand
gaagcaagaacccaucaag

SEQ ID NO: 728809 - RNA, 19 nt, Homo sapiens
  misc_RNA (1)...(19): siRNA sense strand
uuaccuaccuaaacacuag

SEQ ID NO: 728810 - RNA, 19 nt, Homo sapiens
  misc_RNA (1)...(19): siRNA sense strand
aggcagggcucaaauuucu

SEQ ID NO: 728811 - RNA, 19 nt, Homo sapiens
  misc_RNA (1)...(19): siRNA sense strand
cgaauuaauagacuggauu

SEQ ID NO: 728812 - RNA, 19 nt, Homo sapiens
  misc_RNA (1)...(19): siRNA sense strand
caagaggaaaucuccaaau

SEQ ID NO: 728813 - RNA, 19 nt, Homo sapiens
  misc_RNA (1)...(19): siRNA sense strand
ccaaaugcaaacuggauga

SEQ ID NO: 728814 - RNA, 19 nt, Homo sapiens
  misc_RNA (1)...(19): siRNA sense strand
ggacuucagcagaaaucuu

SEQ ID NO: 728815 - RNA, 19 nt, Homo sapiens
  misc_RNA (1)...(19): siRNA sense strand
aagagaauguuggaggaaa

SEQ ID NO: 728816 - RNA, 19 nt, Homo sapiens
  misc_RNA (1)...(19): siRNA sense strand
ggaauggaacacacuugga

SEQ ID NO: 728817 - RNA, 19 nt, Homo sapiens
  misc_RNA (1)...(19): siRNA sense strand
uggacaaaguuuaccaaau

SEQ ID NO: 728818 - RNA, 19 nt, Homo sapiens
  misc_RNA (1)...(19): siRNA sense strand
aaaguuggacauccugaaa

SEQ ID NO: 728819 - RNA, 19 nt, Homo sapiens
  misc_RNA (1)...(19): siRNA sense strand
gcucaaauuucugccuaca

SEQ ID NO: 728820 - RNA, 19 nt, Homo sapiens
  misc_RNA (1)...(19): siRNA sense strand
uagacuggauuugcugauu

SEQ ID NO: 728821 - RNA, 19 nt, Homo sapiens
  misc_RNA (1)...(19): siRNA sense strand
ggacuacauuccgcaaagg

SEQ ID NO: 728822 - RNA, 19 nt, Homo sapiens
  misc_RNA (1)...(19): siRNA sense strand
uaucagauuucagaagaag

SEQ ID NO: 728823 - RNA, 19 nt, Homo sapiens
  misc_RNA (1)...(19): siRNA sense strand
uuaauagacuggauuugcu

SEQ ID NO: 728824 - RNA, 19 nt, Homo sapiens
  misc_RNA (1)...(19): siRNA sense strand
gggauacugucugaucauc

SEQ ID NO: 728825 - RNA, 19 nt, Homo sapiens
  misc_RNA (1)...(19): siRNA sense strand
aagagucugugcccaaauc

SEQ ID NO: 728826 - RNA, 19 nt, Homo sapiens
  misc_RNA (1)...(19): siRNA sense strand
caagagccugcugaagaua

SEQ ID NO: 728827 - RNA, 19 nt, Homo sapiens
  misc_RNA (1)...(19): siRNA sense strand
cuagaaaggaggagaugga

SEQ ID NO: 728828 - RNA, 19 nt, Homo sapiens
  misc_RNA (1)...(19): siRNA sense strand
ggagauggaaagggaacuu

SEQ ID NO: 728829 - RNA, 19 nt, Homo sapiens
  misc_RNA (1)...(19): siRNA sense strand
aggaugccuugauguuauu

SEQ ID NO: 728830 - RNA, 19 nt, Homo sapiens
  misc_RNA (1)...(19): siRNA sense strand
ucaacgacuaugaagaauu

SEQ ID NO: 728831 - RNA, 19 nt, Homo sapiens
  misc_RNA (1)...(19): siRNA sense strand
gaauguuggaggaaagcaa

SEQ ID NO: 728832 - RNA, 19 nt, Homo sapiens
  misc_RNA (1)...(19): siRNA sense strand
gagaaggaaaguuggacau

SEQ ID NO: 728833 - RNA, 19 nt, Homo sapiens
  misc_RNA (1)...(19): siRNA sense strand
gaagaagugagcagaucag

SEQ ID NO: 728834 - RNA, 19 nt, Homo sapiens
  misc_RNA (1)...(19): siRNA sense strand
gacuggauuugcugauuac

SEQ ID NO: 728835 - RNA, 19 nt, Homo sapiens
  misc_RNA (1)...(19): siRNA sense strand
agcaagaacccaucaagga

SEQ ID NO: 728836 - RNA, 19 nt, Homo sapiens
  misc_RNA (1)...(19): siRNA sense strand
caacaagagccugcugaag

SEQ ID NO: 728837 - RNA, 19 nt, Homo sapiens
  misc_RNA (1)...(19): siRNA sense strand
ucagcagaaaucuuuauga

SEQ ID NO: 728838 - RNA, 19 nt, Homo sapiens
  misc_RNA (1)...(19): siRNA sense strand
cugcucuuccgaauuaaua

SEQ ID NO: 728839 - RNA, 19 nt, Homo sapiens
  misc_RNA (1)...(19): siRNA sense strand
ggaagcaagaacccaucaa

SEQ ID NO: 728840 - RNA, 19 nt, Homo sapiens
  misc_RNA (1)...(19): siRNA sense strand
ucagauuucagaagaagug

SEQ ID NO: 728841 - RNA, 19 nt, Homo sapiens
  misc_RNA (1)...(19): siRNA sense strand
gcugauuaccuaccuaaac

SEQ ID NO: 728842 - RNA, 19 nt, Homo sapiens
  misc_RNA (1)...(19): siRNA sense strand
cccaaacuucacagcauua

SEQ ID NO: 728843 - RNA, 19 nt, Homo sapiens
  misc_RNA (1)...(19): siRNA sense strand
ucaacaagagccugcugaa

SEQ ID NO: 728844 - RNA, 19 nt, Homo sapiens
  misc_RNA (1)...(19): siRNA sense strand
ccugggagaaggaaaguug

SEQ ID NO: 728845 - RNA, 19 nt, Homo sapiens
  misc_RNA (1)...(19): siRNA sense strand
ugaaccugcuggauauuuu

SEQ ID NO: 728846 - RNA, 19 nt, Homo sapiens
  misc_RNA (1)...(19): siRNA sense strand
gcaaucuguccuuccugaa

SEQ ID NO: 728847 - RNA, 19 nt, Homo sapiens
  misc_RNA (1)...(19): siRNA sense strand
agagaauguuggaggaaag

SEQ ID NO: 728848 - RNA, 19 nt, Homo sapiens
  misc_RNA (1)...(19): siRNA sense strand
gcaaacuggaugaugacau

SEQ ID NO: 728849 - RNA, 19 nt, Homo sapiens
  misc_RNA (1)...(19): siRNA sense strand
aaagcaaucuguccuuccu

SEQ ID NO: 728850 - RNA, 19 nt, Homo sapiens
  misc_RNA (1)...(19): siRNA sense strand
cuaucagauuucagaagaa

SEQ ID NO: 728851 - RNA, 19 nt, Homo sapiens
  misc_RNA (1)...(19): siRNA sense strand
gggucaugcucuaucagau

SEQ ID NO: 728852 - RNA, 19 nt, Homo sapiens
  misc_RNA (1)...(19): siRNA sense strand
aaaagagucugugcccaaa

SEQ ID NO: 728853 - RNA, 19 nt, Homo sapiens
  misc_RNA (1)...(19): siRNA sense strand
caaaagcacgggagaaagu

SEQ ID NO: 728854 - RNA, 19 nt, Homo sapiens
  misc_RNA (1)...(19): siRNA sense strand
gugcccaaaucaacaagag

SEQ ID NO: 728855 - RNA, 19 nt, Homo sapiens
  misc_RNA (1)...(19): siRNA sense strand
uggacuacauuccgcaaag

SEQ ID NO: 728856 - RNA, 19 nt, Homo sapiens
  misc_RNA (1)...(19): siRNA sense strand
uaaucaacgacuaugaaga

SEQ ID NO: 728857 - RNA, 19 nt, Homo sapiens
  misc_RNA (1)...(19): siRNA sense strand
agagccugcugaagauaau

SEQ ID NO: 728858 - RNA, 19 nt, Homo sapiens
  misc_RNA (1)...(19): siRNA sense strand
aagagccugcugaagauaa

SEQ ID NO: 728859 - RNA, 19 nt, Homo sapiens
  misc_RNA (1)...(19): siRNA sense strand
gcucuuccgaauuaauaga

SEQ ID NO: 728860 - RNA, 19 nt, Homo sapiens
  misc_RNA (1)...(19): siRNA sense strand
ccgaauuaauagacuggau

SEQ ID NO: 728861 - RNA, 19 nt, Homo sapiens
  misc_RNA (1)...(19): siRNA sense strand
ggacaaaguuuaccaaaug

SEQ ID NO: 728862 - RNA, 19 nt, Homo sapiens
  misc_RNA (1)...(19): siRNA sense strand
caacgacuaugaagaauuc

SEQ ID NO: 728863 - RNA, 19 nt, Homo sapiens
  misc_RNA (1)...(19): siRNA sense strand
gaucagaauugaggucuuu

SEQ ID NO: 728864 - RNA, 19 nt, Homo sapiens
  misc_RNA (1)...(19): siRNA sense strand
gaagugagcagaucagaau

SEQ ID NO: 728865 - RNA, 19 nt, Homo sapiens
  misc_RNA (1)...(19): siRNA sense strand
gaggaaaucuccaaaugca

SEQ ID NO: 728866 - RNA, 19 nt, Homo sapiens
  misc_RNA (1)...(19): siRNA sense strand
ggaaaucuccaaaugcaaa

SEQ ID NO: 728867 - RNA, 19 nt, Homo sapiens
  misc_RNA (1)...(19): siRNA sense strand
caaacuggaugaugacaug

SEQ ID NO: 728868 - RNA, 19 nt, Homo sapiens
  misc_RNA (1)...(19): siRNA sense strand
agacuggauuugcugauua

SEQ ID NO: 728869 - RNA, 19 nt, Homo sapiens
  misc_RNA (1)...(19): siRNA sense strand
gacaugaaccugcuggaua

SEQ ID NO: 728870 - RNA, 19 nt, Homo sapiens
  misc_RNA (1)...(19): siRNA sense strand
gaagauaaucaacgacuau

SEQ ID NO: 728871 - RNA, 19 nt, Homo sapiens
  misc_RNA (1)...(19): siRNA sense strand
gacaaaguuuaccaaauga

SEQ ID NO: 728872 - RNA, 19 nt, Homo sapiens
  misc_RNA (1)...(19): siRNA sense strand
cagcagaaaucuuuaugau

SEQ ID NO: 728873 - RNA, 19 nt, Homo sapiens
  misc_RNA (1)...(19): siRNA sense strand
gaaaggaggagauggaaag

SEQ ID NO: 728874 - RNA, 19 nt, Homo sapiens
  misc_RNA (1)...(19): siRNA sense strand
gauaaucaacgacuaugaa

SEQ ID NO: 728875 - RNA, 19 nt, Homo sapiens
  misc_RNA (1)...(19): siRNA sense strand
gaucuggccucccucaagu

SEQ ID NO: 728876 - RNA, 19 nt, Homo sapiens
  misc_RNA (1)...(19): siRNA sense strand
gaauugaggucuuuuaagu

SEQ ID NO: 728877 - RNA, 19 nt, Homo sapiens
  misc_RNA (1)...(19): siRNA sense strand
aagaggaaaucuccaaaug

SEQ ID NO: 728878 - RNA, 19 nt, Homo sapiens
  misc_RNA (1)...(19): siRNA sense strand
gcaagaacccaucaaggau

SEQ ID NO: 728879 - RNA, 19 nt, Homo sapiens
  misc_RNA (1)...(19): siRNA sense strand
ggaaagggaacuucagaca

SEQ ID NO: 728880 - RNA, 19 nt, Homo sapiens
  misc_RNA (1)...(19): siRNA sense strand
gcccaaacuucacagcauu

SEQ ID NO: 728881 - RNA, 19 nt, Homo sapiens
  misc_RNA (1)...(19): siRNA sense strand
acaugaaccugcuggauau

SEQ ID NO: 728882 - RNA, 19 nt, Homo sapiens
  misc_RNA (1)...(19): siRNA sense strand
gucaugcucuaucagauuu

SEQ ID NO: 728883 - RNA, 19 nt, Homo sapiens
  misc_RNA (1)...(19): siRNA sense strand
ucauagagauggagaagag

SEQ ID NO: 728884 - RNA, 19 nt, Homo sapiens
  misc_RNA (1)...(19): siRNA sense strand
ucuaucagauuucagaaga

SEQ ID NO: 728885 - RNA, 19 nt, Homo sapiens
  misc_RNA (1)...(19): siRNA sense strand
ugaagauaaucaacgacua

SEQ ID NO: 728886 - RNA, 19 nt, Homo sapiens
  misc_RNA (1)...(19): siRNA sense strand
acaagagccugcugaagau

SEQ ID NO: 728887 - RNA, 19 nt, Homo sapiens
  misc_RNA (1)...(19): siRNA sense strand
aaugcaaacuggaugauga

SEQ ID NO: 728888 - RNA, 19 nt, Homo sapiens
  misc_RNA (1)...(19): siRNA sense strand
uggauuugcugauuaccua

SEQ ID NO: 728889 - RNA, 19 nt, Homo sapiens
  misc_RNA (1)...(19): siRNA sense strand
gugagcagaucagaauuga

SEQ ID NO: 728890 - RNA, 19 nt, Homo sapiens
  misc_RNA (1)...(19): siRNA sense strand
gaauggaacacacuuggau

SEQ ID NO: 728891 - RNA, 19 nt, Homo sapiens
  misc_RNA (1)...(19): siRNA sense strand
gggagaaagugcccaaacu

SEQ ID NO: 728892 - RNA, 19 nt, Homo sapiens
  misc_RNA (1)...(19): siRNA sense strand
aaucaacgacuaugaagaa

SEQ ID NO: 728893 - RNA, 19 nt, Homo sapiens
  misc_RNA (1)...(19): siRNA sense strand
ccaggcagggcucaaauuu

SEQ ID NO: 728894 - RNA, 19 nt, Homo sapiens
  misc_RNA (1)...(19): siRNA sense strand
gcaagaggaaaucuccaaa

SEQ ID NO: 728895 - RNA, 19 nt, Homo sapiens
  misc_RNA (1)...(19): siRNA sense strand
gaaaguuggacauccugaa

SEQ ID NO: 728896 - RNA, 19 nt, Homo sapiens
  misc_RNA (1)...(19): siRNA sense strand
gaucaucaacaaucacaau

SEQ ID NO: 728897 - RNA, 19 nt, Homo sapiens
  misc_RNA (1)...(19): siRNA sense strand
gacuucagcagaaaucuuu

SEQ ID NO: 728898 - RNA, 19 nt, Homo sapiens
  misc_RNA (1)...(19): siRNA sense strand
cagaagaagugagcagauc

SEQ ID NO: 728899 - RNA, 19 nt, Homo sapiens
  misc_RNA (1)...(19): siRNA sense strand
aacaagagccugcugaaga

SEQ ID NO: 728900 - RNA, 19 nt, Homo sapiens
  misc_RNA (1)...(19): siRNA sense strand
cugauuaccuaccuaaaca

SEQ ID NO: 728901 - RNA, 19 nt, Homo sapiens
  misc_RNA (1)...(19): siRNA sense strand
ggucaugcucuaucagauu

SEQ ID NO: 728902 - RNA, 19 nt, Homo sapiens
  misc_RNA (1)...(19): siRNA sense strand
gaagcaagaacccaucaag

SEQ ID NO: 728903 - RNA, 19 nt, Homo sapiens
  misc_RNA (1)...(19): siRNA sense strand
uuaccuaccuaaacacuag

SEQ ID NO: 728904 - RNA, 19 nt, Homo sapiens
  misc_RNA (1)...(19): siRNA sense strand
aggcagggcucaaauuucu

SEQ ID NO: 728905 - RNA, 19 nt, Homo sapiens
  misc_RNA (1)...(19): siRNA sense strand
cgaauuaauagacuggauu

SEQ ID NO: 728906 - RNA, 19 nt, Homo sapiens
  misc_RNA (1)...(19): siRNA sense strand
caagaggaaaucuccaaau

SEQ ID NO: 728907 - RNA, 19 nt, Homo sapiens
  misc_RNA (1)...(19): siRNA sense strand
ccaaaugcaaacuggauga

SEQ ID NO: 728908 - RNA, 19 nt, Homo sapiens
  misc_RNA (1)...(19): siRNA sense strand
ggacuucagcagaaaucuu

SEQ ID NO: 728909 - RNA, 19 nt, Homo sapiens
  misc_RNA (1)...(19): siRNA sense strand
aagagaauguuggaggaaa

SEQ ID NO: 728910 - RNA, 19 nt, Homo sapiens
  misc_RNA (1)...(19): siRNA sense strand
ggaauggaacacacuugga

SEQ ID NO: 728911 - RNA, 19 nt, Homo sapiens
  misc_RNA (1)...(19): siRNA sense strand
uggacaaaguuuaccaaau

SEQ ID NO: 728912 - RNA, 19 nt, Homo sapiens
  misc_RNA (1)...(19): siRNA sense strand
aaaguuggacauccugaaa

SEQ ID NO: 728913 - RNA, 19 nt, Homo sapiens
  misc_RNA (1)...(19): siRNA sense strand
gcucaaauuucugccuaca

SEQ ID NO: 728914 - RNA, 19 nt, Homo sapiens
  misc_RNA (1)...(19): siRNA sense strand
uagacuggauuugcugauu

SEQ ID NO: 728915 - RNA, 19 nt, Homo sapiens
  misc_RNA (1)...(19): siRNA sense strand
ggacuacauuccgcaaagg

SEQ ID NO: 728916 - RNA, 19 nt, Homo sapiens
  misc_RNA (1)...(19): siRNA sense strand
uaucagauuucagaagaag

SEQ ID NO: 728917 - RNA, 19 nt, Homo sapiens
  misc_RNA (1)...(19): siRNA sense strand
uuaauagacuggauuugcu

SEQ ID NO: 728918 - RNA, 19 nt, Homo sapiens
  misc_RNA (1)...(19): siRNA sense strand
gggauacugucugaucauc

SEQ ID NO: 728919 - RNA, 19 nt, Homo sapiens
  misc_RNA (1)...(19): siRNA sense strand
aagagucugugcccaaauc

SEQ ID NO: 728920 - RNA, 19 nt, Homo sapiens
  misc_RNA (1)...(19): siRNA sense strand
caagagccugcugaagaua

SEQ ID NO: 728921 - RNA, 19 nt, Homo sapiens
  misc_RNA (1)...(19): siRNA sense strand
cuagaaaggaggagaugga

SEQ ID NO: 728922 - RNA, 19 nt, Homo sapiens
  misc_RNA (1)...(19): siRNA sense strand
ggagauggaaagggaacuu

SEQ ID NO: 728923 - RNA, 19 nt, Homo sapiens
  misc_RNA (1)...(19): siRNA sense strand
aggaugccuugauguuauu

SEQ ID NO: 728924 - RNA, 19 nt, Homo sapiens
  misc_RNA (1)...(19): siRNA sense strand
ucaacgacuaugaagaauu

SEQ ID NO: 728925 - RNA, 19 nt, Homo sapiens
  misc_RNA (1)...(19): siRNA sense strand
gaauguuggaggaaagcaa

SEQ ID NO: 728926 - RNA, 19 nt, Homo sapiens
  misc_RNA (1)...(19): siRNA sense strand
gagaaggaaaguuggacau

SEQ ID NO: 728927 - RNA, 19 nt, Homo sapiens
  misc_RNA (1)...(19): siRNA sense strand
gaagaagugagcagaucag

SEQ ID NO: 728928 - RNA, 19 nt, Homo sapiens
  misc_RNA (1)...(19): siRNA sense strand
gacuggauuugcugauuac

SEQ ID NO: 728929 - RNA, 19 nt, Homo sapiens
  misc_RNA (1)...(19): siRNA sense strand
agcaagaacccaucaagga

SEQ ID NO: 728930 - RNA, 19 nt, Homo sapiens
  misc_RNA (1)...(19): siRNA sense strand
caacaagagccugcugaag

SEQ ID NO: 728931 - RNA, 19 nt, Homo sapiens
  misc_RNA (1)...(19): siRNA sense strand
ucagcagaaaucuuuauga

SEQ ID NO: 728932 - RNA, 19 nt, Homo sapiens
  misc_RNA (1)...(19): siRNA sense strand
cugcucuuccgaauuaaua

SEQ ID NO: 728933 - RNA, 19 nt, Homo sapiens
  misc_RNA (1)...(19): siRNA sense strand
ggaagcaagaacccaucaa

SEQ ID NO: 728934 - RNA, 19 nt, Homo sapiens
  misc_RNA (1)...(19): siRNA sense strand
ucagauuucagaagaagug

SEQ ID NO: 728935 - RNA, 19 nt, Homo sapiens
  misc_RNA (1)...(19): siRNA sense strand
gcugauuaccuaccuaaac

SEQ ID NO: 728936 - RNA, 19 nt, Homo sapiens
  misc_RNA (1)...(19): siRNA sense strand
cccaaacuucacagcauua

SEQ ID NO: 728937 - RNA, 19 nt, Homo sapiens
  misc_RNA (1)...(19): siRNA sense strand
ucaacaagagccugcugaa

SEQ ID NO: 728938 - RNA, 19 nt, Homo sapiens
  misc_RNA (1)...(19): siRNA sense strand
ccugggagaaggaaaguug

SEQ ID NO: 728939 - RNA, 19 nt, Homo sapiens
  misc_RNA (1)...(19): siRNA sense strand
ugaaccugcuggauauuuu

SEQ ID NO: 728940 - RNA, 19 nt, Homo sapiens
  misc_RNA (1)...(19): siRNA sense strand
gcaaucuguccuuccugaa

SEQ ID NO: 728941 - RNA, 19 nt, Homo sapiens
  misc_RNA (1)...(19): siRNA sense strand
agagaauguuggaggaaag

SEQ ID NO: 728942 - RNA, 19 nt, Homo sapiens
  misc_RNA (1)...(19): siRNA sense strand
gcaaacuggaugaugacau

SEQ ID NO: 728943 - RNA, 19 nt, Homo sapiens
  misc_RNA (1)...(19): siRNA sense strand
aaagcaaucuguccuuccu

SEQ ID NO: 728944 - RNA, 19 nt, Homo sapiens
  misc_RNA (1)...(19): siRNA sense strand
cuaucagauuucagaagaa

SEQ ID NO: 728945 - RNA, 19 nt, Homo sapiens
  misc_RNA (1)...(19): siRNA sense strand
gggucaugcucuaucagau

SEQ ID NO: 728946 - RNA, 19 nt, Homo sapiens
  misc_RNA (1)...(19): siRNA sense strand
aaaagagucugugcccaaa

SEQ ID NO: 728947 - RNA, 19 nt, Homo sapiens
  misc_RNA (1)...(19): siRNA sense strand
caaaagcacgggagaaagu

SEQ ID NO: 728948 - RNA, 19 nt, Homo sapiens
  misc_RNA (1)...(19): siRNA sense strand
gugcccaaaucaacaagag

SEQ ID NO: 728949 - RNA, 19 nt, Homo sapiens
  misc_RNA (1)...(19): siRNA sense strand
uggacuacauuccgcaaag

SEQ ID NO: 728950 - RNA, 19 nt, Homo sapiens
  misc_RNA (1)...(19): siRNA sense strand
uaaucaacgacuaugaaga

SEQ ID NO: 728951 - RNA, 19 nt, Homo sapiens
  misc_RNA (1)...(19): siRNA sense strand
agagccugcugaagauaau

SEQ ID NO: 728952 - RNA, 19 nt, Homo sapiens
  misc_RNA (1)...(19): siRNA sense strand
aagagccugcugaagauaa

SEQ ID NO: 728953 - RNA, 19 nt, Homo sapiens
  misc_RNA (1)...(19): siRNA sense strand
gcucuuccgaauuaauaga

SEQ ID NO: 728954 - RNA, 19 nt, Homo sapiens
  misc_RNA (1)...(19): siRNA sense strand
ccgaauuaauagacuggau

SEQ ID NO: 728955 - RNA, 19 nt, Homo sapiens
  misc_RNA (1)...(19): siRNA sense strand
ggacaaaguuuaccaaaug

SEQ ID NO: 728956 - RNA, 19 nt, Homo sapiens
  misc_RNA (1)...(19): siRNA sense strand
caacgacuaugaagaauuc

SEQ ID NO: 728957 - RNA, 19 nt, Homo sapiens
  misc_RNA (1)...(19): siRNA sense strand
gaucagaauugaggucuuu

SEQ ID NO: 728958 - RNA, 19 nt, Homo sapiens
  misc_RNA (1)...(19): siRNA sense strand
gaagugagcagaucagaau

SEQ ID NO: 728959 - RNA, 19 nt, Homo sapiens
  misc_RNA (1)...(19): siRNA sense strand
gaggaaaucuccaaaugca

SEQ ID NO: 728960 - RNA, 19 nt, Homo sapiens
  misc_RNA (1)...(19): siRNA sense strand
ggaaaucuccaaaugcaaa

SEQ ID NO: 728961 - RNA, 19 nt, Homo sapiens
  misc_RNA (1)...(19): siRNA sense strand
caaacuggaugaugacaug

SEQ ID NO: 728962 - RNA, 19 nt, Homo sapiens
  misc_RNA (1)...(19): siRNA sense strand
agacuggauuugcugauua

SEQ ID NO: 728963 - RNA, 19 nt, Homo sapiens
  misc_RNA (1)...(19): siRNA sense strand
gacaugaaccugcuggaua

SEQ ID NO: 728964 - RNA, 19 nt, Homo sapiens
  misc_RNA (1)...(19): siRNA sense strand
gaagauaaucaacgacuau

SEQ ID NO: 728965 - RNA, 19 nt, Homo sapiens
  misc_RNA (1)...(19): siRNA sense strand
gacaaaguuuaccaaauga

SEQ ID NO: 728966 - RNA, 19 nt, Homo sapiens
  misc_RNA (1)...(19): siRNA sense strand
cagcagaaaucuuuaugau

SEQ ID NO: 728967 - RNA, 19 nt, Homo sapiens
  misc_RNA (1)...(19): siRNA sense strand
gaaaggaggagauggaaag

SEQ ID NO: 728968 - RNA, 19 nt, Homo sapiens
  misc_RNA (1)...(19): siRNA sense strand
gauaaucaacgacuaugaa

SEQ ID NO: 728969 - RNA, 19 nt, Homo sapiens
  misc_RNA (1)...(19): siRNA sense strand
gaucuggccucccucaagu

SEQ ID NO: 728970 - RNA, 19 nt, Homo sapiens
  misc_RNA (1)...(19): siRNA sense strand
gaauugaggucuuuuaagu

SEQ ID NO: 728971 - RNA, 19 nt, Homo sapiens
  misc_RNA (1)...(19): siRNA sense strand
aagaggaaaucuccaaaug

SEQ ID NO: 728972 - RNA, 19 nt, Homo sapiens
  misc_RNA (1)...(19): siRNA sense strand
gcaagaacccaucaaggau

SEQ ID NO: 728973 - RNA, 19 nt, Homo sapiens
  misc_RNA (1)...(19): siRNA sense strand
ggaaagggaacuucagaca

SEQ ID NO: 728974 - RNA, 19 nt, Homo sapiens
  misc_RNA (1)...(19): siRNA sense strand
gcccaaacuucacagcauu

SEQ ID NO: 728975 - RNA, 19 nt, Homo sapiens
  misc_RNA (1)...(19): siRNA sense strand
acaugaaccugcuggauau

SEQ ID NO: 728976 - RNA, 19 nt, Homo sapiens
  misc_RNA (1)...(19): siRNA sense strand
gucaugcucuaucagauuu

SEQ ID NO: 728977 - RNA, 19 nt, Homo sapiens
  misc_RNA (1)...(19): siRNA sense strand
ucauagagauggagaagag

SEQ ID NO: 728978 - RNA, 19 nt, Homo sapiens
  misc_RNA (1)...(19): siRNA sense strand
ucuaucagauuucagaaga

SEQ ID NO: 728979 - RNA, 19 nt, Homo sapiens
  misc_RNA (1)...(19): siRNA sense strand
ugaagauaaucaacgacua

SEQ ID NO: 728980 - RNA, 19 nt, Homo sapiens
  misc_RNA (1)...(19): siRNA sense strand
acaagagccugcugaagau

SEQ ID NO: 728981 - RNA, 19 nt, Homo sapiens
  misc_RNA (1)...(19): siRNA sense strand
aaugcaaacuggaugauga

SEQ ID NO: 728982 - RNA, 19 nt, Homo sapiens
  misc_RNA (1)...(19): siRNA sense strand
uggauuugcugauuaccua

SEQ ID NO: 728983 - RNA, 19 nt, Homo sapiens
  misc_RNA (1)...(19): siRNA sense strand
gugagcagaucagaauuga

SEQ ID NO: 728984 - RNA, 19 nt, Homo sapiens
  misc_RNA (1)...(19): siRNA sense strand
gaauggaacacacuuggau

SEQ ID NO: 728985 - RNA, 19 nt, Homo sapiens
  misc_RNA (1)...(19): siRNA sense strand
gggagaaagugcccaaacu

SEQ ID NO: 728986 - RNA, 19 nt, Homo sapiens
  misc_RNA (1)...(19): siRNA sense strand
aaucaacgacuaugaagaa

SEQ ID NO: 728987 - RNA, 19 nt, Homo sapiens
  misc_RNA (1)...(19): siRNA sense strand
ccaggcagggcucaaauuu

SEQ ID NO: 728988 - RNA, 19 nt, Homo sapiens
  misc_RNA (1)...(19): siRNA sense strand
gcaagaggaaaucuccaaa

SEQ ID NO: 728989 - RNA, 19 nt, Homo sapiens
  misc_RNA (1)...(19): siRNA sense strand
gaaaguuggacauccugaa

SEQ ID NO: 728990 - RNA, 19 nt, Homo sapiens
  misc_RNA (1)...(19): siRNA sense strand
gaucaucaacaaucacaau

SEQ ID NO: 728991 - RNA, 19 nt, Homo sapiens
  misc_RNA (1)...(19): siRNA sense strand
gacuucagcagaaaucuuu

SEQ ID NO: 728992 - RNA, 19 nt, Homo sapiens
  misc_RNA (1)...(19): siRNA sense strand
cagaagaagugagcagauc

SEQ ID NO: 728993 - RNA, 19 nt, Homo sapiens
  misc_RNA (1)...(19): siRNA sense strand
aacaagagccugcugaaga

SEQ ID NO: 728994 - RNA, 19 nt, Homo sapiens
  misc_RNA (1)...(19): siRNA sense strand
cugauuaccuaccuaaaca

SEQ ID NO: 728995 - RNA, 19 nt, Homo sapiens
  misc_RNA (1)...(19): siRNA sense strand
ggucaugcucuaucagauu

SEQ ID NO: 728996 - RNA, 19 nt, Homo sapiens
  misc_RNA (1)...(19): siRNA sense strand
gaagcaagaacccaucaag

SEQ ID NO: 728997 - RNA, 19 nt, Homo sapiens
  misc_RNA (1)...(19): siRNA sense strand
uuaccuaccuaaacacuag

SEQ ID NO: 728998 - RNA, 19 nt, Homo sapiens
  misc_RNA (1)...(19): siRNA sense strand
aggcagggcucaaauuucu

SEQ ID NO: 728999 - RNA, 19 nt, Homo sapiens
  misc_RNA (1)...(19): siRNA sense strand
cgaauuaauagacuggauu

SEQ ID NO: 729000 - RNA, 19 nt, Homo sapiens
  misc_RNA (1)...(19): siRNA sense strand
caagaggaaaucuccaaau

SEQ ID NO: 729001 - RNA, 19 nt, Homo sapiens
  misc_RNA (1)...(19): siRNA sense strand
ccaaaugcaaacuggauga

SEQ ID NO: 729002 - RNA, 19 nt, Homo sapiens
  misc_RNA (1)...(19): siRNA sense strand
ggacuucagcagaaaucuu

SEQ ID NO: 729003 - RNA, 19 nt, Homo sapiens
  misc_RNA (1)...(19): siRNA sense strand
aagagaauguuggaggaaa

SEQ ID NO: 729004 - RNA, 19 nt, Homo sapiens
  misc_RNA (1)...(19): siRNA sense strand
ggaauggaacacacuugga

SEQ ID NO: 729005 - RNA, 19 nt, Homo sapiens
  misc_RNA (1)...(19): siRNA sense strand
uggacaaaguuuaccaaau

SEQ ID NO: 729006 - RNA, 19 nt, Homo sapiens
  misc_RNA (1)...(19): siRNA sense strand
aaaguuggacauccugaaa

SEQ ID NO: 729007 - RNA, 19 nt, Homo sapiens
  misc_RNA (1)...(19): siRNA sense strand
gcucaaauuucugccuaca

SEQ ID NO: 729008 - RNA, 19 nt, Homo sapiens
  misc_RNA (1)...(19): siRNA sense strand
uagacuggauuugcugauu

SEQ ID NO: 729009 - RNA, 19 nt, Homo sapiens
  misc_RNA (1)...(19): siRNA sense strand
ggacuacauuccgcaaagg

SEQ ID NO: 729010 - RNA, 19 nt, Homo sapiens
  misc_RNA (1)...(19): siRNA sense strand
uaucagauuucagaagaag

SEQ ID NO: 729011 - RNA, 19 nt, Homo sapiens
  misc_RNA (1)...(19): siRNA sense strand
uuaauagacuggauuugcu

SEQ ID NO: 729012 - RNA, 19 nt, Homo sapiens
  misc_RNA (1)...(19): siRNA sense strand
gggauacugucugaucauc

SEQ ID NO: 729013 - RNA, 19 nt, Homo sapiens
  misc_RNA (1)...(19): siRNA sense strand
aagagucugugcccaaauc

SEQ ID NO: 729014 - RNA, 19 nt, Homo sapiens
  misc_RNA (1)...(19): siRNA sense strand
caagagccugcugaagaua

SEQ ID NO: 729015 - RNA, 19 nt, Homo sapiens
  misc_RNA (1)...(19): siRNA sense strand
cuagaaaggaggagaugga

SEQ ID NO: 729016 - RNA, 19 nt, Homo sapiens
  misc_RNA (1)...(19): siRNA sense strand
ggagauggaaagggaacuu

SEQ ID NO: 729017 - RNA, 19 nt, Homo sapiens
  misc_RNA (1)...(19): siRNA sense strand
aggaugccuugauguuauu

SEQ ID NO: 729018 - RNA, 19 nt, Homo sapiens
  misc_RNA (1)...(19): siRNA sense strand
ucaacgacuaugaagaauu

SEQ ID NO: 729019 - RNA, 19 nt, Homo sapiens
  misc_RNA (1)...(19): siRNA sense strand
gaauguuggaggaaagcaa

SEQ ID NO: 729020 - RNA, 19 nt, Homo sapiens
  misc_RNA (1)...(19): siRNA sense strand
gagaaggaaaguuggacau

SEQ ID NO: 729021 - RNA, 19 nt, Homo sapiens
  misc_RNA (1)...(19): siRNA sense strand
gaagaagugagcagaucag

SEQ ID NO: 729022 - RNA, 19 nt, Homo sapiens
  misc_RNA (1)...(19): siRNA sense strand
gacuggauuugcugauuac

SEQ ID NO: 729023 - RNA, 19 nt, Homo sapiens
  misc_RNA (1)...(19): siRNA sense strand
agcaagaacccaucaagga

SEQ ID NO: 729024 - RNA, 19 nt, Homo sapiens
  misc_RNA (1)...(19): siRNA sense strand
caacaagagccugcugaag

SEQ ID NO: 729025 - RNA, 19 nt, Homo sapiens
  misc_RNA (1)...(19): siRNA sense strand
ucagcagaaaucuuuauga

SEQ ID NO: 729026 - RNA, 19 nt, Homo sapiens
  misc_RNA (1)...(19): siRNA sense strand
cugcucuuccgaauuaaua

SEQ ID NO: 729027 - RNA, 19 nt, Homo sapiens
  misc_RNA (1)...(19): siRNA sense strand
ggaagcaagaacccaucaa

SEQ ID NO: 729028 - RNA, 19 nt, Homo sapiens
  misc_RNA (1)...(19): siRNA sense strand
ucagauuucagaagaagug

SEQ ID NO: 729029 - RNA, 19 nt, Homo sapiens
  misc_RNA (1)...(19): siRNA sense strand
gcugauuaccuaccuaaac

SEQ ID NO: 729030 - RNA, 19 nt, Homo sapiens
  misc_RNA (1)...(19): siRNA sense strand
cccaaacuucacagcauua

SEQ ID NO: 729031 - RNA, 19 nt, Homo sapiens
  misc_RNA (1)...(19): siRNA sense strand
ucaacaagagccugcugaa

SEQ ID NO: 729032 - RNA, 19 nt, Homo sapiens
  misc_RNA (1)...(19): siRNA sense strand
ccugggagaaggaaaguug

SEQ ID NO: 729033 - RNA, 19 nt, Homo sapiens
  misc_RNA (1)...(19): siRNA sense strand
ugaaccugcuggauauuuu

SEQ ID NO: 729034 - RNA, 19 nt, Homo sapiens
  misc_RNA (1)...(19): siRNA sense strand
gcaaucuguccuuccugaa

SEQ ID NO: 729035 - RNA, 19 nt, Homo sapiens
  misc_RNA (1)...(19): siRNA sense strand
agagaauguuggaggaaag

SEQ ID NO: 729036 - RNA, 19 nt, Homo sapiens
  misc_RNA (1)...(19): siRNA sense strand
gcaaacuggaugaugacau

SEQ ID NO: 729037 - RNA, 19 nt, Homo sapiens
  misc_RNA (1)...(19): siRNA sense strand
aaagcaaucuguccuuccu

SEQ ID NO: 729038 - RNA, 19 nt, Homo sapiens
  misc_RNA (1)...(19): siRNA sense strand
cuaucagauuucagaagaa

SEQ ID NO: 729039 - RNA, 19 nt, Homo sapiens
  misc_RNA (1)...(19): siRNA sense strand
gggucaugcucuaucagau

SEQ ID NO: 729040 - RNA, 19 nt, Homo sapiens
  misc_RNA (1)...(19): siRNA sense strand
aaaagagucugugcccaaa

SEQ ID NO: 729041 - RNA, 19 nt, Homo sapiens
  misc_RNA (1)...(19): siRNA sense strand
caaaagcacgggagaaagu

SEQ ID NO: 729042 - RNA, 19 nt, Homo sapiens
  misc_RNA (1)...(19): siRNA sense strand
gugcccaaaucaacaagag

SEQ ID NO: 729043 - RNA, 19 nt, Homo sapiens
  misc_RNA (1)...(19): siRNA sense strand
uggacuacauuccgcaaag

SEQ ID NO: 729044 - RNA, 19 nt, Homo sapiens
  misc_RNA (1)...(19): siRNA sense strand
uaaucaacgacuaugaaga

SEQ ID NO: 729045 - RNA, 19 nt, Homo sapiens
  misc_RNA (1)...(19): siRNA sense strand
agagccugcugaagauaau

SEQ ID NO: 729046 - RNA, 19 nt, Homo sapiens
  misc_RNA (1)...(19): siRNA sense strand
aagagccugcugaagauaa

SEQ ID NO: 729047 - RNA, 19 nt, Homo sapiens
  misc_RNA (1)...(19): siRNA sense strand
gcucuuccgaauuaauaga

SEQ ID NO: 729048 - RNA, 19 nt, Homo sapiens
  misc_RNA (1)...(19): siRNA sense strand
ccgaauuaauagacuggau

SEQ ID NO: 729049 - RNA, 19 nt, Homo sapiens
  misc_RNA (1)...(19): siRNA sense strand
ggacaaaguuuaccaaaug

SEQ ID NO: 729050 - RNA, 19 nt, Homo sapiens
  misc_RNA (1)...(19): siRNA sense strand
caacgacuaugaagaauuc

SEQ ID NO: 729051 - RNA, 19 nt, Homo sapiens
  misc_RNA (1)...(19): siRNA sense strand
gaucagaauugaggucuuu

SEQ ID NO: 729052 - RNA, 19 nt, Homo sapiens
  misc_RNA (1)...(19): siRNA sense strand
gaagugagcagaucagaau

SEQ ID NO: 729053 - RNA, 19 nt, Homo sapiens
  misc_RNA (1)...(19): siRNA sense strand
gaggaaaucuccaaaugca

SEQ ID NO: 729054 - RNA, 19 nt, Homo sapiens
  misc_RNA (1)...(19): siRNA sense strand
ggaaaucuccaaaugcaaa

SEQ ID NO: 729055 - RNA, 19 nt, Homo sapiens
  misc_RNA (1)...(19): siRNA sense strand
caaacuggaugaugacaug

SEQ ID NO: 729056 - RNA, 19 nt, Homo sapiens
  misc_RNA (1)...(19): siRNA sense strand
agacuggauuugcugauua

SEQ ID NO: 729057 - RNA, 19 nt, Homo sapiens
  misc_RNA (1)...(19): siRNA sense strand
gacaugaaccugcuggaua

SEQ ID NO: 729058 - RNA, 19 nt, Homo sapiens
  misc_RNA (1)...(19): siRNA sense strand
gaagauaaucaacgacuau

SEQ ID NO: 729059 - RNA, 19 nt, Homo sapiens
  misc_RNA (1)...(19): siRNA sense strand
gacaaaguuuaccaaauga

SEQ ID NO: 729060 - RNA, 19 nt, Homo sapiens
  misc_RNA (1)...(19): siRNA sense strand
cagcagaaaucuuuaugau

SEQ ID NO: 729061 - RNA, 19 nt, Homo sapiens
  misc_RNA (1)...(19): siRNA sense strand
gaaaggaggagauggaaag

SEQ ID NO: 729062 - RNA, 19 nt, Homo sapiens
  misc_RNA (1)...(19): siRNA sense strand
gauaaucaacgacuaugaa

SEQ ID NO: 729063 - RNA, 19 nt, Homo sapiens
  misc_RNA (1)...(19): siRNA sense strand
gaucuggccucccucaagu

SEQ ID NO: 729064 - RNA, 19 nt, Homo sapiens
  misc_RNA (1)...(19): siRNA sense strand
gaauugaggucuuuuaagu

SEQ ID NO: 729065 - RNA, 19 nt, Homo sapiens
  misc_RNA (1)...(19): siRNA sense strand
aagaggaaaucuccaaaug

SEQ ID NO: 729066 - RNA, 19 nt, Homo sapiens
  misc_RNA (1)...(19): siRNA sense strand
gcaagaacccaucaaggau

SEQ ID NO: 729067 - RNA, 19 nt, Homo sapiens
  misc_RNA (1)...(19): siRNA sense strand
ggaaagggaacuucagaca

SEQ ID NO: 729068 - RNA, 19 nt, Homo sapiens
  misc_RNA (1)...(19): siRNA sense strand
gcccaaacuucacagcauu

SEQ ID NO: 729069 - RNA, 19 nt, Homo sapiens
  misc_RNA (1)...(19): siRNA sense strand
acaugaaccugcuggauau

SEQ ID NO: 729070 - RNA, 19 nt, Homo sapiens
  misc_RNA (1)...(19): siRNA sense strand
gucaugcucuaucagauuu

SEQ ID NO: 729071 - RNA, 19 nt, Homo sapiens
  misc_RNA (1)...(19): siRNA sense strand
ucauagagauggagaagag

SEQ ID NO: 729072 - RNA, 19 nt, Homo sapiens
  misc_RNA (1)...(19): siRNA sense strand
ucuaucagauuucagaaga

SEQ ID NO: 729073 - RNA, 19 nt, Homo sapiens
  misc_RNA (1)...(19): siRNA sense strand
ugaagauaaucaacgacua

SEQ ID NO: 729074 - RNA, 19 nt, Homo sapiens
  misc_RNA (1)...(19): siRNA sense strand
acaagagccugcugaagau

SEQ ID NO: 729075 - RNA, 19 nt, Homo sapiens
  misc_RNA (1)...(19): siRNA sense strand
aaugcaaacuggaugauga

SEQ ID NO: 729076 - RNA, 19 nt, Homo sapiens
  misc_RNA (1)...(19): siRNA sense strand
uggauuugcugauuaccua

SEQ ID NO: 729077 - RNA, 19 nt, Homo sapiens
  misc_RNA (1)...(19): siRNA sense strand
gugagcagaucagaauuga

SEQ ID NO: 729078 - RNA, 19 nt, Homo sapiens
  misc_RNA (1)...(19): siRNA sense strand
gggagaaagugcccaaacu

SEQ ID NO: 729079 - RNA, 19 nt, Homo sapiens
  misc_RNA (1)...(19): siRNA sense strand
aaucaacgacuaugaagaa

SEQ ID NO: 729080 - RNA, 19 nt, Homo sapiens
  misc_RNA (1)...(19): siRNA sense strand
ccaggcagggcucaaauuu

SEQ ID NO: 729081 - RNA, 19 nt, Homo sapiens
  misc_RNA (1)...(19): siRNA sense strand
gcaagaggaaaucuccaaa

SEQ ID NO: 729082 - RNA, 19 nt, Homo sapiens
  misc_RNA (1)...(19): siRNA sense strand
gaaaguuggacauccugaa

SEQ ID NO: 729083 - RNA, 19 nt, Homo sapiens
  misc_RNA (1)...(19): siRNA sense strand
gaucaucaacaaucacaau

SEQ ID NO: 729084 - RNA, 19 nt, Homo sapiens
  misc_RNA (1)...(19): siRNA sense strand
gacuucagcagaaaucuuu

SEQ ID NO: 729085 - RNA, 19 nt, Homo sapiens
  misc_RNA (1)...(19): siRNA sense strand
cagaagaagugagcagauc

SEQ ID NO: 729086 - RNA, 19 nt, Homo sapiens
  misc_RNA (1)...(19): siRNA sense strand
aacaagagccugcugaaga

SEQ ID NO: 729087 - RNA, 19 nt, Homo sapiens
  misc_RNA (1)...(19): siRNA sense strand
cugauuaccuaccuaaaca

SEQ ID NO: 729088 - RNA, 19 nt, Homo sapiens
  misc_RNA (1)...(19): siRNA sense strand
gaagcaagaacccaucaag

SEQ ID NO: 729089 - RNA, 19 nt, Homo sapiens
  misc_RNA (1)...(19): siRNA sense strand
ggucaugcucuaucagauu

SEQ ID NO: 729090 - RNA, 19 nt, Homo sapiens
  misc_RNA (1)...(19): siRNA sense strand
uuaccuaccuaaacacuag

SEQ ID NO: 729091 - RNA, 19 nt, Homo sapiens
  misc_RNA (1)...(19): siRNA sense strand
aggcagggcucaaauuucu

SEQ ID NO: 729092 - RNA, 19 nt, Homo sapiens
  misc_RNA (1)...(19): siRNA sense strand
cgaauuaauagacuggauu

SEQ ID NO: 729093 - RNA, 19 nt, Homo sapiens
  misc_RNA (1)...(19): siRNA sense strand
caagaggaaaucuccaaau

SEQ ID NO: 729094 - RNA, 19 nt, Homo sapiens
  misc_RNA (1)...(19): siRNA sense strand
ccaaaugcaaacuggauga

SEQ ID NO: 729095 - RNA, 19 nt, Homo sapiens
  misc_RNA (1)...(19): siRNA sense strand
ggacuucagcagaaaucuu

SEQ ID NO: 729096 - RNA, 19 nt, Homo sapiens
  misc_RNA (1)...(19): siRNA sense strand
aagagaauguuggaggaaa

SEQ ID NO: 729097 - RNA, 19 nt, Homo sapiens
  misc_RNA (1)...(19): siRNA sense strand
uggacaaaguuuaccaaau

SEQ ID NO: 729098 - RNA, 19 nt, Homo sapiens
  misc_RNA (1)...(19): siRNA sense strand
aaaguuggacauccugaaa

SEQ ID NO: 729099 - RNA, 19 nt, Homo sapiens
  misc_RNA (1)...(19): siRNA sense strand
gcucaaauuucugccuaca

SEQ ID NO: 729100 - RNA, 19 nt, Homo sapiens
  misc_RNA (1)...(19): siRNA sense strand
uagacuggauuugcugauu

SEQ ID NO: 729101 - RNA, 19 nt, Homo sapiens
  misc_RNA (1)...(19): siRNA sense strand
ggacuacauuccgcaaagg

SEQ ID NO: 729102 - RNA, 19 nt, Homo sapiens
  misc_RNA (1)...(19): siRNA sense strand
uaucagauuucagaagaag

SEQ ID NO: 729103 - RNA, 19 nt, Homo sapiens
  misc_RNA (1)...(19): siRNA sense strand
uuaauagacuggauuugcu

SEQ ID NO: 729104 - RNA, 19 nt, Homo sapiens
  misc_RNA (1)...(19): siRNA sense strand
gggauacugucugaucauc

SEQ ID NO: 729105 - RNA, 19 nt, Homo sapiens
  misc_RNA (1)...(19): siRNA sense strand
aagagucugugcccaaauc

SEQ ID NO: 729106 - RNA, 19 nt, Homo sapiens
  misc_RNA (1)...(19): siRNA sense strand
caagagccugcugaagaua

SEQ ID NO: 729107 - RNA, 19 nt, Homo sapiens
  misc_RNA (1)...(19): siRNA sense strand
cuagaaaggaggagaugga

SEQ ID NO: 729108 - RNA, 19 nt, Homo sapiens
  misc_RNA (1)...(19): siRNA sense strand
ggagauggaaagggaacuu

SEQ ID NO: 729109 - RNA, 19 nt, Homo sapiens
  misc_RNA (1)...(19): siRNA sense strand
ucaacgacuaugaagaauu

SEQ ID NO: 729110 - RNA, 19 nt, Homo sapiens
  misc_RNA (1)...(19): siRNA sense strand
gaauguuggaggaaagcaa

SEQ ID NO: 729111 - RNA, 19 nt, Homo sapiens
  misc_RNA (1)...(19): siRNA sense strand
aggaugccuugauguuauu

SEQ ID NO: 729112 - RNA, 19 nt, Homo sapiens
  misc_RNA (1)...(19): siRNA sense strand
gagaaggaaaguuggacau

SEQ ID NO: 729113 - RNA, 19 nt, Homo sapiens
  misc_RNA (1)...(19): siRNA sense strand
gaagaagugagcagaucag

SEQ ID NO: 729114 - RNA, 19 nt, Homo sapiens
  misc_RNA (1)...(19): siRNA sense strand
gacuggauuugcugauuac

SEQ ID NO: 729115 - RNA, 19 nt, Homo sapiens
  misc_RNA (1)...(19): siRNA sense strand
caacaagagccugcugaag

SEQ ID NO: 729116 - RNA, 19 nt, Homo sapiens
  misc_RNA (1)...(19): siRNA sense strand
agcaagaacccaucaagga

SEQ ID NO: 729117 - RNA, 19 nt, Homo sapiens
  misc_RNA (1)...(19): siRNA sense strand
ucagcagaaaucuuuauga

SEQ ID NO: 729118 - RNA, 19 nt, Homo sapiens
  misc_RNA (1)...(19): siRNA sense strand
ucagauuucagaagaagug

SEQ ID NO: 729119 - RNA, 19 nt, Homo sapiens
  misc_RNA (1)...(19): siRNA sense strand
ggaagcaagaacccaucaa

SEQ ID NO: 729120 - RNA, 19 nt, Homo sapiens
  misc_RNA (1)...(19): siRNA sense strand
cugcucuuccgaauuaaua

SEQ ID NO: 729121 - RNA, 19 nt, Homo sapiens
  misc_RNA (1)...(19): siRNA sense strand
gcugauuaccuaccuaaac

SEQ ID NO: 729122 - RNA, 19 nt, Homo sapiens
  misc_RNA (1)...(19): siRNA sense strand
cccaaacuucacagcauua

SEQ ID NO: 729123 - RNA, 19 nt, Homo sapiens
  misc_RNA (1)...(19): siRNA sense strand
ucaacaagagccugcugaa

SEQ ID NO: 729124 - RNA, 19 nt, Homo sapiens
  misc_RNA (1)...(19): siRNA sense strand
ccugggagaaggaaaguug

SEQ ID NO: 729125 - RNA, 19 nt, Homo sapiens
  misc_RNA (1)...(19): siRNA sense strand
ugaaccugcuggauauuuu

SEQ ID NO: 729126 - RNA, 19 nt, Homo sapiens
  misc_RNA (1)...(19): siRNA sense strand
cuaucagauuucagaagaa

SEQ ID NO: 729127 - RNA, 19 nt, Homo sapiens
  misc_RNA (1)...(19): siRNA sense strand
aaagcaaucuguccuuccu

SEQ ID NO: 729128 - RNA, 19 nt, Homo sapiens
  misc_RNA (1)...(19): siRNA sense strand
agagaauguuggaggaaag

SEQ ID NO: 729129 - RNA, 19 nt, Homo sapiens
  misc_RNA (1)...(19): siRNA sense strand
gcaaucuguccuuccugaa

SEQ ID NO: 729130 - RNA, 19 nt, Homo sapiens
  misc_RNA (1)...(19): siRNA sense strand
gcaaacuggaugaugacau

SEQ ID NO: 729131 - RNA, 19 nt, Homo sapiens
  misc_RNA (1)...(19): siRNA sense strand
gggucaugcucuaucagau

SEQ ID NO: 729132 - RNA, 19 nt, Homo sapiens
  misc_RNA (1)...(19): siRNA sense strand
aaaagagucugugcccaaa

SEQ ID NO: 729133 - RNA, 19 nt, Homo sapiens
  misc_RNA (1)...(19): siRNA sense strand
caaaagcacgggagaaagu

SEQ ID NO: 729134 - RNA, 19 nt, Homo sapiens
  misc_RNA (1)...(19): siRNA sense strand
gugcccaaaucaacaagag

SEQ ID NO: 729135 - RNA, 19 nt, Homo sapiens
  misc_RNA (1)...(19): siRNA sense strand
uggacuacauuccgcaaag

SEQ ID NO: 729136 - RNA, 19 nt, Homo sapiens
  misc_RNA (1)...(19): siRNA sense strand
uaaucaacgacuaugaaga

SEQ ID NO: 729137 - RNA, 19 nt, Homo sapiens
  misc_RNA (1)...(19): siRNA sense strand
agagccugcugaagauaau

SEQ ID NO: 729138 - RNA, 19 nt, Homo sapiens
  misc_RNA (1)...(19): siRNA sense strand
aagagccugcugaagauaa

SEQ ID NO: 729139 - RNA, 19 nt, Homo sapiens
  misc_RNA (1)...(19): siRNA sense strand
gcucuuccgaauuaauaga

SEQ ID NO: 729140 - RNA, 19 nt, Homo sapiens
  misc_RNA (1)...(19): siRNA sense strand
ccgaauuaauagacuggau

SEQ ID NO: 729141 - RNA, 19 nt, Homo sapiens
  misc_RNA (1)...(19): siRNA sense strand
ggacaaaguuuaccaaaug

SEQ ID NO: 729142 - RNA, 19 nt, Homo sapiens
  misc_RNA (1)...(19): siRNA sense strand
caacgacuaugaagaauuc

SEQ ID NO: 729143 - RNA, 19 nt, Homo sapiens
  misc_RNA (1)...(19): siRNA sense strand
gaucagaauugaggucuuu

SEQ ID NO: 729144 - RNA, 19 nt, Homo sapiens
  misc_RNA (1)...(19): siRNA sense strand
gaagugagcagaucagaau

SEQ ID NO: 729145 - RNA, 19 nt, Homo sapiens
  misc_RNA (1)...(19): siRNA sense strand
gaggaaaucuccaaaugca

SEQ ID NO: 729146 - RNA, 19 nt, Homo sapiens
  misc_RNA (1)...(19): siRNA sense strand
ggaaaucuccaaaugcaaa

SEQ ID NO: 729147 - RNA, 19 nt, Homo sapiens
  misc_RNA (1)...(19): siRNA sense strand
caaacuggaugaugacaug

SEQ ID NO: 729148 - RNA, 19 nt, Homo sapiens
  misc_RNA (1)...(19): siRNA sense strand
agacuggauuugcugauua

SEQ ID NO: 729149 - RNA, 19 nt, Homo sapiens
  misc_RNA (1)...(19): siRNA sense strand
gacaugaaccugcuggaua

SEQ ID NO: 729150 - RNA, 19 nt, Homo sapiens
  misc_RNA (1)...(19): siRNA sense strand
gaagauaaucaacgacuau

SEQ ID NO: 729151 - RNA, 19 nt, Homo sapiens
  misc_RNA (1)...(19): siRNA sense strand
gacaaaguuuaccaaauga

SEQ ID NO: 729152 - RNA, 19 nt, Homo sapiens
  misc_RNA (1)...(19): siRNA sense strand
cagcagaaaucuuuaugau

SEQ ID NO: 729153 - RNA, 19 nt, Homo sapiens
  misc_RNA (1)...(19): siRNA sense strand
gaaaggaggagauggaaag

SEQ ID NO: 729154 - RNA, 19 nt, Homo sapiens
  misc_RNA (1)...(19): siRNA sense strand
gauaaucaacgacuaugaa

SEQ ID NO: 729155 - RNA, 19 nt, Homo sapiens
  misc_RNA (1)...(19): siRNA sense strand
gaucuggccucccucaagu

SEQ ID NO: 729156 - RNA, 19 nt, Homo sapiens
  misc_RNA (1)...(19): siRNA sense strand
gaauugaggucuuuuaagu

SEQ ID NO: 729157 - RNA, 19 nt, Homo sapiens
  misc_RNA (1)...(19): siRNA sense strand
aagaggaaaucuccaaaug

SEQ ID NO: 729158 - RNA, 19 nt, Homo sapiens
  misc_RNA (1)...(19): siRNA sense strand
gcaagaacccaucaaggau

SEQ ID NO: 729159 - RNA, 19 nt, Homo sapiens
  misc_RNA (1)...(19): siRNA sense strand
ggaaagggaacuucagaca

SEQ ID NO: 729160 - RNA, 19 nt, Homo sapiens
  misc_RNA (1)...(19): siRNA sense strand
gcccaaacuucacagcauu

SEQ ID NO: 729161 - RNA, 19 nt, Homo sapiens
  misc_RNA (1)...(19): siRNA sense strand
acaugaaccugcuggauau

SEQ ID NO: 729162 - RNA, 19 nt, Homo sapiens
  misc_RNA (1)...(19): siRNA sense strand
gucaugcucuaucagauuu

SEQ ID NO: 729163 - RNA, 19 nt, Homo sapiens
  misc_RNA (1)...(19): siRNA sense strand
ucauagagauggagaagag

SEQ ID NO: 729164 - RNA, 19 nt, Homo sapiens
  misc_RNA (1)...(19): siRNA sense strand
ucuaucagauuucagaaga

SEQ ID NO: 729165 - RNA, 19 nt, Homo sapiens
  misc_RNA (1)...(19): siRNA sense strand
ugaagauaaucaacgacua

SEQ ID NO: 729166 - RNA, 19 nt, Homo sapiens
  misc_RNA (1)...(19): siRNA sense strand
acaagagccugcugaagau

SEQ ID NO: 729167 - RNA, 19 nt, Homo sapiens
  misc_RNA (1)...(19): siRNA sense strand
aaugcaaacuggaugauga

SEQ ID NO: 729168 - RNA, 19 nt, Homo sapiens
  misc_RNA (1)...(19): siRNA sense strand
uggauuugcugauuaccua

SEQ ID NO: 729169 - RNA, 19 nt, Homo sapiens
  misc_RNA (1)...(19): siRNA sense strand
gugagcagaucagaauuga

SEQ ID NO: 729170 - RNA, 19 nt, Homo sapiens
  misc_RNA (1)...(19): siRNA sense strand
gaauggaacacacuuggau

SEQ ID NO: 729171 - RNA, 19 nt, Homo sapiens
  misc_RNA (1)...(19): siRNA sense strand
gggagaaagugcccaaacu

SEQ ID NO: 729172 - RNA, 19 nt, Homo sapiens
  misc_RNA (1)...(19): siRNA sense strand
aaucaacgacuaugaagaa

SEQ ID NO: 729173 - RNA, 19 nt, Homo sapiens
  misc_RNA (1)...(19): siRNA sense strand
ccaggcagggcucaaauuu

SEQ ID NO: 729174 - RNA, 19 nt, Homo sapiens
  misc_RNA (1)...(19): siRNA sense strand
gcaagaggaaaucuccaaa

SEQ ID NO: 729175 - RNA, 19 nt, Homo sapiens
  misc_RNA (1)...(19): siRNA sense strand
gaaaguuggacauccugaa

SEQ ID NO: 729176 - RNA, 19 nt, Homo sapiens
  misc_RNA (1)...(19): siRNA sense strand
gaucaucaacaaucacaau

SEQ ID NO: 729177 - RNA, 19 nt, Homo sapiens
  misc_RNA (1)...(19): siRNA sense strand
gacuucagcagaaaucuuu

SEQ ID NO: 729178 - RNA, 19 nt, Homo sapiens
  misc_RNA (1)...(19): siRNA sense strand
cagaagaagugagcagauc

SEQ ID NO: 729179 - RNA, 19 nt, Homo sapiens
  misc_RNA (1)...(19): siRNA sense strand
aacaagagccugcugaaga

SEQ ID NO: 729180 - RNA, 19 nt, Homo sapiens
  misc_RNA (1)...(19): siRNA sense strand
cugauuaccuaccuaaaca

SEQ ID NO: 729181 - RNA, 19 nt, Homo sapiens
  misc_RNA (1)...(19): siRNA sense strand
ggucaugcucuaucagauu

SEQ ID NO: 729182 - RNA, 19 nt, Homo sapiens
  misc_RNA (1)...(19): siRNA sense strand
gaagcaagaacccaucaag

SEQ ID NO: 729183 - RNA, 19 nt, Homo sapiens
  misc_RNA (1)...(19): siRNA sense strand
uuaccuaccuaaacacuag

SEQ ID NO: 729184 - RNA, 19 nt, Homo sapiens
  misc_RNA (1)...(19): siRNA sense strand
aggcagggcucaaauuucu

SEQ ID NO: 729185 - RNA, 19 nt, Homo sapiens
  misc_RNA (1)...(19): siRNA sense strand
cgaauuaauagacuggauu

SEQ ID NO: 729186 - RNA, 19 nt, Homo sapiens
  misc_RNA (1)...(19): siRNA sense strand
caagaggaaaucuccaaau

SEQ ID NO: 729187 - RNA, 19 nt, Homo sapiens
  misc_RNA (1)...(19): siRNA sense strand
ccaaaugcaaacuggauga

SEQ ID NO: 729188 - RNA, 19 nt, Homo sapiens
  misc_RNA (1)...(19): siRNA sense strand
ggacuucagcagaaaucuu

SEQ ID NO: 729189 - RNA, 19 nt, Homo sapiens
  misc_RNA (1)...(19): siRNA sense strand
aagagaauguuggaggaaa

SEQ ID NO: 729190 - RNA, 19 nt, Homo sapiens
  misc_RNA (1)...(19): siRNA sense strand
ggaauggaacacacuugga

SEQ ID NO: 729191 - RNA, 19 nt, Homo sapiens
  misc_RNA (1)...(19): siRNA sense strand
uggacaaaguuuaccaaau

SEQ ID NO: 729192 - RNA, 19 nt, Homo sapiens
  misc_RNA (1)...(19): siRNA sense strand
aaaguuggacauccugaaa

SEQ ID NO: 729193 - RNA, 19 nt, Homo sapiens
  misc_RNA (1)...(19): siRNA sense strand
gcucaaauuucugccuaca

SEQ ID NO: 729194 - RNA, 19 nt, Homo sapiens
  misc_RNA (1)...(19): siRNA sense strand
uagacuggauuugcugauu

SEQ ID NO: 729195 - RNA, 19 nt, Homo sapiens
  misc_RNA (1)...(19): siRNA sense strand
ggacuacauuccgcaaagg

SEQ ID NO: 729196 - RNA, 19 nt, Homo sapiens
  misc_RNA (1)...(19): siRNA sense strand
uaucagauuucagaagaag

SEQ ID NO: 729197 - RNA, 19 nt, Homo sapiens
  misc_RNA (1)...(19): siRNA sense strand
uuaauagacuggauuugcu

SEQ ID NO: 729198 - RNA, 19 nt, Homo sapiens
  misc_RNA (1)...(19): siRNA sense strand
gggauacugucugaucauc

SEQ ID NO: 729199 - RNA, 19 nt, Homo sapiens
  misc_RNA (1)...(19): siRNA sense strand
aagagucugugcccaaauc

SEQ ID NO: 729200 - RNA, 19 nt, Homo sapiens
  misc_RNA (1)...(19): siRNA sense strand
caagagccugcugaagaua

SEQ ID NO: 729201 - RNA, 19 nt, Homo sapiens
  misc_RNA (1)...(19): siRNA sense strand
cuagaaaggaggagaugga

SEQ ID NO: 729202 - RNA, 19 nt, Homo sapiens
  misc_RNA (1)...(19): siRNA sense strand
ggagauggaaagggaacuu

SEQ ID NO: 729203 - RNA, 19 nt, Homo sapiens
  misc_RNA (1)...(19): siRNA sense strand
aggaugccuugauguuauu

SEQ ID NO: 729204 - RNA, 19 nt, Homo sapiens
  misc_RNA (1)...(19): siRNA sense strand
ucaacgacuaugaagaauu

SEQ ID NO: 729205 - RNA, 19 nt, Homo sapiens
  misc_RNA (1)...(19): siRNA sense strand
gaauguuggaggaaagcaa

SEQ ID NO: 729206 - RNA, 19 nt, Homo sapiens
  misc_RNA (1)...(19): siRNA sense strand
gagaaggaaaguuggacau

SEQ ID NO: 729207 - RNA, 19 nt, Homo sapiens
  misc_RNA (1)...(19): siRNA sense strand
gaagaagugagcagaucag

SEQ ID NO: 729208 - RNA, 19 nt, Homo sapiens
  misc_RNA (1)...(19): siRNA sense strand
gacuggauuugcugauuac

SEQ ID NO: 729209 - RNA, 19 nt, Homo sapiens
  misc_RNA (1)...(19): siRNA sense strand
agcaagaacccaucaagga

SEQ ID NO: 729210 - RNA, 19 nt, Homo sapiens
  misc_RNA (1)...(19): siRNA sense strand
caacaagagccugcugaag

SEQ ID NO: 729211 - RNA, 19 nt, Homo sapiens
  misc_RNA (1)...(19): siRNA sense strand
ucagcagaaaucuuuauga

SEQ ID NO: 729212 - RNA, 19 nt, Homo sapiens
  misc_RNA (1)...(19): siRNA sense strand
cugcucuuccgaauuaaua

SEQ ID NO: 729213 - RNA, 19 nt, Homo sapiens
  misc_RNA (1)...(19): siRNA sense strand
ggaagcaagaacccaucaa

SEQ ID NO: 729214 - RNA, 19 nt, Homo sapiens
  misc_RNA (1)...(19): siRNA sense strand
ucagauuucagaagaagug

SEQ ID NO: 729215 - RNA, 19 nt, Homo sapiens
  misc_RNA (1)...(19): siRNA sense strand
gcugauuaccuaccuaaac

SEQ ID NO: 729216 - RNA, 19 nt, Homo sapiens
  misc_RNA (1)...(19): siRNA sense strand
cccaaacuucacagcauua

SEQ ID NO: 729217 - RNA, 19 nt, Homo sapiens
  misc_RNA (1)...(19): siRNA sense strand
ucaacaagagccugcugaa

SEQ ID NO: 729218 - RNA, 19 nt, Homo sapiens
  misc_RNA (1)...(19): siRNA sense strand
ccugggagaaggaaaguug

SEQ ID NO: 729219 - RNA, 19 nt, Homo sapiens
  misc_RNA (1)...(19): siRNA sense strand
ugaaccugcuggauauuuu

SEQ ID NO: 729220 - RNA, 19 nt, Homo sapiens
  misc_RNA (1)...(19): siRNA sense strand
gcaaucuguccuuccugaa

SEQ ID NO: 729221 - RNA, 19 nt, Homo sapiens
  misc_RNA (1)...(19): siRNA sense strand
agagaauguuggaggaaag

SEQ ID NO: 729222 - RNA, 19 nt, Homo sapiens
  misc_RNA (1)...(19): siRNA sense strand
gcaaacuggaugaugacau

SEQ ID NO: 729223 - RNA, 19 nt, Homo sapiens
  misc_RNA (1)...(19): siRNA sense strand
aaagcaaucuguccuuccu

SEQ ID NO: 729224 - RNA, 19 nt, Homo sapiens
  misc_RNA (1)...(19): siRNA sense strand
cuaucagauuucagaagaa

SEQ ID NO: 729225 - RNA, 19 nt, Homo sapiens
  misc_RNA (1)...(19): siRNA sense strand
gggucaugcucuaucagau

SEQ ID NO: 729226 - RNA, 19 nt, Homo sapiens
  misc_RNA (1)...(19): siRNA sense strand
aaaagagucugugcccaaa

SEQ ID NO: 729227 - RNA, 19 nt, Homo sapiens
  misc_RNA (1)...(19): siRNA sense strand
caaaagcacgggagaaagu

SEQ ID NO: 729228 - RNA, 19 nt, Homo sapiens
  misc_RNA (1)...(19): siRNA sense strand
gugcccaaaucaacaagag

SEQ ID NO: 729229 - RNA, 19 nt, Homo sapiens
  misc_RNA (1)...(19): siRNA sense strand
uggacuacauuccgcaaag

SEQ ID NO: 729230 - RNA, 19 nt, Homo sapiens
  misc_RNA (1)...(19): siRNA sense strand
uaaucaacgacuaugaaga

SEQ ID NO: 729231 - RNA, 19 nt, Homo sapiens
  misc_RNA (1)...(19): siRNA sense strand
agagccugcugaagauaau

SEQ ID NO: 729232 - RNA, 19 nt, Homo sapiens
  misc_RNA (1)...(19): siRNA sense strand
aagagccugcugaagauaa

SEQ ID NO: 729233 - RNA, 19 nt, Homo sapiens
  misc_RNA (1)...(19): siRNA sense strand
gcucuuccgaauuaauaga

SEQ ID NO: 729234 - RNA, 19 nt, Homo sapiens
  misc_RNA (1)...(19): siRNA sense strand
ccgaauuaauagacuggau

SEQ ID NO: 729235 - RNA, 19 nt, Homo sapiens
  misc_RNA (1)...(19): siRNA sense strand
ggacaaaguuuaccaaaug

SEQ ID NO: 729236 - RNA, 19 nt, Homo sapiens
  misc_RNA (1)...(19): siRNA sense strand
caacgacuaugaagaauuc

SEQ ID NO: 729237 - RNA, 19 nt, Homo sapiens
  misc_RNA (1)...(19): siRNA sense strand
gaucagaauugaggucuuu

SEQ ID NO: 729238 - RNA, 19 nt, Homo sapiens
  misc_RNA (1)...(19): siRNA sense strand
gaagugagcagaucagaau

SEQ ID NO: 729239 - RNA, 19 nt, Homo sapiens
  misc_RNA (1)...(19): siRNA sense strand
gaggaaaucuccaaaugca

SEQ ID NO: 729240 - RNA, 19 nt, Homo sapiens
  misc_RNA (1)...(19): siRNA sense strand
ggaaaucuccaaaugcaaa

SEQ ID NO: 729241 - RNA, 19 nt, Homo sapiens
  misc_RNA (1)...(19): siRNA sense strand
caaacuggaugaugacaug

SEQ ID NO: 729242 - RNA, 19 nt, Homo sapiens
  misc_RNA (1)...(19): siRNA sense strand
agacuggauuugcugauua

SEQ ID NO: 729243 - RNA, 19 nt, Homo sapiens
  misc_RNA (1)...(19): siRNA sense strand
gacaugaaccugcuggaua

SEQ ID NO: 729244 - RNA, 19 nt, Homo sapiens
  misc_RNA (1)...(19): siRNA sense strand
gaagauaaucaacgacuau

SEQ ID NO: 729245 - RNA, 19 nt, Homo sapiens
  misc_RNA (1)...(19): siRNA sense strand
gacaaaguuuaccaaauga

SEQ ID NO: 729246 - RNA, 19 nt, Homo sapiens
  misc_RNA (1)...(19): siRNA sense strand
cagcagaaaucuuuaugau

SEQ ID NO: 729247 - RNA, 19 nt, Homo sapiens
  misc_RNA (1)...(19): siRNA sense strand
gaaaggaggagauggaaag

SEQ ID NO: 729248 - RNA, 19 nt, Homo sapiens
  misc_RNA (1)...(19): siRNA sense strand
gauaaucaacgacuaugaa

SEQ ID NO: 729249 - RNA, 19 nt, Homo sapiens
  misc_RNA (1)...(19): siRNA sense strand
gaucuggccucccucaagu

SEQ ID NO: 729250 - RNA, 19 nt, Homo sapiens
  misc_RNA (1)...(19): siRNA sense strand
gaauugaggucuuuuaagu

SEQ ID NO: 729251 - RNA, 19 nt, Homo sapiens
  misc_RNA (1)...(19): siRNA sense strand
aagaggaaaucuccaaaug

SEQ ID NO: 729252 - RNA, 19 nt, Homo sapiens
  misc_RNA (1)...(19): siRNA sense strand
gcaagaacccaucaaggau

SEQ ID NO: 729253 - RNA, 19 nt, Homo sapiens
  misc_RNA (1)...(19): siRNA sense strand
ggaaagggaacuucagaca

SEQ ID NO: 729254 - RNA, 19 nt, Homo sapiens
  misc_RNA (1)...(19): siRNA sense strand
gcccaaacuucacagcauu

SEQ ID NO: 729255 - RNA, 19 nt, Homo sapiens
  misc_RNA (1)...(19): siRNA sense strand
acaugaaccugcuggauau

SEQ ID NO: 729256 - RNA, 19 nt, Homo sapiens
  misc_RNA (1)...(19): siRNA sense strand
gucaugcucuaucagauuu

SEQ ID NO: 729257 - RNA, 19 nt, Homo sapiens
  misc_RNA (1)...(19): siRNA sense strand
ucauagagauggagaagag

SEQ ID NO: 729258 - RNA, 19 nt, Homo sapiens
  misc_RNA (1)...(19): siRNA sense strand
ucuaucagauuucagaaga

SEQ ID NO: 729259 - RNA, 19 nt, Homo sapiens
  misc_RNA (1)...(19): siRNA sense strand
ugaagauaaucaacgacua

SEQ ID NO: 729260 - RNA, 19 nt, Homo sapiens
  misc_RNA (1)...(19): siRNA sense strand
acaagagccugcugaagau

SEQ ID NO: 729261 - RNA, 19 nt, Homo sapiens
  misc_RNA (1)...(19): siRNA sense strand
aaugcaaacuggaugauga

SEQ ID NO: 729262 - RNA, 19 nt, Homo sapiens
  misc_RNA (1)...(19): siRNA sense strand
uggauuugcugauuaccua

SEQ ID NO: 729263 - RNA, 19 nt, Homo sapiens
  misc_RNA (1)...(19): siRNA sense strand
gugagcagaucagaauuga

SEQ ID NO: 729264 - RNA, 19 nt, Homo sapiens
  misc_RNA (1)...(19): siRNA sense strand
gaauggaacacacuuggau

SEQ ID NO: 729265 - RNA, 19 nt, Homo sapiens
  misc_RNA (1)...(19): siRNA sense strand
gggagaaagugcccaaacu

SEQ ID NO: 729266 - RNA, 19 nt, Homo sapiens
  misc_RNA (1)...(19): siRNA sense strand
aaucaacgacuaugaagaa

SEQ ID NO: 729267 - RNA, 19 nt, Homo sapiens
  misc_RNA (1)...(19): siRNA sense strand
ccaggcagggcucaaauuu

SEQ ID NO: 729268 - RNA, 19 nt, Homo sapiens
  misc_RNA (1)...(19): siRNA sense strand
gcaagaggaaaucuccaaa

SEQ ID NO: 729269 - RNA, 19 nt, Homo sapiens
  misc_RNA (1)...(19): siRNA sense strand
gaaaguuggacauccugaa

SEQ ID NO: 729270 - RNA, 19 nt, Homo sapiens
  misc_RNA (1)...(19): siRNA sense strand
gaucaucaacaaucacaau

SEQ ID NO: 729271 - RNA, 19 nt, Homo sapiens
  misc_RNA (1)...(19): siRNA sense strand
gacuucagcagaaaucuuu

SEQ ID NO: 729272 - RNA, 19 nt, Homo sapiens
  misc_RNA (1)...(19): siRNA sense strand
cagaagaagugagcagauc

SEQ ID NO: 729273 - RNA, 19 nt, Homo sapiens
  misc_RNA (1)...(19): siRNA sense strand
aacaagagccugcugaaga

SEQ ID NO: 729274 - RNA, 19 nt, Homo sapiens
  misc_RNA (1)...(19): siRNA sense strand
cugauuaccuaccuaaaca

SEQ ID NO: 729275 - RNA, 19 nt, Homo sapiens
  misc_RNA (1)...(19): siRNA sense strand
ggucaugcucuaucagauu

SEQ ID NO: 729276 - RNA, 19 nt, Homo sapiens
  misc_RNA (1)...(19): siRNA sense strand
gaagcaagaacccaucaag

SEQ ID NO: 729277 - RNA, 19 nt, Homo sapiens
  misc_RNA (1)...(19): siRNA sense strand
uuaccuaccuaaacacuag

SEQ ID NO: 729278 - RNA, 19 nt, Homo sapiens
  misc_RNA (1)...(19): siRNA sense strand
aggcagggcucaaauuucu

SEQ ID NO: 729279 - RNA, 19 nt, Homo sapiens
  misc_RNA (1)...(19): siRNA sense strand
cgaauuaauagacuggauu

SEQ ID NO: 729280 - RNA, 19 nt, Homo sapiens
  misc_RNA (1)...(19): siRNA sense strand
caagaggaaaucuccaaau

SEQ ID NO: 729281 - RNA, 19 nt, Homo sapiens
  misc_RNA (1)...(19): siRNA sense strand
ccaaaugcaaacuggauga

SEQ ID NO: 729282 - RNA, 19 nt, Homo sapiens
  misc_RNA (1)...(19): siRNA sense strand
ggacuucagcagaaaucuu

SEQ ID NO: 729283 - RNA, 19 nt, Homo sapiens
  misc_RNA (1)...(19): siRNA sense strand
aagagaauguuggaggaaa

SEQ ID NO: 729284 - RNA, 19 nt, Homo sapiens
  misc_RNA (1)...(19): siRNA sense strand
ggaauggaacacacuugga

SEQ ID NO: 729285 - RNA, 19 nt, Homo sapiens
  misc_RNA (1)...(19): siRNA sense strand
uggacaaaguuuaccaaau

SEQ ID NO: 729286 - RNA, 19 nt, Homo sapiens
  misc_RNA (1)...(19): siRNA sense strand
aaaguuggacauccugaaa

SEQ ID NO: 729287 - RNA, 19 nt, Homo sapiens
  misc_RNA (1)...(19): siRNA sense strand
gcucaaauuucugccuaca

SEQ ID NO: 729288 - RNA, 19 nt, Homo sapiens
  misc_RNA (1)...(19): siRNA sense strand
uagacuggauuugcugauu

SEQ ID NO: 729289 - RNA, 19 nt, Homo sapiens
  misc_RNA (1)...(19): siRNA sense strand
ggacuacauuccgcaaagg

SEQ ID NO: 729290 - RNA, 19 nt, Homo sapiens
  misc_RNA (1)...(19): siRNA sense strand
uaucagauuucagaagaag

SEQ ID NO: 729291 - RNA, 19 nt, Homo sapiens
  misc_RNA (1)...(19): siRNA sense strand
uuaauagacuggauuugcu

SEQ ID NO: 729292 - RNA, 19 nt, Homo sapiens
  misc_RNA (1)...(19): siRNA sense strand
gggauacugucugaucauc

SEQ ID NO: 729293 - RNA, 19 nt, Homo sapiens
  misc_RNA (1)...(19): siRNA sense strand
aagagucugugcccaaauc

SEQ ID NO: 729294 - RNA, 19 nt, Homo sapiens
  misc_RNA (1)...(19): siRNA sense strand
caagagccugcugaagaua

SEQ ID NO: 729295 - RNA, 19 nt, Homo sapiens
  misc_RNA (1)...(19): siRNA sense strand
cuagaaaggaggagaugga

SEQ ID NO: 729296 - RNA, 19 nt, Homo sapiens
  misc_RNA (1)...(19): siRNA sense strand
ggagauggaaagggaacuu

SEQ ID NO: 729297 - RNA, 19 nt, Homo sapiens
  misc_RNA (1)...(19): siRNA sense strand
aggaugccuugauguuauu

SEQ ID NO: 729298 - RNA, 19 nt, Homo sapiens
  misc_RNA (1)...(19): siRNA sense strand
ucaacgacuaugaagaauu

SEQ ID NO: 729299 - RNA, 19 nt, Homo sapiens
  misc_RNA (1)...(19): siRNA sense strand
gaauguuggaggaaagcaa

SEQ ID NO: 729300 - RNA, 19 nt, Homo sapiens
  misc_RNA (1)...(19): siRNA sense strand
gagaaggaaaguuggacau

SEQ ID NO: 729301 - RNA, 19 nt, Homo sapiens
  misc_RNA (1)...(19): siRNA sense strand
gaagaagugagcagaucag

SEQ ID NO: 729302 - RNA, 19 nt, Homo sapiens
  misc_RNA (1)...(19): siRNA sense strand
gacuggauuugcugauuac

SEQ ID NO: 729303 - RNA, 19 nt, Homo sapiens
  misc_RNA (1)...(19): siRNA sense strand
agcaagaacccaucaagga

SEQ ID NO: 729304 - RNA, 19 nt, Homo sapiens
  misc_RNA (1)...(19): siRNA sense strand
caacaagagccugcugaag

SEQ ID NO: 729305 - RNA, 19 nt, Homo sapiens
  misc_RNA (1)...(19): siRNA sense strand
ucagcagaaaucuuuauga

SEQ ID NO: 729306 - RNA, 19 nt, Homo sapiens
  misc_RNA (1)...(19): siRNA sense strand
cugcucuuccgaauuaaua

SEQ ID NO: 729307 - RNA, 19 nt, Homo sapiens
  misc_RNA (1)...(19): siRNA sense strand
ggaagcaagaacccaucaa

SEQ ID NO: 729308 - RNA, 19 nt, Homo sapiens
  misc_RNA (1)...(19): siRNA sense strand
ucagauuucagaagaagug

SEQ ID NO: 729309 - RNA, 19 nt, Homo sapiens
  misc_RNA (1)...(19): siRNA sense strand
gcugauuaccuaccuaaac

SEQ ID NO: 729310 - RNA, 19 nt, Homo sapiens
  misc_RNA (1)...(19): siRNA sense strand
cccaaacuucacagcauua

SEQ ID NO: 729311 - RNA, 19 nt, Homo sapiens
  misc_RNA (1)...(19): siRNA sense strand
ucaacaagagccugcugaa

SEQ ID NO: 729312 - RNA, 19 nt, Homo sapiens
  misc_RNA (1)...(19): siRNA sense strand
ccugggagaaggaaaguug

SEQ ID NO: 729313 - RNA, 19 nt, Homo sapiens
  misc_RNA (1)...(19): siRNA sense strand
ugaaccugcuggauauuuu

SEQ ID NO: 729314 - RNA, 19 nt, Homo sapiens
  misc_RNA (1)...(19): siRNA sense strand
gcaaucuguccuuccugaa

SEQ ID NO: 729315 - RNA, 19 nt, Homo sapiens
  misc_RNA (1)...(19): siRNA sense strand
agagaauguuggaggaaag

SEQ ID NO: 729316 - RNA, 19 nt, Homo sapiens
  misc_RNA (1)...(19): siRNA sense strand
gcaaacuggaugaugacau

SEQ ID NO: 729317 - RNA, 19 nt, Homo sapiens
  misc_RNA (1)...(19): siRNA sense strand
aaagcaaucuguccuuccu

SEQ ID NO: 729318 - RNA, 19 nt, Homo sapiens
  misc_RNA (1)...(19): siRNA sense strand
cuaucagauuucagaagaa

SEQ ID NO: 729319 - RNA, 19 nt, Homo sapiens
  misc_RNA (1)...(19): siRNA sense strand
gggucaugcucuaucagau

SEQ ID NO: 729320 - RNA, 19 nt, Homo sapiens
  misc_RNA (1)...(19): siRNA sense strand
aaaagagucugugcccaaa

SEQ ID NO: 729321 - RNA, 19 nt, Homo sapiens
  misc_RNA (1)...(19): siRNA sense strand
caaaagcacgggagaaagu

SEQ ID NO: 729322 - RNA, 19 nt, Homo sapiens
  misc_RNA (1)...(19): siRNA sense strand
gugcccaaaucaacaagag

SEQ ID NO: 729323 - RNA, 19 nt, Homo sapiens
  misc_RNA (1)...(19): siRNA sense strand
uggacuacauuccgcaaag

SEQ ID NO: 729324 - RNA, 19 nt, Homo sapiens
  misc_RNA (1)...(19): siRNA sense strand
uaaucaacgacuaugaaga

SEQ ID NO: 729325 - RNA, 19 nt, Homo sapiens
  misc_RNA (1)...(19): siRNA sense strand
agagccugcugaagauaau

SEQ ID NO: 729326 - RNA, 19 nt, Homo sapiens
  misc_RNA (1)...(19): siRNA sense strand
aagagccugcugaagauaa

SEQ ID NO: 729327 - RNA, 19 nt, Homo sapiens
  misc_RNA (1)...(19): siRNA sense strand
gcucuuccgaauuaauaga

SEQ ID NO: 729328 - RNA, 19 nt, Homo sapiens
  misc_RNA (1)...(19): siRNA sense strand
ccgaauuaauagacuggau

SEQ ID NO: 729329 - RNA, 19 nt, Homo sapiens
  misc_RNA (1)...(19): siRNA sense strand
ggacaaaguuuaccaaaug

SEQ ID NO: 729330 - RNA, 19 nt, Homo sapiens
  misc_RNA (1)...(19): siRNA sense strand
caacgacuaugaagaauuc

SEQ ID NO: 729331 - RNA, 19 nt, Homo sapiens
  misc_RNA (1)...(19): siRNA sense strand
gaucagaauugaggucuuu

SEQ ID NO: 729332 - RNA, 19 nt, Homo sapiens
  misc_RNA (1)...(19): siRNA sense strand
gaagugagcagaucagaau

SEQ ID NO: 729333 - RNA, 19 nt, Homo sapiens
  misc_RNA (1)...(19): siRNA sense strand
gaggaaaucuccaaaugca

SEQ ID NO: 729334 - RNA, 19 nt, Homo sapiens
  misc_RNA (1)...(19): siRNA sense strand
ggaaaucuccaaaugcaaa

SEQ ID NO: 729335 - RNA, 19 nt, Homo sapiens
  misc_RNA (1)...(19): siRNA sense strand
caaacuggaugaugacaug

SEQ ID NO: 729336 - RNA, 19 nt, Homo sapiens
  misc_RNA (1)...(19): siRNA sense strand
agacuggauuugcugauua

SEQ ID NO: 729337 - RNA, 19 nt, Homo sapiens
  misc_RNA (1)...(19): siRNA sense strand
gacaugaaccugcuggaua

SEQ ID NO: 729338 - RNA, 19 nt, Homo sapiens
  misc_RNA (1)...(19): siRNA sense strand
gaagauaaucaacgacuau

SEQ ID NO: 729339 - RNA, 19 nt, Homo sapiens
  misc_RNA (1)...(19): siRNA sense strand
gacaaaguuuaccaaauga

SEQ ID NO: 729340 - RNA, 19 nt, Homo sapiens
  misc_RNA (1)...(19): siRNA sense strand
cagcagaaaucuuuaugau

SEQ ID NO: 729341 - RNA, 19 nt, Homo sapiens
  misc_RNA (1)...(19): siRNA sense strand
gaaaggaggagauggaaag

SEQ ID NO: 729342 - RNA, 19 nt, Homo sapiens
  misc_RNA (1)...(19): siRNA sense strand
gauaaucaacgacuaugaa

SEQ ID NO: 729343 - RNA, 19 nt, Homo sapiens
  misc_RNA (1)...(19): siRNA sense strand
gaucuggccucccucaagu

SEQ ID NO: 729344 - RNA, 19 nt, Homo sapiens
  misc_RNA (1)...(19): siRNA sense strand
gaauugaggucuuuuaagu

SEQ ID NO: 729345 - RNA, 19 nt, Homo sapiens
  misc_RNA (1)...(19): siRNA sense strand
aagaggaaaucuccaaaug

SEQ ID NO: 729346 - RNA, 19 nt, Homo sapiens
  misc_RNA (1)...(19): siRNA sense strand
gcaagaacccaucaaggau

SEQ ID NO: 729347 - RNA, 19 nt, Homo sapiens
  misc_RNA (1)...(19): siRNA sense strand
ggaaagggaacuucagaca

SEQ ID NO: 729348 - RNA, 19 nt, Homo sapiens
  misc_RNA (1)...(19): siRNA sense strand
gcccaaacuucacagcauu

SEQ ID NO: 729349 - RNA, 19 nt, Homo sapiens
  misc_RNA (1)...(19): siRNA sense strand
acaugaaccugcuggauau

SEQ ID NO: 729350 - RNA, 19 nt, Homo sapiens
  misc_RNA (1)...(19): siRNA sense strand
gucaugcucuaucagauuu

SEQ ID NO: 729351 - RNA, 19 nt, Homo sapiens
  misc_RNA (1)...(19): siRNA sense strand
ucauagagauggagaagag

SEQ ID NO: 729352 - RNA, 19 nt, Homo sapiens
  misc_RNA (1)...(19): siRNA sense strand
ucuaucagauuucagaaga

SEQ ID NO: 729353 - RNA, 19 nt, Homo sapiens
  misc_RNA (1)...(19): siRNA sense strand
ugaagauaaucaacgacua

SEQ ID NO: 729354 - RNA, 19 nt, Homo sapiens
  misc_RNA (1)...(19): siRNA sense strand
acaagagccugcugaagau

SEQ ID NO: 729355 - RNA, 19 nt, Homo sapiens
  misc_RNA (1)...(19): siRNA sense strand
aaugcaaacuggaugauga

SEQ ID NO: 729356 - RNA, 19 nt, Homo sapiens
  misc_RNA (1)...(19): siRNA sense strand
uggauuugcugauuaccua

SEQ ID NO: 729357 - RNA, 19 nt, Homo sapiens
  misc_RNA (1)...(19): siRNA sense strand
gugagcagaucagaauuga

SEQ ID NO: 729358 - RNA, 19 nt, Homo sapiens
  misc_RNA (1)...(19): siRNA sense strand
gaauggaacacacuuggau

SEQ ID NO: 729359 - RNA, 19 nt, Homo sapiens
  misc_RNA (1)...(19): siRNA sense strand
gggagaaagugcccaaacu

SEQ ID NO: 729360 - RNA, 19 nt, Homo sapiens
  misc_RNA (1)...(19): siRNA sense strand
aaucaacgacuaugaagaa

SEQ ID NO: 729361 - RNA, 19 nt, Homo sapiens
  misc_RNA (1)...(19): siRNA sense strand
ccaggcagggcucaaauuu

SEQ ID NO: 729362 - RNA, 19 nt, Homo sapiens
  misc_RNA (1)...(19): siRNA sense strand
gcaagaggaaaucuccaaa

SEQ ID NO: 729363 - RNA, 19 nt, Homo sapiens
  misc_RNA (1)...(19): siRNA sense strand
gaaaguuggacauccugaa

SEQ ID NO: 729364 - RNA, 19 nt, Homo sapiens
  misc_RNA (1)...(19): siRNA sense strand
gaucaucaacaaucacaau

SEQ ID NO: 729365 - RNA, 19 nt, Homo sapiens
  misc_RNA (1)...(19): siRNA sense strand
gacuucagcagaaaucuuu

SEQ ID NO: 729366 - RNA, 19 nt, Homo sapiens
  misc_RNA (1)...(19): siRNA sense strand
cagaagaagugagcagauc

SEQ ID NO: 729367 - RNA, 19 nt, Homo sapiens
  misc_RNA (1)...(19): siRNA sense strand
aacaagagccugcugaaga

SEQ ID NO: 729368 - RNA, 19 nt, Homo sapiens
  misc_RNA (1)...(19): siRNA sense strand
cugauuaccuaccuaaaca

SEQ ID NO: 729369 - RNA, 19 nt, Homo sapiens
  misc_RNA (1)...(19): siRNA sense strand
ggucaugcucuaucagauu

SEQ ID NO: 729370 - RNA, 19 nt, Homo sapiens
  misc_RNA (1)...(19): siRNA sense strand
gaagcaagaacccaucaag

SEQ ID NO: 729371 - RNA, 19 nt, Homo sapiens
  misc_RNA (1)...(19): siRNA sense strand
uuaccuaccuaaacacuag

SEQ ID NO: 729372 - RNA, 19 nt, Homo sapiens
  misc_RNA (1)...(19): siRNA sense strand
aggcagggcucaaauuucu

SEQ ID NO: 729373 - RNA, 19 nt, Homo sapiens
  misc_RNA (1)...(19): siRNA sense strand
cgaauuaauagacuggauu

SEQ ID NO: 729374 - RNA, 19 nt, Homo sapiens
  misc_RNA (1)...(19): siRNA sense strand
caagaggaaaucuccaaau

SEQ ID NO: 729375 - RNA, 19 nt, Homo sapiens
  misc_RNA (1)...(19): siRNA sense strand
ccaaaugcaaacuggauga

SEQ ID NO: 729376 - RNA, 19 nt, Homo sapiens
  misc_RNA (1)...(19): siRNA sense strand
ggacuucagcagaaaucuu

SEQ ID NO: 729377 - RNA, 19 nt, Homo sapiens
  misc_RNA (1)...(19): siRNA sense strand
aagagaauguuggaggaaa

SEQ ID NO: 729378 - RNA, 19 nt, Homo sapiens
  misc_RNA (1)...(19): siRNA sense strand
ggaauggaacacacuugga

SEQ ID NO: 729379 - RNA, 19 nt, Homo sapiens
  misc_RNA (1)...(19): siRNA sense strand
uggacaaaguuuaccaaau

SEQ ID NO: 729380 - RNA, 19 nt, Homo sapiens
  misc_RNA (1)...(19): siRNA sense strand
aaaguuggacauccugaaa

SEQ ID NO: 729381 - RNA, 19 nt, Homo sapiens
  misc_RNA (1)...(19): siRNA sense strand
gcucaaauuucugccuaca

SEQ ID NO: 729382 - RNA, 19 nt, Homo sapiens
  misc_RNA (1)...(19): siRNA sense strand
uagacuggauuugcugauu

SEQ ID NO: 729383 - RNA, 19 nt, Homo sapiens
  misc_RNA (1)...(19): siRNA sense strand
ggacuacauuccgcaaagg

SEQ ID NO: 729384 - RNA, 19 nt, Homo sapiens
  misc_RNA (1)...(19): siRNA sense strand
uaucagauuucagaagaag

SEQ ID NO: 729385 - RNA, 19 nt, Homo sapiens
  misc_RNA (1)...(19): siRNA sense strand
uuaauagacuggauuugcu

SEQ ID NO: 729386 - RNA, 19 nt, Homo sapiens
  misc_RNA (1)...(19): siRNA sense strand
gggauacugucugaucauc

SEQ ID NO: 729387 - RNA, 19 nt, Homo sapiens
  misc_RNA (1)...(19): siRNA sense strand
aagagucugugcccaaauc

SEQ ID NO: 729388 - RNA, 19 nt, Homo sapiens
  misc_RNA (1)...(19): siRNA sense strand
caagagccugcugaagaua

SEQ ID NO: 729389 - RNA, 19 nt, Homo sapiens
  misc_RNA (1)...(19): siRNA sense strand
cuagaaaggaggagaugga

SEQ ID NO: 729390 - RNA, 19 nt, Homo sapiens
  misc_RNA (1)...(19): siRNA sense strand
ggagauggaaagggaacuu

SEQ ID NO: 729391 - RNA, 19 nt, Homo sapiens
  misc_RNA (1)...(19): siRNA sense strand
aggaugccuugauguuauu

SEQ ID NO: 729392 - RNA, 19 nt, Homo sapiens
  misc_RNA (1)...(19): siRNA sense strand
ucaacgacuaugaagaauu

SEQ ID NO: 729393 - RNA, 19 nt, Homo sapiens
  misc_RNA (1)...(19): siRNA sense strand
gaauguuggaggaaagcaa

SEQ ID NO: 729394 - RNA, 19 nt, Homo sapiens
  misc_RNA (1)...(19): siRNA sense strand
gagaaggaaaguuggacau

SEQ ID NO: 729395 - RNA, 19 nt, Homo sapiens
  misc_RNA (1)...(19): siRNA sense strand
gaagaagugagcagaucag

SEQ ID NO: 729396 - RNA, 19 nt, Homo sapiens
  misc_RNA (1)...(19): siRNA sense strand
gacuggauuugcugauuac

SEQ ID NO: 729397 - RNA, 19 nt, Homo sapiens
  misc_RNA (1)...(19): siRNA sense strand
agcaagaacccaucaagga

SEQ ID NO: 729398 - RNA, 19 nt, Homo sapiens
  misc_RNA (1)...(19): siRNA sense strand
caacaagagccugcugaag

SEQ ID NO: 729399 - RNA, 19 nt, Homo sapiens
  misc_RNA (1)...(19): siRNA sense strand
ucagcagaaaucuuuauga

SEQ ID NO: 729400 - RNA, 19 nt, Homo sapiens
  misc_RNA (1)...(19): siRNA sense strand
cugcucuuccgaauuaaua

SEQ ID NO: 729401 - RNA, 19 nt, Homo sapiens
  misc_RNA (1)...(19): siRNA sense strand
ggaagcaagaacccaucaa

SEQ ID NO: 729402 - RNA, 19 nt, Homo sapiens
  misc_RNA (1)...(19): siRNA sense strand
ucagauuucagaagaagug

SEQ ID NO: 729403 - RNA, 19 nt, Homo sapiens
  misc_RNA (1)...(19): siRNA sense strand
gcugauuaccuaccuaaac

SEQ ID NO: 729404 - RNA, 19 nt, Homo sapiens
  misc_RNA (1)...(19): siRNA sense strand
cccaaacuucacagcauua

SEQ ID NO: 729405 - RNA, 19 nt, Homo sapiens
  misc_RNA (1)...(19): siRNA sense strand
ucaacaagagccugcugaa

SEQ ID NO: 729406 - RNA, 19 nt, Homo sapiens
  misc_RNA (1)...(19): siRNA sense strand
ccugggagaaggaaaguug

SEQ ID NO: 729407 - RNA, 19 nt, Homo sapiens
  misc_RNA (1)...(19): siRNA sense strand
ugaaccugcuggauauuuu

SEQ ID NO: 729408 - RNA, 19 nt, Homo sapiens
  misc_RNA (1)...(19): siRNA sense strand
gcaaucuguccuuccugaa

SEQ ID NO: 729409 - RNA, 19 nt, Homo sapiens
  misc_RNA (1)...(19): siRNA sense strand
agagaauguuggaggaaag

SEQ ID NO: 729410 - RNA, 19 nt, Homo sapiens
  misc_RNA (1)...(19): siRNA sense strand
gcaaacuggaugaugacau

SEQ ID NO: 729411 - RNA, 19 nt, Homo sapiens
  misc_RNA (1)...(19): siRNA sense strand
aaagcaaucuguccuuccu

SEQ ID NO: 729412 - RNA, 19 nt, Homo sapiens
  misc_RNA (1)...(19): siRNA sense strand
cuaucagauuucagaagaa

SEQ ID NO: 729413 - RNA, 19 nt, Homo sapiens
  misc_RNA (1)...(19): siRNA sense strand
gggucaugcucuaucagau

SEQ ID NO: 729414 - RNA, 19 nt, Homo sapiens
  misc_RNA (1)...(19): siRNA sense strand
aaaagagucugugcccaaa

SEQ ID NO: 729415 - RNA, 19 nt, Homo sapiens
  misc_RNA (1)...(19): siRNA sense strand
caaaagcacgggagaaagu

SEQ ID NO: 729416 - RNA, 19 nt, Homo sapiens
  misc_RNA (1)...(19): siRNA sense strand
gugcccaaaucaacaagag

SEQ ID NO: 729417 - RNA, 19 nt, Homo sapiens
  misc_RNA (1)...(19): siRNA sense strand
uggacuacauuccgcaaag

SEQ ID NO: 729418 - RNA, 19 nt, Homo sapiens
  misc_RNA (1)...(19): siRNA sense strand
uaaucaacgacuaugaaga

SEQ ID NO: 729419 - RNA, 19 nt, Homo sapiens
  misc_RNA (1)...(19): siRNA sense strand
agagccugcugaagauaau

SEQ ID NO: 729420 - RNA, 19 nt, Homo sapiens
  misc_RNA (1)...(19): siRNA sense strand
aagagccugcugaagauaa

SEQ ID NO: 729421 - RNA, 19 nt, Homo sapiens
  misc_RNA (1)...(19): siRNA sense strand
gcucuuccgaauuaauaga

SEQ ID NO: 729422 - RNA, 19 nt, Homo sapiens
  misc_RNA (1)...(19): siRNA sense strand
ccgaauuaauagacuggau

SEQ ID NO: 729423 - RNA, 19 nt, Homo sapiens
  misc_RNA (1)...(19): siRNA sense strand
ggacaaaguuuaccaaaug

SEQ ID NO: 729424 - RNA, 19 nt, Homo sapiens
  misc_RNA (1)...(19): siRNA sense strand
caacgacuaugaagaauuc

SEQ ID NO: 729425 - RNA, 19 nt, Homo sapiens
  misc_RNA (1)...(19): siRNA sense strand
gaucagaauugaggucuuu

SEQ ID NO: 729426 - RNA, 19 nt, Homo sapiens
  misc_RNA (1)...(19): siRNA sense strand
gaagugagcagaucagaau

SEQ ID NO: 729427 - RNA, 19 nt, Homo sapiens
  misc_RNA (1)...(19): siRNA sense strand
gaggaaaucuccaaaugca

SEQ ID NO: 729428 - RNA, 19 nt, Homo sapiens
  misc_RNA (1)...(19): siRNA sense strand
ggaaaucuccaaaugcaaa

SEQ ID NO: 729429 - RNA, 19 nt, Homo sapiens
  misc_RNA (1)...(19): siRNA sense strand
caaacuggaugaugacaug

SEQ ID NO: 729430 - RNA, 19 nt, Homo sapiens
  misc_RNA (1)...(19): siRNA sense strand
agacuggauuugcugauua

SEQ ID NO: 729431 - RNA, 19 nt, Homo sapiens
  misc_RNA (1)...(19): siRNA sense strand
gacaugaaccugcuggaua

SEQ ID NO: 729432 - RNA, 19 nt, Homo sapiens
  misc_RNA (1)...(19): siRNA sense strand
gaagauaaucaacgacuau

SEQ ID NO: 729433 - RNA, 19 nt, Homo sapiens
  misc_RNA (1)...(19): siRNA sense strand
gacaaaguuuaccaaauga

SEQ ID NO: 729434 - RNA, 19 nt, Homo sapiens
  misc_RNA (1)...(19): siRNA sense strand
cagcagaaaucuuuaugau

SEQ ID NO: 729435 - RNA, 19 nt, Homo sapiens
  misc_RNA (1)...(19): siRNA sense strand
gaaaggaggagauggaaag

SEQ ID NO: 729436 - RNA, 19 nt, Homo sapiens
  misc_RNA (1)...(19): siRNA sense strand
gauaaucaacgacuaugaa

SEQ ID NO: 729437 - RNA, 19 nt, Homo sapiens
  misc_RNA (1)...(19): siRNA sense strand
gaucuggccucccucaagu

SEQ ID NO: 729438 - RNA, 19 nt, Homo sapiens
  misc_RNA (1)...(19): siRNA sense strand
gaauugaggucuuuuaagu

SEQ ID NO: 729439 - RNA, 19 nt, Homo sapiens
  misc_RNA (1)...(19): siRNA sense strand
aagaggaaaucuccaaaug

SEQ ID NO: 729440 - RNA, 19 nt, Homo sapiens
  misc_RNA (1)...(19): siRNA sense strand
gcaagaacccaucaaggau

SEQ ID NO: 729441 - RNA, 19 nt, Homo sapiens
  misc_RNA (1)...(19): siRNA sense strand
ggaaagggaacuucagaca

SEQ ID NO: 729442 - RNA, 19 nt, Homo sapiens
  misc_RNA (1)...(19): siRNA sense strand
gcccaaacuucacagcauu

SEQ ID NO: 729443 - RNA, 19 nt, Homo sapiens
  misc_RNA (1)...(19): siRNA sense strand
acaugaaccugcuggauau

SEQ ID NO: 729444 - RNA, 19 nt, Homo sapiens
  misc_RNA (1)...(19): siRNA sense strand
gucaugcucuaucagauuu

SEQ ID NO: 729445 - RNA, 19 nt, Homo sapiens
  misc_RNA (1)...(19): siRNA sense strand
ucauagagauggagaagag

SEQ ID NO: 729446 - RNA, 19 nt, Homo sapiens
  misc_RNA (1)...(19): siRNA sense strand
ucuaucagauuucagaaga

SEQ ID NO: 729447 - RNA, 19 nt, Homo sapiens
  misc_RNA (1)...(19): siRNA sense strand
ugaagauaaucaacgacua

SEQ ID NO: 729448 - RNA, 19 nt, Homo sapiens
  misc_RNA (1)...(19): siRNA sense strand
acaagagccugcugaagau

SEQ ID NO: 729449 - RNA, 19 nt, Homo sapiens
  misc_RNA (1)...(19): siRNA sense strand
aaugcaaacuggaugauga

SEQ ID NO: 729450 - RNA, 19 nt, Homo sapiens
  misc_RNA (1)...(19): siRNA sense strand
uggauuugcugauuaccua

SEQ ID NO: 729451 - RNA, 19 nt, Homo sapiens
  misc_RNA (1)...(19): siRNA sense strand
gugagcagaucagaauuga

SEQ ID NO: 729452 - RNA, 19 nt, Homo sapiens
  misc_RNA (1)...(19): siRNA sense strand
gaauggaacacacuuggau

SEQ ID NO: 729453 - RNA, 19 nt, Homo sapiens
  misc_RNA (1)...(19): siRNA sense strand
gggagaaagugcccaaacu

SEQ ID NO: 729454 - RNA, 19 nt, Homo sapiens
  misc_RNA (1)...(19): siRNA sense strand
aaucaacgacuaugaagaa

SEQ ID NO: 729455 - RNA, 19 nt, Homo sapiens
  misc_RNA (1)...(19): siRNA sense strand
ccaggcagggcucaaauuu

SEQ ID NO: 729456 - RNA, 19 nt, Homo sapiens
  misc_RNA (1)...(19): siRNA sense strand
gcaagaggaaaucuccaaa

SEQ ID NO: 729457 - RNA, 19 nt, Homo sapiens
  misc_RNA (1)...(19): siRNA sense strand
gaaaguuggacauccugaa

SEQ ID NO: 729458 - RNA, 19 nt, Homo sapiens
  misc_RNA (1)...(19): siRNA sense strand
gaucaucaacaaucacaau

SEQ ID NO: 729459 - RNA, 19 nt, Homo sapiens
  misc_RNA (1)...(19): siRNA sense strand
gacuucagcagaaaucuuu

SEQ ID NO: 729460 - RNA, 19 nt, Homo sapiens
  misc_RNA (1)...(19): siRNA sense strand
cagaagaagugagcagauc

SEQ ID NO: 729461 - RNA, 19 nt, Homo sapiens
  misc_RNA (1)...(19): siRNA sense strand
aacaagagccugcugaaga

SEQ ID NO: 729462 - RNA, 19 nt, Homo sapiens
  misc_RNA (1)...(19): siRNA sense strand
cugauuaccuaccuaaaca

SEQ ID NO: 729463 - RNA, 19 nt, Homo sapiens
  misc_RNA (1)...(19): siRNA sense strand
ggucaugcucuaucagauu

SEQ ID NO: 729464 - RNA, 19 nt, Homo sapiens
  misc_RNA (1)...(19): siRNA sense strand
gaagcaagaacccaucaag

SEQ ID NO: 729465 - RNA, 19 nt, Homo sapiens
  misc_RNA (1)...(19): siRNA sense strand
uuaccuaccuaaacacuag

SEQ ID NO: 729466 - RNA, 19 nt, Homo sapiens
  misc_RNA (1)...(19): siRNA sense strand
aggcagggcucaaauuucu

SEQ ID NO: 729467 - RNA, 19 nt, Homo sapiens
  misc_RNA (1)...(19): siRNA sense strand
cgaauuaauagacuggauu

SEQ ID NO: 729468 - RNA, 19 nt, Homo sapiens
  misc_RNA (1)...(19): siRNA sense strand
caagaggaaaucuccaaau

SEQ ID NO: 729469 - RNA, 19 nt, Homo sapiens
  misc_RNA (1)...(19): siRNA sense strand
ccaaaugcaaacuggauga

SEQ ID NO: 729470 - RNA, 19 nt, Homo sapiens
  misc_RNA (1)...(19): siRNA sense strand
ggacuucagcagaaaucuu

SEQ ID NO: 729471 - RNA, 19 nt, Homo sapiens
  misc_RNA (1)...(19): siRNA sense strand
aagagaauguuggaggaaa

SEQ ID NO: 729472 - RNA, 19 nt, Homo sapiens
  misc_RNA (1)...(19): siRNA sense strand
ggaauggaacacacuugga

SEQ ID NO: 729473 - RNA, 19 nt, Homo sapiens
  misc_RNA (1)...(19): siRNA sense strand
uggacaaaguuuaccaaau

SEQ ID NO: 729474 - RNA, 19 nt, Homo sapiens
  misc_RNA (1)...(19): siRNA sense strand
aaaguuggacauccugaaa

SEQ ID NO: 729475 - RNA, 19 nt, Homo sapiens
  misc_RNA (1)...(19): siRNA sense strand
gcucaaauuucugccuaca

SEQ ID NO: 729476 - RNA, 19 nt, Homo sapiens
  misc_RNA (1)...(19): siRNA sense strand
uagacuggauuugcugauu

SEQ ID NO: 729477 - RNA, 19 nt, Homo sapiens
  misc_RNA (1)...(19): siRNA sense strand
ggacuacauuccgcaaagg

SEQ ID NO: 729478 - RNA, 19 nt, Homo sapiens
  misc_RNA (1)...(19): siRNA sense strand
uaucagauuucagaagaag

SEQ ID NO: 729479 - RNA, 19 nt, Homo sapiens
  misc_RNA (1)...(19): siRNA sense strand
uuaauagacuggauuugcu

SEQ ID NO: 729480 - RNA, 19 nt, Homo sapiens
  misc_RNA (1)...(19): siRNA sense strand
gggauacugucugaucauc

SEQ ID NO: 729481 - RNA, 19 nt, Homo sapiens
  misc_RNA (1)...(19): siRNA sense strand
aagagucugugcccaaauc

SEQ ID NO: 729482 - RNA, 19 nt, Homo sapiens
  misc_RNA (1)...(19): siRNA sense strand
caagagccugcugaagaua

SEQ ID NO: 729483 - RNA, 19 nt, Homo sapiens
  misc_RNA (1)...(19): siRNA sense strand
cuagaaaggaggagaugga

SEQ ID NO: 729484 - RNA, 19 nt, Homo sapiens
  misc_RNA (1)...(19): siRNA sense strand
ggagauggaaagggaacuu

SEQ ID NO: 729485 - RNA, 19 nt, Homo sapiens
  misc_RNA (1)...(19): siRNA sense strand
aggaugccuugauguuauu

SEQ ID NO: 729486 - RNA, 19 nt, Homo sapiens
  misc_RNA (1)...(19): siRNA sense strand
ucaacgacuaugaagaauu

SEQ ID NO: 729487 - RNA, 19 nt, Homo sapiens
  misc_RNA (1)...(19): siRNA sense strand
gaauguuggaggaaagcaa

SEQ ID NO: 729488 - RNA, 19 nt, Homo sapiens
  misc_RNA (1)...(19): siRNA sense strand
gagaaggaaaguuggacau

SEQ ID NO: 729489 - RNA, 19 nt, Homo sapiens
  misc_RNA (1)...(19): siRNA sense strand
gaagaagugagcagaucag

SEQ ID NO: 729490 - RNA, 19 nt, Homo sapiens
  misc_RNA (1)...(19): siRNA sense strand
gacuggauuugcugauuac

SEQ ID NO: 729491 - RNA, 19 nt, Homo sapiens
  misc_RNA (1)...(19): siRNA sense strand
agcaagaacccaucaagga

SEQ ID NO: 729492 - RNA, 19 nt, Homo sapiens
  misc_RNA (1)...(19): siRNA sense strand
caacaagagccugcugaag

SEQ ID NO: 729493 - RNA, 19 nt, Homo sapiens
  misc_RNA (1)...(19): siRNA sense strand
ucagcagaaaucuuuauga

SEQ ID NO: 729494 - RNA, 19 nt, Homo sapiens
  misc_RNA (1)...(19): siRNA sense strand
cugcucuuccgaauuaaua

SEQ ID NO: 729495 - RNA, 19 nt, Homo sapiens
  misc_RNA (1)...(19): siRNA sense strand
ggaagcaagaacccaucaa

SEQ ID NO: 729496 - RNA, 19 nt, Homo sapiens
  misc_RNA (1)...(19): siRNA sense strand
ucagauuucagaagaagug

SEQ ID NO: 729497 - RNA, 19 nt, Homo sapiens
  misc_RNA (1)...(19): siRNA sense strand
gcugauuaccuaccuaaac

SEQ ID NO: 729498 - RNA, 19 nt, Homo sapiens
  misc_RNA (1)...(19): siRNA sense strand
cccaaacuucacagcauua

SEQ ID NO: 729499 - RNA, 19 nt, Homo sapiens
  misc_RNA (1)...(19): siRNA sense strand
ucaacaagagccugcugaa

SEQ ID NO: 729500 - RNA, 19 nt, Homo sapiens
  misc_RNA (1)...(19): siRNA sense strand
ccugggagaaggaaaguug

SEQ ID NO: 729501 - RNA, 19 nt, Homo sapiens
  misc_RNA (1)...(19): siRNA sense strand
ugaaccugcuggauauuuu

SEQ ID NO: 729502 - RNA, 19 nt, Homo sapiens
  misc_RNA (1)...(19): siRNA sense strand
gcaaucuguccuuccugaa

SEQ ID NO: 729503 - RNA, 19 nt, Homo sapiens
  misc_RNA (1)...(19): siRNA sense strand
agagaauguuggaggaaag

SEQ ID NO: 729504 - RNA, 19 nt, Homo sapiens
  misc_RNA (1)...(19): siRNA sense strand
gcaaacuggaugaugacau

SEQ ID NO: 729505 - RNA, 19 nt, Homo sapiens
  misc_RNA (1)...(19): siRNA sense strand
aaagcaaucuguccuuccu

SEQ ID NO: 729506 - RNA, 19 nt, Homo sapiens
  misc_RNA (1)...(19): siRNA sense strand
cuaucagauuucagaagaa

SEQ ID NO: 729507 - RNA, 19 nt, Homo sapiens
  misc_RNA (1)...(19): siRNA sense strand
gggucaugcucuaucagau

SEQ ID NO: 729508 - RNA, 19 nt, Homo sapiens
  misc_RNA (1)...(19): siRNA sense strand
aaaagagucugugcccaaa

SEQ ID NO: 729509 - RNA, 19 nt, Homo sapiens
  misc_RNA (1)...(19): siRNA sense strand
caaaagcacgggagaaagu

SEQ ID NO: 729510 - RNA, 19 nt, Homo sapiens
  misc_RNA (1)...(19): siRNA sense strand
gugcccaaaucaacaagag

SEQ ID NO: 729511 - RNA, 19 nt, Homo sapiens
  misc_RNA (1)...(19): siRNA sense strand
uggacuacauuccgcaaag

SEQ ID NO: 729512 - RNA, 19 nt, Homo sapiens
  misc_RNA (1)...(19): siRNA sense strand
uaaucaacgacuaugaaga

SEQ ID NO: 729513 - RNA, 19 nt, Homo sapiens
  misc_RNA (1)...(19): siRNA sense strand
agagccugcugaagauaau

SEQ ID NO: 729514 - RNA, 19 nt, Homo sapiens
  misc_RNA (1)...(19): siRNA sense strand
aagagccugcugaagauaa

SEQ ID NO: 729515 - RNA, 19 nt, Homo sapiens
  misc_RNA (1)...(19): siRNA sense strand
gcucuuccgaauuaauaga

SEQ ID NO: 729516 - RNA, 19 nt, Homo sapiens
  misc_RNA (1)...(19): siRNA sense strand
ccgaauuaauagacuggau

SEQ ID NO: 729517 - RNA, 19 nt, Homo sapiens
  misc_RNA (1)...(19): siRNA sense strand
ggacaaaguuuaccaaaug

SEQ ID NO: 729518 - RNA, 19 nt, Homo sapiens
  misc_RNA (1)...(19): siRNA sense strand
caacgacuaugaagaauuc

SEQ ID NO: 729519 - RNA, 19 nt, Homo sapiens
  misc_RNA (1)...(19): siRNA sense strand
gaucagaauugaggucuuu

SEQ ID NO: 729520 - RNA, 19 nt, Homo sapiens
  misc_RNA (1)...(19): siRNA sense strand
gaagugagcagaucagaau

SEQ ID NO: 729521 - RNA, 19 nt, Homo sapiens
  misc_RNA (1)...(19): siRNA sense strand
gaggaaaucuccaaaugca

SEQ ID NO: 729522 - RNA, 19 nt, Homo sapiens
  misc_RNA (1)...(19): siRNA sense strand
ggaaaucuccaaaugcaaa

SEQ ID NO: 729523 - RNA, 19 nt, Homo sapiens
  misc_RNA (1)...(19): siRNA sense strand
caaacuggaugaugacaug

SEQ ID NO: 729524 - RNA, 19 nt, Homo sapiens
  misc_RNA (1)...(19): siRNA sense strand
agacuggauuugcugauua

SEQ ID NO: 729525 - RNA, 19 nt, Homo sapiens
  misc_RNA (1)...(19): siRNA sense strand
gacaugaaccugcuggaua

SEQ ID NO: 729526 - RNA, 19 nt, Homo sapiens
  misc_RNA (1)...(19): siRNA sense strand
gaagauaaucaacgacuau

SEQ ID NO: 729527 - RNA, 19 nt, Homo sapiens
  misc_RNA (1)...(19): siRNA sense strand
gacaaaguuuaccaaauga

SEQ ID NO: 729528 - RNA, 19 nt, Homo sapiens
  misc_RNA (1)...(19): siRNA sense strand
cagcagaaaucuuuaugau

SEQ ID NO: 729529 - RNA, 19 nt, Homo sapiens
  misc_RNA (1)...(19): siRNA sense strand
gaaaggaggagauggaaag

SEQ ID NO: 729530 - RNA, 19 nt, Homo sapiens
  misc_RNA (1)...(19): siRNA sense strand
gauaaucaacgacuaugaa

SEQ ID NO: 729531 - RNA, 19 nt, Homo sapiens
  misc_RNA (1)...(19): siRNA sense strand
gaucuggccucccucaagu

SEQ ID NO: 729532 - RNA, 19 nt, Homo sapiens
  misc_RNA (1)...(19): siRNA sense strand
gaauugaggucuuuuaagu

SEQ ID NO: 729533 - RNA, 19 nt, Homo sapiens
  misc_RNA (1)...(19): siRNA sense strand
aagaggaaaucuccaaaug

SEQ ID NO: 729534 - RNA, 19 nt, Homo sapiens
  misc_RNA (1)...(19): siRNA sense strand
gcaagaacccaucaaggau

SEQ ID NO: 729535 - RNA, 19 nt, Homo sapiens
  misc_RNA (1)...(19): siRNA sense strand
ggaaagggaacuucagaca

SEQ ID NO: 729536 - RNA, 19 nt, Homo sapiens
  misc_RNA (1)...(19): siRNA sense strand
gcccaaacuucacagcauu

SEQ ID NO: 729537 - RNA, 19 nt, Homo sapiens
  misc_RNA (1)...(19): siRNA sense strand
acaugaaccugcuggauau

SEQ ID NO: 729538 - RNA, 19 nt, Homo sapiens
  misc_RNA (1)...(19): siRNA sense strand
gucaugcucuaucagauuu

SEQ ID NO: 729539 - RNA, 19 nt, Homo sapiens
  misc_RNA (1)...(19): siRNA sense strand
ucauagagauggagaagag

SEQ ID NO: 729540 - RNA, 19 nt, Homo sapiens
  misc_RNA (1)...(19): siRNA sense strand
ucuaucagauuucagaaga

SEQ ID NO: 729541 - RNA, 19 nt, Homo sapiens
  misc_RNA (1)...(19): siRNA sense strand
ugaagauaaucaacgacua

SEQ ID NO: 729542 - RNA, 19 nt, Homo sapiens
  misc_RNA (1)...(19): siRNA sense strand
acaagagccugcugaagau

SEQ ID NO: 729543 - RNA, 19 nt, Homo sapiens
  misc_RNA (1)...(19): siRNA sense strand
aaugcaaacuggaugauga

SEQ ID NO: 729544 - RNA, 19 nt, Homo sapiens
  misc_RNA (1)...(19): siRNA sense strand
uggauuugcugauuaccua

SEQ ID NO: 729545 - RNA, 19 nt, Homo sapiens
  misc_RNA (1)...(19): siRNA sense strand
gugagcagaucagaauuga

SEQ ID NO: 729546 - RNA, 19 nt, Homo sapiens
  misc_RNA (1)...(19): siRNA sense strand
gggagaaagugcccaaacu

SEQ ID NO: 729547 - RNA, 19 nt, Homo sapiens
  misc_RNA (1)...(19): siRNA sense strand
aaucaacgacuaugaagaa

SEQ ID NO: 729548 - RNA, 19 nt, Homo sapiens
  misc_RNA (1)...(19): siRNA sense strand
ccaggcagggcucaaauuu

SEQ ID NO: 729549 - RNA, 19 nt, Homo sapiens
  misc_RNA (1)...(19): siRNA sense strand
gcaagaggaaaucuccaaa

SEQ ID NO: 729550 - RNA, 19 nt, Homo sapiens
  misc_RNA (1)...(19): siRNA sense strand
gaaaguuggacauccugaa

SEQ ID NO: 729551 - RNA, 19 nt, Homo sapiens
  misc_RNA (1)...(19): siRNA sense strand
gaucaucaacaaucacaau

SEQ ID NO: 729552 - RNA, 19 nt, Homo sapiens
  misc_RNA (1)...(19): siRNA sense strand
gacuucagcagaaaucuuu

SEQ ID NO: 729553 - RNA, 19 nt, Homo sapiens
  misc_RNA (1)...(19): siRNA sense strand
cagaagaagugagcagauc

SEQ ID NO: 729554 - RNA, 19 nt, Homo sapiens
  misc_RNA (1)...(19): siRNA sense strand
aacaagagccugcugaaga

SEQ ID NO: 729555 - RNA, 19 nt, Homo sapiens
  misc_RNA (1)...(19): siRNA sense strand
cugauuaccuaccuaaaca

SEQ ID NO: 729556 - RNA, 19 nt, Homo sapiens
  misc_RNA (1)...(19): siRNA sense strand
gaagcaagaacccaucaag

SEQ ID NO: 729557 - RNA, 19 nt, Homo sapiens
  misc_RNA (1)...(19): siRNA sense strand
ggucaugcucuaucagauu

SEQ ID NO: 729558 - RNA, 19 nt, Homo sapiens
  misc_RNA (1)...(19): siRNA sense strand
uuaccuaccuaaacacuag

SEQ ID NO: 729559 - RNA, 19 nt, Homo sapiens
  misc_RNA (1)...(19): siRNA sense strand
aggcagggcucaaauuucu

SEQ ID NO: 729560 - RNA, 19 nt, Homo sapiens
  misc_RNA (1)...(19): siRNA sense strand
cgaauuaauagacuggauu

SEQ ID NO: 729561 - RNA, 19 nt, Homo sapiens
  misc_RNA (1)...(19): siRNA sense strand
caagaggaaaucuccaaau

SEQ ID NO: 729562 - RNA, 19 nt, Homo sapiens
  misc_RNA (1)...(19): siRNA sense strand
ccaaaugcaaacuggauga

SEQ ID NO: 729563 - RNA, 19 nt, Homo sapiens
  misc_RNA (1)...(19): siRNA sense strand
ggacuucagcagaaaucuu

SEQ ID NO: 729564 - RNA, 19 nt, Homo sapiens
  misc_RNA (1)...(19): siRNA sense strand
aagagaauguuggaggaaa

SEQ ID NO: 729565 - RNA, 19 nt, Homo sapiens
  misc_RNA (1)...(19): siRNA sense strand
uggacaaaguuuaccaaau

SEQ ID NO: 729566 - RNA, 19 nt, Homo sapiens
  misc_RNA (1)...(19): siRNA sense strand
aaaguuggacauccugaaa

SEQ ID NO: 729567 - RNA, 19 nt, Homo sapiens
  misc_RNA (1)...(19): siRNA sense strand
gcucaaauuucugccuaca

SEQ ID NO: 729568 - RNA, 19 nt, Homo sapiens
  misc_RNA (1)...(19): siRNA sense strand
uagacuggauuugcugauu

SEQ ID NO: 729569 - RNA, 19 nt, Homo sapiens
  misc_RNA (1)...(19): siRNA sense strand
ggacuacauuccgcaaagg

SEQ ID NO: 729570 - RNA, 19 nt, Homo sapiens
  misc_RNA (1)...(19): siRNA sense strand
uaucagauuucagaagaag

SEQ ID NO: 729571 - RNA, 19 nt, Homo sapiens
  misc_RNA (1)...(19): siRNA sense strand
uuaauagacuggauuugcu

SEQ ID NO: 729572 - RNA, 19 nt, Homo sapiens
  misc_RNA (1)...(19): siRNA sense strand
gggauacugucugaucauc

SEQ ID NO: 729573 - RNA, 19 nt, Homo sapiens
  misc_RNA (1)...(19): siRNA sense strand
aagagucugugcccaaauc

SEQ ID NO: 729574 - RNA, 19 nt, Homo sapiens
  misc_RNA (1)...(19): siRNA sense strand
caagagccugcugaagaua

SEQ ID NO: 729575 - RNA, 19 nt, Homo sapiens
  misc_RNA (1)...(19): siRNA sense strand
cuagaaaggaggagaugga

SEQ ID NO: 729576 - RNA, 19 nt, Homo sapiens
  misc_RNA (1)...(19): siRNA sense strand
ggagauggaaagggaacuu

SEQ ID NO: 729577 - RNA, 19 nt, Homo sapiens
  misc_RNA (1)...(19): siRNA sense strand
ucaacgacuaugaagaauu

SEQ ID NO: 729578 - RNA, 19 nt, Homo sapiens
  misc_RNA (1)...(19): siRNA sense strand
gaauguuggaggaaagcaa

SEQ ID NO: 729579 - RNA, 19 nt, Homo sapiens
  misc_RNA (1)...(19): siRNA sense strand
aggaugccuugauguuauu

SEQ ID NO: 729580 - RNA, 19 nt, Homo sapiens
  misc_RNA (1)...(19): siRNA sense strand
gagaaggaaaguuggacau

SEQ ID NO: 729581 - RNA, 19 nt, Homo sapiens
  misc_RNA (1)...(19): siRNA sense strand
gaagaagugagcagaucag

SEQ ID NO: 729582 - RNA, 19 nt, Homo sapiens
  misc_RNA (1)...(19): siRNA sense strand
gacuggauuugcugauuac

SEQ ID NO: 729583 - RNA, 19 nt, Homo sapiens
  misc_RNA (1)...(19): siRNA sense strand
caacaagagccugcugaag

SEQ ID NO: 729584 - RNA, 19 nt, Homo sapiens
  misc_RNA (1)...(19): siRNA sense strand
agcaagaacccaucaagga

SEQ ID NO: 729585 - RNA, 19 nt, Homo sapiens
  misc_RNA (1)...(19): siRNA sense strand
ucagcagaaaucuuuauga

SEQ ID NO: 729586 - RNA, 19 nt, Homo sapiens
  misc_RNA (1)...(19): siRNA sense strand
ucagauuucagaagaagug

SEQ ID NO: 729587 - RNA, 19 nt, Homo sapiens
  misc_RNA (1)...(19): siRNA sense strand
ggaagcaagaacccaucaa

SEQ ID NO: 729588 - RNA, 19 nt, Homo sapiens
  misc_RNA (1)...(19): siRNA sense strand
cugcucuuccgaauuaaua

SEQ ID NO: 729589 - RNA, 19 nt, Homo sapiens
  misc_RNA (1)...(19): siRNA sense strand
gcugauuaccuaccuaaac

SEQ ID NO: 729590 - RNA, 19 nt, Homo sapiens
  misc_RNA (1)...(19): siRNA sense strand
cccaaacuucacagcauua

SEQ ID NO: 729591 - RNA, 19 nt, Homo sapiens
  misc_RNA (1)...(19): siRNA sense strand
ucaacaagagccugcugaa

SEQ ID NO: 729592 - RNA, 19 nt, Homo sapiens
  misc_RNA (1)...(19): siRNA sense strand
ccugggagaaggaaaguug

SEQ ID NO: 729593 - RNA, 19 nt, Homo sapiens
  misc_RNA (1)...(19): siRNA sense strand
ugaaccugcuggauauuuu

SEQ ID NO: 729594 - RNA, 19 nt, Homo sapiens
  misc_RNA (1)...(19): siRNA sense strand
cuaucagauuucagaagaa

SEQ ID NO: 729595 - RNA, 19 nt, Homo sapiens
  misc_RNA (1)...(19): siRNA sense strand
aaagcaaucuguccuuccu

SEQ ID NO: 729596 - RNA, 19 nt, Homo sapiens
  misc_RNA (1)...(19): siRNA sense strand
agagaauguuggaggaaag

SEQ ID NO: 729597 - RNA, 19 nt, Homo sapiens
  misc_RNA (1)...(19): siRNA sense strand
gcaaucuguccuuccugaa

SEQ ID NO: 729598 - RNA, 19 nt, Homo sapiens
  misc_RNA (1)...(19): siRNA sense strand
gcaaacuggaugaugacau

SEQ ID NO: 729599 - RNA, 19 nt, Homo sapiens
  misc_RNA (1)...(19): siRNA sense strand
gggucaugcucuaucagau

SEQ ID NO: 729600 - RNA, 19 nt, Homo sapiens
  misc_RNA (1)...(19): siRNA sense strand
aaaagagucugugcccaaa

SEQ ID NO: 729601 - RNA, 19 nt, Homo sapiens
  misc_RNA (1)...(19): siRNA sense strand
caaaagcacgggagaaagu

SEQ ID NO: 729602 - RNA, 19 nt, Homo sapiens
  misc_RNA (1)...(19): siRNA sense strand
gugcccaaaucaacaagag

SEQ ID NO: 729603 - RNA, 19 nt, Homo sapiens
  misc_RNA (1)...(19): siRNA sense strand
uggacuacauuccgcaaag

SEQ ID NO: 729604 - RNA, 19 nt, Homo sapiens
  misc_RNA (1)...(19): siRNA sense strand
uaaucaacgacuaugaaga

SEQ ID NO: 729605 - RNA, 19 nt, Homo sapiens
  misc_RNA (1)...(19): siRNA sense strand
agagccugcugaagauaau

SEQ ID NO: 729606 - RNA, 19 nt, Homo sapiens
  misc_RNA (1)...(19): siRNA sense strand
aagagccugcugaagauaa

SEQ ID NO: 729607 - RNA, 19 nt, Homo sapiens
  misc_RNA (1)...(19): siRNA sense strand
gcucuuccgaauuaauaga

SEQ ID NO: 729608 - RNA, 19 nt, Homo sapiens
  misc_RNA (1)...(19): siRNA sense strand
ccgaauuaauagacuggau

SEQ ID NO: 729609 - RNA, 19 nt, Homo sapiens
  misc_RNA (1)...(19): siRNA sense strand
cgaauaugauccaacaaua

SEQ ID NO: 729610 - RNA, 19 nt, Homo sapiens
  misc_RNA (1)...(19): siRNA sense strand
ggacgaauaugauccaaca

SEQ ID NO: 729611 - RNA, 19 nt, Homo sapiens
  misc_RNA (1)...(19): siRNA sense strand
uaaggacucugaagaugua

SEQ ID NO: 729612 - RNA, 19 nt, Homo sapiens
  misc_RNA (1)...(19): siRNA sense strand
ggaagcaaguaguaauuga

SEQ ID NO: 729613 - RNA, 19 nt, Homo sapiens
  misc_RNA (1)...(19): siRNA sense strand
gcaagaaguuauggaauuc

SEQ ID NO: 729614 - RNA, 19 nt, Homo sapiens
  misc_RNA (1)...(19): siRNA sense strand
gaugaugccuucuauacau

SEQ ID NO: 729615 - RNA, 19 nt, Homo sapiens
  misc_RNA (1)...(19): siRNA sense strand
gacaaaguguguaauuaug

SEQ ID NO: 729616 - RNA, 19 nt, Homo sapiens
  misc_RNA (1)...(19): siRNA sense strand
gcucaggacuuagcaagaa

SEQ ID NO: 729617 - RNA, 19 nt, Homo sapiens
  misc_RNA (1)...(19): siRNA sense strand
cgauacagcuaauucagaa

SEQ ID NO: 729618 - RNA, 19 nt, Homo sapiens
  misc_RNA (1)...(19): siRNA sense strand
aaaccugucucuuggauau

SEQ ID NO: 729619 - RNA, 19 nt, Homo sapiens
  misc_RNA (1)...(19): siRNA sense strand
gaaguuauggaauuccuuu

SEQ ID NO: 729620 - RNA, 19 nt, Homo sapiens
  misc_RNA (1)...(19): siRNA sense strand
ggagggcuuucuuugugua

SEQ ID NO: 729621 - RNA, 19 nt, Homo sapiens
  misc_RNA (1)...(19): siRNA sense strand
gggcuuucuuuguguauuu

SEQ ID NO: 729622 - RNA, 19 nt, Homo sapiens
  misc_RNA (1)...(19): siRNA sense strand
gaauaugauccaacaauag

SEQ ID NO: 729623 - RNA, 19 nt, Homo sapiens
  misc_RNA (1)...(19): siRNA sense strand
ucaaagacaaaguguguaa

SEQ ID NO: 729624 - RNA, 19 nt, Homo sapiens
  misc_RNA (1)...(19): siRNA sense strand
guuaaggacucugaagaug

SEQ ID NO: 729625 - RNA, 19 nt, Homo sapiens
  misc_RNA (1)...(19): siRNA sense strand
caagaggaguacagugcaa

SEQ ID NO: 729626 - RNA, 19 nt, Homo sapiens
  misc_RNA (1)...(19): siRNA sense strand
agcaagaaguuauggaauu

SEQ ID NO: 729627 - RNA, 19 nt, Homo sapiens
  misc_RNA (1)...(19): siRNA sense strand
cuagaacaguagacacaaa

SEQ ID NO: 729628 - RNA, 19 nt, Homo sapiens
  misc_RNA (1)...(19): siRNA sense strand
aaaacaggcucaggacuua

SEQ ID NO: 729629 - RNA, 19 nt, Homo sapiens
  misc_RNA (1)...(19): siRNA sense strand
gcaaguaguaauugaugga

SEQ ID NO: 729630 - RNA, 19 nt, Homo sapiens
  misc_RNA (1)...(19): siRNA sense strand
gaaaccugucucuuggaua

SEQ ID NO: 729631 - RNA, 19 nt, Homo sapiens
  misc_RNA (1)...(19): siRNA sense strand
gauauucaccauuauagag

SEQ ID NO: 729632 - RNA, 19 nt, Homo sapiens
  misc_RNA (1)...(19): siRNA sense strand
gaagcaaguaguaauugau

SEQ ID NO: 729633 - RNA, 19 nt, Homo sapiens
  misc_RNA (1)...(19): siRNA sense strand
cgacacagcaggucaagag

SEQ ID NO: 729634 - RNA, 19 nt, Homo sapiens
  misc_RNA (1)...(19): siRNA sense strand
ugauuugccuucuagaaca

SEQ ID NO: 729635 - RNA, 19 nt, Homo sapiens
  misc_RNA (1)...(19): siRNA sense strand
gggagggcuuucuuugugu

SEQ ID NO: 729636 - RNA, 19 nt, Homo sapiens
  misc_RNA (1)...(19): siRNA sense strand
ugaaacaucagcaaagaca

SEQ ID NO: 729637 - RNA, 19 nt, Homo sapiens
  misc_RNA (1)...(19): siRNA sense strand
gaagucaaagacaaagugu

SEQ ID NO: 729638 - RNA, 19 nt, Homo sapiens
  misc_RNA (1)...(19): siRNA sense strand
caggaagcaaguaguaauu

SEQ ID NO: 729639 - RNA, 19 nt, Homo sapiens
  misc_RNA (1)...(19): siRNA sense strand
aguaguaauugauggagaa

SEQ ID NO: 729640 - RNA, 19 nt, Homo sapiens
  misc_RNA (1)...(19): siRNA sense strand
cagcaggucaagaggagua

SEQ ID NO: 729641 - RNA, 19 nt, Homo sapiens
  misc_RNA (1)...(19): siRNA sense strand
gacugaauauaaacuugug

SEQ ID NO: 729642 - RNA, 19 nt, Homo sapiens
  misc_RNA (1)...(19): siRNA sense strand
gcaaugagggaccaguaca

SEQ ID NO: 729643 - RNA, 19 nt, Homo sapiens
  misc_RNA (1)...(19): siRNA sense strand
agaaaccugucucuuggau

SEQ ID NO: 729644 - RNA, 19 nt, Homo sapiens
  misc_RNA (1)...(19): siRNA sense strand
cgagaaauucgaaaacaua

SEQ ID NO: 729645 - RNA, 19 nt, Homo sapiens
  misc_RNA (1)...(19): siRNA sense strand
aagagugccuugacgauac

SEQ ID NO: 729646 - RNA, 19 nt, Homo sapiens
  misc_RNA (1)...(19): siRNA sense strand
gaggaguacagugcaauga

SEQ ID NO: 729647 - RNA, 19 nt, Homo sapiens
  misc_RNA (1)...(19): siRNA sense strand
aagaaaagaugagcaaaga

SEQ ID NO: 729648 - RNA, 19 nt, Homo sapiens
  misc_RNA (1)...(19): siRNA sense strand
ggggagggcuuucuuugug

SEQ ID NO: 729649 - RNA, 19 nt, Homo sapiens
  misc_RNA (1)...(19): siRNA sense strand
gaaacaucagcaaagacaa

SEQ ID NO: 729650 - RNA, 19 nt, Homo sapiens
  misc_RNA (1)...(19): siRNA sense strand
guaccuaugguccuaguag

SEQ ID NO: 729651 - RNA, 19 nt, Homo sapiens
  misc_RNA (1)...(19): siRNA sense strand
agauguaccuaugguccua

SEQ ID NO: 729652 - RNA, 19 nt, Homo sapiens
  misc_RNA (1)...(19): siRNA sense strand
aaugugauuugccuucuag

SEQ ID NO: 729653 - RNA, 19 nt, Homo sapiens
  misc_RNA (1)...(19): siRNA sense strand
gugcaaugagggaccagua

SEQ ID NO: 729654 - RNA, 19 nt, Homo sapiens
  misc_RNA (1)...(19): siRNA sense strand
ucaccauuauagagaacaa

SEQ ID NO: 729655 - RNA, 19 nt, Homo sapiens
  misc_RNA (1)...(19): siRNA sense strand
agucaaagacaaagugugu

SEQ ID NO: 729656 - RNA, 19 nt, Homo sapiens
  misc_RNA (1)...(19): siRNA sense strand
ugccuucuauacauuaguu

SEQ ID NO: 729657 - RNA, 19 nt, Homo sapiens
  misc_RNA (1)...(19): siRNA sense strand
ugaugccuucuauacauua

SEQ ID NO: 729658 - RNA, 19 nt, Homo sapiens
  misc_RNA (1)...(19): siRNA sense strand
aaacaucagcaaagacaag

SEQ ID NO: 729659 - RNA, 19 nt, Homo sapiens
  misc_RNA (1)...(19): siRNA sense strand
auugaaacaucagcaaaga

SEQ ID NO: 729660 - RNA, 19 nt, Homo sapiens
  misc_RNA (1)...(19): siRNA sense strand
caaaacaggcucaggacuu

SEQ ID NO: 729661 - RNA, 19 nt, Homo sapiens
  misc_RNA (1)...(19): siRNA sense strand
ugacgauacagcuaauuca

SEQ ID NO: 729662 - RNA, 19 nt, Homo sapiens
  misc_RNA (1)...(19): siRNA sense strand
gaugccuucuauacauuag

SEQ ID NO: 729663 - RNA, 19 nt, Homo sapiens
  misc_RNA (1)...(19): siRNA sense strand
uuaaggacucugaagaugu

SEQ ID NO: 729664 - RNA, 19 nt, Homo sapiens
  misc_RNA (1)...(19): siRNA sense strand
aagcaaguaguaauugaug

SEQ ID NO: 729665 - RNA, 19 nt, Homo sapiens
  misc_RNA (1)...(19): siRNA sense strand
acaggaagcaaguaguaau

SEQ ID NO: 729666 - RNA, 19 nt, Homo sapiens
  misc_RNA (1)...(19): siRNA sense strand
guugaugaugccuucuaua

SEQ ID NO: 729667 - RNA, 19 nt, Homo sapiens
  misc_RNA (1)...(19): siRNA sense strand
cugaagauguaccuauggu

SEQ ID NO: 729668 - RNA, 19 nt, Homo sapiens
  misc_RNA (1)...(19): siRNA sense strand
agaagucaaagacaaagug

SEQ ID NO: 729669 - RNA, 19 nt, Homo sapiens
  misc_RNA (1)...(19): siRNA sense strand
caucagcaaagacaagaca

SEQ ID NO: 729670 - RNA, 19 nt, Homo sapiens
  misc_RNA (1)...(19): siRNA sense strand
uuagcaagaaguuauggaa

SEQ ID NO: 729671 - RNA, 19 nt, Homo sapiens
  misc_RNA (1)...(19): siRNA sense strand
gaacaguagacacaaaaca

SEQ ID NO: 729672 - RNA, 19 nt, Homo sapiens
  misc_RNA (1)...(19): siRNA sense strand
gauuugccuucuagaacag

SEQ ID NO: 729673 - RNA, 19 nt, Homo sapiens
  misc_RNA (1)...(19): siRNA sense strand
caaagacaaaguguguaau

SEQ ID NO: 729674 - RNA, 19 nt, Homo sapiens
  misc_RNA (1)...(19): siRNA sense strand
augaugccuucuauacauu

SEQ ID NO: 729675 - RNA, 19 nt, Homo sapiens
  misc_RNA (1)...(19): siRNA sense strand
acgaauaugauccaacaau

SEQ ID NO: 729676 - RNA, 19 nt, Homo sapiens
  misc_RNA (1)...(19): siRNA sense strand
cgaauaugauccaacaaua

SEQ ID NO: 729677 - RNA, 19 nt, Homo sapiens
  misc_RNA (1)...(19): siRNA sense strand
ggacgaauaugauccaaca

SEQ ID NO: 729678 - RNA, 19 nt, Homo sapiens
  misc_RNA (1)...(19): siRNA sense strand
uaaggacucugaagaugua

SEQ ID NO: 729679 - RNA, 19 nt, Homo sapiens
  misc_RNA (1)...(19): siRNA sense strand
ggaagcaaguaguaauuga

SEQ ID NO: 729680 - RNA, 19 nt, Homo sapiens
  misc_RNA (1)...(19): siRNA sense strand
gcaagaaguuauggaauuc

SEQ ID NO: 729681 - RNA, 19 nt, Homo sapiens
  misc_RNA (1)...(19): siRNA sense strand
gcucaggacuuagcaagaa

SEQ ID NO: 729682 - RNA, 19 nt, Homo sapiens
  misc_RNA (1)...(19): siRNA sense strand
cgauacagcuaauucagaa

SEQ ID NO: 729683 - RNA, 19 nt, Homo sapiens
  misc_RNA (1)...(19): siRNA sense strand
aaaccugucucuuggauau

SEQ ID NO: 729684 - RNA, 19 nt, Homo sapiens
  misc_RNA (1)...(19): siRNA sense strand
gaaguuauggaauuccuuu

SEQ ID NO: 729685 - RNA, 19 nt, Homo sapiens
  misc_RNA (1)...(19): siRNA sense strand
ggagggcuuucuuugugua

SEQ ID NO: 729686 - RNA, 19 nt, Homo sapiens
  misc_RNA (1)...(19): siRNA sense strand
gggcuuucuuuguguauuu

SEQ ID NO: 729687 - RNA, 19 nt, Homo sapiens
  misc_RNA (1)...(19): siRNA sense strand
gaauaugauccaacaauag

SEQ ID NO: 729688 - RNA, 19 nt, Homo sapiens
  misc_RNA (1)...(19): siRNA sense strand
guuaaggacucugaagaug

SEQ ID NO: 729689 - RNA, 19 nt, Homo sapiens
  misc_RNA (1)...(19): siRNA sense strand
caagaggaguacagugcaa

SEQ ID NO: 729690 - RNA, 19 nt, Homo sapiens
  misc_RNA (1)...(19): siRNA sense strand
agcaagaaguuauggaauu

SEQ ID NO: 729691 - RNA, 19 nt, Homo sapiens
  misc_RNA (1)...(19): siRNA sense strand
cuagaacaguagacacaaa

SEQ ID NO: 729692 - RNA, 19 nt, Homo sapiens
  misc_RNA (1)...(19): siRNA sense strand
aaaacaggcucaggacuua

SEQ ID NO: 729693 - RNA, 19 nt, Homo sapiens
  misc_RNA (1)...(19): siRNA sense strand
gcaaguaguaauugaugga

SEQ ID NO: 729694 - RNA, 19 nt, Homo sapiens
  misc_RNA (1)...(19): siRNA sense strand
gaaaccugucucuuggaua

SEQ ID NO: 729695 - RNA, 19 nt, Homo sapiens
  misc_RNA (1)...(19): siRNA sense strand
gauauucaccauuauagag

SEQ ID NO: 729696 - RNA, 19 nt, Homo sapiens
  misc_RNA (1)...(19): siRNA sense strand
gaagcaaguaguaauugau

SEQ ID NO: 729697 - RNA, 19 nt, Homo sapiens
  misc_RNA (1)...(19): siRNA sense strand
cgacacagcaggucaagag

SEQ ID NO: 729698 - RNA, 19 nt, Homo sapiens
  misc_RNA (1)...(19): siRNA sense strand
ugauuugccuucuagaaca

SEQ ID NO: 729699 - RNA, 19 nt, Homo sapiens
  misc_RNA (1)...(19): siRNA sense strand
gggagggcuuucuuugugu

SEQ ID NO: 729700 - RNA, 19 nt, Homo sapiens
  misc_RNA (1)...(19): siRNA sense strand
ugaaacaucagcaaagaca

SEQ ID NO: 729701 - RNA, 19 nt, Homo sapiens
  misc_RNA (1)...(19): siRNA sense strand
caggaagcaaguaguaauu

SEQ ID NO: 729702 - RNA, 19 nt, Homo sapiens
  misc_RNA (1)...(19): siRNA sense strand
aguaguaauugauggagaa

SEQ ID NO: 729703 - RNA, 19 nt, Homo sapiens
  misc_RNA (1)...(19): siRNA sense strand
cagcaggucaagaggagua

SEQ ID NO: 729704 - RNA, 19 nt, Homo sapiens
  misc_RNA (1)...(19): siRNA sense strand
gcaaugagggaccaguaca

SEQ ID NO: 729705 - RNA, 19 nt, Homo sapiens
  misc_RNA (1)...(19): siRNA sense strand
gacugaauauaaacuugug

SEQ ID NO: 729706 - RNA, 19 nt, Homo sapiens
  misc_RNA (1)...(19): siRNA sense strand
agaaaccugucucuuggau

SEQ ID NO: 729707 - RNA, 19 nt, Homo sapiens
  misc_RNA (1)...(19): siRNA sense strand
aagagugccuugacgauac

SEQ ID NO: 729708 - RNA, 19 nt, Homo sapiens
  misc_RNA (1)...(19): siRNA sense strand
gaggaguacagugcaauga

SEQ ID NO: 729709 - RNA, 19 nt, Homo sapiens
  misc_RNA (1)...(19): siRNA sense strand
ggggagggcuuucuuugug

SEQ ID NO: 729710 - RNA, 19 nt, Homo sapiens
  misc_RNA (1)...(19): siRNA sense strand
gaaacaucagcaaagacaa

SEQ ID NO: 729711 - RNA, 19 nt, Homo sapiens
  misc_RNA (1)...(19): siRNA sense strand
guaccuaugguccuaguag

SEQ ID NO: 729712 - RNA, 19 nt, Homo sapiens
  misc_RNA (1)...(19): siRNA sense strand
agauguaccuaugguccua

SEQ ID NO: 729713 - RNA, 19 nt, Homo sapiens
  misc_RNA (1)...(19): siRNA sense strand
aaugugauuugccuucuag

SEQ ID NO: 729714 - RNA, 19 nt, Homo sapiens
  misc_RNA (1)...(19): siRNA sense strand
gugcaaugagggaccagua

SEQ ID NO: 729715 - RNA, 19 nt, Homo sapiens
  misc_RNA (1)...(19): siRNA sense strand
ucaccauuauagagaacaa

SEQ ID NO: 729716 - RNA, 19 nt, Homo sapiens
  misc_RNA (1)...(19): siRNA sense strand
aaacaucagcaaagacaag

SEQ ID NO: 729717 - RNA, 19 nt, Homo sapiens
  misc_RNA (1)...(19): siRNA sense strand
auugaaacaucagcaaaga

SEQ ID NO: 729718 - RNA, 19 nt, Homo sapiens
  misc_RNA (1)...(19): siRNA sense strand
caaaacaggcucaggacuu

SEQ ID NO: 729719 - RNA, 19 nt, Homo sapiens
  misc_RNA (1)...(19): siRNA sense strand
ugacgauacagcuaauuca

SEQ ID NO: 729720 - RNA, 19 nt, Homo sapiens
  misc_RNA (1)...(19): siRNA sense strand
uuaaggacucugaagaugu

SEQ ID NO: 729721 - RNA, 19 nt, Homo sapiens
  misc_RNA (1)...(19): siRNA sense strand
aagcaaguaguaauugaug

SEQ ID NO: 729722 - RNA, 19 nt, Homo sapiens
  misc_RNA (1)...(19): siRNA sense strand
acaggaagcaaguaguaau

SEQ ID NO: 729723 - RNA, 19 nt, Homo sapiens
  misc_RNA (1)...(19): siRNA sense strand
cugaagauguaccuauggu

SEQ ID NO: 729724 - RNA, 19 nt, Homo sapiens
  misc_RNA (1)...(19): siRNA sense strand
caucagcaaagacaagaca

SEQ ID NO: 729725 - RNA, 19 nt, Homo sapiens
  misc_RNA (1)...(19): siRNA sense strand
uuagcaagaaguuauggaa

SEQ ID NO: 729726 - RNA, 19 nt, Homo sapiens
  misc_RNA (1)...(19): siRNA sense strand
gaacaguagacacaaaaca

SEQ ID NO: 729727 - RNA, 19 nt, Homo sapiens
  misc_RNA (1)...(19): siRNA sense strand
gauuugccuucuagaacag

SEQ ID NO: 729728 - RNA, 19 nt, Homo sapiens
  misc_RNA (1)...(19): siRNA sense strand
acgaauaugauccaacaau

SEQ ID NO: 729729 - RNA, 19 nt, Homo sapiens
  misc_RNA (1)...(19): siRNA sense strand
ggaacuggcuguggcauug

SEQ ID NO: 729730 - RNA, 19 nt, Homo sapiens
  misc_RNA (1)...(19): siRNA sense strand
ccaagcugcugugaaacua

SEQ ID NO: 729731 - RNA, 19 nt, Homo sapiens
  misc_RNA (1)...(19): siRNA sense strand
gcugugagcacccguauca

SEQ ID NO: 729732 - RNA, 19 nt, Homo sapiens
  misc_RNA (1)...(19): siRNA sense strand
gaccagcuucuguggauuu

SEQ ID NO: 729733 - RNA, 19 nt, Homo sapiens
  misc_RNA (1)...(19): siRNA sense strand
gaccagcuucuguggauuu

SEQ ID NO: 729734 - RNA, 19 nt, Homo sapiens
  misc_RNA (1)...(19): siRNA sense strand
uggcauuggugguggcauu

SEQ ID NO: 729735 - RNA, 19 nt, Homo sapiens
  misc_RNA (1)...(19): siRNA sense strand
caaccggugggacuuguga

SEQ ID NO: 729736 - RNA, 19 nt, Homo sapiens
  misc_RNA (1)...(19): siRNA sense strand
ggugggacuugugacucua

SEQ ID NO: 729737 - RNA, 19 nt, Homo sapiens
  misc_RNA (1)...(19): siRNA sense strand
gaccagcuccugcggaacu

SEQ ID NO: 729738 - RNA, 19 nt, Homo sapiens
  misc_RNA (1)...(19): siRNA sense strand
uggauuuccuagcuucuca

SEQ ID NO: 729739 - RNA, 19 nt, Homo sapiens
  misc_RNA (1)...(19): siRNA sense strand
gagcugugagcacccguau

SEQ ID NO: 729740 - RNA, 19 nt, Homo sapiens
  misc_RNA (1)...(19): siRNA sense strand
gcagaaaguugaacagaac

SEQ ID NO: 729741 - RNA, 19 nt, Homo sapiens
  misc_RNA (1)...(19): siRNA sense strand
gguagucucugcuaguaau

SEQ ID NO: 729742 - RNA, 19 nt, Homo sapiens
  misc_RNA (1)...(19): siRNA sense strand
cagguagucucugcuagua

SEQ ID NO: 729743 - RNA, 19 nt, Homo sapiens
  misc_RNA (1)...(19): siRNA sense strand
acagagggauuucggaaug

SEQ ID NO: 729744 - RNA, 19 nt, Homo sapiens
  misc_RNA (1)...(19): siRNA sense strand
gcacagacagcaggcauag

SEQ ID NO: 729745 - RNA, 19 nt, Homo sapiens
  misc_RNA (1)...(19): siRNA sense strand
cauccgaguuguggugaaa

SEQ ID NO: 729746 - RNA, 19 nt, Homo sapiens
  misc_RNA (1)...(19): siRNA sense strand
agcagaaaguugaacagaa

SEQ ID NO: 729747 - RNA, 19 nt, Homo sapiens
  misc_RNA (1)...(19): siRNA sense strand
gcggcgagagcuaaacaaa

SEQ ID NO: 729748 - RNA, 19 nt, Homo sapiens
  misc_RNA (1)...(19): siRNA sense strand
gccuggaagugaucucaau

SEQ ID NO: 729749 - RNA, 19 nt, Homo sapiens
  misc_RNA (1)...(19): siRNA sense strand
ggcgagagcuaaacaaaag

SEQ ID NO: 729750 - RNA, 19 nt, Homo sapiens
  misc_RNA (1)...(19): siRNA sense strand
cggccaagcagaaaguuga

SEQ ID NO: 729751 - RNA, 19 nt, Homo sapiens
  misc_RNA (1)...(19): siRNA sense strand
gauuucggaaugccaagaa

SEQ ID NO: 729752 - RNA, 19 nt, Homo sapiens
  misc_RNA (1)...(19): siRNA sense strand
ccaagcagaaaguugaaca

SEQ ID NO: 729753 - RNA, 19 nt, Homo sapiens
  misc_RNA (1)...(19): siRNA sense strand
gccaugcacggacugauca

SEQ ID NO: 729754 - RNA, 19 nt, Homo sapiens
  misc_RNA (1)...(19): siRNA sense strand
gcagaaaguugaacagaac

SEQ ID NO: 729755 - RNA, 19 nt, Homo sapiens
  misc_RNA (1)...(19): siRNA sense strand
gguagucucugcuaguaau

SEQ ID NO: 729756 - RNA, 19 nt, Homo sapiens
  misc_RNA (1)...(19): siRNA sense strand
cagguagucucugcuagua

SEQ ID NO: 729757 - RNA, 19 nt, Homo sapiens
  misc_RNA (1)...(19): siRNA sense strand
acagagggauuucggaaug

SEQ ID NO: 729758 - RNA, 19 nt, Homo sapiens
  misc_RNA (1)...(19): siRNA sense strand
gcacagacagcaggcauag

SEQ ID NO: 729759 - RNA, 19 nt, Homo sapiens
  misc_RNA (1)...(19): siRNA sense strand
cauccgaguuguggugaaa

SEQ ID NO: 729760 - RNA, 19 nt, Homo sapiens
  misc_RNA (1)...(19): siRNA sense strand
agcagaaaguugaacagaa

SEQ ID NO: 729761 - RNA, 19 nt, Homo sapiens
  misc_RNA (1)...(19): siRNA sense strand
gcggcgagagcuaaacaaa

SEQ ID NO: 729762 - RNA, 19 nt, Homo sapiens
  misc_RNA (1)...(19): siRNA sense strand
gccuggaagugaucucaau

SEQ ID NO: 729763 - RNA, 19 nt, Homo sapiens
  misc_RNA (1)...(19): siRNA sense strand
ggcgagagcuaaacaaaag

SEQ ID NO: 729764 - RNA, 19 nt, Homo sapiens
  misc_RNA (1)...(19): siRNA sense strand
cggccaagcagaaaguuga

SEQ ID NO: 729765 - RNA, 19 nt, Homo sapiens
  misc_RNA (1)...(19): siRNA sense strand
gauuucggaaugccaagaa

SEQ ID NO: 729766 - RNA, 19 nt, Homo sapiens
  misc_RNA (1)...(19): siRNA sense strand
ccaagcagaaaguugaaca

SEQ ID NO: 729767 - RNA, 19 nt, Homo sapiens
  misc_RNA (1)...(19): siRNA sense strand
gccaugcacggacugauca

SEQ ID NO: 729768 - RNA, 19 nt, Homo sapiens
  misc_RNA (1)...(19): siRNA sense strand
gcaaagcaguauauagaga

SEQ ID NO: 729769 - RNA, 19 nt, Homo sapiens
  misc_RNA (1)...(19): siRNA sense strand
caaacaagaucacaccuau

SEQ ID NO: 729770 - RNA, 19 nt, Homo sapiens
  misc_RNA (1)...(19): siRNA sense strand
caaagccagucauugaauu

SEQ ID NO: 729771 - RNA, 19 nt, Homo sapiens
  misc_RNA (1)...(19): siRNA sense strand
uauauaaccuggacuucaa

SEQ ID NO: 729772 - RNA, 19 nt, Homo sapiens
  misc_RNA (1)...(19): siRNA sense strand
gaacuuuggucuccagcau

SEQ ID NO: 729773 - RNA, 19 nt, Homo sapiens
  misc_RNA (1)...(19): siRNA sense strand
gaggaucgcccagaacuuu

SEQ ID NO: 729774 - RNA, 19 nt, Homo sapiens
  misc_RNA (1)...(19): siRNA sense strand
gugaucaguuugaauauuc

SEQ ID NO: 729775 - RNA, 19 nt, Homo sapiens
  misc_RNA (1)...(19): siRNA sense strand
cuagugaucaguuugaaua

SEQ ID NO: 729776 - RNA, 19 nt, Homo sapiens
  misc_RNA (1)...(19): siRNA sense strand
gaacggagacgaacaaaau

SEQ ID NO: 729777 - RNA, 19 nt, Homo sapiens
  misc_RNA (1)...(19): siRNA sense strand
gcaaagccagucauugaau

SEQ ID NO: 729778 - RNA, 19 nt, Homo sapiens
  misc_RNA (1)...(19): siRNA sense strand
uggcaaagcaguauauaga

SEQ ID NO: 729779 - RNA, 19 nt, Homo sapiens
  misc_RNA (1)...(19): siRNA sense strand
ggacuucaauccaccucau

SEQ ID NO: 729780 - RNA, 19 nt, Homo sapiens
  misc_RNA (1)...(19): siRNA sense strand
caaagcaguauauagagaa

SEQ ID NO: 729781 - RNA, 19 nt, Homo sapiens
  misc_RNA (1)...(19): siRNA sense strand
ugauaaacccgaagcaguu

SEQ ID NO: 729782 - RNA, 19 nt, Homo sapiens
  misc_RNA (1)...(19): siRNA sense strand
guccaaagaagcauauuga

SEQ ID NO: 729783 - RNA, 19 nt, Homo sapiens
  misc_RNA (1)...(19): siRNA sense strand
ucacaccuauucaguccaa

SEQ ID NO: 729784 - RNA, 19 nt, Homo sapiens
  misc_RNA (1)...(19): siRNA sense strand
gccagaggaucgcccagaa

SEQ ID NO: 729785 - RNA, 19 nt, Homo sapiens
  misc_RNA (1)...(19): siRNA sense strand
aaaucuggcccuacguuua

SEQ ID NO: 729786 - RNA, 19 nt, Homo sapiens
  misc_RNA (1)...(19): siRNA sense strand
guacaaagacguggcaaag

SEQ ID NO: 729787 - RNA, 19 nt, Homo sapiens
  misc_RNA (1)...(19): siRNA sense strand
aaagccagucauugaauua

SEQ ID NO: 729788 - RNA, 19 nt, Homo sapiens
  misc_RNA (1)...(19): siRNA sense strand
caauccaccucauguacau

SEQ ID NO: 729789 - RNA, 19 nt, Homo sapiens
  misc_RNA (1)...(19): siRNA sense strand
ucaaacaagaucacaccua

SEQ ID NO: 729790 - RNA, 19 nt, Homo sapiens
  misc_RNA (1)...(19): siRNA sense strand
caaaaucugugaaguggau

SEQ ID NO: 729791 - RNA, 19 nt, Homo sapiens
  misc_RNA (1)...(19): siRNA sense strand
gugaucacacgccuaauga

SEQ ID NO: 729792 - RNA, 19 nt, Homo sapiens
  misc_RNA (1)...(19): siRNA sense strand
guauauaaccuggacuuca

SEQ ID NO: 729793 - RNA, 19 nt, Homo sapiens
  misc_RNA (1)...(19): siRNA sense strand
aacaagaucacaccuauuc

SEQ ID NO: 729794 - RNA, 19 nt, Homo sapiens
  misc_RNA (1)...(19): siRNA sense strand
gcccuacguuuacacacuu

SEQ ID NO: 729795 - RNA, 19 nt, Homo sapiens
  misc_RNA (1)...(19): siRNA sense strand
gccagucauugaauuauac

SEQ ID NO: 729796 - RNA, 19 nt, Homo sapiens
  misc_RNA (1)...(19): siRNA sense strand
agccagucauugaauuaua

SEQ ID NO: 729797 - RNA, 19 nt, Homo sapiens
  misc_RNA (1)...(19): siRNA sense strand
gauaaacccgaagcaguug

SEQ ID NO: 729798 - RNA, 19 nt, Homo sapiens
  misc_RNA (1)...(19): siRNA sense strand
gagauggcaaagcaguaua

SEQ ID NO: 729799 - RNA, 19 nt, Homo sapiens
  misc_RNA (1)...(19): siRNA sense strand
ucacacgccuaaugauguc

SEQ ID NO: 729800 - RNA, 19 nt, Homo sapiens
  misc_RNA (1)...(19): siRNA sense strand
ggcaaagccagucauugaa

SEQ ID NO: 729801 - RNA, 19 nt, Homo sapiens
  misc_RNA (1)...(19): siRNA sense strand
gauggcaaagcaguauaua

SEQ ID NO: 729802 - RNA, 19 nt, Homo sapiens
  misc_RNA (1)...(19): siRNA sense strand
ggacaaaaucugugaagug

SEQ ID NO: 729803 - RNA, 19 nt, Homo sapiens
  misc_RNA (1)...(19): siRNA sense strand
ccuauucaguccaaagaag

SEQ ID NO: 729804 - RNA, 19 nt, Homo sapiens
  misc_RNA (1)...(19): siRNA sense strand
gcuaagacaguacaaagac

SEQ ID NO: 729805 - RNA, 19 nt, Homo sapiens
  misc_RNA (1)...(19): siRNA sense strand
aaacaagaucacaccuauu

SEQ ID NO: 729806 - RNA, 19 nt, Homo sapiens
  misc_RNA (1)...(19): siRNA sense strand
ccgaagcccuggacaaaau

SEQ ID NO: 729807 - RNA, 19 nt, Homo sapiens
  misc_RNA (1)...(19): siRNA sense strand
caagaucacaccuauucag

SEQ ID NO: 729808 - RNA, 19 nt, Homo sapiens
  misc_RNA (1)...(19): siRNA sense strand
ggcuaagacaguacaaaga

SEQ ID NO: 729809 - RNA, 19 nt, Homo sapiens
  misc_RNA (1)...(19): siRNA sense strand
ccagcaggaggaugauaaa

SEQ ID NO: 729810 - RNA, 19 nt, Homo sapiens
  misc_RNA (1)...(19): siRNA sense strand
gcggaaggguauauaaccu

SEQ ID NO: 729811 - RNA, 19 nt, Homo sapiens
  misc_RNA (1)...(19): siRNA sense strand
ugaaacacuuaaagaucgu

SEQ ID NO: 729812 - RNA, 19 nt, Homo sapiens
  misc_RNA (1)...(19): siRNA sense strand
uuggugagauggcaaagca

SEQ ID NO: 729813 - RNA, 19 nt, Homo sapiens
  misc_RNA (1)...(19): siRNA sense strand
ugagauggcaaagcaguau

SEQ ID NO: 729814 - RNA, 19 nt, Homo sapiens
  misc_RNA (1)...(19): siRNA sense strand
cuagcggaaggguauauaa

SEQ ID NO: 729815 - RNA, 19 nt, Homo sapiens
  misc_RNA (1)...(19): siRNA sense strand
ccuccuagcggaaggguau

SEQ ID NO: 729816 - RNA, 19 nt, Homo sapiens
  misc_RNA (1)...(19): siRNA sense strand
acacuuuucucaaacaaga

SEQ ID NO: 729817 - RNA, 19 nt, Homo sapiens
  misc_RNA (1)...(19): siRNA sense strand
acacuuaaagaucgucuca

SEQ ID NO: 729818 - RNA, 19 nt, Homo sapiens
  misc_RNA (1)...(19): siRNA sense strand
ggcccuacguuuacacacu

SEQ ID NO: 729819 - RNA, 19 nt, Homo sapiens
  misc_RNA (1)...(19): siRNA sense strand
gugagauggcaaagcagua

SEQ ID NO: 729820 - RNA, 19 nt, Homo sapiens
  misc_RNA (1)...(19): siRNA sense strand
cugccaggcuaagacagua

SEQ ID NO: 729821 - RNA, 19 nt, Homo sapiens
  misc_RNA (1)...(19): siRNA sense strand
ggguauauaaccuggacuu

SEQ ID NO: 729822 - RNA, 19 nt, Homo sapiens
  misc_RNA (1)...(19): siRNA sense strand
gcacuggcuccuugauggu

SEQ ID NO: 729823 - RNA, 19 nt, Homo sapiens
  misc_RNA (1)...(19): siRNA sense strand
ggaaagagaagcuugauuc

SEQ ID NO: 729824 - RNA, 19 nt, Homo sapiens
  misc_RNA (1)...(19): siRNA sense strand
gaagcuugauucugugauu

SEQ ID NO: 729825 - RNA, 19 nt, Homo sapiens
  misc_RNA (1)...(19): siRNA sense strand
ggugagugaugaaauggua

SEQ ID NO: 729826 - RNA, 19 nt, Homo sapiens
  misc_RNA (1)...(19): siRNA sense strand
caaaagagcccaugaaaga

SEQ ID NO: 729827 - RNA, 19 nt, Homo sapiens
  misc_RNA (1)...(19): siRNA sense strand
aggcagaaaugcucgauga

SEQ ID NO: 729828 - RNA, 19 nt, Homo sapiens
  misc_RNA (1)...(19): siRNA sense strand
gcagaacccgaguauccua

SEQ ID NO: 729829 - RNA, 19 nt, Homo sapiens
  misc_RNA (1)...(19): siRNA sense strand
gaacccgaguauccuaaag

SEQ ID NO: 729830 - RNA, 19 nt, Homo sapiens
  misc_RNA (1)...(19): siRNA sense strand
aaagagcccaugaaagaug

SEQ ID NO: 729831 - RNA, 19 nt, Homo sapiens
  misc_RNA (1)...(19): siRNA sense strand
gcugaaaacuucugugucu

SEQ ID NO: 729832 - RNA, 19 nt, Homo sapiens
  misc_RNA (1)...(19): siRNA sense strand
gaauucagcaucccagacu

SEQ ID NO: 729833 - RNA, 19 nt, Homo sapiens
  misc_RNA (1)...(19): siRNA sense strand
aagagcccaugaaagauga

SEQ ID NO: 729834 - RNA, 19 nt, Homo sapiens
  misc_RNA (1)...(19): siRNA sense strand
gaagaggaaagagaagcuu

SEQ ID NO: 729835 - RNA, 19 nt, Homo sapiens
  misc_RNA (1)...(19): siRNA sense strand
gaaggcaacuauggaugcu

SEQ ID NO: 729836 - RNA, 19 nt, Homo sapiens
  misc_RNA (1)...(19): siRNA sense strand
ucacaggaaggcugauuca

SEQ ID NO: 729837 - RNA, 19 nt, Homo sapiens
  misc_RNA (1)...(19): siRNA sense strand
uggagaagaggaaagagaa

SEQ ID NO: 729838 - RNA, 19 nt, Homo sapiens
  misc_RNA (1)...(19): siRNA sense strand
acuggugagugaugaaaug

SEQ ID NO: 729839 - RNA, 19 nt, Homo sapiens
  misc_RNA (1)...(19): siRNA sense strand
gcuugauucugugauugaa

SEQ ID NO: 729840 - RNA, 19 nt, Homo sapiens
  misc_RNA (1)...(19): siRNA sense strand
gcugaaggcaacuauggau

SEQ ID NO: 729841 - RNA, 19 nt, Homo sapiens
  misc_RNA (1)...(19): siRNA sense strand
ucauugagaagaauuugga

SEQ ID NO: 729842 - RNA, 19 nt, Homo sapiens
  misc_RNA (1)...(19): siRNA sense strand
cagaacccgaguauccuaa

SEQ ID NO: 729843 - RNA, 19 nt, Homo sapiens
  misc_RNA (1)...(19): siRNA sense strand
ggagaagaggaaagagaag

SEQ ID NO: 729844 - RNA, 19 nt, Homo sapiens
  misc_RNA (1)...(19): siRNA sense strand
aagcuugauucugugauug

SEQ ID NO: 729845 - RNA, 19 nt, Homo sapiens
  misc_RNA (1)...(19): siRNA sense strand
aaacuggugagugaugaaa

SEQ ID NO: 729846 - RNA, 19 nt, Homo sapiens
  misc_RNA (1)...(19): siRNA sense strand
cuucugugucugccauuua

SEQ ID NO: 729847 - RNA, 19 nt, Homo sapiens
  misc_RNA (1)...(19): siRNA sense strand
agaggaaagagaagcuuga

SEQ ID NO: 729848 - RNA, 19 nt, Homo sapiens
  misc_RNA (1)...(19): siRNA sense strand
gaggaaagagaagcuugau

SEQ ID NO: 729849 - RNA, 19 nt, Homo sapiens
  misc_RNA (1)...(19): siRNA sense strand
cggcagaacccgaguaucc

SEQ ID NO: 729850 - RNA, 19 nt, Homo sapiens
  misc_RNA (1)...(19): siRNA sense strand
ggaaagagaagcuugauuc

SEQ ID NO: 729851 - RNA, 19 nt, Homo sapiens
  misc_RNA (1)...(19): siRNA sense strand
gaagcuugauucugugauu

SEQ ID NO: 729852 - RNA, 19 nt, Homo sapiens
  misc_RNA (1)...(19): siRNA sense strand
ggugagugaugaaauggua

SEQ ID NO: 729853 - RNA, 19 nt, Homo sapiens
  misc_RNA (1)...(19): siRNA sense strand
caaaagagcccaugaaaga

SEQ ID NO: 729854 - RNA, 19 nt, Homo sapiens
  misc_RNA (1)...(19): siRNA sense strand
aggcagaaaugcucgauga

SEQ ID NO: 729855 - RNA, 19 nt, Homo sapiens
  misc_RNA (1)...(19): siRNA sense strand
gcagaacccgaguauccua

SEQ ID NO: 729856 - RNA, 19 nt, Homo sapiens
  misc_RNA (1)...(19): siRNA sense strand
gaacccgaguauccuaaag

SEQ ID NO: 729857 - RNA, 19 nt, Homo sapiens
  misc_RNA (1)...(19): siRNA sense strand
aaagagcccaugaaagaug

SEQ ID NO: 729858 - RNA, 19 nt, Homo sapiens
  misc_RNA (1)...(19): siRNA sense strand
gcugaaaacuucugugucu

SEQ ID NO: 729859 - RNA, 19 nt, Homo sapiens
  misc_RNA (1)...(19): siRNA sense strand
gaauucagcaucccagacu

SEQ ID NO: 729860 - RNA, 19 nt, Homo sapiens
  misc_RNA (1)...(19): siRNA sense strand
aagagcccaugaaagauga

SEQ ID NO: 729861 - RNA, 19 nt, Homo sapiens
  misc_RNA (1)...(19): siRNA sense strand
gaagaggaaagagaagcuu

SEQ ID NO: 729862 - RNA, 19 nt, Homo sapiens
  misc_RNA (1)...(19): siRNA sense strand
gaaggcaacuauggaugcu

SEQ ID NO: 729863 - RNA, 19 nt, Homo sapiens
  misc_RNA (1)...(19): siRNA sense strand
ucacaggaaggcugauuca

SEQ ID NO: 729864 - RNA, 19 nt, Homo sapiens
  misc_RNA (1)...(19): siRNA sense strand
uggagaagaggaaagagaa

SEQ ID NO: 729865 - RNA, 19 nt, Homo sapiens
  misc_RNA (1)...(19): siRNA sense strand
acuggugagugaugaaaug

SEQ ID NO: 729866 - RNA, 19 nt, Homo sapiens
  misc_RNA (1)...(19): siRNA sense strand
gcuugauucugugauugaa

SEQ ID NO: 729867 - RNA, 19 nt, Homo sapiens
  misc_RNA (1)...(19): siRNA sense strand
gcugaaggcaacuauggau

SEQ ID NO: 729868 - RNA, 19 nt, Homo sapiens
  misc_RNA (1)...(19): siRNA sense strand
ucauugagaagaauuugga

SEQ ID NO: 729869 - RNA, 19 nt, Homo sapiens
  misc_RNA (1)...(19): siRNA sense strand
cagaacccgaguauccuaa

SEQ ID NO: 729870 - RNA, 19 nt, Homo sapiens
  misc_RNA (1)...(19): siRNA sense strand
ggagaagaggaaagagaag

SEQ ID NO: 729871 - RNA, 19 nt, Homo sapiens
  misc_RNA (1)...(19): siRNA sense strand
aagcuugauucugugauug

SEQ ID NO: 729872 - RNA, 19 nt, Homo sapiens
  misc_RNA (1)...(19): siRNA sense strand
aaacuggugagugaugaaa

SEQ ID NO: 729873 - RNA, 19 nt, Homo sapiens
  misc_RNA (1)...(19): siRNA sense strand
cuucugugucugccauuua

SEQ ID NO: 729874 - RNA, 19 nt, Homo sapiens
  misc_RNA (1)...(19): siRNA sense strand
agaggaaagagaagcuuga

SEQ ID NO: 729875 - RNA, 19 nt, Homo sapiens
  misc_RNA (1)...(19): siRNA sense strand
gaggaaagagaagcuugau

SEQ ID NO: 729876 - RNA, 19 nt, Homo sapiens
  misc_RNA (1)...(19): siRNA sense strand
cggcagaacccgaguaucc

SEQ ID NO: 729877 - RNA, 19 nt, Homo sapiens
  misc_RNA (1)...(19): siRNA sense strand
ggaaagagaagcuugauuc

SEQ ID NO: 729878 - RNA, 19 nt, Homo sapiens
  misc_RNA (1)...(19): siRNA sense strand
gaagcuugauucugugauu

SEQ ID NO: 729879 - RNA, 19 nt, Homo sapiens
  misc_RNA (1)...(19): siRNA sense strand
ggugagugaugaaauggua

SEQ ID NO: 729880 - RNA, 19 nt, Homo sapiens
  misc_RNA (1)...(19): siRNA sense strand
caaaagagcccaugaaaga

SEQ ID NO: 729881 - RNA, 19 nt, Homo sapiens
  misc_RNA (1)...(19): siRNA sense strand
aggcagaaaugcucgauga

SEQ ID NO: 729882 - RNA, 19 nt, Homo sapiens
  misc_RNA (1)...(19): siRNA sense strand
gcagaacccgaguauccua

SEQ ID NO: 729883 - RNA, 19 nt, Homo sapiens
  misc_RNA (1)...(19): siRNA sense strand
gaacccgaguauccuaaag

SEQ ID NO: 729884 - RNA, 19 nt, Homo sapiens
  misc_RNA (1)...(19): siRNA sense strand
aaagagcccaugaaagaug

SEQ ID NO: 729885 - RNA, 19 nt, Homo sapiens
  misc_RNA (1)...(19): siRNA sense strand
gcugaaaacuucugugucu

SEQ ID NO: 729886 - RNA, 19 nt, Homo sapiens
  misc_RNA (1)...(19): siRNA sense strand
gaauucagcaucccagacu

SEQ ID NO: 729887 - RNA, 19 nt, Homo sapiens
  misc_RNA (1)...(19): siRNA sense strand
aagagcccaugaaagauga

SEQ ID NO: 729888 - RNA, 19 nt, Homo sapiens
  misc_RNA (1)...(19): siRNA sense strand
gaagaggaaagagaagcuu

SEQ ID NO: 729889 - RNA, 19 nt, Homo sapiens
  misc_RNA (1)...(19): siRNA sense strand
gaaggcaacuauggaugcu

SEQ ID NO: 729890 - RNA, 19 nt, Homo sapiens
  misc_RNA (1)...(19): siRNA sense strand
ucacaggaaggcugauuca

SEQ ID NO: 729891 - RNA, 19 nt, Homo sapiens
  misc_RNA (1)...(19): siRNA sense strand
uggagaagaggaaagagaa

SEQ ID NO: 729892 - RNA, 19 nt, Homo sapiens
  misc_RNA (1)...(19): siRNA sense strand
acuggugagugaugaaaug

SEQ ID NO: 729893 - RNA, 19 nt, Homo sapiens
  misc_RNA (1)...(19): siRNA sense strand
gcuugauucugugauugaa

SEQ ID NO: 729894 - RNA, 19 nt, Homo sapiens
  misc_RNA (1)...(19): siRNA sense strand
gcugaaggcaacuauggau

SEQ ID NO: 729895 - RNA, 19 nt, Homo sapiens
  misc_RNA (1)...(19): siRNA sense strand
ucauugagaagaauuugga

SEQ ID NO: 729896 - RNA, 19 nt, Homo sapiens
  misc_RNA (1)...(19): siRNA sense strand
cagaacccgaguauccuaa

SEQ ID NO: 729897 - RNA, 19 nt, Homo sapiens
  misc_RNA (1)...(19): siRNA sense strand
ggagaagaggaaagagaag

SEQ ID NO: 729898 - RNA, 19 nt, Homo sapiens
  misc_RNA (1)...(19): siRNA sense strand
aagcuugauucugugauug

SEQ ID NO: 729899 - RNA, 19 nt, Homo sapiens
  misc_RNA (1)...(19): siRNA sense strand
aaacuggugagugaugaaa

SEQ ID NO: 729900 - RNA, 19 nt, Homo sapiens
  misc_RNA (1)...(19): siRNA sense strand
cuucugugucugccauuua

SEQ ID NO: 729901 - RNA, 19 nt, Homo sapiens
  misc_RNA (1)...(19): siRNA sense strand
agaggaaagagaagcuuga

SEQ ID NO: 729902 - RNA, 19 nt, Homo sapiens
  misc_RNA (1)...(19): siRNA sense strand
gaggaaagagaagcuugau

SEQ ID NO: 729903 - RNA, 19 nt, Homo sapiens
  misc_RNA (1)...(19): siRNA sense strand
cggcagaacccgaguaucc

SEQ ID NO: 729904 - RNA, 19 nt, Homo sapiens
  misc_RNA (1)...(19): siRNA sense strand
gaacaacccuccagucaug

SEQ ID NO: 729905 - RNA, 19 nt, Homo sapiens
  misc_RNA (1)...(19): siRNA sense strand
gggaagaucugcacuguga

SEQ ID NO: 729906 - RNA, 19 nt, Homo sapiens
  misc_RNA (1)...(19): siRNA sense strand
gaagggaaauggucaagga

SEQ ID NO: 729907 - RNA, 19 nt, Homo sapiens
  misc_RNA (1)...(19): siRNA sense strand
gcaaucuugugccauauuu

SEQ ID NO: 729908 - RNA, 19 nt, Homo sapiens
  misc_RNA (1)...(19): siRNA sense strand
ggaaaagucugcaaucuug

SEQ ID NO: 729909 - RNA, 19 nt, Homo sapiens
  misc_RNA (1)...(19): siRNA sense strand
ucagggaccuuuccuauuc

SEQ ID NO: 729910 - RNA, 19 nt, Homo sapiens
  misc_RNA (1)...(19): siRNA sense strand
gggcagcugugaacauuga

SEQ ID NO: 729911 - RNA, 19 nt, Homo sapiens
  misc_RNA (1)...(19): siRNA sense strand
gagggcagcugugaacauu

SEQ ID NO: 729912 - RNA, 19 nt, Homo sapiens
  misc_RNA (1)...(19): siRNA sense strand
gggaacaccugaacuacug

SEQ ID NO: 729913 - RNA, 19 nt, Homo sapiens
  misc_RNA (1)...(19): siRNA sense strand
ggaaauggucaaggagaua

SEQ ID NO: 729914 - RNA, 19 nt, Homo sapiens
  misc_RNA (1)...(19): siRNA sense strand
agacggaccugcugaaugg

SEQ ID NO: 729915 - RNA, 19 nt, Homo sapiens
  misc_RNA (1)...(19): siRNA sense strand
gaugaaggcagaagggaaa

SEQ ID NO: 729916 - RNA, 19 nt, Homo sapiens
  misc_RNA (1)...(19): siRNA sense strand
gaagguguccugcuacauc

SEQ ID NO: 729917 - RNA, 19 nt, Homo sapiens
  misc_RNA (1)...(19): siRNA sense strand
cagguggucucgcugauga

SEQ ID NO: 729918 - RNA, 19 nt, Homo sapiens
  misc_RNA (1)...(19): siRNA sense strand
guaccuggacuucaucgua

SEQ ID NO: 729919 - RNA, 19 nt, Homo sapiens
  misc_RNA (1)...(19): siRNA sense strand
gcgcugggcuugcugucuu

SEQ ID NO: 729920 - RNA, 19 nt, Homo sapiens
  misc_RNA (1)...(19): siRNA sense strand
gacgugcccuuucagauca

SEQ ID NO: 729921 - RNA, 19 nt, Homo sapiens
  misc_RNA (1)...(19): siRNA sense strand
ggaaguccacgcugaugaa

SEQ ID NO: 729922 - RNA, 19 nt, Homo sapiens
  misc_RNA (1)...(19): siRNA sense strand
gggaaauggucaaggagau

SEQ ID NO: 729923 - RNA, 19 nt, Homo sapiens
  misc_RNA (1)...(19): siRNA sense strand
ucugcaaucuugugccaua

SEQ ID NO: 729924 - RNA, 19 nt, Homo sapiens
  misc_RNA (1)...(19): siRNA sense strand
ccuauuugguccucaggua

SEQ ID NO: 729925 - RNA, 19 nt, Homo sapiens
  misc_RNA (1)...(19): siRNA sense strand
gauacaagacccuccugaa

SEQ ID NO: 729926 - RNA, 19 nt, Homo sapiens
  misc_RNA (1)...(19): siRNA sense strand
ggagaugggagucuuucuu

SEQ ID NO: 729927 - RNA, 19 nt, Homo sapiens
  misc_RNA (1)...(19): siRNA sense strand
gagaugggagucuuucuuc

SEQ ID NO: 729928 - RNA, 19 nt, Homo sapiens
  misc_RNA (1)...(19): siRNA sense strand
auacaagacccuccugaaa

SEQ ID NO: 729929 - RNA, 19 nt, Homo sapiens
  misc_RNA (1)...(19): siRNA sense strand
gaagaucugcacugugaca

SEQ ID NO: 729930 - RNA, 19 nt, Homo sapiens
  misc_RNA (1)...(19): siRNA sense strand
ggaacgaaaccaagaaggu

SEQ ID NO: 729931 - RNA, 19 nt, Homo sapiens
  misc_RNA (1)...(19): siRNA sense strand
gggaucggccuccucauug

SEQ ID NO: 729932 - RNA, 19 nt, Homo sapiens
  misc_RNA (1)...(19): siRNA sense strand
ggucugaacugcccaaccu

SEQ ID NO: 729933 - RNA, 19 nt, Homo sapiens
  misc_RNA (1)...(19): siRNA sense strand
acaagacccuccugaaagg

SEQ ID NO: 729934 - RNA, 19 nt, Homo sapiens
  misc_RNA (1)...(19): siRNA sense strand
ucauuggccugcuguacuu

SEQ ID NO: 729935 - RNA, 19 nt, Homo sapiens
  misc_RNA (1)...(19): siRNA sense strand
gaggugaacccuuuucuuu

SEQ ID NO: 729936 - RNA, 19 nt, Homo sapiens
  misc_RNA (1)...(19): siRNA sense strand
ggacccugguggaggaaga

SEQ ID NO: 729937 - RNA, 19 nt, Homo sapiens
  misc_RNA (1)...(19): siRNA sense strand
cgcaucaccucgcacauug

SEQ ID NO: 729938 - RNA, 19 nt, Homo sapiens
  misc_RNA (1)...(19): siRNA sense strand
ugacucagaccacaagaga

SEQ ID NO: 729939 - RNA, 19 nt, Homo sapiens
  misc_RNA (1)...(19): siRNA sense strand
ccaugaaugccagcaguua

SEQ ID NO: 729940 - RNA, 19 nt, Homo sapiens
  misc_RNA (1)...(19): siRNA sense strand
gcgcaucaccucgcacauu

SEQ ID NO: 729941 - RNA, 19 nt, Homo sapiens
  misc_RNA (1)...(19): siRNA sense strand
gaggugguguccagcaaca

SEQ ID NO: 729942 - RNA, 19 nt, Homo sapiens
  misc_RNA (1)...(19): siRNA sense strand
gugaacaacccuccaguca

SEQ ID NO: 729943 - RNA, 19 nt, Homo sapiens
  misc_RNA (1)...(19): siRNA sense strand
caacuccggcuuccucuuc

SEQ ID NO: 729944 - RNA, 19 nt, Homo sapiens
  misc_RNA (1)...(19): siRNA sense strand
gguggaggaagaaaggaua

SEQ ID NO: 729945 - RNA, 19 nt, Homo sapiens
  misc_RNA (1)...(19): siRNA sense strand
gcagacgugcccuuucaga

SEQ ID NO: 729946 - RNA, 19 nt, Homo sapiens
  misc_RNA (1)...(19): siRNA sense strand
gagacggaccugcugaaug

SEQ ID NO: 729947 - RNA, 19 nt, Homo sapiens
  misc_RNA (1)...(19): siRNA sense strand
cgaguacggugaucagaac

SEQ ID NO: 729948 - RNA, 19 nt, Homo sapiens
  misc_RNA (1)...(19): siRNA sense strand
gaugaaagggcucgcucaa

SEQ ID NO: 729949 - RNA, 19 nt, Homo sapiens
  misc_RNA (1)...(19): siRNA sense strand
caucuccuaugucagguau

SEQ ID NO: 729950 - RNA, 19 nt, Homo sapiens
  misc_RNA (1)...(19): siRNA sense strand
ggucauccucuccaucuau

SEQ ID NO: 729951 - RNA, 19 nt, Homo sapiens
  misc_RNA (1)...(19): siRNA sense strand
ugccauauuugagggauuu

SEQ ID NO: 729952 - RNA, 19 nt, Homo sapiens
  misc_RNA (1)...(19): siRNA sense strand
ggaucggccuccucauugg

SEQ ID NO: 729953 - RNA, 19 nt, Homo sapiens
  misc_RNA (1)...(19): siRNA sense strand
gggaaguccacgcugauga

SEQ ID NO: 729954 - RNA, 19 nt, Homo sapiens
  misc_RNA (1)...(19): siRNA sense strand
gcgaguacggugaucagaa

SEQ ID NO: 729955 - RNA, 19 nt, Homo sapiens
  misc_RNA (1)...(19): siRNA sense strand
cgcuggagcuggugaacaa

SEQ ID NO: 729956 - RNA, 19 nt, Homo sapiens
  misc_RNA (1)...(19): siRNA sense strand
ggaggaagaaaggauacaa

SEQ ID NO: 729957 - RNA, 19 nt, Homo sapiens
  misc_RNA (1)...(19): siRNA sense strand
guacggugaucagaacagu

SEQ ID NO: 729958 - RNA, 19 nt, Homo sapiens
  misc_RNA (1)...(19): siRNA sense strand
gcccagcgccaaacucuuc

SEQ ID NO: 729959 - RNA, 19 nt, Homo sapiens
  misc_RNA (1)...(19): siRNA sense strand
gcugaauggacaucugaaa

SEQ ID NO: 729960 - RNA, 19 nt, Homo sapiens
  misc_RNA (1)...(19): siRNA sense strand
caccugaacuacugguaca

SEQ ID NO: 729961 - RNA, 19 nt, Homo sapiens
  misc_RNA (1)...(19): siRNA sense strand
ggucggcaccgccaugaau

SEQ ID NO: 729962 - RNA, 19 nt, Homo sapiens
  misc_RNA (1)...(19): siRNA sense strand
gaaggcagaagggaaaugg

SEQ ID NO: 729963 - RNA, 19 nt, Homo sapiens
  misc_RNA (1)...(19): siRNA sense strand
gcaacauggaggccacuga

SEQ ID NO: 729964 - RNA, 19 nt, Homo sapiens
  misc_RNA (1)...(19): siRNA sense strand
gaaauggucaaggagauac

SEQ ID NO: 729965 - RNA, 19 nt, Homo sapiens
  misc_RNA (1)...(19): siRNA sense strand
cgacgagacgugccacuuc

SEQ ID NO: 729966 - RNA, 19 nt, Homo sapiens
  misc_RNA (1)...(19): siRNA sense strand
ggaagaaaggauacaagac

SEQ ID NO: 729967 - RNA, 19 nt, Homo sapiens
  misc_RNA (1)...(19): siRNA sense strand
ugccuacuguucugacauu

SEQ ID NO: 729968 - RNA, 19 nt, Homo sapiens
  misc_RNA (1)...(19): siRNA sense strand
ccucaugccuacuguucug

SEQ ID NO: 729969 - RNA, 19 nt, Homo sapiens
  misc_RNA (1)...(19): siRNA sense strand
aaucuugugccauauuuga

SEQ ID NO: 729970 - RNA, 19 nt, Homo sapiens
  misc_RNA (1)...(19): siRNA sense strand
uccggaagguguccugcua

SEQ ID NO: 729971 - RNA, 19 nt, Homo sapiens
  misc_RNA (1)...(19): siRNA sense strand
uacaagacccuccugaaag

SEQ ID NO: 729972 - RNA, 19 nt, Homo sapiens
  misc_RNA (1)...(19): siRNA sense strand
gaacagucggcuggugaga

SEQ ID NO: 729973 - RNA, 19 nt, Homo sapiens
  misc_RNA (1)...(19): siRNA sense strand
ccacaacccagcagauuuu

SEQ ID NO: 729974 - RNA, 19 nt, Homo sapiens
  misc_RNA (1)...(19): siRNA sense strand
gcagaagggaaauggucaa

SEQ ID NO: 729975 - RNA, 19 nt, Homo sapiens
  misc_RNA (1)...(19): siRNA sense strand
ugacagcgcugggcuugcu

SEQ ID NO: 729976 - RNA, 19 nt, Homo sapiens
  misc_RNA (1)...(19): siRNA sense strand
gcagcaucguguacuggau

SEQ ID NO: 729977 - RNA, 19 nt, Homo sapiens
  misc_RNA (1)...(19): siRNA sense strand
acucagaccacaagagaga

SEQ ID NO: 729978 - RNA, 19 nt, Homo sapiens
  misc_RNA (1)...(19): siRNA sense strand
cagcugugaacauugaauu

SEQ ID NO: 729979 - RNA, 19 nt, Homo sapiens
  misc_RNA (1)...(19): siRNA sense strand
ggagggcagcugugaacau

SEQ ID NO: 729980 - RNA, 19 nt, Homo sapiens
  misc_RNA (1)...(19): siRNA sense strand
augccgaggugaacccuuu

SEQ ID NO: 729981 - RNA, 19 nt, Homo sapiens
  misc_RNA (1)...(19): siRNA sense strand
ccaaacucuucgagcuguu

SEQ ID NO: 729982 - RNA, 19 nt, Homo sapiens
  misc_RNA (1)...(19): siRNA sense strand
ccgggaagaucugcacugu

SEQ ID NO: 729983 - RNA, 19 nt, Homo sapiens
  misc_RNA (1)...(19): siRNA sense strand
gucauccucuccaucuaug

SEQ ID NO: 729984 - RNA, 19 nt, Homo sapiens
  misc_RNA (1)...(19): siRNA sense strand
ugucagguauggguucgaa

SEQ ID NO: 729985 - RNA, 19 nt, Homo sapiens
  misc_RNA (1)...(19): siRNA sense strand
gaggaagaaaggauacaag

SEQ ID NO: 729986 - RNA, 19 nt, Homo sapiens
  misc_RNA (1)...(19): siRNA sense strand
ccuacuaccuggccaagac

SEQ ID NO: 729987 - RNA, 19 nt, Homo sapiens
  misc_RNA (1)...(19): siRNA sense strand
cggaagguguccugcuaca

SEQ ID NO: 729988 - RNA, 19 nt, Homo sapiens
  misc_RNA (1)...(19): siRNA sense strand
agacgugcccuuucagauc

SEQ ID NO: 729989 - RNA, 19 nt, Homo sapiens
  misc_RNA (1)...(19): siRNA sense strand
ggaccuuccucagcaucau

SEQ ID NO: 729990 - RNA, 19 nt, Homo sapiens
  misc_RNA (1)...(19): siRNA sense strand
aguccacgcugaugaacau

SEQ ID NO: 729991 - RNA, 19 nt, Homo sapiens
  misc_RNA (1)...(19): siRNA sense strand
agacgugccacuuccagaa

SEQ ID NO: 729992 - RNA, 19 nt, Homo sapiens
  misc_RNA (1)...(19): siRNA sense strand
gggucauccucuccaucua

SEQ ID NO: 729993 - RNA, 19 nt, Homo sapiens
  misc_RNA (1)...(19): siRNA sense strand
ggugaacccuuuucuuugg

SEQ ID NO: 729994 - RNA, 19 nt, Homo sapiens
  misc_RNA (1)...(19): siRNA sense strand
ucaaggacaauguguguac

SEQ ID NO: 729995 - RNA, 19 nt, Homo sapiens
  misc_RNA (1)...(19): siRNA sense strand
aagguguccugcuacauca

SEQ ID NO: 729996 - RNA, 19 nt, Homo sapiens
  misc_RNA (1)...(19): siRNA sense strand
uccgggaaguucaauagug

SEQ ID NO: 729997 - RNA, 19 nt, Homo sapiens
  misc_RNA (1)...(19): siRNA sense strand
cccugcagguggccacuuu

SEQ ID NO: 729998 - RNA, 19 nt, Homo sapiens
  misc_RNA (1)...(19): siRNA sense strand
aggaagaaaggauacaaga

SEQ ID NO: 729999 - RNA, 19 nt, Homo sapiens
  misc_RNA (1)...(19): siRNA sense strand
ugagggauuugggucugaa

SEQ ID NO: 730000 - RNA, 19 nt, Homo sapiens
  misc_RNA (1)...(19): siRNA sense strand
ccgccucauugccuauuug

SEQ ID NO: 730001 - RNA, 19 nt, Homo sapiens
  misc_RNA (1)...(19): siRNA sense strand
gcuuagaccgggaagaucu

SEQ ID NO: 730002 - RNA, 19 nt, Homo sapiens
  misc_RNA (1)...(19): siRNA sense strand
cagcagauuuugucaugga

SEQ ID NO: 730003 - RNA, 19 nt, Homo sapiens
  misc_RNA (1)...(19): siRNA sense strand
ggugguguccagcaacaug

SEQ ID NO: 730004 - RNA, 19 nt, Homo sapiens
  misc_RNA (1)...(19): siRNA sense strand
gaacaacccuccagucaug

SEQ ID NO: 730005 - RNA, 19 nt, Homo sapiens
  misc_RNA (1)...(19): siRNA sense strand
gggaagaucugcacuguga

SEQ ID NO: 730006 - RNA, 19 nt, Homo sapiens
  misc_RNA (1)...(19): siRNA sense strand
gaagggaaauggucaagga

SEQ ID NO: 730007 - RNA, 19 nt, Homo sapiens
  misc_RNA (1)...(19): siRNA sense strand
gcaaucuugugccauauuu

SEQ ID NO: 730008 - RNA, 19 nt, Homo sapiens
  misc_RNA (1)...(19): siRNA sense strand
ggaaaagucugcaaucuug

SEQ ID NO: 730009 - RNA, 19 nt, Homo sapiens
  misc_RNA (1)...(19): siRNA sense strand
ucagggaccuuuccuauuc

SEQ ID NO: 730010 - RNA, 19 nt, Homo sapiens
  misc_RNA (1)...(19): siRNA sense strand
gggcagcugugaacauuga

SEQ ID NO: 730011 - RNA, 19 nt, Homo sapiens
  misc_RNA (1)...(19): siRNA sense strand
gagggcagcugugaacauu

SEQ ID NO: 730012 - RNA, 19 nt, Homo sapiens
  misc_RNA (1)...(19): siRNA sense strand
gggaacaccugaacuacug

SEQ ID NO: 730013 - RNA, 19 nt, Homo sapiens
  misc_RNA (1)...(19): siRNA sense strand
ggaaauggucaaggagaua

SEQ ID NO: 730014 - RNA, 19 nt, Homo sapiens
  misc_RNA (1)...(19): siRNA sense strand
agacggaccugcugaaugg

SEQ ID NO: 730015 - RNA, 19 nt, Homo sapiens
  misc_RNA (1)...(19): siRNA sense strand
gaugaaggcagaagggaaa

SEQ ID NO: 730016 - RNA, 19 nt, Homo sapiens
  misc_RNA (1)...(19): siRNA sense strand
gaagguguccugcuacauc

SEQ ID NO: 730017 - RNA, 19 nt, Homo sapiens
  misc_RNA (1)...(19): siRNA sense strand
cagguggucucgcugauga

SEQ ID NO: 730018 - RNA, 19 nt, Homo sapiens
  misc_RNA (1)...(19): siRNA sense strand
guaccuggacuucaucgua

SEQ ID NO: 730019 - RNA, 19 nt, Homo sapiens
  misc_RNA (1)...(19): siRNA sense strand
gcgcugggcuugcugucuu

SEQ ID NO: 730020 - RNA, 19 nt, Homo sapiens
  misc_RNA (1)...(19): siRNA sense strand
gacgugcccuuucagauca

SEQ ID NO: 730021 - RNA, 19 nt, Homo sapiens
  misc_RNA (1)...(19): siRNA sense strand
ggaaguccacgcugaugaa

SEQ ID NO: 730022 - RNA, 19 nt, Homo sapiens
  misc_RNA (1)...(19): siRNA sense strand
gggaaauggucaaggagau

SEQ ID NO: 730023 - RNA, 19 nt, Homo sapiens
  misc_RNA (1)...(19): siRNA sense strand
ucugcaaucuugugccaua

SEQ ID NO: 730024 - RNA, 19 nt, Homo sapiens
  misc_RNA (1)...(19): siRNA sense strand
ccuauuugguccucaggua

SEQ ID NO: 730025 - RNA, 19 nt, Homo sapiens
  misc_RNA (1)...(19): siRNA sense strand
gauacaagacccuccugaa

SEQ ID NO: 730026 - RNA, 19 nt, Homo sapiens
  misc_RNA (1)...(19): siRNA sense strand
ggagaugggagucuuucuu

SEQ ID NO: 730027 - RNA, 19 nt, Homo sapiens
  misc_RNA (1)...(19): siRNA sense strand
gagaugggagucuuucuuc

SEQ ID NO: 730028 - RNA, 19 nt, Homo sapiens
  misc_RNA (1)...(19): siRNA sense strand
auacaagacccuccugaaa

SEQ ID NO: 730029 - RNA, 19 nt, Homo sapiens
  misc_RNA (1)...(19): siRNA sense strand
gaagaucugcacugugaca

SEQ ID NO: 730030 - RNA, 19 nt, Homo sapiens
  misc_RNA (1)...(19): siRNA sense strand
ggaacgaaaccaagaaggu

SEQ ID NO: 730031 - RNA, 19 nt, Homo sapiens
  misc_RNA (1)...(19): siRNA sense strand
gggaucggccuccucauug

SEQ ID NO: 730032 - RNA, 19 nt, Homo sapiens
  misc_RNA (1)...(19): siRNA sense strand
ggucugaacugcccaaccu

SEQ ID NO: 730033 - RNA, 19 nt, Homo sapiens
  misc_RNA (1)...(19): siRNA sense strand
acaagacccuccugaaagg

SEQ ID NO: 730034 - RNA, 19 nt, Homo sapiens
  misc_RNA (1)...(19): siRNA sense strand
ucauuggccugcuguacuu

SEQ ID NO: 730035 - RNA, 19 nt, Homo sapiens
  misc_RNA (1)...(19): siRNA sense strand
gaggugaacccuuuucuuu

SEQ ID NO: 730036 - RNA, 19 nt, Homo sapiens
  misc_RNA (1)...(19): siRNA sense strand
ggacccugguggaggaaga

SEQ ID NO: 730037 - RNA, 19 nt, Homo sapiens
  misc_RNA (1)...(19): siRNA sense strand
cgcaucaccucgcacauug

SEQ ID NO: 730038 - RNA, 19 nt, Homo sapiens
  misc_RNA (1)...(19): siRNA sense strand
ugacucagaccacaagaga

SEQ ID NO: 730039 - RNA, 19 nt, Homo sapiens
  misc_RNA (1)...(19): siRNA sense strand
ccaugaaugccagcaguua

SEQ ID NO: 730040 - RNA, 19 nt, Homo sapiens
  misc_RNA (1)...(19): siRNA sense strand
gcgcaucaccucgcacauu

SEQ ID NO: 730041 - RNA, 19 nt, Homo sapiens
  misc_RNA (1)...(19): siRNA sense strand
gaggugguguccagcaaca

SEQ ID NO: 730042 - RNA, 19 nt, Homo sapiens
  misc_RNA (1)...(19): siRNA sense strand
gugaacaacccuccaguca

SEQ ID NO: 730043 - RNA, 19 nt, Homo sapiens
  misc_RNA (1)...(19): siRNA sense strand
caacuccggcuuccucuuc

SEQ ID NO: 730044 - RNA, 19 nt, Homo sapiens
  misc_RNA (1)...(19): siRNA sense strand
gguggaggaagaaaggaua

SEQ ID NO: 730045 - RNA, 19 nt, Homo sapiens
  misc_RNA (1)...(19): siRNA sense strand
gcagacgugcccuuucaga

SEQ ID NO: 730046 - RNA, 19 nt, Homo sapiens
  misc_RNA (1)...(19): siRNA sense strand
gagacggaccugcugaaug

SEQ ID NO: 730047 - RNA, 19 nt, Homo sapiens
  misc_RNA (1)...(19): siRNA sense strand
cgaguacggugaucagaac

SEQ ID NO: 730048 - RNA, 19 nt, Homo sapiens
  misc_RNA (1)...(19): siRNA sense strand
gaugaaagggcucgcucaa

SEQ ID NO: 730049 - RNA, 19 nt, Homo sapiens
  misc_RNA (1)...(19): siRNA sense strand
caucuccuaugucagguau

SEQ ID NO: 730050 - RNA, 19 nt, Homo sapiens
  misc_RNA (1)...(19): siRNA sense strand
ggucauccucuccaucuau

SEQ ID NO: 730051 - RNA, 19 nt, Homo sapiens
  misc_RNA (1)...(19): siRNA sense strand
ugccauauuugagggauuu

SEQ ID NO: 730052 - RNA, 19 nt, Homo sapiens
  misc_RNA (1)...(19): siRNA sense strand
ggaucggccuccucauugg

SEQ ID NO: 730053 - RNA, 19 nt, Homo sapiens
  misc_RNA (1)...(19): siRNA sense strand
gggaaguccacgcugauga

SEQ ID NO: 730054 - RNA, 19 nt, Homo sapiens
  misc_RNA (1)...(19): siRNA sense strand
gcgaguacggugaucagaa

SEQ ID NO: 730055 - RNA, 19 nt, Homo sapiens
  misc_RNA (1)...(19): siRNA sense strand
cgcuggagcuggugaacaa

SEQ ID NO: 730056 - RNA, 19 nt, Homo sapiens
  misc_RNA (1)...(19): siRNA sense strand
ggaggaagaaaggauacaa

SEQ ID NO: 730057 - RNA, 19 nt, Homo sapiens
  misc_RNA (1)...(19): siRNA sense strand
guacggugaucagaacagu

SEQ ID NO: 730058 - RNA, 19 nt, Homo sapiens
  misc_RNA (1)...(19): siRNA sense strand
gcccagcgccaaacucuuc

SEQ ID NO: 730059 - RNA, 19 nt, Homo sapiens
  misc_RNA (1)...(19): siRNA sense strand
gcugaauggacaucugaaa

SEQ ID NO: 730060 - RNA, 19 nt, Homo sapiens
  misc_RNA (1)...(19): siRNA sense strand
caccugaacuacugguaca

SEQ ID NO: 730061 - RNA, 19 nt, Homo sapiens
  misc_RNA (1)...(19): siRNA sense strand
ggucggcaccgccaugaau

SEQ ID NO: 730062 - RNA, 19 nt, Homo sapiens
  misc_RNA (1)...(19): siRNA sense strand
gaaggcagaagggaaaugg

SEQ ID NO: 730063 - RNA, 19 nt, Homo sapiens
  misc_RNA (1)...(19): siRNA sense strand
gcaacauggaggccacuga

SEQ ID NO: 730064 - RNA, 19 nt, Homo sapiens
  misc_RNA (1)...(19): siRNA sense strand
gaaauggucaaggagauac

SEQ ID NO: 730065 - RNA, 19 nt, Homo sapiens
  misc_RNA (1)...(19): siRNA sense strand
cgacgagacgugccacuuc

SEQ ID NO: 730066 - RNA, 19 nt, Homo sapiens
  misc_RNA (1)...(19): siRNA sense strand
ggaagaaaggauacaagac

SEQ ID NO: 730067 - RNA, 19 nt, Homo sapiens
  misc_RNA (1)...(19): siRNA sense strand
ugccuacuguucugacauu

SEQ ID NO: 730068 - RNA, 19 nt, Homo sapiens
  misc_RNA (1)...(19): siRNA sense strand
ccucaugccuacuguucug

SEQ ID NO: 730069 - RNA, 19 nt, Homo sapiens
  misc_RNA (1)...(19): siRNA sense strand
aaucuugugccauauuuga

SEQ ID NO: 730070 - RNA, 19 nt, Homo sapiens
  misc_RNA (1)...(19): siRNA sense strand
uccggaagguguccugcua

SEQ ID NO: 730071 - RNA, 19 nt, Homo sapiens
  misc_RNA (1)...(19): siRNA sense strand
uacaagacccuccugaaag

SEQ ID NO: 730072 - RNA, 19 nt, Homo sapiens
  misc_RNA (1)...(19): siRNA sense strand
gaacagucggcuggugaga

SEQ ID NO: 730073 - RNA, 19 nt, Homo sapiens
  misc_RNA (1)...(19): siRNA sense strand
ccacaacccagcagauuuu

SEQ ID NO: 730074 - RNA, 19 nt, Homo sapiens
  misc_RNA (1)...(19): siRNA sense strand
gcagaagggaaauggucaa

SEQ ID NO: 730075 - RNA, 19 nt, Homo sapiens
  misc_RNA (1)...(19): siRNA sense strand
ugacagcgcugggcuugcu

SEQ ID NO: 730076 - RNA, 19 nt, Homo sapiens
  misc_RNA (1)...(19): siRNA sense strand
gcagcaucguguacuggau

SEQ ID NO: 730077 - RNA, 19 nt, Homo sapiens
  misc_RNA (1)...(19): siRNA sense strand
acucagaccacaagagaga

SEQ ID NO: 730078 - RNA, 19 nt, Homo sapiens
  misc_RNA (1)...(19): siRNA sense strand
cagcugugaacauugaauu

SEQ ID NO: 730079 - RNA, 19 nt, Homo sapiens
  misc_RNA (1)...(19): siRNA sense strand
ggagggcagcugugaacau

SEQ ID NO: 730080 - RNA, 19 nt, Homo sapiens
  misc_RNA (1)...(19): siRNA sense strand
augccgaggugaacccuuu

SEQ ID NO: 730081 - RNA, 19 nt, Homo sapiens
  misc_RNA (1)...(19): siRNA sense strand
ccaaacucuucgagcuguu

SEQ ID NO: 730082 - RNA, 19 nt, Homo sapiens
  misc_RNA (1)...(19): siRNA sense strand
ccgggaagaucugcacugu

SEQ ID NO: 730083 - RNA, 19 nt, Homo sapiens
  misc_RNA (1)...(19): siRNA sense strand
gucauccucuccaucuaug

SEQ ID NO: 730084 - RNA, 19 nt, Homo sapiens
  misc_RNA (1)...(19): siRNA sense strand
ugucagguauggguucgaa

SEQ ID NO: 730085 - RNA, 19 nt, Homo sapiens
  misc_RNA (1)...(19): siRNA sense strand
gaggaagaaaggauacaag

SEQ ID NO: 730086 - RNA, 19 nt, Homo sapiens
  misc_RNA (1)...(19): siRNA sense strand
ccuacuaccuggccaagac

SEQ ID NO: 730087 - RNA, 19 nt, Homo sapiens
  misc_RNA (1)...(19): siRNA sense strand
cggaagguguccugcuaca

SEQ ID NO: 730088 - RNA, 19 nt, Homo sapiens
  misc_RNA (1)...(19): siRNA sense strand
agacgugcccuuucagauc

SEQ ID NO: 730089 - RNA, 19 nt, Homo sapiens
  misc_RNA (1)...(19): siRNA sense strand
ggaccuuccucagcaucau

SEQ ID NO: 730090 - RNA, 19 nt, Homo sapiens
  misc_RNA (1)...(19): siRNA sense strand
aguccacgcugaugaacau

SEQ ID NO: 730091 - RNA, 19 nt, Homo sapiens
  misc_RNA (1)...(19): siRNA sense strand
agacgugccacuuccagaa

SEQ ID NO: 730092 - RNA, 19 nt, Homo sapiens
  misc_RNA (1)...(19): siRNA sense strand
gggucauccucuccaucua

SEQ ID NO: 730093 - RNA, 19 nt, Homo sapiens
  misc_RNA (1)...(19): siRNA sense strand
ggugaacccuuuucuuugg

SEQ ID NO: 730094 - RNA, 19 nt, Homo sapiens
  misc_RNA (1)...(19): siRNA sense strand
ucaaggacaauguguguac

SEQ ID NO: 730095 - RNA, 19 nt, Homo sapiens
  misc_RNA (1)...(19): siRNA sense strand
aagguguccugcuacauca

SEQ ID NO: 730096 - RNA, 19 nt, Homo sapiens
  misc_RNA (1)...(19): siRNA sense strand
uccgggaaguucaauagug

SEQ ID NO: 730097 - RNA, 19 nt, Homo sapiens
  misc_RNA (1)...(19): siRNA sense strand
cccugcagguggccacuuu

SEQ ID NO: 730098 - RNA, 19 nt, Homo sapiens
  misc_RNA (1)...(19): siRNA sense strand
aggaagaaaggauacaaga

SEQ ID NO: 730099 - RNA, 19 nt, Homo sapiens
  misc_RNA (1)...(19): siRNA sense strand
ugagggauuugggucugaa

SEQ ID NO: 730100 - RNA, 19 nt, Homo sapiens
  misc_RNA (1)...(19): siRNA sense strand
ccgccucauugccuauuug

SEQ ID NO: 730101 - RNA, 19 nt, Homo sapiens
  misc_RNA (1)...(19): siRNA sense strand
gcuuagaccgggaagaucu

SEQ ID NO: 730102 - RNA, 19 nt, Homo sapiens
  misc_RNA (1)...(19): siRNA sense strand
cagcagauuuugucaugga

SEQ ID NO: 730103 - RNA, 19 nt, Homo sapiens
  misc_RNA (1)...(19): siRNA sense strand
ggugguguccagcaacaug

SEQ ID NO: 730104 - RNA, 19 nt, Homo sapiens
  misc_RNA (1)...(19): siRNA sense strand
gacaugaucuucuuccauu

SEQ ID NO: 730105 - RNA, 19 nt, Homo sapiens
  misc_RNA (1)...(19): siRNA sense strand
gagaauuacugcaaguuug

SEQ ID NO: 730106 - RNA, 19 nt, Homo sapiens
  misc_RNA (1)...(19): siRNA sense strand
gcaagucaaugccaugauc

SEQ ID NO: 730107 - RNA, 19 nt, Homo sapiens
  misc_RNA (1)...(19): siRNA sense strand
uaaaguggacgccuucuaa

SEQ ID NO: 730108 - RNA, 19 nt, Homo sapiens
  misc_RNA (1)...(19): siRNA sense strand
gcuuguggcugaaaccuuu

SEQ ID NO: 730109 - RNA, 19 nt, Homo sapiens
  misc_RNA (1)...(19): siRNA sense strand
caacaugguggacguauug

SEQ ID NO: 730110 - RNA, 19 nt, Homo sapiens
  misc_RNA (1)...(19): siRNA sense strand
cauccaaccucaucaguuc

SEQ ID NO: 730111 - RNA, 19 nt, Homo sapiens
  misc_RNA (1)...(19): siRNA sense strand
aggaagaccucaucaagug

SEQ ID NO: 730112 - RNA, 19 nt, Homo sapiens
  misc_RNA (1)...(19): siRNA sense strand
ucaaugccaugaucgagaa

SEQ ID NO: 730113 - RNA, 19 nt, Homo sapiens
  misc_RNA (1)...(19): siRNA sense strand
ccacauacuugggcgaguu

SEQ ID NO: 730114 - RNA, 19 nt, Homo sapiens
  misc_RNA (1)...(19): siRNA sense strand
ccaaugagaauuacugcaa

SEQ ID NO: 730115 - RNA, 19 nt, Homo sapiens
  misc_RNA (1)...(19): siRNA sense strand
cgggagaacgggaucaaua

SEQ ID NO: 730116 - RNA, 19 nt, Homo sapiens
  misc_RNA (1)...(19): siRNA sense strand
acccagaguccguguauua

SEQ ID NO: 730117 - RNA, 19 nt, Homo sapiens
  misc_RNA (1)...(19): siRNA sense strand
gagaacgggaucaauagga

SEQ ID NO: 730118 - RNA, 19 nt, Homo sapiens
  misc_RNA (1)...(19): siRNA sense strand
ugagaauuacugcaaguuu

SEQ ID NO: 730119 - RNA, 19 nt, Homo sapiens
  misc_RNA (1)...(19): siRNA sense strand
guggacgccuucuaagaug

SEQ ID NO: 730120 - RNA, 19 nt, Homo sapiens
  misc_RNA (1)...(19): siRNA sense strand
guaaaguggacgccuucua

SEQ ID NO: 730121 - RNA, 19 nt, Homo sapiens
  misc_RNA (1)...(19): siRNA sense strand
cagaguccguguauuacug

SEQ ID NO: 730122 - RNA, 19 nt, Homo sapiens
  misc_RNA (1)...(19): siRNA sense strand
gaagcuggaaccacuguca

SEQ ID NO: 730123 - RNA, 19 nt, Homo sapiens
  misc_RNA (1)...(19): siRNA sense strand
gcacaacaugguggacgua

SEQ ID NO: 730124 - RNA, 19 nt, Homo sapiens
  misc_RNA (1)...(19): siRNA sense strand
gggagaacgggaucaauag

SEQ ID NO: 730125 - RNA, 19 nt, Homo sapiens
  misc_RNA (1)...(19): siRNA sense strand
caacccagaguccguguau

SEQ ID NO: 730126 - RNA, 19 nt, Homo sapiens
  misc_RNA (1)...(19): siRNA sense strand
caaccgcggugugaauuac

SEQ ID NO: 730127 - RNA, 19 nt, Homo sapiens
  misc_RNA (1)...(19): siRNA sense strand
agaacgggaucaauaggau

SEQ ID NO: 730128 - RNA, 19 nt, Homo sapiens
  misc_RNA (1)...(19): siRNA sense strand
agaauuacugcaaguuuga

SEQ ID NO: 730129 - RNA, 19 nt, Homo sapiens
  misc_RNA (1)...(19): siRNA sense strand
acaacaugguggacguauu

SEQ ID NO: 730130 - RNA, 19 nt, Homo sapiens
  misc_RNA (1)...(19): siRNA sense strand
ucaaccgcggugugaauua

SEQ ID NO: 730131 - RNA, 19 nt, Homo sapiens
  misc_RNA (1)...(19): siRNA sense strand
uaaagcacagcucgacguu

SEQ ID NO: 730132 - RNA, 19 nt, Homo sapiens
  misc_RNA (1)...(19): siRNA sense strand
ugaaaccuuugcccagaag

SEQ ID NO: 730133 - RNA, 19 nt, Homo sapiens
  misc_RNA (1)...(19): siRNA sense strand
cugaaaccuuugcccagaa

SEQ ID NO: 730134 - RNA, 19 nt, Homo sapiens
  misc_RNA (1)...(19): siRNA sense strand
guguuuagucccgcacuua

SEQ ID NO: 730135 - RNA, 19 nt, Homo sapiens
  misc_RNA (1)...(19): siRNA sense strand
gagaucaacaacccagagu

SEQ ID NO: 730136 - RNA, 19 nt, Homo sapiens
  misc_RNA (1)...(19): siRNA sense strand
ugagaagaacgaggacuga

SEQ ID NO: 730137 - RNA, 19 nt, Homo sapiens
  misc_RNA (1)...(19): siRNA sense strand
ugagaccauucgcuaccuu

SEQ ID NO: 730138 - RNA, 19 nt, Homo sapiens
  misc_RNA (1)...(19): siRNA sense strand
aaugagaauuacugcaagu

SEQ ID NO: 730139 - RNA, 19 nt, Homo sapiens
  misc_RNA (1)...(19): siRNA sense strand
ggagaacgggaucaauagg

SEQ ID NO: 730140 - RNA, 19 nt, Homo sapiens
  misc_RNA (1)...(19): siRNA sense strand
ggacgccuucuaagaugau

SEQ ID NO: 730141 - RNA, 19 nt, Homo sapiens
  misc_RNA (1)...(19): siRNA sense strand
cgacaugaucuucuuccau

SEQ ID NO: 730142 - RNA, 19 nt, Homo sapiens
  misc_RNA (1)...(19): siRNA sense strand
cagcaagucaaugccauga

SEQ ID NO: 730143 - RNA, 19 nt, Homo sapiens
  misc_RNA (1)...(19): siRNA sense strand
ucaauaggaucggaaaccu

SEQ ID NO: 730144 - RNA, 19 nt, Homo sapiens
  misc_RNA (1)...(19): siRNA sense strand
gcuggugcccaaugagaau

SEQ ID NO: 730145 - RNA, 19 nt, Homo sapiens
  misc_RNA (1)...(19): siRNA sense strand
cuucuuccauuccuacaag

SEQ ID NO: 730146 - RNA, 19 nt, Homo sapiens
  misc_RNA (1)...(19): siRNA sense strand
uggacgccuucuaagauga

SEQ ID NO: 730147 - RNA, 19 nt, Homo sapiens
  misc_RNA (1)...(19): siRNA sense strand
gacaugaucuucuuccauu

SEQ ID NO: 730148 - RNA, 19 nt, Homo sapiens
  misc_RNA (1)...(19): siRNA sense strand
gagaauuacugcaaguuug

SEQ ID NO: 730149 - RNA, 19 nt, Homo sapiens
  misc_RNA (1)...(19): siRNA sense strand
gcaagucaaugccaugauc

SEQ ID NO: 730150 - RNA, 19 nt, Homo sapiens
  misc_RNA (1)...(19): siRNA sense strand
uaaaguggacgccuucuaa

SEQ ID NO: 730151 - RNA, 19 nt, Homo sapiens
  misc_RNA (1)...(19): siRNA sense strand
gcuuguggcugaaaccuuu

SEQ ID NO: 730152 - RNA, 19 nt, Homo sapiens
  misc_RNA (1)...(19): siRNA sense strand
caacaugguggacguauug

SEQ ID NO: 730153 - RNA, 19 nt, Homo sapiens
  misc_RNA (1)...(19): siRNA sense strand
cauccaaccucaucaguuc

SEQ ID NO: 730154 - RNA, 19 nt, Homo sapiens
  misc_RNA (1)...(19): siRNA sense strand
aggaagaccucaucaagug

SEQ ID NO: 730155 - RNA, 19 nt, Homo sapiens
  misc_RNA (1)...(19): siRNA sense strand
ucaaugccaugaucgagaa

SEQ ID NO: 730156 - RNA, 19 nt, Homo sapiens
  misc_RNA (1)...(19): siRNA sense strand
ccacauacuugggcgaguu

SEQ ID NO: 730157 - RNA, 19 nt, Homo sapiens
  misc_RNA (1)...(19): siRNA sense strand
ccaaugagaauuacugcaa

SEQ ID NO: 730158 - RNA, 19 nt, Homo sapiens
  misc_RNA (1)...(19): siRNA sense strand
cgggagaacgggaucaaua

SEQ ID NO: 730159 - RNA, 19 nt, Homo sapiens
  misc_RNA (1)...(19): siRNA sense strand
acccagaguccguguauua

SEQ ID NO: 730160 - RNA, 19 nt, Homo sapiens
  misc_RNA (1)...(19): siRNA sense strand
gagaacgggaucaauagga

SEQ ID NO: 730161 - RNA, 19 nt, Homo sapiens
  misc_RNA (1)...(19): siRNA sense strand
ugagaauuacugcaaguuu

SEQ ID NO: 730162 - RNA, 19 nt, Homo sapiens
  misc_RNA (1)...(19): siRNA sense strand
guggacgccuucuaagaug

SEQ ID NO: 730163 - RNA, 19 nt, Homo sapiens
  misc_RNA (1)...(19): siRNA sense strand
guaaaguggacgccuucua

SEQ ID NO: 730164 - RNA, 19 nt, Homo sapiens
  misc_RNA (1)...(19): siRNA sense strand
cagaguccguguauuacug

SEQ ID NO: 730165 - RNA, 19 nt, Homo sapiens
  misc_RNA (1)...(19): siRNA sense strand
gaagcuggaaccacuguca

SEQ ID NO: 730166 - RNA, 19 nt, Homo sapiens
  misc_RNA (1)...(19): siRNA sense strand
gcacaacaugguggacgua

SEQ ID NO: 730167 - RNA, 19 nt, Homo sapiens
  misc_RNA (1)...(19): siRNA sense strand
gggagaacgggaucaauag

SEQ ID NO: 730168 - RNA, 19 nt, Homo sapiens
  misc_RNA (1)...(19): siRNA sense strand
caacccagaguccguguau

SEQ ID NO: 730169 - RNA, 19 nt, Homo sapiens
  misc_RNA (1)...(19): siRNA sense strand
caaccgcggugugaauuac

SEQ ID NO: 730170 - RNA, 19 nt, Homo sapiens
  misc_RNA (1)...(19): siRNA sense strand
agaacgggaucaauaggau

SEQ ID NO: 730171 - RNA, 19 nt, Homo sapiens
  misc_RNA (1)...(19): siRNA sense strand
agaauuacugcaaguuuga

SEQ ID NO: 730172 - RNA, 19 nt, Homo sapiens
  misc_RNA (1)...(19): siRNA sense strand
acaacaugguggacguauu

SEQ ID NO: 730173 - RNA, 19 nt, Homo sapiens
  misc_RNA (1)...(19): siRNA sense strand
ucaaccgcggugugaauua

SEQ ID NO: 730174 - RNA, 19 nt, Homo sapiens
  misc_RNA (1)...(19): siRNA sense strand
uaaagcacagcucgacguu

SEQ ID NO: 730175 - RNA, 19 nt, Homo sapiens
  misc_RNA (1)...(19): siRNA sense strand
ugaaaccuuugcccagaag

SEQ ID NO: 730176 - RNA, 19 nt, Homo sapiens
  misc_RNA (1)...(19): siRNA sense strand
cugaaaccuuugcccagaa

SEQ ID NO: 730177 - RNA, 19 nt, Homo sapiens
  misc_RNA (1)...(19): siRNA sense strand
guguuuagucccgcacuua

SEQ ID NO: 730178 - RNA, 19 nt, Homo sapiens
  misc_RNA (1)...(19): siRNA sense strand
gagaucaacaacccagagu

SEQ ID NO: 730179 - RNA, 19 nt, Homo sapiens
  misc_RNA (1)...(19): siRNA sense strand
ugagaagaacgaggacuga

SEQ ID NO: 730180 - RNA, 19 nt, Homo sapiens
  misc_RNA (1)...(19): siRNA sense strand
ugagaccauucgcuaccuu

SEQ ID NO: 730181 - RNA, 19 nt, Homo sapiens
  misc_RNA (1)...(19): siRNA sense strand
aaugagaauuacugcaagu

SEQ ID NO: 730182 - RNA, 19 nt, Homo sapiens
  misc_RNA (1)...(19): siRNA sense strand
ggagaacgggaucaauagg

SEQ ID NO: 730183 - RNA, 19 nt, Homo sapiens
  misc_RNA (1)...(19): siRNA sense strand
ggacgccuucuaagaugau

SEQ ID NO: 730184 - RNA, 19 nt, Homo sapiens
  misc_RNA (1)...(19): siRNA sense strand
cgacaugaucuucuuccau

SEQ ID NO: 730185 - RNA, 19 nt, Homo sapiens
  misc_RNA (1)...(19): siRNA sense strand
cagcaagucaaugccauga

SEQ ID NO: 730186 - RNA, 19 nt, Homo sapiens
  misc_RNA (1)...(19): siRNA sense strand
ucaauaggaucggaaaccu

SEQ ID NO: 730187 - RNA, 19 nt, Homo sapiens
  misc_RNA (1)...(19): siRNA sense strand
gcuggugcccaaugagaau

SEQ ID NO: 730188 - RNA, 19 nt, Homo sapiens
  misc_RNA (1)...(19): siRNA sense strand
cuucuuccauuccuacaag

SEQ ID NO: 730189 - RNA, 19 nt, Homo sapiens
  misc_RNA (1)...(19): siRNA sense strand
uggacgccuucuaagauga

SEQ ID NO: 730190 - RNA, 19 nt, Homo sapiens
  misc_RNA (1)...(19): siRNA sense strand
gacaugaucuucuuccauu

SEQ ID NO: 730191 - RNA, 19 nt, Homo sapiens
  misc_RNA (1)...(19): siRNA sense strand
gagaauuacugcaaguuug

SEQ ID NO: 730192 - RNA, 19 nt, Homo sapiens
  misc_RNA (1)...(19): siRNA sense strand
gcaagucaaugccaugauc

SEQ ID NO: 730193 - RNA, 19 nt, Homo sapiens
  misc_RNA (1)...(19): siRNA sense strand
uaaaguggacgccuucuaa

SEQ ID NO: 730194 - RNA, 19 nt, Homo sapiens
  misc_RNA (1)...(19): siRNA sense strand
gcuuguggcugaaaccuuu

SEQ ID NO: 730195 - RNA, 19 nt, Homo sapiens
  misc_RNA (1)...(19): siRNA sense strand
caacaugguggacguauug

SEQ ID NO: 730196 - RNA, 19 nt, Homo sapiens
  misc_RNA (1)...(19): siRNA sense strand
cauccaaccucaucaguuc

SEQ ID NO: 730197 - RNA, 19 nt, Homo sapiens
  misc_RNA (1)...(19): siRNA sense strand
aggaagaccucaucaagug

SEQ ID NO: 730198 - RNA, 19 nt, Homo sapiens
  misc_RNA (1)...(19): siRNA sense strand
ucaaugccaugaucgagaa

SEQ ID NO: 730199 - RNA, 19 nt, Homo sapiens
  misc_RNA (1)...(19): siRNA sense strand
ccacauacuugggcgaguu

SEQ ID NO: 730200 - RNA, 19 nt, Homo sapiens
  misc_RNA (1)...(19): siRNA sense strand
ccaaugagaauuacugcaa

SEQ ID NO: 730201 - RNA, 19 nt, Homo sapiens
  misc_RNA (1)...(19): siRNA sense strand
cgggagaacgggaucaaua

SEQ ID NO: 730202 - RNA, 19 nt, Homo sapiens
  misc_RNA (1)...(19): siRNA sense strand
acccagaguccguguauua

SEQ ID NO: 730203 - RNA, 19 nt, Homo sapiens
  misc_RNA (1)...(19): siRNA sense strand
gagaacgggaucaauagga

SEQ ID NO: 730204 - RNA, 19 nt, Homo sapiens
  misc_RNA (1)...(19): siRNA sense strand
ugagaauuacugcaaguuu

SEQ ID NO: 730205 - RNA, 19 nt, Homo sapiens
  misc_RNA (1)...(19): siRNA sense strand
guggacgccuucuaagaug

SEQ ID NO: 730206 - RNA, 19 nt, Homo sapiens
  misc_RNA (1)...(19): siRNA sense strand
guaaaguggacgccuucua

SEQ ID NO: 730207 - RNA, 19 nt, Homo sapiens
  misc_RNA (1)...(19): siRNA sense strand
cagaguccguguauuacug

SEQ ID NO: 730208 - RNA, 19 nt, Homo sapiens
  misc_RNA (1)...(19): siRNA sense strand
gaagcuggaaccacuguca

SEQ ID NO: 730209 - RNA, 19 nt, Homo sapiens
  misc_RNA (1)...(19): siRNA sense strand
gcacaacaugguggacgua

SEQ ID NO: 730210 - RNA, 19 nt, Homo sapiens
  misc_RNA (1)...(19): siRNA sense strand
gggagaacgggaucaauag

SEQ ID NO: 730211 - RNA, 19 nt, Homo sapiens
  misc_RNA (1)...(19): siRNA sense strand
caacccagaguccguguau

SEQ ID NO: 730212 - RNA, 19 nt, Homo sapiens
  misc_RNA (1)...(19): siRNA sense strand
caaccgcggugugaauuac

SEQ ID NO: 730213 - RNA, 19 nt, Homo sapiens
  misc_RNA (1)...(19): siRNA sense strand
agaacgggaucaauaggau

SEQ ID NO: 730214 - RNA, 19 nt, Homo sapiens
  misc_RNA (1)...(19): siRNA sense strand
agaauuacugcaaguuuga

SEQ ID NO: 730215 - RNA, 19 nt, Homo sapiens
  misc_RNA (1)...(19): siRNA sense strand
acaacaugguggacguauu

SEQ ID NO: 730216 - RNA, 19 nt, Homo sapiens
  misc_RNA (1)...(19): siRNA sense strand
ucaaccgcggugugaauua

SEQ ID NO: 730217 - RNA, 19 nt, Homo sapiens
  misc_RNA (1)...(19): siRNA sense strand
uaaagcacagcucgacguu

SEQ ID NO: 730218 - RNA, 19 nt, Homo sapiens
  misc_RNA (1)...(19): siRNA sense strand
ugaaaccuuugcccagaag

SEQ ID NO: 730219 - RNA, 19 nt, Homo sapiens
  misc_RNA (1)...(19): siRNA sense strand
cugaaaccuuugcccagaa

SEQ ID NO: 730220 - RNA, 19 nt, Homo sapiens
  misc_RNA (1)...(19): siRNA sense strand
guguuuagucccgcacuua

SEQ ID NO: 730221 - RNA, 19 nt, Homo sapiens
  misc_RNA (1)...(19): siRNA sense strand
gagaucaacaacccagagu

SEQ ID NO: 730222 - RNA, 19 nt, Homo sapiens
  misc_RNA (1)...(19): siRNA sense strand
ugagaagaacgaggacuga

SEQ ID NO: 730223 - RNA, 19 nt, Homo sapiens
  misc_RNA (1)...(19): siRNA sense strand
ugagaccauucgcuaccuu

SEQ ID NO: 730224 - RNA, 19 nt, Homo sapiens
  misc_RNA (1)...(19): siRNA sense strand
aaugagaauuacugcaagu

SEQ ID NO: 730225 - RNA, 19 nt, Homo sapiens
  misc_RNA (1)...(19): siRNA sense strand
ggagaacgggaucaauagg

SEQ ID NO: 730226 - RNA, 19 nt, Homo sapiens
  misc_RNA (1)...(19): siRNA sense strand
ggacgccuucuaagaugau

SEQ ID NO: 730227 - RNA, 19 nt, Homo sapiens
  misc_RNA (1)...(19): siRNA sense strand
cgacaugaucuucuuccau

SEQ ID NO: 730228 - RNA, 19 nt, Homo sapiens
  misc_RNA (1)...(19): siRNA sense strand
cagcaagucaaugccauga

SEQ ID NO: 730229 - RNA, 19 nt, Homo sapiens
  misc_RNA (1)...(19): siRNA sense strand
ucaauaggaucggaaaccu

SEQ ID NO: 730230 - RNA, 19 nt, Homo sapiens
  misc_RNA (1)...(19): siRNA sense strand
gcuggugcccaaugagaau

SEQ ID NO: 730231 - RNA, 19 nt, Homo sapiens
  misc_RNA (1)...(19): siRNA sense strand
cuucuuccauuccuacaag

SEQ ID NO: 730232 - RNA, 19 nt, Homo sapiens
  misc_RNA (1)...(19): siRNA sense strand
uggacgccuucuaagauga

SEQ ID NO: 730233 - RNA, 19 nt, Homo sapiens
  misc_RNA (1)...(19): siRNA sense strand
gcaaaguccugugaagaua

SEQ ID NO: 730234 - RNA, 19 nt, Homo sapiens
  misc_RNA (1)...(19): siRNA sense strand
ggacgugaaugacaacaca

SEQ ID NO: 730235 - RNA, 19 nt, Homo sapiens
  misc_RNA (1)...(19): siRNA sense strand
caaugaaugugcacuccua

SEQ ID NO: 730236 - RNA, 19 nt, Homo sapiens
  misc_RNA (1)...(19): siRNA sense strand
guaaagcacuccggaucuu

SEQ ID NO: 730237 - RNA, 19 nt, Homo sapiens
  misc_RNA (1)...(19): siRNA sense strand
aauaaugccuacuguguga

SEQ ID NO: 730238 - RNA, 19 nt, Homo sapiens
  misc_RNA (1)...(19): siRNA sense strand
caauaucucugugggaaug

SEQ ID NO: 730239 - RNA, 19 nt, Homo sapiens
  misc_RNA (1)...(19): siRNA sense strand
guaaagaaacgugugagaa

SEQ ID NO: 730240 - RNA, 19 nt, Homo sapiens
  misc_RNA (1)...(19): siRNA sense strand
ccaggcagcuccacaugug

SEQ ID NO: 730241 - RNA, 19 nt, Homo sapiens
  misc_RNA (1)...(19): siRNA sense strand
gaaugaacaagaagaacaa

SEQ ID NO: 730242 - RNA, 19 nt, Homo sapiens
  misc_RNA (1)...(19): siRNA sense strand
guaaagagcagccagaacu

SEQ ID NO: 730243 - RNA, 19 nt, Homo sapiens
  misc_RNA (1)...(19): siRNA sense strand
ggaaugauggagucaccua

SEQ ID NO: 730244 - RNA, 19 nt, Homo sapiens
  misc_RNA (1)...(19): siRNA sense strand
gaccaauaaugccuacugu

SEQ ID NO: 730245 - RNA, 19 nt, Homo sapiens
  misc_RNA (1)...(19): siRNA sense strand
gaugagcugugcccugaca

SEQ ID NO: 730246 - RNA, 19 nt, Homo sapiens
  misc_RNA (1)...(19): siRNA sense strand
gguguucccucugugauga

SEQ ID NO: 730247 - RNA, 19 nt, Homo sapiens
  misc_RNA (1)...(19): siRNA sense strand
ccaauaaugccuacugugu

SEQ ID NO: 730248 - RNA, 19 nt, Homo sapiens
  misc_RNA (1)...(19): siRNA sense strand
guaccaaggcagauguaaa

SEQ ID NO: 730249 - RNA, 19 nt, Homo sapiens
  misc_RNA (1)...(19): siRNA sense strand
ccuacugugugaccuguaa

SEQ ID NO: 730250 - RNA, 19 nt, Homo sapiens
  misc_RNA (1)...(19): siRNA sense strand
uaaagaaacgugugagaac

SEQ ID NO: 730251 - RNA, 19 nt, Homo sapiens
  misc_RNA (1)...(19): siRNA sense strand
gggaaaaccuaccgcaaug

SEQ ID NO: 730252 - RNA, 19 nt, Homo sapiens
  misc_RNA (1)...(19): siRNA sense strand
aaaccuaccgcaaugaaug

SEQ ID NO: 730253 - RNA, 19 nt, Homo sapiens
  misc_RNA (1)...(19): siRNA sense strand
uuuaugggauuucaagguu

SEQ ID NO: 730254 - RNA, 19 nt, Homo sapiens
  misc_RNA (1)...(19): siRNA sense strand
agaccgaacugagcaagga

SEQ ID NO: 730255 - RNA, 19 nt, Homo sapiens
  misc_RNA (1)...(19): siRNA sense strand
cgaaugaacaagaagaaca

SEQ ID NO: 730256 - RNA, 19 nt, Homo sapiens
  misc_RNA (1)...(19): siRNA sense strand
ccgaggaggacgugaauga

SEQ ID NO: 730257 - RNA, 19 nt, Homo sapiens
  misc_RNA (1)...(19): siRNA sense strand
caaaguccugugaagauau

SEQ ID NO: 730258 - RNA, 19 nt, Homo sapiens
  misc_RNA (1)...(19): siRNA sense strand
ggaccgaggaggacgugaa

SEQ ID NO: 730259 - RNA, 19 nt, Homo sapiens
  misc_RNA (1)...(19): siRNA sense strand
aaagcaaaguccugugaag

SEQ ID NO: 730260 - RNA, 19 nt, Homo sapiens
  misc_RNA (1)...(19): siRNA sense strand
gaaugacaacacacucuuc

SEQ ID NO: 730261 - RNA, 19 nt, Homo sapiens
  misc_RNA (1)...(19): siRNA sense strand
ggacuguggaccugggaaa

SEQ ID NO: 730262 - RNA, 19 nt, Homo sapiens
  misc_RNA (1)...(19): siRNA sense strand
gaggaggacgugaaugaca

SEQ ID NO: 730263 - RNA, 19 nt, Homo sapiens
  misc_RNA (1)...(19): siRNA sense strand
caaagcaaaguccugugaa

SEQ ID NO: 730264 - RNA, 19 nt, Homo sapiens
  misc_RNA (1)...(19): siRNA sense strand
ccuaaaggcaagauguaaa

SEQ ID NO: 730265 - RNA, 19 nt, Homo sapiens
  misc_RNA (1)...(19): siRNA sense strand
ugacaacacacucuucaag

SEQ ID NO: 730266 - RNA, 19 nt, Homo sapiens
  misc_RNA (1)...(19): siRNA sense strand
gaacugcuggcuccgucaa

SEQ ID NO: 730267 - RNA, 19 nt, Homo sapiens
  misc_RNA (1)...(19): siRNA sense strand
gacaacacacucuucaagu

SEQ ID NO: 730268 - RNA, 19 nt, Homo sapiens
  misc_RNA (1)...(19): siRNA sense strand
gaaugugcacuccuaaagg

SEQ ID NO: 730269 - RNA, 19 nt, Homo sapiens
  misc_RNA (1)...(19): siRNA sense strand
gaaaaccuaccgcaaugaa

SEQ ID NO: 730270 - RNA, 19 nt, Homo sapiens
  misc_RNA (1)...(19): siRNA sense strand
aaaguccugugaagauauc

SEQ ID NO: 730271 - RNA, 19 nt, Homo sapiens
  misc_RNA (1)...(19): siRNA sense strand
ucaaguggaugauuuucaa

SEQ ID NO: 730272 - RNA, 19 nt, Homo sapiens
  misc_RNA (1)...(19): siRNA sense strand
cagcgagugugccaugaag

SEQ ID NO: 730273 - RNA, 19 nt, Homo sapiens
  misc_RNA (1)...(19): siRNA sense strand
aggaggacgugaaugacaa

SEQ ID NO: 730274 - RNA, 19 nt, Homo sapiens
  misc_RNA (1)...(19): siRNA sense strand
gcgagugugccaugaagga

SEQ ID NO: 730275 - RNA, 19 nt, Homo sapiens
  misc_RNA (1)...(19): siRNA sense strand
ugaaugugcacuccuaaag

SEQ ID NO: 730276 - RNA, 19 nt, Homo sapiens
  misc_RNA (1)...(19): siRNA sense strand
ccaacugcauccccuguaa

SEQ ID NO: 730277 - RNA, 19 nt, Homo sapiens
  misc_RNA (1)...(19): siRNA sense strand
cuaaaggcaagauguaaag

SEQ ID NO: 730278 - RNA, 19 nt, Homo sapiens
  misc_RNA (1)...(19): siRNA sense strand
gcaauaucucugugggaau

SEQ ID NO: 730279 - RNA, 19 nt, Homo sapiens
  misc_RNA (1)...(19): siRNA sense strand
cugcugcucugccaguuca

SEQ ID NO: 730280 - RNA, 19 nt, Homo sapiens
  misc_RNA (1)...(19): siRNA sense strand
gaccgaggaggacgugaau

SEQ ID NO: 730281 - RNA, 19 nt, Homo sapiens
  misc_RNA (1)...(19): siRNA sense strand
caggugugcuacuggaagu

SEQ ID NO: 730282 - RNA, 19 nt, Homo sapiens
  misc_RNA (1)...(19): siRNA sense strand
ugaaugacaacacacucuu

SEQ ID NO: 730283 - RNA, 19 nt, Homo sapiens
  misc_RNA (1)...(19): siRNA sense strand
uaaagagcagccagaacug

SEQ ID NO: 730284 - RNA, 19 nt, Homo sapiens
  misc_RNA (1)...(19): siRNA sense strand
gccgaaugaacaagaagaa

SEQ ID NO: 730285 - RNA, 19 nt, Homo sapiens
  misc_RNA (1)...(19): siRNA sense strand
uaaagcacuccggaucuug

SEQ ID NO: 730286 - RNA, 19 nt, Homo sapiens
  misc_RNA (1)...(19): siRNA sense strand
aagcaaaguccugugaaga

SEQ ID NO: 730287 - RNA, 19 nt, Homo sapiens
  misc_RNA (1)...(19): siRNA sense strand
uaaaggcaagauguaaaga

SEQ ID NO: 730288 - RNA, 19 nt, Homo sapiens
  misc_RNA (1)...(19): siRNA sense strand
gcaaaguccugugaagaua

SEQ ID NO: 730289 - RNA, 19 nt, Homo sapiens
  misc_RNA (1)...(19): siRNA sense strand
gacuacagcuuuccuauau

SEQ ID NO: 730290 - RNA, 19 nt, Homo sapiens
  misc_RNA (1)...(19): siRNA sense strand
ggacuacagcuuuccuaua

SEQ ID NO: 730291 - RNA, 19 nt, Homo sapiens
  misc_RNA (1)...(19): siRNA sense strand
ggacgugaaugacaacaca

SEQ ID NO: 730292 - RNA, 19 nt, Homo sapiens
  misc_RNA (1)...(19): siRNA sense strand
caaugaaugugcacuccua

SEQ ID NO: 730293 - RNA, 19 nt, Homo sapiens
  misc_RNA (1)...(19): siRNA sense strand
guaaagcacuccggaucuu

SEQ ID NO: 730294 - RNA, 19 nt, Homo sapiens
  misc_RNA (1)...(19): siRNA sense strand
aauaaugccuacuguguga

SEQ ID NO: 730295 - RNA, 19 nt, Homo sapiens
  misc_RNA (1)...(19): siRNA sense strand
caauaucucugugggaaug

SEQ ID NO: 730296 - RNA, 19 nt, Homo sapiens
  misc_RNA (1)...(19): siRNA sense strand
ggaagaggaggaagaugaa

SEQ ID NO: 730297 - RNA, 19 nt, Homo sapiens
  misc_RNA (1)...(19): siRNA sense strand
guaaagaaacgugugagaa

SEQ ID NO: 730298 - RNA, 19 nt, Homo sapiens
  misc_RNA (1)...(19): siRNA sense strand
ccaggcagcuccacaugug

SEQ ID NO: 730299 - RNA, 19 nt, Homo sapiens
  misc_RNA (1)...(19): siRNA sense strand
gaaugaacaagaagaacaa

SEQ ID NO: 730300 - RNA, 19 nt, Homo sapiens
  misc_RNA (1)...(19): siRNA sense strand
guaaagagcagccagaacu

SEQ ID NO: 730301 - RNA, 19 nt, Homo sapiens
  misc_RNA (1)...(19): siRNA sense strand
gaccaggacuacagcuuuc

SEQ ID NO: 730302 - RNA, 19 nt, Homo sapiens
  misc_RNA (1)...(19): siRNA sense strand
ggaaugauggagucaccua

SEQ ID NO: 730303 - RNA, 19 nt, Homo sapiens
  misc_RNA (1)...(19): siRNA sense strand
gaccaauaaugccuacugu

SEQ ID NO: 730304 - RNA, 19 nt, Homo sapiens
  misc_RNA (1)...(19): siRNA sense strand
gaugagcugugcccugaca

SEQ ID NO: 730305 - RNA, 19 nt, Homo sapiens
  misc_RNA (1)...(19): siRNA sense strand
gguguucccucugugauga

SEQ ID NO: 730306 - RNA, 19 nt, Homo sapiens
  misc_RNA (1)...(19): siRNA sense strand
ccaauaaugccuacugugu

SEQ ID NO: 730307 - RNA, 19 nt, Homo sapiens
  misc_RNA (1)...(19): siRNA sense strand
cuacagcuuuccuauaucu

SEQ ID NO: 730308 - RNA, 19 nt, Homo sapiens
  misc_RNA (1)...(19): siRNA sense strand
guaccaaggcagauguaaa

SEQ ID NO: 730309 - RNA, 19 nt, Homo sapiens
  misc_RNA (1)...(19): siRNA sense strand
ccuacugugugaccuguaa

SEQ ID NO: 730310 - RNA, 19 nt, Homo sapiens
  misc_RNA (1)...(19): siRNA sense strand
uaaagaaacgugugagaac

SEQ ID NO: 730311 - RNA, 19 nt, Homo sapiens
  misc_RNA (1)...(19): siRNA sense strand
gggaaaaccuaccgcaaug

SEQ ID NO: 730312 - RNA, 19 nt, Homo sapiens
  misc_RNA (1)...(19): siRNA sense strand
aaaccuaccgcaaugaaug

SEQ ID NO: 730313 - RNA, 19 nt, Homo sapiens
  misc_RNA (1)...(19): siRNA sense strand
agaccgaacugagcaagga

SEQ ID NO: 730314 - RNA, 19 nt, Homo sapiens
  misc_RNA (1)...(19): siRNA sense strand
uuuaugggauuucaagguu

SEQ ID NO: 730315 - RNA, 19 nt, Homo sapiens
  misc_RNA (1)...(19): siRNA sense strand
cgaaugaacaagaagaaca

SEQ ID NO: 730316 - RNA, 19 nt, Homo sapiens
  misc_RNA (1)...(19): siRNA sense strand
ccgaggaggacgugaauga

SEQ ID NO: 730317 - RNA, 19 nt, Homo sapiens
  misc_RNA (1)...(19): siRNA sense strand
ggaccgaggaggacgugaa

SEQ ID NO: 730318 - RNA, 19 nt, Homo sapiens
  misc_RNA (1)...(19): siRNA sense strand
caaaguccugugaagauau

SEQ ID NO: 730319 - RNA, 19 nt, Homo sapiens
  misc_RNA (1)...(19): siRNA sense strand
aaagcaaaguccugugaag

SEQ ID NO: 730320 - RNA, 19 nt, Homo sapiens
  misc_RNA (1)...(19): siRNA sense strand
ggacuguggaccugggaaa

SEQ ID NO: 730321 - RNA, 19 nt, Homo sapiens
  misc_RNA (1)...(19): siRNA sense strand
gaaugacaacacacucuuc

SEQ ID NO: 730322 - RNA, 19 nt, Homo sapiens
  misc_RNA (1)...(19): siRNA sense strand
ccuaaaggcaagauguaaa

SEQ ID NO: 730323 - RNA, 19 nt, Homo sapiens
  misc_RNA (1)...(19): siRNA sense strand
caaagcaaaguccugugaa

SEQ ID NO: 730324 - RNA, 19 nt, Homo sapiens
  misc_RNA (1)...(19): siRNA sense strand
gaggaggacgugaaugaca

SEQ ID NO: 730325 - RNA, 19 nt, Homo sapiens
  misc_RNA (1)...(19): siRNA sense strand
ugacaacacacucuucaag

SEQ ID NO: 730326 - RNA, 19 nt, Homo sapiens
  misc_RNA (1)...(19): siRNA sense strand
ggaagacaccgaggaagag

SEQ ID NO: 730327 - RNA, 19 nt, Homo sapiens
  misc_RNA (1)...(19): siRNA sense strand
gacaacacacucuucaagu

SEQ ID NO: 730328 - RNA, 19 nt, Homo sapiens
  misc_RNA (1)...(19): siRNA sense strand
gaacugcuggcuccgucaa

SEQ ID NO: 730329 - RNA, 19 nt, Homo sapiens
  misc_RNA (1)...(19): siRNA sense strand
gaaugugcacuccuaaagg

SEQ ID NO: 730330 - RNA, 19 nt, Homo sapiens
  misc_RNA (1)...(19): siRNA sense strand
aggaagaggaggaagauga

SEQ ID NO: 730331 - RNA, 19 nt, Homo sapiens
  misc_RNA (1)...(19): siRNA sense strand
cggaagacaccgaggaaga

SEQ ID NO: 730332 - RNA, 19 nt, Homo sapiens
  misc_RNA (1)...(19): siRNA sense strand
gaaaaccuaccgcaaugaa

SEQ ID NO: 730333 - RNA, 19 nt, Homo sapiens
  misc_RNA (1)...(19): siRNA sense strand
aaaguccugugaagauauc

SEQ ID NO: 730334 - RNA, 19 nt, Homo sapiens
  misc_RNA (1)...(19): siRNA sense strand
ucaaguggaugauuuucaa

SEQ ID NO: 730335 - RNA, 19 nt, Homo sapiens
  misc_RNA (1)...(19): siRNA sense strand
agaccaggacuacagcuuu

SEQ ID NO: 730336 - RNA, 19 nt, Homo sapiens
  misc_RNA (1)...(19): siRNA sense strand
cagcgagugugccaugaag

SEQ ID NO: 730337 - RNA, 19 nt, Homo sapiens
  misc_RNA (1)...(19): siRNA sense strand
aggaggacgugaaugacaa

SEQ ID NO: 730338 - RNA, 19 nt, Homo sapiens
  misc_RNA (1)...(19): siRNA sense strand
gcgagugugccaugaagga

SEQ ID NO: 730339 - RNA, 19 nt, Homo sapiens
  misc_RNA (1)...(19): siRNA sense strand
ugaaugugcacuccuaaag

SEQ ID NO: 730340 - RNA, 19 nt, Homo sapiens
  misc_RNA (1)...(19): siRNA sense strand
ccaacugcauccccuguaa

SEQ ID NO: 730341 - RNA, 19 nt, Homo sapiens
  misc_RNA (1)...(19): siRNA sense strand
gcuuuccuauaucuucuau

SEQ ID NO: 730342 - RNA, 19 nt, Homo sapiens
  misc_RNA (1)...(19): siRNA sense strand
cuaaaggcaagauguaaag

SEQ ID NO: 730343 - RNA, 19 nt, Homo sapiens
  misc_RNA (1)...(19): siRNA sense strand
gcaauaucucugugggaau

SEQ ID NO: 730344 - RNA, 19 nt, Homo sapiens
  misc_RNA (1)...(19): siRNA sense strand
cugcugcucugccaguuca

SEQ ID NO: 730345 - RNA, 19 nt, Homo sapiens
  misc_RNA (1)...(19): siRNA sense strand
uaaagagcagccagaacug

SEQ ID NO: 730346 - RNA, 19 nt, Homo sapiens
  misc_RNA (1)...(19): siRNA sense strand
ccuauaucuucuauucuag

SEQ ID NO: 730347 - RNA, 19 nt, Homo sapiens
  misc_RNA (1)...(19): siRNA sense strand
caggugugcuacuggaagu

SEQ ID NO: 730348 - RNA, 19 nt, Homo sapiens
  misc_RNA (1)...(19): siRNA sense strand
ugaaugacaacacacucuu

SEQ ID NO: 730349 - RNA, 19 nt, Homo sapiens
  misc_RNA (1)...(19): siRNA sense strand
gaccgaggaggacgugaau

SEQ ID NO: 730350 - RNA, 19 nt, Homo sapiens
  misc_RNA (1)...(19): siRNA sense strand
uaaaggcaagauguaaaga

SEQ ID NO: 730351 - RNA, 19 nt, Homo sapiens
  misc_RNA (1)...(19): siRNA sense strand
cagcuuuccuauaucuucu

SEQ ID NO: 730352 - RNA, 19 nt, Homo sapiens
  misc_RNA (1)...(19): siRNA sense strand
aagaugaagaccaggacua

SEQ ID NO: 730353 - RNA, 19 nt, Homo sapiens
  misc_RNA (1)...(19): siRNA sense strand
uaaagcacuccggaucuug

SEQ ID NO: 730354 - RNA, 19 nt, Homo sapiens
  misc_RNA (1)...(19): siRNA sense strand
gccgaaugaacaagaagaa

SEQ ID NO: 730355 - RNA, 19 nt, Homo sapiens
  misc_RNA (1)...(19): siRNA sense strand
aagcaaaguccugugaaga

SEQ ID NO: 730356 - RNA, 19 nt, Homo sapiens
  misc_RNA (1)...(19): siRNA sense strand
gaaauuaugugcugguauc

SEQ ID NO: 730357 - RNA, 19 nt, Homo sapiens
  misc_RNA (1)...(19): siRNA sense strand
caagagaucuguuugcaau

SEQ ID NO: 730358 - RNA, 19 nt, Homo sapiens
  misc_RNA (1)...(19): siRNA sense strand
gaugguggcuuuccucaaa

SEQ ID NO: 730359 - RNA, 19 nt, Homo sapiens
  misc_RNA (1)...(19): siRNA sense strand
ggagaaaugugauguuaca

SEQ ID NO: 730360 - RNA, 19 nt, Homo sapiens
  misc_RNA (1)...(19): siRNA sense strand
caccauaacugucguugua

SEQ ID NO: 730361 - RNA, 19 nt, Homo sapiens
  misc_RNA (1)...(19): siRNA sense strand
gcaaugcucuucaucaaag

SEQ ID NO: 730362 - RNA, 19 nt, Homo sapiens
  misc_RNA (1)...(19): siRNA sense strand
ggagacaauucugcaguua

SEQ ID NO: 730363 - RNA, 19 nt, Homo sapiens
  misc_RNA (1)...(19): siRNA sense strand
uaacuacaccuacuacuuu

SEQ ID NO: 730364 - RNA, 19 nt, Homo sapiens
  misc_RNA (1)...(19): siRNA sense strand
ugaaagaccuuaacuuguc

SEQ ID NO: 730365 - RNA, 19 nt, Homo sapiens
  misc_RNA (1)...(19): siRNA sense strand
ugaagaaacuagauagaga

SEQ ID NO: 730366 - RNA, 19 nt, Homo sapiens
  misc_RNA (1)...(19): siRNA sense strand
ccaagaaacaggcaacaua

SEQ ID NO: 730367 - RNA, 19 nt, Homo sapiens
  misc_RNA (1)...(19): siRNA sense strand
gaaaguaaagguugaagau

SEQ ID NO: 730368 - RNA, 19 nt, Homo sapiens
  misc_RNA (1)...(19): siRNA sense strand
cagaugauguugacaguga

SEQ ID NO: 730369 - RNA, 19 nt, Homo sapiens
  misc_RNA (1)...(19): siRNA sense strand
caagaaacaggcaacauaa

SEQ ID NO: 730370 - RNA, 19 nt, Homo sapiens
  misc_RNA (1)...(19): siRNA sense strand
gcaguuacgcucuccauuu

SEQ ID NO: 730371 - RNA, 19 nt, Homo sapiens
  misc_RNA (1)...(19): siRNA sense strand
gagauuauuucaccucaau

SEQ ID NO: 730372 - RNA, 19 nt, Homo sapiens
  misc_RNA (1)...(19): siRNA sense strand
ccacuggacuuaucacaau

SEQ ID NO: 730373 - RNA, 19 nt, Homo sapiens
  misc_RNA (1)...(19): siRNA sense strand
gaaacagagucacacuaga

SEQ ID NO: 730374 - RNA, 19 nt, Homo sapiens
  misc_RNA (1)...(19): siRNA sense strand
gaccaaugcuacacugauu

SEQ ID NO: 730375 - RNA, 19 nt, Homo sapiens
  misc_RNA (1)...(19): siRNA sense strand
gagaagaaauuccagaaaa

SEQ ID NO: 730376 - RNA, 19 nt, Homo sapiens
  misc_RNA (1)...(19): siRNA sense strand
gauguauccucaccaacua

SEQ ID NO: 730377 - RNA, 19 nt, Homo sapiens
  misc_RNA (1)...(19): siRNA sense strand
gcauugaucgugagaaauu

SEQ ID NO: 730378 - RNA, 19 nt, Homo sapiens
  misc_RNA (1)...(19): siRNA sense strand
caacauugccaggagauua

SEQ ID NO: 730379 - RNA, 19 nt, Homo sapiens
  misc_RNA (1)...(19): siRNA sense strand
gaagaaacuagauagagaa

SEQ ID NO: 730380 - RNA, 19 nt, Homo sapiens
  misc_RNA (1)...(19): siRNA sense strand
caucacugcuguaguaaga

SEQ ID NO: 730381 - RNA, 19 nt, Homo sapiens
  misc_RNA (1)...(19): siRNA sense strand
uuucaucacugcuguagua

SEQ ID NO: 730382 - RNA, 19 nt, Homo sapiens
  misc_RNA (1)...(19): siRNA sense strand
uaacugauccugauuaugg

SEQ ID NO: 730383 - RNA, 19 nt, Homo sapiens
  misc_RNA (1)...(19): siRNA sense strand
caacaguuaucaacauauc

SEQ ID NO: 730384 - RNA, 19 nt, Homo sapiens
  misc_RNA (1)...(19): siRNA sense strand
ugacacaguuguucuuuca

SEQ ID NO: 730385 - RNA, 19 nt, Homo sapiens
  misc_RNA (1)...(19): siRNA sense strand
gguugaagaugguggcuuu

SEQ ID NO: 730386 - RNA, 19 nt, Homo sapiens
  misc_RNA (1)...(19): siRNA sense strand
gagaaauuaugugcuggua

SEQ ID NO: 730387 - RNA, 19 nt, Homo sapiens
  misc_RNA (1)...(19): siRNA sense strand
ggugucauccgaccaaaua

SEQ ID NO: 730388 - RNA, 19 nt, Homo sapiens
  misc_RNA (1)...(19): siRNA sense strand
caauggugcugguaaaugu

SEQ ID NO: 730389 - RNA, 19 nt, Homo sapiens
  misc_RNA (1)...(19): siRNA sense strand
ggacuuaucacaaucaaag

SEQ ID NO: 730390 - RNA, 19 nt, Homo sapiens
  misc_RNA (1)...(19): siRNA sense strand
ccacuucucuuucagcaau

SEQ ID NO: 730391 - RNA, 19 nt, Homo sapiens
  misc_RNA (1)...(19): siRNA sense strand
ucauaacugugacggauaa

SEQ ID NO: 730392 - RNA, 19 nt, Homo sapiens
  misc_RNA (1)...(19): siRNA sense strand
ccauaaaugugguugaugu

SEQ ID NO: 730393 - RNA, 19 nt, Homo sapiens
  misc_RNA (1)...(19): siRNA sense strand
gacaagaugccacaacuga

SEQ ID NO: 730394 - RNA, 19 nt, Homo sapiens
  misc_RNA (1)...(19): siRNA sense strand
ggaaacagagucacacuag

SEQ ID NO: 730395 - RNA, 19 nt, Homo sapiens
  misc_RNA (1)...(19): siRNA sense strand
ugacagugauggaaacaga

SEQ ID NO: 730396 - RNA, 19 nt, Homo sapiens
  misc_RNA (1)...(19): siRNA sense strand
caaaguaaccauaaaugug

SEQ ID NO: 730397 - RNA, 19 nt, Homo sapiens
  misc_RNA (1)...(19): siRNA sense strand
ccucaaagauccaguacug

SEQ ID NO: 730398 - RNA, 19 nt, Homo sapiens
  misc_RNA (1)...(19): siRNA sense strand
acaguggucuuucagguaa

SEQ ID NO: 730399 - RNA, 19 nt, Homo sapiens
  misc_RNA (1)...(19): siRNA sense strand
ucagaucccuacagcguuu

SEQ ID NO: 730400 - RNA, 19 nt, Homo sapiens
  misc_RNA (1)...(19): siRNA sense strand
cacuagaccuuccuauuga

SEQ ID NO: 730401 - RNA, 19 nt, Homo sapiens
  misc_RNA (1)...(19): siRNA sense strand
gaaaacaggcagaugauaa

SEQ ID NO: 730402 - RNA, 19 nt, Homo sapiens
  misc_RNA (1)...(19): siRNA sense strand
caagaugccacaacugauu

SEQ ID NO: 730403 - RNA, 19 nt, Homo sapiens
  misc_RNA (1)...(19): siRNA sense strand
caagaacugccucucgaua

SEQ ID NO: 730404 - RNA, 19 nt, Homo sapiens
  misc_RNA (1)...(19): siRNA sense strand
caaugacacuggcaugaau

SEQ ID NO: 730405 - RNA, 19 nt, Homo sapiens
  misc_RNA (1)...(19): siRNA sense strand
gaagucaguauaccagaaa

SEQ ID NO: 730406 - RNA, 19 nt, Homo sapiens
  misc_RNA (1)...(19): siRNA sense strand
gggaagagaaggauaccua

SEQ ID NO: 730407 - RNA, 19 nt, Homo sapiens
  misc_RNA (1)...(19): siRNA sense strand
guugaaagaccuuaacuug

SEQ ID NO: 730408 - RNA, 19 nt, Homo sapiens
  misc_RNA (1)...(19): siRNA sense strand
ccuuaaggcugcucagaaa

SEQ ID NO: 730409 - RNA, 19 nt, Homo sapiens
  misc_RNA (1)...(19): siRNA sense strand
ugccacagaugcugacaua

SEQ ID NO: 730410 - RNA, 19 nt, Homo sapiens
  misc_RNA (1)...(19): siRNA sense strand
uaagauacaucgucaaucc

SEQ ID NO: 730411 - RNA, 19 nt, Homo sapiens
  misc_RNA (1)...(19): siRNA sense strand
ggaaaguacaauuggguaa

SEQ ID NO: 730412 - RNA, 19 nt, Homo sapiens
  misc_RNA (1)...(19): siRNA sense strand
gauucucucuucaguguug

SEQ ID NO: 730413 - RNA, 19 nt, Homo sapiens
  misc_RNA (1)...(19): siRNA sense strand
gaaugacaauagcccaguu

SEQ ID NO: 730414 - RNA, 19 nt, Homo sapiens
  misc_RNA (1)...(19): siRNA sense strand
ggcaagugaugguggauug

SEQ ID NO: 730415 - RNA, 19 nt, Homo sapiens
  misc_RNA (1)...(19): siRNA sense strand
ucucuucaguguuguaauu

SEQ ID NO: 730416 - RNA, 19 nt, Homo sapiens
  misc_RNA (1)...(19): siRNA sense strand
gagacaagaugccacaacu

SEQ ID NO: 730417 - RNA, 19 nt, Homo sapiens
  misc_RNA (1)...(19): siRNA sense strand
acacuagaccuuccuauug

SEQ ID NO: 730418 - RNA, 19 nt, Homo sapiens
  misc_RNA (1)...(19): siRNA sense strand
gaguguuggucaaagcuaa

SEQ ID NO: 730419 - RNA, 19 nt, Homo sapiens
  misc_RNA (1)...(19): siRNA sense strand
ugacaaccacccagucuuu

SEQ ID NO: 730420 - RNA, 19 nt, Homo sapiens
  misc_RNA (1)...(19): siRNA sense strand
guacaagaccggagaugug

SEQ ID NO: 730421 - RNA, 19 nt, Homo sapiens
  misc_RNA (1)...(19): siRNA sense strand
cagccugccuuccaaauuc

SEQ ID NO: 730422 - RNA, 19 nt, Homo sapiens
  misc_RNA (1)...(19): siRNA sense strand
uuacagaccuugguuuaca

SEQ ID NO: 730423 - RNA, 19 nt, Homo sapiens
  misc_RNA (1)...(19): siRNA sense strand
gagguucguuacagcauug

SEQ ID NO: 730424 - RNA, 19 nt, Homo sapiens
  misc_RNA (1)...(19): siRNA sense strand
acaacaaacugucacaagu

SEQ ID NO: 730425 - RNA, 19 nt, Homo sapiens
  misc_RNA (1)...(19): siRNA sense strand
ugacaugcuucacagauca

SEQ ID NO: 730426 - RNA, 19 nt, Homo sapiens
  misc_RNA (1)...(19): siRNA sense strand
aaauugcucucauaacugu

SEQ ID NO: 730427 - RNA, 19 nt, Homo sapiens
  misc_RNA (1)...(19): siRNA sense strand
ggagaugugccacugauuc

SEQ ID NO: 730428 - RNA, 19 nt, Homo sapiens
  misc_RNA (1)...(19): siRNA sense strand
gacucuaucuccaauuguu

SEQ ID NO: 730429 - RNA, 19 nt, Homo sapiens
  misc_RNA (1)...(19): siRNA sense strand
ggaggaaacacaagagauc

SEQ ID NO: 730430 - RNA, 19 nt, Homo sapiens
  misc_RNA (1)...(19): siRNA sense strand
ugaggauggugguagagua

SEQ ID NO: 730431 - RNA, 19 nt, Homo sapiens
  misc_RNA (1)...(19): siRNA sense strand
uaaggccaguauucaguaa

SEQ ID NO: 730432 - RNA, 19 nt, Homo sapiens
  misc_RNA (1)...(19): siRNA sense strand
ucaaagaaccacuggauag

SEQ ID NO: 730433 - RNA, 19 nt, Homo sapiens
  misc_RNA (1)...(19): siRNA sense strand
caacaaacugucacaagug

SEQ ID NO: 730434 - RNA, 19 nt, Homo sapiens
  misc_RNA (1)...(19): siRNA sense strand
cagcaacaguuaucaacau

SEQ ID NO: 730435 - RNA, 19 nt, Homo sapiens
  misc_RNA (1)...(19): siRNA sense strand
ggaguuagauagggaagag

SEQ ID NO: 730436 - RNA, 19 nt, Homo sapiens
  misc_RNA (1)...(19): siRNA sense strand
gugacucuaucuccaauug

SEQ ID NO: 730437 - RNA, 19 nt, Homo sapiens
  misc_RNA (1)...(19): siRNA sense strand
augcuacacugauuaauga

SEQ ID NO: 730438 - RNA, 19 nt, Homo sapiens
  misc_RNA (1)...(19): siRNA sense strand
gguagaguaucacguucuu

SEQ ID NO: 730439 - RNA, 19 nt, Homo sapiens
  misc_RNA (1)...(19): siRNA sense strand
ucaaucuguucgugaauga

SEQ ID NO: 730440 - RNA, 19 nt, Homo sapiens
  misc_RNA (1)...(19): siRNA sense strand
gcugauguauccucaccaa

SEQ ID NO: 730441 - RNA, 19 nt, Homo sapiens
  misc_RNA (1)...(19): siRNA sense strand
ucgcauugaucgugagaaa

SEQ ID NO: 730442 - RNA, 19 nt, Homo sapiens
  misc_RNA (1)...(19): siRNA sense strand
guaacuacaccuacuacuu

SEQ ID NO: 730443 - RNA, 19 nt, Homo sapiens
  misc_RNA (1)...(19): siRNA sense strand
ccaaugcuacacugauuaa

SEQ ID NO: 730444 - RNA, 19 nt, Homo sapiens
  misc_RNA (1)...(19): siRNA sense strand
aaacaggcaacauaacauu

SEQ ID NO: 730445 - RNA, 19 nt, Homo sapiens
  misc_RNA (1)...(19): siRNA sense strand
gaaacaggcaacauaacau

SEQ ID NO: 730446 - RNA, 19 nt, Homo sapiens
  misc_RNA (1)...(19): siRNA sense strand
ggacuaaucacuguaacug

SEQ ID NO: 730447 - RNA, 19 nt, Homo sapiens
  misc_RNA (1)...(19): siRNA sense strand
caaaauugcucucauaacu

SEQ ID NO: 730448 - RNA, 19 nt, Homo sapiens
  misc_RNA (1)...(19): siRNA sense strand
acacaguuguucuuucaga

SEQ ID NO: 730449 - RNA, 19 nt, Homo sapiens
  misc_RNA (1)...(19): siRNA sense strand
ugaagucaguauaccagaa

SEQ ID NO: 730450 - RNA, 19 nt, Homo sapiens
  misc_RNA (1)...(19): siRNA sense strand
caucgucaauccugucaau

SEQ ID NO: 730451 - RNA, 19 nt, Homo sapiens
  misc_RNA (1)...(19): siRNA sense strand
ccaaaguaaccauaaaugu

SEQ ID NO: 730452 - RNA, 19 nt, Homo sapiens
  misc_RNA (1)...(19): siRNA sense strand
ggauggugguagaguauca

SEQ ID NO: 730453 - RNA, 19 nt, Homo sapiens
  misc_RNA (1)...(19): siRNA sense strand
caaugucacagucuuugua

SEQ ID NO: 730454 - RNA, 19 nt, Homo sapiens
  misc_RNA (1)...(19): siRNA sense strand
auacugagauagcugaugu

SEQ ID NO: 730455 - RNA, 19 nt, Homo sapiens
  misc_RNA (1)...(19): siRNA sense strand
aaacuaaggcagaugaugu

SEQ ID NO: 730456 - RNA, 19 nt, Homo sapiens
  misc_RNA (1)...(19): siRNA sense strand
gaaauuaugugcugguauc

SEQ ID NO: 730457 - RNA, 19 nt, Homo sapiens
  misc_RNA (1)...(19): siRNA sense strand
caagagaucuguuugcaau

SEQ ID NO: 730458 - RNA, 19 nt, Homo sapiens
  misc_RNA (1)...(19): siRNA sense strand
gaugguggcuuuccucaaa

SEQ ID NO: 730459 - RNA, 19 nt, Homo sapiens
  misc_RNA (1)...(19): siRNA sense strand
ggagaaaugugauguuaca

SEQ ID NO: 730460 - RNA, 19 nt, Homo sapiens
  misc_RNA (1)...(19): siRNA sense strand
caccauaacugucguugua

SEQ ID NO: 730461 - RNA, 19 nt, Homo sapiens
  misc_RNA (1)...(19): siRNA sense strand
gcaaugcucuucaucaaag

SEQ ID NO: 730462 - RNA, 19 nt, Homo sapiens
  misc_RNA (1)...(19): siRNA sense strand
ggagacaauucugcaguua

SEQ ID NO: 730463 - RNA, 19 nt, Homo sapiens
  misc_RNA (1)...(19): siRNA sense strand
uaacuacaccuacuacuuu

SEQ ID NO: 730464 - RNA, 19 nt, Homo sapiens
  misc_RNA (1)...(19): siRNA sense strand
ugaaagaccuuaacuuguc

SEQ ID NO: 730465 - RNA, 19 nt, Homo sapiens
  misc_RNA (1)...(19): siRNA sense strand
ugaagaaacuagauagaga

SEQ ID NO: 730466 - RNA, 19 nt, Homo sapiens
  misc_RNA (1)...(19): siRNA sense strand
ccaagaaacaggcaacaua

SEQ ID NO: 730467 - RNA, 19 nt, Homo sapiens
  misc_RNA (1)...(19): siRNA sense strand
gaaaguaaagguugaagau

SEQ ID NO: 730468 - RNA, 19 nt, Homo sapiens
  misc_RNA (1)...(19): siRNA sense strand
cagaugauguugacaguga

SEQ ID NO: 730469 - RNA, 19 nt, Homo sapiens
  misc_RNA (1)...(19): siRNA sense strand
caagaaacaggcaacauaa

SEQ ID NO: 730470 - RNA, 19 nt, Homo sapiens
  misc_RNA (1)...(19): siRNA sense strand
gcaguuacgcucuccauuu

SEQ ID NO: 730471 - RNA, 19 nt, Homo sapiens
  misc_RNA (1)...(19): siRNA sense strand
gagauuauuucaccucaau

SEQ ID NO: 730472 - RNA, 19 nt, Homo sapiens
  misc_RNA (1)...(19): siRNA sense strand
ccacuggacuuaucacaau

SEQ ID NO: 730473 - RNA, 19 nt, Homo sapiens
  misc_RNA (1)...(19): siRNA sense strand
gaaacagagucacacuaga

SEQ ID NO: 730474 - RNA, 19 nt, Homo sapiens
  misc_RNA (1)...(19): siRNA sense strand
gaccaaugcuacacugauu

SEQ ID NO: 730475 - RNA, 19 nt, Homo sapiens
  misc_RNA (1)...(19): siRNA sense strand
gagaagaaauuccagaaaa

SEQ ID NO: 730476 - RNA, 19 nt, Homo sapiens
  misc_RNA (1)...(19): siRNA sense strand
gauguauccucaccaacua

SEQ ID NO: 730477 - RNA, 19 nt, Homo sapiens
  misc_RNA (1)...(19): siRNA sense strand
gcauugaucgugagaaauu

SEQ ID NO: 730478 - RNA, 19 nt, Homo sapiens
  misc_RNA (1)...(19): siRNA sense strand
caacauugccaggagauua

SEQ ID NO: 730479 - RNA, 19 nt, Homo sapiens
  misc_RNA (1)...(19): siRNA sense strand
gaagaaacuagauagagaa

SEQ ID NO: 730480 - RNA, 19 nt, Homo sapiens
  misc_RNA (1)...(19): siRNA sense strand
caucacugcuguaguaaga

SEQ ID NO: 730481 - RNA, 19 nt, Homo sapiens
  misc_RNA (1)...(19): siRNA sense strand
uuucaucacugcuguagua

SEQ ID NO: 730482 - RNA, 19 nt, Homo sapiens
  misc_RNA (1)...(19): siRNA sense strand
uaacugauccugauuaugg

SEQ ID NO: 730483 - RNA, 19 nt, Homo sapiens
  misc_RNA (1)...(19): siRNA sense strand
caacaguuaucaacauauc

SEQ ID NO: 730484 - RNA, 19 nt, Homo sapiens
  misc_RNA (1)...(19): siRNA sense strand
ugacacaguuguucuuuca

SEQ ID NO: 730485 - RNA, 19 nt, Homo sapiens
  misc_RNA (1)...(19): siRNA sense strand
gguugaagaugguggcuuu

SEQ ID NO: 730486 - RNA, 19 nt, Homo sapiens
  misc_RNA (1)...(19): siRNA sense strand
gagaaauuaugugcuggua

SEQ ID NO: 730487 - RNA, 19 nt, Homo sapiens
  misc_RNA (1)...(19): siRNA sense strand
ggugucauccgaccaaaua

SEQ ID NO: 730488 - RNA, 19 nt, Homo sapiens
  misc_RNA (1)...(19): siRNA sense strand
caauggugcugguaaaugu

SEQ ID NO: 730489 - RNA, 19 nt, Homo sapiens
  misc_RNA (1)...(19): siRNA sense strand
ggacuuaucacaaucaaag

SEQ ID NO: 730490 - RNA, 19 nt, Homo sapiens
  misc_RNA (1)...(19): siRNA sense strand
ccacuucucuuucagcaau

SEQ ID NO: 730491 - RNA, 19 nt, Homo sapiens
  misc_RNA (1)...(19): siRNA sense strand
ucauaacugugacggauaa

SEQ ID NO: 730492 - RNA, 19 nt, Homo sapiens
  misc_RNA (1)...(19): siRNA sense strand
ccauaaaugugguugaugu

SEQ ID NO: 730493 - RNA, 19 nt, Homo sapiens
  misc_RNA (1)...(19): siRNA sense strand
gacaagaugccacaacuga

SEQ ID NO: 730494 - RNA, 19 nt, Homo sapiens
  misc_RNA (1)...(19): siRNA sense strand
ggaaacagagucacacuag

SEQ ID NO: 730495 - RNA, 19 nt, Homo sapiens
  misc_RNA (1)...(19): siRNA sense strand
ugacagugauggaaacaga

SEQ ID NO: 730496 - RNA, 19 nt, Homo sapiens
  misc_RNA (1)...(19): siRNA sense strand
caaaguaaccauaaaugug

SEQ ID NO: 730497 - RNA, 19 nt, Homo sapiens
  misc_RNA (1)...(19): siRNA sense strand
ccucaaagauccaguacug

SEQ ID NO: 730498 - RNA, 19 nt, Homo sapiens
  misc_RNA (1)...(19): siRNA sense strand
acaguggucuuucagguaa

SEQ ID NO: 730499 - RNA, 19 nt, Homo sapiens
  misc_RNA (1)...(19): siRNA sense strand
ucagaucccuacagcguuu

SEQ ID NO: 730500 - RNA, 19 nt, Homo sapiens
  misc_RNA (1)...(19): siRNA sense strand
cacuagaccuuccuauuga

SEQ ID NO: 730501 - RNA, 19 nt, Homo sapiens
  misc_RNA (1)...(19): siRNA sense strand
gaaaacaggcagaugauaa

SEQ ID NO: 730502 - RNA, 19 nt, Homo sapiens
  misc_RNA (1)...(19): siRNA sense strand
caagaugccacaacugauu

SEQ ID NO: 730503 - RNA, 19 nt, Homo sapiens
  misc_RNA (1)...(19): siRNA sense strand
caagaacugccucucgaua

SEQ ID NO: 730504 - RNA, 19 nt, Homo sapiens
  misc_RNA (1)...(19): siRNA sense strand
caaugacacuggcaugaau

SEQ ID NO: 730505 - RNA, 19 nt, Homo sapiens
  misc_RNA (1)...(19): siRNA sense strand
gaagucaguauaccagaaa

SEQ ID NO: 730506 - RNA, 19 nt, Homo sapiens
  misc_RNA (1)...(19): siRNA sense strand
gggaagagaaggauaccua

SEQ ID NO: 730507 - RNA, 19 nt, Homo sapiens
  misc_RNA (1)...(19): siRNA sense strand
guugaaagaccuuaacuug

SEQ ID NO: 730508 - RNA, 19 nt, Homo sapiens
  misc_RNA (1)...(19): siRNA sense strand
ccuuaaggcugcucagaaa

SEQ ID NO: 730509 - RNA, 19 nt, Homo sapiens
  misc_RNA (1)...(19): siRNA sense strand
ugccacagaugcugacaua

SEQ ID NO: 730510 - RNA, 19 nt, Homo sapiens
  misc_RNA (1)...(19): siRNA sense strand
uaagauacaucgucaaucc

SEQ ID NO: 730511 - RNA, 19 nt, Homo sapiens
  misc_RNA (1)...(19): siRNA sense strand
ggaaaguacaauuggguaa

SEQ ID NO: 730512 - RNA, 19 nt, Homo sapiens
  misc_RNA (1)...(19): siRNA sense strand
gauucucucuucaguguug

SEQ ID NO: 730513 - RNA, 19 nt, Homo sapiens
  misc_RNA (1)...(19): siRNA sense strand
gaaugacaauagcccaguu

SEQ ID NO: 730514 - RNA, 19 nt, Homo sapiens
  misc_RNA (1)...(19): siRNA sense strand
ggcaagugaugguggauug

SEQ ID NO: 730515 - RNA, 19 nt, Homo sapiens
  misc_RNA (1)...(19): siRNA sense strand
ucucuucaguguuguaauu

SEQ ID NO: 730516 - RNA, 19 nt, Homo sapiens
  misc_RNA (1)...(19): siRNA sense strand
gagacaagaugccacaacu

SEQ ID NO: 730517 - RNA, 19 nt, Homo sapiens
  misc_RNA (1)...(19): siRNA sense strand
acacuagaccuuccuauug

SEQ ID NO: 730518 - RNA, 19 nt, Homo sapiens
  misc_RNA (1)...(19): siRNA sense strand
gaguguuggucaaagcuaa

SEQ ID NO: 730519 - RNA, 19 nt, Homo sapiens
  misc_RNA (1)...(19): siRNA sense strand
ugacaaccacccagucuuu

SEQ ID NO: 730520 - RNA, 19 nt, Homo sapiens
  misc_RNA (1)...(19): siRNA sense strand
guacaagaccggagaugug

SEQ ID NO: 730521 - RNA, 19 nt, Homo sapiens
  misc_RNA (1)...(19): siRNA sense strand
cagccugccuuccaaauuc

SEQ ID NO: 730522 - RNA, 19 nt, Homo sapiens
  misc_RNA (1)...(19): siRNA sense strand
uuacagaccuugguuuaca

SEQ ID NO: 730523 - RNA, 19 nt, Homo sapiens
  misc_RNA (1)...(19): siRNA sense strand
gagguucguuacagcauug

SEQ ID NO: 730524 - RNA, 19 nt, Homo sapiens
  misc_RNA (1)...(19): siRNA sense strand
acaacaaacugucacaagu

SEQ ID NO: 730525 - RNA, 19 nt, Homo sapiens
  misc_RNA (1)...(19): siRNA sense strand
ugacaugcuucacagauca

SEQ ID NO: 730526 - RNA, 19 nt, Homo sapiens
  misc_RNA (1)...(19): siRNA sense strand
aaauugcucucauaacugu

SEQ ID NO: 730527 - RNA, 19 nt, Homo sapiens
  misc_RNA (1)...(19): siRNA sense strand
ggagaugugccacugauuc

SEQ ID NO: 730528 - RNA, 19 nt, Homo sapiens
  misc_RNA (1)...(19): siRNA sense strand
gacucuaucuccaauuguu

SEQ ID NO: 730529 - RNA, 19 nt, Homo sapiens
  misc_RNA (1)...(19): siRNA sense strand
ggaggaaacacaagagauc

SEQ ID NO: 730530 - RNA, 19 nt, Homo sapiens
  misc_RNA (1)...(19): siRNA sense strand
ugaggauggugguagagua

SEQ ID NO: 730531 - RNA, 19 nt, Homo sapiens
  misc_RNA (1)...(19): siRNA sense strand
uaaggccaguauucaguaa

SEQ ID NO: 730532 - RNA, 19 nt, Homo sapiens
  misc_RNA (1)...(19): siRNA sense strand
ucaaagaaccacuggauag

SEQ ID NO: 730533 - RNA, 19 nt, Homo sapiens
  misc_RNA (1)...(19): siRNA sense strand
caacaaacugucacaagug

SEQ ID NO: 730534 - RNA, 19 nt, Homo sapiens
  misc_RNA (1)...(19): siRNA sense strand
cagcaacaguuaucaacau

SEQ ID NO: 730535 - RNA, 19 nt, Homo sapiens
  misc_RNA (1)...(19): siRNA sense strand
ggaguuagauagggaagag

SEQ ID NO: 730536 - RNA, 19 nt, Homo sapiens
  misc_RNA (1)...(19): siRNA sense strand
gugacucuaucuccaauug

SEQ ID NO: 730537 - RNA, 19 nt, Homo sapiens
  misc_RNA (1)...(19): siRNA sense strand
augcuacacugauuaauga

SEQ ID NO: 730538 - RNA, 19 nt, Homo sapiens
  misc_RNA (1)...(19): siRNA sense strand
gguagaguaucacguucuu

SEQ ID NO: 730539 - RNA, 19 nt, Homo sapiens
  misc_RNA (1)...(19): siRNA sense strand
ucaaucuguucgugaauga

SEQ ID NO: 730540 - RNA, 19 nt, Homo sapiens
  misc_RNA (1)...(19): siRNA sense strand
gcugauguauccucaccaa

SEQ ID NO: 730541 - RNA, 19 nt, Homo sapiens
  misc_RNA (1)...(19): siRNA sense strand
ucgcauugaucgugagaaa

SEQ ID NO: 730542 - RNA, 19 nt, Homo sapiens
  misc_RNA (1)...(19): siRNA sense strand
guaacuacaccuacuacuu

SEQ ID NO: 730543 - RNA, 19 nt, Homo sapiens
  misc_RNA (1)...(19): siRNA sense strand
ccaaugcuacacugauuaa

SEQ ID NO: 730544 - RNA, 19 nt, Homo sapiens
  misc_RNA (1)...(19): siRNA sense strand
aaacaggcaacauaacauu

SEQ ID NO: 730545 - RNA, 19 nt, Homo sapiens
  misc_RNA (1)...(19): siRNA sense strand
gaaacaggcaacauaacau

SEQ ID NO: 730546 - RNA, 19 nt, Homo sapiens
  misc_RNA (1)...(19): siRNA sense strand
ggacuaaucacuguaacug

SEQ ID NO: 730547 - RNA, 19 nt, Homo sapiens
  misc_RNA (1)...(19): siRNA sense strand
caaaauugcucucauaacu

SEQ ID NO: 730548 - RNA, 19 nt, Homo sapiens
  misc_RNA (1)...(19): siRNA sense strand
acacaguuguucuuucaga

SEQ ID NO: 730549 - RNA, 19 nt, Homo sapiens
  misc_RNA (1)...(19): siRNA sense strand
ugaagucaguauaccagaa

SEQ ID NO: 730550 - RNA, 19 nt, Homo sapiens
  misc_RNA (1)...(19): siRNA sense strand
caucgucaauccugucaau

SEQ ID NO: 730551 - RNA, 19 nt, Homo sapiens
  misc_RNA (1)...(19): siRNA sense strand
ccaaaguaaccauaaaugu

SEQ ID NO: 730552 - RNA, 19 nt, Homo sapiens
  misc_RNA (1)...(19): siRNA sense strand
ggauggugguagaguauca

SEQ ID NO: 730553 - RNA, 19 nt, Homo sapiens
  misc_RNA (1)...(19): siRNA sense strand
caaugucacagucuuugua

SEQ ID NO: 730554 - RNA, 19 nt, Homo sapiens
  misc_RNA (1)...(19): siRNA sense strand
auacugagauagcugaugu

SEQ ID NO: 730555 - RNA, 19 nt, Homo sapiens
  misc_RNA (1)...(19): siRNA sense strand
aaacuaaggcagaugaugu

SEQ ID NO: 730556 - RNA, 19 nt, Homo sapiens
  misc_RNA (1)...(19): siRNA sense strand
gaaauuaugugcugguauc

SEQ ID NO: 730557 - RNA, 19 nt, Homo sapiens
  misc_RNA (1)...(19): siRNA sense strand
caagagaucuguuugcaau

SEQ ID NO: 730558 - RNA, 19 nt, Homo sapiens
  misc_RNA (1)...(19): siRNA sense strand
gaugguggcuuuccucaaa

SEQ ID NO: 730559 - RNA, 19 nt, Homo sapiens
  misc_RNA (1)...(19): siRNA sense strand
ggagaaaugugauguuaca

SEQ ID NO: 730560 - RNA, 19 nt, Homo sapiens
  misc_RNA (1)...(19): siRNA sense strand
caccauaacugucguugua

SEQ ID NO: 730561 - RNA, 19 nt, Homo sapiens
  misc_RNA (1)...(19): siRNA sense strand
gcaaugcucuucaucaaag

SEQ ID NO: 730562 - RNA, 19 nt, Homo sapiens
  misc_RNA (1)...(19): siRNA sense strand
ggagacaauucugcaguua

SEQ ID NO: 730563 - RNA, 19 nt, Homo sapiens
  misc_RNA (1)...(19): siRNA sense strand
uaacuacaccuacuacuuu

SEQ ID NO: 730564 - RNA, 19 nt, Homo sapiens
  misc_RNA (1)...(19): siRNA sense strand
ugaaagaccuuaacuuguc

SEQ ID NO: 730565 - RNA, 19 nt, Homo sapiens
  misc_RNA (1)...(19): siRNA sense strand
ugaagaaacuagauagaga

SEQ ID NO: 730566 - RNA, 19 nt, Homo sapiens
  misc_RNA (1)...(19): siRNA sense strand
ccaagaaacaggcaacaua

SEQ ID NO: 730567 - RNA, 19 nt, Homo sapiens
  misc_RNA (1)...(19): siRNA sense strand
gaaaguaaagguugaagau

SEQ ID NO: 730568 - RNA, 19 nt, Homo sapiens
  misc_RNA (1)...(19): siRNA sense strand
cagaugauguugacaguga

SEQ ID NO: 730569 - RNA, 19 nt, Homo sapiens
  misc_RNA (1)...(19): siRNA sense strand
caagaaacaggcaacauaa

SEQ ID NO: 730570 - RNA, 19 nt, Homo sapiens
  misc_RNA (1)...(19): siRNA sense strand
gcaguuacgcucuccauuu

SEQ ID NO: 730571 - RNA, 19 nt, Homo sapiens
  misc_RNA (1)...(19): siRNA sense strand
gagauuauuucaccucaau

SEQ ID NO: 730572 - RNA, 19 nt, Homo sapiens
  misc_RNA (1)...(19): siRNA sense strand
ccacuggacuuaucacaau

SEQ ID NO: 730573 - RNA, 19 nt, Homo sapiens
  misc_RNA (1)...(19): siRNA sense strand
gaaacagagucacacuaga

SEQ ID NO: 730574 - RNA, 19 nt, Homo sapiens
  misc_RNA (1)...(19): siRNA sense strand
gaccaaugcuacacugauu

SEQ ID NO: 730575 - RNA, 19 nt, Homo sapiens
  misc_RNA (1)...(19): siRNA sense strand
gagaagaaauuccagaaaa

SEQ ID NO: 730576 - RNA, 19 nt, Homo sapiens
  misc_RNA (1)...(19): siRNA sense strand
gauguauccucaccaacua

SEQ ID NO: 730577 - RNA, 19 nt, Homo sapiens
  misc_RNA (1)...(19): siRNA sense strand
gcauugaucgugagaaauu

SEQ ID NO: 730578 - RNA, 19 nt, Homo sapiens
  misc_RNA (1)...(19): siRNA sense strand
caacauugccaggagauua

SEQ ID NO: 730579 - RNA, 19 nt, Homo sapiens
  misc_RNA (1)...(19): siRNA sense strand
gaagaaacuagauagagaa

SEQ ID NO: 730580 - RNA, 19 nt, Homo sapiens
  misc_RNA (1)...(19): siRNA sense strand
caucacugcuguaguaaga

SEQ ID NO: 730581 - RNA, 19 nt, Homo sapiens
  misc_RNA (1)...(19): siRNA sense strand
uuucaucacugcuguagua

SEQ ID NO: 730582 - RNA, 19 nt, Homo sapiens
  misc_RNA (1)...(19): siRNA sense strand
uaacugauccugauuaugg

SEQ ID NO: 730583 - RNA, 19 nt, Homo sapiens
  misc_RNA (1)...(19): siRNA sense strand
caacaguuaucaacauauc

SEQ ID NO: 730584 - RNA, 19 nt, Homo sapiens
  misc_RNA (1)...(19): siRNA sense strand
ugacacaguuguucuuuca

SEQ ID NO: 730585 - RNA, 19 nt, Homo sapiens
  misc_RNA (1)...(19): siRNA sense strand
gguugaagaugguggcuuu

SEQ ID NO: 730586 - RNA, 19 nt, Homo sapiens
  misc_RNA (1)...(19): siRNA sense strand
gagaaauuaugugcuggua

SEQ ID NO: 730587 - RNA, 19 nt, Homo sapiens
  misc_RNA (1)...(19): siRNA sense strand
ggugucauccgaccaaaua

SEQ ID NO: 730588 - RNA, 19 nt, Homo sapiens
  misc_RNA (1)...(19): siRNA sense strand
caauggugcugguaaaugu

SEQ ID NO: 730589 - RNA, 19 nt, Homo sapiens
  misc_RNA (1)...(19): siRNA sense strand
ggacuuaucacaaucaaag

SEQ ID NO: 730590 - RNA, 19 nt, Homo sapiens
  misc_RNA (1)...(19): siRNA sense strand
ccacuucucuuucagcaau

SEQ ID NO: 730591 - RNA, 19 nt, Homo sapiens
  misc_RNA (1)...(19): siRNA sense strand
ucauaacugugacggauaa

SEQ ID NO: 730592 - RNA, 19 nt, Homo sapiens
  misc_RNA (1)...(19): siRNA sense strand
ccauaaaugugguugaugu

SEQ ID NO: 730593 - RNA, 19 nt, Homo sapiens
  misc_RNA (1)...(19): siRNA sense strand
gacaagaugccacaacuga

SEQ ID NO: 730594 - RNA, 19 nt, Homo sapiens
  misc_RNA (1)...(19): siRNA sense strand
ggaaacagagucacacuag

SEQ ID NO: 730595 - RNA, 19 nt, Homo sapiens
  misc_RNA (1)...(19): siRNA sense strand
ugacagugauggaaacaga

SEQ ID NO: 730596 - RNA, 19 nt, Homo sapiens
  misc_RNA (1)...(19): siRNA sense strand
caaaguaaccauaaaugug

SEQ ID NO: 730597 - RNA, 19 nt, Homo sapiens
  misc_RNA (1)...(19): siRNA sense strand
ccucaaagauccaguacug

SEQ ID NO: 730598 - RNA, 19 nt, Homo sapiens
  misc_RNA (1)...(19): siRNA sense strand
acaguggucuuucagguaa

SEQ ID NO: 730599 - RNA, 19 nt, Homo sapiens
  misc_RNA (1)...(19): siRNA sense strand
ucagaucccuacagcguuu

SEQ ID NO: 730600 - RNA, 19 nt, Homo sapiens
  misc_RNA (1)...(19): siRNA sense strand
cacuagaccuuccuauuga

SEQ ID NO: 730601 - RNA, 19 nt, Homo sapiens
  misc_RNA (1)...(19): siRNA sense strand
gaaaacaggcagaugauaa

SEQ ID NO: 730602 - RNA, 19 nt, Homo sapiens
  misc_RNA (1)...(19): siRNA sense strand
caagaugccacaacugauu

SEQ ID NO: 730603 - RNA, 19 nt, Homo sapiens
  misc_RNA (1)...(19): siRNA sense strand
caagaacugccucucgaua

SEQ ID NO: 730604 - RNA, 19 nt, Homo sapiens
  misc_RNA (1)...(19): siRNA sense strand
caaugacacuggcaugaau

SEQ ID NO: 730605 - RNA, 19 nt, Homo sapiens
  misc_RNA (1)...(19): siRNA sense strand
gaagucaguauaccagaaa

SEQ ID NO: 730606 - RNA, 19 nt, Homo sapiens
  misc_RNA (1)...(19): siRNA sense strand
gggaagagaaggauaccua

SEQ ID NO: 730607 - RNA, 19 nt, Homo sapiens
  misc_RNA (1)...(19): siRNA sense strand
guugaaagaccuuaacuug

SEQ ID NO: 730608 - RNA, 19 nt, Homo sapiens
  misc_RNA (1)...(19): siRNA sense strand
ccuuaaggcugcucagaaa

SEQ ID NO: 730609 - RNA, 19 nt, Homo sapiens
  misc_RNA (1)...(19): siRNA sense strand
ugccacagaugcugacaua

SEQ ID NO: 730610 - RNA, 19 nt, Homo sapiens
  misc_RNA (1)...(19): siRNA sense strand
uaagauacaucgucaaucc

SEQ ID NO: 730611 - RNA, 19 nt, Homo sapiens
  misc_RNA (1)...(19): siRNA sense strand
ggaaaguacaauuggguaa

SEQ ID NO: 730612 - RNA, 19 nt, Homo sapiens
  misc_RNA (1)...(19): siRNA sense strand
gauucucucuucaguguug

SEQ ID NO: 730613 - RNA, 19 nt, Homo sapiens
  misc_RNA (1)...(19): siRNA sense strand
gaaugacaauagcccaguu

SEQ ID NO: 730614 - RNA, 19 nt, Homo sapiens
  misc_RNA (1)...(19): siRNA sense strand
ggcaagugaugguggauug

SEQ ID NO: 730615 - RNA, 19 nt, Homo sapiens
  misc_RNA (1)...(19): siRNA sense strand
ucucuucaguguuguaauu

SEQ ID NO: 730616 - RNA, 19 nt, Homo sapiens
  misc_RNA (1)...(19): siRNA sense strand
gagacaagaugccacaacu

SEQ ID NO: 730617 - RNA, 19 nt, Homo sapiens
  misc_RNA (1)...(19): siRNA sense strand
acacuagaccuuccuauug

SEQ ID NO: 730618 - RNA, 19 nt, Homo sapiens
  misc_RNA (1)...(19): siRNA sense strand
gaguguuggucaaagcuaa

SEQ ID NO: 730619 - RNA, 19 nt, Homo sapiens
  misc_RNA (1)...(19): siRNA sense strand
ugacaaccacccagucuuu

SEQ ID NO: 730620 - RNA, 19 nt, Homo sapiens
  misc_RNA (1)...(19): siRNA sense strand
guacaagaccggagaugug

SEQ ID NO: 730621 - RNA, 19 nt, Homo sapiens
  misc_RNA (1)...(19): siRNA sense strand
cagccugccuuccaaauuc

SEQ ID NO: 730622 - RNA, 19 nt, Homo sapiens
  misc_RNA (1)...(19): siRNA sense strand
uuacagaccuugguuuaca

SEQ ID NO: 730623 - RNA, 19 nt, Homo sapiens
  misc_RNA (1)...(19): siRNA sense strand
gagguucguuacagcauug

SEQ ID NO: 730624 - RNA, 19 nt, Homo sapiens
  misc_RNA (1)...(19): siRNA sense strand
acaacaaacugucacaagu

SEQ ID NO: 730625 - RNA, 19 nt, Homo sapiens
  misc_RNA (1)...(19): siRNA sense strand
ugacaugcuucacagauca

SEQ ID NO: 730626 - RNA, 19 nt, Homo sapiens
  misc_RNA (1)...(19): siRNA sense strand
aaauugcucucauaacugu

SEQ ID NO: 730627 - RNA, 19 nt, Homo sapiens
  misc_RNA (1)...(19): siRNA sense strand
ggagaugugccacugauuc

SEQ ID NO: 730628 - RNA, 19 nt, Homo sapiens
  misc_RNA (1)...(19): siRNA sense strand
gacucuaucuccaauuguu

SEQ ID NO: 730629 - RNA, 19 nt, Homo sapiens
  misc_RNA (1)...(19): siRNA sense strand
ggaggaaacacaagagauc

SEQ ID NO: 730630 - RNA, 19 nt, Homo sapiens
  misc_RNA (1)...(19): siRNA sense strand
ugaggauggugguagagua

SEQ ID NO: 730631 - RNA, 19 nt, Homo sapiens
  misc_RNA (1)...(19): siRNA sense strand
uaaggccaguauucaguaa

SEQ ID NO: 730632 - RNA, 19 nt, Homo sapiens
  misc_RNA (1)...(19): siRNA sense strand
ucaaagaaccacuggauag

SEQ ID NO: 730633 - RNA, 19 nt, Homo sapiens
  misc_RNA (1)...(19): siRNA sense strand
caacaaacugucacaagug

SEQ ID NO: 730634 - RNA, 19 nt, Homo sapiens
  misc_RNA (1)...(19): siRNA sense strand
cagcaacaguuaucaacau

SEQ ID NO: 730635 - RNA, 19 nt, Homo sapiens
  misc_RNA (1)...(19): siRNA sense strand
ggaguuagauagggaagag

SEQ ID NO: 730636 - RNA, 19 nt, Homo sapiens
  misc_RNA (1)...(19): siRNA sense strand
gugacucuaucuccaauug

SEQ ID NO: 730637 - RNA, 19 nt, Homo sapiens
  misc_RNA (1)...(19): siRNA sense strand
augcuacacugauuaauga

SEQ ID NO: 730638 - RNA, 19 nt, Homo sapiens
  misc_RNA (1)...(19): siRNA sense strand
gguagaguaucacguucuu

SEQ ID NO: 730639 - RNA, 19 nt, Homo sapiens
  misc_RNA (1)...(19): siRNA sense strand
ucaaucuguucgugaauga

SEQ ID NO: 730640 - RNA, 19 nt, Homo sapiens
  misc_RNA (1)...(19): siRNA sense strand
gcugauguauccucaccaa

SEQ ID NO: 730641 - RNA, 19 nt, Homo sapiens
  misc_RNA (1)...(19): siRNA sense strand
ucgcauugaucgugagaaa

SEQ ID NO: 730642 - RNA, 19 nt, Homo sapiens
  misc_RNA (1)...(19): siRNA sense strand
guaacuacaccuacuacuu

SEQ ID NO: 730643 - RNA, 19 nt, Homo sapiens
  misc_RNA (1)...(19): siRNA sense strand
ccaaugcuacacugauuaa

SEQ ID NO: 730644 - RNA, 19 nt, Homo sapiens
  misc_RNA (1)...(19): siRNA sense strand
aaacaggcaacauaacauu

SEQ ID NO: 730645 - RNA, 19 nt, Homo sapiens
  misc_RNA (1)...(19): siRNA sense strand
gaaacaggcaacauaacau

SEQ ID NO: 730646 - RNA, 19 nt, Homo sapiens
  misc_RNA (1)...(19): siRNA sense strand
ggacuaaucacuguaacug

SEQ ID NO: 730647 - RNA, 19 nt, Homo sapiens
  misc_RNA (1)...(19): siRNA sense strand
caaaauugcucucauaacu

SEQ ID NO: 730648 - RNA, 19 nt, Homo sapiens
  misc_RNA (1)...(19): siRNA sense strand
acacaguuguucuuucaga

SEQ ID NO: 730649 - RNA, 19 nt, Homo sapiens
  misc_RNA (1)...(19): siRNA sense strand
ugaagucaguauaccagaa

SEQ ID NO: 730650 - RNA, 19 nt, Homo sapiens
  misc_RNA (1)...(19): siRNA sense strand
caucgucaauccugucaau

SEQ ID NO: 730651 - RNA, 19 nt, Homo sapiens
  misc_RNA (1)...(19): siRNA sense strand
ccaaaguaaccauaaaugu

SEQ ID NO: 730652 - RNA, 19 nt, Homo sapiens
  misc_RNA (1)...(19): siRNA sense strand
ggauggugguagaguauca

SEQ ID NO: 730653 - RNA, 19 nt, Homo sapiens
  misc_RNA (1)...(19): siRNA sense strand
caaugucacagucuuugua

SEQ ID NO: 730654 - RNA, 19 nt, Homo sapiens
  misc_RNA (1)...(19): siRNA sense strand
auacugagauagcugaugu

SEQ ID NO: 730655 - RNA, 19 nt, Homo sapiens
  misc_RNA (1)...(19): siRNA sense strand
aaacuaaggcagaugaugu

SEQ ID NO: 730656 - RNA, 19 nt, Homo sapiens
  misc_RNA (1)...(19): siRNA sense strand
gaacggguccgaauacuuc

SEQ ID NO: 730657 - RNA, 19 nt, Homo sapiens
  misc_RNA (1)...(19): siRNA sense strand
gaugagcccugaggacauu

SEQ ID NO: 730658 - RNA, 19 nt, Homo sapiens
  misc_RNA (1)...(19): siRNA sense strand
gaugagcucuacccacaag

SEQ ID NO: 730659 - RNA, 19 nt, Homo sapiens
  misc_RNA (1)...(19): siRNA sense strand
cauuggaccugcugcuauu

SEQ ID NO: 730660 - RNA, 19 nt, Homo sapiens
  misc_RNA (1)...(19): siRNA sense strand
gcauggacuuggccacguu

SEQ ID NO: 730661 - RNA, 19 nt, Homo sapiens
  misc_RNA (1)...(19): siRNA sense strand
uggagacccugaaggcuuu

SEQ ID NO: 730662 - RNA, 19 nt, Homo sapiens
  misc_RNA (1)...(19): siRNA sense strand
ccuaggaccuggaccuguu

SEQ ID NO: 730663 - RNA, 19 nt, Homo sapiens
  misc_RNA (1)...(19): siRNA sense strand
gacccuggcuggagagaca

SEQ ID NO: 730664 - RNA, 19 nt, Homo sapiens
  misc_RNA (1)...(19): siRNA sense strand
ccugaaggcuuugcuugaa

SEQ ID NO: 730665 - RNA, 19 nt, Homo sapiens
  misc_RNA (1)...(19): siRNA sense strand
gcaccugggcuaccucuuc

SEQ ID NO: 730666 - RNA, 19 nt, Homo sapiens
  misc_RNA (1)...(19): siRNA sense strand
ggacuuggccacguucaug

SEQ ID NO: 730667 - RNA, 19 nt, Homo sapiens
  misc_RNA (1)...(19): siRNA sense strand
gacgagagccucaucuucu

SEQ ID NO: 730668 - RNA, 19 nt, Homo sapiens
  misc_RNA (1)...(19): siRNA sense strand
gcagcuggacguccucuau

SEQ ID NO: 730669 - RNA, 19 nt, Homo sapiens
  misc_RNA (1)...(19): siRNA sense strand
acgagagccucaucuucua

SEQ ID NO: 730670 - RNA, 19 nt, Homo sapiens
  misc_RNA (1)...(19): siRNA sense strand
gcuggaagccugcguggau

SEQ ID NO: 730671 - RNA, 19 nt, Homo sapiens
  misc_RNA (1)...(19): siRNA sense strand
uaaagcauaaacuggauga

SEQ ID NO: 730672 - RNA, 19 nt, Homo sapiens
  misc_RNA (1)...(19): siRNA sense strand
uaaacuggaugagcucuac

SEQ ID NO: 730673 - RNA, 19 nt, Homo sapiens
  misc_RNA (1)...(19): siRNA sense strand
caaagggcacgaaaugagu

SEQ ID NO: 730674 - RNA, 19 nt, Homo sapiens
  misc_RNA (1)...(19): siRNA sense strand
gacaaagacacccuagaca

SEQ ID NO: 730675 - RNA, 19 nt, Homo sapiens
  misc_RNA (1)...(19): siRNA sense strand
uggcugaggugcagaaacu

SEQ ID NO: 730676 - RNA, 19 nt, Homo sapiens
  misc_RNA (1)...(19): siRNA sense strand
gcagcuggacguccuaaag

SEQ ID NO: 730677 - RNA, 19 nt, Homo sapiens
  misc_RNA (1)...(19): siRNA sense strand
ugaaggcuuugcuugaagu

SEQ ID NO: 730678 - RNA, 19 nt, Homo sapiens
  misc_RNA (1)...(19): siRNA sense strand
ccuaaagcauaaacuggau

SEQ ID NO: 730679 - RNA, 19 nt, Homo sapiens
  misc_RNA (1)...(19): siRNA sense strand
ggaccuggaccuguucuca

SEQ ID NO: 730680 - RNA, 19 nt, Homo sapiens
  misc_RNA (1)...(19): siRNA sense strand
gaaugucaagcucucaaca

SEQ ID NO: 730681 - RNA, 19 nt, Homo sapiens
  misc_RNA (1)...(19): siRNA sense strand
caacggcuaccugguccua

SEQ ID NO: 730682 - RNA, 19 nt, Homo sapiens
  misc_RNA (1)...(19): siRNA sense strand
gaucgaccgcuuugugaag

SEQ ID NO: 730683 - RNA, 19 nt, Homo sapiens
  misc_RNA (1)...(19): siRNA sense strand
gagcucuacccacaagguu

SEQ ID NO: 730684 - RNA, 19 nt, Homo sapiens
  misc_RNA (1)...(19): siRNA sense strand
uggacguccuaaagcauaa

SEQ ID NO: 730685 - RNA, 19 nt, Homo sapiens
  misc_RNA (1)...(19): siRNA sense strand
ggccugcacccguuucuuc

SEQ ID NO: 730686 - RNA, 19 nt, Homo sapiens
  misc_RNA (1)...(19): siRNA sense strand
gaagaaugucaagcucuca

SEQ ID NO: 730687 - RNA, 19 nt, Homo sapiens
  misc_RNA (1)...(19): siRNA sense strand
acaaagggcacgaaaugag

SEQ ID NO: 730688 - RNA, 19 nt, Homo sapiens
  misc_RNA (1)...(19): siRNA sense strand
cauggucugucuccacgau

SEQ ID NO: 730689 - RNA, 19 nt, Homo sapiens
  misc_RNA (1)...(19): siRNA sense strand
gaaugugagcauggacuug

SEQ ID NO: 730690 - RNA, 19 nt, Homo sapiens
  misc_RNA (1)...(19): siRNA sense strand
ucgugaagauccaguccuu

SEQ ID NO: 730691 - RNA, 19 nt, Homo sapiens
  misc_RNA (1)...(19): siRNA sense strand
acaugaacggguccgaaua

SEQ ID NO: 730692 - RNA, 19 nt, Homo sapiens
  misc_RNA (1)...(19): siRNA sense strand
gcaucacgaaggccaaugu

SEQ ID NO: 730693 - RNA, 19 nt, Homo sapiens
  misc_RNA (1)...(19): siRNA sense strand
agacaaagacacccuagac

SEQ ID NO: 730694 - RNA, 19 nt, Homo sapiens
  misc_RNA (1)...(19): siRNA sense strand
ccauuggaccugcugcuau

SEQ ID NO: 730695 - RNA, 19 nt, Homo sapiens
  misc_RNA (1)...(19): siRNA sense strand
gauagacgagagccucauc

SEQ ID NO: 730696 - RNA, 19 nt, Homo sapiens
  misc_RNA (1)...(19): siRNA sense strand
agacgagagccucaucuuc

SEQ ID NO: 730697 - RNA, 19 nt, Homo sapiens
  misc_RNA (1)...(19): siRNA sense strand
gcugaggugcagaaacuuc

SEQ ID NO: 730698 - RNA, 19 nt, Homo sapiens
  misc_RNA (1)...(19): siRNA sense strand
gacuuggccacguucauga

SEQ ID NO: 730699 - RNA, 19 nt, Homo sapiens
  misc_RNA (1)...(19): siRNA sense strand
caugaacggguccgaauac

SEQ ID NO: 730700 - RNA, 19 nt, Homo sapiens
  misc_RNA (1)...(19): siRNA sense strand
caagaagugggagcuggaa

SEQ ID NO: 730701 - RNA, 19 nt, Homo sapiens
  misc_RNA (1)...(19): siRNA sense strand
ccagauggaccgcgugaac

SEQ ID NO: 730702 - RNA, 19 nt, Homo sapiens
  misc_RNA (1)...(19): siRNA sense strand
augucaagcucucaacaga

SEQ ID NO: 730703 - RNA, 19 nt, Homo sapiens
  misc_RNA (1)...(19): siRNA sense strand
cugaggacauucgcaagug

SEQ ID NO: 730704 - RNA, 19 nt, Homo sapiens
  misc_RNA (1)...(19): siRNA sense strand
cuggacguccuaaagcaua

SEQ ID NO: 730705 - RNA, 19 nt, Homo sapiens
  misc_RNA (1)...(19): siRNA sense strand
gagcagcuggacguccuaa

SEQ ID NO: 730706 - RNA, 19 nt, Homo sapiens
  misc_RNA (1)...(19): siRNA sense strand
gaacggguccgaauacuuc

SEQ ID NO: 730707 - RNA, 19 nt, Homo sapiens
  misc_RNA (1)...(19): siRNA sense strand
gaugagcccugaggacauu

SEQ ID NO: 730708 - RNA, 19 nt, Homo sapiens
  misc_RNA (1)...(19): siRNA sense strand
gaugagcucuacccacaag

SEQ ID NO: 730709 - RNA, 19 nt, Homo sapiens
  misc_RNA (1)...(19): siRNA sense strand
cauuggaccugcugcuauu

SEQ ID NO: 730710 - RNA, 19 nt, Homo sapiens
  misc_RNA (1)...(19): siRNA sense strand
gcauggacuuggccacguu

SEQ ID NO: 730711 - RNA, 19 nt, Homo sapiens
  misc_RNA (1)...(19): siRNA sense strand
uggagacccugaaggcuuu

SEQ ID NO: 730712 - RNA, 19 nt, Homo sapiens
  misc_RNA (1)...(19): siRNA sense strand
ccuaggaccuggaccuguu

SEQ ID NO: 730713 - RNA, 19 nt, Homo sapiens
  misc_RNA (1)...(19): siRNA sense strand
gacccuggcuggagagaca

SEQ ID NO: 730714 - RNA, 19 nt, Homo sapiens
  misc_RNA (1)...(19): siRNA sense strand
ccugaaggcuuugcuugaa

SEQ ID NO: 730715 - RNA, 19 nt, Homo sapiens
  misc_RNA (1)...(19): siRNA sense strand
gcaccugggcuaccucuuc

SEQ ID NO: 730716 - RNA, 19 nt, Homo sapiens
  misc_RNA (1)...(19): siRNA sense strand
ggacuuggccacguucaug

SEQ ID NO: 730717 - RNA, 19 nt, Homo sapiens
  misc_RNA (1)...(19): siRNA sense strand
gacgagagccucaucuucu

SEQ ID NO: 730718 - RNA, 19 nt, Homo sapiens
  misc_RNA (1)...(19): siRNA sense strand
gcagcuggacguccucuau

SEQ ID NO: 730719 - RNA, 19 nt, Homo sapiens
  misc_RNA (1)...(19): siRNA sense strand
acgagagccucaucuucua

SEQ ID NO: 730720 - RNA, 19 nt, Homo sapiens
  misc_RNA (1)...(19): siRNA sense strand
gcuggaagccugcguggau

SEQ ID NO: 730721 - RNA, 19 nt, Homo sapiens
  misc_RNA (1)...(19): siRNA sense strand
uaaagcauaaacuggauga

SEQ ID NO: 730722 - RNA, 19 nt, Homo sapiens
  misc_RNA (1)...(19): siRNA sense strand
uaaacuggaugagcucuac

SEQ ID NO: 730723 - RNA, 19 nt, Homo sapiens
  misc_RNA (1)...(19): siRNA sense strand
caaagggcacgaaaugagu

SEQ ID NO: 730724 - RNA, 19 nt, Homo sapiens
  misc_RNA (1)...(19): siRNA sense strand
gacaaagacacccuagaca

SEQ ID NO: 730725 - RNA, 19 nt, Homo sapiens
  misc_RNA (1)...(19): siRNA sense strand
uggcugaggugcagaaacu

SEQ ID NO: 730726 - RNA, 19 nt, Homo sapiens
  misc_RNA (1)...(19): siRNA sense strand
gcagcuggacguccuaaag

SEQ ID NO: 730727 - RNA, 19 nt, Homo sapiens
  misc_RNA (1)...(19): siRNA sense strand
ugaaggcuuugcuugaagu

SEQ ID NO: 730728 - RNA, 19 nt, Homo sapiens
  misc_RNA (1)...(19): siRNA sense strand
ccuaaagcauaaacuggau

SEQ ID NO: 730729 - RNA, 19 nt, Homo sapiens
  misc_RNA (1)...(19): siRNA sense strand
ggaccuggaccuguucuca

SEQ ID NO: 730730 - RNA, 19 nt, Homo sapiens
  misc_RNA (1)...(19): siRNA sense strand
gaaugucaagcucucaaca

SEQ ID NO: 730731 - RNA, 19 nt, Homo sapiens
  misc_RNA (1)...(19): siRNA sense strand
caacggcuaccugguccua

SEQ ID NO: 730732 - RNA, 19 nt, Homo sapiens
  misc_RNA (1)...(19): siRNA sense strand
gaucgaccgcuuugugaag

SEQ ID NO: 730733 - RNA, 19 nt, Homo sapiens
  misc_RNA (1)...(19): siRNA sense strand
gagcucuacccacaagguu

SEQ ID NO: 730734 - RNA, 19 nt, Homo sapiens
  misc_RNA (1)...(19): siRNA sense strand
uggacguccuaaagcauaa

SEQ ID NO: 730735 - RNA, 19 nt, Homo sapiens
  misc_RNA (1)...(19): siRNA sense strand
ggccugcacccguuucuuc

SEQ ID NO: 730736 - RNA, 19 nt, Homo sapiens
  misc_RNA (1)...(19): siRNA sense strand
gaagaaugucaagcucuca

SEQ ID NO: 730737 - RNA, 19 nt, Homo sapiens
  misc_RNA (1)...(19): siRNA sense strand
acaaagggcacgaaaugag

SEQ ID NO: 730738 - RNA, 19 nt, Homo sapiens
  misc_RNA (1)...(19): siRNA sense strand
cauggucugucuccacgau

SEQ ID NO: 730739 - RNA, 19 nt, Homo sapiens
  misc_RNA (1)...(19): siRNA sense strand
gaaugugagcauggacuug

SEQ ID NO: 730740 - RNA, 19 nt, Homo sapiens
  misc_RNA (1)...(19): siRNA sense strand
ucgugaagauccaguccuu

SEQ ID NO: 730741 - RNA, 19 nt, Homo sapiens
  misc_RNA (1)...(19): siRNA sense strand
acaugaacggguccgaaua

SEQ ID NO: 730742 - RNA, 19 nt, Homo sapiens
  misc_RNA (1)...(19): siRNA sense strand
gcaucacgaaggccaaugu

SEQ ID NO: 730743 - RNA, 19 nt, Homo sapiens
  misc_RNA (1)...(19): siRNA sense strand
agacaaagacacccuagac

SEQ ID NO: 730744 - RNA, 19 nt, Homo sapiens
  misc_RNA (1)...(19): siRNA sense strand
ccauuggaccugcugcuau

SEQ ID NO: 730745 - RNA, 19 nt, Homo sapiens
  misc_RNA (1)...(19): siRNA sense strand
gauagacgagagccucauc

SEQ ID NO: 730746 - RNA, 19 nt, Homo sapiens
  misc_RNA (1)...(19): siRNA sense strand
agacgagagccucaucuuc

SEQ ID NO: 730747 - RNA, 19 nt, Homo sapiens
  misc_RNA (1)...(19): siRNA sense strand
gcugaggugcagaaacuuc

SEQ ID NO: 730748 - RNA, 19 nt, Homo sapiens
  misc_RNA (1)...(19): siRNA sense strand
gacuuggccacguucauga

SEQ ID NO: 730749 - RNA, 19 nt, Homo sapiens
  misc_RNA (1)...(19): siRNA sense strand
caugaacggguccgaauac

SEQ ID NO: 730750 - RNA, 19 nt, Homo sapiens
  misc_RNA (1)...(19): siRNA sense strand
caagaagugggagcuggaa

SEQ ID NO: 730751 - RNA, 19 nt, Homo sapiens
  misc_RNA (1)...(19): siRNA sense strand
ccagauggaccgcgugaac

SEQ ID NO: 730752 - RNA, 19 nt, Homo sapiens
  misc_RNA (1)...(19): siRNA sense strand
augucaagcucucaacaga

SEQ ID NO: 730753 - RNA, 19 nt, Homo sapiens
  misc_RNA (1)...(19): siRNA sense strand
cugaggacauucgcaagug

SEQ ID NO: 730754 - RNA, 19 nt, Homo sapiens
  misc_RNA (1)...(19): siRNA sense strand
cuggacguccuaaagcaua

SEQ ID NO: 730755 - RNA, 19 nt, Homo sapiens
  misc_RNA (1)...(19): siRNA sense strand
gagcagcuggacguccuaa

SEQ ID NO: 730756 - RNA, 19 nt, Homo sapiens
  misc_RNA (1)...(19): siRNA sense strand
gacaugaucuucuuccauu

SEQ ID NO: 730757 - RNA, 19 nt, Homo sapiens
  misc_RNA (1)...(19): siRNA sense strand
gagaauuacugcaaguuug

SEQ ID NO: 730758 - RNA, 19 nt, Homo sapiens
  misc_RNA (1)...(19): siRNA sense strand
gcaagucaaugccaugauc

SEQ ID NO: 730759 - RNA, 19 nt, Homo sapiens
  misc_RNA (1)...(19): siRNA sense strand
uaaaguggacgccuucuaa

SEQ ID NO: 730760 - RNA, 19 nt, Homo sapiens
  misc_RNA (1)...(19): siRNA sense strand
gcuuguggcugaaaccuuu

SEQ ID NO: 730761 - RNA, 19 nt, Homo sapiens
  misc_RNA (1)...(19): siRNA sense strand
caacaugguggacguauug

SEQ ID NO: 730762 - RNA, 19 nt, Homo sapiens
  misc_RNA (1)...(19): siRNA sense strand
cauccaaccucaucaguuc

SEQ ID NO: 730763 - RNA, 19 nt, Homo sapiens
  misc_RNA (1)...(19): siRNA sense strand
aggaagaccucaucaagug

SEQ ID NO: 730764 - RNA, 19 nt, Homo sapiens
  misc_RNA (1)...(19): siRNA sense strand
ucaaugccaugaucgagaa

SEQ ID NO: 730765 - RNA, 19 nt, Homo sapiens
  misc_RNA (1)...(19): siRNA sense strand
ccacauacuugggcgaguu

SEQ ID NO: 730766 - RNA, 19 nt, Homo sapiens
  misc_RNA (1)...(19): siRNA sense strand
ccaaugagaauuacugcaa

SEQ ID NO: 730767 - RNA, 19 nt, Homo sapiens
  misc_RNA (1)...(19): siRNA sense strand
cgggagaacgggaucaaua

SEQ ID NO: 730768 - RNA, 19 nt, Homo sapiens
  misc_RNA (1)...(19): siRNA sense strand
acccagaguccguguauua

SEQ ID NO: 730769 - RNA, 19 nt, Homo sapiens
  misc_RNA (1)...(19): siRNA sense strand
gagaacgggaucaauagga

SEQ ID NO: 730770 - RNA, 19 nt, Homo sapiens
  misc_RNA (1)...(19): siRNA sense strand
ugagaauuacugcaaguuu

SEQ ID NO: 730771 - RNA, 19 nt, Homo sapiens
  misc_RNA (1)...(19): siRNA sense strand
guggacgccuucuaagaug

SEQ ID NO: 730772 - RNA, 19 nt, Homo sapiens
  misc_RNA (1)...(19): siRNA sense strand
guaaaguggacgccuucua

SEQ ID NO: 730773 - RNA, 19 nt, Homo sapiens
  misc_RNA (1)...(19): siRNA sense strand
cagaguccguguauuacug

SEQ ID NO: 730774 - RNA, 19 nt, Homo sapiens
  misc_RNA (1)...(19): siRNA sense strand
gaagcuggaaccacuguca

SEQ ID NO: 730775 - RNA, 19 nt, Homo sapiens
  misc_RNA (1)...(19): siRNA sense strand
gcacaacaugguggacgua

SEQ ID NO: 730776 - RNA, 19 nt, Homo sapiens
  misc_RNA (1)...(19): siRNA sense strand
gggagaacgggaucaauag

SEQ ID NO: 730777 - RNA, 19 nt, Homo sapiens
  misc_RNA (1)...(19): siRNA sense strand
caacccagaguccguguau

SEQ ID NO: 730778 - RNA, 19 nt, Homo sapiens
  misc_RNA (1)...(19): siRNA sense strand
caaccgcggugugaauuac

SEQ ID NO: 730779 - RNA, 19 nt, Homo sapiens
  misc_RNA (1)...(19): siRNA sense strand
agaacgggaucaauaggau

SEQ ID NO: 730780 - RNA, 19 nt, Homo sapiens
  misc_RNA (1)...(19): siRNA sense strand
agaauuacugcaaguuuga

SEQ ID NO: 730781 - RNA, 19 nt, Homo sapiens
  misc_RNA (1)...(19): siRNA sense strand
acaacaugguggacguauu

SEQ ID NO: 730782 - RNA, 19 nt, Homo sapiens
  misc_RNA (1)...(19): siRNA sense strand
ucaaccgcggugugaauua

SEQ ID NO: 730783 - RNA, 19 nt, Homo sapiens
  misc_RNA (1)...(19): siRNA sense strand
uaaagcacagcucgacguu

SEQ ID NO: 730784 - RNA, 19 nt, Homo sapiens
  misc_RNA (1)...(19): siRNA sense strand
ugaaaccuuugcccagaag

SEQ ID NO: 730785 - RNA, 19 nt, Homo sapiens
  misc_RNA (1)...(19): siRNA sense strand
cugaaaccuuugcccagaa

SEQ ID NO: 730786 - RNA, 19 nt, Homo sapiens
  misc_RNA (1)...(19): siRNA sense strand
guguuuagucccgcacuua

SEQ ID NO: 730787 - RNA, 19 nt, Homo sapiens
  misc_RNA (1)...(19): siRNA sense strand
gagaucaacaacccagagu

SEQ ID NO: 730788 - RNA, 19 nt, Homo sapiens
  misc_RNA (1)...(19): siRNA sense strand
ugagaagaacgaggacuga

SEQ ID NO: 730789 - RNA, 19 nt, Homo sapiens
  misc_RNA (1)...(19): siRNA sense strand
ugagaccauucgcuaccuu

SEQ ID NO: 730790 - RNA, 19 nt, Homo sapiens
  misc_RNA (1)...(19): siRNA sense strand
aaugagaauuacugcaagu

SEQ ID NO: 730791 - RNA, 19 nt, Homo sapiens
  misc_RNA (1)...(19): siRNA sense strand
ggagaacgggaucaauagg

SEQ ID NO: 730792 - RNA, 19 nt, Homo sapiens
  misc_RNA (1)...(19): siRNA sense strand
ggacgccuucuaagaugau

SEQ ID NO: 730793 - RNA, 19 nt, Homo sapiens
  misc_RNA (1)...(19): siRNA sense strand
cgacaugaucuucuuccau

SEQ ID NO: 730794 - RNA, 19 nt, Homo sapiens
  misc_RNA (1)...(19): siRNA sense strand
cagcaagucaaugccauga

SEQ ID NO: 730795 - RNA, 19 nt, Homo sapiens
  misc_RNA (1)...(19): siRNA sense strand
ucaauaggaucggaaaccu

SEQ ID NO: 730796 - RNA, 19 nt, Homo sapiens
  misc_RNA (1)...(19): siRNA sense strand
gcuggugcccaaugagaau

SEQ ID NO: 730797 - RNA, 19 nt, Homo sapiens
  misc_RNA (1)...(19): siRNA sense strand
cuucuuccauuccuacaag

SEQ ID NO: 730798 - RNA, 19 nt, Homo sapiens
  misc_RNA (1)...(19): siRNA sense strand
uggacgccuucuaagauga

SEQ ID NO: 730799 - RNA, 19 nt, Homo sapiens
  misc_RNA (1)...(19): siRNA sense strand
gacaugaucuucuuccauu

SEQ ID NO: 730800 - RNA, 19 nt, Homo sapiens
  misc_RNA (1)...(19): siRNA sense strand
gagaauuacugcaaguuug

SEQ ID NO: 730801 - RNA, 19 nt, Homo sapiens
  misc_RNA (1)...(19): siRNA sense strand
gcaagucaaugccaugauc

SEQ ID NO: 730802 - RNA, 19 nt, Homo sapiens
  misc_RNA (1)...(19): siRNA sense strand
uaaaguggacgccuucuaa

SEQ ID NO: 730803 - RNA, 19 nt, Homo sapiens
  misc_RNA (1)...(19): siRNA sense strand
gcuuguggcugaaaccuuu

SEQ ID NO: 730804 - RNA, 19 nt, Homo sapiens
  misc_RNA (1)...(19): siRNA sense strand
caacaugguggacguauug

SEQ ID NO: 730805 - RNA, 19 nt, Homo sapiens
  misc_RNA (1)...(19): siRNA sense strand
cauccaaccucaucaguuc

SEQ ID NO: 730806 - RNA, 19 nt, Homo sapiens
  misc_RNA (1)...(19): siRNA sense strand
aggaagaccucaucaagug

SEQ ID NO: 730807 - RNA, 19 nt, Homo sapiens
  misc_RNA (1)...(19): siRNA sense strand
ucaaugccaugaucgagaa

SEQ ID NO: 730808 - RNA, 19 nt, Homo sapiens
  misc_RNA (1)...(19): siRNA sense strand
ccacauacuugggcgaguu

SEQ ID NO: 730809 - RNA, 19 nt, Homo sapiens
  misc_RNA (1)...(19): siRNA sense strand
ccaaugagaauuacugcaa

SEQ ID NO: 730810 - RNA, 19 nt, Homo sapiens
  misc_RNA (1)...(19): siRNA sense strand
cgggagaacgggaucaaua

SEQ ID NO: 730811 - RNA, 19 nt, Homo sapiens
  misc_RNA (1)...(19): siRNA sense strand
acccagaguccguguauua

SEQ ID NO: 730812 - RNA, 19 nt, Homo sapiens
  misc_RNA (1)...(19): siRNA sense strand
gagaacgggaucaauagga

SEQ ID NO: 730813 - RNA, 19 nt, Homo sapiens
  misc_RNA (1)...(19): siRNA sense strand
ugagaauuacugcaaguuu

SEQ ID NO: 730814 - RNA, 19 nt, Homo sapiens
  misc_RNA (1)...(19): siRNA sense strand
guggacgccuucuaagaug

SEQ ID NO: 730815 - RNA, 19 nt, Homo sapiens
  misc_RNA (1)...(19): siRNA sense strand
guaaaguggacgccuucua

SEQ ID NO: 730816 - RNA, 19 nt, Homo sapiens
  misc_RNA (1)...(19): siRNA sense strand
cagaguccguguauuacug

SEQ ID NO: 730817 - RNA, 19 nt, Homo sapiens
  misc_RNA (1)...(19): siRNA sense strand
gaagcuggaaccacuguca

SEQ ID NO: 730818 - RNA, 19 nt, Homo sapiens
  misc_RNA (1)...(19): siRNA sense strand
gcacaacaugguggacgua

SEQ ID NO: 730819 - RNA, 19 nt, Homo sapiens
  misc_RNA (1)...(19): siRNA sense strand
gggagaacgggaucaauag

SEQ ID NO: 730820 - RNA, 19 nt, Homo sapiens
  misc_RNA (1)...(19): siRNA sense strand
caacccagaguccguguau

SEQ ID NO: 730821 - RNA, 19 nt, Homo sapiens
  misc_RNA (1)...(19): siRNA sense strand
caaccgcggugugaauuac

SEQ ID NO: 730822 - RNA, 19 nt, Homo sapiens
  misc_RNA (1)...(19): siRNA sense strand
agaacgggaucaauaggau

SEQ ID NO: 730823 - RNA, 19 nt, Homo sapiens
  misc_RNA (1)...(19): siRNA sense strand
agaauuacugcaaguuuga

SEQ ID NO: 730824 - RNA, 19 nt, Homo sapiens
  misc_RNA (1)...(19): siRNA sense strand
acaacaugguggacguauu

SEQ ID NO: 730825 - RNA, 19 nt, Homo sapiens
  misc_RNA (1)...(19): siRNA sense strand
ucaaccgcggugugaauua

SEQ ID NO: 730826 - RNA, 19 nt, Homo sapiens
  misc_RNA (1)...(19): siRNA sense strand
uaaagcacagcucgacguu

SEQ ID NO: 730827 - RNA, 19 nt, Homo sapiens
  misc_RNA (1)...(19): siRNA sense strand
ugaaaccuuugcccagaag

SEQ ID NO: 730828 - RNA, 19 nt, Homo sapiens
  misc_RNA (1)...(19): siRNA sense strand
cugaaaccuuugcccagaa

SEQ ID NO: 730829 - RNA, 19 nt, Homo sapiens
  misc_RNA (1)...(19): siRNA sense strand
guguuuagucccgcacuua

SEQ ID NO: 730830 - RNA, 19 nt, Homo sapiens
  misc_RNA (1)...(19): siRNA sense strand
gagaucaacaacccagagu

SEQ ID NO: 730831 - RNA, 19 nt, Homo sapiens
  misc_RNA (1)...(19): siRNA sense strand
ugagaagaacgaggacuga

SEQ ID NO: 730832 - RNA, 19 nt, Homo sapiens
  misc_RNA (1)...(19): siRNA sense strand
ugagaccauucgcuaccuu

SEQ ID NO: 730833 - RNA, 19 nt, Homo sapiens
  misc_RNA (1)...(19): siRNA sense strand
aaugagaauuacugcaagu

SEQ ID NO: 730834 - RNA, 19 nt, Homo sapiens
  misc_RNA (1)...(19): siRNA sense strand
ggagaacgggaucaauagg

SEQ ID NO: 730835 - RNA, 19 nt, Homo sapiens
  misc_RNA (1)...(19): siRNA sense strand
ggacgccuucuaagaugau

SEQ ID NO: 730836 - RNA, 19 nt, Homo sapiens
  misc_RNA (1)...(19): siRNA sense strand
cgacaugaucuucuuccau

SEQ ID NO: 730837 - RNA, 19 nt, Homo sapiens
  misc_RNA (1)...(19): siRNA sense strand
cagcaagucaaugccauga

SEQ ID NO: 730838 - RNA, 19 nt, Homo sapiens
  misc_RNA (1)...(19): siRNA sense strand
ucaauaggaucggaaaccu

SEQ ID NO: 730839 - RNA, 19 nt, Homo sapiens
  misc_RNA (1)...(19): siRNA sense strand
gcuggugcccaaugagaau

SEQ ID NO: 730840 - RNA, 19 nt, Homo sapiens
  misc_RNA (1)...(19): siRNA sense strand
cuucuuccauuccuacaag

SEQ ID NO: 730841 - RNA, 19 nt, Homo sapiens
  misc_RNA (1)...(19): siRNA sense strand
uggacgccuucuaagauga

SEQ ID NO: 730842 - RNA, 19 nt, Homo sapiens
  misc_RNA (1)...(19): siRNA sense strand
gacaugaucuucuuccauu

SEQ ID NO: 730843 - RNA, 19 nt, Homo sapiens
  misc_RNA (1)...(19): siRNA sense strand
gagaauuacugcaaguuug

SEQ ID NO: 730844 - RNA, 19 nt, Homo sapiens
  misc_RNA (1)...(19): siRNA sense strand
gcaagucaaugccaugauc

SEQ ID NO: 730845 - RNA, 19 nt, Homo sapiens
  misc_RNA (1)...(19): siRNA sense strand
uaaaguggacgccuucuaa

SEQ ID NO: 730846 - RNA, 19 nt, Homo sapiens
  misc_RNA (1)...(19): siRNA sense strand
gcuuguggcugaaaccuuu

SEQ ID NO: 730847 - RNA, 19 nt, Homo sapiens
  misc_RNA (1)...(19): siRNA sense strand
caacaugguggacguauug

SEQ ID NO: 730848 - RNA, 19 nt, Homo sapiens
  misc_RNA (1)...(19): siRNA sense strand
cauccaaccucaucaguuc

SEQ ID NO: 730849 - RNA, 19 nt, Homo sapiens
  misc_RNA (1)...(19): siRNA sense strand
aggaagaccucaucaagug

SEQ ID NO: 730850 - RNA, 19 nt, Homo sapiens
  misc_RNA (1)...(19): siRNA sense strand
ucaaugccaugaucgagaa

SEQ ID NO: 730851 - RNA, 19 nt, Homo sapiens
  misc_RNA (1)...(19): siRNA sense strand
ccacauacuugggcgaguu

SEQ ID NO: 730852 - RNA, 19 nt, Homo sapiens
  misc_RNA (1)...(19): siRNA sense strand
ccaaugagaauuacugcaa

SEQ ID NO: 730853 - RNA, 19 nt, Homo sapiens
  misc_RNA (1)...(19): siRNA sense strand
cgggagaacgggaucaaua

SEQ ID NO: 730854 - RNA, 19 nt, Homo sapiens
  misc_RNA (1)...(19): siRNA sense strand
acccagaguccguguauua

SEQ ID NO: 730855 - RNA, 19 nt, Homo sapiens
  misc_RNA (1)...(19): siRNA sense strand
gagaacgggaucaauagga

SEQ ID NO: 730856 - RNA, 19 nt, Homo sapiens
  misc_RNA (1)...(19): siRNA sense strand
ugagaauuacugcaaguuu

SEQ ID NO: 730857 - RNA, 19 nt, Homo sapiens
  misc_RNA (1)...(19): siRNA sense strand
guggacgccuucuaagaug

SEQ ID NO: 730858 - RNA, 19 nt, Homo sapiens
  misc_RNA (1)...(19): siRNA sense strand
guaaaguggacgccuucua

SEQ ID NO: 730859 - RNA, 19 nt, Homo sapiens
  misc_RNA (1)...(19): siRNA sense strand
cagaguccguguauuacug

SEQ ID NO: 730860 - RNA, 19 nt, Homo sapiens
  misc_RNA (1)...(19): siRNA sense strand
gaagcuggaaccacuguca

SEQ ID NO: 730861 - RNA, 19 nt, Homo sapiens
  misc_RNA (1)...(19): siRNA sense strand
gcacaacaugguggacgua

SEQ ID NO: 730862 - RNA, 19 nt, Homo sapiens
  misc_RNA (1)...(19): siRNA sense strand
gggagaacgggaucaauag

SEQ ID NO: 730863 - RNA, 19 nt, Homo sapiens
  misc_RNA (1)...(19): siRNA sense strand
caacccagaguccguguau

SEQ ID NO: 730864 - RNA, 19 nt, Homo sapiens
  misc_RNA (1)...(19): siRNA sense strand
caaccgcggugugaauuac

SEQ ID NO: 730865 - RNA, 19 nt, Homo sapiens
  misc_RNA (1)...(19): siRNA sense strand
agaacgggaucaauaggau

SEQ ID NO: 730866 - RNA, 19 nt, Homo sapiens
  misc_RNA (1)...(19): siRNA sense strand
agaauuacugcaaguuuga

SEQ ID NO: 730867 - RNA, 19 nt, Homo sapiens
  misc_RNA (1)...(19): siRNA sense strand
acaacaugguggacguauu

SEQ ID NO: 730868 - RNA, 19 nt, Homo sapiens
  misc_RNA (1)...(19): siRNA sense strand
ucaaccgcggugugaauua

SEQ ID NO: 730869 - RNA, 19 nt, Homo sapiens
  misc_RNA (1)...(19): siRNA sense strand
uaaagcacagcucgacguu

SEQ ID NO: 730870 - RNA, 19 nt, Homo sapiens
  misc_RNA (1)...(19): siRNA sense strand
ugaaaccuuugcccagaag

SEQ ID NO: 730871 - RNA, 19 nt, Homo sapiens
  misc_RNA (1)...(19): siRNA sense strand
cugaaaccuuugcccagaa

SEQ ID NO: 730872 - RNA, 19 nt, Homo sapiens
  misc_RNA (1)...(19): siRNA sense strand
guguuuagucccgcacuua

SEQ ID NO: 730873 - RNA, 19 nt, Homo sapiens
  misc_RNA (1)...(19): siRNA sense strand
gagaucaacaacccagagu

SEQ ID NO: 730874 - RNA, 19 nt, Homo sapiens
  misc_RNA (1)...(19): siRNA sense strand
ugagaagaacgaggacuga

SEQ ID NO: 730875 - RNA, 19 nt, Homo sapiens
  misc_RNA (1)...(19): siRNA sense strand
ugagaccauucgcuaccuu

SEQ ID NO: 730876 - RNA, 19 nt, Homo sapiens
  misc_RNA (1)...(19): siRNA sense strand
aaugagaauuacugcaagu

SEQ ID NO: 730877 - RNA, 19 nt, Homo sapiens
  misc_RNA (1)...(19): siRNA sense strand
ggagaacgggaucaauagg

SEQ ID NO: 730878 - RNA, 19 nt, Homo sapiens
  misc_RNA (1)...(19): siRNA sense strand
ggacgccuucuaagaugau

SEQ ID NO: 730879 - RNA, 19 nt, Homo sapiens
  misc_RNA (1)...(19): siRNA sense strand
cgacaugaucuucuuccau

SEQ ID NO: 730880 - RNA, 19 nt, Homo sapiens
  misc_RNA (1)...(19): siRNA sense strand
cagcaagucaaugccauga

SEQ ID NO: 730881 - RNA, 19 nt, Homo sapiens
  misc_RNA (1)...(19): siRNA sense strand
ucaauaggaucggaaaccu

SEQ ID NO: 730882 - RNA, 19 nt, Homo sapiens
  misc_RNA (1)...(19): siRNA sense strand
gcuggugcccaaugagaau

SEQ ID NO: 730883 - RNA, 19 nt, Homo sapiens
  misc_RNA (1)...(19): siRNA sense strand
cuucuuccauuccuacaag

SEQ ID NO: 730884 - RNA, 19 nt, Homo sapiens
  misc_RNA (1)...(19): siRNA sense strand
uggacgccuucuaagauga

SEQ ID NO: 730885 - RNA, 19 nt, Homo sapiens
  misc_RNA (1)...(19): siRNA sense strand
gaaauuaugugcugguauc

SEQ ID NO: 730886 - RNA, 19 nt, Homo sapiens
  misc_RNA (1)...(19): siRNA sense strand
caagagaucuguuugcaau

SEQ ID NO: 730887 - RNA, 19 nt, Homo sapiens
  misc_RNA (1)...(19): siRNA sense strand
gaugguggcuuuccucaaa

SEQ ID NO: 730888 - RNA, 19 nt, Homo sapiens
  misc_RNA (1)...(19): siRNA sense strand
ggagaaaugugauguuaca

SEQ ID NO: 730889 - RNA, 19 nt, Homo sapiens
  misc_RNA (1)...(19): siRNA sense strand
caccauaacugucguugua

SEQ ID NO: 730890 - RNA, 19 nt, Homo sapiens
  misc_RNA (1)...(19): siRNA sense strand
gcaaugcucuucaucaaag

SEQ ID NO: 730891 - RNA, 19 nt, Homo sapiens
  misc_RNA (1)...(19): siRNA sense strand
ggagacaauucugcaguua

SEQ ID NO: 730892 - RNA, 19 nt, Homo sapiens
  misc_RNA (1)...(19): siRNA sense strand
uaacuacaccuacuacuuu

SEQ ID NO: 730893 - RNA, 19 nt, Homo sapiens
  misc_RNA (1)...(19): siRNA sense strand
ugaaagaccuuaacuuguc

SEQ ID NO: 730894 - RNA, 19 nt, Homo sapiens
  misc_RNA (1)...(19): siRNA sense strand
ugaagaaacuagauagaga

SEQ ID NO: 730895 - RNA, 19 nt, Homo sapiens
  misc_RNA (1)...(19): siRNA sense strand
ccaagaaacaggcaacaua

SEQ ID NO: 730896 - RNA, 19 nt, Homo sapiens
  misc_RNA (1)...(19): siRNA sense strand
gaaaguaaagguugaagau

SEQ ID NO: 730897 - RNA, 19 nt, Homo sapiens
  misc_RNA (1)...(19): siRNA sense strand
cagaugauguugacaguga

SEQ ID NO: 730898 - RNA, 19 nt, Homo sapiens
  misc_RNA (1)...(19): siRNA sense strand
caagaaacaggcaacauaa

SEQ ID NO: 730899 - RNA, 19 nt, Homo sapiens
  misc_RNA (1)...(19): siRNA sense strand
gcaguuacgcucuccauuu

SEQ ID NO: 730900 - RNA, 19 nt, Homo sapiens
  misc_RNA (1)...(19): siRNA sense strand
gagauuauuucaccucaau

SEQ ID NO: 730901 - RNA, 19 nt, Homo sapiens
  misc_RNA (1)...(19): siRNA sense strand
ccacuggacuuaucacaau

SEQ ID NO: 730902 - RNA, 19 nt, Homo sapiens
  misc_RNA (1)...(19): siRNA sense strand
gaaacagagucacacuaga

SEQ ID NO: 730903 - RNA, 19 nt, Homo sapiens
  misc_RNA (1)...(19): siRNA sense strand
gaccaaugcuacacugauu

SEQ ID NO: 730904 - RNA, 19 nt, Homo sapiens
  misc_RNA (1)...(19): siRNA sense strand
gagaagaaauuccagaaaa

SEQ ID NO: 730905 - RNA, 19 nt, Homo sapiens
  misc_RNA (1)...(19): siRNA sense strand
gauguauccucaccaacua

SEQ ID NO: 730906 - RNA, 19 nt, Homo sapiens
  misc_RNA (1)...(19): siRNA sense strand
gcauugaucgugagaaauu

SEQ ID NO: 730907 - RNA, 19 nt, Homo sapiens
  misc_RNA (1)...(19): siRNA sense strand
caacauugccaggagauua

SEQ ID NO: 730908 - RNA, 19 nt, Homo sapiens
  misc_RNA (1)...(19): siRNA sense strand
gaagaaacuagauagagaa

SEQ ID NO: 730909 - RNA, 19 nt, Homo sapiens
  misc_RNA (1)...(19): siRNA sense strand
caucacugcuguaguaaga

SEQ ID NO: 730910 - RNA, 19 nt, Homo sapiens
  misc_RNA (1)...(19): siRNA sense strand
uuucaucacugcuguagua

SEQ ID NO: 730911 - RNA, 19 nt, Homo sapiens
  misc_RNA (1)...(19): siRNA sense strand
uaacugauccugauuaugg

SEQ ID NO: 730912 - RNA, 19 nt, Homo sapiens
  misc_RNA (1)...(19): siRNA sense strand
caacaguuaucaacauauc

SEQ ID NO: 730913 - RNA, 19 nt, Homo sapiens
  misc_RNA (1)...(19): siRNA sense strand
ugacacaguuguucuuuca

SEQ ID NO: 730914 - RNA, 19 nt, Homo sapiens
  misc_RNA (1)...(19): siRNA sense strand
gguugaagaugguggcuuu

SEQ ID NO: 730915 - RNA, 19 nt, Homo sapiens
  misc_RNA (1)...(19): siRNA sense strand
gagaaauuaugugcuggua

SEQ ID NO: 730916 - RNA, 19 nt, Homo sapiens
  misc_RNA (1)...(19): siRNA sense strand
ggugucauccgaccaaaua

SEQ ID NO: 730917 - RNA, 19 nt, Homo sapiens
  misc_RNA (1)...(19): siRNA sense strand
caauggugcugguaaaugu

SEQ ID NO: 730918 - RNA, 19 nt, Homo sapiens
  misc_RNA (1)...(19): siRNA sense strand
ggacuuaucacaaucaaag

SEQ ID NO: 730919 - RNA, 19 nt, Homo sapiens
  misc_RNA (1)...(19): siRNA sense strand
ccacuucucuuucagcaau

SEQ ID NO: 730920 - RNA, 19 nt, Homo sapiens
  misc_RNA (1)...(19): siRNA sense strand
ucauaacugugacggauaa

SEQ ID NO: 730921 - RNA, 19 nt, Homo sapiens
  misc_RNA (1)...(19): siRNA sense strand
ccauaaaugugguugaugu

SEQ ID NO: 730922 - RNA, 19 nt, Homo sapiens
  misc_RNA (1)...(19): siRNA sense strand
gacaagaugccacaacuga

SEQ ID NO: 730923 - RNA, 19 nt, Homo sapiens
  misc_RNA (1)...(19): siRNA sense strand
ggaaacagagucacacuag

SEQ ID NO: 730924 - RNA, 19 nt, Homo sapiens
  misc_RNA (1)...(19): siRNA sense strand
ugacagugauggaaacaga

SEQ ID NO: 730925 - RNA, 19 nt, Homo sapiens
  misc_RNA (1)...(19): siRNA sense strand
caaaguaaccauaaaugug

SEQ ID NO: 730926 - RNA, 19 nt, Homo sapiens
  misc_RNA (1)...(19): siRNA sense strand
ccucaaagauccaguacug

SEQ ID NO: 730927 - RNA, 19 nt, Homo sapiens
  misc_RNA (1)...(19): siRNA sense strand
acaguggucuuucagguaa

SEQ ID NO: 730928 - RNA, 19 nt, Homo sapiens
  misc_RNA (1)...(19): siRNA sense strand
ucagaucccuacagcguuu

SEQ ID NO: 730929 - RNA, 19 nt, Homo sapiens
  misc_RNA (1)...(19): siRNA sense strand
cacuagaccuuccuauuga

SEQ ID NO: 730930 - RNA, 19 nt, Homo sapiens
  misc_RNA (1)...(19): siRNA sense strand
gaaaacaggcagaugauaa

SEQ ID NO: 730931 - RNA, 19 nt, Homo sapiens
  misc_RNA (1)...(19): siRNA sense strand
caagaugccacaacugauu

SEQ ID NO: 730932 - RNA, 19 nt, Homo sapiens
  misc_RNA (1)...(19): siRNA sense strand
caagaacugccucucgaua

SEQ ID NO: 730933 - RNA, 19 nt, Homo sapiens
  misc_RNA (1)...(19): siRNA sense strand
caaugacacuggcaugaau

SEQ ID NO: 730934 - RNA, 19 nt, Homo sapiens
  misc_RNA (1)...(19): siRNA sense strand
gaagucaguauaccagaaa

SEQ ID NO: 730935 - RNA, 19 nt, Homo sapiens
  misc_RNA (1)...(19): siRNA sense strand
gggaagagaaggauaccua

SEQ ID NO: 730936 - RNA, 19 nt, Homo sapiens
  misc_RNA (1)...(19): siRNA sense strand
guugaaagaccuuaacuug

SEQ ID NO: 730937 - RNA, 19 nt, Homo sapiens
  misc_RNA (1)...(19): siRNA sense strand
ccuuaaggcugcucagaaa

SEQ ID NO: 730938 - RNA, 19 nt, Homo sapiens
  misc_RNA (1)...(19): siRNA sense strand
ugccacagaugcugacaua

SEQ ID NO: 730939 - RNA, 19 nt, Homo sapiens
  misc_RNA (1)...(19): siRNA sense strand
uaagauacaucgucaaucc

SEQ ID NO: 730940 - RNA, 19 nt, Homo sapiens
  misc_RNA (1)...(19): siRNA sense strand
ggaaaguacaauuggguaa

SEQ ID NO: 730941 - RNA, 19 nt, Homo sapiens
  misc_RNA (1)...(19): siRNA sense strand
gauucucucuucaguguug

SEQ ID NO: 730942 - RNA, 19 nt, Homo sapiens
  misc_RNA (1)...(19): siRNA sense strand
gaaugacaauagcccaguu

SEQ ID NO: 730943 - RNA, 19 nt, Homo sapiens
  misc_RNA (1)...(19): siRNA sense strand
ggcaagugaugguggauug

SEQ ID NO: 730944 - RNA, 19 nt, Homo sapiens
  misc_RNA (1)...(19): siRNA sense strand
ucucuucaguguuguaauu

SEQ ID NO: 730945 - RNA, 19 nt, Homo sapiens
  misc_RNA (1)...(19): siRNA sense strand
gagacaagaugccacaacu

SEQ ID NO: 730946 - RNA, 19 nt, Homo sapiens
  misc_RNA (1)...(19): siRNA sense strand
acacuagaccuuccuauug

SEQ ID NO: 730947 - RNA, 19 nt, Homo sapiens
  misc_RNA (1)...(19): siRNA sense strand
gaguguuggucaaagcuaa

SEQ ID NO: 730948 - RNA, 19 nt, Homo sapiens
  misc_RNA (1)...(19): siRNA sense strand
ugacaaccacccagucuuu

SEQ ID NO: 730949 - RNA, 19 nt, Homo sapiens
  misc_RNA (1)...(19): siRNA sense strand
guacaagaccggagaugug

SEQ ID NO: 730950 - RNA, 19 nt, Homo sapiens
  misc_RNA (1)...(19): siRNA sense strand
cagccugccuuccaaauuc

SEQ ID NO: 730951 - RNA, 19 nt, Homo sapiens
  misc_RNA (1)...(19): siRNA sense strand
uuacagaccuugguuuaca

SEQ ID NO: 730952 - RNA, 19 nt, Homo sapiens
  misc_RNA (1)...(19): siRNA sense strand
gagguucguuacagcauug

SEQ ID NO: 730953 - RNA, 19 nt, Homo sapiens
  misc_RNA (1)...(19): siRNA sense strand
acaacaaacugucacaagu

SEQ ID NO: 730954 - RNA, 19 nt, Homo sapiens
  misc_RNA (1)...(19): siRNA sense strand
ugacaugcuucacagauca

SEQ ID NO: 730955 - RNA, 19 nt, Homo sapiens
  misc_RNA (1)...(19): siRNA sense strand
aaauugcucucauaacugu

SEQ ID NO: 730956 - RNA, 19 nt, Homo sapiens
  misc_RNA (1)...(19): siRNA sense strand
ggagaugugccacugauuc

SEQ ID NO: 730957 - RNA, 19 nt, Homo sapiens
  misc_RNA (1)...(19): siRNA sense strand
gacucuaucuccaauuguu

SEQ ID NO: 730958 - RNA, 19 nt, Homo sapiens
  misc_RNA (1)...(19): siRNA sense strand
ggaggaaacacaagagauc

SEQ ID NO: 730959 - RNA, 19 nt, Homo sapiens
  misc_RNA (1)...(19): siRNA sense strand
ugaggauggugguagagua

SEQ ID NO: 730960 - RNA, 19 nt, Homo sapiens
  misc_RNA (1)...(19): siRNA sense strand
uaaggccaguauucaguaa

SEQ ID NO: 730961 - RNA, 19 nt, Homo sapiens
  misc_RNA (1)...(19): siRNA sense strand
ucaaagaaccacuggauag

SEQ ID NO: 730962 - RNA, 19 nt, Homo sapiens
  misc_RNA (1)...(19): siRNA sense strand
caacaaacugucacaagug

SEQ ID NO: 730963 - RNA, 19 nt, Homo sapiens
  misc_RNA (1)...(19): siRNA sense strand
cagcaacaguuaucaacau

SEQ ID NO: 730964 - RNA, 19 nt, Homo sapiens
  misc_RNA (1)...(19): siRNA sense strand
ggaguuagauagggaagag

SEQ ID NO: 730965 - RNA, 19 nt, Homo sapiens
  misc_RNA (1)...(19): siRNA sense strand
gugacucuaucuccaauug

SEQ ID NO: 730966 - RNA, 19 nt, Homo sapiens
  misc_RNA (1)...(19): siRNA sense strand
augcuacacugauuaauga

SEQ ID NO: 730967 - RNA, 19 nt, Homo sapiens
  misc_RNA (1)...(19): siRNA sense strand
gguagaguaucacguucuu

SEQ ID NO: 730968 - RNA, 19 nt, Homo sapiens
  misc_RNA (1)...(19): siRNA sense strand
ucaaucuguucgugaauga

SEQ ID NO: 730969 - RNA, 19 nt, Homo sapiens
  misc_RNA (1)...(19): siRNA sense strand
gcugauguauccucaccaa

SEQ ID NO: 730970 - RNA, 19 nt, Homo sapiens
  misc_RNA (1)...(19): siRNA sense strand
ucgcauugaucgugagaaa

SEQ ID NO: 730971 - RNA, 19 nt, Homo sapiens
  misc_RNA (1)...(19): siRNA sense strand
guaacuacaccuacuacuu

SEQ ID NO: 730972 - RNA, 19 nt, Homo sapiens
  misc_RNA (1)...(19): siRNA sense strand
ccaaugcuacacugauuaa

SEQ ID NO: 730973 - RNA, 19 nt, Homo sapiens
  misc_RNA (1)...(19): siRNA sense strand
aaacaggcaacauaacauu

SEQ ID NO: 730974 - RNA, 19 nt, Homo sapiens
  misc_RNA (1)...(19): siRNA sense strand
gaaacaggcaacauaacau

SEQ ID NO: 730975 - RNA, 19 nt, Homo sapiens
  misc_RNA (1)...(19): siRNA sense strand
ggacuaaucacuguaacug

SEQ ID NO: 730976 - RNA, 19 nt, Homo sapiens
  misc_RNA (1)...(19): siRNA sense strand
caaaauugcucucauaacu

SEQ ID NO: 730977 - RNA, 19 nt, Homo sapiens
  misc_RNA (1)...(19): siRNA sense strand
acacaguuguucuuucaga

SEQ ID NO: 730978 - RNA, 19 nt, Homo sapiens
  misc_RNA (1)...(19): siRNA sense strand
ugaagucaguauaccagaa

SEQ ID NO: 730979 - RNA, 19 nt, Homo sapiens
  misc_RNA (1)...(19): siRNA sense strand
caucgucaauccugucaau

SEQ ID NO: 730980 - RNA, 19 nt, Homo sapiens
  misc_RNA (1)...(19): siRNA sense strand
ccaaaguaaccauaaaugu

SEQ ID NO: 730981 - RNA, 19 nt, Homo sapiens
  misc_RNA (1)...(19): siRNA sense strand
ggauggugguagaguauca

SEQ ID NO: 730982 - RNA, 19 nt, Homo sapiens
  misc_RNA (1)...(19): siRNA sense strand
caaugucacagucuuugua

SEQ ID NO: 730983 - RNA, 19 nt, Homo sapiens
  misc_RNA (1)...(19): siRNA sense strand
auacugagauagcugaugu

SEQ ID NO: 730984 - RNA, 19 nt, Homo sapiens
  misc_RNA (1)...(19): siRNA sense strand
aaacuaaggcagaugaugu

SEQ ID NO: 730985 - RNA, 19 nt, Homo sapiens
  misc_RNA (1)...(19): siRNA sense strand
gaaauuaugugcugguauc

SEQ ID NO: 730986 - RNA, 19 nt, Homo sapiens
  misc_RNA (1)...(19): siRNA sense strand
caagagaucuguuugcaau

SEQ ID NO: 730987 - RNA, 19 nt, Homo sapiens
  misc_RNA (1)...(19): siRNA sense strand
gaugguggcuuuccucaaa

SEQ ID NO: 730988 - RNA, 19 nt, Homo sapiens
  misc_RNA (1)...(19): siRNA sense strand
ggagaaaugugauguuaca

SEQ ID NO: 730989 - RNA, 19 nt, Homo sapiens
  misc_RNA (1)...(19): siRNA sense strand
caccauaacugucguugua

SEQ ID NO: 730990 - RNA, 19 nt, Homo sapiens
  misc_RNA (1)...(19): siRNA sense strand
gcaaugcucuucaucaaag

SEQ ID NO: 730991 - RNA, 19 nt, Homo sapiens
  misc_RNA (1)...(19): siRNA sense strand
ggagacaauucugcaguua

SEQ ID NO: 730992 - RNA, 19 nt, Homo sapiens
  misc_RNA (1)...(19): siRNA sense strand
uaacuacaccuacuacuuu

SEQ ID NO: 730993 - RNA, 19 nt, Homo sapiens
  misc_RNA (1)...(19): siRNA sense strand
ugaaagaccuuaacuuguc

SEQ ID NO: 730994 - RNA, 19 nt, Homo sapiens
  misc_RNA (1)...(19): siRNA sense strand
ugaagaaacuagauagaga

SEQ ID NO: 730995 - RNA, 19 nt, Homo sapiens
  misc_RNA (1)...(19): siRNA sense strand
ccaagaaacaggcaacaua

SEQ ID NO: 730996 - RNA, 19 nt, Homo sapiens
  misc_RNA (1)...(19): siRNA sense strand
gaaaguaaagguugaagau

SEQ ID NO: 730997 - RNA, 19 nt, Homo sapiens
  misc_RNA (1)...(19): siRNA sense strand
cagaugauguugacaguga

SEQ ID NO: 730998 - RNA, 19 nt, Homo sapiens
  misc_RNA (1)...(19): siRNA sense strand
caagaaacaggcaacauaa

SEQ ID NO: 730999 - RNA, 19 nt, Homo sapiens
  misc_RNA (1)...(19): siRNA sense strand
gcaguuacgcucuccauuu

SEQ ID NO: 731000 - RNA, 19 nt, Homo sapiens
  misc_RNA (1)...(19): siRNA sense strand
gagauuauuucaccucaau

SEQ ID NO: 731001 - RNA, 19 nt, Homo sapiens
  misc_RNA (1)...(19): siRNA sense strand
ccacuggacuuaucacaau

SEQ ID NO: 731002 - RNA, 19 nt, Homo sapiens
  misc_RNA (1)...(19): siRNA sense strand
gaaacagagucacacuaga

SEQ ID NO: 731003 - RNA, 19 nt, Homo sapiens
  misc_RNA (1)...(19): siRNA sense strand
gaccaaugcuacacugauu

SEQ ID NO: 731004 - RNA, 19 nt, Homo sapiens
  misc_RNA (1)...(19): siRNA sense strand
gagaagaaauuccagaaaa

SEQ ID NO: 731005 - RNA, 19 nt, Homo sapiens
  misc_RNA (1)...(19): siRNA sense strand
gauguauccucaccaacua

SEQ ID NO: 731006 - RNA, 19 nt, Homo sapiens
  misc_RNA (1)...(19): siRNA sense strand
gcauugaucgugagaaauu

SEQ ID NO: 731007 - RNA, 19 nt, Homo sapiens
  misc_RNA (1)...(19): siRNA sense strand
caacauugccaggagauua

SEQ ID NO: 731008 - RNA, 19 nt, Homo sapiens
  misc_RNA (1)...(19): siRNA sense strand
gaagaaacuagauagagaa

SEQ ID NO: 731009 - RNA, 19 nt, Homo sapiens
  misc_RNA (1)...(19): siRNA sense strand
caucacugcuguaguaaga

SEQ ID NO: 731010 - RNA, 19 nt, Homo sapiens
  misc_RNA (1)...(19): siRNA sense strand
uuucaucacugcuguagua

SEQ ID NO: 731011 - RNA, 19 nt, Homo sapiens
  misc_RNA (1)...(19): siRNA sense strand
uaacugauccugauuaugg

SEQ ID NO: 731012 - RNA, 19 nt, Homo sapiens
  misc_RNA (1)...(19): siRNA sense strand
caacaguuaucaacauauc

SEQ ID NO: 731013 - RNA, 19 nt, Homo sapiens
  misc_RNA (1)...(19): siRNA sense strand
ugacacaguuguucuuuca

SEQ ID NO: 731014 - RNA, 19 nt, Homo sapiens
  misc_RNA (1)...(19): siRNA sense strand
gguugaagaugguggcuuu

SEQ ID NO: 731015 - RNA, 19 nt, Homo sapiens
  misc_RNA (1)...(19): siRNA sense strand
gagaaauuaugugcuggua

SEQ ID NO: 731016 - RNA, 19 nt, Homo sapiens
  misc_RNA (1)...(19): siRNA sense strand
ggugucauccgaccaaaua

SEQ ID NO: 731017 - RNA, 19 nt, Homo sapiens
  misc_RNA (1)...(19): siRNA sense strand
caauggugcugguaaaugu

SEQ ID NO: 731018 - RNA, 19 nt, Homo sapiens
  misc_RNA (1)...(19): siRNA sense strand
ggacuuaucacaaucaaag

SEQ ID NO: 731019 - RNA, 19 nt, Homo sapiens
  misc_RNA (1)...(19): siRNA sense strand
ccacuucucuuucagcaau

SEQ ID NO: 731020 - RNA, 19 nt, Homo sapiens
  misc_RNA (1)...(19): siRNA sense strand
ucauaacugugacggauaa

SEQ ID NO: 731021 - RNA, 19 nt, Homo sapiens
  misc_RNA (1)...(19): siRNA sense strand
ccauaaaugugguugaugu

SEQ ID NO: 731022 - RNA, 19 nt, Homo sapiens
  misc_RNA (1)...(19): siRNA sense strand
gacaagaugccacaacuga

SEQ ID NO: 731023 - RNA, 19 nt, Homo sapiens
  misc_RNA (1)...(19): siRNA sense strand
ggaaacagagucacacuag

SEQ ID NO: 731024 - RNA, 19 nt, Homo sapiens
  misc_RNA (1)...(19): siRNA sense strand
ugacagugauggaaacaga

SEQ ID NO: 731025 - RNA, 19 nt, Homo sapiens
  misc_RNA (1)...(19): siRNA sense strand
caaaguaaccauaaaugug

SEQ ID NO: 731026 - RNA, 19 nt, Homo sapiens
  misc_RNA (1)...(19): siRNA sense strand
ccucaaagauccaguacug

SEQ ID NO: 731027 - RNA, 19 nt, Homo sapiens
  misc_RNA (1)...(19): siRNA sense strand
acaguggucuuucagguaa

SEQ ID NO: 731028 - RNA, 19 nt, Homo sapiens
  misc_RNA (1)...(19): siRNA sense strand
ucagaucccuacagcguuu

SEQ ID NO: 731029 - RNA, 19 nt, Homo sapiens
  misc_RNA (1)...(19): siRNA sense strand
cacuagaccuuccuauuga

SEQ ID NO: 731030 - RNA, 19 nt, Homo sapiens
  misc_RNA (1)...(19): siRNA sense strand
gaaaacaggcagaugauaa

SEQ ID NO: 731031 - RNA, 19 nt, Homo sapiens
  misc_RNA (1)...(19): siRNA sense strand
caagaugccacaacugauu

SEQ ID NO: 731032 - RNA, 19 nt, Homo sapiens
  misc_RNA (1)...(19): siRNA sense strand
caagaacugccucucgaua

SEQ ID NO: 731033 - RNA, 19 nt, Homo sapiens
  misc_RNA (1)...(19): siRNA sense strand
caaugacacuggcaugaau

SEQ ID NO: 731034 - RNA, 19 nt, Homo sapiens
  misc_RNA (1)...(19): siRNA sense strand
gaagucaguauaccagaaa

SEQ ID NO: 731035 - RNA, 19 nt, Homo sapiens
  misc_RNA (1)...(19): siRNA sense strand
gggaagagaaggauaccua

SEQ ID NO: 731036 - RNA, 19 nt, Homo sapiens
  misc_RNA (1)...(19): siRNA sense strand
guugaaagaccuuaacuug

SEQ ID NO: 731037 - RNA, 19 nt, Homo sapiens
  misc_RNA (1)...(19): siRNA sense strand
ccuuaaggcugcucagaaa

SEQ ID NO: 731038 - RNA, 19 nt, Homo sapiens
  misc_RNA (1)...(19): siRNA sense strand
ugccacagaugcugacaua

SEQ ID NO: 731039 - RNA, 19 nt, Homo sapiens
  misc_RNA (1)...(19): siRNA sense strand
uaagauacaucgucaaucc

SEQ ID NO: 731040 - RNA, 19 nt, Homo sapiens
  misc_RNA (1)...(19): siRNA sense strand
ggaaaguacaauuggguaa

SEQ ID NO: 731041 - RNA, 19 nt, Homo sapiens
  misc_RNA (1)...(19): siRNA sense strand
gauucucucuucaguguug

SEQ ID NO: 731042 - RNA, 19 nt, Homo sapiens
  misc_RNA (1)...(19): siRNA sense strand
gaaugacaauagcccaguu

SEQ ID NO: 731043 - RNA, 19 nt, Homo sapiens
  misc_RNA (1)...(19): siRNA sense strand
ggcaagugaugguggauug

SEQ ID NO: 731044 - RNA, 19 nt, Homo sapiens
  misc_RNA (1)...(19): siRNA sense strand
ucucuucaguguuguaauu

SEQ ID NO: 731045 - RNA, 19 nt, Homo sapiens
  misc_RNA (1)...(19): siRNA sense strand
gagacaagaugccacaacu

SEQ ID NO: 731046 - RNA, 19 nt, Homo sapiens
  misc_RNA (1)...(19): siRNA sense strand
acacuagaccuuccuauug

SEQ ID NO: 731047 - RNA, 19 nt, Homo sapiens
  misc_RNA (1)...(19): siRNA sense strand
gaguguuggucaaagcuaa

SEQ ID NO: 731048 - RNA, 19 nt, Homo sapiens
  misc_RNA (1)...(19): siRNA sense strand
ugacaaccacccagucuuu

SEQ ID NO: 731049 - RNA, 19 nt, Homo sapiens
  misc_RNA (1)...(19): siRNA sense strand
guacaagaccggagaugug

SEQ ID NO: 731050 - RNA, 19 nt, Homo sapiens
  misc_RNA (1)...(19): siRNA sense strand
cagccugccuuccaaauuc

SEQ ID NO: 731051 - RNA, 19 nt, Homo sapiens
  misc_RNA (1)...(19): siRNA sense strand
uuacagaccuugguuuaca

SEQ ID NO: 731052 - RNA, 19 nt, Homo sapiens
  misc_RNA (1)...(19): siRNA sense strand
gagguucguuacagcauug

SEQ ID NO: 731053 - RNA, 19 nt, Homo sapiens
  misc_RNA (1)...(19): siRNA sense strand
acaacaaacugucacaagu

SEQ ID NO: 731054 - RNA, 19 nt, Homo sapiens
  misc_RNA (1)...(19): siRNA sense strand
ugacaugcuucacagauca

SEQ ID NO: 731055 - RNA, 19 nt, Homo sapiens
  misc_RNA (1)...(19): siRNA sense strand
aaauugcucucauaacugu

SEQ ID NO: 731056 - RNA, 19 nt, Homo sapiens
  misc_RNA (1)...(19): siRNA sense strand
ggagaugugccacugauuc

SEQ ID NO: 731057 - RNA, 19 nt, Homo sapiens
  misc_RNA (1)...(19): siRNA sense strand
gacucuaucuccaauuguu

SEQ ID NO: 731058 - RNA, 19 nt, Homo sapiens
  misc_RNA (1)...(19): siRNA sense strand
ggaggaaacacaagagauc

SEQ ID NO: 731059 - RNA, 19 nt, Homo sapiens
  misc_RNA (1)...(19): siRNA sense strand
ugaggauggugguagagua

SEQ ID NO: 731060 - RNA, 19 nt, Homo sapiens
  misc_RNA (1)...(19): siRNA sense strand
uaaggccaguauucaguaa

SEQ ID NO: 731061 - RNA, 19 nt, Homo sapiens
  misc_RNA (1)...(19): siRNA sense strand
ucaaagaaccacuggauag

SEQ ID NO: 731062 - RNA, 19 nt, Homo sapiens
  misc_RNA (1)...(19): siRNA sense strand
caacaaacugucacaagug

SEQ ID NO: 731063 - RNA, 19 nt, Homo sapiens
  misc_RNA (1)...(19): siRNA sense strand
cagcaacaguuaucaacau

SEQ ID NO: 731064 - RNA, 19 nt, Homo sapiens
  misc_RNA (1)...(19): siRNA sense strand
ggaguuagauagggaagag

SEQ ID NO: 731065 - RNA, 19 nt, Homo sapiens
  misc_RNA (1)...(19): siRNA sense strand
gugacucuaucuccaauug

SEQ ID NO: 731066 - RNA, 19 nt, Homo sapiens
  misc_RNA (1)...(19): siRNA sense strand
augcuacacugauuaauga

SEQ ID NO: 731067 - RNA, 19 nt, Homo sapiens
  misc_RNA (1)...(19): siRNA sense strand
gguagaguaucacguucuu

SEQ ID NO: 731068 - RNA, 19 nt, Homo sapiens
  misc_RNA (1)...(19): siRNA sense strand
ucaaucuguucgugaauga

SEQ ID NO: 731069 - RNA, 19 nt, Homo sapiens
  misc_RNA (1)...(19): siRNA sense strand
gcugauguauccucaccaa

SEQ ID NO: 731070 - RNA, 19 nt, Homo sapiens
  misc_RNA (1)...(19): siRNA sense strand
ucgcauugaucgugagaaa

SEQ ID NO: 731071 - RNA, 19 nt, Homo sapiens
  misc_RNA (1)...(19): siRNA sense strand
guaacuacaccuacuacuu

SEQ ID NO: 731072 - RNA, 19 nt, Homo sapiens
  misc_RNA (1)...(19): siRNA sense strand
ccaaugcuacacugauuaa

SEQ ID NO: 731073 - RNA, 19 nt, Homo sapiens
  misc_RNA (1)...(19): siRNA sense strand
aaacaggcaacauaacauu

SEQ ID NO: 731074 - RNA, 19 nt, Homo sapiens
  misc_RNA (1)...(19): siRNA sense strand
gaaacaggcaacauaacau

SEQ ID NO: 731075 - RNA, 19 nt, Homo sapiens
  misc_RNA (1)...(19): siRNA sense strand
ggacuaaucacuguaacug

SEQ ID NO: 731076 - RNA, 19 nt, Homo sapiens
  misc_RNA (1)...(19): siRNA sense strand
caaaauugcucucauaacu

SEQ ID NO: 731077 - RNA, 19 nt, Homo sapiens
  misc_RNA (1)...(19): siRNA sense strand
acacaguuguucuuucaga

SEQ ID NO: 731078 - RNA, 19 nt, Homo sapiens
  misc_RNA (1)...(19): siRNA sense strand
ugaagucaguauaccagaa

SEQ ID NO: 731079 - RNA, 19 nt, Homo sapiens
  misc_RNA (1)...(19): siRNA sense strand
caucgucaauccugucaau

SEQ ID NO: 731080 - RNA, 19 nt, Homo sapiens
  misc_RNA (1)...(19): siRNA sense strand
ccaaaguaaccauaaaugu

SEQ ID NO: 731081 - RNA, 19 nt, Homo sapiens
  misc_RNA (1)...(19): siRNA sense strand
ggauggugguagaguauca

SEQ ID NO: 731082 - RNA, 19 nt, Homo sapiens
  misc_RNA (1)...(19): siRNA sense strand
caaugucacagucuuugua

SEQ ID NO: 731083 - RNA, 19 nt, Homo sapiens
  misc_RNA (1)...(19): siRNA sense strand
auacugagauagcugaugu

SEQ ID NO: 731084 - RNA, 19 nt, Homo sapiens
  misc_RNA (1)...(19): siRNA sense strand
aaacuaaggcagaugaugu

SEQ ID NO: 731085 - RNA, 19 nt, Homo sapiens
  misc_RNA (1)...(19): siRNA sense strand
gaaauuaugugcugguauc

SEQ ID NO: 731086 - RNA, 19 nt, Homo sapiens
  misc_RNA (1)...(19): siRNA sense strand
caagagaucuguuugcaau

SEQ ID NO: 731087 - RNA, 19 nt, Homo sapiens
  misc_RNA (1)...(19): siRNA sense strand
gaugguggcuuuccucaaa

SEQ ID NO: 731088 - RNA, 19 nt, Homo sapiens
  misc_RNA (1)...(19): siRNA sense strand
ggagaaaugugauguuaca

SEQ ID NO: 731089 - RNA, 19 nt, Homo sapiens
  misc_RNA (1)...(19): siRNA sense strand
caccauaacugucguugua

SEQ ID NO: 731090 - RNA, 19 nt, Homo sapiens
  misc_RNA (1)...(19): siRNA sense strand
gcaaugcucuucaucaaag

SEQ ID NO: 731091 - RNA, 19 nt, Homo sapiens
  misc_RNA (1)...(19): siRNA sense strand
ggagacaauucugcaguua

SEQ ID NO: 731092 - RNA, 19 nt, Homo sapiens
  misc_RNA (1)...(19): siRNA sense strand
uaacuacaccuacuacuuu

SEQ ID NO: 731093 - RNA, 19 nt, Homo sapiens
  misc_RNA (1)...(19): siRNA sense strand
ugaaagaccuuaacuuguc

SEQ ID NO: 731094 - RNA, 19 nt, Homo sapiens
  misc_RNA (1)...(19): siRNA sense strand
ugaagaaacuagauagaga

SEQ ID NO: 731095 - RNA, 19 nt, Homo sapiens
  misc_RNA (1)...(19): siRNA sense strand
ccaagaaacaggcaacaua

SEQ ID NO: 731096 - RNA, 19 nt, Homo sapiens
  misc_RNA (1)...(19): siRNA sense strand
gaaaguaaagguugaagau

SEQ ID NO: 731097 - RNA, 19 nt, Homo sapiens
  misc_RNA (1)...(19): siRNA sense strand
cagaugauguugacaguga

SEQ ID NO: 731098 - RNA, 19 nt, Homo sapiens
  misc_RNA (1)...(19): siRNA sense strand
caagaaacaggcaacauaa

SEQ ID NO: 731099 - RNA, 19 nt, Homo sapiens
  misc_RNA (1)...(19): siRNA sense strand
gcaguuacgcucuccauuu

SEQ ID NO: 731100 - RNA, 19 nt, Homo sapiens
  misc_RNA (1)...(19): siRNA sense strand
gagauuauuucaccucaau

SEQ ID NO: 731101 - RNA, 19 nt, Homo sapiens
  misc_RNA (1)...(19): siRNA sense strand
ccacuggacuuaucacaau

SEQ ID NO: 731102 - RNA, 19 nt, Homo sapiens
  misc_RNA (1)...(19): siRNA sense strand
gaaacagagucacacuaga

SEQ ID NO: 731103 - RNA, 19 nt, Homo sapiens
  misc_RNA (1)...(19): siRNA sense strand
gaccaaugcuacacugauu

SEQ ID NO: 731104 - RNA, 19 nt, Homo sapiens
  misc_RNA (1)...(19): siRNA sense strand
gagaagaaauuccagaaaa

SEQ ID NO: 731105 - RNA, 19 nt, Homo sapiens
  misc_RNA (1)...(19): siRNA sense strand
gauguauccucaccaacua

SEQ ID NO: 731106 - RNA, 19 nt, Homo sapiens
  misc_RNA (1)...(19): siRNA sense strand
gcauugaucgugagaaauu

SEQ ID NO: 731107 - RNA, 19 nt, Homo sapiens
  misc_RNA (1)...(19): siRNA sense strand
caacauugccaggagauua

SEQ ID NO: 731108 - RNA, 19 nt, Homo sapiens
  misc_RNA (1)...(19): siRNA sense strand
gaagaaacuagauagagaa

SEQ ID NO: 731109 - RNA, 19 nt, Homo sapiens
  misc_RNA (1)...(19): siRNA sense strand
caucacugcuguaguaaga

SEQ ID NO: 731110 - RNA, 19 nt, Homo sapiens
  misc_RNA (1)...(19): siRNA sense strand
uuucaucacugcuguagua

SEQ ID NO: 731111 - RNA, 19 nt, Homo sapiens
  misc_RNA (1)...(19): siRNA sense strand
uaacugauccugauuaugg

SEQ ID NO: 731112 - RNA, 19 nt, Homo sapiens
  misc_RNA (1)...(19): siRNA sense strand
caacaguuaucaacauauc

SEQ ID NO: 731113 - RNA, 19 nt, Homo sapiens
  misc_RNA (1)...(19): siRNA sense strand
ugacacaguuguucuuuca

SEQ ID NO: 731114 - RNA, 19 nt, Homo sapiens
  misc_RNA (1)...(19): siRNA sense strand
gguugaagaugguggcuuu

SEQ ID NO: 731115 - RNA, 19 nt, Homo sapiens
  misc_RNA (1)...(19): siRNA sense strand
gagaaauuaugugcuggua

SEQ ID NO: 731116 - RNA, 19 nt, Homo sapiens
  misc_RNA (1)...(19): siRNA sense strand
ggugucauccgaccaaaua

SEQ ID NO: 731117 - RNA, 19 nt, Homo sapiens
  misc_RNA (1)...(19): siRNA sense strand
caauggugcugguaaaugu

SEQ ID NO: 731118 - RNA, 19 nt, Homo sapiens
  misc_RNA (1)...(19): siRNA sense strand
ggacuuaucacaaucaaag

SEQ ID NO: 731119 - RNA, 19 nt, Homo sapiens
  misc_RNA (1)...(19): siRNA sense strand
ccacuucucuuucagcaau

SEQ ID NO: 731120 - RNA, 19 nt, Homo sapiens
  misc_RNA (1)...(19): siRNA sense strand
ucauaacugugacggauaa

SEQ ID NO: 731121 - RNA, 19 nt, Homo sapiens
  misc_RNA (1)...(19): siRNA sense strand
ccauaaaugugguugaugu

SEQ ID NO: 731122 - RNA, 19 nt, Homo sapiens
  misc_RNA (1)...(19): siRNA sense strand
gacaagaugccacaacuga

SEQ ID NO: 731123 - RNA, 19 nt, Homo sapiens
  misc_RNA (1)...(19): siRNA sense strand
ggaaacagagucacacuag

SEQ ID NO: 731124 - RNA, 19 nt, Homo sapiens
  misc_RNA (1)...(19): siRNA sense strand
ugacagugauggaaacaga

SEQ ID NO: 731125 - RNA, 19 nt, Homo sapiens
  misc_RNA (1)...(19): siRNA sense strand
caaaguaaccauaaaugug

SEQ ID NO: 731126 - RNA, 19 nt, Homo sapiens
  misc_RNA (1)...(19): siRNA sense strand
ccucaaagauccaguacug

SEQ ID NO: 731127 - RNA, 19 nt, Homo sapiens
  misc_RNA (1)...(19): siRNA sense strand
acaguggucuuucagguaa

SEQ ID NO: 731128 - RNA, 19 nt, Homo sapiens
  misc_RNA (1)...(19): siRNA sense strand
ucagaucccuacagcguuu

SEQ ID NO: 731129 - RNA, 19 nt, Homo sapiens
  misc_RNA (1)...(19): siRNA sense strand
cacuagaccuuccuauuga

SEQ ID NO: 731130 - RNA, 19 nt, Homo sapiens
  misc_RNA (1)...(19): siRNA sense strand
gaaaacaggcagaugauaa

SEQ ID NO: 731131 - RNA, 19 nt, Homo sapiens
  misc_RNA (1)...(19): siRNA sense strand
caagaugccacaacugauu

SEQ ID NO: 731132 - RNA, 19 nt, Homo sapiens
  misc_RNA (1)...(19): siRNA sense strand
caagaacugccucucgaua

SEQ ID NO: 731133 - RNA, 19 nt, Homo sapiens
  misc_RNA (1)...(19): siRNA sense strand
caaugacacuggcaugaau

SEQ ID NO: 731134 - RNA, 19 nt, Homo sapiens
  misc_RNA (1)...(19): siRNA sense strand
gaagucaguauaccagaaa

SEQ ID NO: 731135 - RNA, 19 nt, Homo sapiens
  misc_RNA (1)...(19): siRNA sense strand
gggaagagaaggauaccua

SEQ ID NO: 731136 - RNA, 19 nt, Homo sapiens
  misc_RNA (1)...(19): siRNA sense strand
guugaaagaccuuaacuug

SEQ ID NO: 731137 - RNA, 19 nt, Homo sapiens
  misc_RNA (1)...(19): siRNA sense strand
ccuuaaggcugcucagaaa

SEQ ID NO: 731138 - RNA, 19 nt, Homo sapiens
  misc_RNA (1)...(19): siRNA sense strand
ugccacagaugcugacaua

SEQ ID NO: 731139 - RNA, 19 nt, Homo sapiens
  misc_RNA (1)...(19): siRNA sense strand
uaagauacaucgucaaucc

SEQ ID NO: 731140 - RNA, 19 nt, Homo sapiens
  misc_RNA (1)...(19): siRNA sense strand
ggaaaguacaauuggguaa

SEQ ID NO: 731141 - RNA, 19 nt, Homo sapiens
  misc_RNA (1)...(19): siRNA sense strand
gauucucucuucaguguug

SEQ ID NO: 731142 - RNA, 19 nt, Homo sapiens
  misc_RNA (1)...(19): siRNA sense strand
gaaugacaauagcccaguu

SEQ ID NO: 731143 - RNA, 19 nt, Homo sapiens
  misc_RNA (1)...(19): siRNA sense strand
ggcaagugaugguggauug

SEQ ID NO: 731144 - RNA, 19 nt, Homo sapiens
  misc_RNA (1)...(19): siRNA sense strand
ucucuucaguguuguaauu

SEQ ID NO: 731145 - RNA, 19 nt, Homo sapiens
  misc_RNA (1)...(19): siRNA sense strand
gagacaagaugccacaacu

SEQ ID NO: 731146 - RNA, 19 nt, Homo sapiens
  misc_RNA (1)...(19): siRNA sense strand
acacuagaccuuccuauug

SEQ ID NO: 731147 - RNA, 19 nt, Homo sapiens
  misc_RNA (1)...(19): siRNA sense strand
gaguguuggucaaagcuaa

SEQ ID NO: 731148 - RNA, 19 nt, Homo sapiens
  misc_RNA (1)...(19): siRNA sense strand
ugacaaccacccagucuuu

SEQ ID NO: 731149 - RNA, 19 nt, Homo sapiens
  misc_RNA (1)...(19): siRNA sense strand
guacaagaccggagaugug

SEQ ID NO: 731150 - RNA, 19 nt, Homo sapiens
  misc_RNA (1)...(19): siRNA sense strand
cagccugccuuccaaauuc

SEQ ID NO: 731151 - RNA, 19 nt, Homo sapiens
  misc_RNA (1)...(19): siRNA sense strand
uuacagaccuugguuuaca

SEQ ID NO: 731152 - RNA, 19 nt, Homo sapiens
  misc_RNA (1)...(19): siRNA sense strand
gagguucguuacagcauug

SEQ ID NO: 731153 - RNA, 19 nt, Homo sapiens
  misc_RNA (1)...(19): siRNA sense strand
acaacaaacugucacaagu

SEQ ID NO: 731154 - RNA, 19 nt, Homo sapiens
  misc_RNA (1)...(19): siRNA sense strand
ugacaugcuucacagauca

SEQ ID NO: 731155 - RNA, 19 nt, Homo sapiens
  misc_RNA (1)...(19): siRNA sense strand
aaauugcucucauaacugu

SEQ ID NO: 731156 - RNA, 19 nt, Homo sapiens
  misc_RNA (1)...(19): siRNA sense strand
ggagaugugccacugauuc

SEQ ID NO: 731157 - RNA, 19 nt, Homo sapiens
  misc_RNA (1)...(19): siRNA sense strand
gacucuaucuccaauuguu

SEQ ID NO: 731158 - RNA, 19 nt, Homo sapiens
  misc_RNA (1)...(19): siRNA sense strand
ggaggaaacacaagagauc

SEQ ID NO: 731159 - RNA, 19 nt, Homo sapiens
  misc_RNA (1)...(19): siRNA sense strand
ugaggauggugguagagua

SEQ ID NO: 731160 - RNA, 19 nt, Homo sapiens
  misc_RNA (1)...(19): siRNA sense strand
uaaggccaguauucaguaa

SEQ ID NO: 731161 - RNA, 19 nt, Homo sapiens
  misc_RNA (1)...(19): siRNA sense strand
ucaaagaaccacuggauag

SEQ ID NO: 731162 - RNA, 19 nt, Homo sapiens
  misc_RNA (1)...(19): siRNA sense strand
caacaaacugucacaagug

SEQ ID NO: 731163 - RNA, 19 nt, Homo sapiens
  misc_RNA (1)...(19): siRNA sense strand
cagcaacaguuaucaacau

SEQ ID NO: 731164 - RNA, 19 nt, Homo sapiens
  misc_RNA (1)...(19): siRNA sense strand
ggaguuagauagggaagag

SEQ ID NO: 731165 - RNA, 19 nt, Homo sapiens
  misc_RNA (1)...(19): siRNA sense strand
gugacucuaucuccaauug

SEQ ID NO: 731166 - RNA, 19 nt, Homo sapiens
  misc_RNA (1)...(19): siRNA sense strand
augcuacacugauuaauga

SEQ ID NO: 731167 - RNA, 19 nt, Homo sapiens
  misc_RNA (1)...(19): siRNA sense strand
gguagaguaucacguucuu

SEQ ID NO: 731168 - RNA, 19 nt, Homo sapiens
  misc_RNA (1)...(19): siRNA sense strand
ucaaucuguucgugaauga

SEQ ID NO: 731169 - RNA, 19 nt, Homo sapiens
  misc_RNA (1)...(19): siRNA sense strand
gcugauguauccucaccaa

SEQ ID NO: 731170 - RNA, 19 nt, Homo sapiens
  misc_RNA (1)...(19): siRNA sense strand
ucgcauugaucgugagaaa

SEQ ID NO: 731171 - RNA, 19 nt, Homo sapiens
  misc_RNA (1)...(19): siRNA sense strand
guaacuacaccuacuacuu

SEQ ID NO: 731172 - RNA, 19 nt, Homo sapiens
  misc_RNA (1)...(19): siRNA sense strand
ccaaugcuacacugauuaa

SEQ ID NO: 731173 - RNA, 19 nt, Homo sapiens
  misc_RNA (1)...(19): siRNA sense strand
aaacaggcaacauaacauu

SEQ ID NO: 731174 - RNA, 19 nt, Homo sapiens
  misc_RNA (1)...(19): siRNA sense strand
gaaacaggcaacauaacau

SEQ ID NO: 731175 - RNA, 19 nt, Homo sapiens
  misc_RNA (1)...(19): siRNA sense strand
ggacuaaucacuguaacug

SEQ ID NO: 731176 - RNA, 19 nt, Homo sapiens
  misc_RNA (1)...(19): siRNA sense strand
caaaauugcucucauaacu

SEQ ID NO: 731177 - RNA, 19 nt, Homo sapiens
  misc_RNA (1)...(19): siRNA sense strand
acacaguuguucuuucaga

SEQ ID NO: 731178 - RNA, 19 nt, Homo sapiens
  misc_RNA (1)...(19): siRNA sense strand
ugaagucaguauaccagaa

SEQ ID NO: 731179 - RNA, 19 nt, Homo sapiens
  misc_RNA (1)...(19): siRNA sense strand
caucgucaauccugucaau

SEQ ID NO: 731180 - RNA, 19 nt, Homo sapiens
  misc_RNA (1)...(19): siRNA sense strand
ccaaaguaaccauaaaugu

SEQ ID NO: 731181 - RNA, 19 nt, Homo sapiens
  misc_RNA (1)...(19): siRNA sense strand
ggauggugguagaguauca

SEQ ID NO: 731182 - RNA, 19 nt, Homo sapiens
  misc_RNA (1)...(19): siRNA sense strand
caaugucacagucuuugua

SEQ ID NO: 731183 - RNA, 19 nt, Homo sapiens
  misc_RNA (1)...(19): siRNA sense strand
auacugagauagcugaugu

SEQ ID NO: 731184 - RNA, 19 nt, Homo sapiens
  misc_RNA (1)...(19): siRNA sense strand
aaacuaaggcagaugaugu

SEQ ID NO: 731185 - RNA, 19 nt, Homo sapiens
  misc_RNA (1)...(19): siRNA sense strand
gaaauuaugugcugguauc

SEQ ID NO: 731186 - RNA, 19 nt, Homo sapiens
  misc_RNA (1)...(19): siRNA sense strand
caagagaucuguuugcaau

SEQ ID NO: 731187 - RNA, 19 nt, Homo sapiens
  misc_RNA (1)...(19): siRNA sense strand
gaugguggcuuuccucaaa

SEQ ID NO: 731188 - RNA, 19 nt, Homo sapiens
  misc_RNA (1)...(19): siRNA sense strand
ggagaaaugugauguuaca

SEQ ID NO: 731189 - RNA, 19 nt, Homo sapiens
  misc_RNA (1)...(19): siRNA sense strand
caccauaacugucguugua

SEQ ID NO: 731190 - RNA, 19 nt, Homo sapiens
  misc_RNA (1)...(19): siRNA sense strand
gcaaugcucuucaucaaag

SEQ ID NO: 731191 - RNA, 19 nt, Homo sapiens
  misc_RNA (1)...(19): siRNA sense strand
ggagacaauucugcaguua

SEQ ID NO: 731192 - RNA, 19 nt, Homo sapiens
  misc_RNA (1)...(19): siRNA sense strand
uaacuacaccuacuacuuu

SEQ ID NO: 731193 - RNA, 19 nt, Homo sapiens
  misc_RNA (1)...(19): siRNA sense strand
ugaaagaccuuaacuuguc

SEQ ID NO: 731194 - RNA, 19 nt, Homo sapiens
  misc_RNA (1)...(19): siRNA sense strand
ugaagaaacuagauagaga

SEQ ID NO: 731195 - RNA, 19 nt, Homo sapiens
  misc_RNA (1)...(19): siRNA sense strand
ccaagaaacaggcaacaua

SEQ ID NO: 731196 - RNA, 19 nt, Homo sapiens
  misc_RNA (1)...(19): siRNA sense strand
gaaaguaaagguugaagau

SEQ ID NO: 731197 - RNA, 19 nt, Homo sapiens
  misc_RNA (1)...(19): siRNA sense strand
cagaugauguugacaguga

SEQ ID NO: 731198 - RNA, 19 nt, Homo sapiens
  misc_RNA (1)...(19): siRNA sense strand
caagaaacaggcaacauaa

SEQ ID NO: 731199 - RNA, 19 nt, Homo sapiens
  misc_RNA (1)...(19): siRNA sense strand
gcaguuacgcucuccauuu

SEQ ID NO: 731200 - RNA, 19 nt, Homo sapiens
  misc_RNA (1)...(19): siRNA sense strand
gagauuauuucaccucaau

SEQ ID NO: 731201 - RNA, 19 nt, Homo sapiens
  misc_RNA (1)...(19): siRNA sense strand
ccacuggacuuaucacaau

SEQ ID NO: 731202 - RNA, 19 nt, Homo sapiens
  misc_RNA (1)...(19): siRNA sense strand
gaaacagagucacacuaga

SEQ ID NO: 731203 - RNA, 19 nt, Homo sapiens
  misc_RNA (1)...(19): siRNA sense strand
gaccaaugcuacacugauu

SEQ ID NO: 731204 - RNA, 19 nt, Homo sapiens
  misc_RNA (1)...(19): siRNA sense strand
gagaagaaauuccagaaaa

SEQ ID NO: 731205 - RNA, 19 nt, Homo sapiens
  misc_RNA (1)...(19): siRNA sense strand
gauguauccucaccaacua

SEQ ID NO: 731206 - RNA, 19 nt, Homo sapiens
  misc_RNA (1)...(19): siRNA sense strand
gcauugaucgugagaaauu

SEQ ID NO: 731207 - RNA, 19 nt, Homo sapiens
  misc_RNA (1)...(19): siRNA sense strand
caacauugccaggagauua

SEQ ID NO: 731208 - RNA, 19 nt, Homo sapiens
  misc_RNA (1)...(19): siRNA sense strand
gaagaaacuagauagagaa

SEQ ID NO: 731209 - RNA, 19 nt, Homo sapiens
  misc_RNA (1)...(19): siRNA sense strand
caucacugcuguaguaaga

SEQ ID NO: 731210 - RNA, 19 nt, Homo sapiens
  misc_RNA (1)...(19): siRNA sense strand
uuucaucacugcuguagua

SEQ ID NO: 731211 - RNA, 19 nt, Homo sapiens
  misc_RNA (1)...(19): siRNA sense strand
uaacugauccugauuaugg

SEQ ID NO: 731212 - RNA, 19 nt, Homo sapiens
  misc_RNA (1)...(19): siRNA sense strand
caacaguuaucaacauauc

SEQ ID NO: 731213 - RNA, 19 nt, Homo sapiens
  misc_RNA (1)...(19): siRNA sense strand
ugacacaguuguucuuuca

SEQ ID NO: 731214 - RNA, 19 nt, Homo sapiens
  misc_RNA (1)...(19): siRNA sense strand
gguugaagaugguggcuuu

SEQ ID NO: 731215 - RNA, 19 nt, Homo sapiens
  misc_RNA (1)...(19): siRNA sense strand
gagaaauuaugugcuggua

SEQ ID NO: 731216 - RNA, 19 nt, Homo sapiens
  misc_RNA (1)...(19): siRNA sense strand
ggugucauccgaccaaaua

SEQ ID NO: 731217 - RNA, 19 nt, Homo sapiens
  misc_RNA (1)...(19): siRNA sense strand
caauggugcugguaaaugu

SEQ ID NO: 731218 - RNA, 19 nt, Homo sapiens
  misc_RNA (1)...(19): siRNA sense strand
ggacuuaucacaaucaaag

SEQ ID NO: 731219 - RNA, 19 nt, Homo sapiens
  misc_RNA (1)...(19): siRNA sense strand
ccacuucucuuucagcaau

SEQ ID NO: 731220 - RNA, 19 nt, Homo sapiens
  misc_RNA (1)...(19): siRNA sense strand
ucauaacugugacggauaa

SEQ ID NO: 731221 - RNA, 19 nt, Homo sapiens
  misc_RNA (1)...(19): siRNA sense strand
ccauaaaugugguugaugu

SEQ ID NO: 731222 - RNA, 19 nt, Homo sapiens
  misc_RNA (1)...(19): siRNA sense strand
gacaagaugccacaacuga

SEQ ID NO: 731223 - RNA, 19 nt, Homo sapiens
  misc_RNA (1)...(19): siRNA sense strand
ggaaacagagucacacuag

SEQ ID NO: 731224 - RNA, 19 nt, Homo sapiens
  misc_RNA (1)...(19): siRNA sense strand
ugacagugauggaaacaga

SEQ ID NO: 731225 - RNA, 19 nt, Homo sapiens
  misc_RNA (1)...(19): siRNA sense strand
caaaguaaccauaaaugug

SEQ ID NO: 731226 - RNA, 19 nt, Homo sapiens
  misc_RNA (1)...(19): siRNA sense strand
ccucaaagauccaguacug

SEQ ID NO: 731227 - RNA, 19 nt, Homo sapiens
  misc_RNA (1)...(19): siRNA sense strand
acaguggucuuucagguaa

SEQ ID NO: 731228 - RNA, 19 nt, Homo sapiens
  misc_RNA (1)...(19): siRNA sense strand
ucagaucccuacagcguuu

SEQ ID NO: 731229 - RNA, 19 nt, Homo sapiens
  misc_RNA (1)...(19): siRNA sense strand
cacuagaccuuccuauuga

SEQ ID NO: 731230 - RNA, 19 nt, Homo sapiens
  misc_RNA (1)...(19): siRNA sense strand
gaaaacaggcagaugauaa

SEQ ID NO: 731231 - RNA, 19 nt, Homo sapiens
  misc_RNA (1)...(19): siRNA sense strand
caagaugccacaacugauu

SEQ ID NO: 731232 - RNA, 19 nt, Homo sapiens
  misc_RNA (1)...(19): siRNA sense strand
caagaacugccucucgaua

SEQ ID NO: 731233 - RNA, 19 nt, Homo sapiens
  misc_RNA (1)...(19): siRNA sense strand
caaugacacuggcaugaau

SEQ ID NO: 731234 - RNA, 19 nt, Homo sapiens
  misc_RNA (1)...(19): siRNA sense strand
gaagucaguauaccagaaa

SEQ ID NO: 731235 - RNA, 19 nt, Homo sapiens
  misc_RNA (1)...(19): siRNA sense strand
gggaagagaaggauaccua

SEQ ID NO: 731236 - RNA, 19 nt, Homo sapiens
  misc_RNA (1)...(19): siRNA sense strand
guugaaagaccuuaacuug

SEQ ID NO: 731237 - RNA, 19 nt, Homo sapiens
  misc_RNA (1)...(19): siRNA sense strand
ccuuaaggcugcucagaaa

SEQ ID NO: 731238 - RNA, 19 nt, Homo sapiens
  misc_RNA (1)...(19): siRNA sense strand
ugccacagaugcugacaua

SEQ ID NO: 731239 - RNA, 19 nt, Homo sapiens
  misc_RNA (1)...(19): siRNA sense strand
uaagauacaucgucaaucc

SEQ ID NO: 731240 - RNA, 19 nt, Homo sapiens
  misc_RNA (1)...(19): siRNA sense strand
ggaaaguacaauuggguaa

SEQ ID NO: 731241 - RNA, 19 nt, Homo sapiens
  misc_RNA (1)...(19): siRNA sense strand
gauucucucuucaguguug

SEQ ID NO: 731242 - RNA, 19 nt, Homo sapiens
  misc_RNA (1)...(19): siRNA sense strand
gaaugacaauagcccaguu

SEQ ID NO: 731243 - RNA, 19 nt, Homo sapiens
  misc_RNA (1)...(19): siRNA sense strand
ggcaagugaugguggauug

SEQ ID NO: 731244 - RNA, 19 nt, Homo sapiens
  misc_RNA (1)...(19): siRNA sense strand
ucucuucaguguuguaauu

SEQ ID NO: 731245 - RNA, 19 nt, Homo sapiens
  misc_RNA (1)...(19): siRNA sense strand
gagacaagaugccacaacu

SEQ ID NO: 731246 - RNA, 19 nt, Homo sapiens
  misc_RNA (1)...(19): siRNA sense strand
acacuagaccuuccuauug

SEQ ID NO: 731247 - RNA, 19 nt, Homo sapiens
  misc_RNA (1)...(19): siRNA sense strand
gaguguuggucaaagcuaa

SEQ ID NO: 731248 - RNA, 19 nt, Homo sapiens
  misc_RNA (1)...(19): siRNA sense strand
ugacaaccacccagucuuu

SEQ ID NO: 731249 - RNA, 19 nt, Homo sapiens
  misc_RNA (1)...(19): siRNA sense strand
guacaagaccggagaugug

SEQ ID NO: 731250 - RNA, 19 nt, Homo sapiens
  misc_RNA (1)...(19): siRNA sense strand
cagccugccuuccaaauuc

SEQ ID NO: 731251 - RNA, 19 nt, Homo sapiens
  misc_RNA (1)...(19): siRNA sense strand
uuacagaccuugguuuaca

SEQ ID NO: 731252 - RNA, 19 nt, Homo sapiens
  misc_RNA (1)...(19): siRNA sense strand
gagguucguuacagcauug

SEQ ID NO: 731253 - RNA, 19 nt, Homo sapiens
  misc_RNA (1)...(19): siRNA sense strand
acaacaaacugucacaagu

SEQ ID NO: 731254 - RNA, 19 nt, Homo sapiens
  misc_RNA (1)...(19): siRNA sense strand
ugacaugcuucacagauca

SEQ ID NO: 731255 - RNA, 19 nt, Homo sapiens
  misc_RNA (1)...(19): siRNA sense strand
aaauugcucucauaacugu

SEQ ID NO: 731256 - RNA, 19 nt, Homo sapiens
  misc_RNA (1)...(19): siRNA sense strand
ggagaugugccacugauuc

SEQ ID NO: 731257 - RNA, 19 nt, Homo sapiens
  misc_RNA (1)...(19): siRNA sense strand
gacucuaucuccaauuguu

SEQ ID NO: 731258 - RNA, 19 nt, Homo sapiens
  misc_RNA (1)...(19): siRNA sense strand
ggaggaaacacaagagauc

SEQ ID NO: 731259 - RNA, 19 nt, Homo sapiens
  misc_RNA (1)...(19): siRNA sense strand
ugaggauggugguagagua

SEQ ID NO: 731260 - RNA, 19 nt, Homo sapiens
  misc_RNA (1)...(19): siRNA sense strand
uaaggccaguauucaguaa

SEQ ID NO: 731261 - RNA, 19 nt, Homo sapiens
  misc_RNA (1)...(19): siRNA sense strand
ucaaagaaccacuggauag

SEQ ID NO: 731262 - RNA, 19 nt, Homo sapiens
  misc_RNA (1)...(19): siRNA sense strand
caacaaacugucacaagug

SEQ ID NO: 731263 - RNA, 19 nt, Homo sapiens
  misc_RNA (1)...(19): siRNA sense strand
cagcaacaguuaucaacau

SEQ ID NO: 731264 - RNA, 19 nt, Homo sapiens
  misc_RNA (1)...(19): siRNA sense strand
ggaguuagauagggaagag

SEQ ID NO: 731265 - RNA, 19 nt, Homo sapiens
  misc_RNA (1)...(19): siRNA sense strand
gugacucuaucuccaauug

SEQ ID NO: 731266 - RNA, 19 nt, Homo sapiens
  misc_RNA (1)...(19): siRNA sense strand
augcuacacugauuaauga

SEQ ID NO: 731267 - RNA, 19 nt, Homo sapiens
  misc_RNA (1)...(19): siRNA sense strand
gguagaguaucacguucuu

SEQ ID NO: 731268 - RNA, 19 nt, Homo sapiens
  misc_RNA (1)...(19): siRNA sense strand
ucaaucuguucgugaauga

SEQ ID NO: 731269 - RNA, 19 nt, Homo sapiens
  misc_RNA (1)...(19): siRNA sense strand
gcugauguauccucaccaa

SEQ ID NO: 731270 - RNA, 19 nt, Homo sapiens
  misc_RNA (1)...(19): siRNA sense strand
ucgcauugaucgugagaaa

SEQ ID NO: 731271 - RNA, 19 nt, Homo sapiens
  misc_RNA (1)...(19): siRNA sense strand
guaacuacaccuacuacuu

SEQ ID NO: 731272 - RNA, 19 nt, Homo sapiens
  misc_RNA (1)...(19): siRNA sense strand
ccaaugcuacacugauuaa

SEQ ID NO: 731273 - RNA, 19 nt, Homo sapiens
  misc_RNA (1)...(19): siRNA sense strand
aaacaggcaacauaacauu

SEQ ID NO: 731274 - RNA, 19 nt, Homo sapiens
  misc_RNA (1)...(19): siRNA sense strand
gaaacaggcaacauaacau

SEQ ID NO: 731275 - RNA, 19 nt, Homo sapiens
  misc_RNA (1)...(19): siRNA sense strand
ggacuaaucacuguaacug

SEQ ID NO: 731276 - RNA, 19 nt, Homo sapiens
  misc_RNA (1)...(19): siRNA sense strand
caaaauugcucucauaacu

SEQ ID NO: 731277 - RNA, 19 nt, Homo sapiens
  misc_RNA (1)...(19): siRNA sense strand
acacaguuguucuuucaga

SEQ ID NO: 731278 - RNA, 19 nt, Homo sapiens
  misc_RNA (1)...(19): siRNA sense strand
ugaagucaguauaccagaa

SEQ ID NO: 731279 - RNA, 19 nt, Homo sapiens
  misc_RNA (1)...(19): siRNA sense strand
caucgucaauccugucaau

SEQ ID NO: 731280 - RNA, 19 nt, Homo sapiens
  misc_RNA (1)...(19): siRNA sense strand
ccaaaguaaccauaaaugu

SEQ ID NO: 731281 - RNA, 19 nt, Homo sapiens
  misc_RNA (1)...(19): siRNA sense strand
ggauggugguagaguauca

SEQ ID NO: 731282 - RNA, 19 nt, Homo sapiens
  misc_RNA (1)...(19): siRNA sense strand
caaugucacagucuuugua

SEQ ID NO: 731283 - RNA, 19 nt, Homo sapiens
  misc_RNA (1)...(19): siRNA sense strand
auacugagauagcugaugu

SEQ ID NO: 731284 - RNA, 19 nt, Homo sapiens
  misc_RNA (1)...(19): siRNA sense strand
aaacuaaggcagaugaugu

SEQ ID NO: 731285 - RNA, 19 nt, Homo sapiens
  misc_RNA (1)...(19): siRNA sense strand
gaaauuaugugcugguauc

SEQ ID NO: 731286 - RNA, 19 nt, Homo sapiens
  misc_RNA (1)...(19): siRNA sense strand
caagagaucuguuugcaau

SEQ ID NO: 731287 - RNA, 19 nt, Homo sapiens
  misc_RNA (1)...(19): siRNA sense strand
gaugguggcuuuccucaaa

SEQ ID NO: 731288 - RNA, 19 nt, Homo sapiens
  misc_RNA (1)...(19): siRNA sense strand
ggagaaaugugauguuaca

SEQ ID NO: 731289 - RNA, 19 nt, Homo sapiens
  misc_RNA (1)...(19): siRNA sense strand
caccauaacugucguugua

SEQ ID NO: 731290 - RNA, 19 nt, Homo sapiens
  misc_RNA (1)...(19): siRNA sense strand
gcaaugcucuucaucaaag

SEQ ID NO: 731291 - RNA, 19 nt, Homo sapiens
  misc_RNA (1)...(19): siRNA sense strand
ggagacaauucugcaguua

SEQ ID NO: 731292 - RNA, 19 nt, Homo sapiens
  misc_RNA (1)...(19): siRNA sense strand
uaacuacaccuacuacuuu

SEQ ID NO: 731293 - RNA, 19 nt, Homo sapiens
  misc_RNA (1)...(19): siRNA sense strand
ugaaagaccuuaacuuguc

SEQ ID NO: 731294 - RNA, 19 nt, Homo sapiens
  misc_RNA (1)...(19): siRNA sense strand
ugaagaaacuagauagaga

SEQ ID NO: 731295 - RNA, 19 nt, Homo sapiens
  misc_RNA (1)...(19): siRNA sense strand
ccaagaaacaggcaacaua

SEQ ID NO: 731296 - RNA, 19 nt, Homo sapiens
  misc_RNA (1)...(19): siRNA sense strand
gaaaguaaagguugaagau

SEQ ID NO: 731297 - RNA, 19 nt, Homo sapiens
  misc_RNA (1)...(19): siRNA sense strand
cagaugauguugacaguga

SEQ ID NO: 731298 - RNA, 19 nt, Homo sapiens
  misc_RNA (1)...(19): siRNA sense strand
caagaaacaggcaacauaa

SEQ ID NO: 731299 - RNA, 19 nt, Homo sapiens
  misc_RNA (1)...(19): siRNA sense strand
gcaguuacgcucuccauuu

SEQ ID NO: 731300 - RNA, 19 nt, Homo sapiens
  misc_RNA (1)...(19): siRNA sense strand
gagauuauuucaccucaau

SEQ ID NO: 731301 - RNA, 19 nt, Homo sapiens
  misc_RNA (1)...(19): siRNA sense strand
ccacuggacuuaucacaau

SEQ ID NO: 731302 - RNA, 19 nt, Homo sapiens
  misc_RNA (1)...(19): siRNA sense strand
gaaacagagucacacuaga

SEQ ID NO: 731303 - RNA, 19 nt, Homo sapiens
  misc_RNA (1)...(19): siRNA sense strand
gaccaaugcuacacugauu

SEQ ID NO: 731304 - RNA, 19 nt, Homo sapiens
  misc_RNA (1)...(19): siRNA sense strand
gagaagaaauuccagaaaa

SEQ ID NO: 731305 - RNA, 19 nt, Homo sapiens
  misc_RNA (1)...(19): siRNA sense strand
gauguauccucaccaacua

SEQ ID NO: 731306 - RNA, 19 nt, Homo sapiens
  misc_RNA (1)...(19): siRNA sense strand
gcauugaucgugagaaauu

SEQ ID NO: 731307 - RNA, 19 nt, Homo sapiens
  misc_RNA (1)...(19): siRNA sense strand
caacauugccaggagauua

SEQ ID NO: 731308 - RNA, 19 nt, Homo sapiens
  misc_RNA (1)...(19): siRNA sense strand
gaagaaacuagauagagaa

SEQ ID NO: 731309 - RNA, 19 nt, Homo sapiens
  misc_RNA (1)...(19): siRNA sense strand
caucacugcuguaguaaga

SEQ ID NO: 731310 - RNA, 19 nt, Homo sapiens
  misc_RNA (1)...(19): siRNA sense strand
uuucaucacugcuguagua

SEQ ID NO: 731311 - RNA, 19 nt, Homo sapiens
  misc_RNA (1)...(19): siRNA sense strand
uaacugauccugauuaugg

SEQ ID NO: 731312 - RNA, 19 nt, Homo sapiens
  misc_RNA (1)...(19): siRNA sense strand
caacaguuaucaacauauc

SEQ ID NO: 731313 - RNA, 19 nt, Homo sapiens
  misc_RNA (1)...(19): siRNA sense strand
ugacacaguuguucuuuca

SEQ ID NO: 731314 - RNA, 19 nt, Homo sapiens
  misc_RNA (1)...(19): siRNA sense strand
gguugaagaugguggcuuu

SEQ ID NO: 731315 - RNA, 19 nt, Homo sapiens
  misc_RNA (1)...(19): siRNA sense strand
gagaaauuaugugcuggua

SEQ ID NO: 731316 - RNA, 19 nt, Homo sapiens
  misc_RNA (1)...(19): siRNA sense strand
ggugucauccgaccaaaua

SEQ ID NO: 731317 - RNA, 19 nt, Homo sapiens
  misc_RNA (1)...(19): siRNA sense strand
caauggugcugguaaaugu

SEQ ID NO: 731318 - RNA, 19 nt, Homo sapiens
  misc_RNA (1)...(19): siRNA sense strand
ggacuuaucacaaucaaag

SEQ ID NO: 731319 - RNA, 19 nt, Homo sapiens
  misc_RNA (1)...(19): siRNA sense strand
ccacuucucuuucagcaau

SEQ ID NO: 731320 - RNA, 19 nt, Homo sapiens
  misc_RNA (1)...(19): siRNA sense strand
ucauaacugugacggauaa

SEQ ID NO: 731321 - RNA, 19 nt, Homo sapiens
  misc_RNA (1)...(19): siRNA sense strand
ccauaaaugugguugaugu

SEQ ID NO: 731322 - RNA, 19 nt, Homo sapiens
  misc_RNA (1)...(19): siRNA sense strand
gacaagaugccacaacuga

SEQ ID NO: 731323 - RNA, 19 nt, Homo sapiens
  misc_RNA (1)...(19): siRNA sense strand
ggaaacagagucacacuag

SEQ ID NO: 731324 - RNA, 19 nt, Homo sapiens
  misc_RNA (1)...(19): siRNA sense strand
ugacagugauggaaacaga

SEQ ID NO: 731325 - RNA, 19 nt, Homo sapiens
  misc_RNA (1)...(19): siRNA sense strand
caaaguaaccauaaaugug

SEQ ID NO: 731326 - RNA, 19 nt, Homo sapiens
  misc_RNA (1)...(19): siRNA sense strand
ccucaaagauccaguacug

SEQ ID NO: 731327 - RNA, 19 nt, Homo sapiens
  misc_RNA (1)...(19): siRNA sense strand
acaguggucuuucagguaa

SEQ ID NO: 731328 - RNA, 19 nt, Homo sapiens
  misc_RNA (1)...(19): siRNA sense strand
ucagaucccuacagcguuu

SEQ ID NO: 731329 - RNA, 19 nt, Homo sapiens
  misc_RNA (1)...(19): siRNA sense strand
cacuagaccuuccuauuga

SEQ ID NO: 731330 - RNA, 19 nt, Homo sapiens
  misc_RNA (1)...(19): siRNA sense strand
gaaaacaggcagaugauaa

SEQ ID NO: 731331 - RNA, 19 nt, Homo sapiens
  misc_RNA (1)...(19): siRNA sense strand
caagaugccacaacugauu

SEQ ID NO: 731332 - RNA, 19 nt, Homo sapiens
  misc_RNA (1)...(19): siRNA sense strand
caagaacugccucucgaua

SEQ ID NO: 731333 - RNA, 19 nt, Homo sapiens
  misc_RNA (1)...(19): siRNA sense strand
caaugacacuggcaugaau

SEQ ID NO: 731334 - RNA, 19 nt, Homo sapiens
  misc_RNA (1)...(19): siRNA sense strand
gaagucaguauaccagaaa

SEQ ID NO: 731335 - RNA, 19 nt, Homo sapiens
  misc_RNA (1)...(19): siRNA sense strand
gggaagagaaggauaccua

SEQ ID NO: 731336 - RNA, 19 nt, Homo sapiens
  misc_RNA (1)...(19): siRNA sense strand
guugaaagaccuuaacuug

SEQ ID NO: 731337 - RNA, 19 nt, Homo sapiens
  misc_RNA (1)...(19): siRNA sense strand
ccuuaaggcugcucagaaa

SEQ ID NO: 731338 - RNA, 19 nt, Homo sapiens
  misc_RNA (1)...(19): siRNA sense strand
ugccacagaugcugacaua

SEQ ID NO: 731339 - RNA, 19 nt, Homo sapiens
  misc_RNA (1)...(19): siRNA sense strand
uaagauacaucgucaaucc

SEQ ID NO: 731340 - RNA, 19 nt, Homo sapiens
  misc_RNA (1)...(19): siRNA sense strand
ggaaaguacaauuggguaa

SEQ ID NO: 731341 - RNA, 19 nt, Homo sapiens
  misc_RNA (1)...(19): siRNA sense strand
gauucucucuucaguguug

SEQ ID NO: 731342 - RNA, 19 nt, Homo sapiens
  misc_RNA (1)...(19): siRNA sense strand
gaaugacaauagcccaguu

SEQ ID NO: 731343 - RNA, 19 nt, Homo sapiens
  misc_RNA (1)...(19): siRNA sense strand
ggcaagugaugguggauug

SEQ ID NO: 731344 - RNA, 19 nt, Homo sapiens
  misc_RNA (1)...(19): siRNA sense strand
ucucuucaguguuguaauu

SEQ ID NO: 731345 - RNA, 19 nt, Homo sapiens
  misc_RNA (1)...(19): siRNA sense strand
gagacaagaugccacaacu

SEQ ID NO: 731346 - RNA, 19 nt, Homo sapiens
  misc_RNA (1)...(19): siRNA sense strand
acacuagaccuuccuauug

SEQ ID NO: 731347 - RNA, 19 nt, Homo sapiens
  misc_RNA (1)...(19): siRNA sense strand
gaguguuggucaaagcuaa

SEQ ID NO: 731348 - RNA, 19 nt, Homo sapiens
  misc_RNA (1)...(19): siRNA sense strand
ugacaaccacccagucuuu

SEQ ID NO: 731349 - RNA, 19 nt, Homo sapiens
  misc_RNA (1)...(19): siRNA sense strand
guacaagaccggagaugug

SEQ ID NO: 731350 - RNA, 19 nt, Homo sapiens
  misc_RNA (1)...(19): siRNA sense strand
cagccugccuuccaaauuc

SEQ ID NO: 731351 - RNA, 19 nt, Homo sapiens
  misc_RNA (1)...(19): siRNA sense strand
uuacagaccuugguuuaca

SEQ ID NO: 731352 - RNA, 19 nt, Homo sapiens
  misc_RNA (1)...(19): siRNA sense strand
gagguucguuacagcauug

SEQ ID NO: 731353 - RNA, 19 nt, Homo sapiens
  misc_RNA (1)...(19): siRNA sense strand
acaacaaacugucacaagu

SEQ ID NO: 731354 - RNA, 19 nt, Homo sapiens
  misc_RNA (1)...(19): siRNA sense strand
ugacaugcuucacagauca

SEQ ID NO: 731355 - RNA, 19 nt, Homo sapiens
  misc_RNA (1)...(19): siRNA sense strand
aaauugcucucauaacugu

SEQ ID NO: 731356 - RNA, 19 nt, Homo sapiens
  misc_RNA (1)...(19): siRNA sense strand
ggagaugugccacugauuc

SEQ ID NO: 731357 - RNA, 19 nt, Homo sapiens
  misc_RNA (1)...(19): siRNA sense strand
gacucuaucuccaauuguu

SEQ ID NO: 731358 - RNA, 19 nt, Homo sapiens
  misc_RNA (1)...(19): siRNA sense strand
ggaggaaacacaagagauc

SEQ ID NO: 731359 - RNA, 19 nt, Homo sapiens
  misc_RNA (1)...(19): siRNA sense strand
ugaggauggugguagagua

SEQ ID NO: 731360 - RNA, 19 nt, Homo sapiens
  misc_RNA (1)...(19): siRNA sense strand
uaaggccaguauucaguaa

SEQ ID NO: 731361 - RNA, 19 nt, Homo sapiens
  misc_RNA (1)...(19): siRNA sense strand
ucaaagaaccacuggauag

SEQ ID NO: 731362 - RNA, 19 nt, Homo sapiens
  misc_RNA (1)...(19): siRNA sense strand
caacaaacugucacaagug

SEQ ID NO: 731363 - RNA, 19 nt, Homo sapiens
  misc_RNA (1)...(19): siRNA sense strand
cagcaacaguuaucaacau

SEQ ID NO: 731364 - RNA, 19 nt, Homo sapiens
  misc_RNA (1)...(19): siRNA sense strand
ggaguuagauagggaagag

SEQ ID NO: 731365 - RNA, 19 nt, Homo sapiens
  misc_RNA (1)...(19): siRNA sense strand
gugacucuaucuccaauug

SEQ ID NO: 731366 - RNA, 19 nt, Homo sapiens
  misc_RNA (1)...(19): siRNA sense strand
augcuacacugauuaauga

SEQ ID NO: 731367 - RNA, 19 nt, Homo sapiens
  misc_RNA (1)...(19): siRNA sense strand
gguagaguaucacguucuu

SEQ ID NO: 731368 - RNA, 19 nt, Homo sapiens
  misc_RNA (1)...(19): siRNA sense strand
ucaaucuguucgugaauga

SEQ ID NO: 731369 - RNA, 19 nt, Homo sapiens
  misc_RNA (1)...(19): siRNA sense strand
gcugauguauccucaccaa

SEQ ID NO: 731370 - RNA, 19 nt, Homo sapiens
  misc_RNA (1)...(19): siRNA sense strand
ucgcauugaucgugagaaa

SEQ ID NO: 731371 - RNA, 19 nt, Homo sapiens
  misc_RNA (1)...(19): siRNA sense strand
guaacuacaccuacuacuu

SEQ ID NO: 731372 - RNA, 19 nt, Homo sapiens
  misc_RNA (1)...(19): siRNA sense strand
ccaaugcuacacugauuaa

SEQ ID NO: 731373 - RNA, 19 nt, Homo sapiens
  misc_RNA (1)...(19): siRNA sense strand
aaacaggcaacauaacauu

SEQ ID NO: 731374 - RNA, 19 nt, Homo sapiens
  misc_RNA (1)...(19): siRNA sense strand
gaaacaggcaacauaacau

SEQ ID NO: 731375 - RNA, 19 nt, Homo sapiens
  misc_RNA (1)...(19): siRNA sense strand
ggacuaaucacuguaacug

SEQ ID NO: 731376 - RNA, 19 nt, Homo sapiens
  misc_RNA (1)...(19): siRNA sense strand
caaaauugcucucauaacu

SEQ ID NO: 731377 - RNA, 19 nt, Homo sapiens
  misc_RNA (1)...(19): siRNA sense strand
acacaguuguucuuucaga

SEQ ID NO: 731378 - RNA, 19 nt, Homo sapiens
  misc_RNA (1)...(19): siRNA sense strand
ugaagucaguauaccagaa

SEQ ID NO: 731379 - RNA, 19 nt, Homo sapiens
  misc_RNA (1)...(19): siRNA sense strand
caucgucaauccugucaau

SEQ ID NO: 731380 - RNA, 19 nt, Homo sapiens
  misc_RNA (1)...(19): siRNA sense strand
ccaaaguaaccauaaaugu

SEQ ID NO: 731381 - RNA, 19 nt, Homo sapiens
  misc_RNA (1)...(19): siRNA sense strand
ggauggugguagaguauca

SEQ ID NO: 731382 - RNA, 19 nt, Homo sapiens
  misc_RNA (1)...(19): siRNA sense strand
caaugucacagucuuugua

SEQ ID NO: 731383 - RNA, 19 nt, Homo sapiens
  misc_RNA (1)...(19): siRNA sense strand
auacugagauagcugaugu

SEQ ID NO: 731384 - RNA, 19 nt, Homo sapiens
  misc_RNA (1)...(19): siRNA sense strand
aaacuaaggcagaugaugu

SEQ ID NO: 731385 - RNA, 19 nt, Homo sapiens
  misc_RNA (1)...(19): siRNA sense strand
gaaauuaugugcugguauc

SEQ ID NO: 731386 - RNA, 19 nt, Homo sapiens
  misc_RNA (1)...(19): siRNA sense strand
caagagaucuguuugcaau

SEQ ID NO: 731387 - RNA, 19 nt, Homo sapiens
  misc_RNA (1)...(19): siRNA sense strand
gaugguggcuuuccucaaa

SEQ ID NO: 731388 - RNA, 19 nt, Homo sapiens
  misc_RNA (1)...(19): siRNA sense strand
ggagaaaugugauguuaca

SEQ ID NO: 731389 - RNA, 19 nt, Homo sapiens
  misc_RNA (1)...(19): siRNA sense strand
caccauaacugucguugua

SEQ ID NO: 731390 - RNA, 19 nt, Homo sapiens
  misc_RNA (1)...(19): siRNA sense strand
gcaaugcucuucaucaaag

SEQ ID NO: 731391 - RNA, 19 nt, Homo sapiens
  misc_RNA (1)...(19): siRNA sense strand
ggagacaauucugcaguua

SEQ ID NO: 731392 - RNA, 19 nt, Homo sapiens
  misc_RNA (1)...(19): siRNA sense strand
uaacuacaccuacuacuuu

SEQ ID NO: 731393 - RNA, 19 nt, Homo sapiens
  misc_RNA (1)...(19): siRNA sense strand
ugaaagaccuuaacuuguc

SEQ ID NO: 731394 - RNA, 19 nt, Homo sapiens
  misc_RNA (1)...(19): siRNA sense strand
ugaagaaacuagauagaga

SEQ ID NO: 731395 - RNA, 19 nt, Homo sapiens
  misc_RNA (1)...(19): siRNA sense strand
ccaagaaacaggcaacaua

SEQ ID NO: 731396 - RNA, 19 nt, Homo sapiens
  misc_RNA (1)...(19): siRNA sense strand
gaaaguaaagguugaagau

SEQ ID NO: 731397 - RNA, 19 nt, Homo sapiens
  misc_RNA (1)...(19): siRNA sense strand
cagaugauguugacaguga

SEQ ID NO: 731398 - RNA, 19 nt, Homo sapiens
  misc_RNA (1)...(19): siRNA sense strand
caagaaacaggcaacauaa

SEQ ID NO: 731399 - RNA, 19 nt, Homo sapiens
  misc_RNA (1)...(19): siRNA sense strand
gcaguuacgcucuccauuu

SEQ ID NO: 731400 - RNA, 19 nt, Homo sapiens
  misc_RNA (1)...(19): siRNA sense strand
gagauuauuucaccucaau

SEQ ID NO: 731401 - RNA, 19 nt, Homo sapiens
  misc_RNA (1)...(19): siRNA sense strand
ccacuggacuuaucacaau

SEQ ID NO: 731402 - RNA, 19 nt, Homo sapiens
  misc_RNA (1)...(19): siRNA sense strand
gaaacagagucacacuaga

SEQ ID NO: 731403 - RNA, 19 nt, Homo sapiens
  misc_RNA (1)...(19): siRNA sense strand
gaccaaugcuacacugauu

SEQ ID NO: 731404 - RNA, 19 nt, Homo sapiens
  misc_RNA (1)...(19): siRNA sense strand
gagaagaaauuccagaaaa

SEQ ID NO: 731405 - RNA, 19 nt, Homo sapiens
  misc_RNA (1)...(19): siRNA sense strand
gauguauccucaccaacua

SEQ ID NO: 731406 - RNA, 19 nt, Homo sapiens
  misc_RNA (1)...(19): siRNA sense strand
gcauugaucgugagaaauu

SEQ ID NO: 731407 - RNA, 19 nt, Homo sapiens
  misc_RNA (1)...(19): siRNA sense strand
caacauugccaggagauua

SEQ ID NO: 731408 - RNA, 19 nt, Homo sapiens
  misc_RNA (1)...(19): siRNA sense strand
gaagaaacuagauagagaa

SEQ ID NO: 731409 - RNA, 19 nt, Homo sapiens
  misc_RNA (1)...(19): siRNA sense strand
caucacugcuguaguaaga

SEQ ID NO: 731410 - RNA, 19 nt, Homo sapiens
  misc_RNA (1)...(19): siRNA sense strand
uuucaucacugcuguagua

SEQ ID NO: 731411 - RNA, 19 nt, Homo sapiens
  misc_RNA (1)...(19): siRNA sense strand
uaacugauccugauuaugg

SEQ ID NO: 731412 - RNA, 19 nt, Homo sapiens
  misc_RNA (1)...(19): siRNA sense strand
caacaguuaucaacauauc

SEQ ID NO: 731413 - RNA, 19 nt, Homo sapiens
  misc_RNA (1)...(19): siRNA sense strand
ugacacaguuguucuuuca

SEQ ID NO: 731414 - RNA, 19 nt, Homo sapiens
  misc_RNA (1)...(19): siRNA sense strand
gguugaagaugguggcuuu

SEQ ID NO: 731415 - RNA, 19 nt, Homo sapiens
  misc_RNA (1)...(19): siRNA sense strand
gagaaauuaugugcuggua

SEQ ID NO: 731416 - RNA, 19 nt, Homo sapiens
  misc_RNA (1)...(19): siRNA sense strand
ggugucauccgaccaaaua

SEQ ID NO: 731417 - RNA, 19 nt, Homo sapiens
  misc_RNA (1)...(19): siRNA sense strand
caauggugcugguaaaugu

SEQ ID NO: 731418 - RNA, 19 nt, Homo sapiens
  misc_RNA (1)...(19): siRNA sense strand
ggacuuaucacaaucaaag

SEQ ID NO: 731419 - RNA, 19 nt, Homo sapiens
  misc_RNA (1)...(19): siRNA sense strand
ccacuucucuuucagcaau

SEQ ID NO: 731420 - RNA, 19 nt, Homo sapiens
  misc_RNA (1)...(19): siRNA sense strand
ucauaacugugacggauaa

SEQ ID NO: 731421 - RNA, 19 nt, Homo sapiens
  misc_RNA (1)...(19): siRNA sense strand
ccauaaaugugguugaugu

SEQ ID NO: 731422 - RNA, 19 nt, Homo sapiens
  misc_RNA (1)...(19): siRNA sense strand
gacaagaugccacaacuga

SEQ ID NO: 731423 - RNA, 19 nt, Homo sapiens
  misc_RNA (1)...(19): siRNA sense strand
ggaaacagagucacacuag

SEQ ID NO: 731424 - RNA, 19 nt, Homo sapiens
  misc_RNA (1)...(19): siRNA sense strand
ugacagugauggaaacaga

SEQ ID NO: 731425 - RNA, 19 nt, Homo sapiens
  misc_RNA (1)...(19): siRNA sense strand
caaaguaaccauaaaugug

SEQ ID NO: 731426 - RNA, 19 nt, Homo sapiens
  misc_RNA (1)...(19): siRNA sense strand
ccucaaagauccaguacug

SEQ ID NO: 731427 - RNA, 19 nt, Homo sapiens
  misc_RNA (1)...(19): siRNA sense strand
acaguggucuuucagguaa

SEQ ID NO: 731428 - RNA, 19 nt, Homo sapiens
  misc_RNA (1)...(19): siRNA sense strand
ucagaucccuacagcguuu

SEQ ID NO: 731429 - RNA, 19 nt, Homo sapiens
  misc_RNA (1)...(19): siRNA sense strand
cacuagaccuuccuauuga

SEQ ID NO: 731430 - RNA, 19 nt, Homo sapiens
  misc_RNA (1)...(19): siRNA sense strand
gaaaacaggcagaugauaa

SEQ ID NO: 731431 - RNA, 19 nt, Homo sapiens
  misc_RNA (1)...(19): siRNA sense strand
caagaugccacaacugauu

SEQ ID NO: 731432 - RNA, 19 nt, Homo sapiens
  misc_RNA (1)...(19): siRNA sense strand
caagaacugccucucgaua

SEQ ID NO: 731433 - RNA, 19 nt, Homo sapiens
  misc_RNA (1)...(19): siRNA sense strand
caaugacacuggcaugaau

SEQ ID NO: 731434 - RNA, 19 nt, Homo sapiens
  misc_RNA (1)...(19): siRNA sense strand
gaagucaguauaccagaaa

SEQ ID NO: 731435 - RNA, 19 nt, Homo sapiens
  misc_RNA (1)...(19): siRNA sense strand
gggaagagaaggauaccua

SEQ ID NO: 731436 - RNA, 19 nt, Homo sapiens
  misc_RNA (1)...(19): siRNA sense strand
guugaaagaccuuaacuug

SEQ ID NO: 731437 - RNA, 19 nt, Homo sapiens
  misc_RNA (1)...(19): siRNA sense strand
ccuuaaggcugcucagaaa

SEQ ID NO: 731438 - RNA, 19 nt, Homo sapiens
  misc_RNA (1)...(19): siRNA sense strand
ugccacagaugcugacaua

SEQ ID NO: 731439 - RNA, 19 nt, Homo sapiens
  misc_RNA (1)...(19): siRNA sense strand
uaagauacaucgucaaucc

SEQ ID NO: 731440 - RNA, 19 nt, Homo sapiens
  misc_RNA (1)...(19): siRNA sense strand
ggaaaguacaauuggguaa

SEQ ID NO: 731441 - RNA, 19 nt, Homo sapiens
  misc_RNA (1)...(19): siRNA sense strand
gauucucucuucaguguug

SEQ ID NO: 731442 - RNA, 19 nt, Homo sapiens
  misc_RNA (1)...(19): siRNA sense strand
gaaugacaauagcccaguu

SEQ ID NO: 731443 - RNA, 19 nt, Homo sapiens
  misc_RNA (1)...(19): siRNA sense strand
ggcaagugaugguggauug

SEQ ID NO: 731444 - RNA, 19 nt, Homo sapiens
  misc_RNA (1)...(19): siRNA sense strand
ucucuucaguguuguaauu

SEQ ID NO: 731445 - RNA, 19 nt, Homo sapiens
  misc_RNA (1)...(19): siRNA sense strand
gagacaagaugccacaacu

SEQ ID NO: 731446 - RNA, 19 nt, Homo sapiens
  misc_RNA (1)...(19): siRNA sense strand
acacuagaccuuccuauug

SEQ ID NO: 731447 - RNA, 19 nt, Homo sapiens
  misc_RNA (1)...(19): siRNA sense strand
gaguguuggucaaagcuaa

SEQ ID NO: 731448 - RNA, 19 nt, Homo sapiens
  misc_RNA (1)...(19): siRNA sense strand
ugacaaccacccagucuuu

SEQ ID NO: 731449 - RNA, 19 nt, Homo sapiens
  misc_RNA (1)...(19): siRNA sense strand
guacaagaccggagaugug

SEQ ID NO: 731450 - RNA, 19 nt, Homo sapiens
  misc_RNA (1)...(19): siRNA sense strand
cagccugccuuccaaauuc

SEQ ID NO: 731451 - RNA, 19 nt, Homo sapiens
  misc_RNA (1)...(19): siRNA sense strand
uuacagaccuugguuuaca

SEQ ID NO: 731452 - RNA, 19 nt, Homo sapiens
  misc_RNA (1)...(19): siRNA sense strand
gagguucguuacagcauug

SEQ ID NO: 731453 - RNA, 19 nt, Homo sapiens
  misc_RNA (1)...(19): siRNA sense strand
acaacaaacugucacaagu

SEQ ID NO: 731454 - RNA, 19 nt, Homo sapiens
  misc_RNA (1)...(19): siRNA sense strand
ugacaugcuucacagauca

SEQ ID NO: 731455 - RNA, 19 nt, Homo sapiens
  misc_RNA (1)...(19): siRNA sense strand
aaauugcucucauaacugu

SEQ ID NO: 731456 - RNA, 19 nt, Homo sapiens
  misc_RNA (1)...(19): siRNA sense strand
ggagaugugccacugauuc

SEQ ID NO: 731457 - RNA, 19 nt, Homo sapiens
  misc_RNA (1)...(19): siRNA sense strand
gacucuaucuccaauuguu

SEQ ID NO: 731458 - RNA, 19 nt, Homo sapiens
  misc_RNA (1)...(19): siRNA sense strand
ggaggaaacacaagagauc

SEQ ID NO: 731459 - RNA, 19 nt, Homo sapiens
  misc_RNA (1)...(19): siRNA sense strand
ugaggauggugguagagua

SEQ ID NO: 731460 - RNA, 19 nt, Homo sapiens
  misc_RNA (1)...(19): siRNA sense strand
uaaggccaguauucaguaa

SEQ ID NO: 731461 - RNA, 19 nt, Homo sapiens
  misc_RNA (1)...(19): siRNA sense strand
ucaaagaaccacuggauag

SEQ ID NO: 731462 - RNA, 19 nt, Homo sapiens
  misc_RNA (1)...(19): siRNA sense strand
caacaaacugucacaagug

SEQ ID NO: 731463 - RNA, 19 nt, Homo sapiens
  misc_RNA (1)...(19): siRNA sense strand
cagcaacaguuaucaacau

SEQ ID NO: 731464 - RNA, 19 nt, Homo sapiens
  misc_RNA (1)...(19): siRNA sense strand
ggaguuagauagggaagag

SEQ ID NO: 731465 - RNA, 19 nt, Homo sapiens
  misc_RNA (1)...(19): siRNA sense strand
gugacucuaucuccaauug

SEQ ID NO: 731466 - RNA, 19 nt, Homo sapiens
  misc_RNA (1)...(19): siRNA sense strand
augcuacacugauuaauga

SEQ ID NO: 731467 - RNA, 19 nt, Homo sapiens
  misc_RNA (1)...(19): siRNA sense strand
gguagaguaucacguucuu

SEQ ID NO: 731468 - RNA, 19 nt, Homo sapiens
  misc_RNA (1)...(19): siRNA sense strand
ucaaucuguucgugaauga

SEQ ID NO: 731469 - RNA, 19 nt, Homo sapiens
  misc_RNA (1)...(19): siRNA sense strand
gcugauguauccucaccaa

SEQ ID NO: 731470 - RNA, 19 nt, Homo sapiens
  misc_RNA (1)...(19): siRNA sense strand
ucgcauugaucgugagaaa

SEQ ID NO: 731471 - RNA, 19 nt, Homo sapiens
  misc_RNA (1)...(19): siRNA sense strand
guaacuacaccuacuacuu

SEQ ID NO: 731472 - RNA, 19 nt, Homo sapiens
  misc_RNA (1)...(19): siRNA sense strand
ccaaugcuacacugauuaa

SEQ ID NO: 731473 - RNA, 19 nt, Homo sapiens
  misc_RNA (1)...(19): siRNA sense strand
aaacaggcaacauaacauu

SEQ ID NO: 731474 - RNA, 19 nt, Homo sapiens
  misc_RNA (1)...(19): siRNA sense strand
gaaacaggcaacauaacau

SEQ ID NO: 731475 - RNA, 19 nt, Homo sapiens
  misc_RNA (1)...(19): siRNA sense strand
ggacuaaucacuguaacug

SEQ ID NO: 731476 - RNA, 19 nt, Homo sapiens
  misc_RNA (1)...(19): siRNA sense strand
caaaauugcucucauaacu

SEQ ID NO: 731477 - RNA, 19 nt, Homo sapiens
  misc_RNA (1)...(19): siRNA sense strand
acacaguuguucuuucaga

SEQ ID NO: 731478 - RNA, 19 nt, Homo sapiens
  misc_RNA (1)...(19): siRNA sense strand
ugaagucaguauaccagaa

SEQ ID NO: 731479 - RNA, 19 nt, Homo sapiens
  misc_RNA (1)...(19): siRNA sense strand
caucgucaauccugucaau

SEQ ID NO: 731480 - RNA, 19 nt, Homo sapiens
  misc_RNA (1)...(19): siRNA sense strand
ccaaaguaaccauaaaugu

SEQ ID NO: 731481 - RNA, 19 nt, Homo sapiens
  misc_RNA (1)...(19): siRNA sense strand
ggauggugguagaguauca

SEQ ID NO: 731482 - RNA, 19 nt, Homo sapiens
  misc_RNA (1)...(19): siRNA sense strand
caaugucacagucuuugua

SEQ ID NO: 731483 - RNA, 19 nt, Homo sapiens
  misc_RNA (1)...(19): siRNA sense strand
auacugagauagcugaugu

SEQ ID NO: 731484 - RNA, 19 nt, Homo sapiens
  misc_RNA (1)...(19): siRNA sense strand
aaacuaaggcagaugaugu

SEQ ID NO: 731485 - RNA, 19 nt, Homo sapiens
  misc_RNA (1)...(19): siRNA sense strand
gggaauaucuuggaaauaa

SEQ ID NO: 731486 - RNA, 19 nt, Homo sapiens
  misc_RNA (1)...(19): siRNA sense strand
ggaaaggacuccaaccaaa

SEQ ID NO: 731487 - RNA, 19 nt, Homo sapiens
  misc_RNA (1)...(19): siRNA sense strand
uaaagaagcugccaugaug

SEQ ID NO: 731488 - RNA, 19 nt, Homo sapiens
  misc_RNA (1)...(19): siRNA sense strand
gaaggaagcugccaagaca

SEQ ID NO: 731489 - RNA, 19 nt, Homo sapiens
  misc_RNA (1)...(19): siRNA sense strand
gaaagagcaugccuacaaa

SEQ ID NO: 731490 - RNA, 19 nt, Homo sapiens
  misc_RNA (1)...(19): siRNA sense strand
ccaguacgcucuacagaua

SEQ ID NO: 731491 - RNA, 19 nt, Homo sapiens
  misc_RNA (1)...(19): siRNA sense strand
gagaacagauggcagauau

SEQ ID NO: 731492 - RNA, 19 nt, Homo sapiens
  misc_RNA (1)...(19): siRNA sense strand
ccaaagagguugagaaaca

SEQ ID NO: 731493 - RNA, 19 nt, Homo sapiens
  misc_RNA (1)...(19): siRNA sense strand
gaacggaauuacagaaguu

SEQ ID NO: 731494 - RNA, 19 nt, Homo sapiens
  misc_RNA (1)...(19): siRNA sense strand
gaaagaggaccauaaagaa

SEQ ID NO: 731495 - RNA, 19 nt, Homo sapiens
  misc_RNA (1)...(19): siRNA sense strand
ggaaagagcaugccuacaa

SEQ ID NO: 731496 - RNA, 19 nt, Homo sapiens
  misc_RNA (1)...(19): siRNA sense strand
gcaaacagcacaacugauu

SEQ ID NO: 731497 - RNA, 19 nt, Homo sapiens
  misc_RNA (1)...(19): siRNA sense strand
gaauauaguuacaggcaaa

SEQ ID NO: 731498 - RNA, 19 nt, Homo sapiens
  misc_RNA (1)...(19): siRNA sense strand
gguauuagaugaucaagga

SEQ ID NO: 731499 - RNA, 19 nt, Homo sapiens
  misc_RNA (1)...(19): siRNA sense strand
ucaaacagcugcagguauu

SEQ ID NO: 731500 - RNA, 19 nt, Homo sapiens
  misc_RNA (1)...(19): siRNA sense strand
uaaccaagaucguacauau

SEQ ID NO: 731501 - RNA, 19 nt, Homo sapiens
  misc_RNA (1)...(19): siRNA sense strand
ggacaagccugcacaccaa

SEQ ID NO: 731502 - RNA, 19 nt, Homo sapiens
  misc_RNA (1)...(19): siRNA sense strand
gaaccaaguuugccucuca

SEQ ID NO: 731503 - RNA, 19 nt, Homo sapiens
  misc_RNA (1)...(19): siRNA sense strand
ggaaucaguuagaaugaaa

SEQ ID NO: 731504 - RNA, 19 nt, Homo sapiens
  misc_RNA (1)...(19): siRNA sense strand
agaaguagauccuccagua

SEQ ID NO: 731505 - RNA, 19 nt, Homo sapiens
  misc_RNA (1)...(19): siRNA sense strand
gcagauacauggaacuuca

SEQ ID NO: 731506 - RNA, 19 nt, Homo sapiens
  misc_RNA (1)...(19): siRNA sense strand
ggagaaaucuggucaagac

SEQ ID NO: 731507 - RNA, 19 nt, Homo sapiens
  misc_RNA (1)...(19): siRNA sense strand
gaaagggccugugaauguu

SEQ ID NO: 731508 - RNA, 19 nt, Homo sapiens
  misc_RNA (1)...(19): siRNA sense strand
caaggaaccugcagaaaca

SEQ ID NO: 731509 - RNA, 19 nt, Homo sapiens
  misc_RNA (1)...(19): siRNA sense strand
uaaauggaguuccucagua

SEQ ID NO: 731510 - RNA, 19 nt, Homo sapiens
  misc_RNA (1)...(19): siRNA sense strand
ggacagagaagacaagcua

SEQ ID NO: 731511 - RNA, 19 nt, Homo sapiens
  misc_RNA (1)...(19): siRNA sense strand
ugaaacaccugaacguaaa

SEQ ID NO: 731512 - RNA, 19 nt, Homo sapiens
  misc_RNA (1)...(19): siRNA sense strand
guaauaaacugagcagaga

SEQ ID NO: 731513 - RNA, 19 nt, Homo sapiens
  misc_RNA (1)...(19): siRNA sense strand
gagaaauuguggauauuga

SEQ ID NO: 731514 - RNA, 19 nt, Homo sapiens
  misc_RNA (1)...(19): siRNA sense strand
gaugaaagacucucuaguu

SEQ ID NO: 731515 - RNA, 19 nt, Homo sapiens
  misc_RNA (1)...(19): siRNA sense strand
ccaaacagcauaauuaaga

SEQ ID NO: 731516 - RNA, 19 nt, Homo sapiens
  misc_RNA (1)...(19): siRNA sense strand
uuacacagcucaaucuuug

SEQ ID NO: 731517 - RNA, 19 nt, Homo sapiens
  misc_RNA (1)...(19): siRNA sense strand
ggaaugauccuuaugaaca

SEQ ID NO: 731518 - RNA, 19 nt, Homo sapiens
  misc_RNA (1)...(19): siRNA sense strand
ggaaacagcagauggaaau

SEQ ID NO: 731519 - RNA, 19 nt, Homo sapiens
  misc_RNA (1)...(19): siRNA sense strand
gaaugauccuuaugaacaa

SEQ ID NO: 731520 - RNA, 19 nt, Homo sapiens
  misc_RNA (1)...(19): siRNA sense strand
uauaaugccucuccuguga

SEQ ID NO: 731521 - RNA, 19 nt, Homo sapiens
  misc_RNA (1)...(19): siRNA sense strand
aaagguggcuccagucauu

SEQ ID NO: 731522 - RNA, 19 nt, Homo sapiens
  misc_RNA (1)...(19): siRNA sense strand
gaagaugaacuaaaucguu

SEQ ID NO: 731523 - RNA, 19 nt, Homo sapiens
  misc_RNA (1)...(19): siRNA sense strand
gauacaagccuuaaagaug

SEQ ID NO: 731524 - RNA, 19 nt, Homo sapiens
  misc_RNA (1)...(19): siRNA sense strand
caaagggucuaaagaagug

SEQ ID NO: 731525 - RNA, 19 nt, Homo sapiens
  misc_RNA (1)...(19): siRNA sense strand
gaacagaaacgugacagaa

SEQ ID NO: 731526 - RNA, 19 nt, Homo sapiens
  misc_RNA (1)...(19): siRNA sense strand
cagcacaacugauuccauu

SEQ ID NO: 731527 - RNA, 19 nt, Homo sapiens
  misc_RNA (1)...(19): siRNA sense strand
gaaugaaaguaccaaagga

SEQ ID NO: 731528 - RNA, 19 nt, Homo sapiens
  misc_RNA (1)...(19): siRNA sense strand
ggagagagagagacgcuua

SEQ ID NO: 731529 - RNA, 19 nt, Homo sapiens
  misc_RNA (1)...(19): siRNA sense strand
gcaaagggaacgagaaaga

SEQ ID NO: 731530 - RNA, 19 nt, Homo sapiens
  misc_RNA (1)...(19): siRNA sense strand
ggaagugcauuaucaccuu

SEQ ID NO: 731531 - RNA, 19 nt, Homo sapiens
  misc_RNA (1)...(19): siRNA sense strand
gagaauucgucccaagaaa

SEQ ID NO: 731532 - RNA, 19 nt, Homo sapiens
  misc_RNA (1)...(19): siRNA sense strand
gaacaucccgaaccaaguu

SEQ ID NO: 731533 - RNA, 19 nt, Homo sapiens
  misc_RNA (1)...(19): siRNA sense strand
ggaaggagaggcugaaaga

SEQ ID NO: 731534 - RNA, 19 nt, Homo sapiens
  misc_RNA (1)...(19): siRNA sense strand
agagaaagcugacaaagag

SEQ ID NO: 731535 - RNA, 19 nt, Homo sapiens
  misc_RNA (1)...(19): siRNA sense strand
gcccguauccucacaguua

SEQ ID NO: 731536 - RNA, 19 nt, Homo sapiens
  misc_RNA (1)...(19): siRNA sense strand
aaacuggacagacuuaaua

SEQ ID NO: 731537 - RNA, 19 nt, Homo sapiens
  misc_RNA (1)...(19): siRNA sense strand
aaagaaagccugugaggaa

SEQ ID NO: 731538 - RNA, 19 nt, Homo sapiens
  misc_RNA (1)...(19): siRNA sense strand
gggauuggaugauacaguu

SEQ ID NO: 731539 - RNA, 19 nt, Homo sapiens
  misc_RNA (1)...(19): siRNA sense strand
aaacaacucugagauacaa

SEQ ID NO: 731540 - RNA, 19 nt, Homo sapiens
  misc_RNA (1)...(19): siRNA sense strand
gagagaagacguuaggaaa

SEQ ID NO: 731541 - RNA, 19 nt, Homo sapiens
  misc_RNA (1)...(19): siRNA sense strand
aagagaacgugaaagauuu

SEQ ID NO: 731542 - RNA, 19 nt, Homo sapiens
  misc_RNA (1)...(19): siRNA sense strand
ggacaagacauuacgauca

SEQ ID NO: 731543 - RNA, 19 nt, Homo sapiens
  misc_RNA (1)...(19): siRNA sense strand
ggguugugcuccugaguua

SEQ ID NO: 731544 - RNA, 19 nt, Homo sapiens
  misc_RNA (1)...(19): siRNA sense strand
uaagaaagaggaccauaaa

SEQ ID NO: 731545 - RNA, 19 nt, Homo sapiens
  misc_RNA (1)...(19): siRNA sense strand
gaaaaucggugggaauaaa

SEQ ID NO: 731546 - RNA, 19 nt, Homo sapiens
  misc_RNA (1)...(19): siRNA sense strand
gaucaucgagcauuucaaa

SEQ ID NO: 731547 - RNA, 19 nt, Homo sapiens
  misc_RNA (1)...(19): siRNA sense strand
ggcagcggcucuagaagua

SEQ ID NO: 731548 - RNA, 19 nt, Homo sapiens
  misc_RNA (1)...(19): siRNA sense strand
gacauuacgaucaggauua

SEQ ID NO: 731549 - RNA, 19 nt, Homo sapiens
  misc_RNA (1)...(19): siRNA sense strand
cuacagaagucaaccaugu

SEQ ID NO: 731550 - RNA, 19 nt, Homo sapiens
  misc_RNA (1)...(19): siRNA sense strand
gacaaacaacucugagaua

SEQ ID NO: 731551 - RNA, 19 nt, Homo sapiens
  misc_RNA (1)...(19): siRNA sense strand
aaaggaggaugguuuauca

SEQ ID NO: 731552 - RNA, 19 nt, Homo sapiens
  misc_RNA (1)...(19): siRNA sense strand
gaaaaccgcucuccuguca

SEQ ID NO: 731553 - RNA, 19 nt, Homo sapiens
  misc_RNA (1)...(19): siRNA sense strand
cgaagauggugaacacaaa

SEQ ID NO: 731554 - RNA, 19 nt, Homo sapiens
  misc_RNA (1)...(19): siRNA sense strand
uagaugggcuuucuucgaa

SEQ ID NO: 731555 - RNA, 19 nt, Homo sapiens
  misc_RNA (1)...(19): siRNA sense strand
gagcggacuuuacaacaug

SEQ ID NO: 731556 - RNA, 19 nt, Homo sapiens
  misc_RNA (1)...(19): siRNA sense strand
ggauggaucaugucgauuu

SEQ ID NO: 731557 - RNA, 19 nt, Homo sapiens
  misc_RNA (1)...(19): siRNA sense strand
ggaacagagucguaggaaa

SEQ ID NO: 731558 - RNA, 19 nt, Homo sapiens
  misc_RNA (1)...(19): siRNA sense strand
gucaggagcuugccaguau

SEQ ID NO: 731559 - RNA, 19 nt, Homo sapiens
  misc_RNA (1)...(19): siRNA sense strand
gaaagccugugaggaaaga

SEQ ID NO: 731560 - RNA, 19 nt, Homo sapiens
  misc_RNA (1)...(19): siRNA sense strand
gagagaaagcugacaaaga

SEQ ID NO: 731561 - RNA, 19 nt, Homo sapiens
  misc_RNA (1)...(19): siRNA sense strand
gaaaucuggucaagacauc

SEQ ID NO: 731562 - RNA, 19 nt, Homo sapiens
  misc_RNA (1)...(19): siRNA sense strand
gauaugggccugugguaaa

SEQ ID NO: 731563 - RNA, 19 nt, Homo sapiens
  misc_RNA (1)...(19): siRNA sense strand
cgacauuucugccgauaug

SEQ ID NO: 731564 - RNA, 19 nt, Homo sapiens
  misc_RNA (1)...(19): siRNA sense strand
gaaaguaaauggaguuccu

SEQ ID NO: 731565 - RNA, 19 nt, Homo sapiens
  misc_RNA (1)...(19): siRNA sense strand
gaacagagucguaggaaac

SEQ ID NO: 731566 - RNA, 19 nt, Homo sapiens
  misc_RNA (1)...(19): siRNA sense strand
ugaaagggccugugaaugu

SEQ ID NO: 731567 - RNA, 19 nt, Homo sapiens
  misc_RNA (1)...(19): siRNA sense strand
gaaagagagcuccauggaa

SEQ ID NO: 731568 - RNA, 19 nt, Homo sapiens
  misc_RNA (1)...(19): siRNA sense strand
caaauaggcgugaaagaga

SEQ ID NO: 731569 - RNA, 19 nt, Homo sapiens
  misc_RNA (1)...(19): siRNA sense strand
aaagagaacgugaaagauu

SEQ ID NO: 731570 - RNA, 19 nt, Homo sapiens
  misc_RNA (1)...(19): siRNA sense strand
aagcaaagccugcaucuga

SEQ ID NO: 731571 - RNA, 19 nt, Homo sapiens
  misc_RNA (1)...(19): siRNA sense strand
gagcaaacagcacaacuga

SEQ ID NO: 731572 - RNA, 19 nt, Homo sapiens
  misc_RNA (1)...(19): siRNA sense strand
cuaaaucccucucuucauc

SEQ ID NO: 731573 - RNA, 19 nt, Homo sapiens
  misc_RNA (1)...(19): siRNA sense strand
uaaaucaggccaagagaaa

SEQ ID NO: 731574 - RNA, 19 nt, Homo sapiens
  misc_RNA (1)...(19): siRNA sense strand
gcccaggaguuguaauaaa

SEQ ID NO: 731575 - RNA, 19 nt, Homo sapiens
  misc_RNA (1)...(19): siRNA sense strand
gguauggucugguauucuu

SEQ ID NO: 731576 - RNA, 19 nt, Homo sapiens
  misc_RNA (1)...(19): siRNA sense strand
gcagcaagaugccucaagu

SEQ ID NO: 731577 - RNA, 19 nt, Homo sapiens
  misc_RNA (1)...(19): siRNA sense strand
gcugguagcugcugacaag

SEQ ID NO: 731578 - RNA, 19 nt, Homo sapiens
  misc_RNA (1)...(19): siRNA sense strand
aaaccgcucuccugucaaa

SEQ ID NO: 731579 - RNA, 19 nt, Homo sapiens
  misc_RNA (1)...(19): siRNA sense strand
gagagagagacgcuuaaua

SEQ ID NO: 731580 - RNA, 19 nt, Homo sapiens
  misc_RNA (1)...(19): siRNA sense strand
caaggagacuacuaugaau

SEQ ID NO: 731581 - RNA, 19 nt, Homo sapiens
  misc_RNA (1)...(19): siRNA sense strand
ccaaggagacuacuaugaa

SEQ ID NO: 731582 - RNA, 19 nt, Homo sapiens
  misc_RNA (1)...(19): siRNA sense strand
ugaaguaacagcauggaua

SEQ ID NO: 731583 - RNA, 19 nt, Homo sapiens
  misc_RNA (1)...(19): siRNA sense strand
gggaaggccuccaaagaca

SEQ ID NO: 731584 - RNA, 19 nt, Homo sapiens
  misc_RNA (1)...(19): siRNA sense strand
agaaaucaguguugaggaa

SEQ ID NO: 731585 - RNA, 19 nt, Homo sapiens
  misc_RNA (1)...(19): siRNA sense strand
gaaaugaccucccuaaguu

SEQ ID NO: 731586 - RNA, 19 nt, Homo sapiens
  misc_RNA (1)...(19): siRNA sense strand
gaaggcagcugguauauuc

SEQ ID NO: 731587 - RNA, 19 nt, Homo sapiens
  misc_RNA (1)...(19): siRNA sense strand
gacaugaucuuccuucuga

SEQ ID NO: 731588 - RNA, 19 nt, Homo sapiens
  misc_RNA (1)...(19): siRNA sense strand
caaaggguuucucuguuua

SEQ ID NO: 731589 - RNA, 19 nt, Homo sapiens
  misc_RNA (1)...(19): siRNA sense strand
gaucaugucucacuucaca

SEQ ID NO: 731590 - RNA, 19 nt, Homo sapiens
  misc_RNA (1)...(19): siRNA sense strand
uggcagaacuccucuauau

SEQ ID NO: 731591 - RNA, 19 nt, Homo sapiens
  misc_RNA (1)...(19): siRNA sense strand
gcagaacuccucuauauca

SEQ ID NO: 731592 - RNA, 19 nt, Homo sapiens
  misc_RNA (1)...(19): siRNA sense strand
acaaaggguuucucuguuu

SEQ ID NO: 731593 - RNA, 19 nt, Homo sapiens
  misc_RNA (1)...(19): siRNA sense strand
gaacuccucuauaucauac

SEQ ID NO: 731594 - RNA, 19 nt, Homo sapiens
  misc_RNA (1)...(19): siRNA sense strand
caacauugguauuccaguu

SEQ ID NO: 731595 - RNA, 19 nt, Homo sapiens
  misc_RNA (1)...(19): siRNA sense strand
gacaaaggguuucucuguu

SEQ ID NO: 731596 - RNA, 19 nt, Homo sapiens
  misc_RNA (1)...(19): siRNA sense strand
gaaagacucgcuucccaaa

SEQ ID NO: 731597 - RNA, 19 nt, Homo sapiens
  misc_RNA (1)...(19): siRNA sense strand
gcaaaacaguuguaccuaa

SEQ ID NO: 731598 - RNA, 19 nt, Homo sapiens
  misc_RNA (1)...(19): siRNA sense strand
gaacuuaaaggacaugauc

SEQ ID NO: 731599 - RNA, 19 nt, Homo sapiens
  misc_RNA (1)...(19): siRNA sense strand
ccauaaagaugcugagauc

SEQ ID NO: 731600 - RNA, 19 nt, Homo sapiens
  misc_RNA (1)...(19): siRNA sense strand
gaggaaggcagcugguaua

SEQ ID NO: 731601 - RNA, 19 nt, Homo sapiens
  misc_RNA (1)...(19): siRNA sense strand
gaagaacuaguuucccaaa

SEQ ID NO: 731602 - RNA, 19 nt, Homo sapiens
  misc_RNA (1)...(19): siRNA sense strand
acaauaaugugacgaaagu

SEQ ID NO: 731603 - RNA, 19 nt, Homo sapiens
  misc_RNA (1)...(19): siRNA sense strand
gaggcugacuuccuacuug

SEQ ID NO: 731604 - RNA, 19 nt, Homo sapiens
  misc_RNA (1)...(19): siRNA sense strand
ugacgaaaguggaaaugga

SEQ ID NO: 731605 - RNA, 19 nt, Homo sapiens
  misc_RNA (1)...(19): siRNA sense strand
cagaaggcauugacucaga

SEQ ID NO: 731606 - RNA, 19 nt, Homo sapiens
  misc_RNA (1)...(19): siRNA sense strand
ucaaggagaggaagaacua

SEQ ID NO: 731607 - RNA, 19 nt, Homo sapiens
  misc_RNA (1)...(19): siRNA sense strand
cgacaaaggguuucucugu

SEQ ID NO: 731608 - RNA, 19 nt, Homo sapiens
  misc_RNA (1)...(19): siRNA sense strand
cugccaaggugaagagaua

SEQ ID NO: 731609 - RNA, 19 nt, Homo sapiens
  misc_RNA (1)...(19): siRNA sense strand
gcugagauccugagucaug

SEQ ID NO: 731610 - RNA, 19 nt, Homo sapiens
  misc_RNA (1)...(19): siRNA sense strand
uauauucagucucugugua

SEQ ID NO: 731611 - RNA, 19 nt, Homo sapiens
  misc_RNA (1)...(19): siRNA sense strand
ccucaaguuucucugcaua

SEQ ID NO: 731612 - RNA, 19 nt, Homo sapiens
  misc_RNA (1)...(19): siRNA sense strand
gauccugagucauguguuc

SEQ ID NO: 731613 - RNA, 19 nt, Homo sapiens
  misc_RNA (1)...(19): siRNA sense strand
caaggaacccauaaagaug

SEQ ID NO: 731614 - RNA, 19 nt, Homo sapiens
  misc_RNA (1)...(19): siRNA sense strand
caaaacaguuguaccuaaa

SEQ ID NO: 731615 - RNA, 19 nt, Homo sapiens
  misc_RNA (1)...(19): siRNA sense strand
ggagaggaagaacuaguuu

SEQ ID NO: 731616 - RNA, 19 nt, Homo sapiens
  misc_RNA (1)...(19): siRNA sense strand
gacaaggaacccauaaaga

SEQ ID NO: 731617 - RNA, 19 nt, Homo sapiens
  misc_RNA (1)...(19): siRNA sense strand
gaaaccugcucuacgaacu

SEQ ID NO: 731618 - RNA, 19 nt, Homo sapiens
  misc_RNA (1)...(19): siRNA sense strand
gauagugacaccuccugua

SEQ ID NO: 731619 - RNA, 19 nt, Homo sapiens
  misc_RNA (1)...(19): siRNA sense strand
ugaaaugaccucccuaagu

SEQ ID NO: 731620 - RNA, 19 nt, Homo sapiens
  misc_RNA (1)...(19): siRNA sense strand
caaggaagccgagucguau

SEQ ID NO: 731621 - RNA, 19 nt, Homo sapiens
  misc_RNA (1)...(19): siRNA sense strand
guauuccaguucagauaaa

SEQ ID NO: 731622 - RNA, 19 nt, Homo sapiens
  misc_RNA (1)...(19): siRNA sense strand
cagugcauauacacaauaa

SEQ ID NO: 731623 - RNA, 19 nt, Homo sapiens
  misc_RNA (1)...(19): siRNA sense strand
acaaggaacccauaaagau

SEQ ID NO: 731624 - RNA, 19 nt, Homo sapiens
  misc_RNA (1)...(19): siRNA sense strand
gugcauauacacaauaaug

SEQ ID NO: 731625 - RNA, 19 nt, Homo sapiens
  misc_RNA (1)...(19): siRNA sense strand
gcugguauauucagucucu

SEQ ID NO: 731626 - RNA, 19 nt, Homo sapiens
  misc_RNA (1)...(19): siRNA sense strand
gguauuccaguucagauaa

SEQ ID NO: 731627 - RNA, 19 nt, Homo sapiens
  misc_RNA (1)...(19): siRNA sense strand
gagagaaagcuauccagau

SEQ ID NO: 731628 - RNA, 19 nt, Homo sapiens
  misc_RNA (1)...(19): siRNA sense strand
ggaggaaggcagcugguau

SEQ ID NO: 731629 - RNA, 19 nt, Homo sapiens
  misc_RNA (1)...(19): siRNA sense strand
gcaccucaacuguaccaaa

SEQ ID NO: 731630 - RNA, 19 nt, Homo sapiens
  misc_RNA (1)...(19): siRNA sense strand
ggaaggcagcugguauauu

SEQ ID NO: 731631 - RNA, 19 nt, Homo sapiens
  misc_RNA (1)...(19): siRNA sense strand
acaaggaagccgagucgua

SEQ ID NO: 731632 - RNA, 19 nt, Homo sapiens
  misc_RNA (1)...(19): siRNA sense strand
gucaacaaccacagcuuua

SEQ ID NO: 731633 - RNA, 19 nt, Homo sapiens
  misc_RNA (1)...(19): siRNA sense strand
uaaguuuccuggcauuucu

SEQ ID NO: 731634 - RNA, 19 nt, Homo sapiens
  misc_RNA (1)...(19): siRNA sense strand
gaaaguggaaauggagaug

SEQ ID NO: 731635 - RNA, 19 nt, Homo sapiens
  misc_RNA (1)...(19): siRNA sense strand
ugccgaggcugacuuccua

SEQ ID NO: 731636 - RNA, 19 nt, Homo sapiens
  misc_RNA (1)...(19): siRNA sense strand
caacuguaccaaagaggaa

SEQ ID NO: 731637 - RNA, 19 nt, Homo sapiens
  misc_RNA (1)...(19): siRNA sense strand
gaagccgagucguaucaag

SEQ ID NO: 731638 - RNA, 19 nt, Homo sapiens
  misc_RNA (1)...(19): siRNA sense strand
caccucaacuguaccaaag

SEQ ID NO: 731639 - RNA, 19 nt, Homo sapiens
  misc_RNA (1)...(19): siRNA sense strand
ucacagugcauauacacaa

SEQ ID NO: 731640 - RNA, 19 nt, Homo sapiens
  misc_RNA (1)...(19): siRNA sense strand
guggagaaccucaaguuuc

SEQ ID NO: 731641 - RNA, 19 nt, Homo sapiens
  misc_RNA (1)...(19): siRNA sense strand
ggacaugaucuuccuucug

SEQ ID NO: 731642 - RNA, 19 nt, Homo sapiens
  misc_RNA (1)...(19): siRNA sense strand
gacauucuuggaagccuua

SEQ ID NO: 731643 - RNA, 19 nt, Homo sapiens
  misc_RNA (1)...(19): siRNA sense strand
gacagacaaggaacccaua

SEQ ID NO: 731644 - RNA, 19 nt, Homo sapiens
  misc_RNA (1)...(19): siRNA sense strand
cccaggcuauguauccuuu

SEQ ID NO: 731645 - RNA, 19 nt, Homo sapiens
  misc_RNA (1)...(19): siRNA sense strand
ggucaacauugguauucca

SEQ ID NO: 731646 - RNA, 19 nt, Homo sapiens
  misc_RNA (1)...(19): siRNA sense strand
ugacaccuccuguagacaa

SEQ ID NO: 731647 - RNA, 19 nt, Homo sapiens
  misc_RNA (1)...(19): siRNA sense strand
caaggucaacauugguauu

SEQ ID NO: 731648 - RNA, 19 nt, Homo sapiens
  misc_RNA (1)...(19): siRNA sense strand
uguguaaucaucugaagaa

SEQ ID NO: 731649 - RNA, 19 nt, Homo sapiens
  misc_RNA (1)...(19): siRNA sense strand
augcugagauccugaguca

SEQ ID NO: 731650 - RNA, 19 nt, Homo sapiens
  misc_RNA (1)...(19): siRNA sense strand
agaacuccucuauaucaua

SEQ ID NO: 731651 - RNA, 19 nt, Homo sapiens
  misc_RNA (1)...(19): siRNA sense strand
agacaaggaacccauaaag

SEQ ID NO: 731652 - RNA, 19 nt, Homo sapiens
  misc_RNA (1)...(19): siRNA sense strand
caugaucuuccuucugaaa

SEQ ID NO: 731653 - RNA, 19 nt, Homo sapiens
  misc_RNA (1)...(19): siRNA sense strand
cagaacuccucuauaucau

SEQ ID NO: 731654 - RNA, 19 nt, Homo sapiens
  misc_RNA (1)...(19): siRNA sense strand
acucagagaacuuaaagga

SEQ ID NO: 731655 - RNA, 19 nt, Homo sapiens
  misc_RNA (1)...(19): siRNA sense strand
ugucaacaaccacagcuuu

SEQ ID NO: 731656 - RNA, 19 nt, Homo sapiens
  misc_RNA (1)...(19): siRNA sense strand
cgaacugucagaaggcauu

SEQ ID NO: 731657 - RNA, 19 nt, Homo sapiens
  misc_RNA (1)...(19): siRNA sense strand
ugagugaggaagacccuuu

SEQ ID NO: 731658 - RNA, 19 nt, Homo sapiens
  misc_RNA (1)...(19): siRNA sense strand
gagaggaagaacuaguuuc

SEQ ID NO: 731659 - RNA, 19 nt, Homo sapiens
  misc_RNA (1)...(19): siRNA sense strand
cugcagcaccucaacugua

SEQ ID NO: 731660 - RNA, 19 nt, Homo sapiens
  misc_RNA (1)...(19): siRNA sense strand
gcccuagacuggcugaaaa

SEQ ID NO: 731661 - RNA, 19 nt, Homo sapiens
  misc_RNA (1)...(19): siRNA sense strand
cacagugcauauacacaau

SEQ ID NO: 731662 - RNA, 19 nt, Homo sapiens
  misc_RNA (1)...(19): siRNA sense strand
gcauugacucagagaacuu

SEQ ID NO: 731663 - RNA, 19 nt, Homo sapiens
  misc_RNA (1)...(19): siRNA sense strand
cagcugguauauucagucu

SEQ ID NO: 731664 - RNA, 19 nt, Homo sapiens
  misc_RNA (1)...(19): siRNA sense strand
uauaucauacggcagaaga

SEQ ID NO: 731665 - RNA, 19 nt, Homo sapiens
  misc_RNA (1)...(19): siRNA sense strand
cauugacucagagaacuua

SEQ ID NO: 731666 - RNA, 19 nt, Homo sapiens
  misc_RNA (1)...(19): siRNA sense strand
ccucaacuguaccaaagag

SEQ ID NO: 731667 - RNA, 19 nt, Homo sapiens
  misc_RNA (1)...(19): siRNA sense strand
uggagaugguccugcagaa

SEQ ID NO: 731668 - RNA, 19 nt, Homo sapiens
  misc_RNA (1)...(19): siRNA sense strand
cagacaaggaacccauaaa

SEQ ID NO: 731669 - RNA, 19 nt, Homo sapiens
  misc_RNA (1)...(19): siRNA sense strand
cagagaacuuaaaggacau

SEQ ID NO: 731670 - RNA, 19 nt, Homo sapiens
  misc_RNA (1)...(19): siRNA sense strand
gaaggcauugacucagaga

SEQ ID NO: 731671 - RNA, 19 nt, Homo sapiens
  misc_RNA (1)...(19): siRNA sense strand
gaaaucucaaggucaacau

SEQ ID NO: 731672 - RNA, 19 nt, Homo sapiens
  misc_RNA (1)...(19): siRNA sense strand
acagugcauauacacaaua

SEQ ID NO: 731673 - RNA, 19 nt, Homo sapiens
  misc_RNA (1)...(19): siRNA sense strand
gagaaacaagguaaaauag

SEQ ID NO: 731674 - RNA, 19 nt, Homo sapiens
  misc_RNA (1)...(19): siRNA sense strand
aaaugaccucccuaaguuu

SEQ ID NO: 731675 - RNA, 19 nt, Homo sapiens
  misc_RNA (1)...(19): siRNA sense strand
gaacugucagaaggcauug

SEQ ID NO: 731676 - RNA, 19 nt, Homo sapiens
  misc_RNA (1)...(19): siRNA sense strand
ggacugcuucguguucugu

SEQ ID NO: 731677 - RNA, 19 nt, Homo sapiens
  misc_RNA (1)...(19): siRNA sense strand
acauugguauuccaguuca

SEQ ID NO: 731678 - RNA, 19 nt, Homo sapiens
  misc_RNA (1)...(19): siRNA sense strand
acagacaaggaacccauaa

SEQ ID NO: 731679 - RNA, 19 nt, Homo sapiens
  misc_RNA (1)...(19): siRNA sense strand
gagaaacauagagaaauac

SEQ ID NO: 731680 - RNA, 19 nt, Homo sapiens
  misc_RNA (1)...(19): siRNA sense strand
ugacucagagaacuuaaag

SEQ ID NO: 731681 - RNA, 19 nt, Homo sapiens
  misc_RNA (1)...(19): siRNA sense strand
aaguuucucugcauaggau

SEQ ID NO: 731682 - RNA, 19 nt, Homo sapiens
  misc_RNA (1)...(19): siRNA sense strand
guguaaucaucugaagaaa

SEQ ID NO: 731683 - RNA, 19 nt, Homo sapiens
  misc_RNA (1)...(19): siRNA sense strand
ggagaugguccugcagaag

SEQ ID NO: 731684 - RNA, 19 nt, Homo sapiens
  misc_RNA (1)...(19): siRNA sense strand
gcucuacgaacugucagaa

SEQ ID NO: 731685 - RNA, 19 nt, Homo sapiens
  misc_RNA (1)...(19): siRNA sense strand
gaaaugaccucccuaaguu

SEQ ID NO: 731686 - RNA, 19 nt, Homo sapiens
  misc_RNA (1)...(19): siRNA sense strand
gaaggcagcugguauauuc

SEQ ID NO: 731687 - RNA, 19 nt, Homo sapiens
  misc_RNA (1)...(19): siRNA sense strand
gacaugaucuuccuucuga

SEQ ID NO: 731688 - RNA, 19 nt, Homo sapiens
  misc_RNA (1)...(19): siRNA sense strand
caaaggguuucucuguuua

SEQ ID NO: 731689 - RNA, 19 nt, Homo sapiens
  misc_RNA (1)...(19): siRNA sense strand
gaucaugucucacuucaca

SEQ ID NO: 731690 - RNA, 19 nt, Homo sapiens
  misc_RNA (1)...(19): siRNA sense strand
uggcagaacuccucuauau

SEQ ID NO: 731691 - RNA, 19 nt, Homo sapiens
  misc_RNA (1)...(19): siRNA sense strand
gcagaacuccucuauauca

SEQ ID NO: 731692 - RNA, 19 nt, Homo sapiens
  misc_RNA (1)...(19): siRNA sense strand
acaaaggguuucucuguuu

SEQ ID NO: 731693 - RNA, 19 nt, Homo sapiens
  misc_RNA (1)...(19): siRNA sense strand
gaacuccucuauaucauac

SEQ ID NO: 731694 - RNA, 19 nt, Homo sapiens
  misc_RNA (1)...(19): siRNA sense strand
caacauugguauuccaguu

SEQ ID NO: 731695 - RNA, 19 nt, Homo sapiens
  misc_RNA (1)...(19): siRNA sense strand
gacaaaggguuucucuguu

SEQ ID NO: 731696 - RNA, 19 nt, Homo sapiens
  misc_RNA (1)...(19): siRNA sense strand
gaaagacucgcuucccaaa

SEQ ID NO: 731697 - RNA, 19 nt, Homo sapiens
  misc_RNA (1)...(19): siRNA sense strand
gcaaaacaguuguaccuaa

SEQ ID NO: 731698 - RNA, 19 nt, Homo sapiens
  misc_RNA (1)...(19): siRNA sense strand
gaacuuaaaggacaugauc

SEQ ID NO: 731699 - RNA, 19 nt, Homo sapiens
  misc_RNA (1)...(19): siRNA sense strand
ccauaaagaugcugagauc

SEQ ID NO: 731700 - RNA, 19 nt, Homo sapiens
  misc_RNA (1)...(19): siRNA sense strand
gaggaaggcagcugguaua

SEQ ID NO: 731701 - RNA, 19 nt, Homo sapiens
  misc_RNA (1)...(19): siRNA sense strand
gaagaacuaguuucccaaa

SEQ ID NO: 731702 - RNA, 19 nt, Homo sapiens
  misc_RNA (1)...(19): siRNA sense strand
acaauaaugugacgaaagu

SEQ ID NO: 731703 - RNA, 19 nt, Homo sapiens
  misc_RNA (1)...(19): siRNA sense strand
gaggcugacuuccuacuug

SEQ ID NO: 731704 - RNA, 19 nt, Homo sapiens
  misc_RNA (1)...(19): siRNA sense strand
ugacgaaaguggaaaugga

SEQ ID NO: 731705 - RNA, 19 nt, Homo sapiens
  misc_RNA (1)...(19): siRNA sense strand
cagaaggcauugacucaga

SEQ ID NO: 731706 - RNA, 19 nt, Homo sapiens
  misc_RNA (1)...(19): siRNA sense strand
ucaaggagaggaagaacua

SEQ ID NO: 731707 - RNA, 19 nt, Homo sapiens
  misc_RNA (1)...(19): siRNA sense strand
cgacaaaggguuucucugu

SEQ ID NO: 731708 - RNA, 19 nt, Homo sapiens
  misc_RNA (1)...(19): siRNA sense strand
cugccaaggugaagagaua

SEQ ID NO: 731709 - RNA, 19 nt, Homo sapiens
  misc_RNA (1)...(19): siRNA sense strand
gcugagauccugagucaug

SEQ ID NO: 731710 - RNA, 19 nt, Homo sapiens
  misc_RNA (1)...(19): siRNA sense strand
uauauucagucucugugua

SEQ ID NO: 731711 - RNA, 19 nt, Homo sapiens
  misc_RNA (1)...(19): siRNA sense strand
ccucaaguuucucugcaua

SEQ ID NO: 731712 - RNA, 19 nt, Homo sapiens
  misc_RNA (1)...(19): siRNA sense strand
gauccugagucauguguuc

SEQ ID NO: 731713 - RNA, 19 nt, Homo sapiens
  misc_RNA (1)...(19): siRNA sense strand
caaggaacccauaaagaug

SEQ ID NO: 731714 - RNA, 19 nt, Homo sapiens
  misc_RNA (1)...(19): siRNA sense strand
caaaacaguuguaccuaaa

SEQ ID NO: 731715 - RNA, 19 nt, Homo sapiens
  misc_RNA (1)...(19): siRNA sense strand
ggagaggaagaacuaguuu

SEQ ID NO: 731716 - RNA, 19 nt, Homo sapiens
  misc_RNA (1)...(19): siRNA sense strand
gacaaggaacccauaaaga

SEQ ID NO: 731717 - RNA, 19 nt, Homo sapiens
  misc_RNA (1)...(19): siRNA sense strand
gaaaccugcucuacgaacu

SEQ ID NO: 731718 - RNA, 19 nt, Homo sapiens
  misc_RNA (1)...(19): siRNA sense strand
gauagugacaccuccugua

SEQ ID NO: 731719 - RNA, 19 nt, Homo sapiens
  misc_RNA (1)...(19): siRNA sense strand
ugaaaugaccucccuaagu

SEQ ID NO: 731720 - RNA, 19 nt, Homo sapiens
  misc_RNA (1)...(19): siRNA sense strand
caaggaagccgagucguau

SEQ ID NO: 731721 - RNA, 19 nt, Homo sapiens
  misc_RNA (1)...(19): siRNA sense strand
guauuccaguucagauaaa

SEQ ID NO: 731722 - RNA, 19 nt, Homo sapiens
  misc_RNA (1)...(19): siRNA sense strand
cagugcauauacacaauaa

SEQ ID NO: 731723 - RNA, 19 nt, Homo sapiens
  misc_RNA (1)...(19): siRNA sense strand
acaaggaacccauaaagau

SEQ ID NO: 731724 - RNA, 19 nt, Homo sapiens
  misc_RNA (1)...(19): siRNA sense strand
gugcauauacacaauaaug

SEQ ID NO: 731725 - RNA, 19 nt, Homo sapiens
  misc_RNA (1)...(19): siRNA sense strand
gcugguauauucagucucu

SEQ ID NO: 731726 - RNA, 19 nt, Homo sapiens
  misc_RNA (1)...(19): siRNA sense strand
gguauuccaguucagauaa

SEQ ID NO: 731727 - RNA, 19 nt, Homo sapiens
  misc_RNA (1)...(19): siRNA sense strand
gagagaaagcuauccagau

SEQ ID NO: 731728 - RNA, 19 nt, Homo sapiens
  misc_RNA (1)...(19): siRNA sense strand
ggaggaaggcagcugguau

SEQ ID NO: 731729 - RNA, 19 nt, Homo sapiens
  misc_RNA (1)...(19): siRNA sense strand
gcaccucaacuguaccaaa

SEQ ID NO: 731730 - RNA, 19 nt, Homo sapiens
  misc_RNA (1)...(19): siRNA sense strand
ggaaggcagcugguauauu

SEQ ID NO: 731731 - RNA, 19 nt, Homo sapiens
  misc_RNA (1)...(19): siRNA sense strand
acaaggaagccgagucgua

SEQ ID NO: 731732 - RNA, 19 nt, Homo sapiens
  misc_RNA (1)...(19): siRNA sense strand
gucaacaaccacagcuuua

SEQ ID NO: 731733 - RNA, 19 nt, Homo sapiens
  misc_RNA (1)...(19): siRNA sense strand
uaaguuuccuggcauuucu

SEQ ID NO: 731734 - RNA, 19 nt, Homo sapiens
  misc_RNA (1)...(19): siRNA sense strand
gaaaguggaaauggagaug

SEQ ID NO: 731735 - RNA, 19 nt, Homo sapiens
  misc_RNA (1)...(19): siRNA sense strand
ugccgaggcugacuuccua

SEQ ID NO: 731736 - RNA, 19 nt, Homo sapiens
  misc_RNA (1)...(19): siRNA sense strand
caacuguaccaaagaggaa

SEQ ID NO: 731737 - RNA, 19 nt, Homo sapiens
  misc_RNA (1)...(19): siRNA sense strand
gaagccgagucguaucaag

SEQ ID NO: 731738 - RNA, 19 nt, Homo sapiens
  misc_RNA (1)...(19): siRNA sense strand
caccucaacuguaccaaag

SEQ ID NO: 731739 - RNA, 19 nt, Homo sapiens
  misc_RNA (1)...(19): siRNA sense strand
ucacagugcauauacacaa

SEQ ID NO: 731740 - RNA, 19 nt, Homo sapiens
  misc_RNA (1)...(19): siRNA sense strand
guggagaaccucaaguuuc

SEQ ID NO: 731741 - RNA, 19 nt, Homo sapiens
  misc_RNA (1)...(19): siRNA sense strand
ggacaugaucuuccuucug

SEQ ID NO: 731742 - RNA, 19 nt, Homo sapiens
  misc_RNA (1)...(19): siRNA sense strand
gacauucuuggaagccuua

SEQ ID NO: 731743 - RNA, 19 nt, Homo sapiens
  misc_RNA (1)...(19): siRNA sense strand
gacagacaaggaacccaua

SEQ ID NO: 731744 - RNA, 19 nt, Homo sapiens
  misc_RNA (1)...(19): siRNA sense strand
cccaggcuauguauccuuu

SEQ ID NO: 731745 - RNA, 19 nt, Homo sapiens
  misc_RNA (1)...(19): siRNA sense strand
ggucaacauugguauucca

SEQ ID NO: 731746 - RNA, 19 nt, Homo sapiens
  misc_RNA (1)...(19): siRNA sense strand
ugacaccuccuguagacaa

SEQ ID NO: 731747 - RNA, 19 nt, Homo sapiens
  misc_RNA (1)...(19): siRNA sense strand
caaggucaacauugguauu

SEQ ID NO: 731748 - RNA, 19 nt, Homo sapiens
  misc_RNA (1)...(19): siRNA sense strand
uguguaaucaucugaagaa

SEQ ID NO: 731749 - RNA, 19 nt, Homo sapiens
  misc_RNA (1)...(19): siRNA sense strand
augcugagauccugaguca

SEQ ID NO: 731750 - RNA, 19 nt, Homo sapiens
  misc_RNA (1)...(19): siRNA sense strand
agaacuccucuauaucaua

SEQ ID NO: 731751 - RNA, 19 nt, Homo sapiens
  misc_RNA (1)...(19): siRNA sense strand
agacaaggaacccauaaag

SEQ ID NO: 731752 - RNA, 19 nt, Homo sapiens
  misc_RNA (1)...(19): siRNA sense strand
caugaucuuccuucugaaa

SEQ ID NO: 731753 - RNA, 19 nt, Homo sapiens
  misc_RNA (1)...(19): siRNA sense strand
cagaacuccucuauaucau

SEQ ID NO: 731754 - RNA, 19 nt, Homo sapiens
  misc_RNA (1)...(19): siRNA sense strand
acucagagaacuuaaagga

SEQ ID NO: 731755 - RNA, 19 nt, Homo sapiens
  misc_RNA (1)...(19): siRNA sense strand
ugucaacaaccacagcuuu

SEQ ID NO: 731756 - RNA, 19 nt, Homo sapiens
  misc_RNA (1)...(19): siRNA sense strand
cgaacugucagaaggcauu

SEQ ID NO: 731757 - RNA, 19 nt, Homo sapiens
  misc_RNA (1)...(19): siRNA sense strand
ugagugaggaagacccuuu

SEQ ID NO: 731758 - RNA, 19 nt, Homo sapiens
  misc_RNA (1)...(19): siRNA sense strand
gagaggaagaacuaguuuc

SEQ ID NO: 731759 - RNA, 19 nt, Homo sapiens
  misc_RNA (1)...(19): siRNA sense strand
cugcagcaccucaacugua

SEQ ID NO: 731760 - RNA, 19 nt, Homo sapiens
  misc_RNA (1)...(19): siRNA sense strand
gcccuagacuggcugaaaa

SEQ ID NO: 731761 - RNA, 19 nt, Homo sapiens
  misc_RNA (1)...(19): siRNA sense strand
cacagugcauauacacaau

SEQ ID NO: 731762 - RNA, 19 nt, Homo sapiens
  misc_RNA (1)...(19): siRNA sense strand
gcauugacucagagaacuu

SEQ ID NO: 731763 - RNA, 19 nt, Homo sapiens
  misc_RNA (1)...(19): siRNA sense strand
cagcugguauauucagucu

SEQ ID NO: 731764 - RNA, 19 nt, Homo sapiens
  misc_RNA (1)...(19): siRNA sense strand
uauaucauacggcagaaga

SEQ ID NO: 731765 - RNA, 19 nt, Homo sapiens
  misc_RNA (1)...(19): siRNA sense strand
cauugacucagagaacuua

SEQ ID NO: 731766 - RNA, 19 nt, Homo sapiens
  misc_RNA (1)...(19): siRNA sense strand
ccucaacuguaccaaagag

SEQ ID NO: 731767 - RNA, 19 nt, Homo sapiens
  misc_RNA (1)...(19): siRNA sense strand
uggagaugguccugcagaa

SEQ ID NO: 731768 - RNA, 19 nt, Homo sapiens
  misc_RNA (1)...(19): siRNA sense strand
cagacaaggaacccauaaa

SEQ ID NO: 731769 - RNA, 19 nt, Homo sapiens
  misc_RNA (1)...(19): siRNA sense strand
cagagaacuuaaaggacau

SEQ ID NO: 731770 - RNA, 19 nt, Homo sapiens
  misc_RNA (1)...(19): siRNA sense strand
gaaggcauugacucagaga

SEQ ID NO: 731771 - RNA, 19 nt, Homo sapiens
  misc_RNA (1)...(19): siRNA sense strand
gaaaucucaaggucaacau

SEQ ID NO: 731772 - RNA, 19 nt, Homo sapiens
  misc_RNA (1)...(19): siRNA sense strand
acagugcauauacacaaua

SEQ ID NO: 731773 - RNA, 19 nt, Homo sapiens
  misc_RNA (1)...(19): siRNA sense strand
gagaaacaagguaaaauag

SEQ ID NO: 731774 - RNA, 19 nt, Homo sapiens
  misc_RNA (1)...(19): siRNA sense strand
aaaugaccucccuaaguuu

SEQ ID NO: 731775 - RNA, 19 nt, Homo sapiens
  misc_RNA (1)...(19): siRNA sense strand
gaacugucagaaggcauug

SEQ ID NO: 731776 - RNA, 19 nt, Homo sapiens
  misc_RNA (1)...(19): siRNA sense strand
ggacugcuucguguucugu

SEQ ID NO: 731777 - RNA, 19 nt, Homo sapiens
  misc_RNA (1)...(19): siRNA sense strand
acauugguauuccaguuca

SEQ ID NO: 731778 - RNA, 19 nt, Homo sapiens
  misc_RNA (1)...(19): siRNA sense strand
acagacaaggaacccauaa

SEQ ID NO: 731779 - RNA, 19 nt, Homo sapiens
  misc_RNA (1)...(19): siRNA sense strand
gagaaacauagagaaauac

SEQ ID NO: 731780 - RNA, 19 nt, Homo sapiens
  misc_RNA (1)...(19): siRNA sense strand
ugacucagagaacuuaaag

SEQ ID NO: 731781 - RNA, 19 nt, Homo sapiens
  misc_RNA (1)...(19): siRNA sense strand
aaguuucucugcauaggau

SEQ ID NO: 731782 - RNA, 19 nt, Homo sapiens
  misc_RNA (1)...(19): siRNA sense strand
guguaaucaucugaagaaa

SEQ ID NO: 731783 - RNA, 19 nt, Homo sapiens
  misc_RNA (1)...(19): siRNA sense strand
ggagaugguccugcagaag

SEQ ID NO: 731784 - RNA, 19 nt, Homo sapiens
  misc_RNA (1)...(19): siRNA sense strand
gcucuacgaacugucagaa

SEQ ID NO: 731785 - RNA, 19 nt, Homo sapiens
  misc_RNA (1)...(19): siRNA sense strand
gaaaugaccucccuaaguu

SEQ ID NO: 731786 - RNA, 19 nt, Homo sapiens
  misc_RNA (1)...(19): siRNA sense strand
gacaugaucuuccuucuga

SEQ ID NO: 731787 - RNA, 19 nt, Homo sapiens
  misc_RNA (1)...(19): siRNA sense strand
caaaggguuucucuguuua

SEQ ID NO: 731788 - RNA, 19 nt, Homo sapiens
  misc_RNA (1)...(19): siRNA sense strand
uggcagaacuccucuauau

SEQ ID NO: 731789 - RNA, 19 nt, Homo sapiens
  misc_RNA (1)...(19): siRNA sense strand
gcagaacuccucuauauca

SEQ ID NO: 731790 - RNA, 19 nt, Homo sapiens
  misc_RNA (1)...(19): siRNA sense strand
acaaaggguuucucuguuu

SEQ ID NO: 731791 - RNA, 19 nt, Homo sapiens
  misc_RNA (1)...(19): siRNA sense strand
gaacuccucuauaucauac

SEQ ID NO: 731792 - RNA, 19 nt, Homo sapiens
  misc_RNA (1)...(19): siRNA sense strand
caacauugguauuccaguu

SEQ ID NO: 731793 - RNA, 19 nt, Homo sapiens
  misc_RNA (1)...(19): siRNA sense strand
gacaaaggguuucucuguu

SEQ ID NO: 731794 - RNA, 19 nt, Homo sapiens
  misc_RNA (1)...(19): siRNA sense strand
gaaagacucgcuucccaaa

SEQ ID NO: 731795 - RNA, 19 nt, Homo sapiens
  misc_RNA (1)...(19): siRNA sense strand
gcaaaacaguuguaccuaa

SEQ ID NO: 731796 - RNA, 19 nt, Homo sapiens
  misc_RNA (1)...(19): siRNA sense strand
gaacuuaaaggacaugauc

SEQ ID NO: 731797 - RNA, 19 nt, Homo sapiens
  misc_RNA (1)...(19): siRNA sense strand
gaagaacuaguuucccaaa

SEQ ID NO: 731798 - RNA, 19 nt, Homo sapiens
  misc_RNA (1)...(19): siRNA sense strand
cagaaggcauugacucaga

SEQ ID NO: 731799 - RNA, 19 nt, Homo sapiens
  misc_RNA (1)...(19): siRNA sense strand
ucaaggagaggaagaacua

SEQ ID NO: 731800 - RNA, 19 nt, Homo sapiens
  misc_RNA (1)...(19): siRNA sense strand
cgacaaaggguuucucugu

SEQ ID NO: 731801 - RNA, 19 nt, Homo sapiens
  misc_RNA (1)...(19): siRNA sense strand
ccucaaguuucucugcaua

SEQ ID NO: 731802 - RNA, 19 nt, Homo sapiens
  misc_RNA (1)...(19): siRNA sense strand
caaaacaguuguaccuaaa

SEQ ID NO: 731803 - RNA, 19 nt, Homo sapiens
  misc_RNA (1)...(19): siRNA sense strand
ggagaggaagaacuaguuu

SEQ ID NO: 731804 - RNA, 19 nt, Homo sapiens
  misc_RNA (1)...(19): siRNA sense strand
gaaaccugcucuacgaacu

SEQ ID NO: 731805 - RNA, 19 nt, Homo sapiens
  misc_RNA (1)...(19): siRNA sense strand
gauagugacaccuccugua

SEQ ID NO: 731806 - RNA, 19 nt, Homo sapiens
  misc_RNA (1)...(19): siRNA sense strand
ugaaaugaccucccuaagu

SEQ ID NO: 731807 - RNA, 19 nt, Homo sapiens
  misc_RNA (1)...(19): siRNA sense strand
guauuccaguucagauaaa

SEQ ID NO: 731808 - RNA, 19 nt, Homo sapiens
  misc_RNA (1)...(19): siRNA sense strand
caaggaagccgagucguau

SEQ ID NO: 731809 - RNA, 19 nt, Homo sapiens
  misc_RNA (1)...(19): siRNA sense strand
gguauuccaguucagauaa

SEQ ID NO: 731810 - RNA, 19 nt, Homo sapiens
  misc_RNA (1)...(19): siRNA sense strand
gagagaaagcuauccagau

SEQ ID NO: 731811 - RNA, 19 nt, Homo sapiens
  misc_RNA (1)...(19): siRNA sense strand
gcaccucaacuguaccaaa

SEQ ID NO: 731812 - RNA, 19 nt, Homo sapiens
  misc_RNA (1)...(19): siRNA sense strand
acaaggaagccgagucgua

SEQ ID NO: 731813 - RNA, 19 nt, Homo sapiens
  misc_RNA (1)...(19): siRNA sense strand
gucaacaaccacagcuuua

SEQ ID NO: 731814 - RNA, 19 nt, Homo sapiens
  misc_RNA (1)...(19): siRNA sense strand
uaaguuuccuggcauuucu

SEQ ID NO: 731815 - RNA, 19 nt, Homo sapiens
  misc_RNA (1)...(19): siRNA sense strand
caacuguaccaaagaggaa

SEQ ID NO: 731816 - RNA, 19 nt, Homo sapiens
  misc_RNA (1)...(19): siRNA sense strand
gaagccgagucguaucaag

SEQ ID NO: 731817 - RNA, 19 nt, Homo sapiens
  misc_RNA (1)...(19): siRNA sense strand
caccucaacuguaccaaag

SEQ ID NO: 731818 - RNA, 19 nt, Homo sapiens
  misc_RNA (1)...(19): siRNA sense strand
ggacaugaucuuccuucug

SEQ ID NO: 731819 - RNA, 19 nt, Homo sapiens
  misc_RNA (1)...(19): siRNA sense strand
guggagaaccucaaguuuc

SEQ ID NO: 731820 - RNA, 19 nt, Homo sapiens
  misc_RNA (1)...(19): siRNA sense strand
gacauucuuggaagccuua

SEQ ID NO: 731821 - RNA, 19 nt, Homo sapiens
  misc_RNA (1)...(19): siRNA sense strand
gacagacaaggaacccaua

SEQ ID NO: 731822 - RNA, 19 nt, Homo sapiens
  misc_RNA (1)...(19): siRNA sense strand
ggucaacauugguauucca

SEQ ID NO: 731823 - RNA, 19 nt, Homo sapiens
  misc_RNA (1)...(19): siRNA sense strand
ugacaccuccuguagacaa

SEQ ID NO: 731824 - RNA, 19 nt, Homo sapiens
  misc_RNA (1)...(19): siRNA sense strand
caaggucaacauugguauu

SEQ ID NO: 731825 - RNA, 19 nt, Homo sapiens
  misc_RNA (1)...(19): siRNA sense strand
cagaacuccucuauaucau

SEQ ID NO: 731826 - RNA, 19 nt, Homo sapiens
  misc_RNA (1)...(19): siRNA sense strand
caugaucuuccuucugaaa

SEQ ID NO: 731827 - RNA, 19 nt, Homo sapiens
  misc_RNA (1)...(19): siRNA sense strand
acucagagaacuuaaagga

SEQ ID NO: 731828 - RNA, 19 nt, Homo sapiens
  misc_RNA (1)...(19): siRNA sense strand
agaacuccucuauaucaua

SEQ ID NO: 731829 - RNA, 19 nt, Homo sapiens
  misc_RNA (1)...(19): siRNA sense strand
ugucaacaaccacagcuuu

SEQ ID NO: 731830 - RNA, 19 nt, Homo sapiens
  misc_RNA (1)...(19): siRNA sense strand
ugagugaggaagacccuuu

SEQ ID NO: 731831 - RNA, 19 nt, Homo sapiens
  misc_RNA (1)...(19): siRNA sense strand
gagaggaagaacuaguuuc

SEQ ID NO: 731832 - RNA, 19 nt, Homo sapiens
  misc_RNA (1)...(19): siRNA sense strand
cgaacugucagaaggcauu

SEQ ID NO: 731833 - RNA, 19 nt, Homo sapiens
  misc_RNA (1)...(19): siRNA sense strand
cugcagcaccucaacugua

SEQ ID NO: 731834 - RNA, 19 nt, Homo sapiens
  misc_RNA (1)...(19): siRNA sense strand
uauaucauacggcagaaga

SEQ ID NO: 731835 - RNA, 19 nt, Homo sapiens
  misc_RNA (1)...(19): siRNA sense strand
cauugacucagagaacuua

SEQ ID NO: 731836 - RNA, 19 nt, Homo sapiens
  misc_RNA (1)...(19): siRNA sense strand
gcauugacucagagaacuu

SEQ ID NO: 731837 - RNA, 19 nt, Homo sapiens
  misc_RNA (1)...(19): siRNA sense strand
ccucaacuguaccaaagag

SEQ ID NO: 731838 - RNA, 19 nt, Homo sapiens
  misc_RNA (1)...(19): siRNA sense strand
cagagaacuuaaaggacau

SEQ ID NO: 731839 - RNA, 19 nt, Homo sapiens
  misc_RNA (1)...(19): siRNA sense strand
gaaggcauugacucagaga

SEQ ID NO: 731840 - RNA, 19 nt, Homo sapiens
  misc_RNA (1)...(19): siRNA sense strand
gaaaucucaaggucaacau

SEQ ID NO: 731841 - RNA, 19 nt, Homo sapiens
  misc_RNA (1)...(19): siRNA sense strand
gagaaacaagguaaaauag

SEQ ID NO: 731842 - RNA, 19 nt, Homo sapiens
  misc_RNA (1)...(19): siRNA sense strand
aaaugaccucccuaaguuu

SEQ ID NO: 731843 - RNA, 19 nt, Homo sapiens
  misc_RNA (1)...(19): siRNA sense strand
gaacugucagaaggcauug

SEQ ID NO: 731844 - RNA, 19 nt, Homo sapiens
  misc_RNA (1)...(19): siRNA sense strand
acagacaaggaacccauaa

SEQ ID NO: 731845 - RNA, 19 nt, Homo sapiens
  misc_RNA (1)...(19): siRNA sense strand
gagaaacauagagaaauac

SEQ ID NO: 731846 - RNA, 19 nt, Homo sapiens
  misc_RNA (1)...(19): siRNA sense strand
ugacucagagaacuuaaag

SEQ ID NO: 731847 - RNA, 19 nt, Homo sapiens
  misc_RNA (1)...(19): siRNA sense strand
acauugguauuccaguuca

SEQ ID NO: 731848 - RNA, 19 nt, Homo sapiens
  misc_RNA (1)...(19): siRNA sense strand
aaguuucucugcauaggau

SEQ ID NO: 731849 - RNA, 19 nt, Homo sapiens
  misc_RNA (1)...(19): siRNA sense strand
gcucuacgaacugucagaa

SEQ ID NO: 731850 - RNA, 19 nt, Homo sapiens
  misc_RNA (1)...(19): siRNA sense strand
ggcauugacucagagaacu

SEQ ID NO: 731851 - RNA, 19 nt, Homo sapiens
  misc_RNA (1)...(19): siRNA sense strand
uguggagaaccucaaguuu

SEQ ID NO: 731852 - RNA, 19 nt, Homo sapiens
  misc_RNA (1)...(19): siRNA sense strand
caaguuucucugcauagga

SEQ ID NO: 731853 - RNA, 19 nt, Homo sapiens
  misc_RNA (1)...(19): siRNA sense strand
ucaaguuucucugcauagg

SEQ ID NO: 731854 - RNA, 19 nt, Homo sapiens
  misc_RNA (1)...(19): siRNA sense strand
gaaaugaccucccuaaguu

SEQ ID NO: 731855 - RNA, 19 nt, Homo sapiens
  misc_RNA (1)...(19): siRNA sense strand
gaaggcagcugguauauuc

SEQ ID NO: 731856 - RNA, 19 nt, Homo sapiens
  misc_RNA (1)...(19): siRNA sense strand
gacaugaucuuccuucuga

SEQ ID NO: 731857 - RNA, 19 nt, Homo sapiens
  misc_RNA (1)...(19): siRNA sense strand
caaaggguuucucuguuua

SEQ ID NO: 731858 - RNA, 19 nt, Homo sapiens
  misc_RNA (1)...(19): siRNA sense strand
gaucaugucucacuucaca

SEQ ID NO: 731859 - RNA, 19 nt, Homo sapiens
  misc_RNA (1)...(19): siRNA sense strand
uggcagaacuccucuauau

SEQ ID NO: 731860 - RNA, 19 nt, Homo sapiens
  misc_RNA (1)...(19): siRNA sense strand
gcagaacuccucuauauca

SEQ ID NO: 731861 - RNA, 19 nt, Homo sapiens
  misc_RNA (1)...(19): siRNA sense strand
acaaaggguuucucuguuu

SEQ ID NO: 731862 - RNA, 19 nt, Homo sapiens
  misc_RNA (1)...(19): siRNA sense strand
gaacuccucuauaucauac

SEQ ID NO: 731863 - RNA, 19 nt, Homo sapiens
  misc_RNA (1)...(19): siRNA sense strand
caacauugguauuccaguu

SEQ ID NO: 731864 - RNA, 19 nt, Homo sapiens
  misc_RNA (1)...(19): siRNA sense strand
gacaaaggguuucucuguu

SEQ ID NO: 731865 - RNA, 19 nt, Homo sapiens
  misc_RNA (1)...(19): siRNA sense strand
gaaagacucgcuucccaaa

SEQ ID NO: 731866 - RNA, 19 nt, Homo sapiens
  misc_RNA (1)...(19): siRNA sense strand
gcaaaacaguuguaccuaa

SEQ ID NO: 731867 - RNA, 19 nt, Homo sapiens
  misc_RNA (1)...(19): siRNA sense strand
gaacuuaaaggacaugauc

SEQ ID NO: 731868 - RNA, 19 nt, Homo sapiens
  misc_RNA (1)...(19): siRNA sense strand
ccauaaagaugcugagauc

SEQ ID NO: 731869 - RNA, 19 nt, Homo sapiens
  misc_RNA (1)...(19): siRNA sense strand
gaggaaggcagcugguaua

SEQ ID NO: 731870 - RNA, 19 nt, Homo sapiens
  misc_RNA (1)...(19): siRNA sense strand
gaagaacuaguuucccaaa

SEQ ID NO: 731871 - RNA, 19 nt, Homo sapiens
  misc_RNA (1)...(19): siRNA sense strand
acaauaaugugacgaaagu

SEQ ID NO: 731872 - RNA, 19 nt, Homo sapiens
  misc_RNA (1)...(19): siRNA sense strand
gaggcugacuuccuacuug

SEQ ID NO: 731873 - RNA, 19 nt, Homo sapiens
  misc_RNA (1)...(19): siRNA sense strand
ugacgaaaguggaaaugga

SEQ ID NO: 731874 - RNA, 19 nt, Homo sapiens
  misc_RNA (1)...(19): siRNA sense strand
cagaaggcauugacucaga

SEQ ID NO: 731875 - RNA, 19 nt, Homo sapiens
  misc_RNA (1)...(19): siRNA sense strand
ucaaggagaggaagaacua

SEQ ID NO: 731876 - RNA, 19 nt, Homo sapiens
  misc_RNA (1)...(19): siRNA sense strand
cgacaaaggguuucucugu

SEQ ID NO: 731877 - RNA, 19 nt, Homo sapiens
  misc_RNA (1)...(19): siRNA sense strand
cugccaaggugaagagaua

SEQ ID NO: 731878 - RNA, 19 nt, Homo sapiens
  misc_RNA (1)...(19): siRNA sense strand
gcugagauccugagucaug

SEQ ID NO: 731879 - RNA, 19 nt, Homo sapiens
  misc_RNA (1)...(19): siRNA sense strand
uauauucagucucugugua

SEQ ID NO: 731880 - RNA, 19 nt, Homo sapiens
  misc_RNA (1)...(19): siRNA sense strand
ccucaaguuucucugcaua

SEQ ID NO: 731881 - RNA, 19 nt, Homo sapiens
  misc_RNA (1)...(19): siRNA sense strand
gauccugagucauguguuc

SEQ ID NO: 731882 - RNA, 19 nt, Homo sapiens
  misc_RNA (1)...(19): siRNA sense strand
caaggaacccauaaagaug

SEQ ID NO: 731883 - RNA, 19 nt, Homo sapiens
  misc_RNA (1)...(19): siRNA sense strand
caaaacaguuguaccuaaa

SEQ ID NO: 731884 - RNA, 19 nt, Homo sapiens
  misc_RNA (1)...(19): siRNA sense strand
ggagaggaagaacuaguuu

SEQ ID NO: 731885 - RNA, 19 nt, Homo sapiens
  misc_RNA (1)...(19): siRNA sense strand
gacaaggaacccauaaaga

SEQ ID NO: 731886 - RNA, 19 nt, Homo sapiens
  misc_RNA (1)...(19): siRNA sense strand
gaaaccugcucuacgaacu

SEQ ID NO: 731887 - RNA, 19 nt, Homo sapiens
  misc_RNA (1)...(19): siRNA sense strand
gauagugacaccuccugua

SEQ ID NO: 731888 - RNA, 19 nt, Homo sapiens
  misc_RNA (1)...(19): siRNA sense strand
ugaaaugaccucccuaagu

SEQ ID NO: 731889 - RNA, 19 nt, Homo sapiens
  misc_RNA (1)...(19): siRNA sense strand
caaggaagccgagucguau

SEQ ID NO: 731890 - RNA, 19 nt, Homo sapiens
  misc_RNA (1)...(19): siRNA sense strand
guauuccaguucagauaaa

SEQ ID NO: 731891 - RNA, 19 nt, Homo sapiens
  misc_RNA (1)...(19): siRNA sense strand
cagugcauauacacaauaa

SEQ ID NO: 731892 - RNA, 19 nt, Homo sapiens
  misc_RNA (1)...(19): siRNA sense strand
acaaggaacccauaaagau

SEQ ID NO: 731893 - RNA, 19 nt, Homo sapiens
  misc_RNA (1)...(19): siRNA sense strand
gugcauauacacaauaaug

SEQ ID NO: 731894 - RNA, 19 nt, Homo sapiens
  misc_RNA (1)...(19): siRNA sense strand
gcugguauauucagucucu

SEQ ID NO: 731895 - RNA, 19 nt, Homo sapiens
  misc_RNA (1)...(19): siRNA sense strand
gguauuccaguucagauaa

SEQ ID NO: 731896 - RNA, 19 nt, Homo sapiens
  misc_RNA (1)...(19): siRNA sense strand
gagagaaagcuauccagau

SEQ ID NO: 731897 - RNA, 19 nt, Homo sapiens
  misc_RNA (1)...(19): siRNA sense strand
ggaggaaggcagcugguau

SEQ ID NO: 731898 - RNA, 19 nt, Homo sapiens
  misc_RNA (1)...(19): siRNA sense strand
gcaccucaacuguaccaaa

SEQ ID NO: 731899 - RNA, 19 nt, Homo sapiens
  misc_RNA (1)...(19): siRNA sense strand
ggaaggcagcugguauauu

SEQ ID NO: 731900 - RNA, 19 nt, Homo sapiens
  misc_RNA (1)...(19): siRNA sense strand
acaaggaagccgagucgua

SEQ ID NO: 731901 - RNA, 19 nt, Homo sapiens
  misc_RNA (1)...(19): siRNA sense strand
gucaacaaccacagcuuua

SEQ ID NO: 731902 - RNA, 19 nt, Homo sapiens
  misc_RNA (1)...(19): siRNA sense strand
uaaguuuccuggcauuucu

SEQ ID NO: 731903 - RNA, 19 nt, Homo sapiens
  misc_RNA (1)...(19): siRNA sense strand
gaaaguggaaauggagaug

SEQ ID NO: 731904 - RNA, 19 nt, Homo sapiens
  misc_RNA (1)...(19): siRNA sense strand
ugccgaggcugacuuccua

SEQ ID NO: 731905 - RNA, 19 nt, Homo sapiens
  misc_RNA (1)...(19): siRNA sense strand
caacuguaccaaagaggaa

SEQ ID NO: 731906 - RNA, 19 nt, Homo sapiens
  misc_RNA (1)...(19): siRNA sense strand
gaagccgagucguaucaag

SEQ ID NO: 731907 - RNA, 19 nt, Homo sapiens
  misc_RNA (1)...(19): siRNA sense strand
caccucaacuguaccaaag

SEQ ID NO: 731908 - RNA, 19 nt, Homo sapiens
  misc_RNA (1)...(19): siRNA sense strand
ucacagugcauauacacaa

SEQ ID NO: 731909 - RNA, 19 nt, Homo sapiens
  misc_RNA (1)...(19): siRNA sense strand
guggagaaccucaaguuuc

SEQ ID NO: 731910 - RNA, 19 nt, Homo sapiens
  misc_RNA (1)...(19): siRNA sense strand
ggacaugaucuuccuucug

SEQ ID NO: 731911 - RNA, 19 nt, Homo sapiens
  misc_RNA (1)...(19): siRNA sense strand
gacauucuuggaagccuua

SEQ ID NO: 731912 - RNA, 19 nt, Homo sapiens
  misc_RNA (1)...(19): siRNA sense strand
gacagacaaggaacccaua

SEQ ID NO: 731913 - RNA, 19 nt, Homo sapiens
  misc_RNA (1)...(19): siRNA sense strand
cccaggcuauguauccuuu

SEQ ID NO: 731914 - RNA, 19 nt, Homo sapiens
  misc_RNA (1)...(19): siRNA sense strand
ggucaacauugguauucca

SEQ ID NO: 731915 - RNA, 19 nt, Homo sapiens
  misc_RNA (1)...(19): siRNA sense strand
ugacaccuccuguagacaa

SEQ ID NO: 731916 - RNA, 19 nt, Homo sapiens
  misc_RNA (1)...(19): siRNA sense strand
caaggucaacauugguauu

SEQ ID NO: 731917 - RNA, 19 nt, Homo sapiens
  misc_RNA (1)...(19): siRNA sense strand
uguguaaucaucugaagaa

SEQ ID NO: 731918 - RNA, 19 nt, Homo sapiens
  misc_RNA (1)...(19): siRNA sense strand
augcugagauccugaguca

SEQ ID NO: 731919 - RNA, 19 nt, Homo sapiens
  misc_RNA (1)...(19): siRNA sense strand
agaacuccucuauaucaua

SEQ ID NO: 731920 - RNA, 19 nt, Homo sapiens
  misc_RNA (1)...(19): siRNA sense strand
agacaaggaacccauaaag

SEQ ID NO: 731921 - RNA, 19 nt, Homo sapiens
  misc_RNA (1)...(19): siRNA sense strand
caugaucuuccuucugaaa

SEQ ID NO: 731922 - RNA, 19 nt, Homo sapiens
  misc_RNA (1)...(19): siRNA sense strand
cagaacuccucuauaucau

SEQ ID NO: 731923 - RNA, 19 nt, Homo sapiens
  misc_RNA (1)...(19): siRNA sense strand
acucagagaacuuaaagga

SEQ ID NO: 731924 - RNA, 19 nt, Homo sapiens
  misc_RNA (1)...(19): siRNA sense strand
ugucaacaaccacagcuuu

SEQ ID NO: 731925 - RNA, 19 nt, Homo sapiens
  misc_RNA (1)...(19): siRNA sense strand
cgaacugucagaaggcauu

SEQ ID NO: 731926 - RNA, 19 nt, Homo sapiens
  misc_RNA (1)...(19): siRNA sense strand
ugagugaggaagacccuuu

SEQ ID NO: 731927 - RNA, 19 nt, Homo sapiens
  misc_RNA (1)...(19): siRNA sense strand
gagaggaagaacuaguuuc

SEQ ID NO: 731928 - RNA, 19 nt, Homo sapiens
  misc_RNA (1)...(19): siRNA sense strand
cugcagcaccucaacugua

SEQ ID NO: 731929 - RNA, 19 nt, Homo sapiens
  misc_RNA (1)...(19): siRNA sense strand
gcccuagacuggcugaaaa

SEQ ID NO: 731930 - RNA, 19 nt, Homo sapiens
  misc_RNA (1)...(19): siRNA sense strand
cacagugcauauacacaau

SEQ ID NO: 731931 - RNA, 19 nt, Homo sapiens
  misc_RNA (1)...(19): siRNA sense strand
gcauugacucagagaacuu

SEQ ID NO: 731932 - RNA, 19 nt, Homo sapiens
  misc_RNA (1)...(19): siRNA sense strand
cagcugguauauucagucu

SEQ ID NO: 731933 - RNA, 19 nt, Homo sapiens
  misc_RNA (1)...(19): siRNA sense strand
uauaucauacggcagaaga

SEQ ID NO: 731934 - RNA, 19 nt, Homo sapiens
  misc_RNA (1)...(19): siRNA sense strand
cauugacucagagaacuua

SEQ ID NO: 731935 - RNA, 19 nt, Homo sapiens
  misc_RNA (1)...(19): siRNA sense strand
ccucaacuguaccaaagag

SEQ ID NO: 731936 - RNA, 19 nt, Homo sapiens
  misc_RNA (1)...(19): siRNA sense strand
uggagaugguccugcagaa

SEQ ID NO: 731937 - RNA, 19 nt, Homo sapiens
  misc_RNA (1)...(19): siRNA sense strand
cagacaaggaacccauaaa

SEQ ID NO: 731938 - RNA, 19 nt, Homo sapiens
  misc_RNA (1)...(19): siRNA sense strand
cagagaacuuaaaggacau

SEQ ID NO: 731939 - RNA, 19 nt, Homo sapiens
  misc_RNA (1)...(19): siRNA sense strand
gaaggcauugacucagaga

SEQ ID NO: 731940 - RNA, 19 nt, Homo sapiens
  misc_RNA (1)...(19): siRNA sense strand
gaaaucucaaggucaacau

SEQ ID NO: 731941 - RNA, 19 nt, Homo sapiens
  misc_RNA (1)...(19): siRNA sense strand
acagugcauauacacaaua

SEQ ID NO: 731942 - RNA, 19 nt, Homo sapiens
  misc_RNA (1)...(19): siRNA sense strand
gagaaacaagguaaaauag

SEQ ID NO: 731943 - RNA, 19 nt, Homo sapiens
  misc_RNA (1)...(19): siRNA sense strand
aaaugaccucccuaaguuu

SEQ ID NO: 731944 - RNA, 19 nt, Homo sapiens
  misc_RNA (1)...(19): siRNA sense strand
gaacugucagaaggcauug

SEQ ID NO: 731945 - RNA, 19 nt, Homo sapiens
  misc_RNA (1)...(19): siRNA sense strand
ggacugcuucguguucugu

SEQ ID NO: 731946 - RNA, 19 nt, Homo sapiens
  misc_RNA (1)...(19): siRNA sense strand
acauugguauuccaguuca

SEQ ID NO: 731947 - RNA, 19 nt, Homo sapiens
  misc_RNA (1)...(19): siRNA sense strand
acagacaaggaacccauaa

SEQ ID NO: 731948 - RNA, 19 nt, Homo sapiens
  misc_RNA (1)...(19): siRNA sense strand
gagaaacauagagaaauac

SEQ ID NO: 731949 - RNA, 19 nt, Homo sapiens
  misc_RNA (1)...(19): siRNA sense strand
ugacucagagaacuuaaag

SEQ ID NO: 731950 - RNA, 19 nt, Homo sapiens
  misc_RNA (1)...(19): siRNA sense strand
aaguuucucugcauaggau

SEQ ID NO: 731951 - RNA, 19 nt, Homo sapiens
  misc_RNA (1)...(19): siRNA sense strand
guguaaucaucugaagaaa

SEQ ID NO: 731952 - RNA, 19 nt, Homo sapiens
  misc_RNA (1)...(19): siRNA sense strand
ggagaugguccugcagaag

SEQ ID NO: 731953 - RNA, 19 nt, Homo sapiens
  misc_RNA (1)...(19): siRNA sense strand
gcucuacgaacugucagaa

SEQ ID NO: 731954 - RNA, 19 nt, Homo sapiens
  misc_RNA (1)...(19): siRNA sense strand
cuaagaagcugacuaaugc

SEQ ID NO: 731955 - RNA, 19 nt, Homo sapiens
  misc_RNA (1)...(19): siRNA sense strand
gcuaagaagcugacuaaug

SEQ ID NO: 731956 - RNA, 19 nt, Homo sapiens
  misc_RNA (1)...(19): siRNA sense strand
ccacucaacuuggcucaca

SEQ ID NO: 731957 - RNA, 19 nt, Homo sapiens
  misc_RNA (1)...(19): siRNA sense strand
cugcuaagaagcugacuaa

SEQ ID NO: 731958 - RNA, 19 nt, Homo sapiens
  misc_RNA (1)...(19): siRNA sense strand
gcaugaacgacacccuguu

SEQ ID NO: 731959 - RNA, 19 nt, Homo sapiens
  misc_RNA (1)...(19): siRNA sense strand
ggaaguccuuuuauuacca

SEQ ID NO: 731960 - RNA, 19 nt, Homo sapiens
  misc_RNA (1)...(19): siRNA sense strand
cuaagaagcugacuaaugc

SEQ ID NO: 731961 - RNA, 19 nt, Homo sapiens
  misc_RNA (1)...(19): siRNA sense strand
gcuaagaagcugacuaaug

SEQ ID NO: 731962 - RNA, 19 nt, Homo sapiens
  misc_RNA (1)...(19): siRNA sense strand
ccacucaacuuggcucaca

SEQ ID NO: 731963 - RNA, 19 nt, Homo sapiens
  misc_RNA (1)...(19): siRNA sense strand
cugcuaagaagcugacuaa

SEQ ID NO: 731964 - RNA, 19 nt, Homo sapiens
  misc_RNA (1)...(19): siRNA sense strand
gcaugaacgacacccuguu

SEQ ID NO: 731965 - RNA, 19 nt, Homo sapiens
  misc_RNA (1)...(19): siRNA sense strand
ggaaguccuuuuauuacca

SEQ ID NO: 731966 - RNA, 19 nt, Homo sapiens
  misc_RNA (1)...(19): siRNA sense strand
cuaagaagcugacuaaugc

SEQ ID NO: 731967 - RNA, 19 nt, Homo sapiens
  misc_RNA (1)...(19): siRNA sense strand
gcuaagaagcugacuaaug

SEQ ID NO: 731968 - RNA, 19 nt, Homo sapiens
  misc_RNA (1)...(19): siRNA sense strand
ccacucaacuuggcucaca

SEQ ID NO: 731969 - RNA, 19 nt, Homo sapiens
  misc_RNA (1)...(19): siRNA sense strand
cugcuaagaagcugacuaa

SEQ ID NO: 731970 - RNA, 19 nt, Homo sapiens
  misc_RNA (1)...(19): siRNA sense strand
gcaugaacgacacccuguu

SEQ ID NO: 731971 - RNA, 19 nt, Homo sapiens
  misc_RNA (1)...(19): siRNA sense strand
ggaaguccuuuuauuacca

SEQ ID NO: 731972 - RNA, 19 nt, Homo sapiens
  misc_RNA (1)...(19): siRNA sense strand
cuaagaagcugacuaaugc

SEQ ID NO: 731973 - RNA, 19 nt, Homo sapiens
  misc_RNA (1)...(19): siRNA sense strand
gcuaagaagcugacuaaug

SEQ ID NO: 731974 - RNA, 19 nt, Homo sapiens
  misc_RNA (1)...(19): siRNA sense strand
ccacucaacuuggcucaca

SEQ ID NO: 731975 - RNA, 19 nt, Homo sapiens
  misc_RNA (1)...(19): siRNA sense strand
cugcuaagaagcugacuaa

SEQ ID NO: 731976 - RNA, 19 nt, Homo sapiens
  misc_RNA (1)...(19): siRNA sense strand
gcaugaacgacacccuguu

SEQ ID NO: 731977 - RNA, 19 nt, Homo sapiens
  misc_RNA (1)...(19): siRNA sense strand
ggaaguccuuuuauuacca

SEQ ID NO: 731978 - RNA, 19 nt, Homo sapiens
  misc_RNA (1)...(19): siRNA sense strand
cuaagaagcugacuaaugc

SEQ ID NO: 731979 - RNA, 19 nt, Homo sapiens
  misc_RNA (1)...(19): siRNA sense strand
gcuaagaagcugacuaaug

SEQ ID NO: 731980 - RNA, 19 nt, Homo sapiens
  misc_RNA (1)...(19): siRNA sense strand
ccacucaacuuggcucaca

SEQ ID NO: 731981 - RNA, 19 nt, Homo sapiens
  misc_RNA (1)...(19): siRNA sense strand
cugcuaagaagcugacuaa

SEQ ID NO: 731982 - RNA, 19 nt, Homo sapiens
  misc_RNA (1)...(19): siRNA sense strand
gcaugaacgacacccuguu

SEQ ID NO: 731983 - RNA, 19 nt, Homo sapiens
  misc_RNA (1)...(19): siRNA sense strand
ggaaguccuuuuauuacca

SEQ ID NO: 731984 - RNA, 19 nt, Homo sapiens
  misc_RNA (1)...(19): siRNA sense strand
cuaagaagcugacuaaugc

SEQ ID NO: 731985 - RNA, 19 nt, Homo sapiens
  misc_RNA (1)...(19): siRNA sense strand
gcuaagaagcugacuaaug

SEQ ID NO: 731986 - RNA, 19 nt, Homo sapiens
  misc_RNA (1)...(19): siRNA sense strand
ccacucaacuuggcucaca

SEQ ID NO: 731987 - RNA, 19 nt, Homo sapiens
  misc_RNA (1)...(19): siRNA sense strand
cugcuaagaagcugacuaa

SEQ ID NO: 731988 - RNA, 19 nt, Homo sapiens
  misc_RNA (1)...(19): siRNA sense strand
gcaugaacgacacccuguu

SEQ ID NO: 731989 - RNA, 19 nt, Homo sapiens
  misc_RNA (1)...(19): siRNA sense strand
ggaaguccuuuuauuacca

SEQ ID NO: 731990 - RNA, 19 nt, Homo sapiens
  misc_RNA (1)...(19): siRNA sense strand
ccacucaacuuggcucaca

SEQ ID NO: 731991 - RNA, 19 nt, Homo sapiens
  misc_RNA (1)...(19): siRNA sense strand
gcaugaacgacacccuguu

SEQ ID NO: 731992 - RNA, 19 nt, Homo sapiens
  misc_RNA (1)...(19): siRNA sense strand
ggaaguccuuuuauuacca

SEQ ID NO: 731993 - RNA, 19 nt, Homo sapiens
  misc_RNA (1)...(19): siRNA sense strand
ccacucaacuuggcucaca

SEQ ID NO: 731994 - RNA, 19 nt, Homo sapiens
  misc_RNA (1)...(19): siRNA sense strand
gcaugaacgacacccuguu

SEQ ID NO: 731995 - RNA, 19 nt, Homo sapiens
  misc_RNA (1)...(19): siRNA sense strand
ggaaguccuuuuauuacca

SEQ ID NO: 731996 - RNA, 19 nt, Homo sapiens
  misc_RNA (1)...(19): siRNA sense strand
gaaaugaccucccuaaguu

SEQ ID NO: 731997 - RNA, 19 nt, Homo sapiens
  misc_RNA (1)...(19): siRNA sense strand
gaaggcagcugguauauuc

SEQ ID NO: 731998 - RNA, 19 nt, Homo sapiens
  misc_RNA (1)...(19): siRNA sense strand
gacaugaucuuccuucuga

SEQ ID NO: 731999 - RNA, 19 nt, Homo sapiens
  misc_RNA (1)...(19): siRNA sense strand
caaaggguuucucuguuua

SEQ ID NO: 732000 - RNA, 19 nt, Homo sapiens
  misc_RNA (1)...(19): siRNA sense strand
gaucaugucucacuucaca

SEQ ID NO: 732001 - RNA, 19 nt, Homo sapiens
  misc_RNA (1)...(19): siRNA sense strand
uggcagaacuccucuauau

SEQ ID NO: 732002 - RNA, 19 nt, Homo sapiens
  misc_RNA (1)...(19): siRNA sense strand
gcagaacuccucuauauca

SEQ ID NO: 732003 - RNA, 19 nt, Homo sapiens
  misc_RNA (1)...(19): siRNA sense strand
acaaaggguuucucuguuu

SEQ ID NO: 732004 - RNA, 19 nt, Homo sapiens
  misc_RNA (1)...(19): siRNA sense strand
gaacuccucuauaucauac

SEQ ID NO: 732005 - RNA, 19 nt, Homo sapiens
  misc_RNA (1)...(19): siRNA sense strand
caacauugguauuccaguu

SEQ ID NO: 732006 - RNA, 19 nt, Homo sapiens
  misc_RNA (1)...(19): siRNA sense strand
gacaaaggguuucucuguu

SEQ ID NO: 732007 - RNA, 19 nt, Homo sapiens
  misc_RNA (1)...(19): siRNA sense strand
gaaagacucgcuucccaaa

SEQ ID NO: 732008 - RNA, 19 nt, Homo sapiens
  misc_RNA (1)...(19): siRNA sense strand
gcaaaacaguuguaccuaa

SEQ ID NO: 732009 - RNA, 19 nt, Homo sapiens
  misc_RNA (1)...(19): siRNA sense strand
gaacuuaaaggacaugauc

SEQ ID NO: 732010 - RNA, 19 nt, Homo sapiens
  misc_RNA (1)...(19): siRNA sense strand
ccauaaagaugcugagauc

SEQ ID NO: 732011 - RNA, 19 nt, Homo sapiens
  misc_RNA (1)...(19): siRNA sense strand
gaggaaggcagcugguaua

SEQ ID NO: 732012 - RNA, 19 nt, Homo sapiens
  misc_RNA (1)...(19): siRNA sense strand
gaagaacuaguuucccaaa

SEQ ID NO: 732013 - RNA, 19 nt, Homo sapiens
  misc_RNA (1)...(19): siRNA sense strand
acaauaaugugacgaaagu

SEQ ID NO: 732014 - RNA, 19 nt, Homo sapiens
  misc_RNA (1)...(19): siRNA sense strand
gaggcugacuuccuacuug

SEQ ID NO: 732015 - RNA, 19 nt, Homo sapiens
  misc_RNA (1)...(19): siRNA sense strand
ugacgaaaguggaaaugga

SEQ ID NO: 732016 - RNA, 19 nt, Homo sapiens
  misc_RNA (1)...(19): siRNA sense strand
cagaaggcauugacucaga

SEQ ID NO: 732017 - RNA, 19 nt, Homo sapiens
  misc_RNA (1)...(19): siRNA sense strand
ucaaggagaggaagaacua

SEQ ID NO: 732018 - RNA, 19 nt, Homo sapiens
  misc_RNA (1)...(19): siRNA sense strand
cgacaaaggguuucucugu

SEQ ID NO: 732019 - RNA, 19 nt, Homo sapiens
  misc_RNA (1)...(19): siRNA sense strand
cugccaaggugaagagaua

SEQ ID NO: 732020 - RNA, 19 nt, Homo sapiens
  misc_RNA (1)...(19): siRNA sense strand
gcugagauccugagucaug

SEQ ID NO: 732021 - RNA, 19 nt, Homo sapiens
  misc_RNA (1)...(19): siRNA sense strand
uauauucagucucugugua

SEQ ID NO: 732022 - RNA, 19 nt, Homo sapiens
  misc_RNA (1)...(19): siRNA sense strand
ccucaaguuucucugcaua

SEQ ID NO: 732023 - RNA, 19 nt, Homo sapiens
  misc_RNA (1)...(19): siRNA sense strand
gauccugagucauguguuc

SEQ ID NO: 732024 - RNA, 19 nt, Homo sapiens
  misc_RNA (1)...(19): siRNA sense strand
caaggaacccauaaagaug

SEQ ID NO: 732025 - RNA, 19 nt, Homo sapiens
  misc_RNA (1)...(19): siRNA sense strand
caaaacaguuguaccuaaa

SEQ ID NO: 732026 - RNA, 19 nt, Homo sapiens
  misc_RNA (1)...(19): siRNA sense strand
ggagaggaagaacuaguuu

SEQ ID NO: 732027 - RNA, 19 nt, Homo sapiens
  misc_RNA (1)...(19): siRNA sense strand
gacaaggaacccauaaaga

SEQ ID NO: 732028 - RNA, 19 nt, Homo sapiens
  misc_RNA (1)...(19): siRNA sense strand
gaaaccugcucuacgaacu

SEQ ID NO: 732029 - RNA, 19 nt, Homo sapiens
  misc_RNA (1)...(19): siRNA sense strand
gauagugacaccuccugua

SEQ ID NO: 732030 - RNA, 19 nt, Homo sapiens
  misc_RNA (1)...(19): siRNA sense strand
ugaaaugaccucccuaagu

SEQ ID NO: 732031 - RNA, 19 nt, Homo sapiens
  misc_RNA (1)...(19): siRNA sense strand
caaggaagccgagucguau

SEQ ID NO: 732032 - RNA, 19 nt, Homo sapiens
  misc_RNA (1)...(19): siRNA sense strand
guauuccaguucagauaaa

SEQ ID NO: 732033 - RNA, 19 nt, Homo sapiens
  misc_RNA (1)...(19): siRNA sense strand
cagugcauauacacaauaa

SEQ ID NO: 732034 - RNA, 19 nt, Homo sapiens
  misc_RNA (1)...(19): siRNA sense strand
acaaggaacccauaaagau

SEQ ID NO: 732035 - RNA, 19 nt, Homo sapiens
  misc_RNA (1)...(19): siRNA sense strand
gugcauauacacaauaaug

SEQ ID NO: 732036 - RNA, 19 nt, Homo sapiens
  misc_RNA (1)...(19): siRNA sense strand
gcugguauauucagucucu

SEQ ID NO: 732037 - RNA, 19 nt, Homo sapiens
  misc_RNA (1)...(19): siRNA sense strand
gguauuccaguucagauaa

SEQ ID NO: 732038 - RNA, 19 nt, Homo sapiens
  misc_RNA (1)...(19): siRNA sense strand
gagagaaagcuauccagau

SEQ ID NO: 732039 - RNA, 19 nt, Homo sapiens
  misc_RNA (1)...(19): siRNA sense strand
ggaggaaggcagcugguau

SEQ ID NO: 732040 - RNA, 19 nt, Homo sapiens
  misc_RNA (1)...(19): siRNA sense strand
gcaccucaacuguaccaaa

SEQ ID NO: 732041 - RNA, 19 nt, Homo sapiens
  misc_RNA (1)...(19): siRNA sense strand
ggaaggcagcugguauauu

SEQ ID NO: 732042 - RNA, 19 nt, Homo sapiens
  misc_RNA (1)...(19): siRNA sense strand
acaaggaagccgagucgua

SEQ ID NO: 732043 - RNA, 19 nt, Homo sapiens
  misc_RNA (1)...(19): siRNA sense strand
gucaacaaccacagcuuua

SEQ ID NO: 732044 - RNA, 19 nt, Homo sapiens
  misc_RNA (1)...(19): siRNA sense strand
uaaguuuccuggcauuucu

SEQ ID NO: 732045 - RNA, 19 nt, Homo sapiens
  misc_RNA (1)...(19): siRNA sense strand
gaaaguggaaauggagaug

SEQ ID NO: 732046 - RNA, 19 nt, Homo sapiens
  misc_RNA (1)...(19): siRNA sense strand
ugccgaggcugacuuccua

SEQ ID NO: 732047 - RNA, 19 nt, Homo sapiens
  misc_RNA (1)...(19): siRNA sense strand
caacuguaccaaagaggaa

SEQ ID NO: 732048 - RNA, 19 nt, Homo sapiens
  misc_RNA (1)...(19): siRNA sense strand
gaagccgagucguaucaag

SEQ ID NO: 732049 - RNA, 19 nt, Homo sapiens
  misc_RNA (1)...(19): siRNA sense strand
caccucaacuguaccaaag

SEQ ID NO: 732050 - RNA, 19 nt, Homo sapiens
  misc_RNA (1)...(19): siRNA sense strand
ucacagugcauauacacaa

SEQ ID NO: 732051 - RNA, 19 nt, Homo sapiens
  misc_RNA (1)...(19): siRNA sense strand
guggagaaccucaaguuuc

SEQ ID NO: 732052 - RNA, 19 nt, Homo sapiens
  misc_RNA (1)...(19): siRNA sense strand
ggacaugaucuuccuucug

SEQ ID NO: 732053 - RNA, 19 nt, Homo sapiens
  misc_RNA (1)...(19): siRNA sense strand
gacauucuuggaagccuua

SEQ ID NO: 732054 - RNA, 19 nt, Homo sapiens
  misc_RNA (1)...(19): siRNA sense strand
gacagacaaggaacccaua

SEQ ID NO: 732055 - RNA, 19 nt, Homo sapiens
  misc_RNA (1)...(19): siRNA sense strand
cccaggcuauguauccuuu

SEQ ID NO: 732056 - RNA, 19 nt, Homo sapiens
  misc_RNA (1)...(19): siRNA sense strand
ggucaacauugguauucca

SEQ ID NO: 732057 - RNA, 19 nt, Homo sapiens
  misc_RNA (1)...(19): siRNA sense strand
ugacaccuccuguagacaa

SEQ ID NO: 732058 - RNA, 19 nt, Homo sapiens
  misc_RNA (1)...(19): siRNA sense strand
caaggucaacauugguauu

SEQ ID NO: 732059 - RNA, 19 nt, Homo sapiens
  misc_RNA (1)...(19): siRNA sense strand
uguguaaucaucugaagaa

SEQ ID NO: 732060 - RNA, 19 nt, Homo sapiens
  misc_RNA (1)...(19): siRNA sense strand
augcugagauccugaguca

SEQ ID NO: 732061 - RNA, 19 nt, Homo sapiens
  misc_RNA (1)...(19): siRNA sense strand
agaacuccucuauaucaua

SEQ ID NO: 732062 - RNA, 19 nt, Homo sapiens
  misc_RNA (1)...(19): siRNA sense strand
agacaaggaacccauaaag

SEQ ID NO: 732063 - RNA, 19 nt, Homo sapiens
  misc_RNA (1)...(19): siRNA sense strand
caugaucuuccuucugaaa

SEQ ID NO: 732064 - RNA, 19 nt, Homo sapiens
  misc_RNA (1)...(19): siRNA sense strand
cagaacuccucuauaucau

SEQ ID NO: 732065 - RNA, 19 nt, Homo sapiens
  misc_RNA (1)...(19): siRNA sense strand
acucagagaacuuaaagga

SEQ ID NO: 732066 - RNA, 19 nt, Homo sapiens
  misc_RNA (1)...(19): siRNA sense strand
ugucaacaaccacagcuuu

SEQ ID NO: 732067 - RNA, 19 nt, Homo sapiens
  misc_RNA (1)...(19): siRNA sense strand
cgaacugucagaaggcauu

SEQ ID NO: 732068 - RNA, 19 nt, Homo sapiens
  misc_RNA (1)...(19): siRNA sense strand
ugagugaggaagacccuuu

SEQ ID NO: 732069 - RNA, 19 nt, Homo sapiens
  misc_RNA (1)...(19): siRNA sense strand
gagaggaagaacuaguuuc

SEQ ID NO: 732070 - RNA, 19 nt, Homo sapiens
  misc_RNA (1)...(19): siRNA sense strand
cugcagcaccucaacugua

SEQ ID NO: 732071 - RNA, 19 nt, Homo sapiens
  misc_RNA (1)...(19): siRNA sense strand
gcccuagacuggcugaaaa

SEQ ID NO: 732072 - RNA, 19 nt, Homo sapiens
  misc_RNA (1)...(19): siRNA sense strand
cacagugcauauacacaau

SEQ ID NO: 732073 - RNA, 19 nt, Homo sapiens
  misc_RNA (1)...(19): siRNA sense strand
gcauugacucagagaacuu

SEQ ID NO: 732074 - RNA, 19 nt, Homo sapiens
  misc_RNA (1)...(19): siRNA sense strand
cagcugguauauucagucu

SEQ ID NO: 732075 - RNA, 19 nt, Homo sapiens
  misc_RNA (1)...(19): siRNA sense strand
uauaucauacggcagaaga

SEQ ID NO: 732076 - RNA, 19 nt, Homo sapiens
  misc_RNA (1)...(19): siRNA sense strand
cauugacucagagaacuua

SEQ ID NO: 732077 - RNA, 19 nt, Homo sapiens
  misc_RNA (1)...(19): siRNA sense strand
ccucaacuguaccaaagag

SEQ ID NO: 732078 - RNA, 19 nt, Homo sapiens
  misc_RNA (1)...(19): siRNA sense strand
uggagaugguccugcagaa

SEQ ID NO: 732079 - RNA, 19 nt, Homo sapiens
  misc_RNA (1)...(19): siRNA sense strand
cagacaaggaacccauaaa

SEQ ID NO: 732080 - RNA, 19 nt, Homo sapiens
  misc_RNA (1)...(19): siRNA sense strand
cagagaacuuaaaggacau

SEQ ID NO: 732081 - RNA, 19 nt, Homo sapiens
  misc_RNA (1)...(19): siRNA sense strand
gaaggcauugacucagaga

SEQ ID NO: 732082 - RNA, 19 nt, Homo sapiens
  misc_RNA (1)...(19): siRNA sense strand
gaaaucucaaggucaacau

SEQ ID NO: 732083 - RNA, 19 nt, Homo sapiens
  misc_RNA (1)...(19): siRNA sense strand
acagugcauauacacaaua

SEQ ID NO: 732084 - RNA, 19 nt, Homo sapiens
  misc_RNA (1)...(19): siRNA sense strand
gagaaacaagguaaaauag

SEQ ID NO: 732085 - RNA, 19 nt, Homo sapiens
  misc_RNA (1)...(19): siRNA sense strand
aaaugaccucccuaaguuu

SEQ ID NO: 732086 - RNA, 19 nt, Homo sapiens
  misc_RNA (1)...(19): siRNA sense strand
gaacugucagaaggcauug

SEQ ID NO: 732087 - RNA, 19 nt, Homo sapiens
  misc_RNA (1)...(19): siRNA sense strand
ggacugcuucguguucugu

SEQ ID NO: 732088 - RNA, 19 nt, Homo sapiens
  misc_RNA (1)...(19): siRNA sense strand
acauugguauuccaguuca

SEQ ID NO: 732089 - RNA, 19 nt, Homo sapiens
  misc_RNA (1)...(19): siRNA sense strand
acagacaaggaacccauaa

SEQ ID NO: 732090 - RNA, 19 nt, Homo sapiens
  misc_RNA (1)...(19): siRNA sense strand
gagaaacauagagaaauac

SEQ ID NO: 732091 - RNA, 19 nt, Homo sapiens
  misc_RNA (1)...(19): siRNA sense strand
ugacucagagaacuuaaag

SEQ ID NO: 732092 - RNA, 19 nt, Homo sapiens
  misc_RNA (1)...(19): siRNA sense strand
aaguuucucugcauaggau

SEQ ID NO: 732093 - RNA, 19 nt, Homo sapiens
  misc_RNA (1)...(19): siRNA sense strand
guguaaucaucugaagaaa

SEQ ID NO: 732094 - RNA, 19 nt, Homo sapiens
  misc_RNA (1)...(19): siRNA sense strand
ggagaugguccugcagaag

SEQ ID NO: 732095 - RNA, 19 nt, Homo sapiens
  misc_RNA (1)...(19): siRNA sense strand
gcucuacgaacugucagaa

SEQ ID NO: 732096 - RNA, 19 nt, Homo sapiens
  misc_RNA (1)...(19): siRNA sense strand
gaaaugaccucccuaaguu

SEQ ID NO: 732097 - RNA, 19 nt, Homo sapiens
  misc_RNA (1)...(19): siRNA sense strand
gaaggcagcugguauauuc

SEQ ID NO: 732098 - RNA, 19 nt, Homo sapiens
  misc_RNA (1)...(19): siRNA sense strand
gacaugaucuuccuucuga

SEQ ID NO: 732099 - RNA, 19 nt, Homo sapiens
  misc_RNA (1)...(19): siRNA sense strand
caaaggguuucucuguuua

SEQ ID NO: 732100 - RNA, 19 nt, Homo sapiens
  misc_RNA (1)...(19): siRNA sense strand
gaucaugucucacuucaca

SEQ ID NO: 732101 - RNA, 19 nt, Homo sapiens
  misc_RNA (1)...(19): siRNA sense strand
uggcagaacuccucuauau

SEQ ID NO: 732102 - RNA, 19 nt, Homo sapiens
  misc_RNA (1)...(19): siRNA sense strand
gcagaacuccucuauauca

SEQ ID NO: 732103 - RNA, 19 nt, Homo sapiens
  misc_RNA (1)...(19): siRNA sense strand
acaaaggguuucucuguuu

SEQ ID NO: 732104 - RNA, 19 nt, Homo sapiens
  misc_RNA (1)...(19): siRNA sense strand
gaacuccucuauaucauac

SEQ ID NO: 732105 - RNA, 19 nt, Homo sapiens
  misc_RNA (1)...(19): siRNA sense strand
caacauugguauuccaguu

SEQ ID NO: 732106 - RNA, 19 nt, Homo sapiens
  misc_RNA (1)...(19): siRNA sense strand
gacaaaggguuucucuguu

SEQ ID NO: 732107 - RNA, 19 nt, Homo sapiens
  misc_RNA (1)...(19): siRNA sense strand
gaaagacucgcuucccaaa

SEQ ID NO: 732108 - RNA, 19 nt, Homo sapiens
  misc_RNA (1)...(19): siRNA sense strand
gcaaaacaguuguaccuaa

SEQ ID NO: 732109 - RNA, 19 nt, Homo sapiens
  misc_RNA (1)...(19): siRNA sense strand
gaacuuaaaggacaugauc

SEQ ID NO: 732110 - RNA, 19 nt, Homo sapiens
  misc_RNA (1)...(19): siRNA sense strand
ccauaaagaugcugagauc

SEQ ID NO: 732111 - RNA, 19 nt, Homo sapiens
  misc_RNA (1)...(19): siRNA sense strand
gaggaaggcagcugguaua

SEQ ID NO: 732112 - RNA, 19 nt, Homo sapiens
  misc_RNA (1)...(19): siRNA sense strand
gaagaacuaguuucccaaa

SEQ ID NO: 732113 - RNA, 19 nt, Homo sapiens
  misc_RNA (1)...(19): siRNA sense strand
acaauaaugugacgaaagu

SEQ ID NO: 732114 - RNA, 19 nt, Homo sapiens
  misc_RNA (1)...(19): siRNA sense strand
gaggcugacuuccuacuug

SEQ ID NO: 732115 - RNA, 19 nt, Homo sapiens
  misc_RNA (1)...(19): siRNA sense strand
ugacgaaaguggaaaugga

SEQ ID NO: 732116 - RNA, 19 nt, Homo sapiens
  misc_RNA (1)...(19): siRNA sense strand
cagaaggcauugacucaga

SEQ ID NO: 732117 - RNA, 19 nt, Homo sapiens
  misc_RNA (1)...(19): siRNA sense strand
ucaaggagaggaagaacua

SEQ ID NO: 732118 - RNA, 19 nt, Homo sapiens
  misc_RNA (1)...(19): siRNA sense strand
cgacaaaggguuucucugu

SEQ ID NO: 732119 - RNA, 19 nt, Homo sapiens
  misc_RNA (1)...(19): siRNA sense strand
cugccaaggugaagagaua

SEQ ID NO: 732120 - RNA, 19 nt, Homo sapiens
  misc_RNA (1)...(19): siRNA sense strand
gcugagauccugagucaug

SEQ ID NO: 732121 - RNA, 19 nt, Homo sapiens
  misc_RNA (1)...(19): siRNA sense strand
uauauucagucucugugua

SEQ ID NO: 732122 - RNA, 19 nt, Homo sapiens
  misc_RNA (1)...(19): siRNA sense strand
ccucaaguuucucugcaua

SEQ ID NO: 732123 - RNA, 19 nt, Homo sapiens
  misc_RNA (1)...(19): siRNA sense strand
gauccugagucauguguuc

SEQ ID NO: 732124 - RNA, 19 nt, Homo sapiens
  misc_RNA (1)...(19): siRNA sense strand
caaggaacccauaaagaug

SEQ ID NO: 732125 - RNA, 19 nt, Homo sapiens
  misc_RNA (1)...(19): siRNA sense strand
caaaacaguuguaccuaaa

SEQ ID NO: 732126 - RNA, 19 nt, Homo sapiens
  misc_RNA (1)...(19): siRNA sense strand
ggagaggaagaacuaguuu

SEQ ID NO: 732127 - RNA, 19 nt, Homo sapiens
  misc_RNA (1)...(19): siRNA sense strand
gacaaggaacccauaaaga

SEQ ID NO: 732128 - RNA, 19 nt, Homo sapiens
  misc_RNA (1)...(19): siRNA sense strand
gaaaccugcucuacgaacu

SEQ ID NO: 732129 - RNA, 19 nt, Homo sapiens
  misc_RNA (1)...(19): siRNA sense strand
gauagugacaccuccugua

SEQ ID NO: 732130 - RNA, 19 nt, Homo sapiens
  misc_RNA (1)...(19): siRNA sense strand
ugaaaugaccucccuaagu

SEQ ID NO: 732131 - RNA, 19 nt, Homo sapiens
  misc_RNA (1)...(19): siRNA sense strand
caaggaagccgagucguau

SEQ ID NO: 732132 - RNA, 19 nt, Homo sapiens
  misc_RNA (1)...(19): siRNA sense strand
guauuccaguucagauaaa

SEQ ID NO: 732133 - RNA, 19 nt, Homo sapiens
  misc_RNA (1)...(19): siRNA sense strand
cagugcauauacacaauaa

SEQ ID NO: 732134 - RNA, 19 nt, Homo sapiens
  misc_RNA (1)...(19): siRNA sense strand
acaaggaacccauaaagau

SEQ ID NO: 732135 - RNA, 19 nt, Homo sapiens
  misc_RNA (1)...(19): siRNA sense strand
gugcauauacacaauaaug

SEQ ID NO: 732136 - RNA, 19 nt, Homo sapiens
  misc_RNA (1)...(19): siRNA sense strand
gcugguauauucagucucu

SEQ ID NO: 732137 - RNA, 19 nt, Homo sapiens
  misc_RNA (1)...(19): siRNA sense strand
gguauuccaguucagauaa

SEQ ID NO: 732138 - RNA, 19 nt, Homo sapiens
  misc_RNA (1)...(19): siRNA sense strand
gagagaaagcuauccagau

SEQ ID NO: 732139 - RNA, 19 nt, Homo sapiens
  misc_RNA (1)...(19): siRNA sense strand
ggaggaaggcagcugguau

SEQ ID NO: 732140 - RNA, 19 nt, Homo sapiens
  misc_RNA (1)...(19): siRNA sense strand
gcaccucaacuguaccaaa

SEQ ID NO: 732141 - RNA, 19 nt, Homo sapiens
  misc_RNA (1)...(19): siRNA sense strand
ggaaggcagcugguauauu

SEQ ID NO: 732142 - RNA, 19 nt, Homo sapiens
  misc_RNA (1)...(19): siRNA sense strand
acaaggaagccgagucgua

SEQ ID NO: 732143 - RNA, 19 nt, Homo sapiens
  misc_RNA (1)...(19): siRNA sense strand
gucaacaaccacagcuuua

SEQ ID NO: 732144 - RNA, 19 nt, Homo sapiens
  misc_RNA (1)...(19): siRNA sense strand
uaaguuuccuggcauuucu

SEQ ID NO: 732145 - RNA, 19 nt, Homo sapiens
  misc_RNA (1)...(19): siRNA sense strand
gaaaguggaaauggagaug

SEQ ID NO: 732146 - RNA, 19 nt, Homo sapiens
  misc_RNA (1)...(19): siRNA sense strand
ugccgaggcugacuuccua

SEQ ID NO: 732147 - RNA, 19 nt, Homo sapiens
  misc_RNA (1)...(19): siRNA sense strand
caacuguaccaaagaggaa

SEQ ID NO: 732148 - RNA, 19 nt, Homo sapiens
  misc_RNA (1)...(19): siRNA sense strand
gaagccgagucguaucaag

SEQ ID NO: 732149 - RNA, 19 nt, Homo sapiens
  misc_RNA (1)...(19): siRNA sense strand
caccucaacuguaccaaag

SEQ ID NO: 732150 - RNA, 19 nt, Homo sapiens
  misc_RNA (1)...(19): siRNA sense strand
ucacagugcauauacacaa

SEQ ID NO: 732151 - RNA, 19 nt, Homo sapiens
  misc_RNA (1)...(19): siRNA sense strand
guggagaaccucaaguuuc

SEQ ID NO: 732152 - RNA, 19 nt, Homo sapiens
  misc_RNA (1)...(19): siRNA sense strand
ggacaugaucuuccuucug

SEQ ID NO: 732153 - RNA, 19 nt, Homo sapiens
  misc_RNA (1)...(19): siRNA sense strand
gacauucuuggaagccuua

SEQ ID NO: 732154 - RNA, 19 nt, Homo sapiens
  misc_RNA (1)...(19): siRNA sense strand
gacagacaaggaacccaua

SEQ ID NO: 732155 - RNA, 19 nt, Homo sapiens
  misc_RNA (1)...(19): siRNA sense strand
cccaggcuauguauccuuu

SEQ ID NO: 732156 - RNA, 19 nt, Homo sapiens
  misc_RNA (1)...(19): siRNA sense strand
ggucaacauugguauucca

SEQ ID NO: 732157 - RNA, 19 nt, Homo sapiens
  misc_RNA (1)...(19): siRNA sense strand
ugacaccuccuguagacaa

SEQ ID NO: 732158 - RNA, 19 nt, Homo sapiens
  misc_RNA (1)...(19): siRNA sense strand
caaggucaacauugguauu

SEQ ID NO: 732159 - RNA, 19 nt, Homo sapiens
  misc_RNA (1)...(19): siRNA sense strand
uguguaaucaucugaagaa

SEQ ID NO: 732160 - RNA, 19 nt, Homo sapiens
  misc_RNA (1)...(19): siRNA sense strand
augcugagauccugaguca

SEQ ID NO: 732161 - RNA, 19 nt, Homo sapiens
  misc_RNA (1)...(19): siRNA sense strand
agaacuccucuauaucaua

SEQ ID NO: 732162 - RNA, 19 nt, Homo sapiens
  misc_RNA (1)...(19): siRNA sense strand
agacaaggaacccauaaag

SEQ ID NO: 732163 - RNA, 19 nt, Homo sapiens
  misc_RNA (1)...(19): siRNA sense strand
caugaucuuccuucugaaa

SEQ ID NO: 732164 - RNA, 19 nt, Homo sapiens
  misc_RNA (1)...(19): siRNA sense strand
cagaacuccucuauaucau

SEQ ID NO: 732165 - RNA, 19 nt, Homo sapiens
  misc_RNA (1)...(19): siRNA sense strand
acucagagaacuuaaagga

SEQ ID NO: 732166 - RNA, 19 nt, Homo sapiens
  misc_RNA (1)...(19): siRNA sense strand
ugucaacaaccacagcuuu

SEQ ID NO: 732167 - RNA, 19 nt, Homo sapiens
  misc_RNA (1)...(19): siRNA sense strand
cgaacugucagaaggcauu

SEQ ID NO: 732168 - RNA, 19 nt, Homo sapiens
  misc_RNA (1)...(19): siRNA sense strand
ugagugaggaagacccuuu

SEQ ID NO: 732169 - RNA, 19 nt, Homo sapiens
  misc_RNA (1)...(19): siRNA sense strand
gagaggaagaacuaguuuc

SEQ ID NO: 732170 - RNA, 19 nt, Homo sapiens
  misc_RNA (1)...(19): siRNA sense strand
cugcagcaccucaacugua

SEQ ID NO: 732171 - RNA, 19 nt, Homo sapiens
  misc_RNA (1)...(19): siRNA sense strand
gcccuagacuggcugaaaa

SEQ ID NO: 732172 - RNA, 19 nt, Homo sapiens
  misc_RNA (1)...(19): siRNA sense strand
cacagugcauauacacaau

SEQ ID NO: 732173 - RNA, 19 nt, Homo sapiens
  misc_RNA (1)...(19): siRNA sense strand
gcauugacucagagaacuu

SEQ ID NO: 732174 - RNA, 19 nt, Homo sapiens
  misc_RNA (1)...(19): siRNA sense strand
cagcugguauauucagucu

SEQ ID NO: 732175 - RNA, 19 nt, Homo sapiens
  misc_RNA (1)...(19): siRNA sense strand
uauaucauacggcagaaga

SEQ ID NO: 732176 - RNA, 19 nt, Homo sapiens
  misc_RNA (1)...(19): siRNA sense strand
cauugacucagagaacuua

SEQ ID NO: 732177 - RNA, 19 nt, Homo sapiens
  misc_RNA (1)...(19): siRNA sense strand
ccucaacuguaccaaagag

SEQ ID NO: 732178 - RNA, 19 nt, Homo sapiens
  misc_RNA (1)...(19): siRNA sense strand
uggagaugguccugcagaa

SEQ ID NO: 732179 - RNA, 19 nt, Homo sapiens
  misc_RNA (1)...(19): siRNA sense strand
cagacaaggaacccauaaa

SEQ ID NO: 732180 - RNA, 19 nt, Homo sapiens
  misc_RNA (1)...(19): siRNA sense strand
cagagaacuuaaaggacau

SEQ ID NO: 732181 - RNA, 19 nt, Homo sapiens
  misc_RNA (1)...(19): siRNA sense strand
gaaggcauugacucagaga

SEQ ID NO: 732182 - RNA, 19 nt, Homo sapiens
  misc_RNA (1)...(19): siRNA sense strand
gaaaucucaaggucaacau

SEQ ID NO: 732183 - RNA, 19 nt, Homo sapiens
  misc_RNA (1)...(19): siRNA sense strand
acagugcauauacacaaua

SEQ ID NO: 732184 - RNA, 19 nt, Homo sapiens
  misc_RNA (1)...(19): siRNA sense strand
gagaaacaagguaaaauag

SEQ ID NO: 732185 - RNA, 19 nt, Homo sapiens
  misc_RNA (1)...(19): siRNA sense strand
aaaugaccucccuaaguuu

SEQ ID NO: 732186 - RNA, 19 nt, Homo sapiens
  misc_RNA (1)...(19): siRNA sense strand
gaacugucagaaggcauug

SEQ ID NO: 732187 - RNA, 19 nt, Homo sapiens
  misc_RNA (1)...(19): siRNA sense strand
ggacugcuucguguucugu

SEQ ID NO: 732188 - RNA, 19 nt, Homo sapiens
  misc_RNA (1)...(19): siRNA sense strand
acauugguauuccaguuca

SEQ ID NO: 732189 - RNA, 19 nt, Homo sapiens
  misc_RNA (1)...(19): siRNA sense strand
acagacaaggaacccauaa

SEQ ID NO: 732190 - RNA, 19 nt, Homo sapiens
  misc_RNA (1)...(19): siRNA sense strand
gagaaacauagagaaauac

SEQ ID NO: 732191 - RNA, 19 nt, Homo sapiens
  misc_RNA (1)...(19): siRNA sense strand
ugacucagagaacuuaaag

SEQ ID NO: 732192 - RNA, 19 nt, Homo sapiens
  misc_RNA (1)...(19): siRNA sense strand
aaguuucucugcauaggau

SEQ ID NO: 732193 - RNA, 19 nt, Homo sapiens
  misc_RNA (1)...(19): siRNA sense strand
guguaaucaucugaagaaa

SEQ ID NO: 732194 - RNA, 19 nt, Homo sapiens
  misc_RNA (1)...(19): siRNA sense strand
ggagaugguccugcagaag

SEQ ID NO: 732195 - RNA, 19 nt, Homo sapiens
  misc_RNA (1)...(19): siRNA sense strand
gcucuacgaacugucagaa

SEQ ID NO: 732196 - RNA, 19 nt, Homo sapiens
  misc_RNA (1)...(19): siRNA sense strand
gaaaugaccucccuaaguu

SEQ ID NO: 732197 - RNA, 19 nt, Homo sapiens
  misc_RNA (1)...(19): siRNA sense strand
gacaugaucuuccuucuga

SEQ ID NO: 732198 - RNA, 19 nt, Homo sapiens
  misc_RNA (1)...(19): siRNA sense strand
caaaggguuucucuguuua

SEQ ID NO: 732199 - RNA, 19 nt, Homo sapiens
  misc_RNA (1)...(19): siRNA sense strand
uggcagaacuccucuauau

SEQ ID NO: 732200 - RNA, 19 nt, Homo sapiens
  misc_RNA (1)...(19): siRNA sense strand
gcagaacuccucuauauca

SEQ ID NO: 732201 - RNA, 19 nt, Homo sapiens
  misc_RNA (1)...(19): siRNA sense strand
acaaaggguuucucuguuu

SEQ ID NO: 732202 - RNA, 19 nt, Homo sapiens
  misc_RNA (1)...(19): siRNA sense strand
gaacuccucuauaucauac

SEQ ID NO: 732203 - RNA, 19 nt, Homo sapiens
  misc_RNA (1)...(19): siRNA sense strand
caacauugguauuccaguu

SEQ ID NO: 732204 - RNA, 19 nt, Homo sapiens
  misc_RNA (1)...(19): siRNA sense strand
gacaaaggguuucucuguu

SEQ ID NO: 732205 - RNA, 19 nt, Homo sapiens
  misc_RNA (1)...(19): siRNA sense strand
gaaagacucgcuucccaaa

SEQ ID NO: 732206 - RNA, 19 nt, Homo sapiens
  misc_RNA (1)...(19): siRNA sense strand
gcaaaacaguuguaccuaa

SEQ ID NO: 732207 - RNA, 19 nt, Homo sapiens
  misc_RNA (1)...(19): siRNA sense strand
gaacuuaaaggacaugauc

SEQ ID NO: 732208 - RNA, 19 nt, Homo sapiens
  misc_RNA (1)...(19): siRNA sense strand
gaagaacuaguuucccaaa

SEQ ID NO: 732209 - RNA, 19 nt, Homo sapiens
  misc_RNA (1)...(19): siRNA sense strand
cagaaggcauugacucaga

SEQ ID NO: 732210 - RNA, 19 nt, Homo sapiens
  misc_RNA (1)...(19): siRNA sense strand
ucaaggagaggaagaacua

SEQ ID NO: 732211 - RNA, 19 nt, Homo sapiens
  misc_RNA (1)...(19): siRNA sense strand
cgacaaaggguuucucugu

SEQ ID NO: 732212 - RNA, 19 nt, Homo sapiens
  misc_RNA (1)...(19): siRNA sense strand
ccucaaguuucucugcaua

SEQ ID NO: 732213 - RNA, 19 nt, Homo sapiens
  misc_RNA (1)...(19): siRNA sense strand
caaaacaguuguaccuaaa

SEQ ID NO: 732214 - RNA, 19 nt, Homo sapiens
  misc_RNA (1)...(19): siRNA sense strand
ggagaggaagaacuaguuu

SEQ ID NO: 732215 - RNA, 19 nt, Homo sapiens
  misc_RNA (1)...(19): siRNA sense strand
gaaaccugcucuacgaacu

SEQ ID NO: 732216 - RNA, 19 nt, Homo sapiens
  misc_RNA (1)...(19): siRNA sense strand
gauagugacaccuccugua

SEQ ID NO: 732217 - RNA, 19 nt, Homo sapiens
  misc_RNA (1)...(19): siRNA sense strand
ugaaaugaccucccuaagu

SEQ ID NO: 732218 - RNA, 19 nt, Homo sapiens
  misc_RNA (1)...(19): siRNA sense strand
guauuccaguucagauaaa

SEQ ID NO: 732219 - RNA, 19 nt, Homo sapiens
  misc_RNA (1)...(19): siRNA sense strand
caaggaagccgagucguau

SEQ ID NO: 732220 - RNA, 19 nt, Homo sapiens
  misc_RNA (1)...(19): siRNA sense strand
gguauuccaguucagauaa

SEQ ID NO: 732221 - RNA, 19 nt, Homo sapiens
  misc_RNA (1)...(19): siRNA sense strand
gagagaaagcuauccagau

SEQ ID NO: 732222 - RNA, 19 nt, Homo sapiens
  misc_RNA (1)...(19): siRNA sense strand
gcaccucaacuguaccaaa

SEQ ID NO: 732223 - RNA, 19 nt, Homo sapiens
  misc_RNA (1)...(19): siRNA sense strand
acaaggaagccgagucgua

SEQ ID NO: 732224 - RNA, 19 nt, Homo sapiens
  misc_RNA (1)...(19): siRNA sense strand
gucaacaaccacagcuuua

SEQ ID NO: 732225 - RNA, 19 nt, Homo sapiens
  misc_RNA (1)...(19): siRNA sense strand
uaaguuuccuggcauuucu

SEQ ID NO: 732226 - RNA, 19 nt, Homo sapiens
  misc_RNA (1)...(19): siRNA sense strand
caacuguaccaaagaggaa

SEQ ID NO: 732227 - RNA, 19 nt, Homo sapiens
  misc_RNA (1)...(19): siRNA sense strand
gaagccgagucguaucaag

SEQ ID NO: 732228 - RNA, 19 nt, Homo sapiens
  misc_RNA (1)...(19): siRNA sense strand
caccucaacuguaccaaag

SEQ ID NO: 732229 - RNA, 19 nt, Homo sapiens
  misc_RNA (1)...(19): siRNA sense strand
ggacaugaucuuccuucug

SEQ ID NO: 732230 - RNA, 19 nt, Homo sapiens
  misc_RNA (1)...(19): siRNA sense strand
guggagaaccucaaguuuc

SEQ ID NO: 732231 - RNA, 19 nt, Homo sapiens
  misc_RNA (1)...(19): siRNA sense strand
gacauucuuggaagccuua

SEQ ID NO: 732232 - RNA, 19 nt, Homo sapiens
  misc_RNA (1)...(19): siRNA sense strand
gacagacaaggaacccaua

SEQ ID NO: 732233 - RNA, 19 nt, Homo sapiens
  misc_RNA (1)...(19): siRNA sense strand
ggucaacauugguauucca

SEQ ID NO: 732234 - RNA, 19 nt, Homo sapiens
  misc_RNA (1)...(19): siRNA sense strand
ugacaccuccuguagacaa

SEQ ID NO: 732235 - RNA, 19 nt, Homo sapiens
  misc_RNA (1)...(19): siRNA sense strand
caaggucaacauugguauu

SEQ ID NO: 732236 - RNA, 19 nt, Homo sapiens
  misc_RNA (1)...(19): siRNA sense strand
cagaacuccucuauaucau

SEQ ID NO: 732237 - RNA, 19 nt, Homo sapiens
  misc_RNA (1)...(19): siRNA sense strand
caugaucuuccuucugaaa

SEQ ID NO: 732238 - RNA, 19 nt, Homo sapiens
  misc_RNA (1)...(19): siRNA sense strand
acucagagaacuuaaagga

SEQ ID NO: 732239 - RNA, 19 nt, Homo sapiens
  misc_RNA (1)...(19): siRNA sense strand
agaacuccucuauaucaua

SEQ ID NO: 732240 - RNA, 19 nt, Homo sapiens
  misc_RNA (1)...(19): siRNA sense strand
ugucaacaaccacagcuuu

SEQ ID NO: 732241 - RNA, 19 nt, Homo sapiens
  misc_RNA (1)...(19): siRNA sense strand
ugagugaggaagacccuuu

SEQ ID NO: 732242 - RNA, 19 nt, Homo sapiens
  misc_RNA (1)...(19): siRNA sense strand
gagaggaagaacuaguuuc

SEQ ID NO: 732243 - RNA, 19 nt, Homo sapiens
  misc_RNA (1)...(19): siRNA sense strand
cgaacugucagaaggcauu

SEQ ID NO: 732244 - RNA, 19 nt, Homo sapiens
  misc_RNA (1)...(19): siRNA sense strand
cugcagcaccucaacugua

SEQ ID NO: 732245 - RNA, 19 nt, Homo sapiens
  misc_RNA (1)...(19): siRNA sense strand
uauaucauacggcagaaga

SEQ ID NO: 732246 - RNA, 19 nt, Homo sapiens
  misc_RNA (1)...(19): siRNA sense strand
cauugacucagagaacuua

SEQ ID NO: 732247 - RNA, 19 nt, Homo sapiens
  misc_RNA (1)...(19): siRNA sense strand
gcauugacucagagaacuu

SEQ ID NO: 732248 - RNA, 19 nt, Homo sapiens
  misc_RNA (1)...(19): siRNA sense strand
ccucaacuguaccaaagag

SEQ ID NO: 732249 - RNA, 19 nt, Homo sapiens
  misc_RNA (1)...(19): siRNA sense strand
cagagaacuuaaaggacau

SEQ ID NO: 732250 - RNA, 19 nt, Homo sapiens
  misc_RNA (1)...(19): siRNA sense strand
gaaggcauugacucagaga

SEQ ID NO: 732251 - RNA, 19 nt, Homo sapiens
  misc_RNA (1)...(19): siRNA sense strand
gaaaucucaaggucaacau

SEQ ID NO: 732252 - RNA, 19 nt, Homo sapiens
  misc_RNA (1)...(19): siRNA sense strand
gagaaacaagguaaaauag

SEQ ID NO: 732253 - RNA, 19 nt, Homo sapiens
  misc_RNA (1)...(19): siRNA sense strand
aaaugaccucccuaaguuu

SEQ ID NO: 732254 - RNA, 19 nt, Homo sapiens
  misc_RNA (1)...(19): siRNA sense strand
gaacugucagaaggcauug

SEQ ID NO: 732255 - RNA, 19 nt, Homo sapiens
  misc_RNA (1)...(19): siRNA sense strand
acagacaaggaacccauaa

SEQ ID NO: 732256 - RNA, 19 nt, Homo sapiens
  misc_RNA (1)...(19): siRNA sense strand
gagaaacauagagaaauac

SEQ ID NO: 732257 - RNA, 19 nt, Homo sapiens
  misc_RNA (1)...(19): siRNA sense strand
ugacucagagaacuuaaag

SEQ ID NO: 732258 - RNA, 19 nt, Homo sapiens
  misc_RNA (1)...(19): siRNA sense strand
acauugguauuccaguuca

SEQ ID NO: 732259 - RNA, 19 nt, Homo sapiens
  misc_RNA (1)...(19): siRNA sense strand
aaguuucucugcauaggau

SEQ ID NO: 732260 - RNA, 19 nt, Homo sapiens
  misc_RNA (1)...(19): siRNA sense strand
gcucuacgaacugucagaa

SEQ ID NO: 732261 - RNA, 19 nt, Homo sapiens
  misc_RNA (1)...(19): siRNA sense strand
ggcauugacucagagaacu

SEQ ID NO: 732262 - RNA, 19 nt, Homo sapiens
  misc_RNA (1)...(19): siRNA sense strand
uguggagaaccucaaguuu

SEQ ID NO: 732263 - RNA, 19 nt, Homo sapiens
  misc_RNA (1)...(19): siRNA sense strand
caaguuucucugcauagga

SEQ ID NO: 732264 - RNA, 19 nt, Homo sapiens
  misc_RNA (1)...(19): siRNA sense strand
ucaaguuucucugcauagg

SEQ ID NO: 732265 - RNA, 19 nt, Homo sapiens
  misc_RNA (1)...(19): siRNA sense strand
gaaaugaccucccuaaguu

SEQ ID NO: 732266 - RNA, 19 nt, Homo sapiens
  misc_RNA (1)...(19): siRNA sense strand
gaaggcagcugguauauuc

SEQ ID NO: 732267 - RNA, 19 nt, Homo sapiens
  misc_RNA (1)...(19): siRNA sense strand
gacaugaucuuccuucuga

SEQ ID NO: 732268 - RNA, 19 nt, Homo sapiens
  misc_RNA (1)...(19): siRNA sense strand
caaaggguuucucuguuua

SEQ ID NO: 732269 - RNA, 19 nt, Homo sapiens
  misc_RNA (1)...(19): siRNA sense strand
gaucaugucucacuucaca

SEQ ID NO: 732270 - RNA, 19 nt, Homo sapiens
  misc_RNA (1)...(19): siRNA sense strand
uggcagaacuccucuauau

SEQ ID NO: 732271 - RNA, 19 nt, Homo sapiens
  misc_RNA (1)...(19): siRNA sense strand
gcagaacuccucuauauca

SEQ ID NO: 732272 - RNA, 19 nt, Homo sapiens
  misc_RNA (1)...(19): siRNA sense strand
acaaaggguuucucuguuu

SEQ ID NO: 732273 - RNA, 19 nt, Homo sapiens
  misc_RNA (1)...(19): siRNA sense strand
gaacuccucuauaucauac

SEQ ID NO: 732274 - RNA, 19 nt, Homo sapiens
  misc_RNA (1)...(19): siRNA sense strand
caacauugguauuccaguu

SEQ ID NO: 732275 - RNA, 19 nt, Homo sapiens
  misc_RNA (1)...(19): siRNA sense strand
gacaaaggguuucucuguu

SEQ ID NO: 732276 - RNA, 19 nt, Homo sapiens
  misc_RNA (1)...(19): siRNA sense strand
gaaagacucgcuucccaaa

SEQ ID NO: 732277 - RNA, 19 nt, Homo sapiens
  misc_RNA (1)...(19): siRNA sense strand
gcaaaacaguuguaccuaa

SEQ ID NO: 732278 - RNA, 19 nt, Homo sapiens
  misc_RNA (1)...(19): siRNA sense strand
gaacuuaaaggacaugauc

SEQ ID NO: 732279 - RNA, 19 nt, Homo sapiens
  misc_RNA (1)...(19): siRNA sense strand
ccauaaagaugcugagauc

SEQ ID NO: 732280 - RNA, 19 nt, Homo sapiens
  misc_RNA (1)...(19): siRNA sense strand
gaggaaggcagcugguaua

SEQ ID NO: 732281 - RNA, 19 nt, Homo sapiens
  misc_RNA (1)...(19): siRNA sense strand
gaagaacuaguuucccaaa

SEQ ID NO: 732282 - RNA, 19 nt, Homo sapiens
  misc_RNA (1)...(19): siRNA sense strand
acaauaaugugacgaaagu

SEQ ID NO: 732283 - RNA, 19 nt, Homo sapiens
  misc_RNA (1)...(19): siRNA sense strand
gaggcugacuuccuacuug

SEQ ID NO: 732284 - RNA, 19 nt, Homo sapiens
  misc_RNA (1)...(19): siRNA sense strand
ugacgaaaguggaaaugga

SEQ ID NO: 732285 - RNA, 19 nt, Homo sapiens
  misc_RNA (1)...(19): siRNA sense strand
cagaaggcauugacucaga

SEQ ID NO: 732286 - RNA, 19 nt, Homo sapiens
  misc_RNA (1)...(19): siRNA sense strand
ucaaggagaggaagaacua

SEQ ID NO: 732287 - RNA, 19 nt, Homo sapiens
  misc_RNA (1)...(19): siRNA sense strand
cgacaaaggguuucucugu

SEQ ID NO: 732288 - RNA, 19 nt, Homo sapiens
  misc_RNA (1)...(19): siRNA sense strand
cugccaaggugaagagaua

SEQ ID NO: 732289 - RNA, 19 nt, Homo sapiens
  misc_RNA (1)...(19): siRNA sense strand
gcugagauccugagucaug

SEQ ID NO: 732290 - RNA, 19 nt, Homo sapiens
  misc_RNA (1)...(19): siRNA sense strand
uauauucagucucugugua

SEQ ID NO: 732291 - RNA, 19 nt, Homo sapiens
  misc_RNA (1)...(19): siRNA sense strand
ccucaaguuucucugcaua

SEQ ID NO: 732292 - RNA, 19 nt, Homo sapiens
  misc_RNA (1)...(19): siRNA sense strand
gauccugagucauguguuc

SEQ ID NO: 732293 - RNA, 19 nt, Homo sapiens
  misc_RNA (1)...(19): siRNA sense strand
caaggaacccauaaagaug

SEQ ID NO: 732294 - RNA, 19 nt, Homo sapiens
  misc_RNA (1)...(19): siRNA sense strand
caaaacaguuguaccuaaa

SEQ ID NO: 732295 - RNA, 19 nt, Homo sapiens
  misc_RNA (1)...(19): siRNA sense strand
ggagaggaagaacuaguuu

SEQ ID NO: 732296 - RNA, 19 nt, Homo sapiens
  misc_RNA (1)...(19): siRNA sense strand
gacaaggaacccauaaaga

SEQ ID NO: 732297 - RNA, 19 nt, Homo sapiens
  misc_RNA (1)...(19): siRNA sense strand
gaaaccugcucuacgaacu

SEQ ID NO: 732298 - RNA, 19 nt, Homo sapiens
  misc_RNA (1)...(19): siRNA sense strand
gauagugacaccuccugua

SEQ ID NO: 732299 - RNA, 19 nt, Homo sapiens
  misc_RNA (1)...(19): siRNA sense strand
ugaaaugaccucccuaagu

SEQ ID NO: 732300 - RNA, 19 nt, Homo sapiens
  misc_RNA (1)...(19): siRNA sense strand
caaggaagccgagucguau

SEQ ID NO: 732301 - RNA, 19 nt, Homo sapiens
  misc_RNA (1)...(19): siRNA sense strand
guauuccaguucagauaaa

SEQ ID NO: 732302 - RNA, 19 nt, Homo sapiens
  misc_RNA (1)...(19): siRNA sense strand
cagugcauauacacaauaa

SEQ ID NO: 732303 - RNA, 19 nt, Homo sapiens
  misc_RNA (1)...(19): siRNA sense strand
acaaggaacccauaaagau

SEQ ID NO: 732304 - RNA, 19 nt, Homo sapiens
  misc_RNA (1)...(19): siRNA sense strand
gugcauauacacaauaaug

SEQ ID NO: 732305 - RNA, 19 nt, Homo sapiens
  misc_RNA (1)...(19): siRNA sense strand
gcugguauauucagucucu

SEQ ID NO: 732306 - RNA, 19 nt, Homo sapiens
  misc_RNA (1)...(19): siRNA sense strand
gguauuccaguucagauaa

SEQ ID NO: 732307 - RNA, 19 nt, Homo sapiens
  misc_RNA (1)...(19): siRNA sense strand
gagagaaagcuauccagau

SEQ ID NO: 732308 - RNA, 19 nt, Homo sapiens
  misc_RNA (1)...(19): siRNA sense strand
ggaggaaggcagcugguau

SEQ ID NO: 732309 - RNA, 19 nt, Homo sapiens
  misc_RNA (1)...(19): siRNA sense strand
gcaccucaacuguaccaaa

SEQ ID NO: 732310 - RNA, 19 nt, Homo sapiens
  misc_RNA (1)...(19): siRNA sense strand
ggaaggcagcugguauauu

SEQ ID NO: 732311 - RNA, 19 nt, Homo sapiens
  misc_RNA (1)...(19): siRNA sense strand
acaaggaagccgagucgua

SEQ ID NO: 732312 - RNA, 19 nt, Homo sapiens
  misc_RNA (1)...(19): siRNA sense strand
gucaacaaccacagcuuua

SEQ ID NO: 732313 - RNA, 19 nt, Homo sapiens
  misc_RNA (1)...(19): siRNA sense strand
uaaguuuccuggcauuucu

SEQ ID NO: 732314 - RNA, 19 nt, Homo sapiens
  misc_RNA (1)...(19): siRNA sense strand
gaaaguggaaauggagaug

SEQ ID NO: 732315 - RNA, 19 nt, Homo sapiens
  misc_RNA (1)...(19): siRNA sense strand
ugccgaggcugacuuccua

SEQ ID NO: 732316 - RNA, 19 nt, Homo sapiens
  misc_RNA (1)...(19): siRNA sense strand
caacuguaccaaagaggaa

SEQ ID NO: 732317 - RNA, 19 nt, Homo sapiens
  misc_RNA (1)...(19): siRNA sense strand
gaagccgagucguaucaag

SEQ ID NO: 732318 - RNA, 19 nt, Homo sapiens
  misc_RNA (1)...(19): siRNA sense strand
caccucaacuguaccaaag

SEQ ID NO: 732319 - RNA, 19 nt, Homo sapiens
  misc_RNA (1)...(19): siRNA sense strand
ucacagugcauauacacaa

SEQ ID NO: 732320 - RNA, 19 nt, Homo sapiens
  misc_RNA (1)...(19): siRNA sense strand
guggagaaccucaaguuuc

SEQ ID NO: 732321 - RNA, 19 nt, Homo sapiens
  misc_RNA (1)...(19): siRNA sense strand
ggacaugaucuuccuucug

SEQ ID NO: 732322 - RNA, 19 nt, Homo sapiens
  misc_RNA (1)...(19): siRNA sense strand
gacauucuuggaagccuua

SEQ ID NO: 732323 - RNA, 19 nt, Homo sapiens
  misc_RNA (1)...(19): siRNA sense strand
gacagacaaggaacccaua

SEQ ID NO: 732324 - RNA, 19 nt, Homo sapiens
  misc_RNA (1)...(19): siRNA sense strand
cccaggcuauguauccuuu

SEQ ID NO: 732325 - RNA, 19 nt, Homo sapiens
  misc_RNA (1)...(19): siRNA sense strand
ggucaacauugguauucca

SEQ ID NO: 732326 - RNA, 19 nt, Homo sapiens
  misc_RNA (1)...(19): siRNA sense strand
ugacaccuccuguagacaa

SEQ ID NO: 732327 - RNA, 19 nt, Homo sapiens
  misc_RNA (1)...(19): siRNA sense strand
caaggucaacauugguauu

SEQ ID NO: 732328 - RNA, 19 nt, Homo sapiens
  misc_RNA (1)...(19): siRNA sense strand
uguguaaucaucugaagaa

SEQ ID NO: 732329 - RNA, 19 nt, Homo sapiens
  misc_RNA (1)...(19): siRNA sense strand
augcugagauccugaguca

SEQ ID NO: 732330 - RNA, 19 nt, Homo sapiens
  misc_RNA (1)...(19): siRNA sense strand
agaacuccucuauaucaua

SEQ ID NO: 732331 - RNA, 19 nt, Homo sapiens
  misc_RNA (1)...(19): siRNA sense strand
agacaaggaacccauaaag

SEQ ID NO: 732332 - RNA, 19 nt, Homo sapiens
  misc_RNA (1)...(19): siRNA sense strand
caugaucuuccuucugaaa

SEQ ID NO: 732333 - RNA, 19 nt, Homo sapiens
  misc_RNA (1)...(19): siRNA sense strand
cagaacuccucuauaucau

SEQ ID NO: 732334 - RNA, 19 nt, Homo sapiens
  misc_RNA (1)...(19): siRNA sense strand
acucagagaacuuaaagga

SEQ ID NO: 732335 - RNA, 19 nt, Homo sapiens
  misc_RNA (1)...(19): siRNA sense strand
ugucaacaaccacagcuuu

SEQ ID NO: 732336 - RNA, 19 nt, Homo sapiens
  misc_RNA (1)...(19): siRNA sense strand
cgaacugucagaaggcauu

SEQ ID NO: 732337 - RNA, 19 nt, Homo sapiens
  misc_RNA (1)...(19): siRNA sense strand
ugagugaggaagacccuuu

SEQ ID NO: 732338 - RNA, 19 nt, Homo sapiens
  misc_RNA (1)...(19): siRNA sense strand
gagaggaagaacuaguuuc

SEQ ID NO: 732339 - RNA, 19 nt, Homo sapiens
  misc_RNA (1)...(19): siRNA sense strand
cugcagcaccucaacugua

SEQ ID NO: 732340 - RNA, 19 nt, Homo sapiens
  misc_RNA (1)...(19): siRNA sense strand
gcccuagacuggcugaaaa

SEQ ID NO: 732341 - RNA, 19 nt, Homo sapiens
  misc_RNA (1)...(19): siRNA sense strand
cacagugcauauacacaau

SEQ ID NO: 732342 - RNA, 19 nt, Homo sapiens
  misc_RNA (1)...(19): siRNA sense strand
gcauugacucagagaacuu

SEQ ID NO: 732343 - RNA, 19 nt, Homo sapiens
  misc_RNA (1)...(19): siRNA sense strand
cagcugguauauucagucu

SEQ ID NO: 732344 - RNA, 19 nt, Homo sapiens
  misc_RNA (1)...(19): siRNA sense strand
uauaucauacggcagaaga

SEQ ID NO: 732345 - RNA, 19 nt, Homo sapiens
  misc_RNA (1)...(19): siRNA sense strand
cauugacucagagaacuua

SEQ ID NO: 732346 - RNA, 19 nt, Homo sapiens
  misc_RNA (1)...(19): siRNA sense strand
ccucaacuguaccaaagag

SEQ ID NO: 732347 - RNA, 19 nt, Homo sapiens
  misc_RNA (1)...(19): siRNA sense strand
uggagaugguccugcagaa

SEQ ID NO: 732348 - RNA, 19 nt, Homo sapiens
  misc_RNA (1)...(19): siRNA sense strand
cagacaaggaacccauaaa

SEQ ID NO: 732349 - RNA, 19 nt, Homo sapiens
  misc_RNA (1)...(19): siRNA sense strand
cagagaacuuaaaggacau

SEQ ID NO: 732350 - RNA, 19 nt, Homo sapiens
  misc_RNA (1)...(19): siRNA sense strand
gaaggcauugacucagaga

SEQ ID NO: 732351 - RNA, 19 nt, Homo sapiens
  misc_RNA (1)...(19): siRNA sense strand
gaaaucucaaggucaacau

SEQ ID NO: 732352 - RNA, 19 nt, Homo sapiens
  misc_RNA (1)...(19): siRNA sense strand
acagugcauauacacaaua

SEQ ID NO: 732353 - RNA, 19 nt, Homo sapiens
  misc_RNA (1)...(19): siRNA sense strand
gagaaacaagguaaaauag

SEQ ID NO: 732354 - RNA, 19 nt, Homo sapiens
  misc_RNA (1)...(19): siRNA sense strand
aaaugaccucccuaaguuu

SEQ ID NO: 732355 - RNA, 19 nt, Homo sapiens
  misc_RNA (1)...(19): siRNA sense strand
gaacugucagaaggcauug

SEQ ID NO: 732356 - RNA, 19 nt, Homo sapiens
  misc_RNA (1)...(19): siRNA sense strand
ggacugcuucguguucugu

SEQ ID NO: 732357 - RNA, 19 nt, Homo sapiens
  misc_RNA (1)...(19): siRNA sense strand
acauugguauuccaguuca

SEQ ID NO: 732358 - RNA, 19 nt, Homo sapiens
  misc_RNA (1)...(19): siRNA sense strand
acagacaaggaacccauaa

SEQ ID NO: 732359 - RNA, 19 nt, Homo sapiens
  misc_RNA (1)...(19): siRNA sense strand
gagaaacauagagaaauac

SEQ ID NO: 732360 - RNA, 19 nt, Homo sapiens
  misc_RNA (1)...(19): siRNA sense strand
ugacucagagaacuuaaag

SEQ ID NO: 732361 - RNA, 19 nt, Homo sapiens
  misc_RNA (1)...(19): siRNA sense strand
aaguuucucugcauaggau

SEQ ID NO: 732362 - RNA, 19 nt, Homo sapiens
  misc_RNA (1)...(19): siRNA sense strand
guguaaucaucugaagaaa

SEQ ID NO: 732363 - RNA, 19 nt, Homo sapiens
  misc_RNA (1)...(19): siRNA sense strand
ggagaugguccugcagaag

SEQ ID NO: 732364 - RNA, 19 nt, Homo sapiens
  misc_RNA (1)...(19): siRNA sense strand
gcucuacgaacugucagaa

SEQ ID NO: 732365 - RNA, 19 nt, Homo sapiens
  misc_RNA (1)...(19): siRNA sense strand
gaaaugaccucccuaaguu

SEQ ID NO: 732366 - RNA, 19 nt, Homo sapiens
  misc_RNA (1)...(19): siRNA sense strand
gaaggcagcugguauauuc

SEQ ID NO: 732367 - RNA, 19 nt, Homo sapiens
  misc_RNA (1)...(19): siRNA sense strand
gacaugaucuuccuucuga

SEQ ID NO: 732368 - RNA, 19 nt, Homo sapiens
  misc_RNA (1)...(19): siRNA sense strand
caaaggguuucucuguuua

SEQ ID NO: 732369 - RNA, 19 nt, Homo sapiens
  misc_RNA (1)...(19): siRNA sense strand
gaucaugucucacuucaca

SEQ ID NO: 732370 - RNA, 19 nt, Homo sapiens
  misc_RNA (1)...(19): siRNA sense strand
uggcagaacuccucuauau

SEQ ID NO: 732371 - RNA, 19 nt, Homo sapiens
  misc_RNA (1)...(19): siRNA sense strand
gcagaacuccucuauauca

SEQ ID NO: 732372 - RNA, 19 nt, Homo sapiens
  misc_RNA (1)...(19): siRNA sense strand
acaaaggguuucucuguuu

SEQ ID NO: 732373 - RNA, 19 nt, Homo sapiens
  misc_RNA (1)...(19): siRNA sense strand
gaacuccucuauaucauac

SEQ ID NO: 732374 - RNA, 19 nt, Homo sapiens
  misc_RNA (1)...(19): siRNA sense strand
caacauugguauuccaguu

SEQ ID NO: 732375 - RNA, 19 nt, Homo sapiens
  misc_RNA (1)...(19): siRNA sense strand
gacaaaggguuucucuguu

SEQ ID NO: 732376 - RNA, 19 nt, Homo sapiens
  misc_RNA (1)...(19): siRNA sense strand
gaaagacucgcuucccaaa

SEQ ID NO: 732377 - RNA, 19 nt, Homo sapiens
  misc_RNA (1)...(19): siRNA sense strand
gcaaaacaguuguaccuaa

SEQ ID NO: 732378 - RNA, 19 nt, Homo sapiens
  misc_RNA (1)...(19): siRNA sense strand
gaacuuaaaggacaugauc

SEQ ID NO: 732379 - RNA, 19 nt, Homo sapiens
  misc_RNA (1)...(19): siRNA sense strand
ccauaaagaugcugagauc

SEQ ID NO: 732380 - RNA, 19 nt, Homo sapiens
  misc_RNA (1)...(19): siRNA sense strand
gaggaaggcagcugguaua

SEQ ID NO: 732381 - RNA, 19 nt, Homo sapiens
  misc_RNA (1)...(19): siRNA sense strand
gaagaacuaguuucccaaa

SEQ ID NO: 732382 - RNA, 19 nt, Homo sapiens
  misc_RNA (1)...(19): siRNA sense strand
acaauaaugugacgaaagu

SEQ ID NO: 732383 - RNA, 19 nt, Homo sapiens
  misc_RNA (1)...(19): siRNA sense strand
gaggcugacuuccuacuug

SEQ ID NO: 732384 - RNA, 19 nt, Homo sapiens
  misc_RNA (1)...(19): siRNA sense strand
ugacgaaaguggaaaugga

SEQ ID NO: 732385 - RNA, 19 nt, Homo sapiens
  misc_RNA (1)...(19): siRNA sense strand
cagaaggcauugacucaga

SEQ ID NO: 732386 - RNA, 19 nt, Homo sapiens
  misc_RNA (1)...(19): siRNA sense strand
ucaaggagaggaagaacua

SEQ ID NO: 732387 - RNA, 19 nt, Homo sapiens
  misc_RNA (1)...(19): siRNA sense strand
cgacaaaggguuucucugu

SEQ ID NO: 732388 - RNA, 19 nt, Homo sapiens
  misc_RNA (1)...(19): siRNA sense strand
cugccaaggugaagagaua

SEQ ID NO: 732389 - RNA, 19 nt, Homo sapiens
  misc_RNA (1)...(19): siRNA sense strand
gcugagauccugagucaug

SEQ ID NO: 732390 - RNA, 19 nt, Homo sapiens
  misc_RNA (1)...(19): siRNA sense strand
uauauucagucucugugua

SEQ ID NO: 732391 - RNA, 19 nt, Homo sapiens
  misc_RNA (1)...(19): siRNA sense strand
ccucaaguuucucugcaua

SEQ ID NO: 732392 - RNA, 19 nt, Homo sapiens
  misc_RNA (1)...(19): siRNA sense strand
gauccugagucauguguuc

SEQ ID NO: 732393 - RNA, 19 nt, Homo sapiens
  misc_RNA (1)...(19): siRNA sense strand
caaggaacccauaaagaug

SEQ ID NO: 732394 - RNA, 19 nt, Homo sapiens
  misc_RNA (1)...(19): siRNA sense strand
caaaacaguuguaccuaaa

SEQ ID NO: 732395 - RNA, 19 nt, Homo sapiens
  misc_RNA (1)...(19): siRNA sense strand
ggagaggaagaacuaguuu

SEQ ID NO: 732396 - RNA, 19 nt, Homo sapiens
  misc_RNA (1)...(19): siRNA sense strand
gacaaggaacccauaaaga

SEQ ID NO: 732397 - RNA, 19 nt, Homo sapiens
  misc_RNA (1)...(19): siRNA sense strand
gaaaccugcucuacgaacu

SEQ ID NO: 732398 - RNA, 19 nt, Homo sapiens
  misc_RNA (1)...(19): siRNA sense strand
gauagugacaccuccugua

SEQ ID NO: 732399 - RNA, 19 nt, Homo sapiens
  misc_RNA (1)...(19): siRNA sense strand
ugaaaugaccucccuaagu

SEQ ID NO: 732400 - RNA, 19 nt, Homo sapiens
  misc_RNA (1)...(19): siRNA sense strand
caaggaagccgagucguau

SEQ ID NO: 732401 - RNA, 19 nt, Homo sapiens
  misc_RNA (1)...(19): siRNA sense strand
guauuccaguucagauaaa

SEQ ID NO: 732402 - RNA, 19 nt, Homo sapiens
  misc_RNA (1)...(19): siRNA sense strand
cagugcauauacacaauaa

SEQ ID NO: 732403 - RNA, 19 nt, Homo sapiens
  misc_RNA (1)...(19): siRNA sense strand
acaaggaacccauaaagau

SEQ ID NO: 732404 - RNA, 19 nt, Homo sapiens
  misc_RNA (1)...(19): siRNA sense strand
gugcauauacacaauaaug

SEQ ID NO: 732405 - RNA, 19 nt, Homo sapiens
  misc_RNA (1)...(19): siRNA sense strand
gcugguauauucagucucu

SEQ ID NO: 732406 - RNA, 19 nt, Homo sapiens
  misc_RNA (1)...(19): siRNA sense strand
gguauuccaguucagauaa

SEQ ID NO: 732407 - RNA, 19 nt, Homo sapiens
  misc_RNA (1)...(19): siRNA sense strand
gagagaaagcuauccagau

SEQ ID NO: 732408 - RNA, 19 nt, Homo sapiens
  misc_RNA (1)...(19): siRNA sense strand
ggaggaaggcagcugguau

SEQ ID NO: 732409 - RNA, 19 nt, Homo sapiens
  misc_RNA (1)...(19): siRNA sense strand
gcaccucaacuguaccaaa

SEQ ID NO: 732410 - RNA, 19 nt, Homo sapiens
  misc_RNA (1)...(19): siRNA sense strand
ggaaggcagcugguauauu

SEQ ID NO: 732411 - RNA, 19 nt, Homo sapiens
  misc_RNA (1)...(19): siRNA sense strand
acaaggaagccgagucgua

SEQ ID NO: 732412 - RNA, 19 nt, Homo sapiens
  misc_RNA (1)...(19): siRNA sense strand
gucaacaaccacagcuuua

SEQ ID NO: 732413 - RNA, 19 nt, Homo sapiens
  misc_RNA (1)...(19): siRNA sense strand
uaaguuuccuggcauuucu

SEQ ID NO: 732414 - RNA, 19 nt, Homo sapiens
  misc_RNA (1)...(19): siRNA sense strand
gaaaguggaaauggagaug

SEQ ID NO: 732415 - RNA, 19 nt, Homo sapiens
  misc_RNA (1)...(19): siRNA sense strand
ugccgaggcugacuuccua

SEQ ID NO: 732416 - RNA, 19 nt, Homo sapiens
  misc_RNA (1)...(19): siRNA sense strand
caacuguaccaaagaggaa

SEQ ID NO: 732417 - RNA, 19 nt, Homo sapiens
  misc_RNA (1)...(19): siRNA sense strand
gaagccgagucguaucaag

SEQ ID NO: 732418 - RNA, 19 nt, Homo sapiens
  misc_RNA (1)...(19): siRNA sense strand
caccucaacuguaccaaag

SEQ ID NO: 732419 - RNA, 19 nt, Homo sapiens
  misc_RNA (1)...(19): siRNA sense strand
ucacagugcauauacacaa

SEQ ID NO: 732420 - RNA, 19 nt, Homo sapiens
  misc_RNA (1)...(19): siRNA sense strand
guggagaaccucaaguuuc

SEQ ID NO: 732421 - RNA, 19 nt, Homo sapiens
  misc_RNA (1)...(19): siRNA sense strand
ggacaugaucuuccuucug

SEQ ID NO: 732422 - RNA, 19 nt, Homo sapiens
  misc_RNA (1)...(19): siRNA sense strand
gacauucuuggaagccuua

SEQ ID NO: 732423 - RNA, 19 nt, Homo sapiens
  misc_RNA (1)...(19): siRNA sense strand
gacagacaaggaacccaua

SEQ ID NO: 732424 - RNA, 19 nt, Homo sapiens
  misc_RNA (1)...(19): siRNA sense strand
cccaggcuauguauccuuu

SEQ ID NO: 732425 - RNA, 19 nt, Homo sapiens
  misc_RNA (1)...(19): siRNA sense strand
ggucaacauugguauucca

SEQ ID NO: 732426 - RNA, 19 nt, Homo sapiens
  misc_RNA (1)...(19): siRNA sense strand
ugacaccuccuguagacaa

SEQ ID NO: 732427 - RNA, 19 nt, Homo sapiens
  misc_RNA (1)...(19): siRNA sense strand
caaggucaacauugguauu

SEQ ID NO: 732428 - RNA, 19 nt, Homo sapiens
  misc_RNA (1)...(19): siRNA sense strand
uguguaaucaucugaagaa

SEQ ID NO: 732429 - RNA, 19 nt, Homo sapiens
  misc_RNA (1)...(19): siRNA sense strand
augcugagauccugaguca

SEQ ID NO: 732430 - RNA, 19 nt, Homo sapiens
  misc_RNA (1)...(19): siRNA sense strand
agaacuccucuauaucaua

SEQ ID NO: 732431 - RNA, 19 nt, Homo sapiens
  misc_RNA (1)...(19): siRNA sense strand
agacaaggaacccauaaag

SEQ ID NO: 732432 - RNA, 19 nt, Homo sapiens
  misc_RNA (1)...(19): siRNA sense strand
caugaucuuccuucugaaa

SEQ ID NO: 732433 - RNA, 19 nt, Homo sapiens
  misc_RNA (1)...(19): siRNA sense strand
cagaacuccucuauaucau

SEQ ID NO: 732434 - RNA, 19 nt, Homo sapiens
  misc_RNA (1)...(19): siRNA sense strand
acucagagaacuuaaagga

SEQ ID NO: 732435 - RNA, 19 nt, Homo sapiens
  misc_RNA (1)...(19): siRNA sense strand
ugucaacaaccacagcuuu

SEQ ID NO: 732436 - RNA, 19 nt, Homo sapiens
  misc_RNA (1)...(19): siRNA sense strand
cgaacugucagaaggcauu

SEQ ID NO: 732437 - RNA, 19 nt, Homo sapiens
  misc_RNA (1)...(19): siRNA sense strand
ugagugaggaagacccuuu

SEQ ID NO: 732438 - RNA, 19 nt, Homo sapiens
  misc_RNA (1)...(19): siRNA sense strand
gagaggaagaacuaguuuc

SEQ ID NO: 732439 - RNA, 19 nt, Homo sapiens
  misc_RNA (1)...(19): siRNA sense strand
cugcagcaccucaacugua

SEQ ID NO: 732440 - RNA, 19 nt, Homo sapiens
  misc_RNA (1)...(19): siRNA sense strand
gcccuagacuggcugaaaa

SEQ ID NO: 732441 - RNA, 19 nt, Homo sapiens
  misc_RNA (1)...(19): siRNA sense strand
cacagugcauauacacaau

SEQ ID NO: 732442 - RNA, 19 nt, Homo sapiens
  misc_RNA (1)...(19): siRNA sense strand
gcauugacucagagaacuu

SEQ ID NO: 732443 - RNA, 19 nt, Homo sapiens
  misc_RNA (1)...(19): siRNA sense strand
cagcugguauauucagucu

SEQ ID NO: 732444 - RNA, 19 nt, Homo sapiens
  misc_RNA (1)...(19): siRNA sense strand
uauaucauacggcagaaga

SEQ ID NO: 732445 - RNA, 19 nt, Homo sapiens
  misc_RNA (1)...(19): siRNA sense strand
cauugacucagagaacuua

SEQ ID NO: 732446 - RNA, 19 nt, Homo sapiens
  misc_RNA (1)...(19): siRNA sense strand
ccucaacuguaccaaagag

SEQ ID NO: 732447 - RNA, 19 nt, Homo sapiens
  misc_RNA (1)...(19): siRNA sense strand
uggagaugguccugcagaa

SEQ ID NO: 732448 - RNA, 19 nt, Homo sapiens
  misc_RNA (1)...(19): siRNA sense strand
cagacaaggaacccauaaa

SEQ ID NO: 732449 - RNA, 19 nt, Homo sapiens
  misc_RNA (1)...(19): siRNA sense strand
cagagaacuuaaaggacau

SEQ ID NO: 732450 - RNA, 19 nt, Homo sapiens
  misc_RNA (1)...(19): siRNA sense strand
gaaggcauugacucagaga

SEQ ID NO: 732451 - RNA, 19 nt, Homo sapiens
  misc_RNA (1)...(19): siRNA sense strand
gaaaucucaaggucaacau

SEQ ID NO: 732452 - RNA, 19 nt, Homo sapiens
  misc_RNA (1)...(19): siRNA sense strand
acagugcauauacacaaua

SEQ ID NO: 732453 - RNA, 19 nt, Homo sapiens
  misc_RNA (1)...(19): siRNA sense strand
gagaaacaagguaaaauag

SEQ ID NO: 732454 - RNA, 19 nt, Homo sapiens
  misc_RNA (1)...(19): siRNA sense strand
aaaugaccucccuaaguuu

SEQ ID NO: 732455 - RNA, 19 nt, Homo sapiens
  misc_RNA (1)...(19): siRNA sense strand
gaacugucagaaggcauug

SEQ ID NO: 732456 - RNA, 19 nt, Homo sapiens
  misc_RNA (1)...(19): siRNA sense strand
ggacugcuucguguucugu

SEQ ID NO: 732457 - RNA, 19 nt, Homo sapiens
  misc_RNA (1)...(19): siRNA sense strand
acauugguauuccaguuca

SEQ ID NO: 732458 - RNA, 19 nt, Homo sapiens
  misc_RNA (1)...(19): siRNA sense strand
acagacaaggaacccauaa

SEQ ID NO: 732459 - RNA, 19 nt, Homo sapiens
  misc_RNA (1)...(19): siRNA sense strand
gagaaacauagagaaauac

SEQ ID NO: 732460 - RNA, 19 nt, Homo sapiens
  misc_RNA (1)...(19): siRNA sense strand
ugacucagagaacuuaaag

SEQ ID NO: 732461 - RNA, 19 nt, Homo sapiens
  misc_RNA (1)...(19): siRNA sense strand
aaguuucucugcauaggau

SEQ ID NO: 732462 - RNA, 19 nt, Homo sapiens
  misc_RNA (1)...(19): siRNA sense strand
guguaaucaucugaagaaa

SEQ ID NO: 732463 - RNA, 19 nt, Homo sapiens
  misc_RNA (1)...(19): siRNA sense strand
ggagaugguccugcagaag

SEQ ID NO: 732464 - RNA, 19 nt, Homo sapiens
  misc_RNA (1)...(19): siRNA sense strand
gcucuacgaacugucagaa

SEQ ID NO: 732465 - RNA, 19 nt, Homo sapiens
  misc_RNA (1)...(19): siRNA sense strand
gaaaugaccucccuaaguu

SEQ ID NO: 732466 - RNA, 19 nt, Homo sapiens
  misc_RNA (1)...(19): siRNA sense strand
gaaggcagcugguauauuc

SEQ ID NO: 732467 - RNA, 19 nt, Homo sapiens
  misc_RNA (1)...(19): siRNA sense strand
gacaugaucuuccuucuga

SEQ ID NO: 732468 - RNA, 19 nt, Homo sapiens
  misc_RNA (1)...(19): siRNA sense strand
caaaggguuucucuguuua

SEQ ID NO: 732469 - RNA, 19 nt, Homo sapiens
  misc_RNA (1)...(19): siRNA sense strand
gaucaugucucacuucaca

SEQ ID NO: 732470 - RNA, 19 nt, Homo sapiens
  misc_RNA (1)...(19): siRNA sense strand
uggcagaacuccucuauau

SEQ ID NO: 732471 - RNA, 19 nt, Homo sapiens
  misc_RNA (1)...(19): siRNA sense strand
gcagaacuccucuauauca

SEQ ID NO: 732472 - RNA, 19 nt, Homo sapiens
  misc_RNA (1)...(19): siRNA sense strand
acaaaggguuucucuguuu

SEQ ID NO: 732473 - RNA, 19 nt, Homo sapiens
  misc_RNA (1)...(19): siRNA sense strand
gaacuccucuauaucauac

SEQ ID NO: 732474 - RNA, 19 nt, Homo sapiens
  misc_RNA (1)...(19): siRNA sense strand
caacauugguauuccaguu

SEQ ID NO: 732475 - RNA, 19 nt, Homo sapiens
  misc_RNA (1)...(19): siRNA sense strand
gacaaaggguuucucuguu

SEQ ID NO: 732476 - RNA, 19 nt, Homo sapiens
  misc_RNA (1)...(19): siRNA sense strand
gaaagacucgcuucccaaa

SEQ ID NO: 732477 - RNA, 19 nt, Homo sapiens
  misc_RNA (1)...(19): siRNA sense strand
gcaaaacaguuguaccuaa

SEQ ID NO: 732478 - RNA, 19 nt, Homo sapiens
  misc_RNA (1)...(19): siRNA sense strand
gaacuuaaaggacaugauc

SEQ ID NO: 732479 - RNA, 19 nt, Homo sapiens
  misc_RNA (1)...(19): siRNA sense strand
ccauaaagaugcugagauc

SEQ ID NO: 732480 - RNA, 19 nt, Homo sapiens
  misc_RNA (1)...(19): siRNA sense strand
gaggaaggcagcugguaua

SEQ ID NO: 732481 - RNA, 19 nt, Homo sapiens
  misc_RNA (1)...(19): siRNA sense strand
gaagaacuaguuucccaaa

SEQ ID NO: 732482 - RNA, 19 nt, Homo sapiens
  misc_RNA (1)...(19): siRNA sense strand
acaauaaugugacgaaagu

SEQ ID NO: 732483 - RNA, 19 nt, Homo sapiens
  misc_RNA (1)...(19): siRNA sense strand
gaggcugacuuccuacuug

SEQ ID NO: 732484 - RNA, 19 nt, Homo sapiens
  misc_RNA (1)...(19): siRNA sense strand
ugacgaaaguggaaaugga

SEQ ID NO: 732485 - RNA, 19 nt, Homo sapiens
  misc_RNA (1)...(19): siRNA sense strand
cagaaggcauugacucaga

SEQ ID NO: 732486 - RNA, 19 nt, Homo sapiens
  misc_RNA (1)...(19): siRNA sense strand
ucaaggagaggaagaacua

SEQ ID NO: 732487 - RNA, 19 nt, Homo sapiens
  misc_RNA (1)...(19): siRNA sense strand
cgacaaaggguuucucugu

SEQ ID NO: 732488 - RNA, 19 nt, Homo sapiens
  misc_RNA (1)...(19): siRNA sense strand
cugccaaggugaagagaua

SEQ ID NO: 732489 - RNA, 19 nt, Homo sapiens
  misc_RNA (1)...(19): siRNA sense strand
gcugagauccugagucaug

SEQ ID NO: 732490 - RNA, 19 nt, Homo sapiens
  misc_RNA (1)...(19): siRNA sense strand
uauauucagucucugugua

SEQ ID NO: 732491 - RNA, 19 nt, Homo sapiens
  misc_RNA (1)...(19): siRNA sense strand
ccucaaguuucucugcaua

SEQ ID NO: 732492 - RNA, 19 nt, Homo sapiens
  misc_RNA (1)...(19): siRNA sense strand
gauccugagucauguguuc

SEQ ID NO: 732493 - RNA, 19 nt, Homo sapiens
  misc_RNA (1)...(19): siRNA sense strand
caaggaacccauaaagaug

SEQ ID NO: 732494 - RNA, 19 nt, Homo sapiens
  misc_RNA (1)...(19): siRNA sense strand
caaaacaguuguaccuaaa

SEQ ID NO: 732495 - RNA, 19 nt, Homo sapiens
  misc_RNA (1)...(19): siRNA sense strand
ggagaggaagaacuaguuu

SEQ ID NO: 732496 - RNA, 19 nt, Homo sapiens
  misc_RNA (1)...(19): siRNA sense strand
gacaaggaacccauaaaga

SEQ ID NO: 732497 - RNA, 19 nt, Homo sapiens
  misc_RNA (1)...(19): siRNA sense strand
gaaaccugcucuacgaacu

SEQ ID NO: 732498 - RNA, 19 nt, Homo sapiens
  misc_RNA (1)...(19): siRNA sense strand
gauagugacaccuccugua

SEQ ID NO: 732499 - RNA, 19 nt, Homo sapiens
  misc_RNA (1)...(19): siRNA sense strand
ugaaaugaccucccuaagu

SEQ ID NO: 732500 - RNA, 19 nt, Homo sapiens
  misc_RNA (1)...(19): siRNA sense strand
caaggaagccgagucguau

SEQ ID NO: 732501 - RNA, 19 nt, Homo sapiens
  misc_RNA (1)...(19): siRNA sense strand
guauuccaguucagauaaa

SEQ ID NO: 732502 - RNA, 19 nt, Homo sapiens
  misc_RNA (1)...(19): siRNA sense strand
cagugcauauacacaauaa

SEQ ID NO: 732503 - RNA, 19 nt, Homo sapiens
  misc_RNA (1)...(19): siRNA sense strand
acaaggaacccauaaagau

SEQ ID NO: 732504 - RNA, 19 nt, Homo sapiens
  misc_RNA (1)...(19): siRNA sense strand
gugcauauacacaauaaug

SEQ ID NO: 732505 - RNA, 19 nt, Homo sapiens
  misc_RNA (1)...(19): siRNA sense strand
gcugguauauucagucucu

SEQ ID NO: 732506 - RNA, 19 nt, Homo sapiens
  misc_RNA (1)...(19): siRNA sense strand
gguauuccaguucagauaa

SEQ ID NO: 732507 - RNA, 19 nt, Homo sapiens
  misc_RNA (1)...(19): siRNA sense strand
gagagaaagcuauccagau

SEQ ID NO: 732508 - RNA, 19 nt, Homo sapiens
  misc_RNA (1)...(19): siRNA sense strand
ggaggaaggcagcugguau

SEQ ID NO: 732509 - RNA, 19 nt, Homo sapiens
  misc_RNA (1)...(19): siRNA sense strand
gcaccucaacuguaccaaa

SEQ ID NO: 732510 - RNA, 19 nt, Homo sapiens
  misc_RNA (1)...(19): siRNA sense strand
ggaaggcagcugguauauu

SEQ ID NO: 732511 - RNA, 19 nt, Homo sapiens
  misc_RNA (1)...(19): siRNA sense strand
acaaggaagccgagucgua

SEQ ID NO: 732512 - RNA, 19 nt, Homo sapiens
  misc_RNA (1)...(19): siRNA sense strand
gucaacaaccacagcuuua

SEQ ID NO: 732513 - RNA, 19 nt, Homo sapiens
  misc_RNA (1)...(19): siRNA sense strand
uaaguuuccuggcauuucu

SEQ ID NO: 732514 - RNA, 19 nt, Homo sapiens
  misc_RNA (1)...(19): siRNA sense strand
gaaaguggaaauggagaug

SEQ ID NO: 732515 - RNA, 19 nt, Homo sapiens
  misc_RNA (1)...(19): siRNA sense strand
ugccgaggcugacuuccua

SEQ ID NO: 732516 - RNA, 19 nt, Homo sapiens
  misc_RNA (1)...(19): siRNA sense strand
caacuguaccaaagaggaa

SEQ ID NO: 732517 - RNA, 19 nt, Homo sapiens
  misc_RNA (1)...(19): siRNA sense strand
gaagccgagucguaucaag

SEQ ID NO: 732518 - RNA, 19 nt, Homo sapiens
  misc_RNA (1)...(19): siRNA sense strand
caccucaacuguaccaaag

SEQ ID NO: 732519 - RNA, 19 nt, Homo sapiens
  misc_RNA (1)...(19): siRNA sense strand
ucacagugcauauacacaa

SEQ ID NO: 732520 - RNA, 19 nt, Homo sapiens
  misc_RNA (1)...(19): siRNA sense strand
guggagaaccucaaguuuc

SEQ ID NO: 732521 - RNA, 19 nt, Homo sapiens
  misc_RNA (1)...(19): siRNA sense strand
ggacaugaucuuccuucug

SEQ ID NO: 732522 - RNA, 19 nt, Homo sapiens
  misc_RNA (1)...(19): siRNA sense strand
gacauucuuggaagccuua

SEQ ID NO: 732523 - RNA, 19 nt, Homo sapiens
  misc_RNA (1)...(19): siRNA sense strand
gacagacaaggaacccaua

SEQ ID NO: 732524 - RNA, 19 nt, Homo sapiens
  misc_RNA (1)...(19): siRNA sense strand
cccaggcuauguauccuuu

SEQ ID NO: 732525 - RNA, 19 nt, Homo sapiens
  misc_RNA (1)...(19): siRNA sense strand
ggucaacauugguauucca

SEQ ID NO: 732526 - RNA, 19 nt, Homo sapiens
  misc_RNA (1)...(19): siRNA sense strand
ugacaccuccuguagacaa

SEQ ID NO: 732527 - RNA, 19 nt, Homo sapiens
  misc_RNA (1)...(19): siRNA sense strand
caaggucaacauugguauu

SEQ ID NO: 732528 - RNA, 19 nt, Homo sapiens
  misc_RNA (1)...(19): siRNA sense strand
uguguaaucaucugaagaa

SEQ ID NO: 732529 - RNA, 19 nt, Homo sapiens
  misc_RNA (1)...(19): siRNA sense strand
augcugagauccugaguca

SEQ ID NO: 732530 - RNA, 19 nt, Homo sapiens
  misc_RNA (1)...(19): siRNA sense strand
agaacuccucuauaucaua

SEQ ID NO: 732531 - RNA, 19 nt, Homo sapiens
  misc_RNA (1)...(19): siRNA sense strand
agacaaggaacccauaaag

SEQ ID NO: 732532 - RNA, 19 nt, Homo sapiens
  misc_RNA (1)...(19): siRNA sense strand
caugaucuuccuucugaaa

SEQ ID NO: 732533 - RNA, 19 nt, Homo sapiens
  misc_RNA (1)...(19): siRNA sense strand
cagaacuccucuauaucau

SEQ ID NO: 732534 - RNA, 19 nt, Homo sapiens
  misc_RNA (1)...(19): siRNA sense strand
acucagagaacuuaaagga

SEQ ID NO: 732535 - RNA, 19 nt, Homo sapiens
  misc_RNA (1)...(19): siRNA sense strand
ugucaacaaccacagcuuu

SEQ ID NO: 732536 - RNA, 19 nt, Homo sapiens
  misc_RNA (1)...(19): siRNA sense strand
cgaacugucagaaggcauu

SEQ ID NO: 732537 - RNA, 19 nt, Homo sapiens
  misc_RNA (1)...(19): siRNA sense strand
ugagugaggaagacccuuu

SEQ ID NO: 732538 - RNA, 19 nt, Homo sapiens
  misc_RNA (1)...(19): siRNA sense strand
gagaggaagaacuaguuuc

SEQ ID NO: 732539 - RNA, 19 nt, Homo sapiens
  misc_RNA (1)...(19): siRNA sense strand
cugcagcaccucaacugua

SEQ ID NO: 732540 - RNA, 19 nt, Homo sapiens
  misc_RNA (1)...(19): siRNA sense strand
gcccuagacuggcugaaaa

SEQ ID NO: 732541 - RNA, 19 nt, Homo sapiens
  misc_RNA (1)...(19): siRNA sense strand
cacagugcauauacacaau

SEQ ID NO: 732542 - RNA, 19 nt, Homo sapiens
  misc_RNA (1)...(19): siRNA sense strand
gcauugacucagagaacuu

SEQ ID NO: 732543 - RNA, 19 nt, Homo sapiens
  misc_RNA (1)...(19): siRNA sense strand
cagcugguauauucagucu

SEQ ID NO: 732544 - RNA, 19 nt, Homo sapiens
  misc_RNA (1)...(19): siRNA sense strand
uauaucauacggcagaaga

SEQ ID NO: 732545 - RNA, 19 nt, Homo sapiens
  misc_RNA (1)...(19): siRNA sense strand
cauugacucagagaacuua

SEQ ID NO: 732546 - RNA, 19 nt, Homo sapiens
  misc_RNA (1)...(19): siRNA sense strand
ccucaacuguaccaaagag

SEQ ID NO: 732547 - RNA, 19 nt, Homo sapiens
  misc_RNA (1)...(19): siRNA sense strand
uggagaugguccugcagaa

SEQ ID NO: 732548 - RNA, 19 nt, Homo sapiens
  misc_RNA (1)...(19): siRNA sense strand
cagacaaggaacccauaaa

SEQ ID NO: 732549 - RNA, 19 nt, Homo sapiens
  misc_RNA (1)...(19): siRNA sense strand
cagagaacuuaaaggacau

SEQ ID NO: 732550 - RNA, 19 nt, Homo sapiens
  misc_RNA (1)...(19): siRNA sense strand
gaaggcauugacucagaga

SEQ ID NO: 732551 - RNA, 19 nt, Homo sapiens
  misc_RNA (1)...(19): siRNA sense strand
gaaaucucaaggucaacau

SEQ ID NO: 732552 - RNA, 19 nt, Homo sapiens
  misc_RNA (1)...(19): siRNA sense strand
acagugcauauacacaaua

SEQ ID NO: 732553 - RNA, 19 nt, Homo sapiens
  misc_RNA (1)...(19): siRNA sense strand
gagaaacaagguaaaauag

SEQ ID NO: 732554 - RNA, 19 nt, Homo sapiens
  misc_RNA (1)...(19): siRNA sense strand
aaaugaccucccuaaguuu

SEQ ID NO: 732555 - RNA, 19 nt, Homo sapiens
  misc_RNA (1)...(19): siRNA sense strand
gaacugucagaaggcauug

SEQ ID NO: 732556 - RNA, 19 nt, Homo sapiens
  misc_RNA (1)...(19): siRNA sense strand
ggacugcuucguguucugu

SEQ ID NO: 732557 - RNA, 19 nt, Homo sapiens
  misc_RNA (1)...(19): siRNA sense strand
acauugguauuccaguuca

SEQ ID NO: 732558 - RNA, 19 nt, Homo sapiens
  misc_RNA (1)...(19): siRNA sense strand
acagacaaggaacccauaa

SEQ ID NO: 732559 - RNA, 19 nt, Homo sapiens
  misc_RNA (1)...(19): siRNA sense strand
gagaaacauagagaaauac

SEQ ID NO: 732560 - RNA, 19 nt, Homo sapiens
  misc_RNA (1)...(19): siRNA sense strand
ugacucagagaacuuaaag

SEQ ID NO: 732561 - RNA, 19 nt, Homo sapiens
  misc_RNA (1)...(19): siRNA sense strand
aaguuucucugcauaggau

SEQ ID NO: 732562 - RNA, 19 nt, Homo sapiens
  misc_RNA (1)...(19): siRNA sense strand
guguaaucaucugaagaaa

SEQ ID NO: 732563 - RNA, 19 nt, Homo sapiens
  misc_RNA (1)...(19): siRNA sense strand
ggagaugguccugcagaag

SEQ ID NO: 732564 - RNA, 19 nt, Homo sapiens
  misc_RNA (1)...(19): siRNA sense strand
gcucuacgaacugucagaa

SEQ ID NO: 732565 - RNA, 19 nt, Homo sapiens
  misc_RNA (1)...(19): siRNA sense strand
gaaaugaccucccuaaguu

SEQ ID NO: 732566 - RNA, 19 nt, Homo sapiens
  misc_RNA (1)...(19): siRNA sense strand
gacaugaucuuccuucuga

SEQ ID NO: 732567 - RNA, 19 nt, Homo sapiens
  misc_RNA (1)...(19): siRNA sense strand
caaaggguuucucuguuua

SEQ ID NO: 732568 - RNA, 19 nt, Homo sapiens
  misc_RNA (1)...(19): siRNA sense strand
uggcagaacuccucuauau

SEQ ID NO: 732569 - RNA, 19 nt, Homo sapiens
  misc_RNA (1)...(19): siRNA sense strand
gcagaacuccucuauauca

SEQ ID NO: 732570 - RNA, 19 nt, Homo sapiens
  misc_RNA (1)...(19): siRNA sense strand
acaaaggguuucucuguuu

SEQ ID NO: 732571 - RNA, 19 nt, Homo sapiens
  misc_RNA (1)...(19): siRNA sense strand
gaacuccucuauaucauac

SEQ ID NO: 732572 - RNA, 19 nt, Homo sapiens
  misc_RNA (1)...(19): siRNA sense strand
caacauugguauuccaguu

SEQ ID NO: 732573 - RNA, 19 nt, Homo sapiens
  misc_RNA (1)...(19): siRNA sense strand
gacaaaggguuucucuguu

SEQ ID NO: 732574 - RNA, 19 nt, Homo sapiens
  misc_RNA (1)...(19): siRNA sense strand
gaaagacucgcuucccaaa

SEQ ID NO: 732575 - RNA, 19 nt, Homo sapiens
  misc_RNA (1)...(19): siRNA sense strand
gcaaaacaguuguaccuaa

SEQ ID NO: 732576 - RNA, 19 nt, Homo sapiens
  misc_RNA (1)...(19): siRNA sense strand
gaacuuaaaggacaugauc

SEQ ID NO: 732577 - RNA, 19 nt, Homo sapiens
  misc_RNA (1)...(19): siRNA sense strand
gaagaacuaguuucccaaa

SEQ ID NO: 732578 - RNA, 19 nt, Homo sapiens
  misc_RNA (1)...(19): siRNA sense strand
cagaaggcauugacucaga

SEQ ID NO: 732579 - RNA, 19 nt, Homo sapiens
  misc_RNA (1)...(19): siRNA sense strand
ucaaggagaggaagaacua

SEQ ID NO: 732580 - RNA, 19 nt, Homo sapiens
  misc_RNA (1)...(19): siRNA sense strand
cgacaaaggguuucucugu

SEQ ID NO: 732581 - RNA, 19 nt, Homo sapiens
  misc_RNA (1)...(19): siRNA sense strand
ccucaaguuucucugcaua

SEQ ID NO: 732582 - RNA, 19 nt, Homo sapiens
  misc_RNA (1)...(19): siRNA sense strand
caaaacaguuguaccuaaa

SEQ ID NO: 732583 - RNA, 19 nt, Homo sapiens
  misc_RNA (1)...(19): siRNA sense strand
ggagaggaagaacuaguuu

SEQ ID NO: 732584 - RNA, 19 nt, Homo sapiens
  misc_RNA (1)...(19): siRNA sense strand
gaaaccugcucuacgaacu

SEQ ID NO: 732585 - RNA, 19 nt, Homo sapiens
  misc_RNA (1)...(19): siRNA sense strand
gauagugacaccuccugua

SEQ ID NO: 732586 - RNA, 19 nt, Homo sapiens
  misc_RNA (1)...(19): siRNA sense strand
ugaaaugaccucccuaagu

SEQ ID NO: 732587 - RNA, 19 nt, Homo sapiens
  misc_RNA (1)...(19): siRNA sense strand
guauuccaguucagauaaa

SEQ ID NO: 732588 - RNA, 19 nt, Homo sapiens
  misc_RNA (1)...(19): siRNA sense strand
caaggaagccgagucguau

SEQ ID NO: 732589 - RNA, 19 nt, Homo sapiens
  misc_RNA (1)...(19): siRNA sense strand
gguauuccaguucagauaa

SEQ ID NO: 732590 - RNA, 19 nt, Homo sapiens
  misc_RNA (1)...(19): siRNA sense strand
gagagaaagcuauccagau

SEQ ID NO: 732591 - RNA, 19 nt, Homo sapiens
  misc_RNA (1)...(19): siRNA sense strand
gcaccucaacuguaccaaa

SEQ ID NO: 732592 - RNA, 19 nt, Homo sapiens
  misc_RNA (1)...(19): siRNA sense strand
acaaggaagccgagucgua

SEQ ID NO: 732593 - RNA, 19 nt, Homo sapiens
  misc_RNA (1)...(19): siRNA sense strand
gucaacaaccacagcuuua

SEQ ID NO: 732594 - RNA, 19 nt, Homo sapiens
  misc_RNA (1)...(19): siRNA sense strand
uaaguuuccuggcauuucu

SEQ ID NO: 732595 - RNA, 19 nt, Homo sapiens
  misc_RNA (1)...(19): siRNA sense strand
caacuguaccaaagaggaa

SEQ ID NO: 732596 - RNA, 19 nt, Homo sapiens
  misc_RNA (1)...(19): siRNA sense strand
gaagccgagucguaucaag

SEQ ID NO: 732597 - RNA, 19 nt, Homo sapiens
  misc_RNA (1)...(19): siRNA sense strand
caccucaacuguaccaaag

SEQ ID NO: 732598 - RNA, 19 nt, Homo sapiens
  misc_RNA (1)...(19): siRNA sense strand
ggacaugaucuuccuucug

SEQ ID NO: 732599 - RNA, 19 nt, Homo sapiens
  misc_RNA (1)...(19): siRNA sense strand
guggagaaccucaaguuuc

SEQ ID NO: 732600 - RNA, 19 nt, Homo sapiens
  misc_RNA (1)...(19): siRNA sense strand
gacauucuuggaagccuua

SEQ ID NO: 732601 - RNA, 19 nt, Homo sapiens
  misc_RNA (1)...(19): siRNA sense strand
gacagacaaggaacccaua

SEQ ID NO: 732602 - RNA, 19 nt, Homo sapiens
  misc_RNA (1)...(19): siRNA sense strand
ggucaacauugguauucca

SEQ ID NO: 732603 - RNA, 19 nt, Homo sapiens
  misc_RNA (1)...(19): siRNA sense strand
ugacaccuccuguagacaa

SEQ ID NO: 732604 - RNA, 19 nt, Homo sapiens
  misc_RNA (1)...(19): siRNA sense strand
caaggucaacauugguauu

SEQ ID NO: 732605 - RNA, 19 nt, Homo sapiens
  misc_RNA (1)...(19): siRNA sense strand
cagaacuccucuauaucau

SEQ ID NO: 732606 - RNA, 19 nt, Homo sapiens
  misc_RNA (1)...(19): siRNA sense strand
caugaucuuccuucugaaa

SEQ ID NO: 732607 - RNA, 19 nt, Homo sapiens
  misc_RNA (1)...(19): siRNA sense strand
acucagagaacuuaaagga

SEQ ID NO: 732608 - RNA, 19 nt, Homo sapiens
  misc_RNA (1)...(19): siRNA sense strand
agaacuccucuauaucaua

SEQ ID NO: 732609 - RNA, 19 nt, Homo sapiens
  misc_RNA (1)...(19): siRNA sense strand
ugucaacaaccacagcuuu

SEQ ID NO: 732610 - RNA, 19 nt, Homo sapiens
  misc_RNA (1)...(19): siRNA sense strand
ugagugaggaagacccuuu

SEQ ID NO: 732611 - RNA, 19 nt, Homo sapiens
  misc_RNA (1)...(19): siRNA sense strand
gagaggaagaacuaguuuc

SEQ ID NO: 732612 - RNA, 19 nt, Homo sapiens
  misc_RNA (1)...(19): siRNA sense strand
cgaacugucagaaggcauu

SEQ ID NO: 732613 - RNA, 19 nt, Homo sapiens
  misc_RNA (1)...(19): siRNA sense strand
cugcagcaccucaacugua

SEQ ID NO: 732614 - RNA, 19 nt, Homo sapiens
  misc_RNA (1)...(19): siRNA sense strand
uauaucauacggcagaaga

SEQ ID NO: 732615 - RNA, 19 nt, Homo sapiens
  misc_RNA (1)...(19): siRNA sense strand
cauugacucagagaacuua

SEQ ID NO: 732616 - RNA, 19 nt, Homo sapiens
  misc_RNA (1)...(19): siRNA sense strand
gcauugacucagagaacuu

SEQ ID NO: 732617 - RNA, 19 nt, Homo sapiens
  misc_RNA (1)...(19): siRNA sense strand
ccucaacuguaccaaagag

SEQ ID NO: 732618 - RNA, 19 nt, Homo sapiens
  misc_RNA (1)...(19): siRNA sense strand
cagagaacuuaaaggacau

SEQ ID NO: 732619 - RNA, 19 nt, Homo sapiens
  misc_RNA (1)...(19): siRNA sense strand
gaaggcauugacucagaga

SEQ ID NO: 732620 - RNA, 19 nt, Homo sapiens
  misc_RNA (1)...(19): siRNA sense strand
gaaaucucaaggucaacau

SEQ ID NO: 732621 - RNA, 19 nt, Homo sapiens
  misc_RNA (1)...(19): siRNA sense strand
gagaaacaagguaaaauag

SEQ ID NO: 732622 - RNA, 19 nt, Homo sapiens
  misc_RNA (1)...(19): siRNA sense strand
aaaugaccucccuaaguuu

SEQ ID NO: 732623 - RNA, 19 nt, Homo sapiens
  misc_RNA (1)...(19): siRNA sense strand
gaacugucagaaggcauug

SEQ ID NO: 732624 - RNA, 19 nt, Homo sapiens
  misc_RNA (1)...(19): siRNA sense strand
acagacaaggaacccauaa

SEQ ID NO: 732625 - RNA, 19 nt, Homo sapiens
  misc_RNA (1)...(19): siRNA sense strand
gagaaacauagagaaauac

SEQ ID NO: 732626 - RNA, 19 nt, Homo sapiens
  misc_RNA (1)...(19): siRNA sense strand
ugacucagagaacuuaaag

SEQ ID NO: 732627 - RNA, 19 nt, Homo sapiens
  misc_RNA (1)...(19): siRNA sense strand
acauugguauuccaguuca

SEQ ID NO: 732628 - RNA, 19 nt, Homo sapiens
  misc_RNA (1)...(19): siRNA sense strand
aaguuucucugcauaggau

SEQ ID NO: 732629 - RNA, 19 nt, Homo sapiens
  misc_RNA (1)...(19): siRNA sense strand
gcucuacgaacugucagaa

SEQ ID NO: 732630 - RNA, 19 nt, Homo sapiens
  misc_RNA (1)...(19): siRNA sense strand
ggcauugacucagagaacu

SEQ ID NO: 732631 - RNA, 19 nt, Homo sapiens
  misc_RNA (1)...(19): siRNA sense strand
uguggagaaccucaaguuu

SEQ ID NO: 732632 - RNA, 19 nt, Homo sapiens
  misc_RNA (1)...(19): siRNA sense strand
caaguuucucugcauagga

SEQ ID NO: 732633 - RNA, 19 nt, Homo sapiens
  misc_RNA (1)...(19): siRNA sense strand
ucaaguuucucugcauagg

SEQ ID NO: 732634 - RNA, 19 nt, Homo sapiens
  misc_RNA (1)...(19): siRNA sense strand
gaaaugaccucccuaaguu

SEQ ID NO: 732635 - RNA, 19 nt, Homo sapiens
  misc_RNA (1)...(19): siRNA sense strand
gaaggcagcugguauauuc

SEQ ID NO: 732636 - RNA, 19 nt, Homo sapiens
  misc_RNA (1)...(19): siRNA sense strand
gacaugaucuuccuucuga

SEQ ID NO: 732637 - RNA, 19 nt, Homo sapiens
  misc_RNA (1)...(19): siRNA sense strand
caaaggguuucucuguuua

SEQ ID NO: 732638 - RNA, 19 nt, Homo sapiens
  misc_RNA (1)...(19): siRNA sense strand
gaucaugucucacuucaca

SEQ ID NO: 732639 - RNA, 19 nt, Homo sapiens
  misc_RNA (1)...(19): siRNA sense strand
uggcagaacuccucuauau

SEQ ID NO: 732640 - RNA, 19 nt, Homo sapiens
  misc_RNA (1)...(19): siRNA sense strand
gcagaacuccucuauauca

SEQ ID NO: 732641 - RNA, 19 nt, Homo sapiens
  misc_RNA (1)...(19): siRNA sense strand
acaaaggguuucucuguuu

SEQ ID NO: 732642 - RNA, 19 nt, Homo sapiens
  misc_RNA (1)...(19): siRNA sense strand
gaacuccucuauaucauac

SEQ ID NO: 732643 - RNA, 19 nt, Homo sapiens
  misc_RNA (1)...(19): siRNA sense strand
caacauugguauuccaguu

SEQ ID NO: 732644 - RNA, 19 nt, Homo sapiens
  misc_RNA (1)...(19): siRNA sense strand
gacaaaggguuucucuguu

SEQ ID NO: 732645 - RNA, 19 nt, Homo sapiens
  misc_RNA (1)...(19): siRNA sense strand
gaaagacucgcuucccaaa

SEQ ID NO: 732646 - RNA, 19 nt, Homo sapiens
  misc_RNA (1)...(19): siRNA sense strand
gcaaaacaguuguaccuaa

SEQ ID NO: 732647 - RNA, 19 nt, Homo sapiens
  misc_RNA (1)...(19): siRNA sense strand
gaacuuaaaggacaugauc

SEQ ID NO: 732648 - RNA, 19 nt, Homo sapiens
  misc_RNA (1)...(19): siRNA sense strand
ccauaaagaugcugagauc

SEQ ID NO: 732649 - RNA, 19 nt, Homo sapiens
  misc_RNA (1)...(19): siRNA sense strand
gaggaaggcagcugguaua

SEQ ID NO: 732650 - RNA, 19 nt, Homo sapiens
  misc_RNA (1)...(19): siRNA sense strand
gaagaacuaguuucccaaa

SEQ ID NO: 732651 - RNA, 19 nt, Homo sapiens
  misc_RNA (1)...(19): siRNA sense strand
acaauaaugugacgaaagu

SEQ ID NO: 732652 - RNA, 19 nt, Homo sapiens
  misc_RNA (1)...(19): siRNA sense strand
gaggcugacuuccuacuug

SEQ ID NO: 732653 - RNA, 19 nt, Homo sapiens
  misc_RNA (1)...(19): siRNA sense strand
ugacgaaaguggaaaugga

SEQ ID NO: 732654 - RNA, 19 nt, Homo sapiens
  misc_RNA (1)...(19): siRNA sense strand
cagaaggcauugacucaga

SEQ ID NO: 732655 - RNA, 19 nt, Homo sapiens
  misc_RNA (1)...(19): siRNA sense strand
ucaaggagaggaagaacua

SEQ ID NO: 732656 - RNA, 19 nt, Homo sapiens
  misc_RNA (1)...(19): siRNA sense strand
cgacaaaggguuucucugu

SEQ ID NO: 732657 - RNA, 19 nt, Homo sapiens
  misc_RNA (1)...(19): siRNA sense strand
cugccaaggugaagagaua

SEQ ID NO: 732658 - RNA, 19 nt, Homo sapiens
  misc_RNA (1)...(19): siRNA sense strand
gcugagauccugagucaug

SEQ ID NO: 732659 - RNA, 19 nt, Homo sapiens
  misc_RNA (1)...(19): siRNA sense strand
uauauucagucucugugua

SEQ ID NO: 732660 - RNA, 19 nt, Homo sapiens
  misc_RNA (1)...(19): siRNA sense strand
ccucaaguuucucugcaua

SEQ ID NO: 732661 - RNA, 19 nt, Homo sapiens
  misc_RNA (1)...(19): siRNA sense strand
gauccugagucauguguuc

SEQ ID NO: 732662 - RNA, 19 nt, Homo sapiens
  misc_RNA (1)...(19): siRNA sense strand
caaggaacccauaaagaug

SEQ ID NO: 732663 - RNA, 19 nt, Homo sapiens
  misc_RNA (1)...(19): siRNA sense strand
caaaacaguuguaccuaaa

SEQ ID NO: 732664 - RNA, 19 nt, Homo sapiens
  misc_RNA (1)...(19): siRNA sense strand
ggagaggaagaacuaguuu

SEQ ID NO: 732665 - RNA, 19 nt, Homo sapiens
  misc_RNA (1)...(19): siRNA sense strand
gacaaggaacccauaaaga

SEQ ID NO: 732666 - RNA, 19 nt, Homo sapiens
  misc_RNA (1)...(19): siRNA sense strand
gaaaccugcucuacgaacu

SEQ ID NO: 732667 - RNA, 19 nt, Homo sapiens
  misc_RNA (1)...(19): siRNA sense strand
gauagugacaccuccugua

SEQ ID NO: 732668 - RNA, 19 nt, Homo sapiens
  misc_RNA (1)...(19): siRNA sense strand
ugaaaugaccucccuaagu

SEQ ID NO: 732669 - RNA, 19 nt, Homo sapiens
  misc_RNA (1)...(19): siRNA sense strand
caaggaagccgagucguau

SEQ ID NO: 732670 - RNA, 19 nt, Homo sapiens
  misc_RNA (1)...(19): siRNA sense strand
guauuccaguucagauaaa

SEQ ID NO: 732671 - RNA, 19 nt, Homo sapiens
  misc_RNA (1)...(19): siRNA sense strand
cagugcauauacacaauaa

SEQ ID NO: 732672 - RNA, 19 nt, Homo sapiens
  misc_RNA (1)...(19): siRNA sense strand
acaaggaacccauaaagau

SEQ ID NO: 732673 - RNA, 19 nt, Homo sapiens
  misc_RNA (1)...(19): siRNA sense strand
gugcauauacacaauaaug

SEQ ID NO: 732674 - RNA, 19 nt, Homo sapiens
  misc_RNA (1)...(19): siRNA sense strand
gcugguauauucagucucu

SEQ ID NO: 732675 - RNA, 19 nt, Homo sapiens
  misc_RNA (1)...(19): siRNA sense strand
gguauuccaguucagauaa

SEQ ID NO: 732676 - RNA, 19 nt, Homo sapiens
  misc_RNA (1)...(19): siRNA sense strand
gagagaaagcuauccagau

SEQ ID NO: 732677 - RNA, 19 nt, Homo sapiens
  misc_RNA (1)...(19): siRNA sense strand
ggaggaaggcagcugguau

SEQ ID NO: 732678 - RNA, 19 nt, Homo sapiens
  misc_RNA (1)...(19): siRNA sense strand
gcaccucaacuguaccaaa

SEQ ID NO: 732679 - RNA, 19 nt, Homo sapiens
  misc_RNA (1)...(19): siRNA sense strand
ggaaggcagcugguauauu

SEQ ID NO: 732680 - RNA, 19 nt, Homo sapiens
  misc_RNA (1)...(19): siRNA sense strand
acaaggaagccgagucgua

SEQ ID NO: 732681 - RNA, 19 nt, Homo sapiens
  misc_RNA (1)...(19): siRNA sense strand
gucaacaaccacagcuuua

SEQ ID NO: 732682 - RNA, 19 nt, Homo sapiens
  misc_RNA (1)...(19): siRNA sense strand
uaaguuuccuggcauuucu

SEQ ID NO: 732683 - RNA, 19 nt, Homo sapiens
  misc_RNA (1)...(19): siRNA sense strand
gaaaguggaaauggagaug

SEQ ID NO: 732684 - RNA, 19 nt, Homo sapiens
  misc_RNA (1)...(19): siRNA sense strand
ugccgaggcugacuuccua

SEQ ID NO: 732685 - RNA, 19 nt, Homo sapiens
  misc_RNA (1)...(19): siRNA sense strand
caacuguaccaaagaggaa

SEQ ID NO: 732686 - RNA, 19 nt, Homo sapiens
  misc_RNA (1)...(19): siRNA sense strand
gaagccgagucguaucaag

SEQ ID NO: 732687 - RNA, 19 nt, Homo sapiens
  misc_RNA (1)...(19): siRNA sense strand
caccucaacuguaccaaag

SEQ ID NO: 732688 - RNA, 19 nt, Homo sapiens
  misc_RNA (1)...(19): siRNA sense strand
ucacagugcauauacacaa

SEQ ID NO: 732689 - RNA, 19 nt, Homo sapiens
  misc_RNA (1)...(19): siRNA sense strand
guggagaaccucaaguuuc

SEQ ID NO: 732690 - RNA, 19 nt, Homo sapiens
  misc_RNA (1)...(19): siRNA sense strand
ggacaugaucuuccuucug

SEQ ID NO: 732691 - RNA, 19 nt, Homo sapiens
  misc_RNA (1)...(19): siRNA sense strand
gacauucuuggaagccuua

SEQ ID NO: 732692 - RNA, 19 nt, Homo sapiens
  misc_RNA (1)...(19): siRNA sense strand
gacagacaaggaacccaua

SEQ ID NO: 732693 - RNA, 19 nt, Homo sapiens
  misc_RNA (1)...(19): siRNA sense strand
cccaggcuauguauccuuu

SEQ ID NO: 732694 - RNA, 19 nt, Homo sapiens
  misc_RNA (1)...(19): siRNA sense strand
ggucaacauugguauucca

SEQ ID NO: 732695 - RNA, 19 nt, Homo sapiens
  misc_RNA (1)...(19): siRNA sense strand
ugacaccuccuguagacaa

SEQ ID NO: 732696 - RNA, 19 nt, Homo sapiens
  misc_RNA (1)...(19): siRNA sense strand
caaggucaacauugguauu

SEQ ID NO: 732697 - RNA, 19 nt, Homo sapiens
  misc_RNA (1)...(19): siRNA sense strand
uguguaaucaucugaagaa

SEQ ID NO: 732698 - RNA, 19 nt, Homo sapiens
  misc_RNA (1)...(19): siRNA sense strand
augcugagauccugaguca

SEQ ID NO: 732699 - RNA, 19 nt, Homo sapiens
  misc_RNA (1)...(19): siRNA sense strand
agaacuccucuauaucaua

SEQ ID NO: 732700 - RNA, 19 nt, Homo sapiens
  misc_RNA (1)...(19): siRNA sense strand
agacaaggaacccauaaag

SEQ ID NO: 732701 - RNA, 19 nt, Homo sapiens
  misc_RNA (1)...(19): siRNA sense strand
caugaucuuccuucugaaa

SEQ ID NO: 732702 - RNA, 19 nt, Homo sapiens
  misc_RNA (1)...(19): siRNA sense strand
cagaacuccucuauaucau

SEQ ID NO: 732703 - RNA, 19 nt, Homo sapiens
  misc_RNA (1)...(19): siRNA sense strand
acucagagaacuuaaagga

SEQ ID NO: 732704 - RNA, 19 nt, Homo sapiens
  misc_RNA (1)...(19): siRNA sense strand
ugucaacaaccacagcuuu

SEQ ID NO: 732705 - RNA, 19 nt, Homo sapiens
  misc_RNA (1)...(19): siRNA sense strand
cgaacugucagaaggcauu

SEQ ID NO: 732706 - RNA, 19 nt, Homo sapiens
  misc_RNA (1)...(19): siRNA sense strand
ugagugaggaagacccuuu

SEQ ID NO: 732707 - RNA, 19 nt, Homo sapiens
  misc_RNA (1)...(19): siRNA sense strand
gagaggaagaacuaguuuc

SEQ ID NO: 732708 - RNA, 19 nt, Homo sapiens
  misc_RNA (1)...(19): siRNA sense strand
cugcagcaccucaacugua

SEQ ID NO: 732709 - RNA, 19 nt, Homo sapiens
  misc_RNA (1)...(19): siRNA sense strand
gcccuagacuggcugaaaa

SEQ ID NO: 732710 - RNA, 19 nt, Homo sapiens
  misc_RNA (1)...(19): siRNA sense strand
cacagugcauauacacaau

SEQ ID NO: 732711 - RNA, 19 nt, Homo sapiens
  misc_RNA (1)...(19): siRNA sense strand
gcauugacucagagaacuu

SEQ ID NO: 732712 - RNA, 19 nt, Homo sapiens
  misc_RNA (1)...(19): siRNA sense strand
cagcugguauauucagucu

SEQ ID NO: 732713 - RNA, 19 nt, Homo sapiens
  misc_RNA (1)...(19): siRNA sense strand
uauaucauacggcagaaga

SEQ ID NO: 732714 - RNA, 19 nt, Homo sapiens
  misc_RNA (1)...(19): siRNA sense strand
cauugacucagagaacuua

SEQ ID NO: 732715 - RNA, 19 nt, Homo sapiens
  misc_RNA (1)...(19): siRNA sense strand
ccucaacuguaccaaagag

SEQ ID NO: 732716 - RNA, 19 nt, Homo sapiens
  misc_RNA (1)...(19): siRNA sense strand
uggagaugguccugcagaa

SEQ ID NO: 732717 - RNA, 19 nt, Homo sapiens
  misc_RNA (1)...(19): siRNA sense strand
cagacaaggaacccauaaa

SEQ ID NO: 732718 - RNA, 19 nt, Homo sapiens
  misc_RNA (1)...(19): siRNA sense strand
cagagaacuuaaaggacau

SEQ ID NO: 732719 - RNA, 19 nt, Homo sapiens
  misc_RNA (1)...(19): siRNA sense strand
gaaggcauugacucagaga

SEQ ID NO: 732720 - RNA, 19 nt, Homo sapiens
  misc_RNA (1)...(19): siRNA sense strand
gaaaucucaaggucaacau

SEQ ID NO: 732721 - RNA, 19 nt, Homo sapiens
  misc_RNA (1)...(19): siRNA sense strand
acagugcauauacacaaua

SEQ ID NO: 732722 - RNA, 19 nt, Homo sapiens
  misc_RNA (1)...(19): siRNA sense strand
gagaaacaagguaaaauag

SEQ ID NO: 732723 - RNA, 19 nt, Homo sapiens
  misc_RNA (1)...(19): siRNA sense strand
aaaugaccucccuaaguuu

SEQ ID NO: 732724 - RNA, 19 nt, Homo sapiens
  misc_RNA (1)...(19): siRNA sense strand
gaacugucagaaggcauug

SEQ ID NO: 732725 - RNA, 19 nt, Homo sapiens
  misc_RNA (1)...(19): siRNA sense strand
ggacugcuucguguucugu

SEQ ID NO: 732726 - RNA, 19 nt, Homo sapiens
  misc_RNA (1)...(19): siRNA sense strand
acauugguauuccaguuca

SEQ ID NO: 732727 - RNA, 19 nt, Homo sapiens
  misc_RNA (1)...(19): siRNA sense strand
acagacaaggaacccauaa

SEQ ID NO: 732728 - RNA, 19 nt, Homo sapiens
  misc_RNA (1)...(19): siRNA sense strand
gagaaacauagagaaauac

SEQ ID NO: 732729 - RNA, 19 nt, Homo sapiens
  misc_RNA (1)...(19): siRNA sense strand
ugacucagagaacuuaaag

SEQ ID NO: 732730 - RNA, 19 nt, Homo sapiens
  misc_RNA (1)...(19): siRNA sense strand
aaguuucucugcauaggau

SEQ ID NO: 732731 - RNA, 19 nt, Homo sapiens
  misc_RNA (1)...(19): siRNA sense strand
guguaaucaucugaagaaa

SEQ ID NO: 732732 - RNA, 19 nt, Homo sapiens
  misc_RNA (1)...(19): siRNA sense strand
ggagaugguccugcagaag

SEQ ID NO: 732733 - RNA, 19 nt, Homo sapiens
  misc_RNA (1)...(19): siRNA sense strand
gcucuacgaacugucagaa

SEQ ID NO: 732734 - RNA, 19 nt, Homo sapiens
  misc_RNA (1)...(19): siRNA sense strand
cuaagaagcugacuaaugc

SEQ ID NO: 732735 - RNA, 19 nt, Homo sapiens
  misc_RNA (1)...(19): siRNA sense strand
gcuaagaagcugacuaaug

SEQ ID NO: 732736 - RNA, 19 nt, Homo sapiens
  misc_RNA (1)...(19): siRNA sense strand
ccacucaacuuggcucaca

SEQ ID NO: 732737 - RNA, 19 nt, Homo sapiens
  misc_RNA (1)...(19): siRNA sense strand
cugcuaagaagcugacuaa

SEQ ID NO: 732738 - RNA, 19 nt, Homo sapiens
  misc_RNA (1)...(19): siRNA sense strand
gcaugaacgacacccuguu

SEQ ID NO: 732739 - RNA, 19 nt, Homo sapiens
  misc_RNA (1)...(19): siRNA sense strand
ggaaguccuuuuauuacca

SEQ ID NO: 732740 - RNA, 19 nt, Homo sapiens
  misc_RNA (1)...(19): siRNA sense strand
cuaagaagcugacuaaugc

SEQ ID NO: 732741 - RNA, 19 nt, Homo sapiens
  misc_RNA (1)...(19): siRNA sense strand
gcuaagaagcugacuaaug

SEQ ID NO: 732742 - RNA, 19 nt, Homo sapiens
  misc_RNA (1)...(19): siRNA sense strand
ccacucaacuuggcucaca

SEQ ID NO: 732743 - RNA, 19 nt, Homo sapiens
  misc_RNA (1)...(19): siRNA sense strand
cugcuaagaagcugacuaa

SEQ ID NO: 732744 - RNA, 19 nt, Homo sapiens
  misc_RNA (1)...(19): siRNA sense strand
gcaugaacgacacccuguu

SEQ ID NO: 732745 - RNA, 19 nt, Homo sapiens
  misc_RNA (1)...(19): siRNA sense strand
ggaaguccuuuuauuacca

SEQ ID NO: 732746 - RNA, 19 nt, Homo sapiens
  misc_RNA (1)...(19): siRNA sense strand
cuaagaagcugacuaaugc

SEQ ID NO: 732747 - RNA, 19 nt, Homo sapiens
  misc_RNA (1)...(19): siRNA sense strand
gcuaagaagcugacuaaug

SEQ ID NO: 732748 - RNA, 19 nt, Homo sapiens
  misc_RNA (1)...(19): siRNA sense strand
ccacucaacuuggcucaca

SEQ ID NO: 732749 - RNA, 19 nt, Homo sapiens
  misc_RNA (1)...(19): siRNA sense strand
cugcuaagaagcugacuaa

SEQ ID NO: 732750 - RNA, 19 nt, Homo sapiens
  misc_RNA (1)...(19): siRNA sense strand
gcaugaacgacacccuguu

SEQ ID NO: 732751 - RNA, 19 nt, Homo sapiens
  misc_RNA (1)...(19): siRNA sense strand
ggaaguccuuuuauuacca

SEQ ID NO: 732752 - RNA, 19 nt, Homo sapiens
  misc_RNA (1)...(19): siRNA sense strand
cuaagaagcugacuaaugc

SEQ ID NO: 732753 - RNA, 19 nt, Homo sapiens
  misc_RNA (1)...(19): siRNA sense strand
gcuaagaagcugacuaaug

SEQ ID NO: 732754 - RNA, 19 nt, Homo sapiens
  misc_RNA (1)...(19): siRNA sense strand
ccacucaacuuggcucaca

SEQ ID NO: 732755 - RNA, 19 nt, Homo sapiens
  misc_RNA (1)...(19): siRNA sense strand
cugcuaagaagcugacuaa

SEQ ID NO: 732756 - RNA, 19 nt, Homo sapiens
  misc_RNA (1)...(19): siRNA sense strand
gcaugaacgacacccuguu

SEQ ID NO: 732757 - RNA, 19 nt, Homo sapiens
  misc_RNA (1)...(19): siRNA sense strand
ggaaguccuuuuauuacca

SEQ ID NO: 732758 - RNA, 19 nt, Homo sapiens
  misc_RNA (1)...(19): siRNA sense strand
cuaagaagcugacuaaugc

SEQ ID NO: 732759 - RNA, 19 nt, Homo sapiens
  misc_RNA (1)...(19): siRNA sense strand
gcuaagaagcugacuaaug

SEQ ID NO: 732760 - RNA, 19 nt, Homo sapiens
  misc_RNA (1)...(19): siRNA sense strand
ccacucaacuuggcucaca

SEQ ID NO: 732761 - RNA, 19 nt, Homo sapiens
  misc_RNA (1)...(19): siRNA sense strand
cugcuaagaagcugacuaa

SEQ ID NO: 732762 - RNA, 19 nt, Homo sapiens
  misc_RNA (1)...(19): siRNA sense strand
gcaugaacgacacccuguu

SEQ ID NO: 732763 - RNA, 19 nt, Homo sapiens
  misc_RNA (1)...(19): siRNA sense strand
ggaaguccuuuuauuacca

SEQ ID NO: 732764 - RNA, 19 nt, Homo sapiens
  misc_RNA (1)...(19): siRNA sense strand
cuaagaagcugacuaaugc

SEQ ID NO: 732765 - RNA, 19 nt, Homo sapiens
  misc_RNA (1)...(19): siRNA sense strand
gcuaagaagcugacuaaug

SEQ ID NO: 732766 - RNA, 19 nt, Homo sapiens
  misc_RNA (1)...(19): siRNA sense strand
ccacucaacuuggcucaca

SEQ ID NO: 732767 - RNA, 19 nt, Homo sapiens
  misc_RNA (1)...(19): siRNA sense strand
cugcuaagaagcugacuaa

SEQ ID NO: 732768 - RNA, 19 nt, Homo sapiens
  misc_RNA (1)...(19): siRNA sense strand
gcaugaacgacacccuguu

SEQ ID NO: 732769 - RNA, 19 nt, Homo sapiens
  misc_RNA (1)...(19): siRNA sense strand
ggaaguccuuuuauuacca

SEQ ID NO: 732770 - RNA, 19 nt, Homo sapiens
  misc_RNA (1)...(19): siRNA sense strand
ccacucaacuuggcucaca

SEQ ID NO: 732771 - RNA, 19 nt, Homo sapiens
  misc_RNA (1)...(19): siRNA sense strand
gcaugaacgacacccuguu

SEQ ID NO: 732772 - RNA, 19 nt, Homo sapiens
  misc_RNA (1)...(19): siRNA sense strand
ggaaguccuuuuauuacca

SEQ ID NO: 732773 - RNA, 19 nt, Homo sapiens
  misc_RNA (1)...(19): siRNA sense strand
ccacucaacuuggcucaca

SEQ ID NO: 732774 - RNA, 19 nt, Homo sapiens
  misc_RNA (1)...(19): siRNA sense strand
gcaugaacgacacccuguu

SEQ ID NO: 732775 - RNA, 19 nt, Homo sapiens
  misc_RNA (1)...(19): siRNA sense strand
ggaaguccuuuuauuacca

SEQ ID NO: 732776 - RNA, 19 nt, Homo sapiens
  misc_RNA (1)...(19): siRNA sense strand
cuaagaagcugacuaaugc

SEQ ID NO: 732777 - RNA, 19 nt, Homo sapiens
  misc_RNA (1)...(19): siRNA sense strand
gcuaagaagcugacuaaug

SEQ ID NO: 732778 - RNA, 19 nt, Homo sapiens
  misc_RNA (1)...(19): siRNA sense strand
ccacucaacuuggcucaca

SEQ ID NO: 732779 - RNA, 19 nt, Homo sapiens
  misc_RNA (1)...(19): siRNA sense strand
cugcuaagaagcugacuaa

SEQ ID NO: 732780 - RNA, 19 nt, Homo sapiens
  misc_RNA (1)...(19): siRNA sense strand
gcaugaacgacacccuguu

SEQ ID NO: 732781 - RNA, 19 nt, Homo sapiens
  misc_RNA (1)...(19): siRNA sense strand
ggaaguccuuuuauuacca

SEQ ID NO: 732782 - RNA, 19 nt, Homo sapiens
  misc_RNA (1)...(19): siRNA sense strand
cuaagaagcugacuaaugc

SEQ ID NO: 732783 - RNA, 19 nt, Homo sapiens
  misc_RNA (1)...(19): siRNA sense strand
gcuaagaagcugacuaaug

SEQ ID NO: 732784 - RNA, 19 nt, Homo sapiens
  misc_RNA (1)...(19): siRNA sense strand
ccacucaacuuggcucaca

SEQ ID NO: 732785 - RNA, 19 nt, Homo sapiens
  misc_RNA (1)...(19): siRNA sense strand
cugcuaagaagcugacuaa

SEQ ID NO: 732786 - RNA, 19 nt, Homo sapiens
  misc_RNA (1)...(19): siRNA sense strand
gcaugaacgacacccuguu

SEQ ID NO: 732787 - RNA, 19 nt, Homo sapiens
  misc_RNA (1)...(19): siRNA sense strand
ggaaguccuuuuauuacca

SEQ ID NO: 732788 - RNA, 19 nt, Homo sapiens
  misc_RNA (1)...(19): siRNA sense strand
cuaagaagcugacuaaugc

SEQ ID NO: 732789 - RNA, 19 nt, Homo sapiens
  misc_RNA (1)...(19): siRNA sense strand
gcuaagaagcugacuaaug

SEQ ID NO: 732790 - RNA, 19 nt, Homo sapiens
  misc_RNA (1)...(19): siRNA sense strand
ccacucaacuuggcucaca

SEQ ID NO: 732791 - RNA, 19 nt, Homo sapiens
  misc_RNA (1)...(19): siRNA sense strand
cugcuaagaagcugacuaa

SEQ ID NO: 732792 - RNA, 19 nt, Homo sapiens
  misc_RNA (1)...(19): siRNA sense strand
gcaugaacgacacccuguu

SEQ ID NO: 732793 - RNA, 19 nt, Homo sapiens
  misc_RNA (1)...(19): siRNA sense strand
ggaaguccuuuuauuacca

SEQ ID NO: 732794 - RNA, 19 nt, Homo sapiens
  misc_RNA (1)...(19): siRNA sense strand
cuaagaagcugacuaaugc

SEQ ID NO: 732795 - RNA, 19 nt, Homo sapiens
  misc_RNA (1)...(19): siRNA sense strand
gcuaagaagcugacuaaug

SEQ ID NO: 732796 - RNA, 19 nt, Homo sapiens
  misc_RNA (1)...(19): siRNA sense strand
ccacucaacuuggcucaca

SEQ ID NO: 732797 - RNA, 19 nt, Homo sapiens
  misc_RNA (1)...(19): siRNA sense strand
cugcuaagaagcugacuaa

SEQ ID NO: 732798 - RNA, 19 nt, Homo sapiens
  misc_RNA (1)...(19): siRNA sense strand
gcaugaacgacacccuguu

SEQ ID NO: 732799 - RNA, 19 nt, Homo sapiens
  misc_RNA (1)...(19): siRNA sense strand
ggaaguccuuuuauuacca

SEQ ID NO: 732800 - RNA, 19 nt, Homo sapiens
  misc_RNA (1)...(19): siRNA sense strand
cuaagaagcugacuaaugc

SEQ ID NO: 732801 - RNA, 19 nt, Homo sapiens
  misc_RNA (1)...(19): siRNA sense strand
gcuaagaagcugacuaaug

SEQ ID NO: 732802 - RNA, 19 nt, Homo sapiens
  misc_RNA (1)...(19): siRNA sense strand
ccacucaacuuggcucaca

SEQ ID NO: 732803 - RNA, 19 nt, Homo sapiens
  misc_RNA (1)...(19): siRNA sense strand
cugcuaagaagcugacuaa

SEQ ID NO: 732804 - RNA, 19 nt, Homo sapiens
  misc_RNA (1)...(19): siRNA sense strand
gcaugaacgacacccuguu

SEQ ID NO: 732805 - RNA, 19 nt, Homo sapiens
  misc_RNA (1)...(19): siRNA sense strand
ggaaguccuuuuauuacca

SEQ ID NO: 732806 - RNA, 19 nt, Homo sapiens
  misc_RNA (1)...(19): siRNA sense strand
cuaagaagcugacuaaugc

SEQ ID NO: 732807 - RNA, 19 nt, Homo sapiens
  misc_RNA (1)...(19): siRNA sense strand
gcuaagaagcugacuaaug

SEQ ID NO: 732808 - RNA, 19 nt, Homo sapiens
  misc_RNA (1)...(19): siRNA sense strand
ccacucaacuuggcucaca

SEQ ID NO: 732809 - RNA, 19 nt, Homo sapiens
  misc_RNA (1)...(19): siRNA sense strand
cugcuaagaagcugacuaa

SEQ ID NO: 732810 - RNA, 19 nt, Homo sapiens
  misc_RNA (1)...(19): siRNA sense strand
gcaugaacgacacccuguu

SEQ ID NO: 732811 - RNA, 19 nt, Homo sapiens
  misc_RNA (1)...(19): siRNA sense strand
ggaaguccuuuuauuacca

SEQ ID NO: 732812 - RNA, 19 nt, Homo sapiens
  misc_RNA (1)...(19): siRNA sense strand
ccacucaacuuggcucaca

SEQ ID NO: 732813 - RNA, 19 nt, Homo sapiens
  misc_RNA (1)...(19): siRNA sense strand
gcaugaacgacacccuguu

SEQ ID NO: 732814 - RNA, 19 nt, Homo sapiens
  misc_RNA (1)...(19): siRNA sense strand
ggaaguccuuuuauuacca

SEQ ID NO: 732815 - RNA, 19 nt, Homo sapiens
  misc_RNA (1)...(19): siRNA sense strand
ccacucaacuuggcucaca

SEQ ID NO: 732816 - RNA, 19 nt, Homo sapiens
  misc_RNA (1)...(19): siRNA sense strand
gcaugaacgacacccuguu

SEQ ID NO: 732817 - RNA, 19 nt, Homo sapiens
  misc_RNA (1)...(19): siRNA sense strand
ggaaguccuuuuauuacca

SEQ ID NO: 732818 - RNA, 19 nt, Homo sapiens
  misc_RNA (1)...(19): siRNA sense strand
cuaagaagcugacuaaugc

SEQ ID NO: 732819 - RNA, 19 nt, Homo sapiens
  misc_RNA (1)...(19): siRNA sense strand
gcuaagaagcugacuaaug

SEQ ID NO: 732820 - RNA, 19 nt, Homo sapiens
  misc_RNA (1)...(19): siRNA sense strand
ccacucaacuuggcucaca

SEQ ID NO: 732821 - RNA, 19 nt, Homo sapiens
  misc_RNA (1)...(19): siRNA sense strand
cugcuaagaagcugacuaa

SEQ ID NO: 732822 - RNA, 19 nt, Homo sapiens
  misc_RNA (1)...(19): siRNA sense strand
gcaugaacgacacccuguu

SEQ ID NO: 732823 - RNA, 19 nt, Homo sapiens
  misc_RNA (1)...(19): siRNA sense strand
ggaaguccuuuuauuacca

SEQ ID NO: 732824 - RNA, 19 nt, Homo sapiens
  misc_RNA (1)...(19): siRNA sense strand
cuaagaagcugacuaaugc

SEQ ID NO: 732825 - RNA, 19 nt, Homo sapiens
  misc_RNA (1)...(19): siRNA sense strand
gcuaagaagcugacuaaug

SEQ ID NO: 732826 - RNA, 19 nt, Homo sapiens
  misc_RNA (1)...(19): siRNA sense strand
ccacucaacuuggcucaca

SEQ ID NO: 732827 - RNA, 19 nt, Homo sapiens
  misc_RNA (1)...(19): siRNA sense strand
cugcuaagaagcugacuaa

SEQ ID NO: 732828 - RNA, 19 nt, Homo sapiens
  misc_RNA (1)...(19): siRNA sense strand
gcaugaacgacacccuguu

SEQ ID NO: 732829 - RNA, 19 nt, Homo sapiens
  misc_RNA (1)...(19): siRNA sense strand
ggaaguccuuuuauuacca

SEQ ID NO: 732830 - RNA, 19 nt, Homo sapiens
  misc_RNA (1)...(19): siRNA sense strand
cuaagaagcugacuaaugc

SEQ ID NO: 732831 - RNA, 19 nt, Homo sapiens
  misc_RNA (1)...(19): siRNA sense strand
gcuaagaagcugacuaaug

SEQ ID NO: 732832 - RNA, 19 nt, Homo sapiens
  misc_RNA (1)...(19): siRNA sense strand
ccacucaacuuggcucaca

SEQ ID NO: 732833 - RNA, 19 nt, Homo sapiens
  misc_RNA (1)...(19): siRNA sense strand
cugcuaagaagcugacuaa

SEQ ID NO: 732834 - RNA, 19 nt, Homo sapiens
  misc_RNA (1)...(19): siRNA sense strand
gcaugaacgacacccuguu

SEQ ID NO: 732835 - RNA, 19 nt, Homo sapiens
  misc_RNA (1)...(19): siRNA sense strand
ggaaguccuuuuauuacca

SEQ ID NO: 732836 - RNA, 19 nt, Homo sapiens
  misc_RNA (1)...(19): siRNA sense strand
cuaagaagcugacuaaugc

SEQ ID NO: 732837 - RNA, 19 nt, Homo sapiens
  misc_RNA (1)...(19): siRNA sense strand
gcuaagaagcugacuaaug

SEQ ID NO: 732838 - RNA, 19 nt, Homo sapiens
  misc_RNA (1)...(19): siRNA sense strand
ccacucaacuuggcucaca

SEQ ID NO: 732839 - RNA, 19 nt, Homo sapiens
  misc_RNA (1)...(19): siRNA sense strand
cugcuaagaagcugacuaa

SEQ ID NO: 732840 - RNA, 19 nt, Homo sapiens
  misc_RNA (1)...(19): siRNA sense strand
gcaugaacgacacccuguu

SEQ ID NO: 732841 - RNA, 19 nt, Homo sapiens
  misc_RNA (1)...(19): siRNA sense strand
ggaaguccuuuuauuacca

SEQ ID NO: 732842 - RNA, 19 nt, Homo sapiens
  misc_RNA (1)...(19): siRNA sense strand
cuaagaagcugacuaaugc

SEQ ID NO: 732843 - RNA, 19 nt, Homo sapiens
  misc_RNA (1)...(19): siRNA sense strand
gcuaagaagcugacuaaug

SEQ ID NO: 732844 - RNA, 19 nt, Homo sapiens
  misc_RNA (1)...(19): siRNA sense strand
ccacucaacuuggcucaca

SEQ ID NO: 732845 - RNA, 19 nt, Homo sapiens
  misc_RNA (1)...(19): siRNA sense strand
cugcuaagaagcugacuaa

SEQ ID NO: 732846 - RNA, 19 nt, Homo sapiens
  misc_RNA (1)...(19): siRNA sense strand
gcaugaacgacacccuguu

SEQ ID NO: 732847 - RNA, 19 nt, Homo sapiens
  misc_RNA (1)...(19): siRNA sense strand
ggaaguccuuuuauuacca

SEQ ID NO: 732848 - RNA, 19 nt, Homo sapiens
  misc_RNA (1)...(19): siRNA sense strand
cuaagaagcugacuaaugc

SEQ ID NO: 732849 - RNA, 19 nt, Homo sapiens
  misc_RNA (1)...(19): siRNA sense strand
gcuaagaagcugacuaaug

SEQ ID NO: 732850 - RNA, 19 nt, Homo sapiens
  misc_RNA (1)...(19): siRNA sense strand
ccacucaacuuggcucaca

SEQ ID NO: 732851 - RNA, 19 nt, Homo sapiens
  misc_RNA (1)...(19): siRNA sense strand
cugcuaagaagcugacuaa

SEQ ID NO: 732852 - RNA, 19 nt, Homo sapiens
  misc_RNA (1)...(19): siRNA sense strand
gcaugaacgacacccuguu

SEQ ID NO: 732853 - RNA, 19 nt, Homo sapiens
  misc_RNA (1)...(19): siRNA sense strand
ggaaguccuuuuauuacca

SEQ ID NO: 732854 - RNA, 19 nt, Homo sapiens
  misc_RNA (1)...(19): siRNA sense strand
ccacucaacuuggcucaca

SEQ ID NO: 732855 - RNA, 19 nt, Homo sapiens
  misc_RNA (1)...(19): siRNA sense strand
gcaugaacgacacccuguu

SEQ ID NO: 732856 - RNA, 19 nt, Homo sapiens
  misc_RNA (1)...(19): siRNA sense strand
ggaaguccuuuuauuacca

SEQ ID NO: 732857 - RNA, 19 nt, Homo sapiens
  misc_RNA (1)...(19): siRNA sense strand
ccacucaacuuggcucaca

SEQ ID NO: 732858 - RNA, 19 nt, Homo sapiens
  misc_RNA (1)...(19): siRNA sense strand
gcaugaacgacacccuguu

SEQ ID NO: 732859 - RNA, 19 nt, Homo sapiens
  misc_RNA (1)...(19): siRNA sense strand
ggaaguccuuuuauuacca

SEQ ID NO: 732860 - RNA, 19 nt, Homo sapiens
  misc_RNA (1)...(19): siRNA sense strand
cuaagaagcugacuaaugc

SEQ ID NO: 732861 - RNA, 19 nt, Homo sapiens
  misc_RNA (1)...(19): siRNA sense strand
gcuaagaagcugacuaaug

SEQ ID NO: 732862 - RNA, 19 nt, Homo sapiens
  misc_RNA (1)...(19): siRNA sense strand
ccacucaacuuggcucaca

SEQ ID NO: 732863 - RNA, 19 nt, Homo sapiens
  misc_RNA (1)...(19): siRNA sense strand
cugcuaagaagcugacuaa

SEQ ID NO: 732864 - RNA, 19 nt, Homo sapiens
  misc_RNA (1)...(19): siRNA sense strand
gcaugaacgacacccuguu

SEQ ID NO: 732865 - RNA, 19 nt, Homo sapiens
  misc_RNA (1)...(19): siRNA sense strand
ggaaguccuuuuauuacca

SEQ ID NO: 732866 - RNA, 19 nt, Homo sapiens
  misc_RNA (1)...(19): siRNA sense strand
cuaagaagcugacuaaugc

SEQ ID NO: 732867 - RNA, 19 nt, Homo sapiens
  misc_RNA (1)...(19): siRNA sense strand
gcuaagaagcugacuaaug

SEQ ID NO: 732868 - RNA, 19 nt, Homo sapiens
  misc_RNA (1)...(19): siRNA sense strand
ccacucaacuuggcucaca

SEQ ID NO: 732869 - RNA, 19 nt, Homo sapiens
  misc_RNA (1)...(19): siRNA sense strand
cugcuaagaagcugacuaa

SEQ ID NO: 732870 - RNA, 19 nt, Homo sapiens
  misc_RNA (1)...(19): siRNA sense strand
gcaugaacgacacccuguu

SEQ ID NO: 732871 - RNA, 19 nt, Homo sapiens
  misc_RNA (1)...(19): siRNA sense strand
ggaaguccuuuuauuacca

SEQ ID NO: 732872 - RNA, 19 nt, Homo sapiens
  misc_RNA (1)...(19): siRNA sense strand
cuaagaagcugacuaaugc

SEQ ID NO: 732873 - RNA, 19 nt, Homo sapiens
  misc_RNA (1)...(19): siRNA sense strand
gcuaagaagcugacuaaug

SEQ ID NO: 732874 - RNA, 19 nt, Homo sapiens
  misc_RNA (1)...(19): siRNA sense strand
ccacucaacuuggcucaca

SEQ ID NO: 732875 - RNA, 19 nt, Homo sapiens
  misc_RNA (1)...(19): siRNA sense strand
cugcuaagaagcugacuaa

SEQ ID NO: 732876 - RNA, 19 nt, Homo sapiens
  misc_RNA (1)...(19): siRNA sense strand
gcaugaacgacacccuguu

SEQ ID NO: 732877 - RNA, 19 nt, Homo sapiens
  misc_RNA (1)...(19): siRNA sense strand
ggaaguccuuuuauuacca

SEQ ID NO: 732878 - RNA, 19 nt, Homo sapiens
  misc_RNA (1)...(19): siRNA sense strand
cuaagaagcugacuaaugc

SEQ ID NO: 732879 - RNA, 19 nt, Homo sapiens
  misc_RNA (1)...(19): siRNA sense strand
gcuaagaagcugacuaaug

SEQ ID NO: 732880 - RNA, 19 nt, Homo sapiens
  misc_RNA (1)...(19): siRNA sense strand
ccacucaacuuggcucaca

SEQ ID NO: 732881 - RNA, 19 nt, Homo sapiens
  misc_RNA (1)...(19): siRNA sense strand
cugcuaagaagcugacuaa

SEQ ID NO: 732882 - RNA, 19 nt, Homo sapiens
  misc_RNA (1)...(19): siRNA sense strand
gcaugaacgacacccuguu

SEQ ID NO: 732883 - RNA, 19 nt, Homo sapiens
  misc_RNA (1)...(19): siRNA sense strand
ggaaguccuuuuauuacca

SEQ ID NO: 732884 - RNA, 19 nt, Homo sapiens
  misc_RNA (1)...(19): siRNA sense strand
cuaagaagcugacuaaugc

SEQ ID NO: 732885 - RNA, 19 nt, Homo sapiens
  misc_RNA (1)...(19): siRNA sense strand
gcuaagaagcugacuaaug

SEQ ID NO: 732886 - RNA, 19 nt, Homo sapiens
  misc_RNA (1)...(19): siRNA sense strand
ccacucaacuuggcucaca

SEQ ID NO: 732887 - RNA, 19 nt, Homo sapiens
  misc_RNA (1)...(19): siRNA sense strand
cugcuaagaagcugacuaa

SEQ ID NO: 732888 - RNA, 19 nt, Homo sapiens
  misc_RNA (1)...(19): siRNA sense strand
gcaugaacgacacccuguu

SEQ ID NO: 732889 - RNA, 19 nt, Homo sapiens
  misc_RNA (1)...(19): siRNA sense strand
ggaaguccuuuuauuacca

SEQ ID NO: 732890 - RNA, 19 nt, Homo sapiens
  misc_RNA (1)...(19): siRNA sense strand
cuaagaagcugacuaaugc

SEQ ID NO: 732891 - RNA, 19 nt, Homo sapiens
  misc_RNA (1)...(19): siRNA sense strand
gcuaagaagcugacuaaug

SEQ ID NO: 732892 - RNA, 19 nt, Homo sapiens
  misc_RNA (1)...(19): siRNA sense strand
ccacucaacuuggcucaca

SEQ ID NO: 732893 - RNA, 19 nt, Homo sapiens
  misc_RNA (1)...(19): siRNA sense strand
cugcuaagaagcugacuaa

SEQ ID NO: 732894 - RNA, 19 nt, Homo sapiens
  misc_RNA (1)...(19): siRNA sense strand
gcaugaacgacacccuguu

SEQ ID NO: 732895 - RNA, 19 nt, Homo sapiens
  misc_RNA (1)...(19): siRNA sense strand
ggaaguccuuuuauuacca

SEQ ID NO: 732896 - RNA, 19 nt, Homo sapiens
  misc_RNA (1)...(19): siRNA sense strand
ccacucaacuuggcucaca

SEQ ID NO: 732897 - RNA, 19 nt, Homo sapiens
  misc_RNA (1)...(19): siRNA sense strand
gcaugaacgacacccuguu

SEQ ID NO: 732898 - RNA, 19 nt, Homo sapiens
  misc_RNA (1)...(19): siRNA sense strand
ggaaguccuuuuauuacca

SEQ ID NO: 732899 - RNA, 19 nt, Homo sapiens
  misc_RNA (1)...(19): siRNA sense strand
ccacucaacuuggcucaca

SEQ ID NO: 732900 - RNA, 19 nt, Homo sapiens
  misc_RNA (1)...(19): siRNA sense strand
gcaugaacgacacccuguu

SEQ ID NO: 732901 - RNA, 19 nt, Homo sapiens
  misc_RNA (1)...(19): siRNA sense strand
ggaaguccuuuuauuacca

SEQ ID NO: 732902 - RNA, 19 nt, Homo sapiens
  misc_RNA (1)...(19): siRNA sense strand
gcacuucacuggagagaaa

SEQ ID NO: 732903 - RNA, 19 nt, Homo sapiens
  misc_RNA (1)...(19): siRNA sense strand
aagagaaacugcagaauuu

SEQ ID NO: 732904 - RNA, 19 nt, Homo sapiens
  misc_RNA (1)...(19): siRNA sense strand
gcacugguguugagcaaug

SEQ ID NO: 732905 - RNA, 19 nt, Homo sapiens
  misc_RNA (1)...(19): siRNA sense strand
caagagaaacugcagaauu

SEQ ID NO: 732906 - RNA, 19 nt, Homo sapiens
  misc_RNA (1)...(19): siRNA sense strand
gccuugcacuccugaauuu

SEQ ID NO: 732907 - RNA, 19 nt, Homo sapiens
  misc_RNA (1)...(19): siRNA sense strand
ugacguccauguucuaugu

SEQ ID NO: 732908 - RNA, 19 nt, Homo sapiens
  misc_RNA (1)...(19): siRNA sense strand
gcacaggaaaugcaagaga

SEQ ID NO: 732909 - RNA, 19 nt, Homo sapiens
  misc_RNA (1)...(19): siRNA sense strand
cacaggaaaugcaagagaa

SEQ ID NO: 732910 - RNA, 19 nt, Homo sapiens
  misc_RNA (1)...(19): siRNA sense strand
gcagaauuuugcacaguua

SEQ ID NO: 732911 - RNA, 19 nt, Homo sapiens
  misc_RNA (1)...(19): siRNA sense strand
gcccaagccuacagaacaa

SEQ ID NO: 732912 - RNA, 19 nt, Homo sapiens
  misc_RNA (1)...(19): siRNA sense strand
agagaaagaacuggaauuu

SEQ ID NO: 732913 - RNA, 19 nt, Homo sapiens
  misc_RNA (1)...(19): siRNA sense strand
ugaccagacugcacaggaa

SEQ ID NO: 732914 - RNA, 19 nt, Homo sapiens
  misc_RNA (1)...(19): siRNA sense strand
guuguugagcgaauuguua

SEQ ID NO: 732915 - RNA, 19 nt, Homo sapiens
  misc_RNA (1)...(19): siRNA sense strand
gagagaaagaacuggaauu

SEQ ID NO: 732916 - RNA, 19 nt, Homo sapiens
  misc_RNA (1)...(19): siRNA sense strand
gcuaugacguccauguucu

SEQ ID NO: 732917 - RNA, 19 nt, Homo sapiens
  misc_RNA (1)...(19): siRNA sense strand
ggacaucaucaccuuggaa

SEQ ID NO: 732918 - RNA, 19 nt, Homo sapiens
  misc_RNA (1)...(19): siRNA sense strand
caucaucaccuuggaaaug

SEQ ID NO: 732919 - RNA, 19 nt, Homo sapiens
  misc_RNA (1)...(19): siRNA sense strand
ggaccacaguacucuaguc

SEQ ID NO: 732920 - RNA, 19 nt, Homo sapiens
  misc_RNA (1)...(19): siRNA sense strand
gacaucaucaccuuggaaa

SEQ ID NO: 732921 - RNA, 19 nt, Homo sapiens
  misc_RNA (1)...(19): siRNA sense strand
ucaacuugcugccuaagag

SEQ ID NO: 732922 - RNA, 19 nt, Homo sapiens
  misc_RNA (1)...(19): siRNA sense strand
caucaucaggaaacucuaa

SEQ ID NO: 732923 - RNA, 19 nt, Homo sapiens
  misc_RNA (1)...(19): siRNA sense strand
ggagagaaagaacuggaau

SEQ ID NO: 732924 - RNA, 19 nt, Homo sapiens
  misc_RNA (1)...(19): siRNA sense strand
gaguggugcuagccaaaca

SEQ ID NO: 732925 - RNA, 19 nt, Homo sapiens
  misc_RNA (1)...(19): siRNA sense strand
ggaaaugcaagagaaacug

SEQ ID NO: 732926 - RNA, 19 nt, Homo sapiens
  misc_RNA (1)...(19): siRNA sense strand
gaccagacugcacaggaaa

SEQ ID NO: 732927 - RNA, 19 nt, Homo sapiens
  misc_RNA (1)...(19): siRNA sense strand
gaccacaguacucuaguca

SEQ ID NO: 732928 - RNA, 19 nt, Homo sapiens
  misc_RNA (1)...(19): siRNA sense strand
gucacccucuucaagcuuu

SEQ ID NO: 732929 - RNA, 19 nt, Homo sapiens
  misc_RNA (1)...(19): siRNA sense strand
gcucauccaggccaaagug

SEQ ID NO: 732930 - RNA, 19 nt, Homo sapiens
  misc_RNA (1)...(19): siRNA sense strand
gcaagagaaacugcagaau

SEQ ID NO: 732931 - RNA, 19 nt, Homo sapiens
  misc_RNA (1)...(19): siRNA sense strand
guugagcaaugugcacuuc

SEQ ID NO: 732932 - RNA, 19 nt, Homo sapiens
  misc_RNA (1)...(19): siRNA sense strand
uagcacugguguugagcaa

SEQ ID NO: 732933 - RNA, 19 nt, Homo sapiens
  misc_RNA (1)...(19): siRNA sense strand
gcaguuucagccagaaugu

SEQ ID NO: 732934 - RNA, 19 nt, Homo sapiens
  misc_RNA (1)...(19): siRNA sense strand
gggcuaugacguccauguu

SEQ ID NO: 732935 - RNA, 19 nt, Homo sapiens
  misc_RNA (1)...(19): siRNA sense strand
gaauguggaacuccucaac

SEQ ID NO: 732936 - RNA, 19 nt, Homo sapiens
  misc_RNA (1)...(19): siRNA sense strand
cagcuguuguugagcgaau

SEQ ID NO: 732937 - RNA, 19 nt, Homo sapiens
  misc_RNA (1)...(19): siRNA sense strand
guacucuagucacccucuu

SEQ ID NO: 732938 - RNA, 19 nt, Homo sapiens
  misc_RNA (1)...(19): siRNA sense strand
acaggaaaugcaagagaaa

SEQ ID NO: 732939 - RNA, 19 nt, Homo sapiens
  misc_RNA (1)...(19): siRNA sense strand
gagaaacugcagaauuuug

SEQ ID NO: 732940 - RNA, 19 nt, Homo sapiens
  misc_RNA (1)...(19): siRNA sense strand
guugagcgaauuguuagaa

SEQ ID NO: 732941 - RNA, 19 nt, Homo sapiens
  misc_RNA (1)...(19): siRNA sense strand
gccuagcacugguguugag

SEQ ID NO: 732942 - RNA, 19 nt, Homo sapiens
  misc_RNA (1)...(19): siRNA sense strand
aggccaaagugggcaguuu

SEQ ID NO: 732943 - RNA, 19 nt, Homo sapiens
  misc_RNA (1)...(19): siRNA sense strand
ggccaaagugggcaguuuc

SEQ ID NO: 732944 - RNA, 19 nt, Homo sapiens
  misc_RNA (1)...(19): siRNA sense strand
acuuccagcuggcauauag

SEQ ID NO: 732945 - RNA, 19 nt, Homo sapiens
  misc_RNA (1)...(19): siRNA sense strand
gcaaggagaugucugaaua

SEQ ID NO: 732946 - RNA, 19 nt, Homo sapiens
  misc_RNA (1)...(19): siRNA sense strand
gcacuucacuggagagaaa

SEQ ID NO: 732947 - RNA, 19 nt, Homo sapiens
  misc_RNA (1)...(19): siRNA sense strand
aagagaaacugcagaauuu

SEQ ID NO: 732948 - RNA, 19 nt, Homo sapiens
  misc_RNA (1)...(19): siRNA sense strand
gcacugguguugagcaaug

SEQ ID NO: 732949 - RNA, 19 nt, Homo sapiens
  misc_RNA (1)...(19): siRNA sense strand
caagagaaacugcagaauu

SEQ ID NO: 732950 - RNA, 19 nt, Homo sapiens
  misc_RNA (1)...(19): siRNA sense strand
ggagagugaugccgguaaa

SEQ ID NO: 732951 - RNA, 19 nt, Homo sapiens
  misc_RNA (1)...(19): siRNA sense strand
ucaaggaucgggaagguua

SEQ ID NO: 732952 - RNA, 19 nt, Homo sapiens
  misc_RNA (1)...(19): siRNA sense strand
gccuugcacuccugaauuu

SEQ ID NO: 732953 - RNA, 19 nt, Homo sapiens
  misc_RNA (1)...(19): siRNA sense strand
ugacguccauguucuaugu

SEQ ID NO: 732954 - RNA, 19 nt, Homo sapiens
  misc_RNA (1)...(19): siRNA sense strand
ugaacgcacuuaucaagga

SEQ ID NO: 732955 - RNA, 19 nt, Homo sapiens
  misc_RNA (1)...(19): siRNA sense strand
gaacgcacuuaucaaggau

SEQ ID NO: 732956 - RNA, 19 nt, Homo sapiens
  misc_RNA (1)...(19): siRNA sense strand
gcacaggaaaugcaagaga

SEQ ID NO: 732957 - RNA, 19 nt, Homo sapiens
  misc_RNA (1)...(19): siRNA sense strand
ccaacaagauggaaagaac

SEQ ID NO: 732958 - RNA, 19 nt, Homo sapiens
  misc_RNA (1)...(19): siRNA sense strand
cacaggaaaugcaagagaa

SEQ ID NO: 732959 - RNA, 19 nt, Homo sapiens
  misc_RNA (1)...(19): siRNA sense strand
caucgaggcucuugcucaa

SEQ ID NO: 732960 - RNA, 19 nt, Homo sapiens
  misc_RNA (1)...(19): siRNA sense strand
gcagaauuuugcacaguua

SEQ ID NO: 732961 - RNA, 19 nt, Homo sapiens
  misc_RNA (1)...(19): siRNA sense strand
gcccaagccuacagaacaa

SEQ ID NO: 732962 - RNA, 19 nt, Homo sapiens
  misc_RNA (1)...(19): siRNA sense strand
agagaaagaacuggaauuu

SEQ ID NO: 732963 - RNA, 19 nt, Homo sapiens
  misc_RNA (1)...(19): siRNA sense strand
ugaccagacugcacaggaa

SEQ ID NO: 732964 - RNA, 19 nt, Homo sapiens
  misc_RNA (1)...(19): siRNA sense strand
ugagcgggcuugugauaug

SEQ ID NO: 732965 - RNA, 19 nt, Homo sapiens
  misc_RNA (1)...(19): siRNA sense strand
guuguugagcgaauuguua

SEQ ID NO: 732966 - RNA, 19 nt, Homo sapiens
  misc_RNA (1)...(19): siRNA sense strand
gagagaaagaacuggaauu

SEQ ID NO: 732967 - RNA, 19 nt, Homo sapiens
  misc_RNA (1)...(19): siRNA sense strand
gcaugcauccucaucauca

SEQ ID NO: 732968 - RNA, 19 nt, Homo sapiens
  misc_RNA (1)...(19): siRNA sense strand
ggaaagaaccacgcaggau

SEQ ID NO: 732969 - RNA, 19 nt, Homo sapiens
  misc_RNA (1)...(19): siRNA sense strand
gcuaugacguccauguucu

SEQ ID NO: 732970 - RNA, 19 nt, Homo sapiens
  misc_RNA (1)...(19): siRNA sense strand
ggacaucaucaccuuggaa

SEQ ID NO: 732971 - RNA, 19 nt, Homo sapiens
  misc_RNA (1)...(19): siRNA sense strand
caucaucaccuuggaaaug

SEQ ID NO: 732972 - RNA, 19 nt, Homo sapiens
  misc_RNA (1)...(19): siRNA sense strand
ggaccacaguacucuaguc

SEQ ID NO: 732973 - RNA, 19 nt, Homo sapiens
  misc_RNA (1)...(19): siRNA sense strand
gacaugauaugcggcuaug

SEQ ID NO: 732974 - RNA, 19 nt, Homo sapiens
  misc_RNA (1)...(19): siRNA sense strand
gagugaugccgguaaagaa

SEQ ID NO: 732975 - RNA, 19 nt, Homo sapiens
  misc_RNA (1)...(19): siRNA sense strand
gacaucaucaccuuggaaa

SEQ ID NO: 732976 - RNA, 19 nt, Homo sapiens
  misc_RNA (1)...(19): siRNA sense strand
aaagaaaaguugccgaaga

SEQ ID NO: 732977 - RNA, 19 nt, Homo sapiens
  misc_RNA (1)...(19): siRNA sense strand
ucaacuugcugccuaagag

SEQ ID NO: 732978 - RNA, 19 nt, Homo sapiens
  misc_RNA (1)...(19): siRNA sense strand
caucaucaggaaacucuaa

SEQ ID NO: 732979 - RNA, 19 nt, Homo sapiens
  misc_RNA (1)...(19): siRNA sense strand
gaaaaguugccgaagauga

SEQ ID NO: 732980 - RNA, 19 nt, Homo sapiens
  misc_RNA (1)...(19): siRNA sense strand
ggagagaaagaacuggaau

SEQ ID NO: 732981 - RNA, 19 nt, Homo sapiens
  misc_RNA (1)...(19): siRNA sense strand
aaacgagguuccugguaca

SEQ ID NO: 732982 - RNA, 19 nt, Homo sapiens
  misc_RNA (1)...(19): siRNA sense strand
gaauacugcagcacucugu

SEQ ID NO: 732983 - RNA, 19 nt, Homo sapiens
  misc_RNA (1)...(19): siRNA sense strand
gaguggugcuagccaaaca

SEQ ID NO: 732984 - RNA, 19 nt, Homo sapiens
  misc_RNA (1)...(19): siRNA sense strand
ccaaacgagguuccuggua

SEQ ID NO: 732985 - RNA, 19 nt, Homo sapiens
  misc_RNA (1)...(19): siRNA sense strand
ggugaacgcacuuaucaag

SEQ ID NO: 732986 - RNA, 19 nt, Homo sapiens
  misc_RNA (1)...(19): siRNA sense strand
uggccgacaugcugguuaa

SEQ ID NO: 732987 - RNA, 19 nt, Homo sapiens
  misc_RNA (1)...(19): siRNA sense strand
ggaaaugcaagagaaacug

SEQ ID NO: 732988 - RNA, 19 nt, Homo sapiens
  misc_RNA (1)...(19): siRNA sense strand
uaucaaggaucgggaaggu

SEQ ID NO: 732989 - RNA, 19 nt, Homo sapiens
  misc_RNA (1)...(19): siRNA sense strand
gaccagacugcacaggaaa

SEQ ID NO: 732990 - RNA, 19 nt, Homo sapiens
  misc_RNA (1)...(19): siRNA sense strand
ggugcaaggagaugucuga

SEQ ID NO: 732991 - RNA, 19 nt, Homo sapiens
  misc_RNA (1)...(19): siRNA sense strand
gggaguguguggcaugcau

SEQ ID NO: 732992 - RNA, 19 nt, Homo sapiens
  misc_RNA (1)...(19): siRNA sense strand
gucacccucuucaagcuuu

SEQ ID NO: 732993 - RNA, 19 nt, Homo sapiens
  misc_RNA (1)...(19): siRNA sense strand
gaccacaguacucuaguca

SEQ ID NO: 732994 - RNA, 19 nt, Homo sapiens
  misc_RNA (1)...(19): siRNA sense strand
caggacacccucccacaug

SEQ ID NO: 732995 - RNA, 19 nt, Homo sapiens
  misc_RNA (1)...(19): siRNA sense strand
uagcacugguguugagcaa

SEQ ID NO: 732996 - RNA, 19 nt, Homo sapiens
  misc_RNA (1)...(19): siRNA sense strand
aggacacccucccacauga

SEQ ID NO: 732997 - RNA, 19 nt, Homo sapiens
  misc_RNA (1)...(19): siRNA sense strand
uuucugagcgggcuuguga

SEQ ID NO: 732998 - RNA, 19 nt, Homo sapiens
  misc_RNA (1)...(19): siRNA sense strand
ggcuaugccugccucaaag

SEQ ID NO: 732999 - RNA, 19 nt, Homo sapiens
  misc_RNA (1)...(19): siRNA sense strand
cggcuaugccugccucaaa

SEQ ID NO: 733000 - RNA, 19 nt, Homo sapiens
  misc_RNA (1)...(19): siRNA sense strand
gcaagagaaacugcagaau

SEQ ID NO: 733001 - RNA, 19 nt, Homo sapiens
  misc_RNA (1)...(19): siRNA sense strand
gcucauccaggccaaagug

SEQ ID NO: 733002 - RNA, 19 nt, Homo sapiens
  misc_RNA (1)...(19): siRNA sense strand
guugagcaaugugcacuuc

SEQ ID NO: 733003 - RNA, 19 nt, Homo sapiens
  misc_RNA (1)...(19): siRNA sense strand
gggcuaugacguccauguu

SEQ ID NO: 733004 - RNA, 19 nt, Homo sapiens
  misc_RNA (1)...(19): siRNA sense strand
aaggugaacgcacuuauca

SEQ ID NO: 733005 - RNA, 19 nt, Homo sapiens
  misc_RNA (1)...(19): siRNA sense strand
ucugagcgggcuugugaua

SEQ ID NO: 733006 - RNA, 19 nt, Homo sapiens
  misc_RNA (1)...(19): siRNA sense strand
gcaguuucagccagaaugu

SEQ ID NO: 733007 - RNA, 19 nt, Homo sapiens
  misc_RNA (1)...(19): siRNA sense strand
gaauguggaacuccucaac

SEQ ID NO: 733008 - RNA, 19 nt, Homo sapiens
  misc_RNA (1)...(19): siRNA sense strand
cagcuguuguugagcgaau

SEQ ID NO: 733009 - RNA, 19 nt, Homo sapiens
  misc_RNA (1)...(19): siRNA sense strand
guacucuagucacccucuu

SEQ ID NO: 733010 - RNA, 19 nt, Homo sapiens
  misc_RNA (1)...(19): siRNA sense strand
aagaaaaguugccgaagau

SEQ ID NO: 733011 - RNA, 19 nt, Homo sapiens
  misc_RNA (1)...(19): siRNA sense strand
ccgacaugcugguuaaggu

SEQ ID NO: 733012 - RNA, 19 nt, Homo sapiens
  misc_RNA (1)...(19): siRNA sense strand
cccacgcgcucagacauga

SEQ ID NO: 733013 - RNA, 19 nt, Homo sapiens
  misc_RNA (1)...(19): siRNA sense strand
acaggaaaugcaagagaaa

SEQ ID NO: 733014 - RNA, 19 nt, Homo sapiens
  misc_RNA (1)...(19): siRNA sense strand
gagcgggcuugugauaugc

SEQ ID NO: 733015 - RNA, 19 nt, Homo sapiens
  misc_RNA (1)...(19): siRNA sense strand
guugagcgaauuguuagaa

SEQ ID NO: 733016 - RNA, 19 nt, Homo sapiens
  misc_RNA (1)...(19): siRNA sense strand
gagaaacugcagaauuuug

SEQ ID NO: 733017 - RNA, 19 nt, Homo sapiens
  misc_RNA (1)...(19): siRNA sense strand
gccuagcacugguguugag

SEQ ID NO: 733018 - RNA, 19 nt, Homo sapiens
  misc_RNA (1)...(19): siRNA sense strand
aggccaaagugggcaguuu

SEQ ID NO: 733019 - RNA, 19 nt, Homo sapiens
  misc_RNA (1)...(19): siRNA sense strand
uggcaugcauccucaucau

SEQ ID NO: 733020 - RNA, 19 nt, Homo sapiens
  misc_RNA (1)...(19): siRNA sense strand
guacaucgaggcucuugcu

SEQ ID NO: 733021 - RNA, 19 nt, Homo sapiens
  misc_RNA (1)...(19): siRNA sense strand
ggccaaagugggcaguuuc

SEQ ID NO: 733022 - RNA, 19 nt, Homo sapiens
  misc_RNA (1)...(19): siRNA sense strand
acuuccagcuggcauauag

SEQ ID NO: 733023 - RNA, 19 nt, Homo sapiens
  misc_RNA (1)...(19): siRNA sense strand
gccgccaccucuaccuguu

SEQ ID NO: 733024 - RNA, 19 nt, Homo sapiens
  misc_RNA (1)...(19): siRNA sense strand
guuguugagcgaauuguua

SEQ ID NO: 733025 - RNA, 19 nt, Homo sapiens
  misc_RNA (1)...(19): siRNA sense strand
gcaugcauccucaucauca

SEQ ID NO: 733026 - RNA, 19 nt, Homo sapiens
  misc_RNA (1)...(19): siRNA sense strand
ggacaucaucaccuuggaa

SEQ ID NO: 733027 - RNA, 19 nt, Homo sapiens
  misc_RNA (1)...(19): siRNA sense strand
caucaucaccuuggaaaug

SEQ ID NO: 733028 - RNA, 19 nt, Homo sapiens
  misc_RNA (1)...(19): siRNA sense strand
gacaucaucaccuuggaaa

SEQ ID NO: 733029 - RNA, 19 nt, Homo sapiens
  misc_RNA (1)...(19): siRNA sense strand
caucaucaggaaacucuaa

SEQ ID NO: 733030 - RNA, 19 nt, Homo sapiens
  misc_RNA (1)...(19): siRNA sense strand
ucaacuugcugccuaagag

SEQ ID NO: 733031 - RNA, 19 nt, Homo sapiens
  misc_RNA (1)...(19): siRNA sense strand
gaguggugcuagccaaaca

SEQ ID NO: 733032 - RNA, 19 nt, Homo sapiens
  misc_RNA (1)...(19): siRNA sense strand
gggaguguguggcaugcau

SEQ ID NO: 733033 - RNA, 19 nt, Homo sapiens
  misc_RNA (1)...(19): siRNA sense strand
gcucauccaggccaaagug

SEQ ID NO: 733034 - RNA, 19 nt, Homo sapiens
  misc_RNA (1)...(19): siRNA sense strand
gcaguuucagccagaaugu

SEQ ID NO: 733035 - RNA, 19 nt, Homo sapiens
  misc_RNA (1)...(19): siRNA sense strand
gaauguggaacuccucaac

SEQ ID NO: 733036 - RNA, 19 nt, Homo sapiens
  misc_RNA (1)...(19): siRNA sense strand
cagcuguuguugagcgaau

SEQ ID NO: 733037 - RNA, 19 nt, Homo sapiens
  misc_RNA (1)...(19): siRNA sense strand
guugagcgaauuguuagaa

SEQ ID NO: 733038 - RNA, 19 nt, Homo sapiens
  misc_RNA (1)...(19): siRNA sense strand
uggcaugcauccucaucau

SEQ ID NO: 733039 - RNA, 19 nt, Homo sapiens
  misc_RNA (1)...(19): siRNA sense strand
ggccaaagugggcaguuuc

SEQ ID NO: 733040 - RNA, 19 nt, Homo sapiens
  misc_RNA (1)...(19): siRNA sense strand
aggccaaagugggcaguuu

SEQ ID NO: 733041 - RNA, 19 nt, Homo sapiens
  misc_RNA (1)...(19): siRNA sense strand
guuguugagcgaauuguua

SEQ ID NO: 733042 - RNA, 19 nt, Homo sapiens
  misc_RNA (1)...(19): siRNA sense strand
ggacaucaucaccuuggaa

SEQ ID NO: 733043 - RNA, 19 nt, Homo sapiens
  misc_RNA (1)...(19): siRNA sense strand
caucaucaccuuggaaaug

SEQ ID NO: 733044 - RNA, 19 nt, Homo sapiens
  misc_RNA (1)...(19): siRNA sense strand
gacaucaucaccuuggaaa

SEQ ID NO: 733045 - RNA, 19 nt, Homo sapiens
  misc_RNA (1)...(19): siRNA sense strand
caucaucaggaaacucuaa

SEQ ID NO: 733046 - RNA, 19 nt, Homo sapiens
  misc_RNA (1)...(19): siRNA sense strand
ucaacuugcugccuaagag

SEQ ID NO: 733047 - RNA, 19 nt, Homo sapiens
  misc_RNA (1)...(19): siRNA sense strand
gaguggugcuagccaaaca

SEQ ID NO: 733048 - RNA, 19 nt, Homo sapiens
  misc_RNA (1)...(19): siRNA sense strand
gcucauccaggccaaagug

SEQ ID NO: 733049 - RNA, 19 nt, Homo sapiens
  misc_RNA (1)...(19): siRNA sense strand
gcaguuucagccagaaugu

SEQ ID NO: 733050 - RNA, 19 nt, Homo sapiens
  misc_RNA (1)...(19): siRNA sense strand
gaauguggaacuccucaac

SEQ ID NO: 733051 - RNA, 19 nt, Homo sapiens
  misc_RNA (1)...(19): siRNA sense strand
cagcuguuguugagcgaau

SEQ ID NO: 733052 - RNA, 19 nt, Homo sapiens
  misc_RNA (1)...(19): siRNA sense strand
guugagcgaauuguuagaa

SEQ ID NO: 733053 - RNA, 19 nt, Homo sapiens
  misc_RNA (1)...(19): siRNA sense strand
aggccaaagugggcaguuu

SEQ ID NO: 733054 - RNA, 19 nt, Homo sapiens
  misc_RNA (1)...(19): siRNA sense strand
ggccaaagugggcaguuuc

SEQ ID NO: 733055 - RNA, 19 nt, Homo sapiens
  misc_RNA (1)...(19): siRNA sense strand
gcacuucacuggagagaaa

SEQ ID NO: 733056 - RNA, 19 nt, Homo sapiens
  misc_RNA (1)...(19): siRNA sense strand
aagagaaacugcagaauuu

SEQ ID NO: 733057 - RNA, 19 nt, Homo sapiens
  misc_RNA (1)...(19): siRNA sense strand
gcacugguguugagcaaug

SEQ ID NO: 733058 - RNA, 19 nt, Homo sapiens
  misc_RNA (1)...(19): siRNA sense strand
caagagaaacugcagaauu

SEQ ID NO: 733059 - RNA, 19 nt, Homo sapiens
  misc_RNA (1)...(19): siRNA sense strand
gccuugcacuccugaauuu

SEQ ID NO: 733060 - RNA, 19 nt, Homo sapiens
  misc_RNA (1)...(19): siRNA sense strand
ugacguccauguucuaugu

SEQ ID NO: 733061 - RNA, 19 nt, Homo sapiens
  misc_RNA (1)...(19): siRNA sense strand
gcacaggaaaugcaagaga

SEQ ID NO: 733062 - RNA, 19 nt, Homo sapiens
  misc_RNA (1)...(19): siRNA sense strand
cacaggaaaugcaagagaa

SEQ ID NO: 733063 - RNA, 19 nt, Homo sapiens
  misc_RNA (1)...(19): siRNA sense strand
gcagaauuuugcacaguua

SEQ ID NO: 733064 - RNA, 19 nt, Homo sapiens
  misc_RNA (1)...(19): siRNA sense strand
gcccaagccuacagaacaa

SEQ ID NO: 733065 - RNA, 19 nt, Homo sapiens
  misc_RNA (1)...(19): siRNA sense strand
agagaaagaacuggaauuu

SEQ ID NO: 733066 - RNA, 19 nt, Homo sapiens
  misc_RNA (1)...(19): siRNA sense strand
ugaccagacugcacaggaa

SEQ ID NO: 733067 - RNA, 19 nt, Homo sapiens
  misc_RNA (1)...(19): siRNA sense strand
guuguugagcgaauuguua

SEQ ID NO: 733068 - RNA, 19 nt, Homo sapiens
  misc_RNA (1)...(19): siRNA sense strand
gagagaaagaacuggaauu

SEQ ID NO: 733069 - RNA, 19 nt, Homo sapiens
  misc_RNA (1)...(19): siRNA sense strand
gcuaugacguccauguucu

SEQ ID NO: 733070 - RNA, 19 nt, Homo sapiens
  misc_RNA (1)...(19): siRNA sense strand
ggacaucaucaccuuggaa

SEQ ID NO: 733071 - RNA, 19 nt, Homo sapiens
  misc_RNA (1)...(19): siRNA sense strand
caucaucaccuuggaaaug

SEQ ID NO: 733072 - RNA, 19 nt, Homo sapiens
  misc_RNA (1)...(19): siRNA sense strand
ggaccacaguacucuaguc

SEQ ID NO: 733073 - RNA, 19 nt, Homo sapiens
  misc_RNA (1)...(19): siRNA sense strand
gacaucaucaccuuggaaa

SEQ ID NO: 733074 - RNA, 19 nt, Homo sapiens
  misc_RNA (1)...(19): siRNA sense strand
ucaacuugcugccuaagag

SEQ ID NO: 733075 - RNA, 19 nt, Homo sapiens
  misc_RNA (1)...(19): siRNA sense strand
caucaucaggaaacucuaa

SEQ ID NO: 733076 - RNA, 19 nt, Homo sapiens
  misc_RNA (1)...(19): siRNA sense strand
ggagagaaagaacuggaau

SEQ ID NO: 733077 - RNA, 19 nt, Homo sapiens
  misc_RNA (1)...(19): siRNA sense strand
gaguggugcuagccaaaca

SEQ ID NO: 733078 - RNA, 19 nt, Homo sapiens
  misc_RNA (1)...(19): siRNA sense strand
ggaaaugcaagagaaacug

SEQ ID NO: 733079 - RNA, 19 nt, Homo sapiens
  misc_RNA (1)...(19): siRNA sense strand
gaccagacugcacaggaaa

SEQ ID NO: 733080 - RNA, 19 nt, Homo sapiens
  misc_RNA (1)...(19): siRNA sense strand
gaccacaguacucuaguca

SEQ ID NO: 733081 - RNA, 19 nt, Homo sapiens
  misc_RNA (1)...(19): siRNA sense strand
gucacccucuucaagcuuu

SEQ ID NO: 733082 - RNA, 19 nt, Homo sapiens
  misc_RNA (1)...(19): siRNA sense strand
gcucauccaggccaaagug

SEQ ID NO: 733083 - RNA, 19 nt, Homo sapiens
  misc_RNA (1)...(19): siRNA sense strand
gcaagagaaacugcagaau

SEQ ID NO: 733084 - RNA, 19 nt, Homo sapiens
  misc_RNA (1)...(19): siRNA sense strand
guugagcaaugugcacuuc

SEQ ID NO: 733085 - RNA, 19 nt, Homo sapiens
  misc_RNA (1)...(19): siRNA sense strand
uagcacugguguugagcaa

SEQ ID NO: 733086 - RNA, 19 nt, Homo sapiens
  misc_RNA (1)...(19): siRNA sense strand
gcaguuucagccagaaugu

SEQ ID NO: 733087 - RNA, 19 nt, Homo sapiens
  misc_RNA (1)...(19): siRNA sense strand
gggcuaugacguccauguu

SEQ ID NO: 733088 - RNA, 19 nt, Homo sapiens
  misc_RNA (1)...(19): siRNA sense strand
gaauguggaacuccucaac

SEQ ID NO: 733089 - RNA, 19 nt, Homo sapiens
  misc_RNA (1)...(19): siRNA sense strand
cagcuguuguugagcgaau

SEQ ID NO: 733090 - RNA, 19 nt, Homo sapiens
  misc_RNA (1)...(19): siRNA sense strand
guacucuagucacccucuu

SEQ ID NO: 733091 - RNA, 19 nt, Homo sapiens
  misc_RNA (1)...(19): siRNA sense strand
acaggaaaugcaagagaaa

SEQ ID NO: 733092 - RNA, 19 nt, Homo sapiens
  misc_RNA (1)...(19): siRNA sense strand
gagaaacugcagaauuuug

SEQ ID NO: 733093 - RNA, 19 nt, Homo sapiens
  misc_RNA (1)...(19): siRNA sense strand
guugagcgaauuguuagaa

SEQ ID NO: 733094 - RNA, 19 nt, Homo sapiens
  misc_RNA (1)...(19): siRNA sense strand
gccuagcacugguguugag

SEQ ID NO: 733095 - RNA, 19 nt, Homo sapiens
  misc_RNA (1)...(19): siRNA sense strand
aggccaaagugggcaguuu

SEQ ID NO: 733096 - RNA, 19 nt, Homo sapiens
  misc_RNA (1)...(19): siRNA sense strand
ggccaaagugggcaguuuc

SEQ ID NO: 733097 - RNA, 19 nt, Homo sapiens
  misc_RNA (1)...(19): siRNA sense strand
acuuccagcuggcauauag

SEQ ID NO: 733098 - RNA, 19 nt, Homo sapiens
  misc_RNA (1)...(19): siRNA sense strand
gcaaggagaugucugaaua

SEQ ID NO: 733099 - RNA, 19 nt, Homo sapiens
  misc_RNA (1)...(19): siRNA sense strand
gcacuucacuggagagaaa

SEQ ID NO: 733100 - RNA, 19 nt, Homo sapiens
  misc_RNA (1)...(19): siRNA sense strand
aagagaaacugcagaauuu

SEQ ID NO: 733101 - RNA, 19 nt, Homo sapiens
  misc_RNA (1)...(19): siRNA sense strand
gcacugguguugagcaaug

SEQ ID NO: 733102 - RNA, 19 nt, Homo sapiens
  misc_RNA (1)...(19): siRNA sense strand
caagagaaacugcagaauu

SEQ ID NO: 733103 - RNA, 19 nt, Homo sapiens
  misc_RNA (1)...(19): siRNA sense strand
ggagagugaugccgguaaa

SEQ ID NO: 733104 - RNA, 19 nt, Homo sapiens
  misc_RNA (1)...(19): siRNA sense strand
ucaaggaucgggaagguua

SEQ ID NO: 733105 - RNA, 19 nt, Homo sapiens
  misc_RNA (1)...(19): siRNA sense strand
gccuugcacuccugaauuu

SEQ ID NO: 733106 - RNA, 19 nt, Homo sapiens
  misc_RNA (1)...(19): siRNA sense strand
ugacguccauguucuaugu

SEQ ID NO: 733107 - RNA, 19 nt, Homo sapiens
  misc_RNA (1)...(19): siRNA sense strand
ugaacgcacuuaucaagga

SEQ ID NO: 733108 - RNA, 19 nt, Homo sapiens
  misc_RNA (1)...(19): siRNA sense strand
gaacgcacuuaucaaggau

SEQ ID NO: 733109 - RNA, 19 nt, Homo sapiens
  misc_RNA (1)...(19): siRNA sense strand
gcacaggaaaugcaagaga

SEQ ID NO: 733110 - RNA, 19 nt, Homo sapiens
  misc_RNA (1)...(19): siRNA sense strand
ccaacaagauggaaagaac

SEQ ID NO: 733111 - RNA, 19 nt, Homo sapiens
  misc_RNA (1)...(19): siRNA sense strand
cacaggaaaugcaagagaa

SEQ ID NO: 733112 - RNA, 19 nt, Homo sapiens
  misc_RNA (1)...(19): siRNA sense strand
caucgaggcucuugcucaa

SEQ ID NO: 733113 - RNA, 19 nt, Homo sapiens
  misc_RNA (1)...(19): siRNA sense strand
gcagaauuuugcacaguua

SEQ ID NO: 733114 - RNA, 19 nt, Homo sapiens
  misc_RNA (1)...(19): siRNA sense strand
gcccaagccuacagaacaa

SEQ ID NO: 733115 - RNA, 19 nt, Homo sapiens
  misc_RNA (1)...(19): siRNA sense strand
agagaaagaacuggaauuu

SEQ ID NO: 733116 - RNA, 19 nt, Homo sapiens
  misc_RNA (1)...(19): siRNA sense strand
ugaccagacugcacaggaa

SEQ ID NO: 733117 - RNA, 19 nt, Homo sapiens
  misc_RNA (1)...(19): siRNA sense strand
ugagcgggcuugugauaug

SEQ ID NO: 733118 - RNA, 19 nt, Homo sapiens
  misc_RNA (1)...(19): siRNA sense strand
guuguugagcgaauuguua

SEQ ID NO: 733119 - RNA, 19 nt, Homo sapiens
  misc_RNA (1)...(19): siRNA sense strand
gagagaaagaacuggaauu

SEQ ID NO: 733120 - RNA, 19 nt, Homo sapiens
  misc_RNA (1)...(19): siRNA sense strand
gcaugcauccucaucauca

SEQ ID NO: 733121 - RNA, 19 nt, Homo sapiens
  misc_RNA (1)...(19): siRNA sense strand
ggaaagaaccacgcaggau

SEQ ID NO: 733122 - RNA, 19 nt, Homo sapiens
  misc_RNA (1)...(19): siRNA sense strand
gcuaugacguccauguucu

SEQ ID NO: 733123 - RNA, 19 nt, Homo sapiens
  misc_RNA (1)...(19): siRNA sense strand
ggacaucaucaccuuggaa

SEQ ID NO: 733124 - RNA, 19 nt, Homo sapiens
  misc_RNA (1)...(19): siRNA sense strand
caucaucaccuuggaaaug

SEQ ID NO: 733125 - RNA, 19 nt, Homo sapiens
  misc_RNA (1)...(19): siRNA sense strand
ggaccacaguacucuaguc

SEQ ID NO: 733126 - RNA, 19 nt, Homo sapiens
  misc_RNA (1)...(19): siRNA sense strand
gacaugauaugcggcuaug

SEQ ID NO: 733127 - RNA, 19 nt, Homo sapiens
  misc_RNA (1)...(19): siRNA sense strand
gagugaugccgguaaagaa

SEQ ID NO: 733128 - RNA, 19 nt, Homo sapiens
  misc_RNA (1)...(19): siRNA sense strand
gacaucaucaccuuggaaa

SEQ ID NO: 733129 - RNA, 19 nt, Homo sapiens
  misc_RNA (1)...(19): siRNA sense strand
aaagaaaaguugccgaaga

SEQ ID NO: 733130 - RNA, 19 nt, Homo sapiens
  misc_RNA (1)...(19): siRNA sense strand
ucaacuugcugccuaagag

SEQ ID NO: 733131 - RNA, 19 nt, Homo sapiens
  misc_RNA (1)...(19): siRNA sense strand
caucaucaggaaacucuaa

SEQ ID NO: 733132 - RNA, 19 nt, Homo sapiens
  misc_RNA (1)...(19): siRNA sense strand
gaaaaguugccgaagauga

SEQ ID NO: 733133 - RNA, 19 nt, Homo sapiens
  misc_RNA (1)...(19): siRNA sense strand
ggagagaaagaacuggaau

SEQ ID NO: 733134 - RNA, 19 nt, Homo sapiens
  misc_RNA (1)...(19): siRNA sense strand
aaacgagguuccugguaca

SEQ ID NO: 733135 - RNA, 19 nt, Homo sapiens
  misc_RNA (1)...(19): siRNA sense strand
gaauacugcagcacucugu

SEQ ID NO: 733136 - RNA, 19 nt, Homo sapiens
  misc_RNA (1)...(19): siRNA sense strand
gaguggugcuagccaaaca

SEQ ID NO: 733137 - RNA, 19 nt, Homo sapiens
  misc_RNA (1)...(19): siRNA sense strand
ccaaacgagguuccuggua

SEQ ID NO: 733138 - RNA, 19 nt, Homo sapiens
  misc_RNA (1)...(19): siRNA sense strand
ggugaacgcacuuaucaag

SEQ ID NO: 733139 - RNA, 19 nt, Homo sapiens
  misc_RNA (1)...(19): siRNA sense strand
uggccgacaugcugguuaa

SEQ ID NO: 733140 - RNA, 19 nt, Homo sapiens
  misc_RNA (1)...(19): siRNA sense strand
ggaaaugcaagagaaacug

SEQ ID NO: 733141 - RNA, 19 nt, Homo sapiens
  misc_RNA (1)...(19): siRNA sense strand
uaucaaggaucgggaaggu

SEQ ID NO: 733142 - RNA, 19 nt, Homo sapiens
  misc_RNA (1)...(19): siRNA sense strand
gaccagacugcacaggaaa

SEQ ID NO: 733143 - RNA, 19 nt, Homo sapiens
  misc_RNA (1)...(19): siRNA sense strand
ggugcaaggagaugucuga

SEQ ID NO: 733144 - RNA, 19 nt, Homo sapiens
  misc_RNA (1)...(19): siRNA sense strand
gggaguguguggcaugcau

SEQ ID NO: 733145 - RNA, 19 nt, Homo sapiens
  misc_RNA (1)...(19): siRNA sense strand
gucacccucuucaagcuuu

SEQ ID NO: 733146 - RNA, 19 nt, Homo sapiens
  misc_RNA (1)...(19): siRNA sense strand
gaccacaguacucuaguca

SEQ ID NO: 733147 - RNA, 19 nt, Homo sapiens
  misc_RNA (1)...(19): siRNA sense strand
caggacacccucccacaug

SEQ ID NO: 733148 - RNA, 19 nt, Homo sapiens
  misc_RNA (1)...(19): siRNA sense strand
uagcacugguguugagcaa

SEQ ID NO: 733149 - RNA, 19 nt, Homo sapiens
  misc_RNA (1)...(19): siRNA sense strand
aggacacccucccacauga

SEQ ID NO: 733150 - RNA, 19 nt, Homo sapiens
  misc_RNA (1)...(19): siRNA sense strand
uuucugagcgggcuuguga

SEQ ID NO: 733151 - RNA, 19 nt, Homo sapiens
  misc_RNA (1)...(19): siRNA sense strand
ggcuaugccugccucaaag

SEQ ID NO: 733152 - RNA, 19 nt, Homo sapiens
  misc_RNA (1)...(19): siRNA sense strand
cggcuaugccugccucaaa

SEQ ID NO: 733153 - RNA, 19 nt, Homo sapiens
  misc_RNA (1)...(19): siRNA sense strand
gcaagagaaacugcagaau

SEQ ID NO: 733154 - RNA, 19 nt, Homo sapiens
  misc_RNA (1)...(19): siRNA sense strand
gcucauccaggccaaagug

SEQ ID NO: 733155 - RNA, 19 nt, Homo sapiens
  misc_RNA (1)...(19): siRNA sense strand
guugagcaaugugcacuuc

SEQ ID NO: 733156 - RNA, 19 nt, Homo sapiens
  misc_RNA (1)...(19): siRNA sense strand
gggcuaugacguccauguu

SEQ ID NO: 733157 - RNA, 19 nt, Homo sapiens
  misc_RNA (1)...(19): siRNA sense strand
aaggugaacgcacuuauca

SEQ ID NO: 733158 - RNA, 19 nt, Homo sapiens
  misc_RNA (1)...(19): siRNA sense strand
ucugagcgggcuugugaua

SEQ ID NO: 733159 - RNA, 19 nt, Homo sapiens
  misc_RNA (1)...(19): siRNA sense strand
gcaguuucagccagaaugu

SEQ ID NO: 733160 - RNA, 19 nt, Homo sapiens
  misc_RNA (1)...(19): siRNA sense strand
gaauguggaacuccucaac

SEQ ID NO: 733161 - RNA, 19 nt, Homo sapiens
  misc_RNA (1)...(19): siRNA sense strand
cagcuguuguugagcgaau

SEQ ID NO: 733162 - RNA, 19 nt, Homo sapiens
  misc_RNA (1)...(19): siRNA sense strand
guacucuagucacccucuu

SEQ ID NO: 733163 - RNA, 19 nt, Homo sapiens
  misc_RNA (1)...(19): siRNA sense strand
aagaaaaguugccgaagau

SEQ ID NO: 733164 - RNA, 19 nt, Homo sapiens
  misc_RNA (1)...(19): siRNA sense strand
ccgacaugcugguuaaggu

SEQ ID NO: 733165 - RNA, 19 nt, Homo sapiens
  misc_RNA (1)...(19): siRNA sense strand
cccacgcgcucagacauga

SEQ ID NO: 733166 - RNA, 19 nt, Homo sapiens
  misc_RNA (1)...(19): siRNA sense strand
acaggaaaugcaagagaaa

SEQ ID NO: 733167 - RNA, 19 nt, Homo sapiens
  misc_RNA (1)...(19): siRNA sense strand
gagcgggcuugugauaugc

SEQ ID NO: 733168 - RNA, 19 nt, Homo sapiens
  misc_RNA (1)...(19): siRNA sense strand
guugagcgaauuguuagaa

SEQ ID NO: 733169 - RNA, 19 nt, Homo sapiens
  misc_RNA (1)...(19): siRNA sense strand
gagaaacugcagaauuuug

SEQ ID NO: 733170 - RNA, 19 nt, Homo sapiens
  misc_RNA (1)...(19): siRNA sense strand
gccuagcacugguguugag

SEQ ID NO: 733171 - RNA, 19 nt, Homo sapiens
  misc_RNA (1)...(19): siRNA sense strand
aggccaaagugggcaguuu

SEQ ID NO: 733172 - RNA, 19 nt, Homo sapiens
  misc_RNA (1)...(19): siRNA sense strand
uggcaugcauccucaucau

SEQ ID NO: 733173 - RNA, 19 nt, Homo sapiens
  misc_RNA (1)...(19): siRNA sense strand
guacaucgaggcucuugcu

SEQ ID NO: 733174 - RNA, 19 nt, Homo sapiens
  misc_RNA (1)...(19): siRNA sense strand
ggccaaagugggcaguuuc

SEQ ID NO: 733175 - RNA, 19 nt, Homo sapiens
  misc_RNA (1)...(19): siRNA sense strand
acuuccagcuggcauauag

SEQ ID NO: 733176 - RNA, 19 nt, Homo sapiens
  misc_RNA (1)...(19): siRNA sense strand
gccgccaccucuaccuguu

SEQ ID NO: 733177 - RNA, 19 nt, Homo sapiens
  misc_RNA (1)...(19): siRNA sense strand
guuguugagcgaauuguua

SEQ ID NO: 733178 - RNA, 19 nt, Homo sapiens
  misc_RNA (1)...(19): siRNA sense strand
gcaugcauccucaucauca

SEQ ID NO: 733179 - RNA, 19 nt, Homo sapiens
  misc_RNA (1)...(19): siRNA sense strand
ggacaucaucaccuuggaa

SEQ ID NO: 733180 - RNA, 19 nt, Homo sapiens
  misc_RNA (1)...(19): siRNA sense strand
caucaucaccuuggaaaug

SEQ ID NO: 733181 - RNA, 19 nt, Homo sapiens
  misc_RNA (1)...(19): siRNA sense strand
gacaucaucaccuuggaaa

SEQ ID NO: 733182 - RNA, 19 nt, Homo sapiens
  misc_RNA (1)...(19): siRNA sense strand
caucaucaggaaacucuaa

SEQ ID NO: 733183 - RNA, 19 nt, Homo sapiens
  misc_RNA (1)...(19): siRNA sense strand
ucaacuugcugccuaagag

SEQ ID NO: 733184 - RNA, 19 nt, Homo sapiens
  misc_RNA (1)...(19): siRNA sense strand
gaguggugcuagccaaaca

SEQ ID NO: 733185 - RNA, 19 nt, Homo sapiens
  misc_RNA (1)...(19): siRNA sense strand
gggaguguguggcaugcau

SEQ ID NO: 733186 - RNA, 19 nt, Homo sapiens
  misc_RNA (1)...(19): siRNA sense strand
gcucauccaggccaaagug

SEQ ID NO: 733187 - RNA, 19 nt, Homo sapiens
  misc_RNA (1)...(19): siRNA sense strand
gcaguuucagccagaaugu

SEQ ID NO: 733188 - RNA, 19 nt, Homo sapiens
  misc_RNA (1)...(19): siRNA sense strand
gaauguggaacuccucaac

SEQ ID NO: 733189 - RNA, 19 nt, Homo sapiens
  misc_RNA (1)...(19): siRNA sense strand
cagcuguuguugagcgaau

SEQ ID NO: 733190 - RNA, 19 nt, Homo sapiens
  misc_RNA (1)...(19): siRNA sense strand
guugagcgaauuguuagaa

SEQ ID NO: 733191 - RNA, 19 nt, Homo sapiens
  misc_RNA (1)...(19): siRNA sense strand
uggcaugcauccucaucau

SEQ ID NO: 733192 - RNA, 19 nt, Homo sapiens
  misc_RNA (1)...(19): siRNA sense strand
ggccaaagugggcaguuuc

SEQ ID NO: 733193 - RNA, 19 nt, Homo sapiens
  misc_RNA (1)...(19): siRNA sense strand
aggccaaagugggcaguuu

SEQ ID NO: 733194 - RNA, 19 nt, Homo sapiens
  misc_RNA (1)...(19): siRNA sense strand
guuguugagcgaauuguua

SEQ ID NO: 733195 - RNA, 19 nt, Homo sapiens
  misc_RNA (1)...(19): siRNA sense strand
ggacaucaucaccuuggaa

SEQ ID NO: 733196 - RNA, 19 nt, Homo sapiens
  misc_RNA (1)...(19): siRNA sense strand
caucaucaccuuggaaaug

SEQ ID NO: 733197 - RNA, 19 nt, Homo sapiens
  misc_RNA (1)...(19): siRNA sense strand
gacaucaucaccuuggaaa

SEQ ID NO: 733198 - RNA, 19 nt, Homo sapiens
  misc_RNA (1)...(19): siRNA sense strand
caucaucaggaaacucuaa

SEQ ID NO: 733199 - RNA, 19 nt, Homo sapiens
  misc_RNA (1)...(19): siRNA sense strand
ucaacuugcugccuaagag

SEQ ID NO: 733200 - RNA, 19 nt, Homo sapiens
  misc_RNA (1)...(19): siRNA sense strand
gaguggugcuagccaaaca

SEQ ID NO: 733201 - RNA, 19 nt, Homo sapiens
  misc_RNA (1)...(19): siRNA sense strand
gcucauccaggccaaagug

SEQ ID NO: 733202 - RNA, 19 nt, Homo sapiens
  misc_RNA (1)...(19): siRNA sense strand
gcaguuucagccagaaugu

SEQ ID NO: 733203 - RNA, 19 nt, Homo sapiens
  misc_RNA (1)...(19): siRNA sense strand
gaauguggaacuccucaac

SEQ ID NO: 733204 - RNA, 19 nt, Homo sapiens
  misc_RNA (1)...(19): siRNA sense strand
cagcuguuguugagcgaau

SEQ ID NO: 733205 - RNA, 19 nt, Homo sapiens
  misc_RNA (1)...(19): siRNA sense strand
guugagcgaauuguuagaa

SEQ ID NO: 733206 - RNA, 19 nt, Homo sapiens
  misc_RNA (1)...(19): siRNA sense strand
aggccaaagugggcaguuu

SEQ ID NO: 733207 - RNA, 19 nt, Homo sapiens
  misc_RNA (1)...(19): siRNA sense strand
ggccaaagugggcaguuuc

SEQ ID NO: 733208 - RNA, 19 nt, Homo sapiens
  misc_RNA (1)...(19): siRNA sense strand
gcacuucacuggagagaaa

SEQ ID NO: 733209 - RNA, 19 nt, Homo sapiens
  misc_RNA (1)...(19): siRNA sense strand
aagagaaacugcagaauuu

SEQ ID NO: 733210 - RNA, 19 nt, Homo sapiens
  misc_RNA (1)...(19): siRNA sense strand
gcacugguguugagcaaug

SEQ ID NO: 733211 - RNA, 19 nt, Homo sapiens
  misc_RNA (1)...(19): siRNA sense strand
caagagaaacugcagaauu

SEQ ID NO: 733212 - RNA, 19 nt, Homo sapiens
  misc_RNA (1)...(19): siRNA sense strand
gccuugcacuccugaauuu

SEQ ID NO: 733213 - RNA, 19 nt, Homo sapiens
  misc_RNA (1)...(19): siRNA sense strand
ugacguccauguucuaugu

SEQ ID NO: 733214 - RNA, 19 nt, Homo sapiens
  misc_RNA (1)...(19): siRNA sense strand
gcacaggaaaugcaagaga

SEQ ID NO: 733215 - RNA, 19 nt, Homo sapiens
  misc_RNA (1)...(19): siRNA sense strand
cacaggaaaugcaagagaa

SEQ ID NO: 733216 - RNA, 19 nt, Homo sapiens
  misc_RNA (1)...(19): siRNA sense strand
gcagaauuuugcacaguua

SEQ ID NO: 733217 - RNA, 19 nt, Homo sapiens
  misc_RNA (1)...(19): siRNA sense strand
gcccaagccuacagaacaa

SEQ ID NO: 733218 - RNA, 19 nt, Homo sapiens
  misc_RNA (1)...(19): siRNA sense strand
agagaaagaacuggaauuu

SEQ ID NO: 733219 - RNA, 19 nt, Homo sapiens
  misc_RNA (1)...(19): siRNA sense strand
ugaccagacugcacaggaa

SEQ ID NO: 733220 - RNA, 19 nt, Homo sapiens
  misc_RNA (1)...(19): siRNA sense strand
guuguugagcgaauuguua

SEQ ID NO: 733221 - RNA, 19 nt, Homo sapiens
  misc_RNA (1)...(19): siRNA sense strand
gagagaaagaacuggaauu

SEQ ID NO: 733222 - RNA, 19 nt, Homo sapiens
  misc_RNA (1)...(19): siRNA sense strand
gcuaugacguccauguucu

SEQ ID NO: 733223 - RNA, 19 nt, Homo sapiens
  misc_RNA (1)...(19): siRNA sense strand
ggacaucaucaccuuggaa

SEQ ID NO: 733224 - RNA, 19 nt, Homo sapiens
  misc_RNA (1)...(19): siRNA sense strand
caucaucaccuuggaaaug

SEQ ID NO: 733225 - RNA, 19 nt, Homo sapiens
  misc_RNA (1)...(19): siRNA sense strand
ggaccacaguacucuaguc

SEQ ID NO: 733226 - RNA, 19 nt, Homo sapiens
  misc_RNA (1)...(19): siRNA sense strand
gacaucaucaccuuggaaa

SEQ ID NO: 733227 - RNA, 19 nt, Homo sapiens
  misc_RNA (1)...(19): siRNA sense strand
ucaacuugcugccuaagag

SEQ ID NO: 733228 - RNA, 19 nt, Homo sapiens
  misc_RNA (1)...(19): siRNA sense strand
caucaucaggaaacucuaa

SEQ ID NO: 733229 - RNA, 19 nt, Homo sapiens
  misc_RNA (1)...(19): siRNA sense strand
ggagagaaagaacuggaau

SEQ ID NO: 733230 - RNA, 19 nt, Homo sapiens
  misc_RNA (1)...(19): siRNA sense strand
gaguggugcuagccaaaca

SEQ ID NO: 733231 - RNA, 19 nt, Homo sapiens
  misc_RNA (1)...(19): siRNA sense strand
ggaaaugcaagagaaacug

SEQ ID NO: 733232 - RNA, 19 nt, Homo sapiens
  misc_RNA (1)...(19): siRNA sense strand
gaccagacugcacaggaaa

SEQ ID NO: 733233 - RNA, 19 nt, Homo sapiens
  misc_RNA (1)...(19): siRNA sense strand
gaccacaguacucuaguca

SEQ ID NO: 733234 - RNA, 19 nt, Homo sapiens
  misc_RNA (1)...(19): siRNA sense strand
gucacccucuucaagcuuu

SEQ ID NO: 733235 - RNA, 19 nt, Homo sapiens
  misc_RNA (1)...(19): siRNA sense strand
gcucauccaggccaaagug

SEQ ID NO: 733236 - RNA, 19 nt, Homo sapiens
  misc_RNA (1)...(19): siRNA sense strand
gcaagagaaacugcagaau

SEQ ID NO: 733237 - RNA, 19 nt, Homo sapiens
  misc_RNA (1)...(19): siRNA sense strand
guugagcaaugugcacuuc

SEQ ID NO: 733238 - RNA, 19 nt, Homo sapiens
  misc_RNA (1)...(19): siRNA sense strand
uagcacugguguugagcaa

SEQ ID NO: 733239 - RNA, 19 nt, Homo sapiens
  misc_RNA (1)...(19): siRNA sense strand
gcaguuucagccagaaugu

SEQ ID NO: 733240 - RNA, 19 nt, Homo sapiens
  misc_RNA (1)...(19): siRNA sense strand
gggcuaugacguccauguu

SEQ ID NO: 733241 - RNA, 19 nt, Homo sapiens
  misc_RNA (1)...(19): siRNA sense strand
gaauguggaacuccucaac

SEQ ID NO: 733242 - RNA, 19 nt, Homo sapiens
  misc_RNA (1)...(19): siRNA sense strand
cagcuguuguugagcgaau

SEQ ID NO: 733243 - RNA, 19 nt, Homo sapiens
  misc_RNA (1)...(19): siRNA sense strand
guacucuagucacccucuu

SEQ ID NO: 733244 - RNA, 19 nt, Homo sapiens
  misc_RNA (1)...(19): siRNA sense strand
acaggaaaugcaagagaaa

SEQ ID NO: 733245 - RNA, 19 nt, Homo sapiens
  misc_RNA (1)...(19): siRNA sense strand
gagaaacugcagaauuuug

SEQ ID NO: 733246 - RNA, 19 nt, Homo sapiens
  misc_RNA (1)...(19): siRNA sense strand
guugagcgaauuguuagaa

SEQ ID NO: 733247 - RNA, 19 nt, Homo sapiens
  misc_RNA (1)...(19): siRNA sense strand
gccuagcacugguguugag

SEQ ID NO: 733248 - RNA, 19 nt, Homo sapiens
  misc_RNA (1)...(19): siRNA sense strand
aggccaaagugggcaguuu

SEQ ID NO: 733249 - RNA, 19 nt, Homo sapiens
  misc_RNA (1)...(19): siRNA sense strand
ggccaaagugggcaguuuc

SEQ ID NO: 733250 - RNA, 19 nt, Homo sapiens
  misc_RNA (1)...(19): siRNA sense strand
acuuccagcuggcauauag

SEQ ID NO: 733251 - RNA, 19 nt, Homo sapiens
  misc_RNA (1)...(19): siRNA sense strand
gcaaggagaugucugaaua

SEQ ID NO: 733252 - RNA, 19 nt, Homo sapiens
  misc_RNA (1)...(19): siRNA sense strand
gcacuucacuggagagaaa

SEQ ID NO: 733253 - RNA, 19 nt, Homo sapiens
  misc_RNA (1)...(19): siRNA sense strand
aagagaaacugcagaauuu

SEQ ID NO: 733254 - RNA, 19 nt, Homo sapiens
  misc_RNA (1)...(19): siRNA sense strand
gcacugguguugagcaaug

SEQ ID NO: 733255 - RNA, 19 nt, Homo sapiens
  misc_RNA (1)...(19): siRNA sense strand
caagagaaacugcagaauu

SEQ ID NO: 733256 - RNA, 19 nt, Homo sapiens
  misc_RNA (1)...(19): siRNA sense strand
ggagagugaugccgguaaa

SEQ ID NO: 733257 - RNA, 19 nt, Homo sapiens
  misc_RNA (1)...(19): siRNA sense strand
ucaaggaucgggaagguua

SEQ ID NO: 733258 - RNA, 19 nt, Homo sapiens
  misc_RNA (1)...(19): siRNA sense strand
gccuugcacuccugaauuu

SEQ ID NO: 733259 - RNA, 19 nt, Homo sapiens
  misc_RNA (1)...(19): siRNA sense strand
ugacguccauguucuaugu

SEQ ID NO: 733260 - RNA, 19 nt, Homo sapiens
  misc_RNA (1)...(19): siRNA sense strand
ugaacgcacuuaucaagga

SEQ ID NO: 733261 - RNA, 19 nt, Homo sapiens
  misc_RNA (1)...(19): siRNA sense strand
gaacgcacuuaucaaggau

SEQ ID NO: 733262 - RNA, 19 nt, Homo sapiens
  misc_RNA (1)...(19): siRNA sense strand
gcacaggaaaugcaagaga

SEQ ID NO: 733263 - RNA, 19 nt, Homo sapiens
  misc_RNA (1)...(19): siRNA sense strand
ccaacaagauggaaagaac

SEQ ID NO: 733264 - RNA, 19 nt, Homo sapiens
  misc_RNA (1)...(19): siRNA sense strand
cacaggaaaugcaagagaa

SEQ ID NO: 733265 - RNA, 19 nt, Homo sapiens
  misc_RNA (1)...(19): siRNA sense strand
caucgaggcucuugcucaa

SEQ ID NO: 733266 - RNA, 19 nt, Homo sapiens
  misc_RNA (1)...(19): siRNA sense strand
gcagaauuuugcacaguua

SEQ ID NO: 733267 - RNA, 19 nt, Homo sapiens
  misc_RNA (1)...(19): siRNA sense strand
gcccaagccuacagaacaa

SEQ ID NO: 733268 - RNA, 19 nt, Homo sapiens
  misc_RNA (1)...(19): siRNA sense strand
agagaaagaacuggaauuu

SEQ ID NO: 733269 - RNA, 19 nt, Homo sapiens
  misc_RNA (1)...(19): siRNA sense strand
ugaccagacugcacaggaa

SEQ ID NO: 733270 - RNA, 19 nt, Homo sapiens
  misc_RNA (1)...(19): siRNA sense strand
ugagcgggcuugugauaug

SEQ ID NO: 733271 - RNA, 19 nt, Homo sapiens
  misc_RNA (1)...(19): siRNA sense strand
guuguugagcgaauuguua

SEQ ID NO: 733272 - RNA, 19 nt, Homo sapiens
  misc_RNA (1)...(19): siRNA sense strand
gagagaaagaacuggaauu

SEQ ID NO: 733273 - RNA, 19 nt, Homo sapiens
  misc_RNA (1)...(19): siRNA sense strand
gcaugcauccucaucauca

SEQ ID NO: 733274 - RNA, 19 nt, Homo sapiens
  misc_RNA (1)...(19): siRNA sense strand
ggaaagaaccacgcaggau

SEQ ID NO: 733275 - RNA, 19 nt, Homo sapiens
  misc_RNA (1)...(19): siRNA sense strand
gcuaugacguccauguucu

SEQ ID NO: 733276 - RNA, 19 nt, Homo sapiens
  misc_RNA (1)...(19): siRNA sense strand
ggacaucaucaccuuggaa

SEQ ID NO: 733277 - RNA, 19 nt, Homo sapiens
  misc_RNA (1)...(19): siRNA sense strand
caucaucaccuuggaaaug

SEQ ID NO: 733278 - RNA, 19 nt, Homo sapiens
  misc_RNA (1)...(19): siRNA sense strand
ggaccacaguacucuaguc

SEQ ID NO: 733279 - RNA, 19 nt, Homo sapiens
  misc_RNA (1)...(19): siRNA sense strand
gacaugauaugcggcuaug

SEQ ID NO: 733280 - RNA, 19 nt, Homo sapiens
  misc_RNA (1)...(19): siRNA sense strand
gagugaugccgguaaagaa

SEQ ID NO: 733281 - RNA, 19 nt, Homo sapiens
  misc_RNA (1)...(19): siRNA sense strand
gacaucaucaccuuggaaa

SEQ ID NO: 733282 - RNA, 19 nt, Homo sapiens
  misc_RNA (1)...(19): siRNA sense strand
aaagaaaaguugccgaaga

SEQ ID NO: 733283 - RNA, 19 nt, Homo sapiens
  misc_RNA (1)...(19): siRNA sense strand
ucaacuugcugccuaagag

SEQ ID NO: 733284 - RNA, 19 nt, Homo sapiens
  misc_RNA (1)...(19): siRNA sense strand
caucaucaggaaacucuaa

SEQ ID NO: 733285 - RNA, 19 nt, Homo sapiens
  misc_RNA (1)...(19): siRNA sense strand
gaaaaguugccgaagauga

SEQ ID NO: 733286 - RNA, 19 nt, Homo sapiens
  misc_RNA (1)...(19): siRNA sense strand
ggagagaaagaacuggaau

SEQ ID NO: 733287 - RNA, 19 nt, Homo sapiens
  misc_RNA (1)...(19): siRNA sense strand
aaacgagguuccugguaca

SEQ ID NO: 733288 - RNA, 19 nt, Homo sapiens
  misc_RNA (1)...(19): siRNA sense strand
gaauacugcagcacucugu

SEQ ID NO: 733289 - RNA, 19 nt, Homo sapiens
  misc_RNA (1)...(19): siRNA sense strand
gaguggugcuagccaaaca

SEQ ID NO: 733290 - RNA, 19 nt, Homo sapiens
  misc_RNA (1)...(19): siRNA sense strand
ccaaacgagguuccuggua

SEQ ID NO: 733291 - RNA, 19 nt, Homo sapiens
  misc_RNA (1)...(19): siRNA sense strand
ggugaacgcacuuaucaag

SEQ ID NO: 733292 - RNA, 19 nt, Homo sapiens
  misc_RNA (1)...(19): siRNA sense strand
uggccgacaugcugguuaa

SEQ ID NO: 733293 - RNA, 19 nt, Homo sapiens
  misc_RNA (1)...(19): siRNA sense strand
ggaaaugcaagagaaacug

SEQ ID NO: 733294 - RNA, 19 nt, Homo sapiens
  misc_RNA (1)...(19): siRNA sense strand
uaucaaggaucgggaaggu

SEQ ID NO: 733295 - RNA, 19 nt, Homo sapiens
  misc_RNA (1)...(19): siRNA sense strand
gaccagacugcacaggaaa

SEQ ID NO: 733296 - RNA, 19 nt, Homo sapiens
  misc_RNA (1)...(19): siRNA sense strand
ggugcaaggagaugucuga

SEQ ID NO: 733297 - RNA, 19 nt, Homo sapiens
  misc_RNA (1)...(19): siRNA sense strand
gggaguguguggcaugcau

SEQ ID NO: 733298 - RNA, 19 nt, Homo sapiens
  misc_RNA (1)...(19): siRNA sense strand
gucacccucuucaagcuuu

SEQ ID NO: 733299 - RNA, 19 nt, Homo sapiens
  misc_RNA (1)...(19): siRNA sense strand
gaccacaguacucuaguca

SEQ ID NO: 733300 - RNA, 19 nt, Homo sapiens
  misc_RNA (1)...(19): siRNA sense strand
caggacacccucccacaug

SEQ ID NO: 733301 - RNA, 19 nt, Homo sapiens
  misc_RNA (1)...(19): siRNA sense strand
uagcacugguguugagcaa

SEQ ID NO: 733302 - RNA, 19 nt, Homo sapiens
  misc_RNA (1)...(19): siRNA sense strand
aggacacccucccacauga

SEQ ID NO: 733303 - RNA, 19 nt, Homo sapiens
  misc_RNA (1)...(19): siRNA sense strand
uuucugagcgggcuuguga

SEQ ID NO: 733304 - RNA, 19 nt, Homo sapiens
  misc_RNA (1)...(19): siRNA sense strand
ggcuaugccugccucaaag

SEQ ID NO: 733305 - RNA, 19 nt, Homo sapiens
  misc_RNA (1)...(19): siRNA sense strand
cggcuaugccugccucaaa

SEQ ID NO: 733306 - RNA, 19 nt, Homo sapiens
  misc_RNA (1)...(19): siRNA sense strand
gcaagagaaacugcagaau

SEQ ID NO: 733307 - RNA, 19 nt, Homo sapiens
  misc_RNA (1)...(19): siRNA sense strand
gcucauccaggccaaagug

SEQ ID NO: 733308 - RNA, 19 nt, Homo sapiens
  misc_RNA (1)...(19): siRNA sense strand
guugagcaaugugcacuuc

SEQ ID NO: 733309 - RNA, 19 nt, Homo sapiens
  misc_RNA (1)...(19): siRNA sense strand
gggcuaugacguccauguu

SEQ ID NO: 733310 - RNA, 19 nt, Homo sapiens
  misc_RNA (1)...(19): siRNA sense strand
aaggugaacgcacuuauca

SEQ ID NO: 733311 - RNA, 19 nt, Homo sapiens
  misc_RNA (1)...(19): siRNA sense strand
ucugagcgggcuugugaua

SEQ ID NO: 733312 - RNA, 19 nt, Homo sapiens
  misc_RNA (1)...(19): siRNA sense strand
gcaguuucagccagaaugu

SEQ ID NO: 733313 - RNA, 19 nt, Homo sapiens
  misc_RNA (1)...(19): siRNA sense strand
gaauguggaacuccucaac

SEQ ID NO: 733314 - RNA, 19 nt, Homo sapiens
  misc_RNA (1)...(19): siRNA sense strand
cagcuguuguugagcgaau

SEQ ID NO: 733315 - RNA, 19 nt, Homo sapiens
  misc_RNA (1)...(19): siRNA sense strand
guacucuagucacccucuu

SEQ ID NO: 733316 - RNA, 19 nt, Homo sapiens
  misc_RNA (1)...(19): siRNA sense strand
aagaaaaguugccgaagau

SEQ ID NO: 733317 - RNA, 19 nt, Homo sapiens
  misc_RNA (1)...(19): siRNA sense strand
ccgacaugcugguuaaggu

SEQ ID NO: 733318 - RNA, 19 nt, Homo sapiens
  misc_RNA (1)...(19): siRNA sense strand
cccacgcgcucagacauga

SEQ ID NO: 733319 - RNA, 19 nt, Homo sapiens
  misc_RNA (1)...(19): siRNA sense strand
acaggaaaugcaagagaaa

SEQ ID NO: 733320 - RNA, 19 nt, Homo sapiens
  misc_RNA (1)...(19): siRNA sense strand
gagcgggcuugugauaugc

SEQ ID NO: 733321 - RNA, 19 nt, Homo sapiens
  misc_RNA (1)...(19): siRNA sense strand
guugagcgaauuguuagaa

SEQ ID NO: 733322 - RNA, 19 nt, Homo sapiens
  misc_RNA (1)...(19): siRNA sense strand
gagaaacugcagaauuuug

SEQ ID NO: 733323 - RNA, 19 nt, Homo sapiens
  misc_RNA (1)...(19): siRNA sense strand
gccuagcacugguguugag

SEQ ID NO: 733324 - RNA, 19 nt, Homo sapiens
  misc_RNA (1)...(19): siRNA sense strand
aggccaaagugggcaguuu

SEQ ID NO: 733325 - RNA, 19 nt, Homo sapiens
  misc_RNA (1)...(19): siRNA sense strand
uggcaugcauccucaucau

SEQ ID NO: 733326 - RNA, 19 nt, Homo sapiens
  misc_RNA (1)...(19): siRNA sense strand
guacaucgaggcucuugcu

SEQ ID NO: 733327 - RNA, 19 nt, Homo sapiens
  misc_RNA (1)...(19): siRNA sense strand
ggccaaagugggcaguuuc

SEQ ID NO: 733328 - RNA, 19 nt, Homo sapiens
  misc_RNA (1)...(19): siRNA sense strand
acuuccagcuggcauauag

SEQ ID NO: 733329 - RNA, 19 nt, Homo sapiens
  misc_RNA (1)...(19): siRNA sense strand
gccgccaccucuaccuguu

SEQ ID NO: 733330 - RNA, 19 nt, Homo sapiens
  misc_RNA (1)...(19): siRNA sense strand
guuguugagcgaauuguua

SEQ ID NO: 733331 - RNA, 19 nt, Homo sapiens
  misc_RNA (1)...(19): siRNA sense strand
gcaugcauccucaucauca

SEQ ID NO: 733332 - RNA, 19 nt, Homo sapiens
  misc_RNA (1)...(19): siRNA sense strand
ggacaucaucaccuuggaa

SEQ ID NO: 733333 - RNA, 19 nt, Homo sapiens
  misc_RNA (1)...(19): siRNA sense strand
caucaucaccuuggaaaug

SEQ ID NO: 733334 - RNA, 19 nt, Homo sapiens
  misc_RNA (1)...(19): siRNA sense strand
gacaucaucaccuuggaaa

SEQ ID NO: 733335 - RNA, 19 nt, Homo sapiens
  misc_RNA (1)...(19): siRNA sense strand
caucaucaggaaacucuaa

SEQ ID NO: 733336 - RNA, 19 nt, Homo sapiens
  misc_RNA (1)...(19): siRNA sense strand
ucaacuugcugccuaagag

SEQ ID NO: 733337 - RNA, 19 nt, Homo sapiens
  misc_RNA (1)...(19): siRNA sense strand
gaguggugcuagccaaaca

SEQ ID NO: 733338 - RNA, 19 nt, Homo sapiens
  misc_RNA (1)...(19): siRNA sense strand
gggaguguguggcaugcau

SEQ ID NO: 733339 - RNA, 19 nt, Homo sapiens
  misc_RNA (1)...(19): siRNA sense strand
gcucauccaggccaaagug

SEQ ID NO: 733340 - RNA, 19 nt, Homo sapiens
  misc_RNA (1)...(19): siRNA sense strand
gcaguuucagccagaaugu

SEQ ID NO: 733341 - RNA, 19 nt, Homo sapiens
  misc_RNA (1)...(19): siRNA sense strand
gaauguggaacuccucaac

SEQ ID NO: 733342 - RNA, 19 nt, Homo sapiens
  misc_RNA (1)...(19): siRNA sense strand
cagcuguuguugagcgaau

SEQ ID NO: 733343 - RNA, 19 nt, Homo sapiens
  misc_RNA (1)...(19): siRNA sense strand
guugagcgaauuguuagaa

SEQ ID NO: 733344 - RNA, 19 nt, Homo sapiens
  misc_RNA (1)...(19): siRNA sense strand
uggcaugcauccucaucau

SEQ ID NO: 733345 - RNA, 19 nt, Homo sapiens
  misc_RNA (1)...(19): siRNA sense strand
ggccaaagugggcaguuuc

SEQ ID NO: 733346 - RNA, 19 nt, Homo sapiens
  misc_RNA (1)...(19): siRNA sense strand
aggccaaagugggcaguuu

SEQ ID NO: 733347 - RNA, 19 nt, Homo sapiens
  misc_RNA (1)...(19): siRNA sense strand
guuguugagcgaauuguua

SEQ ID NO: 733348 - RNA, 19 nt, Homo sapiens
  misc_RNA (1)...(19): siRNA sense strand
ggacaucaucaccuuggaa

SEQ ID NO: 733349 - RNA, 19 nt, Homo sapiens
  misc_RNA (1)...(19): siRNA sense strand
caucaucaccuuggaaaug

SEQ ID NO: 733350 - RNA, 19 nt, Homo sapiens
  misc_RNA (1)...(19): siRNA sense strand
gacaucaucaccuuggaaa

SEQ ID NO: 733351 - RNA, 19 nt, Homo sapiens
  misc_RNA (1)...(19): siRNA sense strand
caucaucaggaaacucuaa

SEQ ID NO: 733352 - RNA, 19 nt, Homo sapiens
  misc_RNA (1)...(19): siRNA sense strand
ucaacuugcugccuaagag

SEQ ID NO: 733353 - RNA, 19 nt, Homo sapiens
  misc_RNA (1)...(19): siRNA sense strand
gaguggugcuagccaaaca

SEQ ID NO: 733354 - RNA, 19 nt, Homo sapiens
  misc_RNA (1)...(19): siRNA sense strand
gcucauccaggccaaagug

SEQ ID NO: 733355 - RNA, 19 nt, Homo sapiens
  misc_RNA (1)...(19): siRNA sense strand
gcaguuucagccagaaugu

SEQ ID NO: 733356 - RNA, 19 nt, Homo sapiens
  misc_RNA (1)...(19): siRNA sense strand
gaauguggaacuccucaac

SEQ ID NO: 733357 - RNA, 19 nt, Homo sapiens
  misc_RNA (1)...(19): siRNA sense strand
cagcuguuguugagcgaau

SEQ ID NO: 733358 - RNA, 19 nt, Homo sapiens
  misc_RNA (1)...(19): siRNA sense strand
guugagcgaauuguuagaa

SEQ ID NO: 733359 - RNA, 19 nt, Homo sapiens
  misc_RNA (1)...(19): siRNA sense strand
aggccaaagugggcaguuu

SEQ ID NO: 733360 - RNA, 19 nt, Homo sapiens
  misc_RNA (1)...(19): siRNA sense strand
ggccaaagugggcaguuuc

SEQ ID NO: 733361 - RNA, 19 nt, Homo sapiens
  misc_RNA (1)...(19): siRNA sense strand
gaaagcaucugguacaaug

SEQ ID NO: 733362 - RNA, 19 nt, Homo sapiens
  misc_RNA (1)...(19): siRNA sense strand
caucaaagcugccauggaa

SEQ ID NO: 733363 - RNA, 19 nt, Homo sapiens
  misc_RNA (1)...(19): siRNA sense strand
aaacauaacugaugagcuu

SEQ ID NO: 733364 - RNA, 19 nt, Homo sapiens
  misc_RNA (1)...(19): siRNA sense strand
gaaaugaaagcaucuggua

SEQ ID NO: 733365 - RNA, 19 nt, Homo sapiens
  misc_RNA (1)...(19): siRNA sense strand
gcaucaaacuuuaugagaa

SEQ ID NO: 733366 - RNA, 19 nt, Homo sapiens
  misc_RNA (1)...(19): siRNA sense strand
gagaugaacugugauacaa

SEQ ID NO: 733367 - RNA, 19 nt, Homo sapiens
  misc_RNA (1)...(19): siRNA sense strand
uaacugaccuaucaccauu

SEQ ID NO: 733368 - RNA, 19 nt, Homo sapiens
  misc_RNA (1)...(19): siRNA sense strand
gcagaaacagugauaauug

SEQ ID NO: 733369 - RNA, 19 nt, Homo sapiens
  misc_RNA (1)...(19): siRNA sense strand
gguuagagaugaacuguga

SEQ ID NO: 733370 - RNA, 19 nt, Homo sapiens
  misc_RNA (1)...(19): siRNA sense strand
gaaauguggugcccuuuua

SEQ ID NO: 733371 - RNA, 19 nt, Homo sapiens
  misc_RNA (1)...(19): siRNA sense strand
aagcuggacuggaauauuu

SEQ ID NO: 733372 - RNA, 19 nt, Homo sapiens
  misc_RNA (1)...(19): siRNA sense strand
acaagaaccuuugguauug

SEQ ID NO: 733373 - RNA, 19 nt, Homo sapiens
  misc_RNA (1)...(19): siRNA sense strand
gaaacacaauggaaagaca

SEQ ID NO: 733374 - RNA, 19 nt, Homo sapiens
  misc_RNA (1)...(19): siRNA sense strand
gcaagagaaucauauggau

SEQ ID NO: 733375 - RNA, 19 nt, Homo sapiens
  misc_RNA (1)...(19): siRNA sense strand
caagagauguucccuuuac

SEQ ID NO: 733376 - RNA, 19 nt, Homo sapiens
  misc_RNA (1)...(19): siRNA sense strand
gaugaacugugauacaaau

SEQ ID NO: 733377 - RNA, 19 nt, Homo sapiens
  misc_RNA (1)...(19): siRNA sense strand
cagcagguuuaacaacuua

SEQ ID NO: 733378 - RNA, 19 nt, Homo sapiens
  misc_RNA (1)...(19): siRNA sense strand
gaccaucucuuugcaaaug

SEQ ID NO: 733379 - RNA, 19 nt, Homo sapiens
  misc_RNA (1)...(19): siRNA sense strand
gcaaauagaauugugaaug

SEQ ID NO: 733380 - RNA, 19 nt, Homo sapiens
  misc_RNA (1)...(19): siRNA sense strand
caaauagaauugugaaugc

SEQ ID NO: 733381 - RNA, 19 nt, Homo sapiens
  misc_RNA (1)...(19): siRNA sense strand
gcuauaggcuuuggauaug

SEQ ID NO: 733382 - RNA, 19 nt, Homo sapiens
  misc_RNA (1)...(19): siRNA sense strand
caucaucaauguugucaau

SEQ ID NO: 733383 - RNA, 19 nt, Homo sapiens
  misc_RNA (1)...(19): siRNA sense strand
cagcagacuucauaggaaa

SEQ ID NO: 733384 - RNA, 19 nt, Homo sapiens
  misc_RNA (1)...(19): siRNA sense strand
gcacgcagcagguuuaaca

SEQ ID NO: 733385 - RNA, 19 nt, Homo sapiens
  misc_RNA (1)...(19): siRNA sense strand
ugauagaauuggauccuaa

SEQ ID NO: 733386 - RNA, 19 nt, Homo sapiens
  misc_RNA (1)...(19): siRNA sense strand
uaaauaagccagcagacuu

SEQ ID NO: 733387 - RNA, 19 nt, Homo sapiens
  misc_RNA (1)...(19): siRNA sense strand
uuagauggauugaagaaga

SEQ ID NO: 733388 - RNA, 19 nt, Homo sapiens
  misc_RNA (1)...(19): siRNA sense strand
cugaagaucuuagugauga

SEQ ID NO: 733389 - RNA, 19 nt, Homo sapiens
  misc_RNA (1)...(19): siRNA sense strand
gagucuggcuuucgcauau

SEQ ID NO: 733390 - RNA, 19 nt, Homo sapiens
  misc_RNA (1)...(19): siRNA sense strand
gcagcagguuuaacaacuu

SEQ ID NO: 733391 - RNA, 19 nt, Homo sapiens
  misc_RNA (1)...(19): siRNA sense strand
ucaaugguccuaucacgua

SEQ ID NO: 733392 - RNA, 19 nt, Homo sapiens
  misc_RNA (1)...(19): siRNA sense strand
ugugaaugcugcaggauuu

SEQ ID NO: 733393 - RNA, 19 nt, Homo sapiens
  misc_RNA (1)...(19): siRNA sense strand
gcacugaaacagauuaaag

SEQ ID NO: 733394 - RNA, 19 nt, Homo sapiens
  misc_RNA (1)...(19): siRNA sense strand
caagaaccuuugguauuga

SEQ ID NO: 733395 - RNA, 19 nt, Homo sapiens
  misc_RNA (1)...(19): siRNA sense strand
gguaguaucagacuugcua

SEQ ID NO: 733396 - RNA, 19 nt, Homo sapiens
  misc_RNA (1)...(19): siRNA sense strand
ugaagaagaagcagucaaa

SEQ ID NO: 733397 - RNA, 19 nt, Homo sapiens
  misc_RNA (1)...(19): siRNA sense strand
uuacuuucauccuggaaua

SEQ ID NO: 733398 - RNA, 19 nt, Homo sapiens
  misc_RNA (1)...(19): siRNA sense strand
gacagcaaguggaaguuga

SEQ ID NO: 733399 - RNA, 19 nt, Homo sapiens
  misc_RNA (1)...(19): siRNA sense strand
gaaagacagagcagaaaca

SEQ ID NO: 733400 - RNA, 19 nt, Homo sapiens
  misc_RNA (1)...(19): siRNA sense strand
gaacaugggacguugaaac

SEQ ID NO: 733401 - RNA, 19 nt, Homo sapiens
  misc_RNA (1)...(19): siRNA sense strand
gaaagcaagcacugaaaca

SEQ ID NO: 733402 - RNA, 19 nt, Homo sapiens
  misc_RNA (1)...(19): siRNA sense strand
uaagccagcagacuucaua

SEQ ID NO: 733403 - RNA, 19 nt, Homo sapiens
  misc_RNA (1)...(19): siRNA sense strand
ucagugggcucuaucaaag

SEQ ID NO: 733404 - RNA, 19 nt, Homo sapiens
  misc_RNA (1)...(19): siRNA sense strand
gagcagaaacagugauaau

SEQ ID NO: 733405 - RNA, 19 nt, Homo sapiens
  misc_RNA (1)...(19): siRNA sense strand
aagcagggaugaaagaugu

SEQ ID NO: 733406 - RNA, 19 nt, Homo sapiens
  misc_RNA (1)...(19): siRNA sense strand
cagaaacagugauaauugg

SEQ ID NO: 733407 - RNA, 19 nt, Homo sapiens
  misc_RNA (1)...(19): siRNA sense strand
ccagcagacuucauaggaa

SEQ ID NO: 733408 - RNA, 19 nt, Homo sapiens
  misc_RNA (1)...(19): siRNA sense strand
gaaccuaugccaugaaugc

SEQ ID NO: 733409 - RNA, 19 nt, Homo sapiens
  misc_RNA (1)...(19): siRNA sense strand
cuuaaagguuuccaacauu

SEQ ID NO: 733410 - RNA, 19 nt, Homo sapiens
  misc_RNA (1)...(19): siRNA sense strand
ccaaagcaagagaaucaua

SEQ ID NO: 733411 - RNA, 19 nt, Homo sapiens
  misc_RNA (1)...(19): siRNA sense strand
gagagcaaauagaauugug

SEQ ID NO: 733412 - RNA, 19 nt, Homo sapiens
  misc_RNA (1)...(19): siRNA sense strand
ucacauugauccuuauucu

SEQ ID NO: 733413 - RNA, 19 nt, Homo sapiens
  misc_RNA (1)...(19): siRNA sense strand
gauguucccuuuacucaac

SEQ ID NO: 733414 - RNA, 19 nt, Homo sapiens
  misc_RNA (1)...(19): siRNA sense strand
uucaagagauguucccuuu

SEQ ID NO: 733415 - RNA, 19 nt, Homo sapiens
  misc_RNA (1)...(19): siRNA sense strand
gauccuuauucucuaacua

SEQ ID NO: 733416 - RNA, 19 nt, Homo sapiens
  misc_RNA (1)...(19): siRNA sense strand
aucaaaggcuggagucuaa

SEQ ID NO: 733417 - RNA, 19 nt, Homo sapiens
  misc_RNA (1)...(19): siRNA sense strand
ggaaggaucauauuaucuc

SEQ ID NO: 733418 - RNA, 19 nt, Homo sapiens
  misc_RNA (1)...(19): siRNA sense strand
accaguaacuucucugaaa

SEQ ID NO: 733419 - RNA, 19 nt, Homo sapiens
  misc_RNA (1)...(19): siRNA sense strand
ggccaaagcaagagaauca

SEQ ID NO: 733420 - RNA, 19 nt, Homo sapiens
  misc_RNA (1)...(19): siRNA sense strand
ccagaaaccggcuucagaa

SEQ ID NO: 733421 - RNA, 19 nt, Homo sapiens
  misc_RNA (1)...(19): siRNA sense strand
caaagcaagagaaucauau

SEQ ID NO: 733422 - RNA, 19 nt, Homo sapiens
  misc_RNA (1)...(19): siRNA sense strand
caacagaacaguaucucau

SEQ ID NO: 733423 - RNA, 19 nt, Homo sapiens
  misc_RNA (1)...(19): siRNA sense strand
uacaagaaccuuugguauu

SEQ ID NO: 733424 - RNA, 19 nt, Homo sapiens
  misc_RNA (1)...(19): siRNA sense strand
aggagggaaucgacaauuu

SEQ ID NO: 733425 - RNA, 19 nt, Homo sapiens
  misc_RNA (1)...(19): siRNA sense strand
agucaaagguggauaugau

SEQ ID NO: 733426 - RNA, 19 nt, Homo sapiens
  misc_RNA (1)...(19): siRNA sense strand
acuagaacauccucucauu

SEQ ID NO: 733427 - RNA, 19 nt, Homo sapiens
  misc_RNA (1)...(19): siRNA sense strand
acagaacaguaucucauug

SEQ ID NO: 733428 - RNA, 19 nt, Homo sapiens
  misc_RNA (1)...(19): siRNA sense strand
cagcagucaucauacaaga

SEQ ID NO: 733429 - RNA, 19 nt, Homo sapiens
  misc_RNA (1)...(19): siRNA sense strand
uuaaagguuuccaacauuc

SEQ ID NO: 733430 - RNA, 19 nt, Homo sapiens
  misc_RNA (1)...(19): siRNA sense strand
uagauggauugaagaagaa

SEQ ID NO: 733431 - RNA, 19 nt, Homo sapiens
  misc_RNA (1)...(19): siRNA sense strand
gagcaaauagaauugugaa

SEQ ID NO: 733432 - RNA, 19 nt, Homo sapiens
  misc_RNA (1)...(19): siRNA sense strand
ggacuggaauauuuuguga

SEQ ID NO: 733433 - RNA, 19 nt, Homo sapiens
  misc_RNA (1)...(19): siRNA sense strand
gaagcuggacuggaauauu

SEQ ID NO: 733434 - RNA, 19 nt, Homo sapiens
  misc_RNA (1)...(19): siRNA sense strand
gcagaaacacaauggaaag

SEQ ID NO: 733435 - RNA, 19 nt, Homo sapiens
  misc_RNA (1)...(19): siRNA sense strand
gcuuggaguucuuggaguu

SEQ ID NO: 733436 - RNA, 19 nt, Homo sapiens
  misc_RNA (1)...(19): siRNA sense strand
gguuuuagcuggauuguau

SEQ ID NO: 733437 - RNA, 19 nt, Homo sapiens
  misc_RNA (1)...(19): siRNA sense strand
cauacaagaaccuuuggua

SEQ ID NO: 733438 - RNA, 19 nt, Homo sapiens
  misc_RNA (1)...(19): siRNA sense strand
cacgacaucuggaagcuau

SEQ ID NO: 733439 - RNA, 19 nt, Homo sapiens
  misc_RNA (1)...(19): siRNA sense strand
ugucacugcuauuaggaua

SEQ ID NO: 733440 - RNA, 19 nt, Homo sapiens
  misc_RNA (1)...(19): siRNA sense strand
ccaaagcagggaugaaaga

SEQ ID NO: 733441 - RNA, 19 nt, Homo sapiens
  misc_RNA (1)...(19): siRNA sense strand
guggugcccuuuuaaaaua

SEQ ID NO: 733442 - RNA, 19 nt, Homo sapiens
  misc_RNA (1)...(19): siRNA sense strand
gaaacuggaagaagaaacu

SEQ ID NO: 733443 - RNA, 19 nt, Homo sapiens
  misc_RNA (1)...(19): siRNA sense strand
uuuggaagcuggacuggaa

SEQ ID NO: 733444 - RNA, 19 nt, Homo sapiens
  misc_RNA (1)...(19): siRNA sense strand
gaagugaaagcuuugaaac

SEQ ID NO: 733445 - RNA, 19 nt, Homo sapiens
  misc_RNA (1)...(19): siRNA sense strand
ggccaaagcagggaugaaa

SEQ ID NO: 733446 - RNA, 19 nt, Homo sapiens
  misc_RNA (1)...(19): siRNA sense strand
gagauguucccuuuacuca

SEQ ID NO: 733447 - RNA, 19 nt, Homo sapiens
  misc_RNA (1)...(19): siRNA sense strand
gauagcaucaaacuuuaug

SEQ ID NO: 733448 - RNA, 19 nt, Homo sapiens
  misc_RNA (1)...(19): siRNA sense strand
caucauacaagaaccuuug

SEQ ID NO: 733449 - RNA, 19 nt, Homo sapiens
  misc_RNA (1)...(19): siRNA sense strand
ggacagcaaguggaaguug

SEQ ID NO: 733450 - RNA, 19 nt, Homo sapiens
  misc_RNA (1)...(19): siRNA sense strand
gaucuuagugaugauguuu

SEQ ID NO: 733451 - RNA, 19 nt, Homo sapiens
  misc_RNA (1)...(19): siRNA sense strand
ccaguaacuucucugaaag

SEQ ID NO: 733452 - RNA, 19 nt, Homo sapiens
  misc_RNA (1)...(19): siRNA sense strand
agaacaguaucucauugaa

SEQ ID NO: 733453 - RNA, 19 nt, Homo sapiens
  misc_RNA (1)...(19): siRNA sense strand
gcaugcaacagaacaguau

SEQ ID NO: 733454 - RNA, 19 nt, Homo sapiens
  misc_RNA (1)...(19): siRNA sense strand
augagaaacuggaagaaga

SEQ ID NO: 733455 - RNA, 19 nt, Homo sapiens
  misc_RNA (1)...(19): siRNA sense strand
ggacuagaacauccucuca

SEQ ID NO: 733456 - RNA, 19 nt, Homo sapiens
  misc_RNA (1)...(19): siRNA sense strand
auaugucccuguacaacua

SEQ ID NO: 733457 - RNA, 19 nt, Homo sapiens
  misc_RNA (1)...(19): siRNA sense strand
aaagguggauaugauguug

SEQ ID NO: 733458 - RNA, 19 nt, Homo sapiens
  misc_RNA (1)...(19): siRNA sense strand
ccuaaucgcuauggcaaau

SEQ ID NO: 733459 - RNA, 19 nt, Homo sapiens
  misc_RNA (1)...(19): siRNA sense strand
gaaaugguuccugucuuga

SEQ ID NO: 733460 - RNA, 19 nt, Homo sapiens
  misc_RNA (1)...(19): siRNA sense strand
agugaaagcuuugaaacga

SEQ ID NO: 733461 - RNA, 19 nt, Homo sapiens
  misc_RNA (1)...(19): siRNA sense strand
gaucccagcucuccuguug

SEQ ID NO: 733462 - RNA, 19 nt, Homo sapiens
  misc_RNA (1)...(19): siRNA sense strand
cugcgaagguggagaguua

SEQ ID NO: 733463 - RNA, 19 nt, Homo sapiens
  misc_RNA (1)...(19): siRNA sense strand
gaaagagucaucagaagug

SEQ ID NO: 733464 - RNA, 19 nt, Homo sapiens
  misc_RNA (1)...(19): siRNA sense strand
gggagucgcugcaagaauc

SEQ ID NO: 733465 - RNA, 19 nt, Homo sapiens
  misc_RNA (1)...(19): siRNA sense strand
ccgagaaccucacagagaa

SEQ ID NO: 733466 - RNA, 19 nt, Homo sapiens
  misc_RNA (1)...(19): siRNA sense strand
ggaaggaagggcacuguga

SEQ ID NO: 733467 - RNA, 19 nt, Homo sapiens
  misc_RNA (1)...(19): siRNA sense strand
gaacgagaggcaccagauu

SEQ ID NO: 733468 - RNA, 19 nt, Homo sapiens
  misc_RNA (1)...(19): siRNA sense strand
gguagaucuucuucacaua

SEQ ID NO: 733469 - RNA, 19 nt, Homo sapiens
  misc_RNA (1)...(19): siRNA sense strand
caggagagcagaugugauu

SEQ ID NO: 733470 - RNA, 19 nt, Homo sapiens
  misc_RNA (1)...(19): siRNA sense strand
gaaggaagggcacugugaa

SEQ ID NO: 733471 - RNA, 19 nt, Homo sapiens
  misc_RNA (1)...(19): siRNA sense strand
ggaaagagucaucagaagu

SEQ ID NO: 733472 - RNA, 19 nt, Homo sapiens
  misc_RNA (1)...(19): siRNA sense strand
gcugguguguguuuccuuu

SEQ ID NO: 733473 - RNA, 19 nt, Homo sapiens
  misc_RNA (1)...(19): siRNA sense strand
ggguagaucuucuucacau

SEQ ID NO: 733474 - RNA, 19 nt, Homo sapiens
  misc_RNA (1)...(19): siRNA sense strand
gaauguaaggaucaucaaa

SEQ ID NO: 733475 - RNA, 19 nt, Homo sapiens
  misc_RNA (1)...(19): siRNA sense strand
gcaggaaagagucaucaga

SEQ ID NO: 733476 - RNA, 19 nt, Homo sapiens
  misc_RNA (1)...(19): siRNA sense strand
guagaucuucuucacauau

SEQ ID NO: 733477 - RNA, 19 nt, Homo sapiens
  misc_RNA (1)...(19): siRNA sense strand
ugacagaggaauuccagaa

SEQ ID NO: 733478 - RNA, 19 nt, Homo sapiens
  misc_RNA (1)...(19): siRNA sense strand
caggaaagagucaucagaa

SEQ ID NO: 733479 - RNA, 19 nt, Homo sapiens
  misc_RNA (1)...(19): siRNA sense strand
gaagccagcaggaaagagu

SEQ ID NO: 733480 - RNA, 19 nt, Homo sapiens
  misc_RNA (1)...(19): siRNA sense strand
gagaguuaccggugucgaa

SEQ ID NO: 733481 - RNA, 19 nt, Homo sapiens
  misc_RNA (1)...(19): siRNA sense strand
ggaagggcacugugaagca

SEQ ID NO: 733482 - RNA, 19 nt, Homo sapiens
  misc_RNA (1)...(19): siRNA sense strand
uccgggaccucgaucauga

SEQ ID NO: 733483 - RNA, 19 nt, Homo sapiens
  misc_RNA (1)...(19): siRNA sense strand
ggagacugacagaggaauu

SEQ ID NO: 733484 - RNA, 19 nt, Homo sapiens
  misc_RNA (1)...(19): siRNA sense strand
acuugaagcuggugugugu

SEQ ID NO: 733485 - RNA, 19 nt, Homo sapiens
  misc_RNA (1)...(19): siRNA sense strand
gucaaggguuccacacugu

SEQ ID NO: 733486 - RNA, 19 nt, Homo sapiens
  misc_RNA (1)...(19): siRNA sense strand
caaagccgucgguuacaga

SEQ ID NO: 733487 - RNA, 19 nt, Homo sapiens
  misc_RNA (1)...(19): siRNA sense strand
cagaauguaaggaucauca

SEQ ID NO: 733488 - RNA, 19 nt, Homo sapiens
  misc_RNA (1)...(19): siRNA sense strand
ggagagcagaugugauucu

SEQ ID NO: 733489 - RNA, 19 nt, Homo sapiens
  misc_RNA (1)...(19): siRNA sense strand
caaggguuccacacuguug

SEQ ID NO: 733490 - RNA, 19 nt, Homo sapiens
  misc_RNA (1)...(19): siRNA sense strand
ggacauuccuuuguaaaac

SEQ ID NO: 733491 - RNA, 19 nt, Homo sapiens
  misc_RNA (1)...(19): siRNA sense strand
aaagagucaucagaagugu

SEQ ID NO: 733492 - RNA, 19 nt, Homo sapiens
  misc_RNA (1)...(19): siRNA sense strand
ucagggacccauuugugaa

SEQ ID NO: 733493 - RNA, 19 nt, Homo sapiens
  misc_RNA (1)...(19): siRNA sense strand
aaccugggcuggaagucaa

SEQ ID NO: 733494 - RNA, 19 nt, Homo sapiens
  misc_RNA (1)...(19): siRNA sense strand
gacccgagaaccucacaga

SEQ ID NO: 733495 - RNA, 19 nt, Homo sapiens
  misc_RNA (1)...(19): siRNA sense strand
caacgccgcaggcacagau

SEQ ID NO: 733496 - RNA, 19 nt, Homo sapiens
  misc_RNA (1)...(19): siRNA sense strand
uggcugacccgacaucuca

SEQ ID NO: 733497 - RNA, 19 nt, Homo sapiens
  misc_RNA (1)...(19): siRNA sense strand
aggaaagagucaucagaag

SEQ ID NO: 733498 - RNA, 19 nt, Homo sapiens
  misc_RNA (1)...(19): siRNA sense strand
gagacugacagaggaauuc

SEQ ID NO: 733499 - RNA, 19 nt, Homo sapiens
  misc_RNA (1)...(19): siRNA sense strand
cccgagaaccucacagaga

SEQ ID NO: 733500 - RNA, 19 nt, Homo sapiens
  misc_RNA (1)...(19): siRNA sense strand
agucaaagccgucgguuac

SEQ ID NO: 733501 - RNA, 19 nt, Homo sapiens
  misc_RNA (1)...(19): siRNA sense strand
ggcaggagagcagauguga

SEQ ID NO: 733502 - RNA, 19 nt, Homo sapiens
  misc_RNA (1)...(19): siRNA sense strand
gaggagacugacagaggaa

SEQ ID NO: 733503 - RNA, 19 nt, Homo sapiens
  misc_RNA (1)...(19): siRNA sense strand
ucaaagccgucgguuacag

SEQ ID NO: 733504 - RNA, 19 nt, Homo sapiens
  misc_RNA (1)...(19): siRNA sense strand
caucucagggacccauuug

SEQ ID NO: 733505 - RNA, 19 nt, Homo sapiens
  misc_RNA (1)...(19): siRNA sense strand
gagaaccucacagagaauc

SEQ ID NO: 733506 - RNA, 19 nt, Homo sapiens
  misc_RNA (1)...(19): siRNA sense strand
guugggagucgcugcaaga

SEQ ID NO: 733507 - RNA, 19 nt, Homo sapiens
  misc_RNA (1)...(19): siRNA sense strand
cugcgaagguggagaguua

SEQ ID NO: 733508 - RNA, 19 nt, Homo sapiens
  misc_RNA (1)...(19): siRNA sense strand
gggagucgcugcaagaauc

SEQ ID NO: 733509 - RNA, 19 nt, Homo sapiens
  misc_RNA (1)...(19): siRNA sense strand
gaacgagaggcaccagauu

SEQ ID NO: 733510 - RNA, 19 nt, Homo sapiens
  misc_RNA (1)...(19): siRNA sense strand
gcugguguguguuuccuuu

SEQ ID NO: 733511 - RNA, 19 nt, Homo sapiens
  misc_RNA (1)...(19): siRNA sense strand
gagaguuaccggugucgaa

SEQ ID NO: 733512 - RNA, 19 nt, Homo sapiens
  misc_RNA (1)...(19): siRNA sense strand
gucaaggguuccacacugu

SEQ ID NO: 733513 - RNA, 19 nt, Homo sapiens
  misc_RNA (1)...(19): siRNA sense strand
acuugaagcuggugugugu

SEQ ID NO: 733514 - RNA, 19 nt, Homo sapiens
  misc_RNA (1)...(19): siRNA sense strand
caaggguuccacacuguug

SEQ ID NO: 733515 - RNA, 19 nt, Homo sapiens
  misc_RNA (1)...(19): siRNA sense strand
ucagggacccauuugugaa

SEQ ID NO: 733516 - RNA, 19 nt, Homo sapiens
  misc_RNA (1)...(19): siRNA sense strand
caacgccgcaggcacagau

SEQ ID NO: 733517 - RNA, 19 nt, Homo sapiens
  misc_RNA (1)...(19): siRNA sense strand
uggcugacccgacaucuca

SEQ ID NO: 733518 - RNA, 19 nt, Homo sapiens
  misc_RNA (1)...(19): siRNA sense strand
caucucagggacccauuug

SEQ ID NO: 733519 - RNA, 19 nt, Homo sapiens
  misc_RNA (1)...(19): siRNA sense strand
guugggagucgcugcaaga

SEQ ID NO: 733520 - RNA, 19 nt, Homo sapiens
  misc_RNA (1)...(19): siRNA sense strand
gaaagaacguccagaccua

SEQ ID NO: 733521 - RNA, 19 nt, Homo sapiens
  misc_RNA (1)...(19): siRNA sense strand
gcacauagaagcagcauuu

SEQ ID NO: 733522 - RNA, 19 nt, Homo sapiens
  misc_RNA (1)...(19): siRNA sense strand
gaaucaaccugccgaauug

SEQ ID NO: 733523 - RNA, 19 nt, Homo sapiens
  misc_RNA (1)...(19): siRNA sense strand
ggaugaugcucaagaaauu

SEQ ID NO: 733524 - RNA, 19 nt, Homo sapiens
  misc_RNA (1)...(19): siRNA sense strand
gcaaauacaggauauguug

SEQ ID NO: 733525 - RNA, 19 nt, Homo sapiens
  misc_RNA (1)...(19): siRNA sense strand
gaaccucacugaucuucuu

SEQ ID NO: 733526 - RNA, 19 nt, Homo sapiens
  misc_RNA (1)...(19): siRNA sense strand
gaaggaaucuccaaaaguu

SEQ ID NO: 733527 - RNA, 19 nt, Homo sapiens
  misc_RNA (1)...(19): siRNA sense strand
ggauuuaacugcaaagcaa

SEQ ID NO: 733528 - RNA, 19 nt, Homo sapiens
  misc_RNA (1)...(19): siRNA sense strand
gaaagauaaugcacgauuc

SEQ ID NO: 733529 - RNA, 19 nt, Homo sapiens
  misc_RNA (1)...(19): siRNA sense strand
gauccuacaucuacacuug

SEQ ID NO: 733530 - RNA, 19 nt, Homo sapiens
  misc_RNA (1)...(19): siRNA sense strand
gcugauggauacuuucuuu

SEQ ID NO: 733531 - RNA, 19 nt, Homo sapiens
  misc_RNA (1)...(19): siRNA sense strand
gaaaggaccguguguguca

SEQ ID NO: 733532 - RNA, 19 nt, Homo sapiens
  misc_RNA (1)...(19): siRNA sense strand
gcaaagcaaauacaggaua

SEQ ID NO: 733533 - RNA, 19 nt, Homo sapiens
  misc_RNA (1)...(19): siRNA sense strand
gagaugaaguguugugcaa

SEQ ID NO: 733534 - RNA, 19 nt, Homo sapiens
  misc_RNA (1)...(19): siRNA sense strand
cgacauaccuggaguucau

SEQ ID NO: 733535 - RNA, 19 nt, Homo sapiens
  misc_RNA (1)...(19): siRNA sense strand
caaagcaaauacaggauau

SEQ ID NO: 733536 - RNA, 19 nt, Homo sapiens
  misc_RNA (1)...(19): siRNA sense strand
ggcaugauauugagaaaga

SEQ ID NO: 733537 - RNA, 19 nt, Homo sapiens
  misc_RNA (1)...(19): siRNA sense strand
gauaaugcacgauucauga

SEQ ID NO: 733538 - RNA, 19 nt, Homo sapiens
  misc_RNA (1)...(19): siRNA sense strand
gagcacccauccuaacuga

SEQ ID NO: 733539 - RNA, 19 nt, Homo sapiens
  misc_RNA (1)...(19): siRNA sense strand
uaauggagauuuccgaaug

SEQ ID NO: 733540 - RNA, 19 nt, Homo sapiens
  misc_RNA (1)...(19): siRNA sense strand
aagcagacauuccaaagaa

SEQ ID NO: 733541 - RNA, 19 nt, Homo sapiens
  misc_RNA (1)...(19): siRNA sense strand
gaugaaguguugugcaaau

SEQ ID NO: 733542 - RNA, 19 nt, Homo sapiens
  misc_RNA (1)...(19): siRNA sense strand
acacaugccuggaggaaga

SEQ ID NO: 733543 - RNA, 19 nt, Homo sapiens
  misc_RNA (1)...(19): siRNA sense strand
gauaugaaccucacugauc

SEQ ID NO: 733544 - RNA, 19 nt, Homo sapiens
  misc_RNA (1)...(19): siRNA sense strand
gaagauugcaggagccauu

SEQ ID NO: 733545 - RNA, 19 nt, Homo sapiens
  misc_RNA (1)...(19): siRNA sense strand
acuaugagaugcuugcuaa

SEQ ID NO: 733546 - RNA, 19 nt, Homo sapiens
  misc_RNA (1)...(19): siRNA sense strand
gagauucuuucaacacuuc

SEQ ID NO: 733547 - RNA, 19 nt, Homo sapiens
  misc_RNA (1)...(19): siRNA sense strand
gaaggauggugcagguuca

SEQ ID NO: 733548 - RNA, 19 nt, Homo sapiens
  misc_RNA (1)...(19): siRNA sense strand
gggcagauguacagaguca

SEQ ID NO: 733549 - RNA, 19 nt, Homo sapiens
  misc_RNA (1)...(19): siRNA sense strand
cagaggagccauccaguuu

SEQ ID NO: 733550 - RNA, 19 nt, Homo sapiens
  misc_RNA (1)...(19): siRNA sense strand
gaaguguugugcaaaucuu

SEQ ID NO: 733551 - RNA, 19 nt, Homo sapiens
  misc_RNA (1)...(19): siRNA sense strand
gguuggagaugaauuaaag

SEQ ID NO: 733552 - RNA, 19 nt, Homo sapiens
  misc_RNA (1)...(19): siRNA sense strand
gcagcaggccaacuuguaa

SEQ ID NO: 733553 - RNA, 19 nt, Homo sapiens
  misc_RNA (1)...(19): siRNA sense strand
ucucuacucuuacuccuuu

SEQ ID NO: 733554 - RNA, 19 nt, Homo sapiens
  misc_RNA (1)...(19): siRNA sense strand
ccucugaucuuucucuaug

SEQ ID NO: 733555 - RNA, 19 nt, Homo sapiens
  misc_RNA (1)...(19): siRNA sense strand
agaccuaccuccuguacaa

SEQ ID NO: 733556 - RNA, 19 nt, Homo sapiens
  misc_RNA (1)...(19): siRNA sense strand
ggacaugcccgaguaugaa

SEQ ID NO: 733557 - RNA, 19 nt, Homo sapiens
  misc_RNA (1)...(19): siRNA sense strand
gauggauacuuucuuucaa

SEQ ID NO: 733558 - RNA, 19 nt, Homo sapiens
  misc_RNA (1)...(19): siRNA sense strand
gaggagccauccaguuugu

SEQ ID NO: 733559 - RNA, 19 nt, Homo sapiens
  misc_RNA (1)...(19): siRNA sense strand
caacacuucucucuucaag

SEQ ID NO: 733560 - RNA, 19 nt, Homo sapiens
  misc_RNA (1)...(19): siRNA sense strand
gucacugcauugauauuua

SEQ ID NO: 733561 - RNA, 19 nt, Homo sapiens
  misc_RNA (1)...(19): siRNA sense strand
ccaaggauuuaacugcaaa

SEQ ID NO: 733562 - RNA, 19 nt, Homo sapiens
  misc_RNA (1)...(19): siRNA sense strand
gcuaagcugugaaggaauc

SEQ ID NO: 733563 - RNA, 19 nt, Homo sapiens
  misc_RNA (1)...(19): siRNA sense strand
gccaggaucaugcuguuua

SEQ ID NO: 733564 - RNA, 19 nt, Homo sapiens
  misc_RNA (1)...(19): siRNA sense strand
gcuggaggcuacaagaaug

SEQ ID NO: 733565 - RNA, 19 nt, Homo sapiens
  misc_RNA (1)...(19): siRNA sense strand
caucucagacacacaauaa

SEQ ID NO: 733566 - RNA, 19 nt, Homo sapiens
  misc_RNA (1)...(19): siRNA sense strand
caguuuauguuccaucuga

SEQ ID NO: 733567 - RNA, 19 nt, Homo sapiens
  misc_RNA (1)...(19): siRNA sense strand
gcguaucucugaaugugaa

SEQ ID NO: 733568 - RNA, 19 nt, Homo sapiens
  misc_RNA (1)...(19): siRNA sense strand
uaacaacaguccugaugag

SEQ ID NO: 733569 - RNA, 19 nt, Homo sapiens
  misc_RNA (1)...(19): siRNA sense strand
ugaaucaaccugccgaauu

SEQ ID NO: 733570 - RNA, 19 nt, Homo sapiens
  misc_RNA (1)...(19): siRNA sense strand
gauagcagcagcauucuag

SEQ ID NO: 733571 - RNA, 19 nt, Homo sapiens
  misc_RNA (1)...(19): siRNA sense strand
gagccaggaucaugcuguu

SEQ ID NO: 733572 - RNA, 19 nt, Homo sapiens
  misc_RNA (1)...(19): siRNA sense strand
ggucugaucacauuuggaa

SEQ ID NO: 733573 - RNA, 19 nt, Homo sapiens
  misc_RNA (1)...(19): siRNA sense strand
caaccaagcacuaugagau

SEQ ID NO: 733574 - RNA, 19 nt, Homo sapiens
  misc_RNA (1)...(19): siRNA sense strand
aaagugaacccaucucaga

SEQ ID NO: 733575 - RNA, 19 nt, Homo sapiens
  misc_RNA (1)...(19): siRNA sense strand
caucuacacuuggcaucua

SEQ ID NO: 733576 - RNA, 19 nt, Homo sapiens
  misc_RNA (1)...(19): siRNA sense strand
acacuucucucuucaagca

SEQ ID NO: 733577 - RNA, 19 nt, Homo sapiens
  misc_RNA (1)...(19): siRNA sense strand
ggagauucuuucaacacuu

SEQ ID NO: 733578 - RNA, 19 nt, Homo sapiens
  misc_RNA (1)...(19): siRNA sense strand
ggugguuggagaugaauua

SEQ ID NO: 733579 - RNA, 19 nt, Homo sapiens
  misc_RNA (1)...(19): siRNA sense strand
gaaauugggcagauguaca

SEQ ID NO: 733580 - RNA, 19 nt, Homo sapiens
  misc_RNA (1)...(19): siRNA sense strand
guucuuggcaugauauuga

SEQ ID NO: 733581 - RNA, 19 nt, Homo sapiens
  misc_RNA (1)...(19): siRNA sense strand
gcagaggagccauccaguu

SEQ ID NO: 733582 - RNA, 19 nt, Homo sapiens
  misc_RNA (1)...(19): siRNA sense strand
uuucaacacuucucucuuc

SEQ ID NO: 733583 - RNA, 19 nt, Homo sapiens
  misc_RNA (1)...(19): siRNA sense strand
cacaauaaccuguaugcuu

SEQ ID NO: 733584 - RNA, 19 nt, Homo sapiens
  misc_RNA (1)...(19): siRNA sense strand
gacaguauaacaaagaaga

SEQ ID NO: 733585 - RNA, 19 nt, Homo sapiens
  misc_RNA (1)...(19): siRNA sense strand
gagccaguacucuuggaua

SEQ ID NO: 733586 - RNA, 19 nt, Homo sapiens
  misc_RNA (1)...(19): siRNA sense strand
agaaagauaaugcacgauu

SEQ ID NO: 733587 - RNA, 19 nt, Homo sapiens
  misc_RNA (1)...(19): siRNA sense strand
ggucacugcauugauauuu

SEQ ID NO: 733588 - RNA, 19 nt, Homo sapiens
  misc_RNA (1)...(19): siRNA sense strand
ucgaacagcugcaaauggu

SEQ ID NO: 733589 - RNA, 19 nt, Homo sapiens
  misc_RNA (1)...(19): siRNA sense strand
gcauaucugaggugaauca

SEQ ID NO: 733590 - RNA, 19 nt, Homo sapiens
  misc_RNA (1)...(19): siRNA sense strand
cgacaacucauccgacugu

SEQ ID NO: 733591 - RNA, 19 nt, Homo sapiens
  misc_RNA (1)...(19): siRNA sense strand
aauaugaaccugugcuuug

SEQ ID NO: 733592 - RNA, 19 nt, Homo sapiens
  misc_RNA (1)...(19): siRNA sense strand
gcauggugguuggagauga

SEQ ID NO: 733593 - RNA, 19 nt, Homo sapiens
  misc_RNA (1)...(19): siRNA sense strand
ucacaagauugauaugaac

SEQ ID NO: 733594 - RNA, 19 nt, Homo sapiens
  misc_RNA (1)...(19): siRNA sense strand
gacacacaauaaccuguau

SEQ ID NO: 733595 - RNA, 19 nt, Homo sapiens
  misc_RNA (1)...(19): siRNA sense strand
uagguuaucagauuccuuu

SEQ ID NO: 733596 - RNA, 19 nt, Homo sapiens
  misc_RNA (1)...(19): siRNA sense strand
ggcauuuggugcuacuuug

SEQ ID NO: 733597 - RNA, 19 nt, Homo sapiens
  misc_RNA (1)...(19): siRNA sense strand
gguguggcuuuguccauug

SEQ ID NO: 733598 - RNA, 19 nt, Homo sapiens
  misc_RNA (1)...(19): siRNA sense strand
aaacuuugggccuguaauu

SEQ ID NO: 733599 - RNA, 19 nt, Homo sapiens
  misc_RNA (1)...(19): siRNA sense strand
caagcagacauuccaaaga

SEQ ID NO: 733600 - RNA, 19 nt, Homo sapiens
  misc_RNA (1)...(19): siRNA sense strand
caaagagucccugcagaug

SEQ ID NO: 733601 - RNA, 19 nt, Homo sapiens
  misc_RNA (1)...(19): siRNA sense strand
aggcauaucugaggugaau

SEQ ID NO: 733602 - RNA, 19 nt, Homo sapiens
  misc_RNA (1)...(19): siRNA sense strand
ucaguuuccuccagcuuau

SEQ ID NO: 733603 - RNA, 19 nt, Homo sapiens
  misc_RNA (1)...(19): siRNA sense strand
ucaaagagucccugcagau

SEQ ID NO: 733604 - RNA, 19 nt, Homo sapiens
  misc_RNA (1)...(19): siRNA sense strand
gaucuccauuucuucaagu

SEQ ID NO: 733605 - RNA, 19 nt, Homo sapiens
  misc_RNA (1)...(19): siRNA sense strand
gguaaugggagauucuuuc

SEQ ID NO: 733606 - RNA, 19 nt, Homo sapiens
  misc_RNA (1)...(19): siRNA sense strand
cauggugguuggagaugaa

SEQ ID NO: 733607 - RNA, 19 nt, Homo sapiens
  misc_RNA (1)...(19): siRNA sense strand
ggauggugcagguucauga

SEQ ID NO: 733608 - RNA, 19 nt, Homo sapiens
  misc_RNA (1)...(19): siRNA sense strand
gcagccuguucacaagauu

SEQ ID NO: 733609 - RNA, 19 nt, Homo sapiens
  misc_RNA (1)...(19): siRNA sense strand
ccaguacucuuggauagca

SEQ ID NO: 733610 - RNA, 19 nt, Homo sapiens
  misc_RNA (1)...(19): siRNA sense strand
ggugcagguucaugagcua

SEQ ID NO: 733611 - RNA, 19 nt, Homo sapiens
  misc_RNA (1)...(19): siRNA sense strand
gcuucccgaugccacguua

SEQ ID NO: 733612 - RNA, 19 nt, Homo sapiens
  misc_RNA (1)...(19): siRNA sense strand
uccaguuugucacgcauua

SEQ ID NO: 733613 - RNA, 19 nt, Homo sapiens
  misc_RNA (1)...(19): siRNA sense strand
gugcuacuuuggacguaaa

SEQ ID NO: 733614 - RNA, 19 nt, Homo sapiens
  misc_RNA (1)...(19): siRNA sense strand
gggagauucuuucaacacu

SEQ ID NO: 733615 - RNA, 19 nt, Homo sapiens
  misc_RNA (1)...(19): siRNA sense strand
guaaugggagauucuuuca

SEQ ID NO: 733616 - RNA, 19 nt, Homo sapiens
  misc_RNA (1)...(19): siRNA sense strand
gaugcuugcuaaucgaaca

SEQ ID NO: 733617 - RNA, 19 nt, Homo sapiens
  misc_RNA (1)...(19): siRNA sense strand
acuggaggcuacaugguaa

SEQ ID NO: 733618 - RNA, 19 nt, Homo sapiens
  misc_RNA (1)...(19): siRNA sense strand
gaauuuugcugauggauac

SEQ ID NO: 733619 - RNA, 19 nt, Homo sapiens
  misc_RNA (1)...(19): siRNA sense strand
ggauagcagcagcauucua

SEQ ID NO: 733620 - RNA, 19 nt, Homo sapiens
  misc_RNA (1)...(19): siRNA sense strand
gaaagaacguccagaccua

SEQ ID NO: 733621 - RNA, 19 nt, Homo sapiens
  misc_RNA (1)...(19): siRNA sense strand
gcacauagaagcagcauuu

SEQ ID NO: 733622 - RNA, 19 nt, Homo sapiens
  misc_RNA (1)...(19): siRNA sense strand
gaaucaaccugccgaauug

SEQ ID NO: 733623 - RNA, 19 nt, Homo sapiens
  misc_RNA (1)...(19): siRNA sense strand
ggaugaugcucaagaaauu

SEQ ID NO: 733624 - RNA, 19 nt, Homo sapiens
  misc_RNA (1)...(19): siRNA sense strand
gcaaauacaggauauguug

SEQ ID NO: 733625 - RNA, 19 nt, Homo sapiens
  misc_RNA (1)...(19): siRNA sense strand
gaaccucacugaucuucuu

SEQ ID NO: 733626 - RNA, 19 nt, Homo sapiens
  misc_RNA (1)...(19): siRNA sense strand
gaaggaaucuccaaaaguu

SEQ ID NO: 733627 - RNA, 19 nt, Homo sapiens
  misc_RNA (1)...(19): siRNA sense strand
ggauuuaacugcaaagcaa

SEQ ID NO: 733628 - RNA, 19 nt, Homo sapiens
  misc_RNA (1)...(19): siRNA sense strand
gaaagauaaugcacgauuc

SEQ ID NO: 733629 - RNA, 19 nt, Homo sapiens
  misc_RNA (1)...(19): siRNA sense strand
gauccuacaucuacacuug

SEQ ID NO: 733630 - RNA, 19 nt, Homo sapiens
  misc_RNA (1)...(19): siRNA sense strand
gcugauggauacuuucuuu

SEQ ID NO: 733631 - RNA, 19 nt, Homo sapiens
  misc_RNA (1)...(19): siRNA sense strand
gaaaggaccguguguguca

SEQ ID NO: 733632 - RNA, 19 nt, Homo sapiens
  misc_RNA (1)...(19): siRNA sense strand
gcaaagcaaauacaggaua

SEQ ID NO: 733633 - RNA, 19 nt, Homo sapiens
  misc_RNA (1)...(19): siRNA sense strand
gagaugaaguguugugcaa

SEQ ID NO: 733634 - RNA, 19 nt, Homo sapiens
  misc_RNA (1)...(19): siRNA sense strand
cgacauaccuggaguucau

SEQ ID NO: 733635 - RNA, 19 nt, Homo sapiens
  misc_RNA (1)...(19): siRNA sense strand
caaagcaaauacaggauau

SEQ ID NO: 733636 - RNA, 19 nt, Homo sapiens
  misc_RNA (1)...(19): siRNA sense strand
ggcaugauauugagaaaga

SEQ ID NO: 733637 - RNA, 19 nt, Homo sapiens
  misc_RNA (1)...(19): siRNA sense strand
gauaaugcacgauucauga

SEQ ID NO: 733638 - RNA, 19 nt, Homo sapiens
  misc_RNA (1)...(19): siRNA sense strand
gagcacccauccuaacuga

SEQ ID NO: 733639 - RNA, 19 nt, Homo sapiens
  misc_RNA (1)...(19): siRNA sense strand
uaauggagauuuccgaaug

SEQ ID NO: 733640 - RNA, 19 nt, Homo sapiens
  misc_RNA (1)...(19): siRNA sense strand
aagcagacauuccaaagaa

SEQ ID NO: 733641 - RNA, 19 nt, Homo sapiens
  misc_RNA (1)...(19): siRNA sense strand
gaugaaguguugugcaaau

SEQ ID NO: 733642 - RNA, 19 nt, Homo sapiens
  misc_RNA (1)...(19): siRNA sense strand
acacaugccuggaggaaga

SEQ ID NO: 733643 - RNA, 19 nt, Homo sapiens
  misc_RNA (1)...(19): siRNA sense strand
gauaugaaccucacugauc

SEQ ID NO: 733644 - RNA, 19 nt, Homo sapiens
  misc_RNA (1)...(19): siRNA sense strand
gaagauugcaggagccauu

SEQ ID NO: 733645 - RNA, 19 nt, Homo sapiens
  misc_RNA (1)...(19): siRNA sense strand
acuaugagaugcuugcuaa

SEQ ID NO: 733646 - RNA, 19 nt, Homo sapiens
  misc_RNA (1)...(19): siRNA sense strand
gagauucuuucaacacuuc

SEQ ID NO: 733647 - RNA, 19 nt, Homo sapiens
  misc_RNA (1)...(19): siRNA sense strand
gaaggauggugcagguuca

SEQ ID NO: 733648 - RNA, 19 nt, Homo sapiens
  misc_RNA (1)...(19): siRNA sense strand
gggcagauguacagaguca

SEQ ID NO: 733649 - RNA, 19 nt, Homo sapiens
  misc_RNA (1)...(19): siRNA sense strand
cagaggagccauccaguuu

SEQ ID NO: 733650 - RNA, 19 nt, Homo sapiens
  misc_RNA (1)...(19): siRNA sense strand
gaaguguugugcaaaucuu

SEQ ID NO: 733651 - RNA, 19 nt, Homo sapiens
  misc_RNA (1)...(19): siRNA sense strand
gguuggagaugaauuaaag

SEQ ID NO: 733652 - RNA, 19 nt, Homo sapiens
  misc_RNA (1)...(19): siRNA sense strand
gcagcaggccaacuuguaa

SEQ ID NO: 733653 - RNA, 19 nt, Homo sapiens
  misc_RNA (1)...(19): siRNA sense strand
ucucuacucuuacuccuuu

SEQ ID NO: 733654 - RNA, 19 nt, Homo sapiens
  misc_RNA (1)...(19): siRNA sense strand
ccucugaucuuucucuaug

SEQ ID NO: 733655 - RNA, 19 nt, Homo sapiens
  misc_RNA (1)...(19): siRNA sense strand
agaccuaccuccuguacaa

SEQ ID NO: 733656 - RNA, 19 nt, Homo sapiens
  misc_RNA (1)...(19): siRNA sense strand
ggacaugcccgaguaugaa

SEQ ID NO: 733657 - RNA, 19 nt, Homo sapiens
  misc_RNA (1)...(19): siRNA sense strand
gauggauacuuucuuucaa

SEQ ID NO: 733658 - RNA, 19 nt, Homo sapiens
  misc_RNA (1)...(19): siRNA sense strand
gaggagccauccaguuugu

SEQ ID NO: 733659 - RNA, 19 nt, Homo sapiens
  misc_RNA (1)...(19): siRNA sense strand
caacacuucucucuucaag

SEQ ID NO: 733660 - RNA, 19 nt, Homo sapiens
  misc_RNA (1)...(19): siRNA sense strand
gucacugcauugauauuua

SEQ ID NO: 733661 - RNA, 19 nt, Homo sapiens
  misc_RNA (1)...(19): siRNA sense strand
ccaaggauuuaacugcaaa

SEQ ID NO: 733662 - RNA, 19 nt, Homo sapiens
  misc_RNA (1)...(19): siRNA sense strand
gcuaagcugugaaggaauc

SEQ ID NO: 733663 - RNA, 19 nt, Homo sapiens
  misc_RNA (1)...(19): siRNA sense strand
gccaggaucaugcuguuua

SEQ ID NO: 733664 - RNA, 19 nt, Homo sapiens
  misc_RNA (1)...(19): siRNA sense strand
gcuggaggcuacaagaaug

SEQ ID NO: 733665 - RNA, 19 nt, Homo sapiens
  misc_RNA (1)...(19): siRNA sense strand
caucucagacacacaauaa

SEQ ID NO: 733666 - RNA, 19 nt, Homo sapiens
  misc_RNA (1)...(19): siRNA sense strand
caguuuauguuccaucuga

SEQ ID NO: 733667 - RNA, 19 nt, Homo sapiens
  misc_RNA (1)...(19): siRNA sense strand
gcguaucucugaaugugaa

SEQ ID NO: 733668 - RNA, 19 nt, Homo sapiens
  misc_RNA (1)...(19): siRNA sense strand
uaacaacaguccugaugag

SEQ ID NO: 733669 - RNA, 19 nt, Homo sapiens
  misc_RNA (1)...(19): siRNA sense strand
ugaaucaaccugccgaauu

SEQ ID NO: 733670 - RNA, 19 nt, Homo sapiens
  misc_RNA (1)...(19): siRNA sense strand
gauagcagcagcauucuag

SEQ ID NO: 733671 - RNA, 19 nt, Homo sapiens
  misc_RNA (1)...(19): siRNA sense strand
gagccaggaucaugcuguu

SEQ ID NO: 733672 - RNA, 19 nt, Homo sapiens
  misc_RNA (1)...(19): siRNA sense strand
ggucugaucacauuuggaa

SEQ ID NO: 733673 - RNA, 19 nt, Homo sapiens
  misc_RNA (1)...(19): siRNA sense strand
caaccaagcacuaugagau

SEQ ID NO: 733674 - RNA, 19 nt, Homo sapiens
  misc_RNA (1)...(19): siRNA sense strand
aaagugaacccaucucaga

SEQ ID NO: 733675 - RNA, 19 nt, Homo sapiens
  misc_RNA (1)...(19): siRNA sense strand
caucuacacuuggcaucua

SEQ ID NO: 733676 - RNA, 19 nt, Homo sapiens
  misc_RNA (1)...(19): siRNA sense strand
acacuucucucuucaagca

SEQ ID NO: 733677 - RNA, 19 nt, Homo sapiens
  misc_RNA (1)...(19): siRNA sense strand
ggagauucuuucaacacuu

SEQ ID NO: 733678 - RNA, 19 nt, Homo sapiens
  misc_RNA (1)...(19): siRNA sense strand
ggugguuggagaugaauua

SEQ ID NO: 733679 - RNA, 19 nt, Homo sapiens
  misc_RNA (1)...(19): siRNA sense strand
gaaauugggcagauguaca

SEQ ID NO: 733680 - RNA, 19 nt, Homo sapiens
  misc_RNA (1)...(19): siRNA sense strand
guucuuggcaugauauuga

SEQ ID NO: 733681 - RNA, 19 nt, Homo sapiens
  misc_RNA (1)...(19): siRNA sense strand
gcagaggagccauccaguu

SEQ ID NO: 733682 - RNA, 19 nt, Homo sapiens
  misc_RNA (1)...(19): siRNA sense strand
uuucaacacuucucucuuc

SEQ ID NO: 733683 - RNA, 19 nt, Homo sapiens
  misc_RNA (1)...(19): siRNA sense strand
cacaauaaccuguaugcuu

SEQ ID NO: 733684 - RNA, 19 nt, Homo sapiens
  misc_RNA (1)...(19): siRNA sense strand
gacaguauaacaaagaaga

SEQ ID NO: 733685 - RNA, 19 nt, Homo sapiens
  misc_RNA (1)...(19): siRNA sense strand
gagccaguacucuuggaua

SEQ ID NO: 733686 - RNA, 19 nt, Homo sapiens
  misc_RNA (1)...(19): siRNA sense strand
agaaagauaaugcacgauu

SEQ ID NO: 733687 - RNA, 19 nt, Homo sapiens
  misc_RNA (1)...(19): siRNA sense strand
ggucacugcauugauauuu

SEQ ID NO: 733688 - RNA, 19 nt, Homo sapiens
  misc_RNA (1)...(19): siRNA sense strand
ucgaacagcugcaaauggu

SEQ ID NO: 733689 - RNA, 19 nt, Homo sapiens
  misc_RNA (1)...(19): siRNA sense strand
gcauaucugaggugaauca

SEQ ID NO: 733690 - RNA, 19 nt, Homo sapiens
  misc_RNA (1)...(19): siRNA sense strand
cgacaacucauccgacugu

SEQ ID NO: 733691 - RNA, 19 nt, Homo sapiens
  misc_RNA (1)...(19): siRNA sense strand
aauaugaaccugugcuuug

SEQ ID NO: 733692 - RNA, 19 nt, Homo sapiens
  misc_RNA (1)...(19): siRNA sense strand
gcauggugguuggagauga

SEQ ID NO: 733693 - RNA, 19 nt, Homo sapiens
  misc_RNA (1)...(19): siRNA sense strand
ucacaagauugauaugaac

SEQ ID NO: 733694 - RNA, 19 nt, Homo sapiens
  misc_RNA (1)...(19): siRNA sense strand
gacacacaauaaccuguau

SEQ ID NO: 733695 - RNA, 19 nt, Homo sapiens
  misc_RNA (1)...(19): siRNA sense strand
uagguuaucagauuccuuu

SEQ ID NO: 733696 - RNA, 19 nt, Homo sapiens
  misc_RNA (1)...(19): siRNA sense strand
ggcauuuggugcuacuuug

SEQ ID NO: 733697 - RNA, 19 nt, Homo sapiens
  misc_RNA (1)...(19): siRNA sense strand
gguguggcuuuguccauug

SEQ ID NO: 733698 - RNA, 19 nt, Homo sapiens
  misc_RNA (1)...(19): siRNA sense strand
aaacuuugggccuguaauu

SEQ ID NO: 733699 - RNA, 19 nt, Homo sapiens
  misc_RNA (1)...(19): siRNA sense strand
caagcagacauuccaaaga

SEQ ID NO: 733700 - RNA, 19 nt, Homo sapiens
  misc_RNA (1)...(19): siRNA sense strand
caaagagucccugcagaug

SEQ ID NO: 733701 - RNA, 19 nt, Homo sapiens
  misc_RNA (1)...(19): siRNA sense strand
aggcauaucugaggugaau

SEQ ID NO: 733702 - RNA, 19 nt, Homo sapiens
  misc_RNA (1)...(19): siRNA sense strand
ucaguuuccuccagcuuau

SEQ ID NO: 733703 - RNA, 19 nt, Homo sapiens
  misc_RNA (1)...(19): siRNA sense strand
ucaaagagucccugcagau

SEQ ID NO: 733704 - RNA, 19 nt, Homo sapiens
  misc_RNA (1)...(19): siRNA sense strand
gaucuccauuucuucaagu

SEQ ID NO: 733705 - RNA, 19 nt, Homo sapiens
  misc_RNA (1)...(19): siRNA sense strand
gguaaugggagauucuuuc

SEQ ID NO: 733706 - RNA, 19 nt, Homo sapiens
  misc_RNA (1)...(19): siRNA sense strand
cauggugguuggagaugaa

SEQ ID NO: 733707 - RNA, 19 nt, Homo sapiens
  misc_RNA (1)...(19): siRNA sense strand
ggauggugcagguucauga

SEQ ID NO: 733708 - RNA, 19 nt, Homo sapiens
  misc_RNA (1)...(19): siRNA sense strand
gcagccuguucacaagauu

SEQ ID NO: 733709 - RNA, 19 nt, Homo sapiens
  misc_RNA (1)...(19): siRNA sense strand
ccaguacucuuggauagca

SEQ ID NO: 733710 - RNA, 19 nt, Homo sapiens
  misc_RNA (1)...(19): siRNA sense strand
ggugcagguucaugagcua

SEQ ID NO: 733711 - RNA, 19 nt, Homo sapiens
  misc_RNA (1)...(19): siRNA sense strand
gcuucccgaugccacguua

SEQ ID NO: 733712 - RNA, 19 nt, Homo sapiens
  misc_RNA (1)...(19): siRNA sense strand
uccaguuugucacgcauua

SEQ ID NO: 733713 - RNA, 19 nt, Homo sapiens
  misc_RNA (1)...(19): siRNA sense strand
gugcuacuuuggacguaaa

SEQ ID NO: 733714 - RNA, 19 nt, Homo sapiens
  misc_RNA (1)...(19): siRNA sense strand
gggagauucuuucaacacu

SEQ ID NO: 733715 - RNA, 19 nt, Homo sapiens
  misc_RNA (1)...(19): siRNA sense strand
guaaugggagauucuuuca

SEQ ID NO: 733716 - RNA, 19 nt, Homo sapiens
  misc_RNA (1)...(19): siRNA sense strand
gaugcuugcuaaucgaaca

SEQ ID NO: 733717 - RNA, 19 nt, Homo sapiens
  misc_RNA (1)...(19): siRNA sense strand
acuggaggcuacaugguaa

SEQ ID NO: 733718 - RNA, 19 nt, Homo sapiens
  misc_RNA (1)...(19): siRNA sense strand
gaauuuugcugauggauac

SEQ ID NO: 733719 - RNA, 19 nt, Homo sapiens
  misc_RNA (1)...(19): siRNA sense strand
ggauagcagcagcauucua

SEQ ID NO: 733720 - RNA, 19 nt, Homo sapiens
  misc_RNA (1)...(19): siRNA sense strand
gaaagaacguccagaccua

SEQ ID NO: 733721 - RNA, 19 nt, Homo sapiens
  misc_RNA (1)...(19): siRNA sense strand
gcacauagaagcagcauuu

SEQ ID NO: 733722 - RNA, 19 nt, Homo sapiens
  misc_RNA (1)...(19): siRNA sense strand
gaaucaaccugccgaauug

SEQ ID NO: 733723 - RNA, 19 nt, Homo sapiens
  misc_RNA (1)...(19): siRNA sense strand
ggaugaugcucaagaaauu

SEQ ID NO: 733724 - RNA, 19 nt, Homo sapiens
  misc_RNA (1)...(19): siRNA sense strand
gcaaauacaggauauguug

SEQ ID NO: 733725 - RNA, 19 nt, Homo sapiens
  misc_RNA (1)...(19): siRNA sense strand
gaaccucacugaucuucuu

SEQ ID NO: 733726 - RNA, 19 nt, Homo sapiens
  misc_RNA (1)...(19): siRNA sense strand
gaaggaaucuccaaaaguu

SEQ ID NO: 733727 - RNA, 19 nt, Homo sapiens
  misc_RNA (1)...(19): siRNA sense strand
ggauuuaacugcaaagcaa

SEQ ID NO: 733728 - RNA, 19 nt, Homo sapiens
  misc_RNA (1)...(19): siRNA sense strand
gaaagauaaugcacgauuc

SEQ ID NO: 733729 - RNA, 19 nt, Homo sapiens
  misc_RNA (1)...(19): siRNA sense strand
gauccuacaucuacacuug

SEQ ID NO: 733730 - RNA, 19 nt, Homo sapiens
  misc_RNA (1)...(19): siRNA sense strand
gcugauggauacuuucuuu

SEQ ID NO: 733731 - RNA, 19 nt, Homo sapiens
  misc_RNA (1)...(19): siRNA sense strand
gaaaggaccguguguguca

SEQ ID NO: 733732 - RNA, 19 nt, Homo sapiens
  misc_RNA (1)...(19): siRNA sense strand
gcaaagcaaauacaggaua

SEQ ID NO: 733733 - RNA, 19 nt, Homo sapiens
  misc_RNA (1)...(19): siRNA sense strand
gagaugaaguguugugcaa

SEQ ID NO: 733734 - RNA, 19 nt, Homo sapiens
  misc_RNA (1)...(19): siRNA sense strand
cgacauaccuggaguucau

SEQ ID NO: 733735 - RNA, 19 nt, Homo sapiens
  misc_RNA (1)...(19): siRNA sense strand
caaagcaaauacaggauau

SEQ ID NO: 733736 - RNA, 19 nt, Homo sapiens
  misc_RNA (1)...(19): siRNA sense strand
ggcaugauauugagaaaga

SEQ ID NO: 733737 - RNA, 19 nt, Homo sapiens
  misc_RNA (1)...(19): siRNA sense strand
gauaaugcacgauucauga

SEQ ID NO: 733738 - RNA, 19 nt, Homo sapiens
  misc_RNA (1)...(19): siRNA sense strand
gagcacccauccuaacuga

SEQ ID NO: 733739 - RNA, 19 nt, Homo sapiens
  misc_RNA (1)...(19): siRNA sense strand
uaauggagauuuccgaaug

SEQ ID NO: 733740 - RNA, 19 nt, Homo sapiens
  misc_RNA (1)...(19): siRNA sense strand
aagcagacauuccaaagaa

SEQ ID NO: 733741 - RNA, 19 nt, Homo sapiens
  misc_RNA (1)...(19): siRNA sense strand
gaugaaguguugugcaaau

SEQ ID NO: 733742 - RNA, 19 nt, Homo sapiens
  misc_RNA (1)...(19): siRNA sense strand
acacaugccuggaggaaga

SEQ ID NO: 733743 - RNA, 19 nt, Homo sapiens
  misc_RNA (1)...(19): siRNA sense strand
gauaugaaccucacugauc

SEQ ID NO: 733744 - RNA, 19 nt, Homo sapiens
  misc_RNA (1)...(19): siRNA sense strand
gaagauugcaggagccauu

SEQ ID NO: 733745 - RNA, 19 nt, Homo sapiens
  misc_RNA (1)...(19): siRNA sense strand
acuaugagaugcuugcuaa

SEQ ID NO: 733746 - RNA, 19 nt, Homo sapiens
  misc_RNA (1)...(19): siRNA sense strand
gagauucuuucaacacuuc

SEQ ID NO: 733747 - RNA, 19 nt, Homo sapiens
  misc_RNA (1)...(19): siRNA sense strand
gaaggauggugcagguuca

SEQ ID NO: 733748 - RNA, 19 nt, Homo sapiens
  misc_RNA (1)...(19): siRNA sense strand
gggcagauguacagaguca

SEQ ID NO: 733749 - RNA, 19 nt, Homo sapiens
  misc_RNA (1)...(19): siRNA sense strand
cagaggagccauccaguuu

SEQ ID NO: 733750 - RNA, 19 nt, Homo sapiens
  misc_RNA (1)...(19): siRNA sense strand
gaaguguugugcaaaucuu

SEQ ID NO: 733751 - RNA, 19 nt, Homo sapiens
  misc_RNA (1)...(19): siRNA sense strand
gguuggagaugaauuaaag

SEQ ID NO: 733752 - RNA, 19 nt, Homo sapiens
  misc_RNA (1)...(19): siRNA sense strand
gcagcaggccaacuuguaa

SEQ ID NO: 733753 - RNA, 19 nt, Homo sapiens
  misc_RNA (1)...(19): siRNA sense strand
ucucuacucuuacuccuuu

SEQ ID NO: 733754 - RNA, 19 nt, Homo sapiens
  misc_RNA (1)...(19): siRNA sense strand
ccucugaucuuucucuaug

SEQ ID NO: 733755 - RNA, 19 nt, Homo sapiens
  misc_RNA (1)...(19): siRNA sense strand
agaccuaccuccuguacaa

SEQ ID NO: 733756 - RNA, 19 nt, Homo sapiens
  misc_RNA (1)...(19): siRNA sense strand
ggacaugcccgaguaugaa

SEQ ID NO: 733757 - RNA, 19 nt, Homo sapiens
  misc_RNA (1)...(19): siRNA sense strand
gauggauacuuucuuucaa

SEQ ID NO: 733758 - RNA, 19 nt, Homo sapiens
  misc_RNA (1)...(19): siRNA sense strand
gaggagccauccaguuugu

SEQ ID NO: 733759 - RNA, 19 nt, Homo sapiens
  misc_RNA (1)...(19): siRNA sense strand
caacacuucucucuucaag

SEQ ID NO: 733760 - RNA, 19 nt, Homo sapiens
  misc_RNA (1)...(19): siRNA sense strand
gucacugcauugauauuua

SEQ ID NO: 733761 - RNA, 19 nt, Homo sapiens
  misc_RNA (1)...(19): siRNA sense strand
ccaaggauuuaacugcaaa

SEQ ID NO: 733762 - RNA, 19 nt, Homo sapiens
  misc_RNA (1)...(19): siRNA sense strand
gcuaagcugugaaggaauc

SEQ ID NO: 733763 - RNA, 19 nt, Homo sapiens
  misc_RNA (1)...(19): siRNA sense strand
gccaggaucaugcuguuua

SEQ ID NO: 733764 - RNA, 19 nt, Homo sapiens
  misc_RNA (1)...(19): siRNA sense strand
gcuggaggcuacaagaaug

SEQ ID NO: 733765 - RNA, 19 nt, Homo sapiens
  misc_RNA (1)...(19): siRNA sense strand
caucucagacacacaauaa

SEQ ID NO: 733766 - RNA, 19 nt, Homo sapiens
  misc_RNA (1)...(19): siRNA sense strand
caguuuauguuccaucuga

SEQ ID NO: 733767 - RNA, 19 nt, Homo sapiens
  misc_RNA (1)...(19): siRNA sense strand
gcguaucucugaaugugaa

SEQ ID NO: 733768 - RNA, 19 nt, Homo sapiens
  misc_RNA (1)...(19): siRNA sense strand
uaacaacaguccugaugag

SEQ ID NO: 733769 - RNA, 19 nt, Homo sapiens
  misc_RNA (1)...(19): siRNA sense strand
ugaaucaaccugccgaauu

SEQ ID NO: 733770 - RNA, 19 nt, Homo sapiens
  misc_RNA (1)...(19): siRNA sense strand
gauagcagcagcauucuag

SEQ ID NO: 733771 - RNA, 19 nt, Homo sapiens
  misc_RNA (1)...(19): siRNA sense strand
gagccaggaucaugcuguu

SEQ ID NO: 733772 - RNA, 19 nt, Homo sapiens
  misc_RNA (1)...(19): siRNA sense strand
ggucugaucacauuuggaa

SEQ ID NO: 733773 - RNA, 19 nt, Homo sapiens
  misc_RNA (1)...(19): siRNA sense strand
caaccaagcacuaugagau

SEQ ID NO: 733774 - RNA, 19 nt, Homo sapiens
  misc_RNA (1)...(19): siRNA sense strand
aaagugaacccaucucaga

SEQ ID NO: 733775 - RNA, 19 nt, Homo sapiens
  misc_RNA (1)...(19): siRNA sense strand
caucuacacuuggcaucua

SEQ ID NO: 733776 - RNA, 19 nt, Homo sapiens
  misc_RNA (1)...(19): siRNA sense strand
acacuucucucuucaagca

SEQ ID NO: 733777 - RNA, 19 nt, Homo sapiens
  misc_RNA (1)...(19): siRNA sense strand
ggagauucuuucaacacuu

SEQ ID NO: 733778 - RNA, 19 nt, Homo sapiens
  misc_RNA (1)...(19): siRNA sense strand
ggugguuggagaugaauua

SEQ ID NO: 733779 - RNA, 19 nt, Homo sapiens
  misc_RNA (1)...(19): siRNA sense strand
gaaauugggcagauguaca

SEQ ID NO: 733780 - RNA, 19 nt, Homo sapiens
  misc_RNA (1)...(19): siRNA sense strand
guucuuggcaugauauuga

SEQ ID NO: 733781 - RNA, 19 nt, Homo sapiens
  misc_RNA (1)...(19): siRNA sense strand
gcagaggagccauccaguu

SEQ ID NO: 733782 - RNA, 19 nt, Homo sapiens
  misc_RNA (1)...(19): siRNA sense strand
uuucaacacuucucucuuc

SEQ ID NO: 733783 - RNA, 19 nt, Homo sapiens
  misc_RNA (1)...(19): siRNA sense strand
cacaauaaccuguaugcuu

SEQ ID NO: 733784 - RNA, 19 nt, Homo sapiens
  misc_RNA (1)...(19): siRNA sense strand
gacaguauaacaaagaaga

SEQ ID NO: 733785 - RNA, 19 nt, Homo sapiens
  misc_RNA (1)...(19): siRNA sense strand
gagccaguacucuuggaua

SEQ ID NO: 733786 - RNA, 19 nt, Homo sapiens
  misc_RNA (1)...(19): siRNA sense strand
agaaagauaaugcacgauu

SEQ ID NO: 733787 - RNA, 19 nt, Homo sapiens
  misc_RNA (1)...(19): siRNA sense strand
ggucacugcauugauauuu

SEQ ID NO: 733788 - RNA, 19 nt, Homo sapiens
  misc_RNA (1)...(19): siRNA sense strand
ucgaacagcugcaaauggu

SEQ ID NO: 733789 - RNA, 19 nt, Homo sapiens
  misc_RNA (1)...(19): siRNA sense strand
gcauaucugaggugaauca

SEQ ID NO: 733790 - RNA, 19 nt, Homo sapiens
  misc_RNA (1)...(19): siRNA sense strand
cgacaacucauccgacugu

SEQ ID NO: 733791 - RNA, 19 nt, Homo sapiens
  misc_RNA (1)...(19): siRNA sense strand
aauaugaaccugugcuuug

SEQ ID NO: 733792 - RNA, 19 nt, Homo sapiens
  misc_RNA (1)...(19): siRNA sense strand
gcauggugguuggagauga

SEQ ID NO: 733793 - RNA, 19 nt, Homo sapiens
  misc_RNA (1)...(19): siRNA sense strand
ucacaagauugauaugaac

SEQ ID NO: 733794 - RNA, 19 nt, Homo sapiens
  misc_RNA (1)...(19): siRNA sense strand
gacacacaauaaccuguau

SEQ ID NO: 733795 - RNA, 19 nt, Homo sapiens
  misc_RNA (1)...(19): siRNA sense strand
uagguuaucagauuccuuu

SEQ ID NO: 733796 - RNA, 19 nt, Homo sapiens
  misc_RNA (1)...(19): siRNA sense strand
ggcauuuggugcuacuuug

SEQ ID NO: 733797 - RNA, 19 nt, Homo sapiens
  misc_RNA (1)...(19): siRNA sense strand
gguguggcuuuguccauug

SEQ ID NO: 733798 - RNA, 19 nt, Homo sapiens
  misc_RNA (1)...(19): siRNA sense strand
aaacuuugggccuguaauu

SEQ ID NO: 733799 - RNA, 19 nt, Homo sapiens
  misc_RNA (1)...(19): siRNA sense strand
caagcagacauuccaaaga

SEQ ID NO: 733800 - RNA, 19 nt, Homo sapiens
  misc_RNA (1)...(19): siRNA sense strand
caaagagucccugcagaug

SEQ ID NO: 733801 - RNA, 19 nt, Homo sapiens
  misc_RNA (1)...(19): siRNA sense strand
aggcauaucugaggugaau

SEQ ID NO: 733802 - RNA, 19 nt, Homo sapiens
  misc_RNA (1)...(19): siRNA sense strand
ucaguuuccuccagcuuau

SEQ ID NO: 733803 - RNA, 19 nt, Homo sapiens
  misc_RNA (1)...(19): siRNA sense strand
ucaaagagucccugcagau

SEQ ID NO: 733804 - RNA, 19 nt, Homo sapiens
  misc_RNA (1)...(19): siRNA sense strand
gaucuccauuucuucaagu

SEQ ID NO: 733805 - RNA, 19 nt, Homo sapiens
  misc_RNA (1)...(19): siRNA sense strand
gguaaugggagauucuuuc

SEQ ID NO: 733806 - RNA, 19 nt, Homo sapiens
  misc_RNA (1)...(19): siRNA sense strand
cauggugguuggagaugaa

SEQ ID NO: 733807 - RNA, 19 nt, Homo sapiens
  misc_RNA (1)...(19): siRNA sense strand
ggauggugcagguucauga

SEQ ID NO: 733808 - RNA, 19 nt, Homo sapiens
  misc_RNA (1)...(19): siRNA sense strand
gcagccuguucacaagauu

SEQ ID NO: 733809 - RNA, 19 nt, Homo sapiens
  misc_RNA (1)...(19): siRNA sense strand
ccaguacucuuggauagca

SEQ ID NO: 733810 - RNA, 19 nt, Homo sapiens
  misc_RNA (1)...(19): siRNA sense strand
ggugcagguucaugagcua

SEQ ID NO: 733811 - RNA, 19 nt, Homo sapiens
  misc_RNA (1)...(19): siRNA sense strand
gcuucccgaugccacguua

SEQ ID NO: 733812 - RNA, 19 nt, Homo sapiens
  misc_RNA (1)...(19): siRNA sense strand
uccaguuugucacgcauua

SEQ ID NO: 733813 - RNA, 19 nt, Homo sapiens
  misc_RNA (1)...(19): siRNA sense strand
gugcuacuuuggacguaaa

SEQ ID NO: 733814 - RNA, 19 nt, Homo sapiens
  misc_RNA (1)...(19): siRNA sense strand
gggagauucuuucaacacu

SEQ ID NO: 733815 - RNA, 19 nt, Homo sapiens
  misc_RNA (1)...(19): siRNA sense strand
guaaugggagauucuuuca

SEQ ID NO: 733816 - RNA, 19 nt, Homo sapiens
  misc_RNA (1)...(19): siRNA sense strand
gaugcuugcuaaucgaaca

SEQ ID NO: 733817 - RNA, 19 nt, Homo sapiens
  misc_RNA (1)...(19): siRNA sense strand
acuggaggcuacaugguaa

SEQ ID NO: 733818 - RNA, 19 nt, Homo sapiens
  misc_RNA (1)...(19): siRNA sense strand
gaauuuugcugauggauac

SEQ ID NO: 733819 - RNA, 19 nt, Homo sapiens
  misc_RNA (1)...(19): siRNA sense strand
ggauagcagcagcauucua

SEQ ID NO: 733820 - RNA, 19 nt, Homo sapiens
  misc_RNA (1)...(19): siRNA sense strand
gaaagaacguccagaccua

SEQ ID NO: 733821 - RNA, 19 nt, Homo sapiens
  misc_RNA (1)...(19): siRNA sense strand
gcacauagaagcagcauuu

SEQ ID NO: 733822 - RNA, 19 nt, Homo sapiens
  misc_RNA (1)...(19): siRNA sense strand
gaaucaaccugccgaauug

SEQ ID NO: 733823 - RNA, 19 nt, Homo sapiens
  misc_RNA (1)...(19): siRNA sense strand
ggaugaugcucaagaaauu

SEQ ID NO: 733824 - RNA, 19 nt, Homo sapiens
  misc_RNA (1)...(19): siRNA sense strand
gcaaauacaggauauguug

SEQ ID NO: 733825 - RNA, 19 nt, Homo sapiens
  misc_RNA (1)...(19): siRNA sense strand
gaaccucacugaucuucuu

SEQ ID NO: 733826 - RNA, 19 nt, Homo sapiens
  misc_RNA (1)...(19): siRNA sense strand
gaaggaaucuccaaaaguu

SEQ ID NO: 733827 - RNA, 19 nt, Homo sapiens
  misc_RNA (1)...(19): siRNA sense strand
ggauuuaacugcaaagcaa

SEQ ID NO: 733828 - RNA, 19 nt, Homo sapiens
  misc_RNA (1)...(19): siRNA sense strand
gaaagauaaugcacgauuc

SEQ ID NO: 733829 - RNA, 19 nt, Homo sapiens
  misc_RNA (1)...(19): siRNA sense strand
gauccuacaucuacacuug

SEQ ID NO: 733830 - RNA, 19 nt, Homo sapiens
  misc_RNA (1)...(19): siRNA sense strand
gcugauggauacuuucuuu

SEQ ID NO: 733831 - RNA, 19 nt, Homo sapiens
  misc_RNA (1)...(19): siRNA sense strand
gaaaggaccguguguguca

SEQ ID NO: 733832 - RNA, 19 nt, Homo sapiens
  misc_RNA (1)...(19): siRNA sense strand
gcaaagcaaauacaggaua

SEQ ID NO: 733833 - RNA, 19 nt, Homo sapiens
  misc_RNA (1)...(19): siRNA sense strand
gagaugaaguguugugcaa

SEQ ID NO: 733834 - RNA, 19 nt, Homo sapiens
  misc_RNA (1)...(19): siRNA sense strand
cgacauaccuggaguucau

SEQ ID NO: 733835 - RNA, 19 nt, Homo sapiens
  misc_RNA (1)...(19): siRNA sense strand
caaagcaaauacaggauau

SEQ ID NO: 733836 - RNA, 19 nt, Homo sapiens
  misc_RNA (1)...(19): siRNA sense strand
ggcaugauauugagaaaga

SEQ ID NO: 733837 - RNA, 19 nt, Homo sapiens
  misc_RNA (1)...(19): siRNA sense strand
gauaaugcacgauucauga

SEQ ID NO: 733838 - RNA, 19 nt, Homo sapiens
  misc_RNA (1)...(19): siRNA sense strand
gagcacccauccuaacuga

SEQ ID NO: 733839 - RNA, 19 nt, Homo sapiens
  misc_RNA (1)...(19): siRNA sense strand
uaauggagauuuccgaaug

SEQ ID NO: 733840 - RNA, 19 nt, Homo sapiens
  misc_RNA (1)...(19): siRNA sense strand
aagcagacauuccaaagaa

SEQ ID NO: 733841 - RNA, 19 nt, Homo sapiens
  misc_RNA (1)...(19): siRNA sense strand
gaugaaguguugugcaaau

SEQ ID NO: 733842 - RNA, 19 nt, Homo sapiens
  misc_RNA (1)...(19): siRNA sense strand
acacaugccuggaggaaga

SEQ ID NO: 733843 - RNA, 19 nt, Homo sapiens
  misc_RNA (1)...(19): siRNA sense strand
gauaugaaccucacugauc

SEQ ID NO: 733844 - RNA, 19 nt, Homo sapiens
  misc_RNA (1)...(19): siRNA sense strand
gaagauugcaggagccauu

SEQ ID NO: 733845 - RNA, 19 nt, Homo sapiens
  misc_RNA (1)...(19): siRNA sense strand
acuaugagaugcuugcuaa

SEQ ID NO: 733846 - RNA, 19 nt, Homo sapiens
  misc_RNA (1)...(19): siRNA sense strand
gagauucuuucaacacuuc

SEQ ID NO: 733847 - RNA, 19 nt, Homo sapiens
  misc_RNA (1)...(19): siRNA sense strand
gaaggauggugcagguuca

SEQ ID NO: 733848 - RNA, 19 nt, Homo sapiens
  misc_RNA (1)...(19): siRNA sense strand
gggcagauguacagaguca

SEQ ID NO: 733849 - RNA, 19 nt, Homo sapiens
  misc_RNA (1)...(19): siRNA sense strand
cagaggagccauccaguuu

SEQ ID NO: 733850 - RNA, 19 nt, Homo sapiens
  misc_RNA (1)...(19): siRNA sense strand
gaaguguugugcaaaucuu

SEQ ID NO: 733851 - RNA, 19 nt, Homo sapiens
  misc_RNA (1)...(19): siRNA sense strand
gguuggagaugaauuaaag

SEQ ID NO: 733852 - RNA, 19 nt, Homo sapiens
  misc_RNA (1)...(19): siRNA sense strand
gcagcaggccaacuuguaa

SEQ ID NO: 733853 - RNA, 19 nt, Homo sapiens
  misc_RNA (1)...(19): siRNA sense strand
ucucuacucuuacuccuuu

SEQ ID NO: 733854 - RNA, 19 nt, Homo sapiens
  misc_RNA (1)...(19): siRNA sense strand
ccucugaucuuucucuaug

SEQ ID NO: 733855 - RNA, 19 nt, Homo sapiens
  misc_RNA (1)...(19): siRNA sense strand
agaccuaccuccuguacaa

SEQ ID NO: 733856 - RNA, 19 nt, Homo sapiens
  misc_RNA (1)...(19): siRNA sense strand
ggacaugcccgaguaugaa

SEQ ID NO: 733857 - RNA, 19 nt, Homo sapiens
  misc_RNA (1)...(19): siRNA sense strand
gauggauacuuucuuucaa

SEQ ID NO: 733858 - RNA, 19 nt, Homo sapiens
  misc_RNA (1)...(19): siRNA sense strand
gaggagccauccaguuugu

SEQ ID NO: 733859 - RNA, 19 nt, Homo sapiens
  misc_RNA (1)...(19): siRNA sense strand
caacacuucucucuucaag

SEQ ID NO: 733860 - RNA, 19 nt, Homo sapiens
  misc_RNA (1)...(19): siRNA sense strand
gucacugcauugauauuua

SEQ ID NO: 733861 - RNA, 19 nt, Homo sapiens
  misc_RNA (1)...(19): siRNA sense strand
ccaaggauuuaacugcaaa

SEQ ID NO: 733862 - RNA, 19 nt, Homo sapiens
  misc_RNA (1)...(19): siRNA sense strand
gcuaagcugugaaggaauc

SEQ ID NO: 733863 - RNA, 19 nt, Homo sapiens
  misc_RNA (1)...(19): siRNA sense strand
gccaggaucaugcuguuua

SEQ ID NO: 733864 - RNA, 19 nt, Homo sapiens
  misc_RNA (1)...(19): siRNA sense strand
gcuggaggcuacaagaaug

SEQ ID NO: 733865 - RNA, 19 nt, Homo sapiens
  misc_RNA (1)...(19): siRNA sense strand
caucucagacacacaauaa

SEQ ID NO: 733866 - RNA, 19 nt, Homo sapiens
  misc_RNA (1)...(19): siRNA sense strand
caguuuauguuccaucuga

SEQ ID NO: 733867 - RNA, 19 nt, Homo sapiens
  misc_RNA (1)...(19): siRNA sense strand
gcguaucucugaaugugaa

SEQ ID NO: 733868 - RNA, 19 nt, Homo sapiens
  misc_RNA (1)...(19): siRNA sense strand
uaacaacaguccugaugag

SEQ ID NO: 733869 - RNA, 19 nt, Homo sapiens
  misc_RNA (1)...(19): siRNA sense strand
ugaaucaaccugccgaauu

SEQ ID NO: 733870 - RNA, 19 nt, Homo sapiens
  misc_RNA (1)...(19): siRNA sense strand
gauagcagcagcauucuag

SEQ ID NO: 733871 - RNA, 19 nt, Homo sapiens
  misc_RNA (1)...(19): siRNA sense strand
gagccaggaucaugcuguu

SEQ ID NO: 733872 - RNA, 19 nt, Homo sapiens
  misc_RNA (1)...(19): siRNA sense strand
ggucugaucacauuuggaa

SEQ ID NO: 733873 - RNA, 19 nt, Homo sapiens
  misc_RNA (1)...(19): siRNA sense strand
caaccaagcacuaugagau

SEQ ID NO: 733874 - RNA, 19 nt, Homo sapiens
  misc_RNA (1)...(19): siRNA sense strand
aaagugaacccaucucaga

SEQ ID NO: 733875 - RNA, 19 nt, Homo sapiens
  misc_RNA (1)...(19): siRNA sense strand
caucuacacuuggcaucua

SEQ ID NO: 733876 - RNA, 19 nt, Homo sapiens
  misc_RNA (1)...(19): siRNA sense strand
acacuucucucuucaagca

SEQ ID NO: 733877 - RNA, 19 nt, Homo sapiens
  misc_RNA (1)...(19): siRNA sense strand
ggagauucuuucaacacuu

SEQ ID NO: 733878 - RNA, 19 nt, Homo sapiens
  misc_RNA (1)...(19): siRNA sense strand
ggugguuggagaugaauua

SEQ ID NO: 733879 - RNA, 19 nt, Homo sapiens
  misc_RNA (1)...(19): siRNA sense strand
gaaauugggcagauguaca

SEQ ID NO: 733880 - RNA, 19 nt, Homo sapiens
  misc_RNA (1)...(19): siRNA sense strand
guucuuggcaugauauuga

SEQ ID NO: 733881 - RNA, 19 nt, Homo sapiens
  misc_RNA (1)...(19): siRNA sense strand
gcagaggagccauccaguu

SEQ ID NO: 733882 - RNA, 19 nt, Homo sapiens
  misc_RNA (1)...(19): siRNA sense strand
uuucaacacuucucucuuc

SEQ ID NO: 733883 - RNA, 19 nt, Homo sapiens
  misc_RNA (1)...(19): siRNA sense strand
cacaauaaccuguaugcuu

SEQ ID NO: 733884 - RNA, 19 nt, Homo sapiens
  misc_RNA (1)...(19): siRNA sense strand
gacaguauaacaaagaaga

SEQ ID NO: 733885 - RNA, 19 nt, Homo sapiens
  misc_RNA (1)...(19): siRNA sense strand
gagccaguacucuuggaua

SEQ ID NO: 733886 - RNA, 19 nt, Homo sapiens
  misc_RNA (1)...(19): siRNA sense strand
agaaagauaaugcacgauu

SEQ ID NO: 733887 - RNA, 19 nt, Homo sapiens
  misc_RNA (1)...(19): siRNA sense strand
ggucacugcauugauauuu

SEQ ID NO: 733888 - RNA, 19 nt, Homo sapiens
  misc_RNA (1)...(19): siRNA sense strand
ucgaacagcugcaaauggu

SEQ ID NO: 733889 - RNA, 19 nt, Homo sapiens
  misc_RNA (1)...(19): siRNA sense strand
gcauaucugaggugaauca

SEQ ID NO: 733890 - RNA, 19 nt, Homo sapiens
  misc_RNA (1)...(19): siRNA sense strand
cgacaacucauccgacugu

SEQ ID NO: 733891 - RNA, 19 nt, Homo sapiens
  misc_RNA (1)...(19): siRNA sense strand
aauaugaaccugugcuuug

SEQ ID NO: 733892 - RNA, 19 nt, Homo sapiens
  misc_RNA (1)...(19): siRNA sense strand
gcauggugguuggagauga

SEQ ID NO: 733893 - RNA, 19 nt, Homo sapiens
  misc_RNA (1)...(19): siRNA sense strand
ucacaagauugauaugaac

SEQ ID NO: 733894 - RNA, 19 nt, Homo sapiens
  misc_RNA (1)...(19): siRNA sense strand
gacacacaauaaccuguau

SEQ ID NO: 733895 - RNA, 19 nt, Homo sapiens
  misc_RNA (1)...(19): siRNA sense strand
uagguuaucagauuccuuu

SEQ ID NO: 733896 - RNA, 19 nt, Homo sapiens
  misc_RNA (1)...(19): siRNA sense strand
ggcauuuggugcuacuuug

SEQ ID NO: 733897 - RNA, 19 nt, Homo sapiens
  misc_RNA (1)...(19): siRNA sense strand
gguguggcuuuguccauug

SEQ ID NO: 733898 - RNA, 19 nt, Homo sapiens
  misc_RNA (1)...(19): siRNA sense strand
aaacuuugggccuguaauu

SEQ ID NO: 733899 - RNA, 19 nt, Homo sapiens
  misc_RNA (1)...(19): siRNA sense strand
caagcagacauuccaaaga

SEQ ID NO: 733900 - RNA, 19 nt, Homo sapiens
  misc_RNA (1)...(19): siRNA sense strand
caaagagucccugcagaug

SEQ ID NO: 733901 - RNA, 19 nt, Homo sapiens
  misc_RNA (1)...(19): siRNA sense strand
aggcauaucugaggugaau

SEQ ID NO: 733902 - RNA, 19 nt, Homo sapiens
  misc_RNA (1)...(19): siRNA sense strand
ucaguuuccuccagcuuau

SEQ ID NO: 733903 - RNA, 19 nt, Homo sapiens
  misc_RNA (1)...(19): siRNA sense strand
ucaaagagucccugcagau

SEQ ID NO: 733904 - RNA, 19 nt, Homo sapiens
  misc_RNA (1)...(19): siRNA sense strand
gaucuccauuucuucaagu

SEQ ID NO: 733905 - RNA, 19 nt, Homo sapiens
  misc_RNA (1)...(19): siRNA sense strand
gguaaugggagauucuuuc

SEQ ID NO: 733906 - RNA, 19 nt, Homo sapiens
  misc_RNA (1)...(19): siRNA sense strand
cauggugguuggagaugaa

SEQ ID NO: 733907 - RNA, 19 nt, Homo sapiens
  misc_RNA (1)...(19): siRNA sense strand
ggauggugcagguucauga

SEQ ID NO: 733908 - RNA, 19 nt, Homo sapiens
  misc_RNA (1)...(19): siRNA sense strand
gcagccuguucacaagauu

SEQ ID NO: 733909 - RNA, 19 nt, Homo sapiens
  misc_RNA (1)...(19): siRNA sense strand
ccaguacucuuggauagca

SEQ ID NO: 733910 - RNA, 19 nt, Homo sapiens
  misc_RNA (1)...(19): siRNA sense strand
ggugcagguucaugagcua

SEQ ID NO: 733911 - RNA, 19 nt, Homo sapiens
  misc_RNA (1)...(19): siRNA sense strand
gcuucccgaugccacguua

SEQ ID NO: 733912 - RNA, 19 nt, Homo sapiens
  misc_RNA (1)...(19): siRNA sense strand
uccaguuugucacgcauua

SEQ ID NO: 733913 - RNA, 19 nt, Homo sapiens
  misc_RNA (1)...(19): siRNA sense strand
gugcuacuuuggacguaaa

SEQ ID NO: 733914 - RNA, 19 nt, Homo sapiens
  misc_RNA (1)...(19): siRNA sense strand
gggagauucuuucaacacu

SEQ ID NO: 733915 - RNA, 19 nt, Homo sapiens
  misc_RNA (1)...(19): siRNA sense strand
guaaugggagauucuuuca

SEQ ID NO: 733916 - RNA, 19 nt, Homo sapiens
  misc_RNA (1)...(19): siRNA sense strand
gaugcuugcuaaucgaaca

SEQ ID NO: 733917 - RNA, 19 nt, Homo sapiens
  misc_RNA (1)...(19): siRNA sense strand
acuggaggcuacaugguaa

SEQ ID NO: 733918 - RNA, 19 nt, Homo sapiens
  misc_RNA (1)...(19): siRNA sense strand
gaauuuugcugauggauac

SEQ ID NO: 733919 - RNA, 19 nt, Homo sapiens
  misc_RNA (1)...(19): siRNA sense strand
ggauagcagcagcauucua

SEQ ID NO: 733920 - RNA, 19 nt, Homo sapiens
  misc_RNA (1)...(19): siRNA sense strand
gaaagaacguccagaccua

SEQ ID NO: 733921 - RNA, 19 nt, Homo sapiens
  misc_RNA (1)...(19): siRNA sense strand
gcacauagaagcagcauuu

SEQ ID NO: 733922 - RNA, 19 nt, Homo sapiens
  misc_RNA (1)...(19): siRNA sense strand
gaaucaaccugccgaauug

SEQ ID NO: 733923 - RNA, 19 nt, Homo sapiens
  misc_RNA (1)...(19): siRNA sense strand
ggaugaugcucaagaaauu

SEQ ID NO: 733924 - RNA, 19 nt, Homo sapiens
  misc_RNA (1)...(19): siRNA sense strand
gcaaauacaggauauguug

SEQ ID NO: 733925 - RNA, 19 nt, Homo sapiens
  misc_RNA (1)...(19): siRNA sense strand
gaaccucacugaucuucuu

SEQ ID NO: 733926 - RNA, 19 nt, Homo sapiens
  misc_RNA (1)...(19): siRNA sense strand
gaaggaaucuccaaaaguu

SEQ ID NO: 733927 - RNA, 19 nt, Homo sapiens
  misc_RNA (1)...(19): siRNA sense strand
ggauuuaacugcaaagcaa

SEQ ID NO: 733928 - RNA, 19 nt, Homo sapiens
  misc_RNA (1)...(19): siRNA sense strand
gaaagauaaugcacgauuc

SEQ ID NO: 733929 - RNA, 19 nt, Homo sapiens
  misc_RNA (1)...(19): siRNA sense strand
gauccuacaucuacacuug

SEQ ID NO: 733930 - RNA, 19 nt, Homo sapiens
  misc_RNA (1)...(19): siRNA sense strand
gcugauggauacuuucuuu

SEQ ID NO: 733931 - RNA, 19 nt, Homo sapiens
  misc_RNA (1)...(19): siRNA sense strand
gaaaggaccguguguguca

SEQ ID NO: 733932 - RNA, 19 nt, Homo sapiens
  misc_RNA (1)...(19): siRNA sense strand
gcaaagcaaauacaggaua

SEQ ID NO: 733933 - RNA, 19 nt, Homo sapiens
  misc_RNA (1)...(19): siRNA sense strand
gagaugaaguguugugcaa

SEQ ID NO: 733934 - RNA, 19 nt, Homo sapiens
  misc_RNA (1)...(19): siRNA sense strand
cgacauaccuggaguucau

SEQ ID NO: 733935 - RNA, 19 nt, Homo sapiens
  misc_RNA (1)...(19): siRNA sense strand
caaagcaaauacaggauau

SEQ ID NO: 733936 - RNA, 19 nt, Homo sapiens
  misc_RNA (1)...(19): siRNA sense strand
ggcaugauauugagaaaga

SEQ ID NO: 733937 - RNA, 19 nt, Homo sapiens
  misc_RNA (1)...(19): siRNA sense strand
gauaaugcacgauucauga

SEQ ID NO: 733938 - RNA, 19 nt, Homo sapiens
  misc_RNA (1)...(19): siRNA sense strand
gagcacccauccuaacuga

SEQ ID NO: 733939 - RNA, 19 nt, Homo sapiens
  misc_RNA (1)...(19): siRNA sense strand
uaauggagauuuccgaaug

SEQ ID NO: 733940 - RNA, 19 nt, Homo sapiens
  misc_RNA (1)...(19): siRNA sense strand
aagcagacauuccaaagaa

SEQ ID NO: 733941 - RNA, 19 nt, Homo sapiens
  misc_RNA (1)...(19): siRNA sense strand
gaugaaguguugugcaaau

SEQ ID NO: 733942 - RNA, 19 nt, Homo sapiens
  misc_RNA (1)...(19): siRNA sense strand
acacaugccuggaggaaga

SEQ ID NO: 733943 - RNA, 19 nt, Homo sapiens
  misc_RNA (1)...(19): siRNA sense strand
gauaugaaccucacugauc

SEQ ID NO: 733944 - RNA, 19 nt, Homo sapiens
  misc_RNA (1)...(19): siRNA sense strand
gaagauugcaggagccauu

SEQ ID NO: 733945 - RNA, 19 nt, Homo sapiens
  misc_RNA (1)...(19): siRNA sense strand
acuaugagaugcuugcuaa

SEQ ID NO: 733946 - RNA, 19 nt, Homo sapiens
  misc_RNA (1)...(19): siRNA sense strand
gagauucuuucaacacuuc

SEQ ID NO: 733947 - RNA, 19 nt, Homo sapiens
  misc_RNA (1)...(19): siRNA sense strand
gaaggauggugcagguuca

SEQ ID NO: 733948 - RNA, 19 nt, Homo sapiens
  misc_RNA (1)...(19): siRNA sense strand
gggcagauguacagaguca

SEQ ID NO: 733949 - RNA, 19 nt, Homo sapiens
  misc_RNA (1)...(19): siRNA sense strand
cagaggagccauccaguuu

SEQ ID NO: 733950 - RNA, 19 nt, Homo sapiens
  misc_RNA (1)...(19): siRNA sense strand
gaaguguugugcaaaucuu

SEQ ID NO: 733951 - RNA, 19 nt, Homo sapiens
  misc_RNA (1)...(19): siRNA sense strand
gguuggagaugaauuaaag

SEQ ID NO: 733952 - RNA, 19 nt, Homo sapiens
  misc_RNA (1)...(19): siRNA sense strand
gcagcaggccaacuuguaa

SEQ ID NO: 733953 - RNA, 19 nt, Homo sapiens
  misc_RNA (1)...(19): siRNA sense strand
ucucuacucuuacuccuuu

SEQ ID NO: 733954 - RNA, 19 nt, Homo sapiens
  misc_RNA (1)...(19): siRNA sense strand
ccucugaucuuucucuaug

SEQ ID NO: 733955 - RNA, 19 nt, Homo sapiens
  misc_RNA (1)...(19): siRNA sense strand
agaccuaccuccuguacaa

SEQ ID NO: 733956 - RNA, 19 nt, Homo sapiens
  misc_RNA (1)...(19): siRNA sense strand
ggacaugcccgaguaugaa

SEQ ID NO: 733957 - RNA, 19 nt, Homo sapiens
  misc_RNA (1)...(19): siRNA sense strand
gauggauacuuucuuucaa

SEQ ID NO: 733958 - RNA, 19 nt, Homo sapiens
  misc_RNA (1)...(19): siRNA sense strand
gaggagccauccaguuugu

SEQ ID NO: 733959 - RNA, 19 nt, Homo sapiens
  misc_RNA (1)...(19): siRNA sense strand
caacacuucucucuucaag

SEQ ID NO: 733960 - RNA, 19 nt, Homo sapiens
  misc_RNA (1)...(19): siRNA sense strand
gucacugcauugauauuua

SEQ ID NO: 733961 - RNA, 19 nt, Homo sapiens
  misc_RNA (1)...(19): siRNA sense strand
ccaaggauuuaacugcaaa

SEQ ID NO: 733962 - RNA, 19 nt, Homo sapiens
  misc_RNA (1)...(19): siRNA sense strand
gcuaagcugugaaggaauc

SEQ ID NO: 733963 - RNA, 19 nt, Homo sapiens
  misc_RNA (1)...(19): siRNA sense strand
gccaggaucaugcuguuua

SEQ ID NO: 733964 - RNA, 19 nt, Homo sapiens
  misc_RNA (1)...(19): siRNA sense strand
gcuggaggcuacaagaaug

SEQ ID NO: 733965 - RNA, 19 nt, Homo sapiens
  misc_RNA (1)...(19): siRNA sense strand
caucucagacacacaauaa

SEQ ID NO: 733966 - RNA, 19 nt, Homo sapiens
  misc_RNA (1)...(19): siRNA sense strand
caguuuauguuccaucuga

SEQ ID NO: 733967 - RNA, 19 nt, Homo sapiens
  misc_RNA (1)...(19): siRNA sense strand
gcguaucucugaaugugaa

SEQ ID NO: 733968 - RNA, 19 nt, Homo sapiens
  misc_RNA (1)...(19): siRNA sense strand
uaacaacaguccugaugag

SEQ ID NO: 733969 - RNA, 19 nt, Homo sapiens
  misc_RNA (1)...(19): siRNA sense strand
ugaaucaaccugccgaauu

SEQ ID NO: 733970 - RNA, 19 nt, Homo sapiens
  misc_RNA (1)...(19): siRNA sense strand
gauagcagcagcauucuag

SEQ ID NO: 733971 - RNA, 19 nt, Homo sapiens
  misc_RNA (1)...(19): siRNA sense strand
gagccaggaucaugcuguu

SEQ ID NO: 733972 - RNA, 19 nt, Homo sapiens
  misc_RNA (1)...(19): siRNA sense strand
ggucugaucacauuuggaa

SEQ ID NO: 733973 - RNA, 19 nt, Homo sapiens
  misc_RNA (1)...(19): siRNA sense strand
caaccaagcacuaugagau

SEQ ID NO: 733974 - RNA, 19 nt, Homo sapiens
  misc_RNA (1)...(19): siRNA sense strand
aaagugaacccaucucaga

SEQ ID NO: 733975 - RNA, 19 nt, Homo sapiens
  misc_RNA (1)...(19): siRNA sense strand
caucuacacuuggcaucua

SEQ ID NO: 733976 - RNA, 19 nt, Homo sapiens
  misc_RNA (1)...(19): siRNA sense strand
acacuucucucuucaagca

SEQ ID NO: 733977 - RNA, 19 nt, Homo sapiens
  misc_RNA (1)...(19): siRNA sense strand
ggagauucuuucaacacuu

SEQ ID NO: 733978 - RNA, 19 nt, Homo sapiens
  misc_RNA (1)...(19): siRNA sense strand
ggugguuggagaugaauua

SEQ ID NO: 733979 - RNA, 19 nt, Homo sapiens
  misc_RNA (1)...(19): siRNA sense strand
gaaauugggcagauguaca

SEQ ID NO: 733980 - RNA, 19 nt, Homo sapiens
  misc_RNA (1)...(19): siRNA sense strand
guucuuggcaugauauuga

SEQ ID NO: 733981 - RNA, 19 nt, Homo sapiens
  misc_RNA (1)...(19): siRNA sense strand
gcagaggagccauccaguu

SEQ ID NO: 733982 - RNA, 19 nt, Homo sapiens
  misc_RNA (1)...(19): siRNA sense strand
uuucaacacuucucucuuc

SEQ ID NO: 733983 - RNA, 19 nt, Homo sapiens
  misc_RNA (1)...(19): siRNA sense strand
cacaauaaccuguaugcuu

SEQ ID NO: 733984 - RNA, 19 nt, Homo sapiens
  misc_RNA (1)...(19): siRNA sense strand
gacaguauaacaaagaaga

SEQ ID NO: 733985 - RNA, 19 nt, Homo sapiens
  misc_RNA (1)...(19): siRNA sense strand
gagccaguacucuuggaua

SEQ ID NO: 733986 - RNA, 19 nt, Homo sapiens
  misc_RNA (1)...(19): siRNA sense strand
agaaagauaaugcacgauu

SEQ ID NO: 733987 - RNA, 19 nt, Homo sapiens
  misc_RNA (1)...(19): siRNA sense strand
ggucacugcauugauauuu

SEQ ID NO: 733988 - RNA, 19 nt, Homo sapiens
  misc_RNA (1)...(19): siRNA sense strand
ucgaacagcugcaaauggu

SEQ ID NO: 733989 - RNA, 19 nt, Homo sapiens
  misc_RNA (1)...(19): siRNA sense strand
gcauaucugaggugaauca

SEQ ID NO: 733990 - RNA, 19 nt, Homo sapiens
  misc_RNA (1)...(19): siRNA sense strand
cgacaacucauccgacugu

SEQ ID NO: 733991 - RNA, 19 nt, Homo sapiens
  misc_RNA (1)...(19): siRNA sense strand
aauaugaaccugugcuuug

SEQ ID NO: 733992 - RNA, 19 nt, Homo sapiens
  misc_RNA (1)...(19): siRNA sense strand
gcauggugguuggagauga

SEQ ID NO: 733993 - RNA, 19 nt, Homo sapiens
  misc_RNA (1)...(19): siRNA sense strand
ucacaagauugauaugaac

SEQ ID NO: 733994 - RNA, 19 nt, Homo sapiens
  misc_RNA (1)...(19): siRNA sense strand
gacacacaauaaccuguau

SEQ ID NO: 733995 - RNA, 19 nt, Homo sapiens
  misc_RNA (1)...(19): siRNA sense strand
uagguuaucagauuccuuu

SEQ ID NO: 733996 - RNA, 19 nt, Homo sapiens
  misc_RNA (1)...(19): siRNA sense strand
ggcauuuggugcuacuuug

SEQ ID NO: 733997 - RNA, 19 nt, Homo sapiens
  misc_RNA (1)...(19): siRNA sense strand
gguguggcuuuguccauug

SEQ ID NO: 733998 - RNA, 19 nt, Homo sapiens
  misc_RNA (1)...(19): siRNA sense strand
aaacuuugggccuguaauu

SEQ ID NO: 733999 - RNA, 19 nt, Homo sapiens
  misc_RNA (1)...(19): siRNA sense strand
caagcagacauuccaaaga

SEQ ID NO: 734000 - RNA, 19 nt, Homo sapiens
  misc_RNA (1)...(19): siRNA sense strand
caaagagucccugcagaug

SEQ ID NO: 734001 - RNA, 19 nt, Homo sapiens
  misc_RNA (1)...(19): siRNA sense strand
aggcauaucugaggugaau

SEQ ID NO: 734002 - RNA, 19 nt, Homo sapiens
  misc_RNA (1)...(19): siRNA sense strand
ucaguuuccuccagcuuau

SEQ ID NO: 734003 - RNA, 19 nt, Homo sapiens
  misc_RNA (1)...(19): siRNA sense strand
ucaaagagucccugcagau

SEQ ID NO: 734004 - RNA, 19 nt, Homo sapiens
  misc_RNA (1)...(19): siRNA sense strand
gaucuccauuucuucaagu

SEQ ID NO: 734005 - RNA, 19 nt, Homo sapiens
  misc_RNA (1)...(19): siRNA sense strand
gguaaugggagauucuuuc

SEQ ID NO: 734006 - RNA, 19 nt, Homo sapiens
  misc_RNA (1)...(19): siRNA sense strand
cauggugguuggagaugaa

SEQ ID NO: 734007 - RNA, 19 nt, Homo sapiens
  misc_RNA (1)...(19): siRNA sense strand
ggauggugcagguucauga

SEQ ID NO: 734008 - RNA, 19 nt, Homo sapiens
  misc_RNA (1)...(19): siRNA sense strand
gcagccuguucacaagauu

SEQ ID NO: 734009 - RNA, 19 nt, Homo sapiens
  misc_RNA (1)...(19): siRNA sense strand
ccaguacucuuggauagca

SEQ ID NO: 734010 - RNA, 19 nt, Homo sapiens
  misc_RNA (1)...(19): siRNA sense strand
ggugcagguucaugagcua

SEQ ID NO: 734011 - RNA, 19 nt, Homo sapiens
  misc_RNA (1)...(19): siRNA sense strand
gcuucccgaugccacguua

SEQ ID NO: 734012 - RNA, 19 nt, Homo sapiens
  misc_RNA (1)...(19): siRNA sense strand
uccaguuugucacgcauua

SEQ ID NO: 734013 - RNA, 19 nt, Homo sapiens
  misc_RNA (1)...(19): siRNA sense strand
gugcuacuuuggacguaaa

SEQ ID NO: 734014 - RNA, 19 nt, Homo sapiens
  misc_RNA (1)...(19): siRNA sense strand
gggagauucuuucaacacu

SEQ ID NO: 734015 - RNA, 19 nt, Homo sapiens
  misc_RNA (1)...(19): siRNA sense strand
guaaugggagauucuuuca

SEQ ID NO: 734016 - RNA, 19 nt, Homo sapiens
  misc_RNA (1)...(19): siRNA sense strand
gaugcuugcuaaucgaaca

SEQ ID NO: 734017 - RNA, 19 nt, Homo sapiens
  misc_RNA (1)...(19): siRNA sense strand
acuggaggcuacaugguaa

SEQ ID NO: 734018 - RNA, 19 nt, Homo sapiens
  misc_RNA (1)...(19): siRNA sense strand
gaauuuugcugauggauac

SEQ ID NO: 734019 - RNA, 19 nt, Homo sapiens
  misc_RNA (1)...(19): siRNA sense strand
ggauagcagcagcauucua

SEQ ID NO: 734020 - RNA, 19 nt, Homo sapiens
  misc_RNA (1)...(19): siRNA sense strand
gaaagaacguccagaccua

SEQ ID NO: 734021 - RNA, 19 nt, Homo sapiens
  misc_RNA (1)...(19): siRNA sense strand
gcacauagaagcagcauuu

SEQ ID NO: 734022 - RNA, 19 nt, Homo sapiens
  misc_RNA (1)...(19): siRNA sense strand
gaaucaaccugccgaauug

SEQ ID NO: 734023 - RNA, 19 nt, Homo sapiens
  misc_RNA (1)...(19): siRNA sense strand
ggaugaugcucaagaaauu

SEQ ID NO: 734024 - RNA, 19 nt, Homo sapiens
  misc_RNA (1)...(19): siRNA sense strand
gcaaauacaggauauguug

SEQ ID NO: 734025 - RNA, 19 nt, Homo sapiens
  misc_RNA (1)...(19): siRNA sense strand
gaaccucacugaucuucuu

SEQ ID NO: 734026 - RNA, 19 nt, Homo sapiens
  misc_RNA (1)...(19): siRNA sense strand
gaaggaaucuccaaaaguu

SEQ ID NO: 734027 - RNA, 19 nt, Homo sapiens
  misc_RNA (1)...(19): siRNA sense strand
ggauuuaacugcaaagcaa

SEQ ID NO: 734028 - RNA, 19 nt, Homo sapiens
  misc_RNA (1)...(19): siRNA sense strand
gaaagauaaugcacgauuc

SEQ ID NO: 734029 - RNA, 19 nt, Homo sapiens
  misc_RNA (1)...(19): siRNA sense strand
gauccuacaucuacacuug

SEQ ID NO: 734030 - RNA, 19 nt, Homo sapiens
  misc_RNA (1)...(19): siRNA sense strand
gcugauggauacuuucuuu

SEQ ID NO: 734031 - RNA, 19 nt, Homo sapiens
  misc_RNA (1)...(19): siRNA sense strand
gaaaggaccguguguguca

SEQ ID NO: 734032 - RNA, 19 nt, Homo sapiens
  misc_RNA (1)...(19): siRNA sense strand
gcaaagcaaauacaggaua

SEQ ID NO: 734033 - RNA, 19 nt, Homo sapiens
  misc_RNA (1)...(19): siRNA sense strand
gagaugaaguguugugcaa

SEQ ID NO: 734034 - RNA, 19 nt, Homo sapiens
  misc_RNA (1)...(19): siRNA sense strand
cgacauaccuggaguucau

SEQ ID NO: 734035 - RNA, 19 nt, Homo sapiens
  misc_RNA (1)...(19): siRNA sense strand
caaagcaaauacaggauau

SEQ ID NO: 734036 - RNA, 19 nt, Homo sapiens
  misc_RNA (1)...(19): siRNA sense strand
ggcaugauauugagaaaga

SEQ ID NO: 734037 - RNA, 19 nt, Homo sapiens
  misc_RNA (1)...(19): siRNA sense strand
gauaaugcacgauucauga

SEQ ID NO: 734038 - RNA, 19 nt, Homo sapiens
  misc_RNA (1)...(19): siRNA sense strand
gagcacccauccuaacuga

SEQ ID NO: 734039 - RNA, 19 nt, Homo sapiens
  misc_RNA (1)...(19): siRNA sense strand
uaauggagauuuccgaaug

SEQ ID NO: 734040 - RNA, 19 nt, Homo sapiens
  misc_RNA (1)...(19): siRNA sense strand
aagcagacauuccaaagaa

SEQ ID NO: 734041 - RNA, 19 nt, Homo sapiens
  misc_RNA (1)...(19): siRNA sense strand
gaugaaguguugugcaaau

SEQ ID NO: 734042 - RNA, 19 nt, Homo sapiens
  misc_RNA (1)...(19): siRNA sense strand
acacaugccuggaggaaga

SEQ ID NO: 734043 - RNA, 19 nt, Homo sapiens
  misc_RNA (1)...(19): siRNA sense strand
gauaugaaccucacugauc

SEQ ID NO: 734044 - RNA, 19 nt, Homo sapiens
  misc_RNA (1)...(19): siRNA sense strand
gaagauugcaggagccauu

SEQ ID NO: 734045 - RNA, 19 nt, Homo sapiens
  misc_RNA (1)...(19): siRNA sense strand
acuaugagaugcuugcuaa

SEQ ID NO: 734046 - RNA, 19 nt, Homo sapiens
  misc_RNA (1)...(19): siRNA sense strand
gagauucuuucaacacuuc

SEQ ID NO: 734047 - RNA, 19 nt, Homo sapiens
  misc_RNA (1)...(19): siRNA sense strand
gaaggauggugcagguuca

SEQ ID NO: 734048 - RNA, 19 nt, Homo sapiens
  misc_RNA (1)...(19): siRNA sense strand
gggcagauguacagaguca

SEQ ID NO: 734049 - RNA, 19 nt, Homo sapiens
  misc_RNA (1)...(19): siRNA sense strand
cagaggagccauccaguuu

SEQ ID NO: 734050 - RNA, 19 nt, Homo sapiens
  misc_RNA (1)...(19): siRNA sense strand
gaaguguugugcaaaucuu

SEQ ID NO: 734051 - RNA, 19 nt, Homo sapiens
  misc_RNA (1)...(19): siRNA sense strand
gguuggagaugaauuaaag

SEQ ID NO: 734052 - RNA, 19 nt, Homo sapiens
  misc_RNA (1)...(19): siRNA sense strand
gcagcaggccaacuuguaa

SEQ ID NO: 734053 - RNA, 19 nt, Homo sapiens
  misc_RNA (1)...(19): siRNA sense strand
ucucuacucuuacuccuuu

SEQ ID NO: 734054 - RNA, 19 nt, Homo sapiens
  misc_RNA (1)...(19): siRNA sense strand
ccucugaucuuucucuaug

SEQ ID NO: 734055 - RNA, 19 nt, Homo sapiens
  misc_RNA (1)...(19): siRNA sense strand
agaccuaccuccuguacaa

SEQ ID NO: 734056 - RNA, 19 nt, Homo sapiens
  misc_RNA (1)...(19): siRNA sense strand
ggacaugcccgaguaugaa

SEQ ID NO: 734057 - RNA, 19 nt, Homo sapiens
  misc_RNA (1)...(19): siRNA sense strand
gauggauacuuucuuucaa

SEQ ID NO: 734058 - RNA, 19 nt, Homo sapiens
  misc_RNA (1)...(19): siRNA sense strand
gaggagccauccaguuugu

SEQ ID NO: 734059 - RNA, 19 nt, Homo sapiens
  misc_RNA (1)...(19): siRNA sense strand
caacacuucucucuucaag

SEQ ID NO: 734060 - RNA, 19 nt, Homo sapiens
  misc_RNA (1)...(19): siRNA sense strand
gucacugcauugauauuua

SEQ ID NO: 734061 - RNA, 19 nt, Homo sapiens
  misc_RNA (1)...(19): siRNA sense strand
ccaaggauuuaacugcaaa

SEQ ID NO: 734062 - RNA, 19 nt, Homo sapiens
  misc_RNA (1)...(19): siRNA sense strand
gcuaagcugugaaggaauc

SEQ ID NO: 734063 - RNA, 19 nt, Homo sapiens
  misc_RNA (1)...(19): siRNA sense strand
gccaggaucaugcuguuua

SEQ ID NO: 734064 - RNA, 19 nt, Homo sapiens
  misc_RNA (1)...(19): siRNA sense strand
gcuggaggcuacaagaaug

SEQ ID NO: 734065 - RNA, 19 nt, Homo sapiens
  misc_RNA (1)...(19): siRNA sense strand
caucucagacacacaauaa

SEQ ID NO: 734066 - RNA, 19 nt, Homo sapiens
  misc_RNA (1)...(19): siRNA sense strand
caguuuauguuccaucuga

SEQ ID NO: 734067 - RNA, 19 nt, Homo sapiens
  misc_RNA (1)...(19): siRNA sense strand
gcguaucucugaaugugaa

SEQ ID NO: 734068 - RNA, 19 nt, Homo sapiens
  misc_RNA (1)...(19): siRNA sense strand
uaacaacaguccugaugag

SEQ ID NO: 734069 - RNA, 19 nt, Homo sapiens
  misc_RNA (1)...(19): siRNA sense strand
ugaaucaaccugccgaauu

SEQ ID NO: 734070 - RNA, 19 nt, Homo sapiens
  misc_RNA (1)...(19): siRNA sense strand
gauagcagcagcauucuag

SEQ ID NO: 734071 - RNA, 19 nt, Homo sapiens
  misc_RNA (1)...(19): siRNA sense strand
gagccaggaucaugcuguu

SEQ ID NO: 734072 - RNA, 19 nt, Homo sapiens
  misc_RNA (1)...(19): siRNA sense strand
ggucugaucacauuuggaa

SEQ ID NO: 734073 - RNA, 19 nt, Homo sapiens
  misc_RNA (1)...(19): siRNA sense strand
caaccaagcacuaugagau

SEQ ID NO: 734074 - RNA, 19 nt, Homo sapiens
  misc_RNA (1)...(19): siRNA sense strand
aaagugaacccaucucaga

SEQ ID NO: 734075 - RNA, 19 nt, Homo sapiens
  misc_RNA (1)...(19): siRNA sense strand
caucuacacuuggcaucua

SEQ ID NO: 734076 - RNA, 19 nt, Homo sapiens
  misc_RNA (1)...(19): siRNA sense strand
acacuucucucuucaagca

SEQ ID NO: 734077 - RNA, 19 nt, Homo sapiens
  misc_RNA (1)...(19): siRNA sense strand
ggagauucuuucaacacuu

SEQ ID NO: 734078 - RNA, 19 nt, Homo sapiens
  misc_RNA (1)...(19): siRNA sense strand
ggugguuggagaugaauua

SEQ ID NO: 734079 - RNA, 19 nt, Homo sapiens
  misc_RNA (1)...(19): siRNA sense strand
gaaauugggcagauguaca

SEQ ID NO: 734080 - RNA, 19 nt, Homo sapiens
  misc_RNA (1)...(19): siRNA sense strand
guucuuggcaugauauuga

SEQ ID NO: 734081 - RNA, 19 nt, Homo sapiens
  misc_RNA (1)...(19): siRNA sense strand
gcagaggagccauccaguu

SEQ ID NO: 734082 - RNA, 19 nt, Homo sapiens
  misc_RNA (1)...(19): siRNA sense strand
uuucaacacuucucucuuc

SEQ ID NO: 734083 - RNA, 19 nt, Homo sapiens
  misc_RNA (1)...(19): siRNA sense strand
cacaauaaccuguaugcuu

SEQ ID NO: 734084 - RNA, 19 nt, Homo sapiens
  misc_RNA (1)...(19): siRNA sense strand
gacaguauaacaaagaaga

SEQ ID NO: 734085 - RNA, 19 nt, Homo sapiens
  misc_RNA (1)...(19): siRNA sense strand
gagccaguacucuuggaua

SEQ ID NO: 734086 - RNA, 19 nt, Homo sapiens
  misc_RNA (1)...(19): siRNA sense strand
agaaagauaaugcacgauu

SEQ ID NO: 734087 - RNA, 19 nt, Homo sapiens
  misc_RNA (1)...(19): siRNA sense strand
ggucacugcauugauauuu

SEQ ID NO: 734088 - RNA, 19 nt, Homo sapiens
  misc_RNA (1)...(19): siRNA sense strand
ucgaacagcugcaaauggu

SEQ ID NO: 734089 - RNA, 19 nt, Homo sapiens
  misc_RNA (1)...(19): siRNA sense strand
gcauaucugaggugaauca

SEQ ID NO: 734090 - RNA, 19 nt, Homo sapiens
  misc_RNA (1)...(19): siRNA sense strand
cgacaacucauccgacugu

SEQ ID NO: 734091 - RNA, 19 nt, Homo sapiens
  misc_RNA (1)...(19): siRNA sense strand
aauaugaaccugugcuuug

SEQ ID NO: 734092 - RNA, 19 nt, Homo sapiens
  misc_RNA (1)...(19): siRNA sense strand
gcauggugguuggagauga

SEQ ID NO: 734093 - RNA, 19 nt, Homo sapiens
  misc_RNA (1)...(19): siRNA sense strand
ucacaagauugauaugaac

SEQ ID NO: 734094 - RNA, 19 nt, Homo sapiens
  misc_RNA (1)...(19): siRNA sense strand
gacacacaauaaccuguau

SEQ ID NO: 734095 - RNA, 19 nt, Homo sapiens
  misc_RNA (1)...(19): siRNA sense strand
uagguuaucagauuccuuu

SEQ ID NO: 734096 - RNA, 19 nt, Homo sapiens
  misc_RNA (1)...(19): siRNA sense strand
ggcauuuggugcuacuuug

SEQ ID NO: 734097 - RNA, 19 nt, Homo sapiens
  misc_RNA (1)...(19): siRNA sense strand
gguguggcuuuguccauug

SEQ ID NO: 734098 - RNA, 19 nt, Homo sapiens
  misc_RNA (1)...(19): siRNA sense strand
aaacuuugggccuguaauu

SEQ ID NO: 734099 - RNA, 19 nt, Homo sapiens
  misc_RNA (1)...(19): siRNA sense strand
caagcagacauuccaaaga

SEQ ID NO: 734100 - RNA, 19 nt, Homo sapiens
  misc_RNA (1)...(19): siRNA sense strand
caaagagucccugcagaug

SEQ ID NO: 734101 - RNA, 19 nt, Homo sapiens
  misc_RNA (1)...(19): siRNA sense strand
aggcauaucugaggugaau

SEQ ID NO: 734102 - RNA, 19 nt, Homo sapiens
  misc_RNA (1)...(19): siRNA sense strand
ucaguuuccuccagcuuau

SEQ ID NO: 734103 - RNA, 19 nt, Homo sapiens
  misc_RNA (1)...(19): siRNA sense strand
ucaaagagucccugcagau

SEQ ID NO: 734104 - RNA, 19 nt, Homo sapiens
  misc_RNA (1)...(19): siRNA sense strand
gaucuccauuucuucaagu

SEQ ID NO: 734105 - RNA, 19 nt, Homo sapiens
  misc_RNA (1)...(19): siRNA sense strand
gguaaugggagauucuuuc

SEQ ID NO: 734106 - RNA, 19 nt, Homo sapiens
  misc_RNA (1)...(19): siRNA sense strand
cauggugguuggagaugaa

SEQ ID NO: 734107 - RNA, 19 nt, Homo sapiens
  misc_RNA (1)...(19): siRNA sense strand
ggauggugcagguucauga

SEQ ID NO: 734108 - RNA, 19 nt, Homo sapiens
  misc_RNA (1)...(19): siRNA sense strand
gcagccuguucacaagauu

SEQ ID NO: 734109 - RNA, 19 nt, Homo sapiens
  misc_RNA (1)...(19): siRNA sense strand
ccaguacucuuggauagca

SEQ ID NO: 734110 - RNA, 19 nt, Homo sapiens
  misc_RNA (1)...(19): siRNA sense strand
ggugcagguucaugagcua

SEQ ID NO: 734111 - RNA, 19 nt, Homo sapiens
  misc_RNA (1)...(19): siRNA sense strand
gcuucccgaugccacguua

SEQ ID NO: 734112 - RNA, 19 nt, Homo sapiens
  misc_RNA (1)...(19): siRNA sense strand
uccaguuugucacgcauua

SEQ ID NO: 734113 - RNA, 19 nt, Homo sapiens
  misc_RNA (1)...(19): siRNA sense strand
gugcuacuuuggacguaaa

SEQ ID NO: 734114 - RNA, 19 nt, Homo sapiens
  misc_RNA (1)...(19): siRNA sense strand
gggagauucuuucaacacu

SEQ ID NO: 734115 - RNA, 19 nt, Homo sapiens
  misc_RNA (1)...(19): siRNA sense strand
guaaugggagauucuuuca

SEQ ID NO: 734116 - RNA, 19 nt, Homo sapiens
  misc_RNA (1)...(19): siRNA sense strand
gaugcuugcuaaucgaaca

SEQ ID NO: 734117 - RNA, 19 nt, Homo sapiens
  misc_RNA (1)...(19): siRNA sense strand
acuggaggcuacaugguaa

SEQ ID NO: 734118 - RNA, 19 nt, Homo sapiens
  misc_RNA (1)...(19): siRNA sense strand
gaauuuugcugauggauac

SEQ ID NO: 734119 - RNA, 19 nt, Homo sapiens
  misc_RNA (1)...(19): siRNA sense strand
ggauagcagcagcauucua

SEQ ID NO: 734120 - RNA, 19 nt, Homo sapiens
  misc_RNA (1)...(19): siRNA sense strand
ccagaaauccuaccgauaa

SEQ ID NO: 734121 - RNA, 19 nt, Homo sapiens
  misc_RNA (1)...(19): siRNA sense strand
gcaauggucucaucaaggu

SEQ ID NO: 734122 - RNA, 19 nt, Homo sapiens
  misc_RNA (1)...(19): siRNA sense strand
ccaagaaggagaucaaaga

SEQ ID NO: 734123 - RNA, 19 nt, Homo sapiens
  misc_RNA (1)...(19): siRNA sense strand
ggagcgauuugcuggugua

SEQ ID NO: 734124 - RNA, 19 nt, Homo sapiens
  misc_RNA (1)...(19): siRNA sense strand
gaucaaagacauccucauc

SEQ ID NO: 734125 - RNA, 19 nt, Homo sapiens
  misc_RNA (1)...(19): siRNA sense strand
agaaggagaucaaagacau

SEQ ID NO: 734126 - RNA, 19 nt, Homo sapiens
  misc_RNA (1)...(19): siRNA sense strand
ucaaagacauccucaucca

SEQ ID NO: 734127 - RNA, 19 nt, Homo sapiens
  misc_RNA (1)...(19): siRNA sense strand
gguggccuauuaccagaaa

SEQ ID NO: 734128 - RNA, 19 nt, Homo sapiens
  misc_RNA (1)...(19): siRNA sense strand
gcgauuugcugguguagac

SEQ ID NO: 734129 - RNA, 19 nt, Homo sapiens
  misc_RNA (1)...(19): siRNA sense strand
ucacguggcccagauuuau

SEQ ID NO: 734130 - RNA, 19 nt, Homo sapiens
  misc_RNA (1)...(19): siRNA sense strand
aagcccugguggccuauua

SEQ ID NO: 734131 - RNA, 19 nt, Homo sapiens
  misc_RNA (1)...(19): siRNA sense strand
aagacauccucauccagua

SEQ ID NO: 734132 - RNA, 19 nt, Homo sapiens
  misc_RNA (1)...(19): siRNA sense strand
ggucacguggcccagauuu

SEQ ID NO: 734133 - RNA, 19 nt, Homo sapiens
  misc_RNA (1)...(19): siRNA sense strand
cggcaauggucucaucaag

SEQ ID NO: 734134 - RNA, 19 nt, Homo sapiens
  misc_RNA (1)...(19): siRNA sense strand
uggcccagauuuaugcuau

SEQ ID NO: 734135 - RNA, 19 nt, Homo sapiens
  misc_RNA (1)...(19): siRNA sense strand
gaaggagaucaaagacauc

SEQ ID NO: 734136 - RNA, 19 nt, Homo sapiens
  misc_RNA (1)...(19): siRNA sense strand
gcacugcaaacgcggcaau

SEQ ID NO: 734137 - RNA, 19 nt, Homo sapiens
  misc_RNA (1)...(19): siRNA sense strand
caagaaggagaucaaagac

SEQ ID NO: 734138 - RNA, 19 nt, Homo sapiens
  misc_RNA (1)...(19): siRNA sense strand
gucacguggcccagauuua

SEQ ID NO: 734139 - RNA, 19 nt, Homo sapiens
  misc_RNA (1)...(19): siRNA sense strand
ccaagaagcagaaacaaua

SEQ ID NO: 734140 - RNA, 19 nt, Homo sapiens
  misc_RNA (1)...(19): siRNA sense strand
ugacaucacuggccgcuuu

SEQ ID NO: 734141 - RNA, 19 nt, Homo sapiens
  misc_RNA (1)...(19): siRNA sense strand
gaaacaauaucagcggauu

SEQ ID NO: 734142 - RNA, 19 nt, Homo sapiens
  misc_RNA (1)...(19): siRNA sense strand
gaagacaggccgcuuugaa

SEQ ID NO: 734143 - RNA, 19 nt, Homo sapiens
  misc_RNA (1)...(19): siRNA sense strand
gcaguaguauucaucucua

SEQ ID NO: 734144 - RNA, 19 nt, Homo sapiens
  misc_RNA (1)...(19): siRNA sense strand
gaugguacauggaaacugu

SEQ ID NO: 734145 - RNA, 19 nt, Homo sapiens
  misc_RNA (1)...(19): siRNA sense strand
acagggaaguuuaucauga

SEQ ID NO: 734146 - RNA, 19 nt, Homo sapiens
  misc_RNA (1)...(19): siRNA sense strand
gcacaaggcgccugucauc

SEQ ID NO: 734147 - RNA, 19 nt, Homo sapiens
  misc_RNA (1)...(19): siRNA sense strand
ggagaagccucaacaacac

SEQ ID NO: 734148 - RNA, 19 nt, Homo sapiens
  misc_RNA (1)...(19): siRNA sense strand
caagugcugucuaccauca

SEQ ID NO: 734149 - RNA, 19 nt, Homo sapiens
  misc_RNA (1)...(19): siRNA sense strand
gcuaacacagggaaguuua

SEQ ID NO: 734150 - RNA, 19 nt, Homo sapiens
  misc_RNA (1)...(19): siRNA sense strand
caacacacacgcugcugua

SEQ ID NO: 734151 - RNA, 19 nt, Homo sapiens
  misc_RNA (1)...(19): siRNA sense strand
ggaaggagaagccucaaca

SEQ ID NO: 734152 - RNA, 19 nt, Homo sapiens
  misc_RNA (1)...(19): siRNA sense strand
ccagaggacuucccuaaaa

SEQ ID NO: 734153 - RNA, 19 nt, Homo sapiens
  misc_RNA (1)...(19): siRNA sense strand
gauguggaauacaagaaga

SEQ ID NO: 734154 - RNA, 19 nt, Homo sapiens
  misc_RNA (1)...(19): siRNA sense strand
gugcgagccuucgaacuaa

SEQ ID NO: 734155 - RNA, 19 nt, Homo sapiens
  misc_RNA (1)...(19): siRNA sense strand
ggugcgagccuucgaacua

SEQ ID NO: 734156 - RNA, 19 nt, Homo sapiens
  misc_RNA (1)...(19): siRNA sense strand
cgagagcaccgcagcauga

SEQ ID NO: 734157 - RNA, 19 nt, Homo sapiens
  misc_RNA (1)...(19): siRNA sense strand
caaggaugguacauggaaa

SEQ ID NO: 734158 - RNA, 19 nt, Homo sapiens
  misc_RNA (1)...(19): siRNA sense strand
uagcagcaauggcaaauac

SEQ ID NO: 734159 - RNA, 19 nt, Homo sapiens
  misc_RNA (1)...(19): siRNA sense strand
gcugugcacucguuugcuu

SEQ ID NO: 734160 - RNA, 19 nt, Homo sapiens
  misc_RNA (1)...(19): siRNA sense strand
caagaagcagaaacaauau

SEQ ID NO: 734161 - RNA, 19 nt, Homo sapiens
  misc_RNA (1)...(19): siRNA sense strand
gaaggagaagccucaacaa

SEQ ID NO: 734162 - RNA, 19 nt, Homo sapiens
  misc_RNA (1)...(19): siRNA sense strand
ugggaagucugcuuuggaa

SEQ ID NO: 734163 - RNA, 19 nt, Homo sapiens
  misc_RNA (1)...(19): siRNA sense strand
gauccaagaagcagaaaca

SEQ ID NO: 734164 - RNA, 19 nt, Homo sapiens
  misc_RNA (1)...(19): siRNA sense strand
uaucuugcauggacuuuag

SEQ ID NO: 734165 - RNA, 19 nt, Homo sapiens
  misc_RNA (1)...(19): siRNA sense strand
ccaaggaugguacauggaa

SEQ ID NO: 734166 - RNA, 19 nt, Homo sapiens
  misc_RNA (1)...(19): siRNA sense strand
cacacacgcugcuguaucu

SEQ ID NO: 734167 - RNA, 19 nt, Homo sapiens
  misc_RNA (1)...(19): siRNA sense strand
gcugaagacaggccgcuuu

SEQ ID NO: 734168 - RNA, 19 nt, Homo sapiens
  misc_RNA (1)...(19): siRNA sense strand
gcagaugucggagcucaug

SEQ ID NO: 734169 - RNA, 19 nt, Homo sapiens
  misc_RNA (1)...(19): siRNA sense strand
gcauggacuuuagcagcaa

SEQ ID NO: 734170 - RNA, 19 nt, Homo sapiens
  misc_RNA (1)...(19): siRNA sense strand
agacaggccgcuuugaaga

SEQ ID NO: 734171 - RNA, 19 nt, Homo sapiens
  misc_RNA (1)...(19): siRNA sense strand
gaaggaggagugcuuugag

SEQ ID NO: 734172 - RNA, 19 nt, Homo sapiens
  misc_RNA (1)...(19): siRNA sense strand
gagccaugguggaggagau

SEQ ID NO: 734173 - RNA, 19 nt, Homo sapiens
  misc_RNA (1)...(19): siRNA sense strand
gucaagugcugucuaccau

SEQ ID NO: 734174 - RNA, 19 nt, Homo sapiens
  misc_RNA (1)...(19): siRNA sense strand
gcgagaaggaggagugcuu

SEQ ID NO: 734175 - RNA, 19 nt, Homo sapiens
  misc_RNA (1)...(19): siRNA sense strand
ccaaccagaugaacaacac

SEQ ID NO: 734176 - RNA, 19 nt, Homo sapiens
  misc_RNA (1)...(19): siRNA sense strand
gacauuggcauugcuaaca

SEQ ID NO: 734177 - RNA, 19 nt, Homo sapiens
  misc_RNA (1)...(19): siRNA sense strand
gagccacagcgggaacaua

SEQ ID NO: 734178 - RNA, 19 nt, Homo sapiens
  misc_RNA (1)...(19): siRNA sense strand
ucgccaacuuguccuuuga

SEQ ID NO: 734179 - RNA, 19 nt, Homo sapiens
  misc_RNA (1)...(19): siRNA sense strand
gagaaggaggagugcuuug

SEQ ID NO: 734180 - RNA, 19 nt, Homo sapiens
  misc_RNA (1)...(19): siRNA sense strand
uggcuucugucuccaagga

SEQ ID NO: 734181 - RNA, 19 nt, Homo sapiens
  misc_RNA (1)...(19): siRNA sense strand
acaccaaccagaugaacaa

SEQ ID NO: 734182 - RNA, 19 nt, Homo sapiens
  misc_RNA (1)...(19): siRNA sense strand
gcgggaacauaucuugcau

SEQ ID NO: 734183 - RNA, 19 nt, Homo sapiens
  misc_RNA (1)...(19): siRNA sense strand
ugggugcccugaagaagug

SEQ ID NO: 734184 - RNA, 19 nt, Homo sapiens
  misc_RNA (1)...(19): siRNA sense strand
cgagaaggaggagugcuuu

SEQ ID NO: 734185 - RNA, 19 nt, Homo sapiens
  misc_RNA (1)...(19): siRNA sense strand
aggagaagccucaacaaca

SEQ ID NO: 734186 - RNA, 19 nt, Homo sapiens
  misc_RNA (1)...(19): siRNA sense strand
cacggaggauggcuucugu

SEQ ID NO: 734187 - RNA, 19 nt, Homo sapiens
  misc_RNA (1)...(19): siRNA sense strand
agaagcagaaacaauauca

SEQ ID NO: 734188 - RNA, 19 nt, Homo sapiens
  misc_RNA (1)...(19): siRNA sense strand
ugucuaccaucaacaccaa

SEQ ID NO: 734189 - RNA, 19 nt, Homo sapiens
  misc_RNA (1)...(19): siRNA sense strand
cagggaaguuuaucaugac

SEQ ID NO: 734190 - RNA, 19 nt, Homo sapiens
  misc_RNA (1)...(19): siRNA sense strand
gaguguaucgccaacuugu

SEQ ID NO: 734191 - RNA, 19 nt, Homo sapiens
  misc_RNA (1)...(19): siRNA sense strand
agaaggaggagugcuuuga

SEQ ID NO: 734192 - RNA, 19 nt, Homo sapiens
  misc_RNA (1)...(19): siRNA sense strand
ccacagcgggaacauaucu

SEQ ID NO: 734193 - RNA, 19 nt, Homo sapiens
  misc_RNA (1)...(19): siRNA sense strand
gaucgcaccauccgcaucu

SEQ ID NO: 734194 - RNA, 19 nt, Homo sapiens
  misc_RNA (1)...(19): siRNA sense strand
acaaggcgccugucaucga

SEQ ID NO: 734195 - RNA, 19 nt, Homo sapiens
  misc_RNA (1)...(19): siRNA sense strand
ggucaagugcugucuacca

SEQ ID NO: 734196 - RNA, 19 nt, Homo sapiens
  misc_RNA (1)...(19): siRNA sense strand
gguuugggaagucugcuuu

SEQ ID NO: 734197 - RNA, 19 nt, Homo sapiens
  misc_RNA (1)...(19): siRNA sense strand
gagaagccucaacaacaca

SEQ ID NO: 734198 - RNA, 19 nt, Homo sapiens
  misc_RNA (1)...(19): siRNA sense strand
gaagcaggaccccuacuug

SEQ ID NO: 734199 - RNA, 19 nt, Homo sapiens
  misc_RNA (1)...(19): siRNA sense strand
uaacacagggaaguuuauc

SEQ ID NO: 734200 - RNA, 19 nt, Homo sapiens
  misc_RNA (1)...(19): siRNA sense strand
gcaucuggagcaccaagga

SEQ ID NO: 734201 - RNA, 19 nt, Homo sapiens
  misc_RNA (1)...(19): siRNA sense strand
cccaagagacccugaagag

SEQ ID NO: 734202 - RNA, 19 nt, Homo sapiens
  misc_RNA (1)...(19): siRNA sense strand
acacagggaaguuuaucau

SEQ ID NO: 734203 - RNA, 19 nt, Homo sapiens
  misc_RNA (1)...(19): siRNA sense strand
gcagaugucggagcucaug

SEQ ID NO: 734204 - RNA, 19 nt, Homo sapiens
  misc_RNA (1)...(19): siRNA sense strand
ucagagaaacggcgucaug

SEQ ID NO: 734205 - RNA, 19 nt, Homo sapiens
  misc_RNA (1)...(19): siRNA sense strand
ugaaaaugguggaaaagga

SEQ ID NO: 734206 - RNA, 19 nt, Homo sapiens
  misc_RNA (1)...(19): siRNA sense strand
ucuggcagccuuccucaaa

SEQ ID NO: 734207 - RNA, 19 nt, Homo sapiens
  misc_RNA (1)...(19): siRNA sense strand
caagcuggccaagcacaaa

SEQ ID NO: 734208 - RNA, 19 nt, Homo sapiens
  misc_RNA (1)...(19): siRNA sense strand
gcuccaugaccaagaucua

SEQ ID NO: 734209 - RNA, 19 nt, Homo sapiens
  misc_RNA (1)...(19): siRNA sense strand
ccgucaagcuggccaagca

SEQ ID NO: 734210 - RNA, 19 nt, Homo sapiens
  misc_RNA (1)...(19): siRNA sense strand
ggagauacaccgaaagaua

SEQ ID NO: 734211 - RNA, 19 nt, Homo sapiens
  misc_RNA (1)...(19): siRNA sense strand
gaacuuacccaaucucaug

SEQ ID NO: 734212 - RNA, 19 nt, Homo sapiens
  misc_RNA (1)...(19): siRNA sense strand
uagaugagcugcuacagaa

SEQ ID NO: 734213 - RNA, 19 nt, Homo sapiens
  misc_RNA (1)...(19): siRNA sense strand
cuaaacagcugaaagaaca

SEQ ID NO: 734214 - RNA, 19 nt, Homo sapiens
  misc_RNA (1)...(19): siRNA sense strand
uagaggaacuuuaauggaa

SEQ ID NO: 734215 - RNA, 19 nt, Homo sapiens
  misc_RNA (1)...(19): siRNA sense strand
gaugcugucuguucgauuu

SEQ ID NO: 734216 - RNA, 19 nt, Homo sapiens
  misc_RNA (1)...(19): siRNA sense strand
ucauagcucuguuccauuu

SEQ ID NO: 734217 - RNA, 19 nt, Homo sapiens
  misc_RNA (1)...(19): siRNA sense strand
gcguugaucugcccauuaa

SEQ ID NO: 734218 - RNA, 19 nt, Homo sapiens
  misc_RNA (1)...(19): siRNA sense strand
gaucaucauucaguuguuu

SEQ ID NO: 734219 - RNA, 19 nt, Homo sapiens
  misc_RNA (1)...(19): siRNA sense strand
ccaaagauguagcuaaaca

SEQ ID NO: 734220 - RNA, 19 nt, Homo sapiens
  misc_RNA (1)...(19): siRNA sense strand
uguaacaucugguuugauu

SEQ ID NO: 734221 - RNA, 19 nt, Homo sapiens
  misc_RNA (1)...(19): siRNA sense strand
guuguuagcuggugccaaa

SEQ ID NO: 734222 - RNA, 19 nt, Homo sapiens
  misc_RNA (1)...(19): siRNA sense strand
gcuauaacgcucuucauuu

SEQ ID NO: 734223 - RNA, 19 nt, Homo sapiens
  misc_RNA (1)...(19): siRNA sense strand
gaaccucauugcuacaguu

SEQ ID NO: 734224 - RNA, 19 nt, Homo sapiens
  misc_RNA (1)...(19): siRNA sense strand
gaaagaacagcagauggua

SEQ ID NO: 734225 - RNA, 19 nt, Homo sapiens
  misc_RNA (1)...(19): siRNA sense strand
gaacagcagaugguaauga

SEQ ID NO: 734226 - RNA, 19 nt, Homo sapiens
  misc_RNA (1)...(19): siRNA sense strand
gauagagcuuuauucaaug

SEQ ID NO: 734227 - RNA, 19 nt, Homo sapiens
  misc_RNA (1)...(19): siRNA sense strand
uggcagagguacugaguuu

SEQ ID NO: 734228 - RNA, 19 nt, Homo sapiens
  misc_RNA (1)...(19): siRNA sense strand
caacaucugugagaccauu

SEQ ID NO: 734229 - RNA, 19 nt, Homo sapiens
  misc_RNA (1)...(19): siRNA sense strand
uucaugagcuuaauaggua

SEQ ID NO: 734230 - RNA, 19 nt, Homo sapiens
  misc_RNA (1)...(19): siRNA sense strand
gcagagguacugaguuuga

SEQ ID NO: 734231 - RNA, 19 nt, Homo sapiens
  misc_RNA (1)...(19): siRNA sense strand
gaaaggaaaauccaguuua

SEQ ID NO: 734232 - RNA, 19 nt, Homo sapiens
  misc_RNA (1)...(19): siRNA sense strand
cggcagaacuuacccaauc

SEQ ID NO: 734233 - RNA, 19 nt, Homo sapiens
  misc_RNA (1)...(19): siRNA sense strand
gaggaacuuuaauggaauu

SEQ ID NO: 734234 - RNA, 19 nt, Homo sapiens
  misc_RNA (1)...(19): siRNA sense strand
uguguuugcuguuguuaua

SEQ ID NO: 734235 - RNA, 19 nt, Homo sapiens
  misc_RNA (1)...(19): siRNA sense strand
ggcaagccauuguguaugu

SEQ ID NO: 734236 - RNA, 19 nt, Homo sapiens
  misc_RNA (1)...(19): siRNA sense strand
gcuguuagaugagcugcua

SEQ ID NO: 734237 - RNA, 19 nt, Homo sapiens
  misc_RNA (1)...(19): siRNA sense strand
gagauacaccgaaagauag

SEQ ID NO: 734238 - RNA, 19 nt, Homo sapiens
  misc_RNA (1)...(19): siRNA sense strand
ugggaugggugcuuuguuu

SEQ ID NO: 734239 - RNA, 19 nt, Homo sapiens
  misc_RNA (1)...(19): siRNA sense strand
caauagaggaacuuuaaug

SEQ ID NO: 734240 - RNA, 19 nt, Homo sapiens
  misc_RNA (1)...(19): siRNA sense strand
gaaguuaucaaaccauucu

SEQ ID NO: 734241 - RNA, 19 nt, Homo sapiens
  misc_RNA (1)...(19): siRNA sense strand
guuugagggugcagucaua

SEQ ID NO: 734242 - RNA, 19 nt, Homo sapiens
  misc_RNA (1)...(19): siRNA sense strand
ggauuucccucuuuauugc

SEQ ID NO: 734243 - RNA, 19 nt, Homo sapiens
  misc_RNA (1)...(19): siRNA sense strand
agaaaugggugccggaauc

SEQ ID NO: 734244 - RNA, 19 nt, Homo sapiens
  misc_RNA (1)...(19): siRNA sense strand
caugugcauucuucucuaa

SEQ ID NO: 734245 - RNA, 19 nt, Homo sapiens
  misc_RNA (1)...(19): siRNA sense strand
uaaagaacaggccgaaguu

SEQ ID NO: 734246 - RNA, 19 nt, Homo sapiens
  misc_RNA (1)...(19): siRNA sense strand
gaaauucagaaaccggaaa

SEQ ID NO: 734247 - RNA, 19 nt, Homo sapiens
  misc_RNA (1)...(19): siRNA sense strand
agccaaagauguagcuaaa

SEQ ID NO: 734248 - RNA, 19 nt, Homo sapiens
  misc_RNA (1)...(19): siRNA sense strand
ggacugcuauaacgcucuu

SEQ ID NO: 734249 - RNA, 19 nt, Homo sapiens
  misc_RNA (1)...(19): siRNA sense strand
gaaucugucuccugaucau

SEQ ID NO: 734250 - RNA, 19 nt, Homo sapiens
  misc_RNA (1)...(19): siRNA sense strand
ucagaaaccggaaaggaaa

SEQ ID NO: 734251 - RNA, 19 nt, Homo sapiens
  misc_RNA (1)...(19): siRNA sense strand
cuauaacgcucuucauuuu

SEQ ID NO: 734252 - RNA, 19 nt, Homo sapiens
  misc_RNA (1)...(19): siRNA sense strand
ccaaggauuucgcguugau

SEQ ID NO: 734253 - RNA, 19 nt, Homo sapiens
  misc_RNA (1)...(19): siRNA sense strand
ucuaagacauggauugaag

SEQ ID NO: 734254 - RNA, 19 nt, Homo sapiens
  misc_RNA (1)...(19): siRNA sense strand
ccaccgagauaccucuaug

SEQ ID NO: 734255 - RNA, 19 nt, Homo sapiens
  misc_RNA (1)...(19): siRNA sense strand
guuuguugcugguuugauu

SEQ ID NO: 734256 - RNA, 19 nt, Homo sapiens
  misc_RNA (1)...(19): siRNA sense strand
gcacguucuuacccaguug

SEQ ID NO: 734257 - RNA, 19 nt, Homo sapiens
  misc_RNA (1)...(19): siRNA sense strand
uguccaaccuguauguuau

SEQ ID NO: 734258 - RNA, 19 nt, Homo sapiens
  misc_RNA (1)...(19): siRNA sense strand
uccaauagaggaacuuuaa

SEQ ID NO: 734259 - RNA, 19 nt, Homo sapiens
  misc_RNA (1)...(19): siRNA sense strand
ugauugugcugcuguuaga

SEQ ID NO: 734260 - RNA, 19 nt, Homo sapiens
  misc_RNA (1)...(19): siRNA sense strand
ugucagaucccacuguuug

SEQ ID NO: 734261 - RNA, 19 nt, Homo sapiens
  misc_RNA (1)...(19): siRNA sense strand
ggccuuuguuacuaucuuu

SEQ ID NO: 734262 - RNA, 19 nt, Homo sapiens
  misc_RNA (1)...(19): siRNA sense strand
gaguuauucuggcuuccaa

SEQ ID NO: 734263 - RNA, 19 nt, Homo sapiens
  misc_RNA (1)...(19): siRNA sense strand
ucgauuuaguggcaacuuu

SEQ ID NO: 734264 - RNA, 19 nt, Homo sapiens
  misc_RNA (1)...(19): siRNA sense strand
cuagcagucacuauuauuu

SEQ ID NO: 734265 - RNA, 19 nt, Homo sapiens
  misc_RNA (1)...(19): siRNA sense strand
gagcuuuacgggaggcuuu

SEQ ID NO: 734266 - RNA, 19 nt, Homo sapiens
  misc_RNA (1)...(19): siRNA sense strand
guugucagaucccacuguu

SEQ ID NO: 734267 - RNA, 19 nt, Homo sapiens
  misc_RNA (1)...(19): siRNA sense strand
auaccucuaugguucauga

SEQ ID NO: 734268 - RNA, 19 nt, Homo sapiens
  misc_RNA (1)...(19): siRNA sense strand
aaagaacagcagaugguaa

SEQ ID NO: 734269 - RNA, 19 nt, Homo sapiens
  misc_RNA (1)...(19): siRNA sense strand
ugaaagaacagcagauggu

SEQ ID NO: 734270 - RNA, 19 nt, Homo sapiens
  misc_RNA (1)...(19): siRNA sense strand
ccaugucguuguuuauauc

SEQ ID NO: 734271 - RNA, 19 nt, Homo sapiens
  misc_RNA (1)...(19): siRNA sense strand
cggaaucugucuccugauc

SEQ ID NO: 734272 - RNA, 19 nt, Homo sapiens
  misc_RNA (1)...(19): siRNA sense strand
caaaaucauugaaguugga

SEQ ID NO: 734273 - RNA, 19 nt, Homo sapiens
  misc_RNA (1)...(19): siRNA sense strand
agaggaacuuuaauggaau

SEQ ID NO: 734274 - RNA, 19 nt, Homo sapiens
  misc_RNA (1)...(19): siRNA sense strand
gcuagcagucacuauuauu

SEQ ID NO: 734275 - RNA, 19 nt, Homo sapiens
  misc_RNA (1)...(19): siRNA sense strand
agucauagcucuguuccau

SEQ ID NO: 734276 - RNA, 19 nt, Homo sapiens
  misc_RNA (1)...(19): siRNA sense strand
cauugaaguuggagauaca

SEQ ID NO: 734277 - RNA, 19 nt, Homo sapiens
  misc_RNA (1)...(19): siRNA sense strand
guaacaucugguuugauua

SEQ ID NO: 734278 - RNA, 19 nt, Homo sapiens
  misc_RNA (1)...(19): siRNA sense strand
ccaauuguaacaucugguu

SEQ ID NO: 734279 - RNA, 19 nt, Homo sapiens
  misc_RNA (1)...(19): siRNA sense strand
ucaugugcauucuucucua

SEQ ID NO: 734280 - RNA, 19 nt, Homo sapiens
  misc_RNA (1)...(19): siRNA sense strand
caaccuguauguuauuucc

SEQ ID NO: 734281 - RNA, 19 nt, Homo sapiens
  misc_RNA (1)...(19): siRNA sense strand
caauggagcccagaaacug

SEQ ID NO: 734282 - RNA, 19 nt, Homo sapiens
  misc_RNA (1)...(19): siRNA sense strand
cagcugcguuuggcgguuu

SEQ ID NO: 734283 - RNA, 19 nt, Homo sapiens
  misc_RNA (1)...(19): siRNA sense strand
guguccaaccuguauguua

SEQ ID NO: 734284 - RNA, 19 nt, Homo sapiens
  misc_RNA (1)...(19): siRNA sense strand
guccaugucguuguuuaua

SEQ ID NO: 734285 - RNA, 19 nt, Homo sapiens
  misc_RNA (1)...(19): siRNA sense strand
uuaaagaacaggccgaagu

SEQ ID NO: 734286 - RNA, 19 nt, Homo sapiens
  misc_RNA (1)...(19): siRNA sense strand
cugcagauccuuucuacug

SEQ ID NO: 734287 - RNA, 19 nt, Homo sapiens
  misc_RNA (1)...(19): siRNA sense strand
ggaggccuuuguuacuauc

SEQ ID NO: 734288 - RNA, 19 nt, Homo sapiens
  misc_RNA (1)...(19): siRNA sense strand
uuggaggccuuuguuacua

SEQ ID NO: 734289 - RNA, 19 nt, Homo sapiens
  misc_RNA (1)...(19): siRNA sense strand
ggaggacccgcacguucuu

SEQ ID NO: 734290 - RNA, 19 nt, Homo sapiens
  misc_RNA (1)...(19): siRNA sense strand
ggaaaggaaaauccaguuu

SEQ ID NO: 734291 - RNA, 19 nt, Homo sapiens
  misc_RNA (1)...(19): siRNA sense strand
gccauuguguaugucauga

SEQ ID NO: 734292 - RNA, 19 nt, Homo sapiens
  misc_RNA (1)...(19): siRNA sense strand
aaaccauucugugcaguuc

SEQ ID NO: 734293 - RNA, 19 nt, Homo sapiens
  misc_RNA (1)...(19): siRNA sense strand
aagguucuguggacugcua

SEQ ID NO: 734294 - RNA, 19 nt, Homo sapiens
  misc_RNA (1)...(19): siRNA sense strand
cagccaaagauguagcuaa

SEQ ID NO: 734295 - RNA, 19 nt, Homo sapiens
  misc_RNA (1)...(19): siRNA sense strand
caaaccauucugugcaguu

SEQ ID NO: 734296 - RNA, 19 nt, Homo sapiens
  misc_RNA (1)...(19): siRNA sense strand
ggaaucugucuccugauca

SEQ ID NO: 734297 - RNA, 19 nt, Homo sapiens
  misc_RNA (1)...(19): siRNA sense strand
gaaaugggugccggaaucu

SEQ ID NO: 734298 - RNA, 19 nt, Homo sapiens
  misc_RNA (1)...(19): siRNA sense strand
caucugguuugauuaugca

SEQ ID NO: 734299 - RNA, 19 nt, Homo sapiens
  misc_RNA (1)...(19): siRNA sense strand
aaaggaaaauccaguuuag

SEQ ID NO: 734300 - RNA, 19 nt, Homo sapiens
  misc_RNA (1)...(19): siRNA sense strand
gagauaccucuaugguuca

SEQ ID NO: 734301 - RNA, 19 nt, Homo sapiens
  misc_RNA (1)...(19): siRNA sense strand
aagaacagcagaugguaau

SEQ ID NO: 734302 - RNA, 19 nt, Homo sapiens
  misc_RNA (1)...(19): siRNA sense strand
gcuaaacagcugaaagaac

SEQ ID NO: 734303 - RNA, 19 nt, Homo sapiens
  misc_RNA (1)...(19): siRNA sense strand
uggaggccuuuguuacuau

SEQ ID NO: 734304 - RNA, 19 nt, Homo sapiens
  misc_RNA (1)...(19): siRNA sense strand
ccaucaaacucuucuacac

SEQ ID NO: 734305 - RNA, 19 nt, Homo sapiens
  misc_RNA (1)...(19): siRNA sense strand
ggcagaacuuacccaaucu

SEQ ID NO: 734306 - RNA, 19 nt, Homo sapiens
  misc_RNA (1)...(19): siRNA sense strand
uaccagaaauucagaaacc

SEQ ID NO: 734307 - RNA, 19 nt, Homo sapiens
  misc_RNA (1)...(19): siRNA sense strand
guucaugagcuuaauaggu

SEQ ID NO: 734308 - RNA, 19 nt, Homo sapiens
  misc_RNA (1)...(19): siRNA sense strand
uccaugucguuguuuauau

SEQ ID NO: 734309 - RNA, 19 nt, Homo sapiens
  misc_RNA (1)...(19): siRNA sense strand
guauguuauuucccagaug

SEQ ID NO: 734310 - RNA, 19 nt, Homo sapiens
  misc_RNA (1)...(19): siRNA sense strand
uaaagaagaucacagcaaa

SEQ ID NO: 734311 - RNA, 19 nt, Homo sapiens
  misc_RNA (1)...(19): siRNA sense strand
gaacuggacuguggcauug

SEQ ID NO: 734312 - RNA, 19 nt, Homo sapiens
  misc_RNA (1)...(19): siRNA sense strand
ugagauggguuuauguaua

SEQ ID NO: 734313 - RNA, 19 nt, Homo sapiens
  misc_RNA (1)...(19): siRNA sense strand
ccacagcaccugguuauua

SEQ ID NO: 734314 - RNA, 19 nt, Homo sapiens
  misc_RNA (1)...(19): siRNA sense strand
agaaacagauuccauguau

SEQ ID NO: 734315 - RNA, 19 nt, Homo sapiens
  misc_RNA (1)...(19): siRNA sense strand
caacagaauuugaguccuu

SEQ ID NO: 734316 - RNA, 19 nt, Homo sapiens
  misc_RNA (1)...(19): siRNA sense strand
gaaacagauuccauguauu

SEQ ID NO: 734317 - RNA, 19 nt, Homo sapiens
  misc_RNA (1)...(19): siRNA sense strand
cagauuccauguauuguuu

SEQ ID NO: 734318 - RNA, 19 nt, Homo sapiens
  misc_RNA (1)...(19): siRNA sense strand
ccgacaagcuugaauuuau

SEQ ID NO: 734319 - RNA, 19 nt, Homo sapiens
  misc_RNA (1)...(19): siRNA sense strand
ccaaagaucauacauggaa

SEQ ID NO: 734320 - RNA, 19 nt, Homo sapiens
  misc_RNA (1)...(19): siRNA sense strand
ggacaacaguuauaaaaug

SEQ ID NO: 734321 - RNA, 19 nt, Homo sapiens
  misc_RNA (1)...(19): siRNA sense strand
gaauaucccuggacaacag

SEQ ID NO: 734322 - RNA, 19 nt, Homo sapiens
  misc_RNA (1)...(19): siRNA sense strand
aaacagauuccauguauug

SEQ ID NO: 734323 - RNA, 19 nt, Homo sapiens
  misc_RNA (1)...(19): siRNA sense strand
ucaauggacucuggaauau

SEQ ID NO: 734324 - RNA, 19 nt, Homo sapiens
  misc_RNA (1)...(19): siRNA sense strand
cgacaagcuugaauuuaug

SEQ ID NO: 734325 - RNA, 19 nt, Homo sapiens
  misc_RNA (1)...(19): siRNA sense strand
gaaacaguaugccgacaag

SEQ ID NO: 734326 - RNA, 19 nt, Homo sapiens
  misc_RNA (1)...(19): siRNA sense strand
gaauugaugcgugauguuu

SEQ ID NO: 734327 - RNA, 19 nt, Homo sapiens
  misc_RNA (1)...(19): siRNA sense strand
gaaccaaagaucauacaug

SEQ ID NO: 734328 - RNA, 19 nt, Homo sapiens
  misc_RNA (1)...(19): siRNA sense strand
gaaagguggcaacagaauu

SEQ ID NO: 734329 - RNA, 19 nt, Homo sapiens
  misc_RNA (1)...(19): siRNA sense strand
ggaaacauucagaaacuug

SEQ ID NO: 734330 - RNA, 19 nt, Homo sapiens
  misc_RNA (1)...(19): siRNA sense strand
ggugaagaaggaauaauuu

SEQ ID NO: 734331 - RNA, 19 nt, Homo sapiens
  misc_RNA (1)...(19): siRNA sense strand
ggagaacacugaaaacuca

SEQ ID NO: 734332 - RNA, 19 nt, Homo sapiens
  misc_RNA (1)...(19): siRNA sense strand
gcagcaaaccucagggaaa

SEQ ID NO: 734333 - RNA, 19 nt, Homo sapiens
  misc_RNA (1)...(19): siRNA sense strand
cacagcaccugguuauuau

SEQ ID NO: 734334 - RNA, 19 nt, Homo sapiens
  misc_RNA (1)...(19): siRNA sense strand
gugccaugcugaaacagua

SEQ ID NO: 734335 - RNA, 19 nt, Homo sapiens
  misc_RNA (1)...(19): siRNA sense strand
gaaacauucagaaacuuga

SEQ ID NO: 734336 - RNA, 19 nt, Homo sapiens
  misc_RNA (1)...(19): siRNA sense strand
aaagguggcaacagaauuu

SEQ ID NO: 734337 - RNA, 19 nt, Homo sapiens
  misc_RNA (1)...(19): siRNA sense strand
gcaccugguuauuauucuu

SEQ ID NO: 734338 - RNA, 19 nt, Homo sapiens
  misc_RNA (1)...(19): siRNA sense strand
gcaaagaaacagauuccau

SEQ ID NO: 734339 - RNA, 19 nt, Homo sapiens
  misc_RNA (1)...(19): siRNA sense strand
gaaauaugaagucaggaau

SEQ ID NO: 734340 - RNA, 19 nt, Homo sapiens
  misc_RNA (1)...(19): siRNA sense strand
gaugcgugauguuucuaaa

SEQ ID NO: 734341 - RNA, 19 nt, Homo sapiens
  misc_RNA (1)...(19): siRNA sense strand
acagugguguugaugauga

SEQ ID NO: 734342 - RNA, 19 nt, Homo sapiens
  misc_RNA (1)...(19): siRNA sense strand
gagccauggugaagaagga

SEQ ID NO: 734343 - RNA, 19 nt, Homo sapiens
  misc_RNA (1)...(19): siRNA sense strand
uaaaagcacuggaaugaca

SEQ ID NO: 734344 - RNA, 19 nt, Homo sapiens
  misc_RNA (1)...(19): siRNA sense strand
gggaaacauucagaaacuu

SEQ ID NO: 734345 - RNA, 19 nt, Homo sapiens
  misc_RNA (1)...(19): siRNA sense strand
ggaggccgacuucuuguau

SEQ ID NO: 734346 - RNA, 19 nt, Homo sapiens
  misc_RNA (1)...(19): siRNA sense strand
cagcaaaccucagggaaac

SEQ ID NO: 734347 - RNA, 19 nt, Homo sapiens
  misc_RNA (1)...(19): siRNA sense strand
gacagacagugguguugau

SEQ ID NO: 734348 - RNA, 19 nt, Homo sapiens
  misc_RNA (1)...(19): siRNA sense strand
agacagugguguugaugau

SEQ ID NO: 734349 - RNA, 19 nt, Homo sapiens
  misc_RNA (1)...(19): siRNA sense strand
ugaaauaugaagucaggaa

SEQ ID NO: 734350 - RNA, 19 nt, Homo sapiens
  misc_RNA (1)...(19): siRNA sense strand
ucugagccauggugaagaa

SEQ ID NO: 734351 - RNA, 19 nt, Homo sapiens
  misc_RNA (1)...(19): siRNA sense strand
auucaggccugccguggua

SEQ ID NO: 734352 - RNA, 19 nt, Homo sapiens
  misc_RNA (1)...(19): siRNA sense strand
ggaauugaugcgugauguu

SEQ ID NO: 734353 - RNA, 19 nt, Homo sapiens
  misc_RNA (1)...(19): siRNA sense strand
ugcgugauguuucuaaaga

SEQ ID NO: 734354 - RNA, 19 nt, Homo sapiens
  misc_RNA (1)...(19): siRNA sense strand
gccgacaagcuugaauuua

SEQ ID NO: 734355 - RNA, 19 nt, Homo sapiens
  misc_RNA (1)...(19): siRNA sense strand
gaagaucacagcaaaagga

SEQ ID NO: 734356 - RNA, 19 nt, Homo sapiens
  misc_RNA (1)...(19): siRNA sense strand
ucagggaaacauucagaaa

SEQ ID NO: 734357 - RNA, 19 nt, Homo sapiens
  misc_RNA (1)...(19): siRNA sense strand
ggccugccgugguacagaa

SEQ ID NO: 734358 - RNA, 19 nt, Homo sapiens
  misc_RNA (1)...(19): siRNA sense strand
cuaaagaagaucacagcaa

SEQ ID NO: 734359 - RNA, 19 nt, Homo sapiens
  misc_RNA (1)...(19): siRNA sense strand
ccugagauggguuuaugua

SEQ ID NO: 734360 - RNA, 19 nt, Homo sapiens
  misc_RNA (1)...(19): siRNA sense strand
gaggccgacuucuuguaug

SEQ ID NO: 734361 - RNA, 19 nt, Homo sapiens
  misc_RNA (1)...(19): siRNA sense strand
cgaaagguggcaacagaau

SEQ ID NO: 734362 - RNA, 19 nt, Homo sapiens
  misc_RNA (1)...(19): siRNA sense strand
cauaaaagcacuggaauga

SEQ ID NO: 734363 - RNA, 19 nt, Homo sapiens
  misc_RNA (1)...(19): siRNA sense strand
aagaaacagauuccaugua

SEQ ID NO: 734364 - RNA, 19 nt, Homo sapiens
  misc_RNA (1)...(19): siRNA sense strand
accgaaagguggcaacaga

SEQ ID NO: 734365 - RNA, 19 nt, Homo sapiens
  misc_RNA (1)...(19): siRNA sense strand
aaagaaacagauuccaugu

SEQ ID NO: 734366 - RNA, 19 nt, Homo sapiens
  misc_RNA (1)...(19): siRNA sense strand
ggaauaucccuggacaaca

SEQ ID NO: 734367 - RNA, 19 nt, Homo sapiens
  misc_RNA (1)...(19): siRNA sense strand
agggaaacauucagaaacu

SEQ ID NO: 734368 - RNA, 19 nt, Homo sapiens
  misc_RNA (1)...(19): siRNA sense strand
cauggaagcgaaucaaugg

SEQ ID NO: 734369 - RNA, 19 nt, Homo sapiens
  misc_RNA (1)...(19): siRNA sense strand
uuacccggguuaaccgaaa

SEQ ID NO: 734370 - RNA, 19 nt, Homo sapiens
  misc_RNA (1)...(19): siRNA sense strand
ggacuguggcauugagaca

SEQ ID NO: 734371 - RNA, 19 nt, Homo sapiens
  misc_RNA (1)...(19): siRNA sense strand
gaaucaauggacucuggaa

SEQ ID NO: 734372 - RNA, 19 nt, Homo sapiens
  misc_RNA (1)...(19): siRNA sense strand
gcaaaccucagggaaacau

SEQ ID NO: 734373 - RNA, 19 nt, Homo sapiens
  misc_RNA (1)...(19): siRNA sense strand
gcuugaauuuaugcacauu

SEQ ID NO: 734374 - RNA, 19 nt, Homo sapiens
  misc_RNA (1)...(19): siRNA sense strand
cauggcgugucauaaaaua

SEQ ID NO: 734375 - RNA, 19 nt, Homo sapiens
  misc_RNA (1)...(19): siRNA sense strand
aaaacucaguggauucaaa

SEQ ID NO: 734376 - RNA, 19 nt, Homo sapiens
  misc_RNA (1)...(19): siRNA sense strand
ccauggugaagaaggaaua

SEQ ID NO: 734377 - RNA, 19 nt, Homo sapiens
  misc_RNA (1)...(19): siRNA sense strand
cagcaccugguuauuauuc

SEQ ID NO: 734378 - RNA, 19 nt, Homo sapiens
  misc_RNA (1)...(19): siRNA sense strand
aacagaauuugaguccuuu

SEQ ID NO: 734379 - RNA, 19 nt, Homo sapiens
  misc_RNA (1)...(19): siRNA sense strand
ugaaacaguaugccgacaa

SEQ ID NO: 734380 - RNA, 19 nt, Homo sapiens
  misc_RNA (1)...(19): siRNA sense strand
aucaauggacucuggaaua

SEQ ID NO: 734381 - RNA, 19 nt, Homo sapiens
  misc_RNA (1)...(19): siRNA sense strand
gacaacaguuauaaaaugg

SEQ ID NO: 734382 - RNA, 19 nt, Homo sapiens
  misc_RNA (1)...(19): siRNA sense strand
uggugaagaaggaauaauu

SEQ ID NO: 734383 - RNA, 19 nt, Homo sapiens
  misc_RNA (1)...(19): siRNA sense strand
gagacagacagugguguug

SEQ ID NO: 734384 - RNA, 19 nt, Homo sapiens
  misc_RNA (1)...(19): siRNA sense strand
agaacuggacuguggcauu

SEQ ID NO: 734385 - RNA, 19 nt, Homo sapiens
  misc_RNA (1)...(19): siRNA sense strand
uggaauugaugcgugaugu

SEQ ID NO: 734386 - RNA, 19 nt, Homo sapiens
  misc_RNA (1)...(19): siRNA sense strand
acagauuccauguauuguu

SEQ ID NO: 734387 - RNA, 19 nt, Homo sapiens
  misc_RNA (1)...(19): siRNA sense strand
ugagacagacagugguguu

SEQ ID NO: 734388 - RNA, 19 nt, Homo sapiens
  misc_RNA (1)...(19): siRNA sense strand
agacagacagugguguuga

SEQ ID NO: 734389 - RNA, 19 nt, Homo sapiens
  misc_RNA (1)...(19): siRNA sense strand
ccgacuucuuguaugcaua

SEQ ID NO: 734390 - RNA, 19 nt, Homo sapiens
  misc_RNA (1)...(19): siRNA sense strand
guuauuauucuuggcgaaa

SEQ ID NO: 734391 - RNA, 19 nt, Homo sapiens
  misc_RNA (1)...(19): siRNA sense strand
aauggacucuggaauaucc

SEQ ID NO: 734392 - RNA, 19 nt, Homo sapiens
  misc_RNA (1)...(19): siRNA sense strand
uaaagaagaucacagcaaa

SEQ ID NO: 734393 - RNA, 19 nt, Homo sapiens
  misc_RNA (1)...(19): siRNA sense strand
gaacuggacuguggcauug

SEQ ID NO: 734394 - RNA, 19 nt, Homo sapiens
  misc_RNA (1)...(19): siRNA sense strand
ugagauggguuuauguaua

SEQ ID NO: 734395 - RNA, 19 nt, Homo sapiens
  misc_RNA (1)...(19): siRNA sense strand
ccacagcaccugguuauua

SEQ ID NO: 734396 - RNA, 19 nt, Homo sapiens
  misc_RNA (1)...(19): siRNA sense strand
agaaacagauuccauguau

SEQ ID NO: 734397 - RNA, 19 nt, Homo sapiens
  misc_RNA (1)...(19): siRNA sense strand
caacagaauuugaguccuu

SEQ ID NO: 734398 - RNA, 19 nt, Homo sapiens
  misc_RNA (1)...(19): siRNA sense strand
gaaacagauuccauguauu

SEQ ID NO: 734399 - RNA, 19 nt, Homo sapiens
  misc_RNA (1)...(19): siRNA sense strand
cagauuccauguauuguuu

SEQ ID NO: 734400 - RNA, 19 nt, Homo sapiens
  misc_RNA (1)...(19): siRNA sense strand
ccgacaagcuugaauuuau

SEQ ID NO: 734401 - RNA, 19 nt, Homo sapiens
  misc_RNA (1)...(19): siRNA sense strand
ccaaagaucauacauggaa

SEQ ID NO: 734402 - RNA, 19 nt, Homo sapiens
  misc_RNA (1)...(19): siRNA sense strand
ggacaacaguuauaaaaug

SEQ ID NO: 734403 - RNA, 19 nt, Homo sapiens
  misc_RNA (1)...(19): siRNA sense strand
gaauaucccuggacaacag

SEQ ID NO: 734404 - RNA, 19 nt, Homo sapiens
  misc_RNA (1)...(19): siRNA sense strand
aaacagauuccauguauug

SEQ ID NO: 734405 - RNA, 19 nt, Homo sapiens
  misc_RNA (1)...(19): siRNA sense strand
ucaauggacucuggaauau

SEQ ID NO: 734406 - RNA, 19 nt, Homo sapiens
  misc_RNA (1)...(19): siRNA sense strand
cgacaagcuugaauuuaug

SEQ ID NO: 734407 - RNA, 19 nt, Homo sapiens
  misc_RNA (1)...(19): siRNA sense strand
gaaacaguaugccgacaag

SEQ ID NO: 734408 - RNA, 19 nt, Homo sapiens
  misc_RNA (1)...(19): siRNA sense strand
gaauugaugcgugauguuu

SEQ ID NO: 734409 - RNA, 19 nt, Homo sapiens
  misc_RNA (1)...(19): siRNA sense strand
gaaccaaagaucauacaug

SEQ ID NO: 734410 - RNA, 19 nt, Homo sapiens
  misc_RNA (1)...(19): siRNA sense strand
gaaagguggcaacagaauu

SEQ ID NO: 734411 - RNA, 19 nt, Homo sapiens
  misc_RNA (1)...(19): siRNA sense strand
ggaaacauucagaaacuug

SEQ ID NO: 734412 - RNA, 19 nt, Homo sapiens
  misc_RNA (1)...(19): siRNA sense strand
ggugaagaaggaauaauuu

SEQ ID NO: 734413 - RNA, 19 nt, Homo sapiens
  misc_RNA (1)...(19): siRNA sense strand
ggagaacacugaaaacuca

SEQ ID NO: 734414 - RNA, 19 nt, Homo sapiens
  misc_RNA (1)...(19): siRNA sense strand
gcagcaaaccucagggaaa

SEQ ID NO: 734415 - RNA, 19 nt, Homo sapiens
  misc_RNA (1)...(19): siRNA sense strand
cacagcaccugguuauuau

SEQ ID NO: 734416 - RNA, 19 nt, Homo sapiens
  misc_RNA (1)...(19): siRNA sense strand
gugccaugcugaaacagua

SEQ ID NO: 734417 - RNA, 19 nt, Homo sapiens
  misc_RNA (1)...(19): siRNA sense strand
gaaacauucagaaacuuga

SEQ ID NO: 734418 - RNA, 19 nt, Homo sapiens
  misc_RNA (1)...(19): siRNA sense strand
aaagguggcaacagaauuu

SEQ ID NO: 734419 - RNA, 19 nt, Homo sapiens
  misc_RNA (1)...(19): siRNA sense strand
gcaccugguuauuauucuu

SEQ ID NO: 734420 - RNA, 19 nt, Homo sapiens
  misc_RNA (1)...(19): siRNA sense strand
gcaaagaaacagauuccau

SEQ ID NO: 734421 - RNA, 19 nt, Homo sapiens
  misc_RNA (1)...(19): siRNA sense strand
gaaauaugaagucaggaau

SEQ ID NO: 734422 - RNA, 19 nt, Homo sapiens
  misc_RNA (1)...(19): siRNA sense strand
gaugcgugauguuucuaaa

SEQ ID NO: 734423 - RNA, 19 nt, Homo sapiens
  misc_RNA (1)...(19): siRNA sense strand
acagugguguugaugauga

SEQ ID NO: 734424 - RNA, 19 nt, Homo sapiens
  misc_RNA (1)...(19): siRNA sense strand
gagccauggugaagaagga

SEQ ID NO: 734425 - RNA, 19 nt, Homo sapiens
  misc_RNA (1)...(19): siRNA sense strand
uaaaagcacuggaaugaca

SEQ ID NO: 734426 - RNA, 19 nt, Homo sapiens
  misc_RNA (1)...(19): siRNA sense strand
gggaaacauucagaaacuu

SEQ ID NO: 734427 - RNA, 19 nt, Homo sapiens
  misc_RNA (1)...(19): siRNA sense strand
ggaggccgacuucuuguau

SEQ ID NO: 734428 - RNA, 19 nt, Homo sapiens
  misc_RNA (1)...(19): siRNA sense strand
cagcaaaccucagggaaac

SEQ ID NO: 734429 - RNA, 19 nt, Homo sapiens
  misc_RNA (1)...(19): siRNA sense strand
gacagacagugguguugau

SEQ ID NO: 734430 - RNA, 19 nt, Homo sapiens
  misc_RNA (1)...(19): siRNA sense strand
agacagugguguugaugau

SEQ ID NO: 734431 - RNA, 19 nt, Homo sapiens
  misc_RNA (1)...(19): siRNA sense strand
ugaaauaugaagucaggaa

SEQ ID NO: 734432 - RNA, 19 nt, Homo sapiens
  misc_RNA (1)...(19): siRNA sense strand
ucugagccauggugaagaa

SEQ ID NO: 734433 - RNA, 19 nt, Homo sapiens
  misc_RNA (1)...(19): siRNA sense strand
auucaggccugccguggua

SEQ ID NO: 734434 - RNA, 19 nt, Homo sapiens
  misc_RNA (1)...(19): siRNA sense strand
ggaauugaugcgugauguu

SEQ ID NO: 734435 - RNA, 19 nt, Homo sapiens
  misc_RNA (1)...(19): siRNA sense strand
ugcgugauguuucuaaaga

SEQ ID NO: 734436 - RNA, 19 nt, Homo sapiens
  misc_RNA (1)...(19): siRNA sense strand
gccgacaagcuugaauuua

SEQ ID NO: 734437 - RNA, 19 nt, Homo sapiens
  misc_RNA (1)...(19): siRNA sense strand
gaagaucacagcaaaagga

SEQ ID NO: 734438 - RNA, 19 nt, Homo sapiens
  misc_RNA (1)...(19): siRNA sense strand
ucagggaaacauucagaaa

SEQ ID NO: 734439 - RNA, 19 nt, Homo sapiens
  misc_RNA (1)...(19): siRNA sense strand
ggccugccgugguacagaa

SEQ ID NO: 734440 - RNA, 19 nt, Homo sapiens
  misc_RNA (1)...(19): siRNA sense strand
cuaaagaagaucacagcaa

SEQ ID NO: 734441 - RNA, 19 nt, Homo sapiens
  misc_RNA (1)...(19): siRNA sense strand
ccugagauggguuuaugua

SEQ ID NO: 734442 - RNA, 19 nt, Homo sapiens
  misc_RNA (1)...(19): siRNA sense strand
gaggccgacuucuuguaug

SEQ ID NO: 734443 - RNA, 19 nt, Homo sapiens
  misc_RNA (1)...(19): siRNA sense strand
cgaaagguggcaacagaau

SEQ ID NO: 734444 - RNA, 19 nt, Homo sapiens
  misc_RNA (1)...(19): siRNA sense strand
cauaaaagcacuggaauga

SEQ ID NO: 734445 - RNA, 19 nt, Homo sapiens
  misc_RNA (1)...(19): siRNA sense strand
aagaaacagauuccaugua

SEQ ID NO: 734446 - RNA, 19 nt, Homo sapiens
  misc_RNA (1)...(19): siRNA sense strand
accgaaagguggcaacaga

SEQ ID NO: 734447 - RNA, 19 nt, Homo sapiens
  misc_RNA (1)...(19): siRNA sense strand
aaagaaacagauuccaugu

SEQ ID NO: 734448 - RNA, 19 nt, Homo sapiens
  misc_RNA (1)...(19): siRNA sense strand
ggaauaucccuggacaaca

SEQ ID NO: 734449 - RNA, 19 nt, Homo sapiens
  misc_RNA (1)...(19): siRNA sense strand
agggaaacauucagaaacu

SEQ ID NO: 734450 - RNA, 19 nt, Homo sapiens
  misc_RNA (1)...(19): siRNA sense strand
cauggaagcgaaucaaugg

SEQ ID NO: 734451 - RNA, 19 nt, Homo sapiens
  misc_RNA (1)...(19): siRNA sense strand
uuacccggguuaaccgaaa

SEQ ID NO: 734452 - RNA, 19 nt, Homo sapiens
  misc_RNA (1)...(19): siRNA sense strand
ggacuguggcauugagaca

SEQ ID NO: 734453 - RNA, 19 nt, Homo sapiens
  misc_RNA (1)...(19): siRNA sense strand
gaaucaauggacucuggaa

SEQ ID NO: 734454 - RNA, 19 nt, Homo sapiens
  misc_RNA (1)...(19): siRNA sense strand
gcaaaccucagggaaacau

SEQ ID NO: 734455 - RNA, 19 nt, Homo sapiens
  misc_RNA (1)...(19): siRNA sense strand
gcuugaauuuaugcacauu

SEQ ID NO: 734456 - RNA, 19 nt, Homo sapiens
  misc_RNA (1)...(19): siRNA sense strand
cauggcgugucauaaaaua

SEQ ID NO: 734457 - RNA, 19 nt, Homo sapiens
  misc_RNA (1)...(19): siRNA sense strand
aaaacucaguggauucaaa

SEQ ID NO: 734458 - RNA, 19 nt, Homo sapiens
  misc_RNA (1)...(19): siRNA sense strand
ccauggugaagaaggaaua

SEQ ID NO: 734459 - RNA, 19 nt, Homo sapiens
  misc_RNA (1)...(19): siRNA sense strand
cagcaccugguuauuauuc

SEQ ID NO: 734460 - RNA, 19 nt, Homo sapiens
  misc_RNA (1)...(19): siRNA sense strand
aacagaauuugaguccuuu

SEQ ID NO: 734461 - RNA, 19 nt, Homo sapiens
  misc_RNA (1)...(19): siRNA sense strand
ugaaacaguaugccgacaa

SEQ ID NO: 734462 - RNA, 19 nt, Homo sapiens
  misc_RNA (1)...(19): siRNA sense strand
aucaauggacucuggaaua

SEQ ID NO: 734463 - RNA, 19 nt, Homo sapiens
  misc_RNA (1)...(19): siRNA sense strand
gacaacaguuauaaaaugg

SEQ ID NO: 734464 - RNA, 19 nt, Homo sapiens
  misc_RNA (1)...(19): siRNA sense strand
uggugaagaaggaauaauu

SEQ ID NO: 734465 - RNA, 19 nt, Homo sapiens
  misc_RNA (1)...(19): siRNA sense strand
gagacagacagugguguug

SEQ ID NO: 734466 - RNA, 19 nt, Homo sapiens
  misc_RNA (1)...(19): siRNA sense strand
agaacuggacuguggcauu

SEQ ID NO: 734467 - RNA, 19 nt, Homo sapiens
  misc_RNA (1)...(19): siRNA sense strand
uggaauugaugcgugaugu

SEQ ID NO: 734468 - RNA, 19 nt, Homo sapiens
  misc_RNA (1)...(19): siRNA sense strand
acagauuccauguauuguu

SEQ ID NO: 734469 - RNA, 19 nt, Homo sapiens
  misc_RNA (1)...(19): siRNA sense strand
ugagacagacagugguguu

SEQ ID NO: 734470 - RNA, 19 nt, Homo sapiens
  misc_RNA (1)...(19): siRNA sense strand
agacagacagugguguuga

SEQ ID NO: 734471 - RNA, 19 nt, Homo sapiens
  misc_RNA (1)...(19): siRNA sense strand
ccgacuucuuguaugcaua

SEQ ID NO: 734472 - RNA, 19 nt, Homo sapiens
  misc_RNA (1)...(19): siRNA sense strand
guuauuauucuuggcgaaa

SEQ ID NO: 734473 - RNA, 19 nt, Homo sapiens
  misc_RNA (1)...(19): siRNA sense strand
aauggacucuggaauaucc

SEQ ID NO: 734474 - RNA, 19 nt, Homo sapiens
  misc_RNA (1)...(19): siRNA sense strand
gcacagagcucaaguaauu

SEQ ID NO: 734475 - RNA, 19 nt, Homo sapiens
  misc_RNA (1)...(19): siRNA sense strand
gaaagucggccaagaaaga

SEQ ID NO: 734476 - RNA, 19 nt, Homo sapiens
  misc_RNA (1)...(19): siRNA sense strand
gggacaagcucaauaacuu

SEQ ID NO: 734477 - RNA, 19 nt, Homo sapiens
  misc_RNA (1)...(19): siRNA sense strand
guaaaggacuuaucaaacu

SEQ ID NO: 734478 - RNA, 19 nt, Homo sapiens
  misc_RNA (1)...(19): siRNA sense strand
ugacaaagcuaccuaugau

SEQ ID NO: 734479 - RNA, 19 nt, Homo sapiens
  misc_RNA (1)...(19): siRNA sense strand
ggacaagcucaauaacuua

SEQ ID NO: 734480 - RNA, 19 nt, Homo sapiens
  misc_RNA (1)...(19): siRNA sense strand
guucccaacuauaaacuua

SEQ ID NO: 734481 - RNA, 19 nt, Homo sapiens
  misc_RNA (1)...(19): siRNA sense strand
acaaagcuaccuaugauaa

SEQ ID NO: 734482 - RNA, 19 nt, Homo sapiens
  misc_RNA (1)...(19): siRNA sense strand
uaaaggacuuaucaaacug

SEQ ID NO: 734483 - RNA, 19 nt, Homo sapiens
  misc_RNA (1)...(19): siRNA sense strand
caaagcuaccuaugauaaa

SEQ ID NO: 734484 - RNA, 19 nt, Homo sapiens
  misc_RNA (1)...(19): siRNA sense strand
acagagcucaaguaauuua

SEQ ID NO: 734485 - RNA, 19 nt, Homo sapiens
  misc_RNA (1)...(19): siRNA sense strand
acaaagacccagugaacaa

SEQ ID NO: 734486 - RNA, 19 nt, Homo sapiens
  misc_RNA (1)...(19): siRNA sense strand
gacaaagcuaccuaugaua

SEQ ID NO: 734487 - RNA, 19 nt, Homo sapiens
  misc_RNA (1)...(19): siRNA sense strand
caaagacccagugaacaaa

SEQ ID NO: 734488 - RNA, 19 nt, Homo sapiens
  misc_RNA (1)...(19): siRNA sense strand
aagcacagagcucaaguaa

SEQ ID NO: 734489 - RNA, 19 nt, Homo sapiens
  misc_RNA (1)...(19): siRNA sense strand
cuaaggacgacaagaagaa

SEQ ID NO: 734490 - RNA, 19 nt, Homo sapiens
  misc_RNA (1)...(19): siRNA sense strand
agacaaagacccagugaac

SEQ ID NO: 734491 - RNA, 19 nt, Homo sapiens
  misc_RNA (1)...(19): siRNA sense strand
ucugagagacugaagauuc

SEQ ID NO: 734492 - RNA, 19 nt, Homo sapiens
  misc_RNA (1)...(19): siRNA sense strand
ccuaugauaaacucuguaa

SEQ ID NO: 734493 - RNA, 19 nt, Homo sapiens
  misc_RNA (1)...(19): siRNA sense strand
guucgggacaagcucaaua

SEQ ID NO: 734494 - RNA, 19 nt, Homo sapiens
  misc_RNA (1)...(19): siRNA sense strand
augauaaacucuguaagga

SEQ ID NO: 734495 - RNA, 19 nt, Homo sapiens
  misc_RNA (1)...(19): siRNA sense strand
ugauaaacucuguaaggaa

SEQ ID NO: 734496 - RNA, 19 nt, Homo sapiens
  misc_RNA (1)...(19): siRNA sense strand
gcaaaguucgggacaagcu

SEQ ID NO: 734497 - RNA, 19 nt, Homo sapiens
  misc_RNA (1)...(19): siRNA sense strand
gacaaagacccagugaaca

SEQ ID NO: 734498 - RNA, 19 nt, Homo sapiens
  misc_RNA (1)...(19): siRNA sense strand
uaugauaaacucuguaagg

SEQ ID NO: 734499 - RNA, 19 nt, Homo sapiens
  misc_RNA (1)...(19): siRNA sense strand
gacaagcucaauaacuuag

SEQ ID NO: 734500 - RNA, 19 nt, Homo sapiens
  misc_RNA (1)...(19): siRNA sense strand
aaagcuaccuaugauaaac

SEQ ID NO: 734501 - RNA, 19 nt, Homo sapiens
  misc_RNA (1)...(19): siRNA sense strand
ggaaagucggccaagaaag

SEQ ID NO: 734502 - RNA, 19 nt, Homo sapiens
  misc_RNA (1)...(19): siRNA sense strand
aaagacaaagacccaguga

SEQ ID NO: 734503 - RNA, 19 nt, Homo sapiens
  misc_RNA (1)...(19): siRNA sense strand
aaagcacagagcucaagua

SEQ ID NO: 734504 - RNA, 19 nt, Homo sapiens
  misc_RNA (1)...(19): siRNA sense strand
uaccuaugauaaacucugu

SEQ ID NO: 734505 - RNA, 19 nt, Homo sapiens
  misc_RNA (1)...(19): siRNA sense strand
uugacaaagcuaccuauga

SEQ ID NO: 734506 - RNA, 19 nt, Homo sapiens
  misc_RNA (1)...(19): siRNA sense strand
ccuaaggacgacaagaaga

SEQ ID NO: 734507 - RNA, 19 nt, Homo sapiens
  misc_RNA (1)...(19): siRNA sense strand
gcaaucacauuuaugcaua

SEQ ID NO: 734508 - RNA, 19 nt, Homo sapiens
  misc_RNA (1)...(19): siRNA sense strand
gacauuaacuggcuuguuc

SEQ ID NO: 734509 - RNA, 19 nt, Homo sapiens
  misc_RNA (1)...(19): siRNA sense strand
caacauaacugagguggau

SEQ ID NO: 734510 - RNA, 19 nt, Homo sapiens
  misc_RNA (1)...(19): siRNA sense strand
caugguacauucaagauuu

SEQ ID NO: 734511 - RNA, 19 nt, Homo sapiens
  misc_RNA (1)...(19): siRNA sense strand
cgaaggcaaucacauuuau

SEQ ID NO: 734512 - RNA, 19 nt, Homo sapiens
  misc_RNA (1)...(19): siRNA sense strand
gcgaaggcaaucacauuua

SEQ ID NO: 734513 - RNA, 19 nt, Homo sapiens
  misc_RNA (1)...(19): siRNA sense strand
ucacagaacuccucacacu

SEQ ID NO: 734514 - RNA, 19 nt, Homo sapiens
  misc_RNA (1)...(19): siRNA sense strand
ggagcugacuuccucaugu

SEQ ID NO: 734515 - RNA, 19 nt, Homo sapiens
  misc_RNA (1)...(19): siRNA sense strand
caagugcaauuggaaagaa

SEQ ID NO: 734516 - RNA, 19 nt, Homo sapiens
  misc_RNA (1)...(19): siRNA sense strand
ggaaaacccaagauauuua

SEQ ID NO: 734517 - RNA, 19 nt, Homo sapiens
  misc_RNA (1)...(19): siRNA sense strand
aaauauggcuccuccuuag

SEQ ID NO: 734518 - RNA, 19 nt, Homo sapiens
  misc_RNA (1)...(19): siRNA sense strand
gaacggcucaugguacauu

SEQ ID NO: 734519 - RNA, 19 nt, Homo sapiens
  misc_RNA (1)...(19): siRNA sense strand
gagcugacuuccucaugug

SEQ ID NO: 734520 - RNA, 19 nt, Homo sapiens
  misc_RNA (1)...(19): siRNA sense strand
gcaaagacccaagugcaau

SEQ ID NO: 734521 - RNA, 19 nt, Homo sapiens
  misc_RNA (1)...(19): siRNA sense strand
ugugugagauguugggaaa

SEQ ID NO: 734522 - RNA, 19 nt, Homo sapiens
  misc_RNA (1)...(19): siRNA sense strand
caaagacccaagugcaauu

SEQ ID NO: 734523 - RNA, 19 nt, Homo sapiens
  misc_RNA (1)...(19): siRNA sense strand
uuaacuggcuuguucaaag

SEQ ID NO: 734524 - RNA, 19 nt, Homo sapiens
  misc_RNA (1)...(19): siRNA sense strand
cugacuuccucauguguua

SEQ ID NO: 734525 - RNA, 19 nt, Homo sapiens
  misc_RNA (1)...(19): siRNA sense strand
uagauaaucagacagagaa

SEQ ID NO: 734526 - RNA, 19 nt, Homo sapiens
  misc_RNA (1)...(19): siRNA sense strand
gugaacggcucaugguaca

SEQ ID NO: 734527 - RNA, 19 nt, Homo sapiens
  misc_RNA (1)...(19): siRNA sense strand
ccucauguguuacucuguu

SEQ ID NO: 734528 - RNA, 19 nt, Homo sapiens
  misc_RNA (1)...(19): siRNA sense strand
uaacuggcuuguucaaagg

SEQ ID NO: 734529 - RNA, 19 nt, Homo sapiens
  misc_RNA (1)...(19): siRNA sense strand
caagauuugugugagaugu

SEQ ID NO: 734530 - RNA, 19 nt, Homo sapiens
  misc_RNA (1)...(19): siRNA sense strand
uguaguagauaaucagaca

SEQ ID NO: 734531 - RNA, 19 nt, Homo sapiens
  misc_RNA (1)...(19): siRNA sense strand
guucaaaggagacaagugu

SEQ ID NO: 734532 - RNA, 19 nt, Homo sapiens
  misc_RNA (1)...(19): siRNA sense strand
guagauaaucagacagaga

SEQ ID NO: 734533 - RNA, 19 nt, Homo sapiens
  misc_RNA (1)...(19): siRNA sense strand
ggcgaaggcaaucacauuu

SEQ ID NO: 734534 - RNA, 19 nt, Homo sapiens
  misc_RNA (1)...(19): siRNA sense strand
gaaggcaaucacauuuaug

SEQ ID NO: 734535 - RNA, 19 nt, Homo sapiens
  misc_RNA (1)...(19): siRNA sense strand
ggaugcagccuccguuuac

SEQ ID NO: 734536 - RNA, 19 nt, Homo sapiens
  misc_RNA (1)...(19): siRNA sense strand
gcucaugguacauucaaga

SEQ ID NO: 734537 - RNA, 19 nt, Homo sapiens
  misc_RNA (1)...(19): siRNA sense strand
gaaaauauggcuccuccuu

SEQ ID NO: 734538 - RNA, 19 nt, Homo sapiens
  misc_RNA (1)...(19): siRNA sense strand
agucauuccuuuggaugua

SEQ ID NO: 734539 - RNA, 19 nt, Homo sapiens
  misc_RNA (1)...(19): siRNA sense strand
guacauucaagauuugugu

SEQ ID NO: 734540 - RNA, 19 nt, Homo sapiens
  misc_RNA (1)...(19): siRNA sense strand
cuuuggauguaguagauaa

SEQ ID NO: 734541 - RNA, 19 nt, Homo sapiens
  misc_RNA (1)...(19): siRNA sense strand
gucacagccugguuggaaa

SEQ ID NO: 734542 - RNA, 19 nt, Homo sapiens
  misc_RNA (1)...(19): siRNA sense strand
uugccucaaugcuaacuaa

SEQ ID NO: 734543 - RNA, 19 nt, Homo sapiens
  misc_RNA (1)...(19): siRNA sense strand
gaugcagccuccguuuaca

SEQ ID NO: 734544 - RNA, 19 nt, Homo sapiens
  misc_RNA (1)...(19): siRNA sense strand
cuggugaacaggaaaguuu

SEQ ID NO: 734545 - RNA, 19 nt, Homo sapiens
  misc_RNA (1)...(19): siRNA sense strand
auaaucagacagagaaguu

SEQ ID NO: 734546 - RNA, 19 nt, Homo sapiens
  misc_RNA (1)...(19): siRNA sense strand
uggcgaaggcaaucacauu

SEQ ID NO: 734547 - RNA, 19 nt, Homo sapiens
  misc_RNA (1)...(19): siRNA sense strand
gauguaguagauaaucaga

SEQ ID NO: 734548 - RNA, 19 nt, Homo sapiens
  misc_RNA (1)...(19): siRNA sense strand
uggaugcagccuccguuua

SEQ ID NO: 734549 - RNA, 19 nt, Homo sapiens
  misc_RNA (1)...(19): siRNA sense strand
gccagucauuccuuuggau

SEQ ID NO: 734550 - RNA, 19 nt, Homo sapiens
  misc_RNA (1)...(19): siRNA sense strand
aagcugcauuucuuuccaa

SEQ ID NO: 734551 - RNA, 19 nt, Homo sapiens
  misc_RNA (1)...(19): siRNA sense strand
ugucacagccugguuggaa

SEQ ID NO: 734552 - RNA, 19 nt, Homo sapiens
  misc_RNA (1)...(19): siRNA sense strand
agauuugugugagauguug

SEQ ID NO: 734553 - RNA, 19 nt, Homo sapiens
  misc_RNA (1)...(19): siRNA sense strand
uggauguaguagauaauca

SEQ ID NO: 734554 - RNA, 19 nt, Homo sapiens
  misc_RNA (1)...(19): siRNA sense strand
aaaauauggcuccuccuua

SEQ ID NO: 734555 - RNA, 19 nt, Homo sapiens
  misc_RNA (1)...(19): siRNA sense strand
auucaagauuugugugaga

SEQ ID NO: 734556 - RNA, 19 nt, Homo sapiens
  misc_RNA (1)...(19): siRNA sense strand
ggcaaucacauuuaugcau

SEQ ID NO: 734557 - RNA, 19 nt, Homo sapiens
  misc_RNA (1)...(19): siRNA sense strand
gauaaucagacagagaagu

SEQ ID NO: 734558 - RNA, 19 nt, Homo sapiens
  misc_RNA (1)...(19): siRNA sense strand
gggaaaccagcacgaugug

SEQ ID NO: 734559 - RNA, 19 nt, Homo sapiens
  misc_RNA (1)...(19): siRNA sense strand
uaguagauaaucagacaga

SEQ ID NO: 734560 - RNA, 19 nt, Homo sapiens
  misc_RNA (1)...(19): siRNA sense strand
gcaaucacauuuaugcaua

SEQ ID NO: 734561 - RNA, 19 nt, Homo sapiens
  misc_RNA (1)...(19): siRNA sense strand
gacauuaacuggcuuguuc

SEQ ID NO: 734562 - RNA, 19 nt, Homo sapiens
  misc_RNA (1)...(19): siRNA sense strand
caacauaacugagguggau

SEQ ID NO: 734563 - RNA, 19 nt, Homo sapiens
  misc_RNA (1)...(19): siRNA sense strand
caugguacauucaagauuu

SEQ ID NO: 734564 - RNA, 19 nt, Homo sapiens
  misc_RNA (1)...(19): siRNA sense strand
cgaaggcaaucacauuuau

SEQ ID NO: 734565 - RNA, 19 nt, Homo sapiens
  misc_RNA (1)...(19): siRNA sense strand
gcgaaggcaaucacauuua

SEQ ID NO: 734566 - RNA, 19 nt, Homo sapiens
  misc_RNA (1)...(19): siRNA sense strand
ucacagaacuccucacacu

SEQ ID NO: 734567 - RNA, 19 nt, Homo sapiens
  misc_RNA (1)...(19): siRNA sense strand
ggagcugacuuccucaugu

SEQ ID NO: 734568 - RNA, 19 nt, Homo sapiens
  misc_RNA (1)...(19): siRNA sense strand
caagugcaauuggaaagaa

SEQ ID NO: 734569 - RNA, 19 nt, Homo sapiens
  misc_RNA (1)...(19): siRNA sense strand
ggaaaacccaagauauuua

SEQ ID NO: 734570 - RNA, 19 nt, Homo sapiens
  misc_RNA (1)...(19): siRNA sense strand
aaauauggcuccuccuuag

SEQ ID NO: 734571 - RNA, 19 nt, Homo sapiens
  misc_RNA (1)...(19): siRNA sense strand
gaacggcucaugguacauu

SEQ ID NO: 734572 - RNA, 19 nt, Homo sapiens
  misc_RNA (1)...(19): siRNA sense strand
gagcugacuuccucaugug

SEQ ID NO: 734573 - RNA, 19 nt, Homo sapiens
  misc_RNA (1)...(19): siRNA sense strand
gcaaagacccaagugcaau

SEQ ID NO: 734574 - RNA, 19 nt, Homo sapiens
  misc_RNA (1)...(19): siRNA sense strand
ugugugagauguugggaaa

SEQ ID NO: 734575 - RNA, 19 nt, Homo sapiens
  misc_RNA (1)...(19): siRNA sense strand
caaagacccaagugcaauu

SEQ ID NO: 734576 - RNA, 19 nt, Homo sapiens
  misc_RNA (1)...(19): siRNA sense strand
uuaacuggcuuguucaaag

SEQ ID NO: 734577 - RNA, 19 nt, Homo sapiens
  misc_RNA (1)...(19): siRNA sense strand
cugacuuccucauguguua

SEQ ID NO: 734578 - RNA, 19 nt, Homo sapiens
  misc_RNA (1)...(19): siRNA sense strand
uagauaaucagacagagaa

SEQ ID NO: 734579 - RNA, 19 nt, Homo sapiens
  misc_RNA (1)...(19): siRNA sense strand
gugaacggcucaugguaca

SEQ ID NO: 734580 - RNA, 19 nt, Homo sapiens
  misc_RNA (1)...(19): siRNA sense strand
ccucauguguuacucuguu

SEQ ID NO: 734581 - RNA, 19 nt, Homo sapiens
  misc_RNA (1)...(19): siRNA sense strand
uaacuggcuuguucaaagg

SEQ ID NO: 734582 - RNA, 19 nt, Homo sapiens
  misc_RNA (1)...(19): siRNA sense strand
caagauuugugugagaugu

SEQ ID NO: 734583 - RNA, 19 nt, Homo sapiens
  misc_RNA (1)...(19): siRNA sense strand
uguaguagauaaucagaca

SEQ ID NO: 734584 - RNA, 19 nt, Homo sapiens
  misc_RNA (1)...(19): siRNA sense strand
guucaaaggagacaagugu

SEQ ID NO: 734585 - RNA, 19 nt, Homo sapiens
  misc_RNA (1)...(19): siRNA sense strand
guagauaaucagacagaga

SEQ ID NO: 734586 - RNA, 19 nt, Homo sapiens
  misc_RNA (1)...(19): siRNA sense strand
ggcgaaggcaaucacauuu

SEQ ID NO: 734587 - RNA, 19 nt, Homo sapiens
  misc_RNA (1)...(19): siRNA sense strand
gaaggcaaucacauuuaug

SEQ ID NO: 734588 - RNA, 19 nt, Homo sapiens
  misc_RNA (1)...(19): siRNA sense strand
ggaugcagccuccguuuac

SEQ ID NO: 734589 - RNA, 19 nt, Homo sapiens
  misc_RNA (1)...(19): siRNA sense strand
gcucaugguacauucaaga

SEQ ID NO: 734590 - RNA, 19 nt, Homo sapiens
  misc_RNA (1)...(19): siRNA sense strand
gaaaauauggcuccuccuu

SEQ ID NO: 734591 - RNA, 19 nt, Homo sapiens
  misc_RNA (1)...(19): siRNA sense strand
agucauuccuuuggaugua

SEQ ID NO: 734592 - RNA, 19 nt, Homo sapiens
  misc_RNA (1)...(19): siRNA sense strand
guacauucaagauuugugu

SEQ ID NO: 734593 - RNA, 19 nt, Homo sapiens
  misc_RNA (1)...(19): siRNA sense strand
cuuuggauguaguagauaa

SEQ ID NO: 734594 - RNA, 19 nt, Homo sapiens
  misc_RNA (1)...(19): siRNA sense strand
gucacagccugguuggaaa

SEQ ID NO: 734595 - RNA, 19 nt, Homo sapiens
  misc_RNA (1)...(19): siRNA sense strand
uugccucaaugcuaacuaa

SEQ ID NO: 734596 - RNA, 19 nt, Homo sapiens
  misc_RNA (1)...(19): siRNA sense strand
gaugcagccuccguuuaca

SEQ ID NO: 734597 - RNA, 19 nt, Homo sapiens
  misc_RNA (1)...(19): siRNA sense strand
cuggugaacaggaaaguuu

SEQ ID NO: 734598 - RNA, 19 nt, Homo sapiens
  misc_RNA (1)...(19): siRNA sense strand
auaaucagacagagaaguu

SEQ ID NO: 734599 - RNA, 19 nt, Homo sapiens
  misc_RNA (1)...(19): siRNA sense strand
uggcgaaggcaaucacauu

SEQ ID NO: 734600 - RNA, 19 nt, Homo sapiens
  misc_RNA (1)...(19): siRNA sense strand
gauguaguagauaaucaga

SEQ ID NO: 734601 - RNA, 19 nt, Homo sapiens
  misc_RNA (1)...(19): siRNA sense strand
uggaugcagccuccguuua

SEQ ID NO: 734602 - RNA, 19 nt, Homo sapiens
  misc_RNA (1)...(19): siRNA sense strand
gccagucauuccuuuggau

SEQ ID NO: 734603 - RNA, 19 nt, Homo sapiens
  misc_RNA (1)...(19): siRNA sense strand
aagcugcauuucuuuccaa

SEQ ID NO: 734604 - RNA, 19 nt, Homo sapiens
  misc_RNA (1)...(19): siRNA sense strand
ugucacagccugguuggaa

SEQ ID NO: 734605 - RNA, 19 nt, Homo sapiens
  misc_RNA (1)...(19): siRNA sense strand
agauuugugugagauguug

SEQ ID NO: 734606 - RNA, 19 nt, Homo sapiens
  misc_RNA (1)...(19): siRNA sense strand
uggauguaguagauaauca

SEQ ID NO: 734607 - RNA, 19 nt, Homo sapiens
  misc_RNA (1)...(19): siRNA sense strand
aaaauauggcuccuccuua

SEQ ID NO: 734608 - RNA, 19 nt, Homo sapiens
  misc_RNA (1)...(19): siRNA sense strand
auucaagauuugugugaga

SEQ ID NO: 734609 - RNA, 19 nt, Homo sapiens
  misc_RNA (1)...(19): siRNA sense strand
ggcaaucacauuuaugcau

SEQ ID NO: 734610 - RNA, 19 nt, Homo sapiens
  misc_RNA (1)...(19): siRNA sense strand
gauaaucagacagagaagu

SEQ ID NO: 734611 - RNA, 19 nt, Homo sapiens
  misc_RNA (1)...(19): siRNA sense strand
gggaaaccagcacgaugug

SEQ ID NO: 734612 - RNA, 19 nt, Homo sapiens
  misc_RNA (1)...(19): siRNA sense strand
uaguagauaaucagacaga

SEQ ID NO: 734613 - RNA, 19 nt, Homo sapiens
  misc_RNA (1)...(19): siRNA sense strand
ggacacagauaaagaaacu

SEQ ID NO: 734614 - RNA, 19 nt, Homo sapiens
  misc_RNA (1)...(19): siRNA sense strand
ucacggaggucaaugucua

SEQ ID NO: 734615 - RNA, 19 nt, Homo sapiens
  misc_RNA (1)...(19): siRNA sense strand
cccaagacaucauuuacua

SEQ ID NO: 734616 - RNA, 19 nt, Homo sapiens
  misc_RNA (1)...(19): siRNA sense strand
gaggaacagucccaaggau

SEQ ID NO: 734617 - RNA, 19 nt, Homo sapiens
  misc_RNA (1)...(19): siRNA sense strand
gcucguggcgggauaagaa

SEQ ID NO: 734618 - RNA, 19 nt, Homo sapiens
  misc_RNA (1)...(19): siRNA sense strand
gcgaggacacagauaaaga

SEQ ID NO: 734619 - RNA, 19 nt, Homo sapiens
  misc_RNA (1)...(19): siRNA sense strand
cgaggacacagauaaagaa

SEQ ID NO: 734620 - RNA, 19 nt, Homo sapiens
  misc_RNA (1)...(19): siRNA sense strand
gaggacacagauaaagaaa

SEQ ID NO: 734621 - RNA, 19 nt, Homo sapiens
  misc_RNA (1)...(19): siRNA sense strand
cggcaugugugguguacga

SEQ ID NO: 734622 - RNA, 19 nt, Homo sapiens
  misc_RNA (1)...(19): siRNA sense strand
ucccaaggauggcacagau

SEQ ID NO: 734623 - RNA, 19 nt, Homo sapiens
  misc_RNA (1)...(19): siRNA sense strand
ugaaagagcuugcugguau

SEQ ID NO: 734624 - RNA, 19 nt, Homo sapiens
  misc_RNA (1)...(19): siRNA sense strand
ggaacucgaugcuuucuuu

SEQ ID NO: 734625 - RNA, 19 nt, Homo sapiens
  misc_RNA (1)...(19): siRNA sense strand
caagaugccucuaaagaug

SEQ ID NO: 734626 - RNA, 19 nt, Homo sapiens
  misc_RNA (1)...(19): siRNA sense strand
ugacagcaguggcuuuaua

SEQ ID NO: 734627 - RNA, 19 nt, Homo sapiens
  misc_RNA (1)...(19): siRNA sense strand
agaaggaacucgaugcuuu

SEQ ID NO: 734628 - RNA, 19 nt, Homo sapiens
  misc_RNA (1)...(19): siRNA sense strand
aaacuuccuucuccaauuu

SEQ ID NO: 734629 - RNA, 19 nt, Homo sapiens
  misc_RNA (1)...(19): siRNA sense strand
aggcuaaacuggaagaaua

SEQ ID NO: 734630 - RNA, 19 nt, Homo sapiens
  misc_RNA (1)...(19): siRNA sense strand
gaaagagcuugcugguaug

SEQ ID NO: 734631 - RNA, 19 nt, Homo sapiens
  misc_RNA (1)...(19): siRNA sense strand
gauggucgguuggaucuaa

SEQ ID NO: 734632 - RNA, 19 nt, Homo sapiens
  misc_RNA (1)...(19): siRNA sense strand
ggguggaccuugauaaguu

SEQ ID NO: 734633 - RNA, 19 nt, Homo sapiens
  misc_RNA (1)...(19): siRNA sense strand
gaaaaucuuugccuacuau

SEQ ID NO: 734634 - RNA, 19 nt, Homo sapiens
  misc_RNA (1)...(19): siRNA sense strand
gagcuggcuuugugucuug

SEQ ID NO: 734635 - RNA, 19 nt, Homo sapiens
  misc_RNA (1)...(19): siRNA sense strand
guucuuaucugaggaugaa

SEQ ID NO: 734636 - RNA, 19 nt, Homo sapiens
  misc_RNA (1)...(19): siRNA sense strand
gauucuggcucuucaggaa

SEQ ID NO: 734637 - RNA, 19 nt, Homo sapiens
  misc_RNA (1)...(19): siRNA sense strand
ggacagcagcguggaguuu

SEQ ID NO: 734638 - RNA, 19 nt, Homo sapiens
  misc_RNA (1)...(19): siRNA sense strand
gauggucgcauucggauga

SEQ ID NO: 734639 - RNA, 19 nt, Homo sapiens
  misc_RNA (1)...(19): siRNA sense strand
ugaugaaacuggguacuga

SEQ ID NO: 734640 - RNA, 19 nt, Homo sapiens
  misc_RNA (1)...(19): siRNA sense strand
ugacagaaauaaagauggu

SEQ ID NO: 734641 - RNA, 19 nt, Homo sapiens
  misc_RNA (1)...(19): siRNA sense strand
uaaaugacuuagcaaggau

SEQ ID NO: 734642 - RNA, 19 nt, Homo sapiens
  misc_RNA (1)...(19): siRNA sense strand
caaggauucuggcucuuca

SEQ ID NO: 734643 - RNA, 19 nt, Homo sapiens
  misc_RNA (1)...(19): siRNA sense strand
gaaggaacucgaugcuuuc

SEQ ID NO: 734644 - RNA, 19 nt, Homo sapiens
  misc_RNA (1)...(19): siRNA sense strand
gcaccaugaugaagauuuu

SEQ ID NO: 734645 - RNA, 19 nt, Homo sapiens
  misc_RNA (1)...(19): siRNA sense strand
ggucaugaaagcaaauuug

SEQ ID NO: 734646 - RNA, 19 nt, Homo sapiens
  misc_RNA (1)...(19): siRNA sense strand
agucugagcuggcuuugug

SEQ ID NO: 734647 - RNA, 19 nt, Homo sapiens
  misc_RNA (1)...(19): siRNA sense strand
gguuggaucuaaaugacuu

SEQ ID NO: 734648 - RNA, 19 nt, Homo sapiens
  misc_RNA (1)...(19): siRNA sense strand
gaaacuggguacugaugac

SEQ ID NO: 734649 - RNA, 19 nt, Homo sapiens
  misc_RNA (1)...(19): siRNA sense strand
gacagcagcguggaguuua

SEQ ID NO: 734650 - RNA, 19 nt, Homo sapiens
  misc_RNA (1)...(19): siRNA sense strand
gcugguauguucuuaucug

SEQ ID NO: 734651 - RNA, 19 nt, Homo sapiens
  misc_RNA (1)...(19): siRNA sense strand
ccaagaugccucuaaagau

SEQ ID NO: 734652 - RNA, 19 nt, Homo sapiens
  misc_RNA (1)...(19): siRNA sense strand
caaauuugcacaaggugaa

SEQ ID NO: 734653 - RNA, 19 nt, Homo sapiens
  misc_RNA (1)...(19): siRNA sense strand
uacccaagaugccucuaaa

SEQ ID NO: 734654 - RNA, 19 nt, Homo sapiens
  misc_RNA (1)...(19): siRNA sense strand
gaauacacuggcaccauga

SEQ ID NO: 734655 - RNA, 19 nt, Homo sapiens
  misc_RNA (1)...(19): siRNA sense strand
cagcaguggcuuuauauca

SEQ ID NO: 734656 - RNA, 19 nt, Homo sapiens
  misc_RNA (1)...(19): siRNA sense strand
aaacuuucuucugcucuuu

SEQ ID NO: 734657 - RNA, 19 nt, Homo sapiens
  misc_RNA (1)...(19): siRNA sense strand
ggaaggcccagaaguggau

SEQ ID NO: 734658 - RNA, 19 nt, Homo sapiens
  misc_RNA (1)...(19): siRNA sense strand
gacagcaguggcuuuauau

SEQ ID NO: 734659 - RNA, 19 nt, Homo sapiens
  misc_RNA (1)...(19): siRNA sense strand
gguggaccuugauaaguuc

SEQ ID NO: 734660 - RNA, 19 nt, Homo sapiens
  misc_RNA (1)...(19): siRNA sense strand
gcaaggauucuggcucuuc

SEQ ID NO: 734661 - RNA, 19 nt, Homo sapiens
  misc_RNA (1)...(19): siRNA sense strand
ggccauuucugaggcuaaa

SEQ ID NO: 734662 - RNA, 19 nt, Homo sapiens
  misc_RNA (1)...(19): siRNA sense strand
cugcugagcuccgcaacuu

SEQ ID NO: 734663 - RNA, 19 nt, Homo sapiens
  misc_RNA (1)...(19): siRNA sense strand
acacggucaugaaagcaaa

SEQ ID NO: 734664 - RNA, 19 nt, Homo sapiens
  misc_RNA (1)...(19): siRNA sense strand
gauaaguuccgcgagauuc

SEQ ID NO: 734665 - RNA, 19 nt, Homo sapiens
  misc_RNA (1)...(19): siRNA sense strand
gcguggaguuuaugcagau

SEQ ID NO: 734666 - RNA, 19 nt, Homo sapiens
  misc_RNA (1)...(19): siRNA sense strand
aagguuacauagaagagaa

SEQ ID NO: 734667 - RNA, 19 nt, Homo sapiens
  misc_RNA (1)...(19): siRNA sense strand
guuuaugacuacccaagau

SEQ ID NO: 734668 - RNA, 19 nt, Homo sapiens
  misc_RNA (1)...(19): siRNA sense strand
cccaagaugccucuaaaga

SEQ ID NO: 734669 - RNA, 19 nt, Homo sapiens
  misc_RNA (1)...(19): siRNA sense strand
gaaguggauggguuuguca

SEQ ID NO: 734670 - RNA, 19 nt, Homo sapiens
  misc_RNA (1)...(19): siRNA sense strand
uaaaauggaugcuuguucu

SEQ ID NO: 734671 - RNA, 19 nt, Homo sapiens
  misc_RNA (1)...(19): siRNA sense strand
uccgagaccucuuucuuca

SEQ ID NO: 734672 - RNA, 19 nt, Homo sapiens
  misc_RNA (1)...(19): siRNA sense strand
uuacauagaagagaaggaa

SEQ ID NO: 734673 - RNA, 19 nt, Homo sapiens
  misc_RNA (1)...(19): siRNA sense strand
uaaagauggucgguuggau

SEQ ID NO: 734674 - RNA, 19 nt, Homo sapiens
  misc_RNA (1)...(19): siRNA sense strand
agagcuugcugguauguuc

SEQ ID NO: 734675 - RNA, 19 nt, Homo sapiens
  misc_RNA (1)...(19): siRNA sense strand
gcgcuuugaugcggaugaa

SEQ ID NO: 734676 - RNA, 19 nt, Homo sapiens
  misc_RNA (1)...(19): siRNA sense strand
uggaguuuaugcagauuug

SEQ ID NO: 734677 - RNA, 19 nt, Homo sapiens
  misc_RNA (1)...(19): siRNA sense strand
cucuaaagauggucgcauu

SEQ ID NO: 734678 - RNA, 19 nt, Homo sapiens
  misc_RNA (1)...(19): siRNA sense strand
gagaaggaacucgaugcuu

SEQ ID NO: 734679 - RNA, 19 nt, Homo sapiens
  misc_RNA (1)...(19): siRNA sense strand
gaacucgaugcuuucuuuc

SEQ ID NO: 734680 - RNA, 19 nt, Homo sapiens
  misc_RNA (1)...(19): siRNA sense strand
ugaaacuggguacugauga

SEQ ID NO: 734681 - RNA, 19 nt, Homo sapiens
  misc_RNA (1)...(19): siRNA sense strand
ggaugcuuguucuacugaa

SEQ ID NO: 734682 - RNA, 19 nt, Homo sapiens
  misc_RNA (1)...(19): siRNA sense strand
acagcagcguggaguuuau

SEQ ID NO: 734683 - RNA, 19 nt, Homo sapiens
  misc_RNA (1)...(19): siRNA sense strand
ccucuuucuucaccacaaa

SEQ ID NO: 734684 - RNA, 19 nt, Homo sapiens
  misc_RNA (1)...(19): siRNA sense strand
gagaaaaucuuugccuacu

SEQ ID NO: 734685 - RNA, 19 nt, Homo sapiens
  misc_RNA (1)...(19): siRNA sense strand
gcuugcugguauguucuua

SEQ ID NO: 734686 - RNA, 19 nt, Homo sapiens
  misc_RNA (1)...(19): siRNA sense strand
aaaacuuccuucuccaauu

SEQ ID NO: 734687 - RNA, 19 nt, Homo sapiens
  misc_RNA (1)...(19): siRNA sense strand
acacuggcaccaugaugaa

SEQ ID NO: 734688 - RNA, 19 nt, Homo sapiens
  misc_RNA (1)...(19): siRNA sense strand
agaaguggauggguuuguc

SEQ ID NO: 734689 - RNA, 19 nt, Homo sapiens
  misc_RNA (1)...(19): siRNA sense strand
gaugcuuguucuacugaag

SEQ ID NO: 734690 - RNA, 19 nt, Homo sapiens
  misc_RNA (1)...(19): siRNA sense strand
gaaaacuuccuucuccaau

SEQ ID NO: 734691 - RNA, 19 nt, Homo sapiens
  misc_RNA (1)...(19): siRNA sense strand
ugagcuggcuuugugucuu

SEQ ID NO: 734692 - RNA, 19 nt, Homo sapiens
  misc_RNA (1)...(19): siRNA sense strand
ggacuuugagaaaaucuuu

SEQ ID NO: 734693 - RNA, 19 nt, Homo sapiens
  misc_RNA (1)...(19): siRNA sense strand
agaagucugagcuggcuuu

SEQ ID NO: 734694 - RNA, 19 nt, Homo sapiens
  misc_RNA (1)...(19): siRNA sense strand
cugguauguucuuaucuga

SEQ ID NO: 734695 - RNA, 19 nt, Homo sapiens
  misc_RNA (1)...(19): siRNA sense strand
cuacccaagaugccucuaa

SEQ ID NO: 734696 - RNA, 19 nt, Homo sapiens
  misc_RNA (1)...(19): siRNA sense strand
gaugaaacuggguacugau

SEQ ID NO: 734697 - RNA, 19 nt, Homo sapiens
  misc_RNA (1)...(19): siRNA sense strand
ggcaccaugaugaagauuu

SEQ ID NO: 734698 - RNA, 19 nt, Homo sapiens
  misc_RNA (1)...(19): siRNA sense strand
gcaggucuggcagcgcuuu

SEQ ID NO: 734699 - RNA, 19 nt, Homo sapiens
  misc_RNA (1)...(19): siRNA sense strand
ugauaaguuccgcgagauu

SEQ ID NO: 734700 - RNA, 19 nt, Homo sapiens
  misc_RNA (1)...(19): siRNA sense strand
aaucuuugccuacuaugau

SEQ ID NO: 734701 - RNA, 19 nt, Homo sapiens
  misc_RNA (1)...(19): siRNA sense strand
agaagggacuggacccaua

SEQ ID NO: 734702 - RNA, 19 nt, Homo sapiens
  misc_RNA (1)...(19): siRNA sense strand
ggacuggacccauacaaug

SEQ ID NO: 734703 - RNA, 19 nt, Homo sapiens
  misc_RNA (1)...(19): siRNA sense strand
caugcuggcugcaaagaag

SEQ ID NO: 734704 - RNA, 19 nt, Homo sapiens
  misc_RNA (1)...(19): siRNA sense strand
aauaguaggcugcaucugu

SEQ ID NO: 734705 - RNA, 19 nt, Homo sapiens
  misc_RNA (1)...(19): siRNA sense strand
gaagggacuggacccauac

SEQ ID NO: 734706 - RNA, 19 nt, Homo sapiens
  misc_RNA (1)...(19): siRNA sense strand
gacuggacccauacaaugu

SEQ ID NO: 734707 - RNA, 19 nt, Homo sapiens
  misc_RNA (1)...(19): siRNA sense strand
gggacuggacccauacaau

SEQ ID NO: 734708 - RNA, 19 nt, Homo sapiens
  misc_RNA (1)...(19): siRNA sense strand
agaucaugcuggcugcaaa

SEQ ID NO: 734709 - RNA, 19 nt, Homo sapiens
  misc_RNA (1)...(19): siRNA sense strand
gcuguggagcccauuacaa

SEQ ID NO: 734710 - RNA, 19 nt, Homo sapiens
  misc_RNA (1)...(19): siRNA sense strand
gaucaugcuggcugcaaag

SEQ ID NO: 734711 - RNA, 19 nt, Homo sapiens
  misc_RNA (1)...(19): siRNA sense strand
gaacaaagcaccuaagaug

SEQ ID NO: 734712 - RNA, 19 nt, Homo sapiens
  misc_RNA (1)...(19): siRNA sense strand
gaaacaguguguaccauuc

SEQ ID NO: 734713 - RNA, 19 nt, Homo sapiens
  misc_RNA (1)...(19): siRNA sense strand
agaagaaacugaagaaaca

SEQ ID NO: 734714 - RNA, 19 nt, Homo sapiens
  misc_RNA (1)...(19): siRNA sense strand
gaacuuaaggguuuagaug

SEQ ID NO: 734715 - RNA, 19 nt, Homo sapiens
  misc_RNA (1)...(19): siRNA sense strand
gagaugauccuuacggaaa

SEQ ID NO: 734716 - RNA, 19 nt, Homo sapiens
  misc_RNA (1)...(19): siRNA sense strand
uagauucucuggucauuga

SEQ ID NO: 734717 - RNA, 19 nt, Homo sapiens
  misc_RNA (1)...(19): siRNA sense strand
uaagaacacucgugaaacu

SEQ ID NO: 734718 - RNA, 19 nt, Homo sapiens
  misc_RNA (1)...(19): siRNA sense strand
caucaaggguaugcauaua

SEQ ID NO: 734719 - RNA, 19 nt, Homo sapiens
  misc_RNA (1)...(19): siRNA sense strand
gaaaucaugcaaaucaaga

SEQ ID NO: 734720 - RNA, 19 nt, Homo sapiens
  misc_RNA (1)...(19): siRNA sense strand
aaagauaucccagaagaaa

SEQ ID NO: 734721 - RNA, 19 nt, Homo sapiens
  misc_RNA (1)...(19): siRNA sense strand
gaguaaugcugaacuuaag

SEQ ID NO: 734722 - RNA, 19 nt, Homo sapiens
  misc_RNA (1)...(19): siRNA sense strand
agaugucacuuuacagaaa

SEQ ID NO: 734723 - RNA, 19 nt, Homo sapiens
  misc_RNA (1)...(19): siRNA sense strand
gagaguaaugcugaacuua

SEQ ID NO: 734724 - RNA, 19 nt, Homo sapiens
  misc_RNA (1)...(19): siRNA sense strand
cggauuaacccauacauga

SEQ ID NO: 734725 - RNA, 19 nt, Homo sapiens
  misc_RNA (1)...(19): siRNA sense strand
aagaggagguugcccagaa

SEQ ID NO: 734726 - RNA, 19 nt, Homo sapiens
  misc_RNA (1)...(19): siRNA sense strand
ccacgaaguaucugaaaga

SEQ ID NO: 734727 - RNA, 19 nt, Homo sapiens
  misc_RNA (1)...(19): siRNA sense strand
augcugaacuuaaggguuu

SEQ ID NO: 734728 - RNA, 19 nt, Homo sapiens
  misc_RNA (1)...(19): siRNA sense strand
ggguuuagauguagauucu

SEQ ID NO: 734729 - RNA, 19 nt, Homo sapiens
  misc_RNA (1)...(19): siRNA sense strand
caaucuucguguucacuuu

SEQ ID NO: 734730 - RNA, 19 nt, Homo sapiens
  misc_RNA (1)...(19): siRNA sense strand
acuuaaggguuuagaugua

SEQ ID NO: 734731 - RNA, 19 nt, Homo sapiens
  misc_RNA (1)...(19): siRNA sense strand
agaguaaugcugaacuuaa

SEQ ID NO: 734732 - RNA, 19 nt, Homo sapiens
  misc_RNA (1)...(19): siRNA sense strand
ggagguugcccagaagaaa

SEQ ID NO: 734733 - RNA, 19 nt, Homo sapiens
  misc_RNA (1)...(19): siRNA sense strand
cacgaaaucaugcaaauca

SEQ ID NO: 734734 - RNA, 19 nt, Homo sapiens
  misc_RNA (1)...(19): siRNA sense strand
gaagaaacugaagaaacaa

SEQ ID NO: 734735 - RNA, 19 nt, Homo sapiens
  misc_RNA (1)...(19): siRNA sense strand
uuuaagaacacucgugaaa

SEQ ID NO: 734736 - RNA, 19 nt, Homo sapiens
  misc_RNA (1)...(19): siRNA sense strand
ucaugcaaaucaagagguu

SEQ ID NO: 734737 - RNA, 19 nt, Homo sapiens
  misc_RNA (1)...(19): siRNA sense strand
caaggucgguggcccaaaa

SEQ ID NO: 734738 - RNA, 19 nt, Homo sapiens
  misc_RNA (1)...(19): siRNA sense strand
agagaguaaugcugaacuu

SEQ ID NO: 734739 - RNA, 19 nt, Homo sapiens
  misc_RNA (1)...(19): siRNA sense strand
gaaaagccacgaaguaucu

SEQ ID NO: 734740 - RNA, 19 nt, Homo sapiens
  misc_RNA (1)...(19): siRNA sense strand
guuccaaucuucguguuca

SEQ ID NO: 734741 - RNA, 19 nt, Homo sapiens
  misc_RNA (1)...(19): siRNA sense strand
cagaagaaacugaagaaac

SEQ ID NO: 734742 - RNA, 19 nt, Homo sapiens
  misc_RNA (1)...(19): siRNA sense strand
gaugucacuuuacagaaac

SEQ ID NO: 734743 - RNA, 19 nt, Homo sapiens
  misc_RNA (1)...(19): siRNA sense strand
gagcucauggucggauuaa

SEQ ID NO: 734744 - RNA, 19 nt, Homo sapiens
  misc_RNA (1)...(19): siRNA sense strand
gugaacaaagcaccuaaga

SEQ ID NO: 734745 - RNA, 19 nt, Homo sapiens
  misc_RNA (1)...(19): siRNA sense strand
aaucuucguguucacuuua

SEQ ID NO: 734746 - RNA, 19 nt, Homo sapiens
  misc_RNA (1)...(19): siRNA sense strand
caaaucaagagguuccaau

SEQ ID NO: 734747 - RNA, 19 nt, Homo sapiens
  misc_RNA (1)...(19): siRNA sense strand
ggauuaacccauacaugag

SEQ ID NO: 734748 - RNA, 19 nt, Homo sapiens
  misc_RNA (1)...(19): siRNA sense strand
agaaacaguguguaccauu

SEQ ID NO: 734749 - RNA, 19 nt, Homo sapiens
  misc_RNA (1)...(19): siRNA sense strand
guuuagauguagauucucu

SEQ ID NO: 734750 - RNA, 19 nt, Homo sapiens
  misc_RNA (1)...(19): siRNA sense strand
uguagauucucuggucauu

SEQ ID NO: 734751 - RNA, 19 nt, Homo sapiens
  misc_RNA (1)...(19): siRNA sense strand
aaacugcucaggccaucaa

SEQ ID NO: 734752 - RNA, 19 nt, Homo sapiens
  misc_RNA (1)...(19): siRNA sense strand
ccagaagaaacugaagaaa

SEQ ID NO: 734753 - RNA, 19 nt, Homo sapiens
  misc_RNA (1)...(19): siRNA sense strand
cccacgaaaucaugcaaau

SEQ ID NO: 734754 - RNA, 19 nt, Homo sapiens
  misc_RNA (1)...(19): siRNA sense strand
gccaucaaggguaugcaua

SEQ ID NO: 734755 - RNA, 19 nt, Homo sapiens
  misc_RNA (1)...(19): siRNA sense strand
ccaucaaggguaugcauau

SEQ ID NO: 734756 - RNA, 19 nt, Homo sapiens
  misc_RNA (1)...(19): siRNA sense strand
cagaaacaguguguaccau

SEQ ID NO: 734757 - RNA, 19 nt, Homo sapiens
  misc_RNA (1)...(19): siRNA sense strand
gcaaaucaagagguuccaa

SEQ ID NO: 734758 - RNA, 19 nt, Homo sapiens
  misc_RNA (1)...(19): siRNA sense strand
cuuaaggguuuagauguag

SEQ ID NO: 734759 - RNA, 19 nt, Homo sapiens
  misc_RNA (1)...(19): siRNA sense strand
cgaaaucaugcaaaucaag

SEQ ID NO: 734760 - RNA, 19 nt, Homo sapiens
  misc_RNA (1)...(19): siRNA sense strand
gccacgaaguaucugaaag

SEQ ID NO: 734761 - RNA, 19 nt, Homo sapiens
  misc_RNA (1)...(19): siRNA sense strand
gugcgcaggccaagcaaug

SEQ ID NO: 734762 - RNA, 19 nt, Homo sapiens
  misc_RNA (1)...(19): siRNA sense strand
uguguaccauuccgacguu

SEQ ID NO: 734763 - RNA, 19 nt, Homo sapiens
  misc_RNA (1)...(19): siRNA sense strand
acgaaaucaugcaaaucaa

SEQ ID NO: 734764 - RNA, 19 nt, Homo sapiens
  misc_RNA (1)...(19): siRNA sense strand
uuaaggguuuagauguaga

SEQ ID NO: 734765 - RNA, 19 nt, Homo sapiens
  misc_RNA (1)...(19): siRNA sense strand
ugaacaaagcaccuaagau

SEQ ID NO: 734766 - RNA, 19 nt, Homo sapiens
  misc_RNA (1)...(19): siRNA sense strand
guaccauuccgacguuaca

SEQ ID NO: 734767 - RNA, 19 nt, Homo sapiens
  misc_RNA (1)...(19): siRNA sense strand
cagagcucauggucggauu

SEQ ID NO: 734768 - RNA, 19 nt, Homo sapiens
  misc_RNA (1)...(19): siRNA sense strand
caauggggcuggacacaag

SEQ ID NO: 734769 - RNA, 19 nt, Homo sapiens
  misc_RNA (1)...(19): siRNA sense strand
gaggagguugcccagaaga

SEQ ID NO: 734770 - RNA, 19 nt, Homo sapiens
  misc_RNA (1)...(19): siRNA sense strand
gaaguaauguucucagcuu

SEQ ID NO: 734771 - RNA, 19 nt, Homo sapiens
  misc_RNA (1)...(19): siRNA sense strand
ccacagacaugcaccauau

SEQ ID NO: 734772 - RNA, 19 nt, Homo sapiens
  misc_RNA (1)...(19): siRNA sense strand
uuucuagccuggauuaaua

SEQ ID NO: 734773 - RNA, 19 nt, Homo sapiens
  misc_RNA (1)...(19): siRNA sense strand
aaagagccauccaagcuaa

SEQ ID NO: 734774 - RNA, 19 nt, Homo sapiens
  misc_RNA (1)...(19): siRNA sense strand
ucacuauccuguccacauu

SEQ ID NO: 734775 - RNA, 19 nt, Homo sapiens
  misc_RNA (1)...(19): siRNA sense strand
ccacgcugcugccauuaaa

SEQ ID NO: 734776 - RNA, 19 nt, Homo sapiens
  misc_RNA (1)...(19): siRNA sense strand
agaagagaguuuccaagaa

SEQ ID NO: 734777 - RNA, 19 nt, Homo sapiens
  misc_RNA (1)...(19): siRNA sense strand
gguccacgcugcugccauu

SEQ ID NO: 734778 - RNA, 19 nt, Homo sapiens
  misc_RNA (1)...(19): siRNA sense strand
uagccuggauuaauaagaa

SEQ ID NO: 734779 - RNA, 19 nt, Homo sapiens
  misc_RNA (1)...(19): siRNA sense strand
gagacucugcagaucauua

SEQ ID NO: 734780 - RNA, 19 nt, Homo sapiens
  misc_RNA (1)...(19): siRNA sense strand
uagaagagaguuuccaaga

SEQ ID NO: 734781 - RNA, 19 nt, Homo sapiens
  misc_RNA (1)...(19): siRNA sense strand
agacaugcaccauauagaa

SEQ ID NO: 734782 - RNA, 19 nt, Homo sapiens
  misc_RNA (1)...(19): siRNA sense strand
ugggagagcucgacgucuu

SEQ ID NO: 734783 - RNA, 19 nt, Homo sapiens
  misc_RNA (1)...(19): siRNA sense strand
ggacaggguguucaaggau

SEQ ID NO: 734784 - RNA, 19 nt, Homo sapiens
  misc_RNA (1)...(19): siRNA sense strand
gcagcauugccaacucuuu

SEQ ID NO: 734785 - RNA, 19 nt, Homo sapiens
  misc_RNA (1)...(19): siRNA sense strand
gcuccuggguacaauacug

SEQ ID NO: 734786 - RNA, 19 nt, Homo sapiens
  misc_RNA (1)...(19): siRNA sense strand
uacaguguguuucccuuug

SEQ ID NO: 734787 - RNA, 19 nt, Homo sapiens
  misc_RNA (1)...(19): siRNA sense strand
gggagagcucgacgucuuu

SEQ ID NO: 734788 - RNA, 19 nt, Homo sapiens
  misc_RNA (1)...(19): siRNA sense strand
agacucugcagaucauuaa

SEQ ID NO: 734789 - RNA, 19 nt, Homo sapiens
  misc_RNA (1)...(19): siRNA sense strand
gaaguuacaguguguuucc

SEQ ID NO: 734790 - RNA, 19 nt, Homo sapiens
  misc_RNA (1)...(19): siRNA sense strand
cagcagcauugccaacucu

SEQ ID NO: 734791 - RNA, 19 nt, Homo sapiens
  misc_RNA (1)...(19): siRNA sense strand
ugccaacucuuuccucuac

SEQ ID NO: 734792 - RNA, 19 nt, Homo sapiens
  misc_RNA (1)...(19): siRNA sense strand
ccaacucuuuccucuacau

SEQ ID NO: 734793 - RNA, 19 nt, Homo sapiens
  misc_RNA (1)...(19): siRNA sense strand
gaaucaugaaguaauguuc

SEQ ID NO: 734794 - RNA, 19 nt, Homo sapiens
  misc_RNA (1)...(19): siRNA sense strand
gagcucgacgucuuucuag

SEQ ID NO: 734795 - RNA, 19 nt, Homo sapiens
  misc_RNA (1)...(19): siRNA sense strand
uggacaggguguucaagga

SEQ ID NO: 734796 - RNA, 19 nt, Homo sapiens
  misc_RNA (1)...(19): siRNA sense strand
gauauugugcucaguagac

SEQ ID NO: 734797 - RNA, 19 nt, Homo sapiens
  misc_RNA (1)...(19): siRNA sense strand
gacaugcaccauauagaag

SEQ ID NO: 734798 - RNA, 19 nt, Homo sapiens
  misc_RNA (1)...(19): siRNA sense strand
cagcauugccaacucuuuc

SEQ ID NO: 734799 - RNA, 19 nt, Homo sapiens
  misc_RNA (1)...(19): siRNA sense strand
uauagaagagaguuuccaa

SEQ ID NO: 734800 - RNA, 19 nt, Homo sapiens
  misc_RNA (1)...(19): siRNA sense strand
uggagacucugcagaucau

SEQ ID NO: 734801 - RNA, 19 nt, Homo sapiens
  misc_RNA (1)...(19): siRNA sense strand
caaaagagccauccaagcu

SEQ ID NO: 734802 - RNA, 19 nt, Homo sapiens
  misc_RNA (1)...(19): siRNA sense strand
ccauauagaagagaguuuc

SEQ ID NO: 734803 - RNA, 19 nt, Homo sapiens
  misc_RNA (1)...(19): siRNA sense strand
acaggguguucaaggauca

SEQ ID NO: 734804 - RNA, 19 nt, Homo sapiens
  misc_RNA (1)...(19): siRNA sense strand
aaacucugcggcaauguca

SEQ ID NO: 734805 - RNA, 19 nt, Homo sapiens
  misc_RNA (1)...(19): siRNA sense strand
ccaccaaugccaccagagu

SEQ ID NO: 734806 - RNA, 19 nt, Homo sapiens
  misc_RNA (1)...(19): siRNA sense strand
acagacaugcaccauauag

SEQ ID NO: 734807 - RNA, 19 nt, Homo sapiens
  misc_RNA (1)...(19): siRNA sense strand
uuacaguguguuucccuuu

SEQ ID NO: 734808 - RNA, 19 nt, Homo sapiens
  misc_RNA (1)...(19): siRNA sense strand
gaaguaauguucucagcuu

SEQ ID NO: 734809 - RNA, 19 nt, Homo sapiens
  misc_RNA (1)...(19): siRNA sense strand
ccacagacaugcaccauau

SEQ ID NO: 734810 - RNA, 19 nt, Homo sapiens
  misc_RNA (1)...(19): siRNA sense strand
uuucuagccuggauuaaua

SEQ ID NO: 734811 - RNA, 19 nt, Homo sapiens
  misc_RNA (1)...(19): siRNA sense strand
aaagagccauccaagcuaa

SEQ ID NO: 734812 - RNA, 19 nt, Homo sapiens
  misc_RNA (1)...(19): siRNA sense strand
ucacuauccuguccacauu

SEQ ID NO: 734813 - RNA, 19 nt, Homo sapiens
  misc_RNA (1)...(19): siRNA sense strand
ccacgcugcugccauuaaa

SEQ ID NO: 734814 - RNA, 19 nt, Homo sapiens
  misc_RNA (1)...(19): siRNA sense strand
agaagagaguuuccaagaa

SEQ ID NO: 734815 - RNA, 19 nt, Homo sapiens
  misc_RNA (1)...(19): siRNA sense strand
gguccacgcugcugccauu

SEQ ID NO: 734816 - RNA, 19 nt, Homo sapiens
  misc_RNA (1)...(19): siRNA sense strand
uagccuggauuaauaagaa

SEQ ID NO: 734817 - RNA, 19 nt, Homo sapiens
  misc_RNA (1)...(19): siRNA sense strand
gcaugaaguuacagugugu

SEQ ID NO: 734818 - RNA, 19 nt, Homo sapiens
  misc_RNA (1)...(19): siRNA sense strand
gagacucugcagaucauua

SEQ ID NO: 734819 - RNA, 19 nt, Homo sapiens
  misc_RNA (1)...(19): siRNA sense strand
uagaagagaguuuccaaga

SEQ ID NO: 734820 - RNA, 19 nt, Homo sapiens
  misc_RNA (1)...(19): siRNA sense strand
agacaugcaccauauagaa

SEQ ID NO: 734821 - RNA, 19 nt, Homo sapiens
  misc_RNA (1)...(19): siRNA sense strand
ugggagagcucgacgucuu

SEQ ID NO: 734822 - RNA, 19 nt, Homo sapiens
  misc_RNA (1)...(19): siRNA sense strand
ggacaggguguucaaggau

SEQ ID NO: 734823 - RNA, 19 nt, Homo sapiens
  misc_RNA (1)...(19): siRNA sense strand
gcagcauugccaacucuuu

SEQ ID NO: 734824 - RNA, 19 nt, Homo sapiens
  misc_RNA (1)...(19): siRNA sense strand
uacaguguguuucccuuug

SEQ ID NO: 734825 - RNA, 19 nt, Homo sapiens
  misc_RNA (1)...(19): siRNA sense strand
gggagagcucgacgucuuu

SEQ ID NO: 734826 - RNA, 19 nt, Homo sapiens
  misc_RNA (1)...(19): siRNA sense strand
gcuccuggguacaauacug

SEQ ID NO: 734827 - RNA, 19 nt, Homo sapiens
  misc_RNA (1)...(19): siRNA sense strand
agacucugcagaucauuaa

SEQ ID NO: 734828 - RNA, 19 nt, Homo sapiens
  misc_RNA (1)...(19): siRNA sense strand
gaaguuacaguguguuucc

SEQ ID NO: 734829 - RNA, 19 nt, Homo sapiens
  misc_RNA (1)...(19): siRNA sense strand
cagcagcauugccaacucu

SEQ ID NO: 734830 - RNA, 19 nt, Homo sapiens
  misc_RNA (1)...(19): siRNA sense strand
ugccaacucuuuccucuac

SEQ ID NO: 734831 - RNA, 19 nt, Homo sapiens
  misc_RNA (1)...(19): siRNA sense strand
ccaacucuuuccucuacau

SEQ ID NO: 734832 - RNA, 19 nt, Homo sapiens
  misc_RNA (1)...(19): siRNA sense strand
gaaucaugaaguaauguuc

SEQ ID NO: 734833 - RNA, 19 nt, Homo sapiens
  misc_RNA (1)...(19): siRNA sense strand
gagcucgacgucuuucuag

SEQ ID NO: 734834 - RNA, 19 nt, Homo sapiens
  misc_RNA (1)...(19): siRNA sense strand
uggacaggguguucaagga

SEQ ID NO: 734835 - RNA, 19 nt, Homo sapiens
  misc_RNA (1)...(19): siRNA sense strand
gauauugugcucaguagac

SEQ ID NO: 734836 - RNA, 19 nt, Homo sapiens
  misc_RNA (1)...(19): siRNA sense strand
gacaugcaccauauagaag

SEQ ID NO: 734837 - RNA, 19 nt, Homo sapiens
  misc_RNA (1)...(19): siRNA sense strand
cagcauugccaacucuuuc

SEQ ID NO: 734838 - RNA, 19 nt, Homo sapiens
  misc_RNA (1)...(19): siRNA sense strand
uauagaagagaguuuccaa

SEQ ID NO: 734839 - RNA, 19 nt, Homo sapiens
  misc_RNA (1)...(19): siRNA sense strand
uggagacucugcagaucau

SEQ ID NO: 734840 - RNA, 19 nt, Homo sapiens
  misc_RNA (1)...(19): siRNA sense strand
caaaagagccauccaagcu

SEQ ID NO: 734841 - RNA, 19 nt, Homo sapiens
  misc_RNA (1)...(19): siRNA sense strand
ccauauagaagagaguuuc

SEQ ID NO: 734842 - RNA, 19 nt, Homo sapiens
  misc_RNA (1)...(19): siRNA sense strand
acaggguguucaaggauca

SEQ ID NO: 734843 - RNA, 19 nt, Homo sapiens
  misc_RNA (1)...(19): siRNA sense strand
aaacucugcggcaauguca

SEQ ID NO: 734844 - RNA, 19 nt, Homo sapiens
  misc_RNA (1)...(19): siRNA sense strand
ccaccaaugccaccagagu

SEQ ID NO: 734845 - RNA, 19 nt, Homo sapiens
  misc_RNA (1)...(19): siRNA sense strand
uuacaguguguuucccuuu

SEQ ID NO: 734846 - RNA, 19 nt, Homo sapiens
  misc_RNA (1)...(19): siRNA sense strand
acagacaugcaccauauag

SEQ ID NO: 734847 - RNA, 19 nt, Homo sapiens
  misc_RNA (1)...(19): siRNA sense strand
gcaacaaugugaccgauau

SEQ ID NO: 734848 - RNA, 19 nt, Homo sapiens
  misc_RNA (1)...(19): siRNA sense strand
ugacccagcucuucauguu

SEQ ID NO: 734849 - RNA, 19 nt, Homo sapiens
  misc_RNA (1)...(19): siRNA sense strand
gugaucggcugcugaguga

SEQ ID NO: 734850 - RNA, 19 nt, Homo sapiens
  misc_RNA (1)...(19): siRNA sense strand
uggcagggcuggucuacaa

SEQ ID NO: 734851 - RNA, 19 nt, Homo sapiens
  misc_RNA (1)...(19): siRNA sense strand
gcaacaucaucuucuccaa

SEQ ID NO: 734852 - RNA, 19 nt, Homo sapiens
  misc_RNA (1)...(19): siRNA sense strand
ggacgucacggcggacuuu

SEQ ID NO: 734853 - RNA, 19 nt, Homo sapiens
  misc_RNA (1)...(19): siRNA sense strand
caaugugaccgauauguuc

SEQ ID NO: 734854 - RNA, 19 nt, Homo sapiens
  misc_RNA (1)...(19): siRNA sense strand
gcacugcuacgacaucuac

SEQ ID NO: 734855 - RNA, 19 nt, Homo sapiens
  misc_RNA (1)...(19): siRNA sense strand
gaagcguuccgacagauca

SEQ ID NO: 734856 - RNA, 19 nt, Homo sapiens
  misc_RNA (1)...(19): siRNA sense strand
gugccuaccugaggaugaa

SEQ ID NO: 734857 - RNA, 19 nt, Homo sapiens
  misc_RNA (1)...(19): siRNA sense strand
gaccuucgccagcaacaau

SEQ ID NO: 734858 - RNA, 19 nt, Homo sapiens
  misc_RNA (1)...(19): siRNA sense strand
gggcccaccuucuucuaca

SEQ ID NO: 734859 - RNA, 19 nt, Homo sapiens
  misc_RNA (1)...(19): siRNA sense strand
ggaccugacccagcucuuc

SEQ ID NO: 734860 - RNA, 19 nt, Homo sapiens
  misc_RNA (1)...(19): siRNA sense strand
ucaccgugcuggccaugau

SEQ ID NO: 734861 - RNA, 19 nt, Homo sapiens
  misc_RNA (1)...(19): siRNA sense strand
gaccugacccagcucuuca

SEQ ID NO: 734862 - RNA, 19 nt, Homo sapiens
  misc_RNA (1)...(19): siRNA sense strand
ccagcaacaucaucuucuc

SEQ ID NO: 734863 - RNA, 19 nt, Homo sapiens
  misc_RNA (1)...(19): siRNA sense strand
acaaugugaccgauauguu

SEQ ID NO: 734864 - RNA, 19 nt, Homo sapiens
  misc_RNA (1)...(19): siRNA sense strand
ggacuuugagggccagagu

SEQ ID NO: 734865 - RNA, 19 nt, Homo sapiens
  misc_RNA (1)...(19): siRNA sense strand
caacaaugugaccgauaug

SEQ ID NO: 734866 - RNA, 19 nt, Homo sapiens
  misc_RNA (1)...(19): siRNA sense strand
ugagugaggcccagaggau

SEQ ID NO: 734867 - RNA, 19 nt, Homo sapiens
  misc_RNA (1)...(19): siRNA sense strand
gggccagagucccaaaugc

SEQ ID NO: 734868 - RNA, 19 nt, Homo sapiens
  misc_RNA (1)...(19): siRNA sense strand
uccgacagaucaaggacuu

SEQ ID NO: 734869 - RNA, 19 nt, Homo sapiens
  misc_RNA (1)...(19): siRNA sense strand
gccaucgccuucgguggaa

SEQ ID NO: 734870 - RNA, 19 nt, Homo sapiens
  misc_RNA (1)...(19): siRNA sense strand
ggccagagucccaaaugca

SEQ ID NO: 734871 - RNA, 19 nt, Homo sapiens
  misc_RNA (1)...(19): siRNA sense strand
gaagaugacauaguuugua

SEQ ID NO: 734872 - RNA, 19 nt, Homo sapiens
  misc_RNA (1)...(19): siRNA sense strand
ucaguuaaguugucagaaa

SEQ ID NO: 734873 - RNA, 19 nt, Homo sapiens
  misc_RNA (1)...(19): siRNA sense strand
caaugcuccuguuuacuua

SEQ ID NO: 734874 - RNA, 19 nt, Homo sapiens
  misc_RNA (1)...(19): siRNA sense strand
guaaauguaccacagauga

SEQ ID NO: 734875 - RNA, 19 nt, Homo sapiens
  misc_RNA (1)...(19): siRNA sense strand
uaacaaaggccaagaccaa

SEQ ID NO: 734876 - RNA, 19 nt, Homo sapiens
  misc_RNA (1)...(19): siRNA sense strand
uccagaacguguagucuua

SEQ ID NO: 734877 - RNA, 19 nt, Homo sapiens
  misc_RNA (1)...(19): siRNA sense strand
ccaaggaccuccagaacgu

SEQ ID NO: 734878 - RNA, 19 nt, Homo sapiens
  misc_RNA (1)...(19): siRNA sense strand
gaacguguagucuuauuag

SEQ ID NO: 734879 - RNA, 19 nt, Homo sapiens
  misc_RNA (1)...(19): siRNA sense strand
ugaaauauuuggacaacuc

SEQ ID NO: 734880 - RNA, 19 nt, Homo sapiens
  misc_RNA (1)...(19): siRNA sense strand
gaugaaauauuuggacaac

SEQ ID NO: 734881 - RNA, 19 nt, Homo sapiens
  misc_RNA (1)...(19): siRNA sense strand
ucaaugcuccuguuuacuu

SEQ ID NO: 734882 - RNA, 19 nt, Homo sapiens
  misc_RNA (1)...(19): siRNA sense strand
gagaaaggaccuccaagag

SEQ ID NO: 734883 - RNA, 19 nt, Homo sapiens
  misc_RNA (1)...(19): siRNA sense strand
cagaacguguagucuuauu

SEQ ID NO: 734884 - RNA, 19 nt, Homo sapiens
  misc_RNA (1)...(19): siRNA sense strand
ccgcggaggcuuuaacaaa

SEQ ID NO: 734885 - RNA, 19 nt, Homo sapiens
  misc_RNA (1)...(19): siRNA sense strand
aggaagagguggugguuuc

SEQ ID NO: 734886 - RNA, 19 nt, Homo sapiens
  misc_RNA (1)...(19): siRNA sense strand
ugagaaaggaccuccaaga

SEQ ID NO: 734887 - RNA, 19 nt, Homo sapiens
  misc_RNA (1)...(19): siRNA sense strand
cugugaagaugacauaguu

SEQ ID NO: 734888 - RNA, 19 nt, Homo sapiens
  misc_RNA (1)...(19): siRNA sense strand
gaaauauuuggacaacuca

SEQ ID NO: 734889 - RNA, 19 nt, Homo sapiens
  misc_RNA (1)...(19): siRNA sense strand
gugaagaugacauaguuug

SEQ ID NO: 734890 - RNA, 19 nt, Homo sapiens
  misc_RNA (1)...(19): siRNA sense strand
gcuccuguuuacuuagaaa

SEQ ID NO: 734891 - RNA, 19 nt, Homo sapiens
  misc_RNA (1)...(19): siRNA sense strand
uaaauguaccacagaugaa

SEQ ID NO: 734892 - RNA, 19 nt, Homo sapiens
  misc_RNA (1)...(19): siRNA sense strand
uuggacaacucagagauuu

SEQ ID NO: 734893 - RNA, 19 nt, Homo sapiens
  misc_RNA (1)...(19): siRNA sense strand
ggaggaagagguggugguu

SEQ ID NO: 734894 - RNA, 19 nt, Homo sapiens
  misc_RNA (1)...(19): siRNA sense strand
caaaggccaagaccaagga

SEQ ID NO: 734895 - RNA, 19 nt, Homo sapiens
  misc_RNA (1)...(19): siRNA sense strand
ggaggucguggaggcuuua

SEQ ID NO: 734896 - RNA, 19 nt, Homo sapiens
  misc_RNA (1)...(19): siRNA sense strand
agaacguguagucuuauua

SEQ ID NO: 734897 - RNA, 19 nt, Homo sapiens
  misc_RNA (1)...(19): siRNA sense strand
uuucaaugcuccuguuuac

SEQ ID NO: 734898 - RNA, 19 nt, Homo sapiens
  misc_RNA (1)...(19): siRNA sense strand
cagagggagaggacauuaa

SEQ ID NO: 734899 - RNA, 19 nt, Homo sapiens
  misc_RNA (1)...(19): siRNA sense strand
ucagagggagaggacauua

SEQ ID NO: 734900 - RNA, 19 nt, Homo sapiens
  misc_RNA (1)...(19): siRNA sense strand
aagagguggugguuucaga

SEQ ID NO: 734901 - RNA, 19 nt, Homo sapiens
  misc_RNA (1)...(19): siRNA sense strand
ggucguggaggcuuuaauc

SEQ ID NO: 734902 - RNA, 19 nt, Homo sapiens
  misc_RNA (1)...(19): siRNA sense strand
ggaugaaauauuuggacaa

SEQ ID NO: 734903 - RNA, 19 nt, Homo sapiens
  misc_RNA (1)...(19): siRNA sense strand
aaauguaccacagaugaaa

SEQ ID NO: 734904 - RNA, 19 nt, Homo sapiens
  misc_RNA (1)...(19): siRNA sense strand
ggugagaaaggaccuccaa

SEQ ID NO: 734905 - RNA, 19 nt, Homo sapiens
  misc_RNA (1)...(19): siRNA sense strand
gaccaaggaccuccagaac

SEQ ID NO: 734906 - RNA, 19 nt, Homo sapiens
  misc_RNA (1)...(19): siRNA sense strand
ggaagagguggugguuuca

SEQ ID NO: 734907 - RNA, 19 nt, Homo sapiens
  misc_RNA (1)...(19): siRNA sense strand
uggaaaaguggaugaaaua

SEQ ID NO: 734908 - RNA, 19 nt, Homo sapiens
  misc_RNA (1)...(19): siRNA sense strand
gaggaagagguggugguuu

SEQ ID NO: 734909 - RNA, 19 nt, Homo sapiens
  misc_RNA (1)...(19): siRNA sense strand
caguuaaguugucagaaaa

SEQ ID NO: 734910 - RNA, 19 nt, Homo sapiens
  misc_RNA (1)...(19): siRNA sense strand
cggaggucguggaggcuuu

SEQ ID NO: 734911 - RNA, 19 nt, Homo sapiens
  misc_RNA (1)...(19): siRNA sense strand
guuccugcaucccugugaa

SEQ ID NO: 734912 - RNA, 19 nt, Homo sapiens
  misc_RNA (1)...(19): siRNA sense strand
ugaagaugacauaguuugu

SEQ ID NO: 734913 - RNA, 19 nt, Homo sapiens
  misc_RNA (1)...(19): siRNA sense strand
agaccaaggaccuccagaa

SEQ ID NO: 734914 - RNA, 19 nt, Homo sapiens
  misc_RNA (1)...(19): siRNA sense strand
cagaggcggugguuuuaga

SEQ ID NO: 734915 - RNA, 19 nt, Homo sapiens
  misc_RNA (1)...(19): siRNA sense strand
uuauuucaaugcuccuguu

SEQ ID NO: 734916 - RNA, 19 nt, Homo sapiens
  misc_RNA (1)...(19): siRNA sense strand
guaccacagaugaaaauaa

SEQ ID NO: 734917 - RNA, 19 nt, Homo sapiens
  misc_RNA (1)...(19): siRNA sense strand
gaagaugacauaguuugua

SEQ ID NO: 734918 - RNA, 19 nt, Homo sapiens
  misc_RNA (1)...(19): siRNA sense strand
ucaguuaaguugucagaaa

SEQ ID NO: 734919 - RNA, 19 nt, Homo sapiens
  misc_RNA (1)...(19): siRNA sense strand
caaugcuccuguuuacuua

SEQ ID NO: 734920 - RNA, 19 nt, Homo sapiens
  misc_RNA (1)...(19): siRNA sense strand
guaaauguaccacagauga

SEQ ID NO: 734921 - RNA, 19 nt, Homo sapiens
  misc_RNA (1)...(19): siRNA sense strand
uaacaaaggccaagaccaa

SEQ ID NO: 734922 - RNA, 19 nt, Homo sapiens
  misc_RNA (1)...(19): siRNA sense strand
uccagaacguguagucuua

SEQ ID NO: 734923 - RNA, 19 nt, Homo sapiens
  misc_RNA (1)...(19): siRNA sense strand
ccaaggaccuccagaacgu

SEQ ID NO: 734924 - RNA, 19 nt, Homo sapiens
  misc_RNA (1)...(19): siRNA sense strand
gaacguguagucuuauuag

SEQ ID NO: 734925 - RNA, 19 nt, Homo sapiens
  misc_RNA (1)...(19): siRNA sense strand
ugaaauauuuggacaacuc

SEQ ID NO: 734926 - RNA, 19 nt, Homo sapiens
  misc_RNA (1)...(19): siRNA sense strand
gaugaaauauuuggacaac

SEQ ID NO: 734927 - RNA, 19 nt, Homo sapiens
  misc_RNA (1)...(19): siRNA sense strand
ucaaugcuccuguuuacuu

SEQ ID NO: 734928 - RNA, 19 nt, Homo sapiens
  misc_RNA (1)...(19): siRNA sense strand
gagaaaggaccuccaagag

SEQ ID NO: 734929 - RNA, 19 nt, Homo sapiens
  misc_RNA (1)...(19): siRNA sense strand
cagaacguguagucuuauu

SEQ ID NO: 734930 - RNA, 19 nt, Homo sapiens
  misc_RNA (1)...(19): siRNA sense strand
ccgcggaggcuuuaacaaa

SEQ ID NO: 734931 - RNA, 19 nt, Homo sapiens
  misc_RNA (1)...(19): siRNA sense strand
aggaagagguggugguuuc

SEQ ID NO: 734932 - RNA, 19 nt, Homo sapiens
  misc_RNA (1)...(19): siRNA sense strand
ugagaaaggaccuccaaga

SEQ ID NO: 734933 - RNA, 19 nt, Homo sapiens
  misc_RNA (1)...(19): siRNA sense strand
cugugaagaugacauaguu

SEQ ID NO: 734934 - RNA, 19 nt, Homo sapiens
  misc_RNA (1)...(19): siRNA sense strand
gaaauauuuggacaacuca

SEQ ID NO: 734935 - RNA, 19 nt, Homo sapiens
  misc_RNA (1)...(19): siRNA sense strand
gugaagaugacauaguuug

SEQ ID NO: 734936 - RNA, 19 nt, Homo sapiens
  misc_RNA (1)...(19): siRNA sense strand
gcuccuguuuacuuagaaa

SEQ ID NO: 734937 - RNA, 19 nt, Homo sapiens
  misc_RNA (1)...(19): siRNA sense strand
uaaauguaccacagaugaa

SEQ ID NO: 734938 - RNA, 19 nt, Homo sapiens
  misc_RNA (1)...(19): siRNA sense strand
uuggacaacucagagauuu

SEQ ID NO: 734939 - RNA, 19 nt, Homo sapiens
  misc_RNA (1)...(19): siRNA sense strand
ggaggaagagguggugguu

SEQ ID NO: 734940 - RNA, 19 nt, Homo sapiens
  misc_RNA (1)...(19): siRNA sense strand
caaaggccaagaccaagga

SEQ ID NO: 734941 - RNA, 19 nt, Homo sapiens
  misc_RNA (1)...(19): siRNA sense strand
ggaggucguggaggcuuua

SEQ ID NO: 734942 - RNA, 19 nt, Homo sapiens
  misc_RNA (1)...(19): siRNA sense strand
agaacguguagucuuauua

SEQ ID NO: 734943 - RNA, 19 nt, Homo sapiens
  misc_RNA (1)...(19): siRNA sense strand
uuucaaugcuccuguuuac

SEQ ID NO: 734944 - RNA, 19 nt, Homo sapiens
  misc_RNA (1)...(19): siRNA sense strand
cagagggagaggacauuaa

SEQ ID NO: 734945 - RNA, 19 nt, Homo sapiens
  misc_RNA (1)...(19): siRNA sense strand
ucagagggagaggacauua

SEQ ID NO: 734946 - RNA, 19 nt, Homo sapiens
  misc_RNA (1)...(19): siRNA sense strand
aagagguggugguuucaga

SEQ ID NO: 734947 - RNA, 19 nt, Homo sapiens
  misc_RNA (1)...(19): siRNA sense strand
ggucguggaggcuuuaauc

SEQ ID NO: 734948 - RNA, 19 nt, Homo sapiens
  misc_RNA (1)...(19): siRNA sense strand
ggaugaaauauuuggacaa

SEQ ID NO: 734949 - RNA, 19 nt, Homo sapiens
  misc_RNA (1)...(19): siRNA sense strand
aaauguaccacagaugaaa

SEQ ID NO: 734950 - RNA, 19 nt, Homo sapiens
  misc_RNA (1)...(19): siRNA sense strand
ggugagaaaggaccuccaa

SEQ ID NO: 734951 - RNA, 19 nt, Homo sapiens
  misc_RNA (1)...(19): siRNA sense strand
gaccaaggaccuccagaac

SEQ ID NO: 734952 - RNA, 19 nt, Homo sapiens
  misc_RNA (1)...(19): siRNA sense strand
ggaagagguggugguuuca

SEQ ID NO: 734953 - RNA, 19 nt, Homo sapiens
  misc_RNA (1)...(19): siRNA sense strand
uggaaaaguggaugaaaua

SEQ ID NO: 734954 - RNA, 19 nt, Homo sapiens
  misc_RNA (1)...(19): siRNA sense strand
gaggaagagguggugguuu

SEQ ID NO: 734955 - RNA, 19 nt, Homo sapiens
  misc_RNA (1)...(19): siRNA sense strand
caguuaaguugucagaaaa

SEQ ID NO: 734956 - RNA, 19 nt, Homo sapiens
  misc_RNA (1)...(19): siRNA sense strand
cggaggucguggaggcuuu

SEQ ID NO: 734957 - RNA, 19 nt, Homo sapiens
  misc_RNA (1)...(19): siRNA sense strand
guuccugcaucccugugaa

SEQ ID NO: 734958 - RNA, 19 nt, Homo sapiens
  misc_RNA (1)...(19): siRNA sense strand
ugaagaugacauaguuugu

SEQ ID NO: 734959 - RNA, 19 nt, Homo sapiens
  misc_RNA (1)...(19): siRNA sense strand
cagaggcggugguuuuaga

SEQ ID NO: 734960 - RNA, 19 nt, Homo sapiens
  misc_RNA (1)...(19): siRNA sense strand
agaccaaggaccuccagaa

SEQ ID NO: 734961 - RNA, 19 nt, Homo sapiens
  misc_RNA (1)...(19): siRNA sense strand
uuauuucaaugcuccuguu

SEQ ID NO: 734962 - RNA, 19 nt, Homo sapiens
  misc_RNA (1)...(19): siRNA sense strand
guaccacagaugaaaauaa

SEQ ID NO: 734963 - RNA, 19 nt, Homo sapiens
  misc_RNA (1)...(19): siRNA sense strand
ggacaagccuucaguggua

SEQ ID NO: 734964 - RNA, 19 nt, Homo sapiens
  misc_RNA (1)...(19): siRNA sense strand
caacauugcuggacauuuc

SEQ ID NO: 734965 - RNA, 19 nt, Homo sapiens
  misc_RNA (1)...(19): siRNA sense strand
agacagagcugcaccaugu

SEQ ID NO: 734966 - RNA, 19 nt, Homo sapiens
  misc_RNA (1)...(19): siRNA sense strand
acagugagcugaugaguga

SEQ ID NO: 734967 - RNA, 19 nt, Homo sapiens
  misc_RNA (1)...(19): siRNA sense strand
gaauuaagauggaguugca

SEQ ID NO: 734968 - RNA, 19 nt, Homo sapiens
  misc_RNA (1)...(19): siRNA sense strand
guaccaaggucaagcagaa

SEQ ID NO: 734969 - RNA, 19 nt, Homo sapiens
  misc_RNA (1)...(19): siRNA sense strand
ugaaggagcugcuguccaa

SEQ ID NO: 734970 - RNA, 19 nt, Homo sapiens
  misc_RNA (1)...(19): siRNA sense strand
gacaaacgcuuccagcaau

SEQ ID NO: 734971 - RNA, 19 nt, Homo sapiens
  misc_RNA (1)...(19): siRNA sense strand
ccacgagacuuuaccagaa

SEQ ID NO: 734972 - RNA, 19 nt, Homo sapiens
  misc_RNA (1)...(19): siRNA sense strand
gaagguagcagccgucugu

SEQ ID NO: 734973 - RNA, 19 nt, Homo sapiens
  misc_RNA (1)...(19): siRNA sense strand
agacagaggaugaggcuua

SEQ ID NO: 734974 - RNA, 19 nt, Homo sapiens
  misc_RNA (1)...(19): siRNA sense strand
aaagggauguuucugauca

SEQ ID NO: 734975 - RNA, 19 nt, Homo sapiens
  misc_RNA (1)...(19): siRNA sense strand
gcaggacacucugauggaa

SEQ ID NO: 734976 - RNA, 19 nt, Homo sapiens
  misc_RNA (1)...(19): siRNA sense strand
ccagagggaucgaaaugga

SEQ ID NO: 734977 - RNA, 19 nt, Homo sapiens
  misc_RNA (1)...(19): siRNA sense strand
gaucaugacccgccucuuc

SEQ ID NO: 734978 - RNA, 19 nt, Homo sapiens
  misc_RNA (1)...(19): siRNA sense strand
gaagagcggcugcaagaca

SEQ ID NO: 734979 - RNA, 19 nt, Homo sapiens
  misc_RNA (1)...(19): siRNA sense strand
gaccagaaguacaucuuuc

SEQ ID NO: 734980 - RNA, 19 nt, Homo sapiens
  misc_RNA (1)...(19): siRNA sense strand
gugcggagcagauguguaa

SEQ ID NO: 734981 - RNA, 19 nt, Homo sapiens
  misc_RNA (1)...(19): siRNA sense strand
ccacggaacuggcauuacu

SEQ ID NO: 734982 - RNA, 19 nt, Homo sapiens
  misc_RNA (1)...(19): siRNA sense strand
uggaagagcuacacuugga

SEQ ID NO: 734983 - RNA, 19 nt, Homo sapiens
  misc_RNA (1)...(19): siRNA sense strand
gagagaaggucgggcuguu

SEQ ID NO: 734984 - RNA, 19 nt, Homo sapiens
  misc_RNA (1)...(19): siRNA sense strand
ugacagauguacugguguu

SEQ ID NO: 734985 - RNA, 19 nt, Homo sapiens
  misc_RNA (1)...(19): siRNA sense strand
gagcaucacagccaaggaa

SEQ ID NO: 734986 - RNA, 19 nt, Homo sapiens
  misc_RNA (1)...(19): siRNA sense strand
ggaccagaaguacaucuuu

SEQ ID NO: 734987 - RNA, 19 nt, Homo sapiens
  misc_RNA (1)...(19): siRNA sense strand
gcaaggccuuaaagcucua

SEQ ID NO: 734988 - RNA, 19 nt, Homo sapiens
  misc_RNA (1)...(19): siRNA sense strand
gcugcagaaucuaaucgua

SEQ ID NO: 734989 - RNA, 19 nt, Homo sapiens
  misc_RNA (1)...(19): siRNA sense strand
caauucauccggaaaguga

SEQ ID NO: 734990 - RNA, 19 nt, Homo sapiens
  misc_RNA (1)...(19): siRNA sense strand
gcuguacgcccgagacaaa

SEQ ID NO: 734991 - RNA, 19 nt, Homo sapiens
  misc_RNA (1)...(19): siRNA sense strand
cacaaccgcuguaaagaca

SEQ ID NO: 734992 - RNA, 19 nt, Homo sapiens
  misc_RNA (1)...(19): siRNA sense strand
ggacgaggguauuuaucag

SEQ ID NO: 734993 - RNA, 19 nt, Homo sapiens
  misc_RNA (1)...(19): siRNA sense strand
caaucucuauggacuucua

SEQ ID NO: 734994 - RNA, 19 nt, Homo sapiens
  misc_RNA (1)...(19): siRNA sense strand
gcacugaccgccuggaucu

SEQ ID NO: 734995 - RNA, 19 nt, Homo sapiens
  misc_RNA (1)...(19): siRNA sense strand
cuucaaagaugugcuagug

SEQ ID NO: 734996 - RNA, 19 nt, Homo sapiens
  misc_RNA (1)...(19): siRNA sense strand
gaugagugacuuugagaug

SEQ ID NO: 734997 - RNA, 19 nt, Homo sapiens
  misc_RNA (1)...(19): siRNA sense strand
ggaguggaacugcucuuga

SEQ ID NO: 734998 - RNA, 19 nt, Homo sapiens
  misc_RNA (1)...(19): siRNA sense strand
guauuuaucagcuggagaa

SEQ ID NO: 734999 - RNA, 19 nt, Homo sapiens
  misc_RNA (1)...(19): siRNA sense strand
gcacggggaugcuggaaga

SEQ ID NO: 735000 - RNA, 19 nt, Homo sapiens
  misc_RNA (1)...(19): siRNA sense strand
gcuggaagagcuacacuug

SEQ ID NO: 735001 - RNA, 19 nt, Homo sapiens
  misc_RNA (1)...(19): siRNA sense strand
ccgaagagcggcugcaaga

SEQ ID NO: 735002 - RNA, 19 nt, Homo sapiens
  misc_RNA (1)...(19): siRNA sense strand
gcgaugcccuguacuugag

SEQ ID NO: 735003 - RNA, 19 nt, Homo sapiens
  misc_RNA (1)...(19): siRNA sense strand
gcuuaccugcggcgaauua

SEQ ID NO: 735004 - RNA, 19 nt, Homo sapiens
  misc_RNA (1)...(19): siRNA sense strand
acaaacgcuuccagcaauu

SEQ ID NO: 735005 - RNA, 19 nt, Homo sapiens
  misc_RNA (1)...(19): siRNA sense strand
gaugcccgcuauaccaaug

SEQ ID NO: 735006 - RNA, 19 nt, Homo sapiens
  misc_RNA (1)...(19): siRNA sense strand
gcccuguacuugaguuuca

SEQ ID NO: 735007 - RNA, 19 nt, Homo sapiens
  misc_RNA (1)...(19): siRNA sense strand
ugagugacuuugagaugga

SEQ ID NO: 735008 - RNA, 19 nt, Homo sapiens
  misc_RNA (1)...(19): siRNA sense strand
ggaucuaccugucacuacu

SEQ ID NO: 735009 - RNA, 19 nt, Homo sapiens
  misc_RNA (1)...(19): siRNA sense strand
ugcccaaccugcaauguga

SEQ ID NO: 735010 - RNA, 19 nt, Homo sapiens
  misc_RNA (1)...(19): siRNA sense strand
gaguggaacugcucuugac

SEQ ID NO: 735011 - RNA, 19 nt, Homo sapiens
  misc_RNA (1)...(19): siRNA sense strand
ugaggacacugaagaucau

SEQ ID NO: 735012 - RNA, 19 nt, Homo sapiens
  misc_RNA (1)...(19): siRNA sense strand
gcaguccguuucucuucga

SEQ ID NO: 735013 - RNA, 19 nt, Homo sapiens
  misc_RNA (1)...(19): siRNA sense strand
gcugaugagugacuuugag

SEQ ID NO: 735014 - RNA, 19 nt, Homo sapiens
  misc_RNA (1)...(19): siRNA sense strand
cacgagacuuuaccagaau

SEQ ID NO: 735015 - RNA, 19 nt, Homo sapiens
  misc_RNA (1)...(19): siRNA sense strand
aaauggaaaucagcugaga

SEQ ID NO: 735016 - RNA, 19 nt, Homo sapiens
  misc_RNA (1)...(19): siRNA sense strand
agauggaguugcagcagaa

SEQ ID NO: 735017 - RNA, 19 nt, Homo sapiens
  misc_RNA (1)...(19): siRNA sense strand
agacaaacgcuuccagcaa

SEQ ID NO: 735018 - RNA, 19 nt, Homo sapiens
  misc_RNA (1)...(19): siRNA sense strand
ggacuuugcagcugacucu

SEQ ID NO: 735019 - RNA, 19 nt, Homo sapiens
  misc_RNA (1)...(19): siRNA sense strand
aagagguaaucuacaguga

SEQ ID NO: 735020 - RNA, 19 nt, Homo sapiens
  misc_RNA (1)...(19): siRNA sense strand
ugguaucgcugcagaaucu

SEQ ID NO: 735021 - RNA, 19 nt, Homo sapiens
  misc_RNA (1)...(19): siRNA sense strand
cagaaguacaucuuuccua

SEQ ID NO: 735022 - RNA, 19 nt, Homo sapiens
  misc_RNA (1)...(19): siRNA sense strand
ucaccaccauuucaguuuc

SEQ ID NO: 735023 - RNA, 19 nt, Homo sapiens
  misc_RNA (1)...(19): siRNA sense strand
cagauguacugguguuucu

SEQ ID NO: 735024 - RNA, 19 nt, Homo sapiens
  misc_RNA (1)...(19): siRNA sense strand
caucaccaaguacccguua

SEQ ID NO: 735025 - RNA, 19 nt, Homo sapiens
  misc_RNA (1)...(19): siRNA sense strand
gagcucagugacauccaua

SEQ ID NO: 735026 - RNA, 19 nt, Homo sapiens
  misc_RNA (1)...(19): siRNA sense strand
aaaaggaggugaugaagca

SEQ ID NO: 735027 - RNA, 19 nt, Homo sapiens
  misc_RNA (1)...(19): siRNA sense strand
ucaagcagaagcaacagaa

SEQ ID NO: 735028 - RNA, 19 nt, Homo sapiens
  misc_RNA (1)...(19): siRNA sense strand
gcauccugcuggugacuca

SEQ ID NO: 735029 - RNA, 19 nt, Homo sapiens
  misc_RNA (1)...(19): siRNA sense strand
ugacgaagagguaaucuac

SEQ ID NO: 735030 - RNA, 19 nt, Homo sapiens
  misc_RNA (1)...(19): siRNA sense strand
ccguuucucuucgaaguaa

SEQ ID NO: 735031 - RNA, 19 nt, Homo sapiens
  misc_RNA (1)...(19): siRNA sense strand
acuuugagauggaugagaa

SEQ ID NO: 735032 - RNA, 19 nt, Homo sapiens
  misc_RNA (1)...(19): siRNA sense strand
gacaagccuucagugguau

SEQ ID NO: 735033 - RNA, 19 nt, Homo sapiens
  misc_RNA (1)...(19): siRNA sense strand
uuuaucagcuggagaaagg

SEQ ID NO: 735034 - RNA, 19 nt, Homo sapiens
  misc_RNA (1)...(19): siRNA sense strand
ugacucagcgcaucaccaa

SEQ ID NO: 735035 - RNA, 19 nt, Homo sapiens
  misc_RNA (1)...(19): siRNA sense strand
ugaugaagcagcaagaugu

SEQ ID NO: 735036 - RNA, 19 nt, Homo sapiens
  misc_RNA (1)...(19): siRNA sense strand
ccacagacucccucaacau

SEQ ID NO: 735037 - RNA, 19 nt, Homo sapiens
  misc_RNA (1)...(19): siRNA sense strand
ggaucgaaauggaaaucag

SEQ ID NO: 735038 - RNA, 19 nt, Homo sapiens
  misc_RNA (1)...(19): siRNA sense strand
ugauugagacagaggauga

SEQ ID NO: 735039 - RNA, 19 nt, Homo sapiens
  misc_RNA (1)...(19): siRNA sense strand
gugaggacacugaagauca

SEQ ID NO: 735040 - RNA, 19 nt, Homo sapiens
  misc_RNA (1)...(19): siRNA sense strand
caaccugcaaugugacuau

SEQ ID NO: 735041 - RNA, 19 nt, Homo sapiens
  misc_RNA (1)...(19): siRNA sense strand
gaacuucugaggcgcaaac

SEQ ID NO: 735042 - RNA, 19 nt, Homo sapiens
  misc_RNA (1)...(19): siRNA sense strand
cagcagagcgugcgcacau

SEQ ID NO: 735043 - RNA, 19 nt, Homo sapiens
  misc_RNA (1)...(19): siRNA sense strand
caugugaggacacugaaga

SEQ ID NO: 735044 - RNA, 19 nt, Homo sapiens
  misc_RNA (1)...(19): siRNA sense strand
ggcgaugcccuguacuuga

SEQ ID NO: 735045 - RNA, 19 nt, Homo sapiens
  misc_RNA (1)...(19): siRNA sense strand
gucaaucucuauggacuuc

SEQ ID NO: 735046 - RNA, 19 nt, Homo sapiens
  misc_RNA (1)...(19): siRNA sense strand
ccacagcaaggccuuaaag

SEQ ID NO: 735047 - RNA, 19 nt, Homo sapiens
  misc_RNA (1)...(19): siRNA sense strand
gagcugaugagugacuuug

SEQ ID NO: 735048 - RNA, 19 nt, Homo sapiens
  misc_RNA (1)...(19): siRNA sense strand
ggaaaucagcugagaucac

SEQ ID NO: 735049 - RNA, 19 nt, Homo sapiens
  misc_RNA (1)...(19): siRNA sense strand
caagcagaagcaacagaaa

SEQ ID NO: 735050 - RNA, 19 nt, Homo sapiens
  misc_RNA (1)...(19): siRNA sense strand
gcugaugacagauguacug

SEQ ID NO: 735051 - RNA, 19 nt, Homo sapiens
  misc_RNA (1)...(19): siRNA sense strand
gcgcuucaaagaugugcua

SEQ ID NO: 735052 - RNA, 19 nt, Homo sapiens
  misc_RNA (1)...(19): siRNA sense strand
gcaauucauccggaaagug

SEQ ID NO: 735053 - RNA, 19 nt, Homo sapiens
  misc_RNA (1)...(19): siRNA sense strand
gcggagcagauguguaaga

SEQ ID NO: 735054 - RNA, 19 nt, Homo sapiens
  misc_RNA (1)...(19): siRNA sense strand
acgaagagguaaucuacag

SEQ ID NO: 735055 - RNA, 19 nt, Homo sapiens
  misc_RNA (1)...(19): siRNA sense strand
gugcuagugcugcugauga

SEQ ID NO: 735056 - RNA, 19 nt, Homo sapiens
  misc_RNA (1)...(19): siRNA sense strand
ccaaggaagcccucaucug

SEQ ID NO: 735057 - RNA, 19 nt, Homo sapiens
  misc_RNA (1)...(19): siRNA sense strand
ccagacagcggugguaaca

SEQ ID NO: 735058 - RNA, 19 nt, Homo sapiens
  misc_RNA (1)...(19): siRNA sense strand
ugagguggagggucugaaa

SEQ ID NO: 735059 - RNA, 19 nt, Homo sapiens
  misc_RNA (1)...(19): siRNA sense strand
gaaaaggaccagaaguaca

SEQ ID NO: 735060 - RNA, 19 nt, Homo sapiens
  misc_RNA (1)...(19): siRNA sense strand
gcagcacccggaacuuugu

SEQ ID NO: 735061 - RNA, 19 nt, Homo sapiens
  misc_RNA (1)...(19): siRNA sense strand
gacagaggaugaggcuuac

SEQ ID NO: 735062 - RNA, 19 nt, Homo sapiens
  misc_RNA (1)...(19): siRNA sense strand
uaccugcggcgaauuaaga

SEQ ID NO: 735063 - RNA, 19 nt, Homo sapiens
  misc_RNA (1)...(19): siRNA sense strand
ccacagcggucacuucaug

SEQ ID NO: 735064 - RNA, 19 nt, Homo sapiens
  misc_RNA (1)...(19): siRNA sense strand
gacacucucuucaccauga

SEQ ID NO: 735065 - RNA, 19 nt, Homo sapiens
  misc_RNA (1)...(19): siRNA sense strand
gcccaugccuucaaacuuc

SEQ ID NO: 735066 - RNA, 19 nt, Homo sapiens
  misc_RNA (1)...(19): siRNA sense strand
acaagaagcggcuccguaa

SEQ ID NO: 735067 - RNA, 19 nt, Homo sapiens
  misc_RNA (1)...(19): siRNA sense strand
gacaagauccgccugaaca

SEQ ID NO: 735068 - RNA, 19 nt, Homo sapiens
  misc_RNA (1)...(19): siRNA sense strand
ucucuucucucccagguuu

SEQ ID NO: 735069 - RNA, 19 nt, Homo sapiens
  misc_RNA (1)...(19): siRNA sense strand
gagacauguuugaugacua

SEQ ID NO: 735070 - RNA, 19 nt, Homo sapiens
  misc_RNA (1)...(19): siRNA sense strand
gagacaagauccgccugaa

SEQ ID NO: 735071 - RNA, 19 nt, Homo sapiens
  misc_RNA (1)...(19): siRNA sense strand
acaaguggcgcaucuacua

SEQ ID NO: 735072 - RNA, 19 nt, Homo sapiens
  misc_RNA (1)...(19): siRNA sense strand
gggcacaucuaccaguauc

SEQ ID NO: 735073 - RNA, 19 nt, Homo sapiens
  misc_RNA (1)...(19): siRNA sense strand
cggcaaugcugacaugauc

SEQ ID NO: 735074 - RNA, 19 nt, Homo sapiens
  misc_RNA (1)...(19): siRNA sense strand
ucucagauuucuuuaccaa

SEQ ID NO: 735075 - RNA, 19 nt, Homo sapiens
  misc_RNA (1)...(19): siRNA sense strand
ugcgagacauguuugauga

SEQ ID NO: 735076 - RNA, 19 nt, Homo sapiens
  misc_RNA (1)...(19): siRNA sense strand
ccagaugcgagacauguuu

SEQ ID NO: 735077 - RNA, 19 nt, Homo sapiens
  misc_RNA (1)...(19): siRNA sense strand
ucagauuucuuuaccaacu

SEQ ID NO: 735078 - RNA, 19 nt, Homo sapiens
  misc_RNA (1)...(19): siRNA sense strand
agacauguuugaugacuac

SEQ ID NO: 735079 - RNA, 19 nt, Homo sapiens
  misc_RNA (1)...(19): siRNA sense strand
ccaaguggaagaauuucaa

SEQ ID NO: 735080 - RNA, 19 nt, Homo sapiens
  misc_RNA (1)...(19): siRNA sense strand
caaguggaagaauuucaaa

SEQ ID NO: 735081 - RNA, 19 nt, Homo sapiens
  misc_RNA (1)...(19): siRNA sense strand
gugguugacucccucuuca

SEQ ID NO: 735082 - RNA, 19 nt, Homo sapiens
  misc_RNA (1)...(19): siRNA sense strand
uggcgcaucuacuacaaga

SEQ ID NO: 735083 - RNA, 19 nt, Homo sapiens
  misc_RNA (1)...(19): siRNA sense strand
gcgcaucuacuacaagaag

SEQ ID NO: 735084 - RNA, 19 nt, Homo sapiens
  misc_RNA (1)...(19): siRNA sense strand
cgucggcaaugcugacaug

SEQ ID NO: 735085 - RNA, 19 nt, Homo sapiens
  misc_RNA (1)...(19): siRNA sense strand
ggccaacuguccugaacuc

SEQ ID NO: 735086 - RNA, 19 nt, Homo sapiens
  misc_RNA (1)...(19): siRNA sense strand
ucucccaaguggaagaauu

SEQ ID NO: 735087 - RNA, 19 nt, Homo sapiens
  misc_RNA (1)...(19): siRNA sense strand
gaccagaugcgagacaugu

SEQ ID NO: 735088 - RNA, 19 nt, Homo sapiens
  misc_RNA (1)...(19): siRNA sense strand
gcgccuuccugaguucuga

SEQ ID NO: 735089 - RNA, 19 nt, Homo sapiens
  misc_RNA (1)...(19): siRNA sense strand
cagacacucucuucaccau

SEQ ID NO: 735090 - RNA, 19 nt, Homo sapiens
  misc_RNA (1)...(19): siRNA sense strand
gaacccguacgcugcacaa

SEQ ID NO: 735091 - RNA, 19 nt, Homo sapiens
  misc_RNA (1)...(19): siRNA sense strand
guacgcugcacaacuggaa

SEQ ID NO: 735092 - RNA, 19 nt, Homo sapiens
  misc_RNA (1)...(19): siRNA sense strand
ugguauauccaguauguga

SEQ ID NO: 735093 - RNA, 19 nt, Homo sapiens
  misc_RNA (1)...(19): siRNA sense strand
gaauuucaaaggccucaag

SEQ ID NO: 735094 - RNA, 19 nt, Homo sapiens
  misc_RNA (1)...(19): siRNA sense strand
ccacacgggcagucacaga

SEQ ID NO: 735095 - RNA, 19 nt, Homo sapiens
  misc_RNA (1)...(19): siRNA sense strand
ccucauccggccucuguuu

SEQ ID NO: 735096 - RNA, 19 nt, Homo sapiens
  misc_RNA (1)...(19): siRNA sense strand
cgagacauguuugaugacu

SEQ ID NO: 735097 - RNA, 19 nt, Homo sapiens
  misc_RNA (1)...(19): siRNA sense strand
gcagcugcgggaugagauu

SEQ ID NO: 735098 - RNA, 19 nt, Homo sapiens
  misc_RNA (1)...(19): siRNA sense strand
gaguucugauuuccuccuu

SEQ ID NO: 735099 - RNA, 19 nt, Homo sapiens
  misc_RNA (1)...(19): siRNA sense strand
caucucagacacucucuuc

SEQ ID NO: 735100 - RNA, 19 nt, Homo sapiens
  misc_RNA (1)...(19): siRNA sense strand
ccccaccucugcugcauua

SEQ ID NO: 735101 - RNA, 19 nt, Homo sapiens
  misc_RNA (1)...(19): siRNA sense strand
gguauauccaguaugugaa

SEQ ID NO: 735102 - RNA, 19 nt, Homo sapiens
  misc_RNA (1)...(19): siRNA sense strand
cccguacgcugcacaacug

SEQ ID NO: 735103 - RNA, 19 nt, Homo sapiens
  misc_RNA (1)...(19): siRNA sense strand
agccaagccuggaugacuu

SEQ ID NO: 735104 - RNA, 19 nt, Homo sapiens
  misc_RNA (1)...(19): siRNA sense strand
uaugugaagcggaggaaga

SEQ ID NO: 735105 - RNA, 19 nt, Homo sapiens
  misc_RNA (1)...(19): siRNA sense strand
ggccaugacccaccucucu

SEQ ID NO: 735106 - RNA, 19 nt, Homo sapiens
  misc_RNA (1)...(19): siRNA sense strand
uggcaccacccacugcuuu

SEQ ID NO: 735107 - RNA, 19 nt, Homo sapiens
  misc_RNA (1)...(19): siRNA sense strand
gcaaugcugacaugaucca

SEQ ID NO: 735108 - RNA, 19 nt, Homo sapiens
  misc_RNA (1)...(19): siRNA sense strand
ccagcgccuuccugaguuc

SEQ ID NO: 735109 - RNA, 19 nt, Homo sapiens
  misc_RNA (1)...(19): siRNA sense strand
gcuugagccuggccuacag

SEQ ID NO: 735110 - RNA, 19 nt, Homo sapiens
  misc_RNA (1)...(19): siRNA sense strand
aagcuggugucucccaagu

SEQ ID NO: 735111 - RNA, 19 nt, Homo sapiens
  misc_RNA (1)...(19): siRNA sense strand
caacaaccccugccucaca

SEQ ID NO: 735112 - RNA, 19 nt, Homo sapiens
  misc_RNA (1)...(19): siRNA sense strand
ccacagcggucacuucaug

SEQ ID NO: 735113 - RNA, 19 nt, Homo sapiens
  misc_RNA (1)...(19): siRNA sense strand
gacacucucuucaccauga

SEQ ID NO: 735114 - RNA, 19 nt, Homo sapiens
  misc_RNA (1)...(19): siRNA sense strand
gcccaugccuucaaacuuc

SEQ ID NO: 735115 - RNA, 19 nt, Homo sapiens
  misc_RNA (1)...(19): siRNA sense strand
acaagaagcggcuccguaa

SEQ ID NO: 735116 - RNA, 19 nt, Homo sapiens
  misc_RNA (1)...(19): siRNA sense strand
gacaagauccgccugaaca

SEQ ID NO: 735117 - RNA, 19 nt, Homo sapiens
  misc_RNA (1)...(19): siRNA sense strand
ucucuucucucccagguuu

SEQ ID NO: 735118 - RNA, 19 nt, Homo sapiens
  misc_RNA (1)...(19): siRNA sense strand
gagacauguuugaugacua

SEQ ID NO: 735119 - RNA, 19 nt, Homo sapiens
  misc_RNA (1)...(19): siRNA sense strand
gagacaagauccgccugaa

SEQ ID NO: 735120 - RNA, 19 nt, Homo sapiens
  misc_RNA (1)...(19): siRNA sense strand
acaaguggcgcaucuacua

SEQ ID NO: 735121 - RNA, 19 nt, Homo sapiens
  misc_RNA (1)...(19): siRNA sense strand
gggcacaucuaccaguauc

SEQ ID NO: 735122 - RNA, 19 nt, Homo sapiens
  misc_RNA (1)...(19): siRNA sense strand
cggcaaugcugacaugauc

SEQ ID NO: 735123 - RNA, 19 nt, Homo sapiens
  misc_RNA (1)...(19): siRNA sense strand
ucucagauuucuuuaccaa

SEQ ID NO: 735124 - RNA, 19 nt, Homo sapiens
  misc_RNA (1)...(19): siRNA sense strand
ugcgagacauguuugauga

SEQ ID NO: 735125 - RNA, 19 nt, Homo sapiens
  misc_RNA (1)...(19): siRNA sense strand
ccagaugcgagacauguuu

SEQ ID NO: 735126 - RNA, 19 nt, Homo sapiens
  misc_RNA (1)...(19): siRNA sense strand
ucagauuucuuuaccaacu

SEQ ID NO: 735127 - RNA, 19 nt, Homo sapiens
  misc_RNA (1)...(19): siRNA sense strand
agacauguuugaugacuac

SEQ ID NO: 735128 - RNA, 19 nt, Homo sapiens
  misc_RNA (1)...(19): siRNA sense strand
ccaaguggaagaauuucaa

SEQ ID NO: 735129 - RNA, 19 nt, Homo sapiens
  misc_RNA (1)...(19): siRNA sense strand
caaguggaagaauuucaaa

SEQ ID NO: 735130 - RNA, 19 nt, Homo sapiens
  misc_RNA (1)...(19): siRNA sense strand
gugguugacucccucuuca

SEQ ID NO: 735131 - RNA, 19 nt, Homo sapiens
  misc_RNA (1)...(19): siRNA sense strand
uggcgcaucuacuacaaga

SEQ ID NO: 735132 - RNA, 19 nt, Homo sapiens
  misc_RNA (1)...(19): siRNA sense strand
gcgcaucuacuacaagaag

SEQ ID NO: 735133 - RNA, 19 nt, Homo sapiens
  misc_RNA (1)...(19): siRNA sense strand
cgucggcaaugcugacaug

SEQ ID NO: 735134 - RNA, 19 nt, Homo sapiens
  misc_RNA (1)...(19): siRNA sense strand
ggccaacuguccugaacuc

SEQ ID NO: 735135 - RNA, 19 nt, Homo sapiens
  misc_RNA (1)...(19): siRNA sense strand
ucucccaaguggaagaauu

SEQ ID NO: 735136 - RNA, 19 nt, Homo sapiens
  misc_RNA (1)...(19): siRNA sense strand
gaccagaugcgagacaugu

SEQ ID NO: 735137 - RNA, 19 nt, Homo sapiens
  misc_RNA (1)...(19): siRNA sense strand
gcgccuuccugaguucuga

SEQ ID NO: 735138 - RNA, 19 nt, Homo sapiens
  misc_RNA (1)...(19): siRNA sense strand
cagacacucucuucaccau

SEQ ID NO: 735139 - RNA, 19 nt, Homo sapiens
  misc_RNA (1)...(19): siRNA sense strand
gaacccguacgcugcacaa

SEQ ID NO: 735140 - RNA, 19 nt, Homo sapiens
  misc_RNA (1)...(19): siRNA sense strand
guacgcugcacaacuggaa

SEQ ID NO: 735141 - RNA, 19 nt, Homo sapiens
  misc_RNA (1)...(19): siRNA sense strand
ugguauauccaguauguga

SEQ ID NO: 735142 - RNA, 19 nt, Homo sapiens
  misc_RNA (1)...(19): siRNA sense strand
gaauuucaaaggccucaag

SEQ ID NO: 735143 - RNA, 19 nt, Homo sapiens
  misc_RNA (1)...(19): siRNA sense strand
ccacacgggcagucacaga

SEQ ID NO: 735144 - RNA, 19 nt, Homo sapiens
  misc_RNA (1)...(19): siRNA sense strand
ccucauccggccucuguuu

SEQ ID NO: 735145 - RNA, 19 nt, Homo sapiens
  misc_RNA (1)...(19): siRNA sense strand
cgagacauguuugaugacu

SEQ ID NO: 735146 - RNA, 19 nt, Homo sapiens
  misc_RNA (1)...(19): siRNA sense strand
gcagcugcgggaugagauu

SEQ ID NO: 735147 - RNA, 19 nt, Homo sapiens
  misc_RNA (1)...(19): siRNA sense strand
gaguucugauuuccuccuu

SEQ ID NO: 735148 - RNA, 19 nt, Homo sapiens
  misc_RNA (1)...(19): siRNA sense strand
caucucagacacucucuuc

SEQ ID NO: 735149 - RNA, 19 nt, Homo sapiens
  misc_RNA (1)...(19): siRNA sense strand
ccccaccucugcugcauua

SEQ ID NO: 735150 - RNA, 19 nt, Homo sapiens
  misc_RNA (1)...(19): siRNA sense strand
gguauauccaguaugugaa

SEQ ID NO: 735151 - RNA, 19 nt, Homo sapiens
  misc_RNA (1)...(19): siRNA sense strand
cccguacgcugcacaacug

SEQ ID NO: 735152 - RNA, 19 nt, Homo sapiens
  misc_RNA (1)...(19): siRNA sense strand
agccaagccuggaugacuu

SEQ ID NO: 735153 - RNA, 19 nt, Homo sapiens
  misc_RNA (1)...(19): siRNA sense strand
uaugugaagcggaggaaga

SEQ ID NO: 735154 - RNA, 19 nt, Homo sapiens
  misc_RNA (1)...(19): siRNA sense strand
ggccaugacccaccucucu

SEQ ID NO: 735155 - RNA, 19 nt, Homo sapiens
  misc_RNA (1)...(19): siRNA sense strand
uggcaccacccacugcuuu

SEQ ID NO: 735156 - RNA, 19 nt, Homo sapiens
  misc_RNA (1)...(19): siRNA sense strand
gcaaugcugacaugaucca

SEQ ID NO: 735157 - RNA, 19 nt, Homo sapiens
  misc_RNA (1)...(19): siRNA sense strand
ccagcgccuuccugaguuc

SEQ ID NO: 735158 - RNA, 19 nt, Homo sapiens
  misc_RNA (1)...(19): siRNA sense strand
gcuugagccuggccuacag

SEQ ID NO: 735159 - RNA, 19 nt, Homo sapiens
  misc_RNA (1)...(19): siRNA sense strand
aagcuggugucucccaagu

SEQ ID NO: 735160 - RNA, 19 nt, Homo sapiens
  misc_RNA (1)...(19): siRNA sense strand
caacaaccccugccucaca

SEQ ID NO: 735161 - RNA, 19 nt, Homo sapiens
  misc_RNA (1)...(19): siRNA sense strand
ccacagcggucacuucaug

SEQ ID NO: 735162 - RNA, 19 nt, Homo sapiens
  misc_RNA (1)...(19): siRNA sense strand
gacacucucuucaccauga

SEQ ID NO: 735163 - RNA, 19 nt, Homo sapiens
  misc_RNA (1)...(19): siRNA sense strand
gcccaugccuucaaacuuc

SEQ ID NO: 735164 - RNA, 19 nt, Homo sapiens
  misc_RNA (1)...(19): siRNA sense strand
acaagaagcggcuccguaa

SEQ ID NO: 735165 - RNA, 19 nt, Homo sapiens
  misc_RNA (1)...(19): siRNA sense strand
gacaagauccgccugaaca

SEQ ID NO: 735166 - RNA, 19 nt, Homo sapiens
  misc_RNA (1)...(19): siRNA sense strand
ucucuucucucccagguuu

SEQ ID NO: 735167 - RNA, 19 nt, Homo sapiens
  misc_RNA (1)...(19): siRNA sense strand
gagacauguuugaugacua

SEQ ID NO: 735168 - RNA, 19 nt, Homo sapiens
  misc_RNA (1)...(19): siRNA sense strand
gagacaagauccgccugaa

SEQ ID NO: 735169 - RNA, 19 nt, Homo sapiens
  misc_RNA (1)...(19): siRNA sense strand
acaaguggcgcaucuacua

SEQ ID NO: 735170 - RNA, 19 nt, Homo sapiens
  misc_RNA (1)...(19): siRNA sense strand
gggcacaucuaccaguauc

SEQ ID NO: 735171 - RNA, 19 nt, Homo sapiens
  misc_RNA (1)...(19): siRNA sense strand
cggcaaugcugacaugauc

SEQ ID NO: 735172 - RNA, 19 nt, Homo sapiens
  misc_RNA (1)...(19): siRNA sense strand
ucucagauuucuuuaccaa

SEQ ID NO: 735173 - RNA, 19 nt, Homo sapiens
  misc_RNA (1)...(19): siRNA sense strand
ugcgagacauguuugauga

SEQ ID NO: 735174 - RNA, 19 nt, Homo sapiens
  misc_RNA (1)...(19): siRNA sense strand
ccagaugcgagacauguuu

SEQ ID NO: 735175 - RNA, 19 nt, Homo sapiens
  misc_RNA (1)...(19): siRNA sense strand
ucagauuucuuuaccaacu

SEQ ID NO: 735176 - RNA, 19 nt, Homo sapiens
  misc_RNA (1)...(19): siRNA sense strand
agacauguuugaugacuac

SEQ ID NO: 735177 - RNA, 19 nt, Homo sapiens
  misc_RNA (1)...(19): siRNA sense strand
ccaaguggaagaauuucaa

SEQ ID NO: 735178 - RNA, 19 nt, Homo sapiens
  misc_RNA (1)...(19): siRNA sense strand
caaguggaagaauuucaaa

SEQ ID NO: 735179 - RNA, 19 nt, Homo sapiens
  misc_RNA (1)...(19): siRNA sense strand
gugguugacucccucuuca

SEQ ID NO: 735180 - RNA, 19 nt, Homo sapiens
  misc_RNA (1)...(19): siRNA sense strand
uggcgcaucuacuacaaga

SEQ ID NO: 735181 - RNA, 19 nt, Homo sapiens
  misc_RNA (1)...(19): siRNA sense strand
gcgcaucuacuacaagaag

SEQ ID NO: 735182 - RNA, 19 nt, Homo sapiens
  misc_RNA (1)...(19): siRNA sense strand
cgucggcaaugcugacaug

SEQ ID NO: 735183 - RNA, 19 nt, Homo sapiens
  misc_RNA (1)...(19): siRNA sense strand
ggccaacuguccugaacuc

SEQ ID NO: 735184 - RNA, 19 nt, Homo sapiens
  misc_RNA (1)...(19): siRNA sense strand
ucucccaaguggaagaauu

SEQ ID NO: 735185 - RNA, 19 nt, Homo sapiens
  misc_RNA (1)...(19): siRNA sense strand
gaccagaugcgagacaugu

SEQ ID NO: 735186 - RNA, 19 nt, Homo sapiens
  misc_RNA (1)...(19): siRNA sense strand
gcgccuuccugaguucuga

SEQ ID NO: 735187 - RNA, 19 nt, Homo sapiens
  misc_RNA (1)...(19): siRNA sense strand
cagacacucucuucaccau

SEQ ID NO: 735188 - RNA, 19 nt, Homo sapiens
  misc_RNA (1)...(19): siRNA sense strand
gaacccguacgcugcacaa

SEQ ID NO: 735189 - RNA, 19 nt, Homo sapiens
  misc_RNA (1)...(19): siRNA sense strand
guacgcugcacaacuggaa

SEQ ID NO: 735190 - RNA, 19 nt, Homo sapiens
  misc_RNA (1)...(19): siRNA sense strand
ugguauauccaguauguga

SEQ ID NO: 735191 - RNA, 19 nt, Homo sapiens
  misc_RNA (1)...(19): siRNA sense strand
gaauuucaaaggccucaag

SEQ ID NO: 735192 - RNA, 19 nt, Homo sapiens
  misc_RNA (1)...(19): siRNA sense strand
ccacacgggcagucacaga

SEQ ID NO: 735193 - RNA, 19 nt, Homo sapiens
  misc_RNA (1)...(19): siRNA sense strand
ccucauccggccucuguuu

SEQ ID NO: 735194 - RNA, 19 nt, Homo sapiens
  misc_RNA (1)...(19): siRNA sense strand
cgagacauguuugaugacu

SEQ ID NO: 735195 - RNA, 19 nt, Homo sapiens
  misc_RNA (1)...(19): siRNA sense strand
gcagcugcgggaugagauu

SEQ ID NO: 735196 - RNA, 19 nt, Homo sapiens
  misc_RNA (1)...(19): siRNA sense strand
gaguucugauuuccuccuu

SEQ ID NO: 735197 - RNA, 19 nt, Homo sapiens
  misc_RNA (1)...(19): siRNA sense strand
caucucagacacucucuuc

SEQ ID NO: 735198 - RNA, 19 nt, Homo sapiens
  misc_RNA (1)...(19): siRNA sense strand
ccccaccucugcugcauua

SEQ ID NO: 735199 - RNA, 19 nt, Homo sapiens
  misc_RNA (1)...(19): siRNA sense strand
gguauauccaguaugugaa

SEQ ID NO: 735200 - RNA, 19 nt, Homo sapiens
  misc_RNA (1)...(19): siRNA sense strand
cccguacgcugcacaacug

SEQ ID NO: 735201 - RNA, 19 nt, Homo sapiens
  misc_RNA (1)...(19): siRNA sense strand
agccaagccuggaugacuu

SEQ ID NO: 735202 - RNA, 19 nt, Homo sapiens
  misc_RNA (1)...(19): siRNA sense strand
uaugugaagcggaggaaga

SEQ ID NO: 735203 - RNA, 19 nt, Homo sapiens
  misc_RNA (1)...(19): siRNA sense strand
ggccaugacccaccucucu

SEQ ID NO: 735204 - RNA, 19 nt, Homo sapiens
  misc_RNA (1)...(19): siRNA sense strand
uggcaccacccacugcuuu

SEQ ID NO: 735205 - RNA, 19 nt, Homo sapiens
  misc_RNA (1)...(19): siRNA sense strand
gcaaugcugacaugaucca

SEQ ID NO: 735206 - RNA, 19 nt, Homo sapiens
  misc_RNA (1)...(19): siRNA sense strand
ccagcgccuuccugaguuc

SEQ ID NO: 735207 - RNA, 19 nt, Homo sapiens
  misc_RNA (1)...(19): siRNA sense strand
gcuugagccuggccuacag

SEQ ID NO: 735208 - RNA, 19 nt, Homo sapiens
  misc_RNA (1)...(19): siRNA sense strand
aagcuggugucucccaagu

SEQ ID NO: 735209 - RNA, 19 nt, Homo sapiens
  misc_RNA (1)...(19): siRNA sense strand
caacaaccccugccucaca

SEQ ID NO: 735210 - RNA, 19 nt, Homo sapiens
  misc_RNA (1)...(19): siRNA sense strand
ccacagcggucacuucaug

SEQ ID NO: 735211 - RNA, 19 nt, Homo sapiens
  misc_RNA (1)...(19): siRNA sense strand
gacacucucuucaccauga

SEQ ID NO: 735212 - RNA, 19 nt, Homo sapiens
  misc_RNA (1)...(19): siRNA sense strand
gcccaugccuucaaacuuc

SEQ ID NO: 735213 - RNA, 19 nt, Homo sapiens
  misc_RNA (1)...(19): siRNA sense strand
acaagaagcggcuccguaa

SEQ ID NO: 735214 - RNA, 19 nt, Homo sapiens
  misc_RNA (1)...(19): siRNA sense strand
gacaagauccgccugaaca

SEQ ID NO: 735215 - RNA, 19 nt, Homo sapiens
  misc_RNA (1)...(19): siRNA sense strand
ucucuucucucccagguuu

SEQ ID NO: 735216 - RNA, 19 nt, Homo sapiens
  misc_RNA (1)...(19): siRNA sense strand
gagacauguuugaugacua

SEQ ID NO: 735217 - RNA, 19 nt, Homo sapiens
  misc_RNA (1)...(19): siRNA sense strand
gagacaagauccgccugaa

SEQ ID NO: 735218 - RNA, 19 nt, Homo sapiens
  misc_RNA (1)...(19): siRNA sense strand
acaaguggcgcaucuacua

SEQ ID NO: 735219 - RNA, 19 nt, Homo sapiens
  misc_RNA (1)...(19): siRNA sense strand
gggcacaucuaccaguauc

SEQ ID NO: 735220 - RNA, 19 nt, Homo sapiens
  misc_RNA (1)...(19): siRNA sense strand
cggcaaugcugacaugauc

SEQ ID NO: 735221 - RNA, 19 nt, Homo sapiens
  misc_RNA (1)...(19): siRNA sense strand
ucucagauuucuuuaccaa

SEQ ID NO: 735222 - RNA, 19 nt, Homo sapiens
  misc_RNA (1)...(19): siRNA sense strand
ugcgagacauguuugauga

SEQ ID NO: 735223 - RNA, 19 nt, Homo sapiens
  misc_RNA (1)...(19): siRNA sense strand
ccagaugcgagacauguuu

SEQ ID NO: 735224 - RNA, 19 nt, Homo sapiens
  misc_RNA (1)...(19): siRNA sense strand
ucagauuucuuuaccaacu

SEQ ID NO: 735225 - RNA, 19 nt, Homo sapiens
  misc_RNA (1)...(19): siRNA sense strand
agacauguuugaugacuac

SEQ ID NO: 735226 - RNA, 19 nt, Homo sapiens
  misc_RNA (1)...(19): siRNA sense strand
ccaaguggaagaauuucaa

SEQ ID NO: 735227 - RNA, 19 nt, Homo sapiens
  misc_RNA (1)...(19): siRNA sense strand
caaguggaagaauuucaaa

SEQ ID NO: 735228 - RNA, 19 nt, Homo sapiens
  misc_RNA (1)...(19): siRNA sense strand
gugguugacucccucuuca

SEQ ID NO: 735229 - RNA, 19 nt, Homo sapiens
  misc_RNA (1)...(19): siRNA sense strand
uggcgcaucuacuacaaga

SEQ ID NO: 735230 - RNA, 19 nt, Homo sapiens
  misc_RNA (1)...(19): siRNA sense strand
gcgcaucuacuacaagaag

SEQ ID NO: 735231 - RNA, 19 nt, Homo sapiens
  misc_RNA (1)...(19): siRNA sense strand
cgucggcaaugcugacaug

SEQ ID NO: 735232 - RNA, 19 nt, Homo sapiens
  misc_RNA (1)...(19): siRNA sense strand
ggccaacuguccugaacuc

SEQ ID NO: 735233 - RNA, 19 nt, Homo sapiens
  misc_RNA (1)...(19): siRNA sense strand
ucucccaaguggaagaauu

SEQ ID NO: 735234 - RNA, 19 nt, Homo sapiens
  misc_RNA (1)...(19): siRNA sense strand
gaccagaugcgagacaugu

SEQ ID NO: 735235 - RNA, 19 nt, Homo sapiens
  misc_RNA (1)...(19): siRNA sense strand
gcgccuuccugaguucuga

SEQ ID NO: 735236 - RNA, 19 nt, Homo sapiens
  misc_RNA (1)...(19): siRNA sense strand
cagacacucucuucaccau

SEQ ID NO: 735237 - RNA, 19 nt, Homo sapiens
  misc_RNA (1)...(19): siRNA sense strand
gaacccguacgcugcacaa

SEQ ID NO: 735238 - RNA, 19 nt, Homo sapiens
  misc_RNA (1)...(19): siRNA sense strand
guacgcugcacaacuggaa

SEQ ID NO: 735239 - RNA, 19 nt, Homo sapiens
  misc_RNA (1)...(19): siRNA sense strand
ugguauauccaguauguga

SEQ ID NO: 735240 - RNA, 19 nt, Homo sapiens
  misc_RNA (1)...(19): siRNA sense strand
gaauuucaaaggccucaag

SEQ ID NO: 735241 - RNA, 19 nt, Homo sapiens
  misc_RNA (1)...(19): siRNA sense strand
ccacacgggcagucacaga

SEQ ID NO: 735242 - RNA, 19 nt, Homo sapiens
  misc_RNA (1)...(19): siRNA sense strand
ccucauccggccucuguuu

SEQ ID NO: 735243 - RNA, 19 nt, Homo sapiens
  misc_RNA (1)...(19): siRNA sense strand
cgagacauguuugaugacu

SEQ ID NO: 735244 - RNA, 19 nt, Homo sapiens
  misc_RNA (1)...(19): siRNA sense strand
gcagcugcgggaugagauu

SEQ ID NO: 735245 - RNA, 19 nt, Homo sapiens
  misc_RNA (1)...(19): siRNA sense strand
gaguucugauuuccuccuu

SEQ ID NO: 735246 - RNA, 19 nt, Homo sapiens
  misc_RNA (1)...(19): siRNA sense strand
caucucagacacucucuuc

SEQ ID NO: 735247 - RNA, 19 nt, Homo sapiens
  misc_RNA (1)...(19): siRNA sense strand
ccccaccucugcugcauua

SEQ ID NO: 735248 - RNA, 19 nt, Homo sapiens
  misc_RNA (1)...(19): siRNA sense strand
gguauauccaguaugugaa

SEQ ID NO: 735249 - RNA, 19 nt, Homo sapiens
  misc_RNA (1)...(19): siRNA sense strand
cccguacgcugcacaacug

SEQ ID NO: 735250 - RNA, 19 nt, Homo sapiens
  misc_RNA (1)...(19): siRNA sense strand
agccaagccuggaugacuu

SEQ ID NO: 735251 - RNA, 19 nt, Homo sapiens
  misc_RNA (1)...(19): siRNA sense strand
uaugugaagcggaggaaga

SEQ ID NO: 735252 - RNA, 19 nt, Homo sapiens
  misc_RNA (1)...(19): siRNA sense strand
ggccaugacccaccucucu

SEQ ID NO: 735253 - RNA, 19 nt, Homo sapiens
  misc_RNA (1)...(19): siRNA sense strand
uggcaccacccacugcuuu

SEQ ID NO: 735254 - RNA, 19 nt, Homo sapiens
  misc_RNA (1)...(19): siRNA sense strand
gcaaugcugacaugaucca

SEQ ID NO: 735255 - RNA, 19 nt, Homo sapiens
  misc_RNA (1)...(19): siRNA sense strand
ccagcgccuuccugaguuc

SEQ ID NO: 735256 - RNA, 19 nt, Homo sapiens
  misc_RNA (1)...(19): siRNA sense strand
gcuugagccuggccuacag

SEQ ID NO: 735257 - RNA, 19 nt, Homo sapiens
  misc_RNA (1)...(19): siRNA sense strand
aagcuggugucucccaagu

SEQ ID NO: 735258 - RNA, 19 nt, Homo sapiens
  misc_RNA (1)...(19): siRNA sense strand
caacaaccccugccucaca

SEQ ID NO: 735259 - RNA, 19 nt, Homo sapiens
  misc_RNA (1)...(19): siRNA sense strand
ccacagcggucacuucaug

SEQ ID NO: 735260 - RNA, 19 nt, Homo sapiens
  misc_RNA (1)...(19): siRNA sense strand
gacacucucuucaccauga

SEQ ID NO: 735261 - RNA, 19 nt, Homo sapiens
  misc_RNA (1)...(19): siRNA sense strand
gcccaugccuucaaacuuc

SEQ ID NO: 735262 - RNA, 19 nt, Homo sapiens
  misc_RNA (1)...(19): siRNA sense strand
acaagaagcggcuccguaa

SEQ ID NO: 735263 - RNA, 19 nt, Homo sapiens
  misc_RNA (1)...(19): siRNA sense strand
gacaagauccgccugaaca

SEQ ID NO: 735264 - RNA, 19 nt, Homo sapiens
  misc_RNA (1)...(19): siRNA sense strand
ucucuucucucccagguuu

SEQ ID NO: 735265 - RNA, 19 nt, Homo sapiens
  misc_RNA (1)...(19): siRNA sense strand
gagacaagauccgccugaa

SEQ ID NO: 735266 - RNA, 19 nt, Homo sapiens
  misc_RNA (1)...(19): siRNA sense strand
acaaguggcgcaucuacua

SEQ ID NO: 735267 - RNA, 19 nt, Homo sapiens
  misc_RNA (1)...(19): siRNA sense strand
cggcaaugcugacaugauc

SEQ ID NO: 735268 - RNA, 19 nt, Homo sapiens
  misc_RNA (1)...(19): siRNA sense strand
ucucagauuucuuuaccaa

SEQ ID NO: 735269 - RNA, 19 nt, Homo sapiens
  misc_RNA (1)...(19): siRNA sense strand
ucagauuucuuuaccaacu

SEQ ID NO: 735270 - RNA, 19 nt, Homo sapiens
  misc_RNA (1)...(19): siRNA sense strand
ccaaguggaagaauuucaa

SEQ ID NO: 735271 - RNA, 19 nt, Homo sapiens
  misc_RNA (1)...(19): siRNA sense strand
caaguggaagaauuucaaa

SEQ ID NO: 735272 - RNA, 19 nt, Homo sapiens
  misc_RNA (1)...(19): siRNA sense strand
gugguugacucccucuuca

SEQ ID NO: 735273 - RNA, 19 nt, Homo sapiens
  misc_RNA (1)...(19): siRNA sense strand
uggcgcaucuacuacaaga

SEQ ID NO: 735274 - RNA, 19 nt, Homo sapiens
  misc_RNA (1)...(19): siRNA sense strand
gcgcaucuacuacaagaag

SEQ ID NO: 735275 - RNA, 19 nt, Homo sapiens
  misc_RNA (1)...(19): siRNA sense strand
cgucggcaaugcugacaug

SEQ ID NO: 735276 - RNA, 19 nt, Homo sapiens
  misc_RNA (1)...(19): siRNA sense strand
ucucccaaguggaagaauu

SEQ ID NO: 735277 - RNA, 19 nt, Homo sapiens
  misc_RNA (1)...(19): siRNA sense strand
gcgccuuccugaguucuga

SEQ ID NO: 735278 - RNA, 19 nt, Homo sapiens
  misc_RNA (1)...(19): siRNA sense strand
cagacacucucuucaccau

SEQ ID NO: 735279 - RNA, 19 nt, Homo sapiens
  misc_RNA (1)...(19): siRNA sense strand
ugguauauccaguauguga

SEQ ID NO: 735280 - RNA, 19 nt, Homo sapiens
  misc_RNA (1)...(19): siRNA sense strand
gaauuucaaaggccucaag

SEQ ID NO: 735281 - RNA, 19 nt, Homo sapiens
  misc_RNA (1)...(19): siRNA sense strand
gaguucugauuuccuccuu

SEQ ID NO: 735282 - RNA, 19 nt, Homo sapiens
  misc_RNA (1)...(19): siRNA sense strand
caucucagacacucucuuc

SEQ ID NO: 735283 - RNA, 19 nt, Homo sapiens
  misc_RNA (1)...(19): siRNA sense strand
ccccaccucugcugcauua

SEQ ID NO: 735284 - RNA, 19 nt, Homo sapiens
  misc_RNA (1)...(19): siRNA sense strand
gguauauccaguaugugaa

SEQ ID NO: 735285 - RNA, 19 nt, Homo sapiens
  misc_RNA (1)...(19): siRNA sense strand
agccaagccuggaugacuu

SEQ ID NO: 735286 - RNA, 19 nt, Homo sapiens
  misc_RNA (1)...(19): siRNA sense strand
uaugugaagcggaggaaga

SEQ ID NO: 735287 - RNA, 19 nt, Homo sapiens
  misc_RNA (1)...(19): siRNA sense strand
ggccaugacccaccucucu

SEQ ID NO: 735288 - RNA, 19 nt, Homo sapiens
  misc_RNA (1)...(19): siRNA sense strand
uggcaccacccacugcuuu

SEQ ID NO: 735289 - RNA, 19 nt, Homo sapiens
  misc_RNA (1)...(19): siRNA sense strand
gcaaugcugacaugaucca

SEQ ID NO: 735290 - RNA, 19 nt, Homo sapiens
  misc_RNA (1)...(19): siRNA sense strand
aagcuggugucucccaagu

SEQ ID NO: 735291 - RNA, 19 nt, Homo sapiens
  misc_RNA (1)...(19): siRNA sense strand
caacaaccccugccucaca

SEQ ID NO: 735292 - RNA, 19 nt, Homo sapiens
  misc_RNA (1)...(19): siRNA sense strand
ccagcgccuuccugaguuc

SEQ ID NO: 735293 - RNA, 19 nt, Homo sapiens
  misc_RNA (1)...(19): siRNA sense strand
gcuugagccuggccuacag

SEQ ID NO: 735294 - RNA, 19 nt, Homo sapiens
  misc_RNA (1)...(19): siRNA sense strand
gcacaaagauggagucaag

SEQ ID NO: 735295 - RNA, 19 nt, Homo sapiens
  misc_RNA (1)...(19): siRNA sense strand
gaaagaaguugcagaagca

SEQ ID NO: 735296 - RNA, 19 nt, Homo sapiens
  misc_RNA (1)...(19): siRNA sense strand
gaaaggaggcugcacauag

SEQ ID NO: 735297 - RNA, 19 nt, Homo sapiens
  misc_RNA (1)...(19): siRNA sense strand
ucaccaagcucagcaagua

SEQ ID NO: 735298 - RNA, 19 nt, Homo sapiens
  misc_RNA (1)...(19): siRNA sense strand
ucacugaacugcagaggaa

SEQ ID NO: 735299 - RNA, 19 nt, Homo sapiens
  misc_RNA (1)...(19): siRNA sense strand
gcucagaacucaucuacuc

SEQ ID NO: 735300 - RNA, 19 nt, Homo sapiens
  misc_RNA (1)...(19): siRNA sense strand
ggacagagaccuccaugug

SEQ ID NO: 735301 - RNA, 19 nt, Homo sapiens
  misc_RNA (1)...(19): siRNA sense strand
ggagaaagacgaucauuac

SEQ ID NO: 735302 - RNA, 19 nt, Homo sapiens
  misc_RNA (1)...(19): siRNA sense strand
ggaccaacgucaucaacga

SEQ ID NO: 735303 - RNA, 19 nt, Homo sapiens
  misc_RNA (1)...(19): siRNA sense strand
ggagucaagugcuggagaa

SEQ ID NO: 735304 - RNA, 19 nt, Homo sapiens
  misc_RNA (1)...(19): siRNA sense strand
cgaauguucuuucucuuug

SEQ ID NO: 735305 - RNA, 19 nt, Homo sapiens
  misc_RNA (1)...(19): siRNA sense strand
gagaagacacagagaaaga

SEQ ID NO: 735306 - RNA, 19 nt, Homo sapiens
  misc_RNA (1)...(19): siRNA sense strand
gggagcagcuggcuaucaa

SEQ ID NO: 735307 - RNA, 19 nt, Homo sapiens
  misc_RNA (1)...(19): siRNA sense strand
gaacaucgaggacaucuac

SEQ ID NO: 735308 - RNA, 19 nt, Homo sapiens
  misc_RNA (1)...(19): siRNA sense strand
gcacugagcgggacuacau

SEQ ID NO: 735309 - RNA, 19 nt, Homo sapiens
  misc_RNA (1)...(19): siRNA sense strand
cagcucaucuacuguaaga

SEQ ID NO: 735310 - RNA, 19 nt, Homo sapiens
  misc_RNA (1)...(19): siRNA sense strand
gcacagggacuucaaggau

SEQ ID NO: 735311 - RNA, 19 nt, Homo sapiens
  misc_RNA (1)...(19): siRNA sense strand
gaauguucuuucucuuuga

SEQ ID NO: 735312 - RNA, 19 nt, Homo sapiens
  misc_RNA (1)...(19): siRNA sense strand
gucaagugcuggagaaaga

SEQ ID NO: 735313 - RNA, 19 nt, Homo sapiens
  misc_RNA (1)...(19): siRNA sense strand
caacgggacugaaccacau

SEQ ID NO: 735314 - RNA, 19 nt, Homo sapiens
  misc_RNA (1)...(19): siRNA sense strand
gaagcaggcccacgucgaa

SEQ ID NO: 735315 - RNA, 19 nt, Homo sapiens
  misc_RNA (1)...(19): siRNA sense strand
aggaggaccuguaugauga

SEQ ID NO: 735316 - RNA, 19 nt, Homo sapiens
  misc_RNA (1)...(19): siRNA sense strand
gagaacaucgacaagauug

SEQ ID NO: 735317 - RNA, 19 nt, Homo sapiens
  misc_RNA (1)...(19): siRNA sense strand
gcgaggaggaccuguauga

SEQ ID NO: 735318 - RNA, 19 nt, Homo sapiens
  misc_RNA (1)...(19): siRNA sense strand
gcgaauguucuuucucuuu

SEQ ID NO: 735319 - RNA, 19 nt, Homo sapiens
  misc_RNA (1)...(19): siRNA sense strand
ggagcugacucgaguuaca

SEQ ID NO: 735320 - RNA, 19 nt, Homo sapiens
  misc_RNA (1)...(19): siRNA sense strand
ccaggaagcccgagcagaa

SEQ ID NO: 735321 - RNA, 19 nt, Homo sapiens
  misc_RNA (1)...(19): siRNA sense strand
gaggaggaccuguaugaug

SEQ ID NO: 735322 - RNA, 19 nt, Homo sapiens
  misc_RNA (1)...(19): siRNA sense strand
gagcggaagcggagacuug

SEQ ID NO: 735323 - RNA, 19 nt, Homo sapiens
  misc_RNA (1)...(19): siRNA sense strand
gaacguggcccagcucauc

SEQ ID NO: 735324 - RNA, 19 nt, Homo sapiens
  misc_RNA (1)...(19): siRNA sense strand
gacagagaccuccauguga

SEQ ID NO: 735325 - RNA, 19 nt, Homo sapiens
  misc_RNA (1)...(19): siRNA sense strand
cagcgaauguucuuucucu

SEQ ID NO: 735326 - RNA, 19 nt, Homo sapiens
  misc_RNA (1)...(19): siRNA sense strand
ugucugcgcugacgaagug

SEQ ID NO: 735327 - RNA, 19 nt, Homo sapiens
  misc_RNA (1)...(19): siRNA sense strand
gucaggagcucagaacuca

SEQ ID NO: 735328 - RNA, 19 nt, Homo sapiens
  misc_RNA (1)...(19): siRNA sense strand
aaaggaggcugcacauagg

SEQ ID NO: 735329 - RNA, 19 nt, Homo sapiens
  misc_RNA (1)...(19): siRNA sense strand
ggacugggagggagaagau

SEQ ID NO: 735330 - RNA, 19 nt, Homo sapiens
  misc_RNA (1)...(19): siRNA sense strand
gcagcuggcuaucaaugag

SEQ ID NO: 735331 - RNA, 19 nt, Homo sapiens
  misc_RNA (1)...(19): siRNA sense strand
uggagaaagacgaucauua

SEQ ID NO: 735332 - RNA, 19 nt, Homo sapiens
  misc_RNA (1)...(19): siRNA sense strand
agagaaagaaguugcagaa

SEQ ID NO: 735333 - RNA, 19 nt, Homo sapiens
  misc_RNA (1)...(19): siRNA sense strand
ugacuccggugcagaagau

SEQ ID NO: 735334 - RNA, 19 nt, Homo sapiens
  misc_RNA (1)...(19): siRNA sense strand
gagcgaggaggaccuguau

SEQ ID NO: 735335 - RNA, 19 nt, Homo sapiens
  misc_RNA (1)...(19): siRNA sense strand
ggagcgaggaggaccugua

SEQ ID NO: 735336 - RNA, 19 nt, Homo sapiens
  misc_RNA (1)...(19): siRNA sense strand
gccgcgacguguuguacua

SEQ ID NO: 735337 - RNA, 19 nt, Homo sapiens
  misc_RNA (1)...(19): siRNA sense strand
ucagaaggcguuccacaug

SEQ ID NO: 735338 - RNA, 19 nt, Homo sapiens
  misc_RNA (1)...(19): siRNA sense strand
gagcagcuggcuaucaaug

SEQ ID NO: 735339 - RNA, 19 nt, Homo sapiens
  misc_RNA (1)...(19): siRNA sense strand
cgaaaggaggcugcacaua

SEQ ID NO: 735340 - RNA, 19 nt, Homo sapiens
  misc_RNA (1)...(19): siRNA sense strand
gcagcugcguaccaucuuc

SEQ ID NO: 735341 - RNA, 19 nt, Homo sapiens
  misc_RNA (1)...(19): siRNA sense strand
gaagaaccagcaggugaga

SEQ ID NO: 735342 - RNA, 19 nt, Homo sapiens
  misc_RNA (1)...(19): siRNA sense strand
gagcagcaaggaccagaug

SEQ ID NO: 735343 - RNA, 19 nt, Homo sapiens
  misc_RNA (1)...(19): siRNA sense strand
ugauggagcucuggacaca

SEQ ID NO: 735344 - RNA, 19 nt, Homo sapiens
  misc_RNA (1)...(19): siRNA sense strand
gaagacacagagaaagaag

SEQ ID NO: 735345 - RNA, 19 nt, Homo sapiens
  misc_RNA (1)...(19): siRNA sense strand
agacacagagaaagaaguu

SEQ ID NO: 735346 - RNA, 19 nt, Homo sapiens
  misc_RNA (1)...(19): siRNA sense strand
gcucaucuacuguaagaag

SEQ ID NO: 735347 - RNA, 19 nt, Homo sapiens
  misc_RNA (1)...(19): siRNA sense strand
uugaaucucccuagaagaa

SEQ ID NO: 735348 - RNA, 19 nt, Homo sapiens
  misc_RNA (1)...(19): siRNA sense strand
ugagaacaucgacaagauu

SEQ ID NO: 735349 - RNA, 19 nt, Homo sapiens
  misc_RNA (1)...(19): siRNA sense strand
acagggacuucaaggaugu

SEQ ID NO: 735350 - RNA, 19 nt, Homo sapiens
  misc_RNA (1)...(19): siRNA sense strand
agaagaagccauccacucu

SEQ ID NO: 735351 - RNA, 19 nt, Homo sapiens
  misc_RNA (1)...(19): siRNA sense strand
gagcucagaacucaucuac

SEQ ID NO: 735352 - RNA, 19 nt, Homo sapiens
  misc_RNA (1)...(19): siRNA sense strand
uugagaacaucgacaagau

SEQ ID NO: 735353 - RNA, 19 nt, Homo sapiens
  misc_RNA (1)...(19): siRNA sense strand
caagccgacuuccagaucu

SEQ ID NO: 735354 - RNA, 19 nt, Homo sapiens
  misc_RNA (1)...(19): siRNA sense strand
gagcagcugcguaccaucu

SEQ ID NO: 735355 - RNA, 19 nt, Homo sapiens
  misc_RNA (1)...(19): siRNA sense strand
caagcgcgcagacauguuc

SEQ ID NO: 735356 - RNA, 19 nt, Homo sapiens
  misc_RNA (1)...(19): siRNA sense strand
uggagaagacacagagaaa

SEQ ID NO: 735357 - RNA, 19 nt, Homo sapiens
  misc_RNA (1)...(19): siRNA sense strand
caccagcucaucuacugua

SEQ ID NO: 735358 - RNA, 19 nt, Homo sapiens
  misc_RNA (1)...(19): siRNA sense strand
acauggagccugcccagaa

SEQ ID NO: 735359 - RNA, 19 nt, Homo sapiens
  misc_RNA (1)...(19): siRNA sense strand
uacacagccucaagccaaa

SEQ ID NO: 735360 - RNA, 19 nt, Homo sapiens
  misc_RNA (1)...(19): siRNA sense strand
ggaagcggagacuugagaa

SEQ ID NO: 735361 - RNA, 19 nt, Homo sapiens
  misc_RNA (1)...(19): siRNA sense strand
ggagaagacacagagaaag

SEQ ID NO: 735362 - RNA, 19 nt, Homo sapiens
  misc_RNA (1)...(19): siRNA sense strand
caggugagaagcccaguug

SEQ ID NO: 735363 - RNA, 19 nt, Homo sapiens
  misc_RNA (1)...(19): siRNA sense strand
gaacaucgacaagauugcu

SEQ ID NO: 735364 - RNA, 19 nt, Homo sapiens
  misc_RNA (1)...(19): siRNA sense strand
gcggagacuugagaacauc

SEQ ID NO: 735365 - RNA, 19 nt, Homo sapiens
  misc_RNA (1)...(19): siRNA sense strand
cauggagccugcccagaag

SEQ ID NO: 735366 - RNA, 19 nt, Homo sapiens
  misc_RNA (1)...(19): siRNA sense strand
gauggaugccaccaacaga

SEQ ID NO: 735367 - RNA, 19 nt, Homo sapiens
  misc_RNA (1)...(19): siRNA sense strand
ugcagaagaugauugacau

SEQ ID NO: 735368 - RNA, 19 nt, Homo sapiens
  misc_RNA (1)...(19): siRNA sense strand
uggcccagcucaucaacga

SEQ ID NO: 735369 - RNA, 19 nt, Homo sapiens
  misc_RNA (1)...(19): siRNA sense strand
cagcagcgaauguucuuuc

SEQ ID NO: 735370 - RNA, 19 nt, Homo sapiens
  misc_RNA (1)...(19): siRNA sense strand
acaaagauggagucaagug

SEQ ID NO: 735371 - RNA, 19 nt, Homo sapiens
  misc_RNA (1)...(19): siRNA sense strand
aagccgacuuccagaucua

SEQ ID NO: 735372 - RNA, 19 nt, Homo sapiens
  misc_RNA (1)...(19): siRNA sense strand
gcaagcgcgcagacauguu

SEQ ID NO: 735373 - RNA, 19 nt, Homo sapiens
  misc_RNA (1)...(19): siRNA sense strand
agaagacacagagaaagaa

SEQ ID NO: 735374 - RNA, 19 nt, Homo sapiens
  misc_RNA (1)...(19): siRNA sense strand
ccaacgucaucaacgagau

SEQ ID NO: 735375 - RNA, 19 nt, Homo sapiens
  misc_RNA (1)...(19): siRNA sense strand
ggaacaucgaggacaucua

SEQ ID NO: 735376 - RNA, 19 nt, Homo sapiens
  misc_RNA (1)...(19): siRNA sense strand
cuuugaaucucccuagaag

SEQ ID NO: 735377 - RNA, 19 nt, Homo sapiens
  misc_RNA (1)...(19): siRNA sense strand
gaaggacagagaccuccau

SEQ ID NO: 735378 - RNA, 19 nt, Homo sapiens
  misc_RNA (1)...(19): siRNA sense strand
caugggcccuccucugcau

SEQ ID NO: 735379 - RNA, 19 nt, Homo sapiens
  misc_RNA (1)...(19): siRNA sense strand
ucaagcaccugcgcgacau

SEQ ID NO: 735380 - RNA, 19 nt, Homo sapiens
  misc_RNA (1)...(19): siRNA sense strand
cggaagcggagacuugaga

SEQ ID NO: 735381 - RNA, 19 nt, Homo sapiens
  misc_RNA (1)...(19): siRNA sense strand
ggucaggagcucagaacuc

SEQ ID NO: 735382 - RNA, 19 nt, Homo sapiens
  misc_RNA (1)...(19): siRNA sense strand
gagaaagaaguugcagaag

SEQ ID NO: 735383 - RNA, 19 nt, Homo sapiens
  misc_RNA (1)...(19): siRNA sense strand
gacuugagaacaucgacaa

SEQ ID NO: 735384 - RNA, 19 nt, Homo sapiens
  misc_RNA (1)...(19): siRNA sense strand
gcacaaagauggagucaag

SEQ ID NO: 735385 - RNA, 19 nt, Homo sapiens
  misc_RNA (1)...(19): siRNA sense strand
gaaagaaguugcagaagca

SEQ ID NO: 735386 - RNA, 19 nt, Homo sapiens
  misc_RNA (1)...(19): siRNA sense strand
gaaaggaggcugcacauag

SEQ ID NO: 735387 - RNA, 19 nt, Homo sapiens
  misc_RNA (1)...(19): siRNA sense strand
ucaccaagcucagcaagua

SEQ ID NO: 735388 - RNA, 19 nt, Homo sapiens
  misc_RNA (1)...(19): siRNA sense strand
ucacugaacugcagaggaa

SEQ ID NO: 735389 - RNA, 19 nt, Homo sapiens
  misc_RNA (1)...(19): siRNA sense strand
gcucagaacucaucuacuc

SEQ ID NO: 735390 - RNA, 19 nt, Homo sapiens
  misc_RNA (1)...(19): siRNA sense strand
ggacagagaccuccaugug

SEQ ID NO: 735391 - RNA, 19 nt, Homo sapiens
  misc_RNA (1)...(19): siRNA sense strand
ggagaaagacgaucauuac

SEQ ID NO: 735392 - RNA, 19 nt, Homo sapiens
  misc_RNA (1)...(19): siRNA sense strand
ggaccaacgucaucaacga

SEQ ID NO: 735393 - RNA, 19 nt, Homo sapiens
  misc_RNA (1)...(19): siRNA sense strand
ggagucaagugcuggagaa

SEQ ID NO: 735394 - RNA, 19 nt, Homo sapiens
  misc_RNA (1)...(19): siRNA sense strand
cgaauguucuuucucuuug

SEQ ID NO: 735395 - RNA, 19 nt, Homo sapiens
  misc_RNA (1)...(19): siRNA sense strand
gagaagacacagagaaaga

SEQ ID NO: 735396 - RNA, 19 nt, Homo sapiens
  misc_RNA (1)...(19): siRNA sense strand
gggagcagcuggcuaucaa

SEQ ID NO: 735397 - RNA, 19 nt, Homo sapiens
  misc_RNA (1)...(19): siRNA sense strand
gaacaucgaggacaucuac

SEQ ID NO: 735398 - RNA, 19 nt, Homo sapiens
  misc_RNA (1)...(19): siRNA sense strand
gcacugagcgggacuacau

SEQ ID NO: 735399 - RNA, 19 nt, Homo sapiens
  misc_RNA (1)...(19): siRNA sense strand
cagcucaucuacuguaaga

SEQ ID NO: 735400 - RNA, 19 nt, Homo sapiens
  misc_RNA (1)...(19): siRNA sense strand
gcacagggacuucaaggau

SEQ ID NO: 735401 - RNA, 19 nt, Homo sapiens
  misc_RNA (1)...(19): siRNA sense strand
gaauguucuuucucuuuga

SEQ ID NO: 735402 - RNA, 19 nt, Homo sapiens
  misc_RNA (1)...(19): siRNA sense strand
gucaagugcuggagaaaga

SEQ ID NO: 735403 - RNA, 19 nt, Homo sapiens
  misc_RNA (1)...(19): siRNA sense strand
caacgggacugaaccacau

SEQ ID NO: 735404 - RNA, 19 nt, Homo sapiens
  misc_RNA (1)...(19): siRNA sense strand
gaagcaggcccacgucgaa

SEQ ID NO: 735405 - RNA, 19 nt, Homo sapiens
  misc_RNA (1)...(19): siRNA sense strand
aggaggaccuguaugauga

SEQ ID NO: 735406 - RNA, 19 nt, Homo sapiens
  misc_RNA (1)...(19): siRNA sense strand
gagaacaucgacaagauug

SEQ ID NO: 735407 - RNA, 19 nt, Homo sapiens
  misc_RNA (1)...(19): siRNA sense strand
gcgaggaggaccuguauga

SEQ ID NO: 735408 - RNA, 19 nt, Homo sapiens
  misc_RNA (1)...(19): siRNA sense strand
gcgaauguucuuucucuuu

SEQ ID NO: 735409 - RNA, 19 nt, Homo sapiens
  misc_RNA (1)...(19): siRNA sense strand
ggagcugacucgaguuaca

SEQ ID NO: 735410 - RNA, 19 nt, Homo sapiens
  misc_RNA (1)...(19): siRNA sense strand
ccaggaagcccgagcagaa

SEQ ID NO: 735411 - RNA, 19 nt, Homo sapiens
  misc_RNA (1)...(19): siRNA sense strand
gaggaggaccuguaugaug

SEQ ID NO: 735412 - RNA, 19 nt, Homo sapiens
  misc_RNA (1)...(19): siRNA sense strand
gagcggaagcggagacuug

SEQ ID NO: 735413 - RNA, 19 nt, Homo sapiens
  misc_RNA (1)...(19): siRNA sense strand
gaacguggcccagcucauc

SEQ ID NO: 735414 - RNA, 19 nt, Homo sapiens
  misc_RNA (1)...(19): siRNA sense strand
gacagagaccuccauguga

SEQ ID NO: 735415 - RNA, 19 nt, Homo sapiens
  misc_RNA (1)...(19): siRNA sense strand
cagcgaauguucuuucucu

SEQ ID NO: 735416 - RNA, 19 nt, Homo sapiens
  misc_RNA (1)...(19): siRNA sense strand
ugucugcgcugacgaagug

SEQ ID NO: 735417 - RNA, 19 nt, Homo sapiens
  misc_RNA (1)...(19): siRNA sense strand
gucaggagcucagaacuca

SEQ ID NO: 735418 - RNA, 19 nt, Homo sapiens
  misc_RNA (1)...(19): siRNA sense strand
aaaggaggcugcacauagg

SEQ ID NO: 735419 - RNA, 19 nt, Homo sapiens
  misc_RNA (1)...(19): siRNA sense strand
ggacugggagggagaagau

SEQ ID NO: 735420 - RNA, 19 nt, Homo sapiens
  misc_RNA (1)...(19): siRNA sense strand
gcagcuggcuaucaaugag

SEQ ID NO: 735421 - RNA, 19 nt, Homo sapiens
  misc_RNA (1)...(19): siRNA sense strand
uggagaaagacgaucauua

SEQ ID NO: 735422 - RNA, 19 nt, Homo sapiens
  misc_RNA (1)...(19): siRNA sense strand
agagaaagaaguugcagaa

SEQ ID NO: 735423 - RNA, 19 nt, Homo sapiens
  misc_RNA (1)...(19): siRNA sense strand
ugacuccggugcagaagau

SEQ ID NO: 735424 - RNA, 19 nt, Homo sapiens
  misc_RNA (1)...(19): siRNA sense strand
gagcgaggaggaccuguau

SEQ ID NO: 735425 - RNA, 19 nt, Homo sapiens
  misc_RNA (1)...(19): siRNA sense strand
ggagcgaggaggaccugua

SEQ ID NO: 735426 - RNA, 19 nt, Homo sapiens
  misc_RNA (1)...(19): siRNA sense strand
gccgcgacguguuguacua

SEQ ID NO: 735427 - RNA, 19 nt, Homo sapiens
  misc_RNA (1)...(19): siRNA sense strand
ucagaaggcguuccacaug

SEQ ID NO: 735428 - RNA, 19 nt, Homo sapiens
  misc_RNA (1)...(19): siRNA sense strand
gagcagcuggcuaucaaug

SEQ ID NO: 735429 - RNA, 19 nt, Homo sapiens
  misc_RNA (1)...(19): siRNA sense strand
cgaaaggaggcugcacaua

SEQ ID NO: 735430 - RNA, 19 nt, Homo sapiens
  misc_RNA (1)...(19): siRNA sense strand
gcagcugcguaccaucuuc

SEQ ID NO: 735431 - RNA, 19 nt, Homo sapiens
  misc_RNA (1)...(19): siRNA sense strand
gaagaaccagcaggugaga

SEQ ID NO: 735432 - RNA, 19 nt, Homo sapiens
  misc_RNA (1)...(19): siRNA sense strand
gagcagcaaggaccagaug

SEQ ID NO: 735433 - RNA, 19 nt, Homo sapiens
  misc_RNA (1)...(19): siRNA sense strand
ugauggagcucuggacaca

SEQ ID NO: 735434 - RNA, 19 nt, Homo sapiens
  misc_RNA (1)...(19): siRNA sense strand
gaagacacagagaaagaag

SEQ ID NO: 735435 - RNA, 19 nt, Homo sapiens
  misc_RNA (1)...(19): siRNA sense strand
agacacagagaaagaaguu

SEQ ID NO: 735436 - RNA, 19 nt, Homo sapiens
  misc_RNA (1)...(19): siRNA sense strand
gcucaucuacuguaagaag

SEQ ID NO: 735437 - RNA, 19 nt, Homo sapiens
  misc_RNA (1)...(19): siRNA sense strand
uugaaucucccuagaagaa

SEQ ID NO: 735438 - RNA, 19 nt, Homo sapiens
  misc_RNA (1)...(19): siRNA sense strand
ugagaacaucgacaagauu

SEQ ID NO: 735439 - RNA, 19 nt, Homo sapiens
  misc_RNA (1)...(19): siRNA sense strand
acagggacuucaaggaugu

SEQ ID NO: 735440 - RNA, 19 nt, Homo sapiens
  misc_RNA (1)...(19): siRNA sense strand
agaagaagccauccacucu

SEQ ID NO: 735441 - RNA, 19 nt, Homo sapiens
  misc_RNA (1)...(19): siRNA sense strand
gagcucagaacucaucuac

SEQ ID NO: 735442 - RNA, 19 nt, Homo sapiens
  misc_RNA (1)...(19): siRNA sense strand
uugagaacaucgacaagau

SEQ ID NO: 735443 - RNA, 19 nt, Homo sapiens
  misc_RNA (1)...(19): siRNA sense strand
caagccgacuuccagaucu

SEQ ID NO: 735444 - RNA, 19 nt, Homo sapiens
  misc_RNA (1)...(19): siRNA sense strand
gagcagcugcguaccaucu

SEQ ID NO: 735445 - RNA, 19 nt, Homo sapiens
  misc_RNA (1)...(19): siRNA sense strand
caagcgcgcagacauguuc

SEQ ID NO: 735446 - RNA, 19 nt, Homo sapiens
  misc_RNA (1)...(19): siRNA sense strand
uggagaagacacagagaaa

SEQ ID NO: 735447 - RNA, 19 nt, Homo sapiens
  misc_RNA (1)...(19): siRNA sense strand
caccagcucaucuacugua

SEQ ID NO: 735448 - RNA, 19 nt, Homo sapiens
  misc_RNA (1)...(19): siRNA sense strand
acauggagccugcccagaa

SEQ ID NO: 735449 - RNA, 19 nt, Homo sapiens
  misc_RNA (1)...(19): siRNA sense strand
uacacagccucaagccaaa

SEQ ID NO: 735450 - RNA, 19 nt, Homo sapiens
  misc_RNA (1)...(19): siRNA sense strand
ggaagcggagacuugagaa

SEQ ID NO: 735451 - RNA, 19 nt, Homo sapiens
  misc_RNA (1)...(19): siRNA sense strand
ggagaagacacagagaaag

SEQ ID NO: 735452 - RNA, 19 nt, Homo sapiens
  misc_RNA (1)...(19): siRNA sense strand
caggugagaagcccaguug

SEQ ID NO: 735453 - RNA, 19 nt, Homo sapiens
  misc_RNA (1)...(19): siRNA sense strand
gaacaucgacaagauugcu

SEQ ID NO: 735454 - RNA, 19 nt, Homo sapiens
  misc_RNA (1)...(19): siRNA sense strand
gcggagacuugagaacauc

SEQ ID NO: 735455 - RNA, 19 nt, Homo sapiens
  misc_RNA (1)...(19): siRNA sense strand
cauggagccugcccagaag

SEQ ID NO: 735456 - RNA, 19 nt, Homo sapiens
  misc_RNA (1)...(19): siRNA sense strand
gauggaugccaccaacaga

SEQ ID NO: 735457 - RNA, 19 nt, Homo sapiens
  misc_RNA (1)...(19): siRNA sense strand
ugcagaagaugauugacau

SEQ ID NO: 735458 - RNA, 19 nt, Homo sapiens
  misc_RNA (1)...(19): siRNA sense strand
uggcccagcucaucaacga

SEQ ID NO: 735459 - RNA, 19 nt, Homo sapiens
  misc_RNA (1)...(19): siRNA sense strand
cagcagcgaauguucuuuc

SEQ ID NO: 735460 - RNA, 19 nt, Homo sapiens
  misc_RNA (1)...(19): siRNA sense strand
acaaagauggagucaagug

SEQ ID NO: 735461 - RNA, 19 nt, Homo sapiens
  misc_RNA (1)...(19): siRNA sense strand
aagccgacuuccagaucua

SEQ ID NO: 735462 - RNA, 19 nt, Homo sapiens
  misc_RNA (1)...(19): siRNA sense strand
gcaagcgcgcagacauguu

SEQ ID NO: 735463 - RNA, 19 nt, Homo sapiens
  misc_RNA (1)...(19): siRNA sense strand
agaagacacagagaaagaa

SEQ ID NO: 735464 - RNA, 19 nt, Homo sapiens
  misc_RNA (1)...(19): siRNA sense strand
ccaacgucaucaacgagau

SEQ ID NO: 735465 - RNA, 19 nt, Homo sapiens
  misc_RNA (1)...(19): siRNA sense strand
ggaacaucgaggacaucua

SEQ ID NO: 735466 - RNA, 19 nt, Homo sapiens
  misc_RNA (1)...(19): siRNA sense strand
cuuugaaucucccuagaag

SEQ ID NO: 735467 - RNA, 19 nt, Homo sapiens
  misc_RNA (1)...(19): siRNA sense strand
gaaggacagagaccuccau

SEQ ID NO: 735468 - RNA, 19 nt, Homo sapiens
  misc_RNA (1)...(19): siRNA sense strand
caugggcccuccucugcau

SEQ ID NO: 735469 - RNA, 19 nt, Homo sapiens
  misc_RNA (1)...(19): siRNA sense strand
ucaagcaccugcgcgacau

SEQ ID NO: 735470 - RNA, 19 nt, Homo sapiens
  misc_RNA (1)...(19): siRNA sense strand
cggaagcggagacuugaga

SEQ ID NO: 735471 - RNA, 19 nt, Homo sapiens
  misc_RNA (1)...(19): siRNA sense strand
ggucaggagcucagaacuc

SEQ ID NO: 735472 - RNA, 19 nt, Homo sapiens
  misc_RNA (1)...(19): siRNA sense strand
gagaaagaaguugcagaag

SEQ ID NO: 735473 - RNA, 19 nt, Homo sapiens
  misc_RNA (1)...(19): siRNA sense strand
gacuugagaacaucgacaa

SEQ ID NO: 735474 - RNA, 19 nt, Homo sapiens
  misc_RNA (1)...(19): siRNA sense strand
gcagaaagaccauggguuu

SEQ ID NO: 735475 - RNA, 19 nt, Homo sapiens
  misc_RNA (1)...(19): siRNA sense strand
ccaggcagcugaucauaga

SEQ ID NO: 735476 - RNA, 19 nt, Homo sapiens
  misc_RNA (1)...(19): siRNA sense strand
gaaagggauuuauaaacag

SEQ ID NO: 735477 - RNA, 19 nt, Homo sapiens
  misc_RNA (1)...(19): siRNA sense strand
acagaugccugguugcuuu

SEQ ID NO: 735478 - RNA, 19 nt, Homo sapiens
  misc_RNA (1)...(19): siRNA sense strand
ggagucaggcucuuccuuu

SEQ ID NO: 735479 - RNA, 19 nt, Homo sapiens
  misc_RNA (1)...(19): siRNA sense strand
gagucaggcucuuccuuug

SEQ ID NO: 735480 - RNA, 19 nt, Homo sapiens
  misc_RNA (1)...(19): siRNA sense strand
ggugaaagggauuuauaaa

SEQ ID NO: 735481 - RNA, 19 nt, Homo sapiens
  misc_RNA (1)...(19): siRNA sense strand
gaaagaccauggguuugag

SEQ ID NO: 735482 - RNA, 19 nt, Homo sapiens
  misc_RNA (1)...(19): siRNA sense strand
ggacaugcuggcuucguuu

SEQ ID NO: 735483 - RNA, 19 nt, Homo sapiens
  misc_RNA (1)...(19): siRNA sense strand
ggacacaggccaggacaug

SEQ ID NO: 735484 - RNA, 19 nt, Homo sapiens
  misc_RNA (1)...(19): siRNA sense strand
gucaggcucuuccuuuguu

SEQ ID NO: 735485 - RNA, 19 nt, Homo sapiens
  misc_RNA (1)...(19): siRNA sense strand
cuaaugcuguuucggugaa

SEQ ID NO: 735486 - RNA, 19 nt, Homo sapiens
  misc_RNA (1)...(19): siRNA sense strand
gacccuggacgacaucuuu

SEQ ID NO: 735487 - RNA, 19 nt, Homo sapiens
  misc_RNA (1)...(19): siRNA sense strand
agaaagaccauggguuuga

SEQ ID NO: 735488 - RNA, 19 nt, Homo sapiens
  misc_RNA (1)...(19): siRNA sense strand
gcucuuccuuuguucaucu

SEQ ID NO: 735489 - RNA, 19 nt, Homo sapiens
  misc_RNA (1)...(19): siRNA sense strand
gaccagagauucgcaaacc

SEQ ID NO: 735490 - RNA, 19 nt, Homo sapiens
  misc_RNA (1)...(19): siRNA sense strand
caggcaagcagcaaaguug

SEQ ID NO: 735491 - RNA, 19 nt, Homo sapiens
  misc_RNA (1)...(19): siRNA sense strand
uagggucgcuaaugcuguu

SEQ ID NO: 735492 - RNA, 19 nt, Homo sapiens
  misc_RNA (1)...(19): siRNA sense strand
ccaagaguggcuccuggua

SEQ ID NO: 735493 - RNA, 19 nt, Homo sapiens
  misc_RNA (1)...(19): siRNA sense strand
gagguucucagaccggaaa

SEQ ID NO: 735494 - RNA, 19 nt, Homo sapiens
  misc_RNA (1)...(19): siRNA sense strand
guucaucuccugcuuagag

SEQ ID NO: 735495 - RNA, 19 nt, Homo sapiens
  misc_RNA (1)...(19): siRNA sense strand
ccagaccaguggacauugg

SEQ ID NO: 735496 - RNA, 19 nt, Homo sapiens
  misc_RNA (1)...(19): siRNA sense strand
cagcuggacgccauaucua

SEQ ID NO: 735497 - RNA, 19 nt, Homo sapiens
  misc_RNA (1)...(19): siRNA sense strand
cacacccagugacaucuuu

SEQ ID NO: 735498 - RNA, 19 nt, Homo sapiens
  misc_RNA (1)...(19): siRNA sense strand
gugaaagggauuuauaaac

SEQ ID NO: 735499 - RNA, 19 nt, Homo sapiens
  misc_RNA (1)...(19): siRNA sense strand
cggugaaagggauuuauaa

SEQ ID NO: 735500 - RNA, 19 nt, Homo sapiens
  misc_RNA (1)...(19): siRNA sense strand
ucggugaaagggauuuaua

SEQ ID NO: 735501 - RNA, 19 nt, Homo sapiens
  misc_RNA (1)...(19): siRNA sense strand
gaugccugguugcuuuaau

SEQ ID NO: 735502 - RNA, 19 nt, Homo sapiens
  misc_RNA (1)...(19): siRNA sense strand
uaacaggcaagcagcaaag

SEQ ID NO: 735503 - RNA, 19 nt, Homo sapiens
  misc_RNA (1)...(19): siRNA sense strand
cagaugccugguugcuuua

SEQ ID NO: 735504 - RNA, 19 nt, Homo sapiens
  misc_RNA (1)...(19): siRNA sense strand
uggacgccauaucuaguuu

SEQ ID NO: 735505 - RNA, 19 nt, Homo sapiens
  misc_RNA (1)...(19): siRNA sense strand
gacauugguucuggaggau

SEQ ID NO: 735506 - RNA, 19 nt, Homo sapiens
  misc_RNA (1)...(19): siRNA sense strand
acucuacuuucccagguuu

SEQ ID NO: 735507 - RNA, 19 nt, Homo sapiens
  misc_RNA (1)...(19): siRNA sense strand
uauaaacagaugccugguu

SEQ ID NO: 735508 - RNA, 19 nt, Homo sapiens
  misc_RNA (1)...(19): siRNA sense strand
ggacgccauaucuaguuug

SEQ ID NO: 735509 - RNA, 19 nt, Homo sapiens
  misc_RNA (1)...(19): siRNA sense strand
ugucgaagccaacccuaga

SEQ ID NO: 735510 - RNA, 19 nt, Homo sapiens
  misc_RNA (1)...(19): siRNA sense strand
cagaaagaccauggguuug

SEQ ID NO: 735511 - RNA, 19 nt, Homo sapiens
  misc_RNA (1)...(19): siRNA sense strand
augccugguugcuuuaauu

SEQ ID NO: 735512 - RNA, 19 nt, Homo sapiens
  misc_RNA (1)...(19): siRNA sense strand
ggccaggcagcugaucaua

SEQ ID NO: 735513 - RNA, 19 nt, Homo sapiens
  misc_RNA (1)...(19): siRNA sense strand
aggacaugcuggcuucguu

SEQ ID NO: 735514 - RNA, 19 nt, Homo sapiens
  misc_RNA (1)...(19): siRNA sense strand
gcagaaagaccauggguuu

SEQ ID NO: 735515 - RNA, 19 nt, Homo sapiens
  misc_RNA (1)...(19): siRNA sense strand
ccaggcagcugaucauaga

SEQ ID NO: 735516 - RNA, 19 nt, Homo sapiens
  misc_RNA (1)...(19): siRNA sense strand
gaaagggauuuauaaacag

SEQ ID NO: 735517 - RNA, 19 nt, Homo sapiens
  misc_RNA (1)...(19): siRNA sense strand
acagaugccugguugcuuu

SEQ ID NO: 735518 - RNA, 19 nt, Homo sapiens
  misc_RNA (1)...(19): siRNA sense strand
ggagucaggcucuuccuuu

SEQ ID NO: 735519 - RNA, 19 nt, Homo sapiens
  misc_RNA (1)...(19): siRNA sense strand
gagucaggcucuuccuuug

SEQ ID NO: 735520 - RNA, 19 nt, Homo sapiens
  misc_RNA (1)...(19): siRNA sense strand
ggugaaagggauuuauaaa

SEQ ID NO: 735521 - RNA, 19 nt, Homo sapiens
  misc_RNA (1)...(19): siRNA sense strand
gaaagaccauggguuugag

SEQ ID NO: 735522 - RNA, 19 nt, Homo sapiens
  misc_RNA (1)...(19): siRNA sense strand
ggacaugcuggcuucguuu

SEQ ID NO: 735523 - RNA, 19 nt, Homo sapiens
  misc_RNA (1)...(19): siRNA sense strand
ggacacaggccaggacaug

SEQ ID NO: 735524 - RNA, 19 nt, Homo sapiens
  misc_RNA (1)...(19): siRNA sense strand
cauugguucuggaggauuu

SEQ ID NO: 735525 - RNA, 19 nt, Homo sapiens
  misc_RNA (1)...(19): siRNA sense strand
gucaggcucuuccuuuguu

SEQ ID NO: 735526 - RNA, 19 nt, Homo sapiens
  misc_RNA (1)...(19): siRNA sense strand
cuaaugcuguuucggugaa

SEQ ID NO: 735527 - RNA, 19 nt, Homo sapiens
  misc_RNA (1)...(19): siRNA sense strand
gacccuggacgacaucuuu

SEQ ID NO: 735528 - RNA, 19 nt, Homo sapiens
  misc_RNA (1)...(19): siRNA sense strand
agaaagaccauggguuuga

SEQ ID NO: 735529 - RNA, 19 nt, Homo sapiens
  misc_RNA (1)...(19): siRNA sense strand
gcucuuccuuuguucaucu

SEQ ID NO: 735530 - RNA, 19 nt, Homo sapiens
  misc_RNA (1)...(19): siRNA sense strand
gaccagagauucgcaaacc

SEQ ID NO: 735531 - RNA, 19 nt, Homo sapiens
  misc_RNA (1)...(19): siRNA sense strand
caggcaagcagcaaaguug

SEQ ID NO: 735532 - RNA, 19 nt, Homo sapiens
  misc_RNA (1)...(19): siRNA sense strand
uagggucgcuaaugcuguu

SEQ ID NO: 735533 - RNA, 19 nt, Homo sapiens
  misc_RNA (1)...(19): siRNA sense strand
ccaagaguggcuccuggua

SEQ ID NO: 735534 - RNA, 19 nt, Homo sapiens
  misc_RNA (1)...(19): siRNA sense strand
gagguucucagaccggaaa

SEQ ID NO: 735535 - RNA, 19 nt, Homo sapiens
  misc_RNA (1)...(19): siRNA sense strand
guucaucuccugcuuagag

SEQ ID NO: 735536 - RNA, 19 nt, Homo sapiens
  misc_RNA (1)...(19): siRNA sense strand
ccagaccaguggacauugg

SEQ ID NO: 735537 - RNA, 19 nt, Homo sapiens
  misc_RNA (1)...(19): siRNA sense strand
cagcuggacgccauaucua

SEQ ID NO: 735538 - RNA, 19 nt, Homo sapiens
  misc_RNA (1)...(19): siRNA sense strand
cacacccagugacaucuuu

SEQ ID NO: 735539 - RNA, 19 nt, Homo sapiens
  misc_RNA (1)...(19): siRNA sense strand
gugaaagggauuuauaaac

SEQ ID NO: 735540 - RNA, 19 nt, Homo sapiens
  misc_RNA (1)...(19): siRNA sense strand
cggugaaagggauuuauaa

SEQ ID NO: 735541 - RNA, 19 nt, Homo sapiens
  misc_RNA (1)...(19): siRNA sense strand
ucggugaaagggauuuaua

SEQ ID NO: 735542 - RNA, 19 nt, Homo sapiens
  misc_RNA (1)...(19): siRNA sense strand
gaugccugguugcuuuaau

SEQ ID NO: 735543 - RNA, 19 nt, Homo sapiens
  misc_RNA (1)...(19): siRNA sense strand
uaacaggcaagcagcaaag

SEQ ID NO: 735544 - RNA, 19 nt, Homo sapiens
  misc_RNA (1)...(19): siRNA sense strand
cagaugccugguugcuuua

SEQ ID NO: 735545 - RNA, 19 nt, Homo sapiens
  misc_RNA (1)...(19): siRNA sense strand
uggacgccauaucuaguuu

SEQ ID NO: 735546 - RNA, 19 nt, Homo sapiens
  misc_RNA (1)...(19): siRNA sense strand
gacauugguucuggaggau

SEQ ID NO: 735547 - RNA, 19 nt, Homo sapiens
  misc_RNA (1)...(19): siRNA sense strand
acucuacuuucccagguuu

SEQ ID NO: 735548 - RNA, 19 nt, Homo sapiens
  misc_RNA (1)...(19): siRNA sense strand
uauaaacagaugccugguu

SEQ ID NO: 735549 - RNA, 19 nt, Homo sapiens
  misc_RNA (1)...(19): siRNA sense strand
ggacgccauaucuaguuug

SEQ ID NO: 735550 - RNA, 19 nt, Homo sapiens
  misc_RNA (1)...(19): siRNA sense strand
ugucgaagccaacccuaga

SEQ ID NO: 735551 - RNA, 19 nt, Homo sapiens
  misc_RNA (1)...(19): siRNA sense strand
cagaaagaccauggguuug

SEQ ID NO: 735552 - RNA, 19 nt, Homo sapiens
  misc_RNA (1)...(19): siRNA sense strand
augccugguugcuuuaauu

SEQ ID NO: 735553 - RNA, 19 nt, Homo sapiens
  misc_RNA (1)...(19): siRNA sense strand
ggccaggcagcugaucaua

SEQ ID NO: 735554 - RNA, 19 nt, Homo sapiens
  misc_RNA (1)...(19): siRNA sense strand
aggacaugcuggcuucguu

SEQ ID NO: 735555 - RNA, 19 nt, Homo sapiens
  misc_RNA (1)...(19): siRNA sense strand
gcagaaagaccauggguuu

SEQ ID NO: 735556 - RNA, 19 nt, Homo sapiens
  misc_RNA (1)...(19): siRNA sense strand
ccaggcagcugaucauaga

SEQ ID NO: 735557 - RNA, 19 nt, Homo sapiens
  misc_RNA (1)...(19): siRNA sense strand
gaaagggauuuauaaacag

SEQ ID NO: 735558 - RNA, 19 nt, Homo sapiens
  misc_RNA (1)...(19): siRNA sense strand
acagaugccugguugcuuu

SEQ ID NO: 735559 - RNA, 19 nt, Homo sapiens
  misc_RNA (1)...(19): siRNA sense strand
ggagucaggcucuuccuuu

SEQ ID NO: 735560 - RNA, 19 nt, Homo sapiens
  misc_RNA (1)...(19): siRNA sense strand
gagucaggcucuuccuuug

SEQ ID NO: 735561 - RNA, 19 nt, Homo sapiens
  misc_RNA (1)...(19): siRNA sense strand
ggugaaagggauuuauaaa

SEQ ID NO: 735562 - RNA, 19 nt, Homo sapiens
  misc_RNA (1)...(19): siRNA sense strand
gaaagaccauggguuugag

SEQ ID NO: 735563 - RNA, 19 nt, Homo sapiens
  misc_RNA (1)...(19): siRNA sense strand
ggacaugcuggcuucguuu

SEQ ID NO: 735564 - RNA, 19 nt, Homo sapiens
  misc_RNA (1)...(19): siRNA sense strand
ggacacaggccaggacaug

SEQ ID NO: 735565 - RNA, 19 nt, Homo sapiens
  misc_RNA (1)...(19): siRNA sense strand
gucaggcucuuccuuuguu

SEQ ID NO: 735566 - RNA, 19 nt, Homo sapiens
  misc_RNA (1)...(19): siRNA sense strand
cuaaugcuguuucggugaa

SEQ ID NO: 735567 - RNA, 19 nt, Homo sapiens
  misc_RNA (1)...(19): siRNA sense strand
gacccuggacgacaucuuu

SEQ ID NO: 735568 - RNA, 19 nt, Homo sapiens
  misc_RNA (1)...(19): siRNA sense strand
agaaagaccauggguuuga

SEQ ID NO: 735569 - RNA, 19 nt, Homo sapiens
  misc_RNA (1)...(19): siRNA sense strand
gcucuuccuuuguucaucu

SEQ ID NO: 735570 - RNA, 19 nt, Homo sapiens
  misc_RNA (1)...(19): siRNA sense strand
gaccagagauucgcaaacc

SEQ ID NO: 735571 - RNA, 19 nt, Homo sapiens
  misc_RNA (1)...(19): siRNA sense strand
caggcaagcagcaaaguug

SEQ ID NO: 735572 - RNA, 19 nt, Homo sapiens
  misc_RNA (1)...(19): siRNA sense strand
uagggucgcuaaugcuguu

SEQ ID NO: 735573 - RNA, 19 nt, Homo sapiens
  misc_RNA (1)...(19): siRNA sense strand
ccaagaguggcuccuggua

SEQ ID NO: 735574 - RNA, 19 nt, Homo sapiens
  misc_RNA (1)...(19): siRNA sense strand
gagguucucagaccggaaa

SEQ ID NO: 735575 - RNA, 19 nt, Homo sapiens
  misc_RNA (1)...(19): siRNA sense strand
guucaucuccugcuuagag

SEQ ID NO: 735576 - RNA, 19 nt, Homo sapiens
  misc_RNA (1)...(19): siRNA sense strand
ccagaccaguggacauugg

SEQ ID NO: 735577 - RNA, 19 nt, Homo sapiens
  misc_RNA (1)...(19): siRNA sense strand
cagcuggacgccauaucua

SEQ ID NO: 735578 - RNA, 19 nt, Homo sapiens
  misc_RNA (1)...(19): siRNA sense strand
cacacccagugacaucuuu

SEQ ID NO: 735579 - RNA, 19 nt, Homo sapiens
  misc_RNA (1)...(19): siRNA sense strand
gugaaagggauuuauaaac

SEQ ID NO: 735580 - RNA, 19 nt, Homo sapiens
  misc_RNA (1)...(19): siRNA sense strand
cggugaaagggauuuauaa

SEQ ID NO: 735581 - RNA, 19 nt, Homo sapiens
  misc_RNA (1)...(19): siRNA sense strand
ucggugaaagggauuuaua

SEQ ID NO: 735582 - RNA, 19 nt, Homo sapiens
  misc_RNA (1)...(19): siRNA sense strand
gaugccugguugcuuuaau

SEQ ID NO: 735583 - RNA, 19 nt, Homo sapiens
  misc_RNA (1)...(19): siRNA sense strand
uaacaggcaagcagcaaag

SEQ ID NO: 735584 - RNA, 19 nt, Homo sapiens
  misc_RNA (1)...(19): siRNA sense strand
cagaugccugguugcuuua

SEQ ID NO: 735585 - RNA, 19 nt, Homo sapiens
  misc_RNA (1)...(19): siRNA sense strand
uggacgccauaucuaguuu

SEQ ID NO: 735586 - RNA, 19 nt, Homo sapiens
  misc_RNA (1)...(19): siRNA sense strand
gacauugguucuggaggau

SEQ ID NO: 735587 - RNA, 19 nt, Homo sapiens
  misc_RNA (1)...(19): siRNA sense strand
acucuacuuucccagguuu

SEQ ID NO: 735588 - RNA, 19 nt, Homo sapiens
  misc_RNA (1)...(19): siRNA sense strand
uauaaacagaugccugguu

SEQ ID NO: 735589 - RNA, 19 nt, Homo sapiens
  misc_RNA (1)...(19): siRNA sense strand
ggacgccauaucuaguuug

SEQ ID NO: 735590 - RNA, 19 nt, Homo sapiens
  misc_RNA (1)...(19): siRNA sense strand
ugucgaagccaacccuaga

SEQ ID NO: 735591 - RNA, 19 nt, Homo sapiens
  misc_RNA (1)...(19): siRNA sense strand
cagaaagaccauggguuug

SEQ ID NO: 735592 - RNA, 19 nt, Homo sapiens
  misc_RNA (1)...(19): siRNA sense strand
augccugguugcuuuaauu

SEQ ID NO: 735593 - RNA, 19 nt, Homo sapiens
  misc_RNA (1)...(19): siRNA sense strand
ggccaggcagcugaucaua

SEQ ID NO: 735594 - RNA, 19 nt, Homo sapiens
  misc_RNA (1)...(19): siRNA sense strand
aggacaugcuggcuucguu

SEQ ID NO: 735595 - RNA, 19 nt, Homo sapiens
  misc_RNA (1)...(19): siRNA sense strand
gcagaaagaccauggguuu

SEQ ID NO: 735596 - RNA, 19 nt, Homo sapiens
  misc_RNA (1)...(19): siRNA sense strand
ccaggcagcugaucauaga

SEQ ID NO: 735597 - RNA, 19 nt, Homo sapiens
  misc_RNA (1)...(19): siRNA sense strand
gaaagggauuuauaaacag

SEQ ID NO: 735598 - RNA, 19 nt, Homo sapiens
  misc_RNA (1)...(19): siRNA sense strand
acagaugccugguugcuuu

SEQ ID NO: 735599 - RNA, 19 nt, Homo sapiens
  misc_RNA (1)...(19): siRNA sense strand
ggagucaggcucuuccuuu

SEQ ID NO: 735600 - RNA, 19 nt, Homo sapiens
  misc_RNA (1)...(19): siRNA sense strand
gagucaggcucuuccuuug

SEQ ID NO: 735601 - RNA, 19 nt, Homo sapiens
  misc_RNA (1)...(19): siRNA sense strand
ggugaaagggauuuauaaa

SEQ ID NO: 735602 - RNA, 19 nt, Homo sapiens
  misc_RNA (1)...(19): siRNA sense strand
gaaagaccauggguuugag

SEQ ID NO: 735603 - RNA, 19 nt, Homo sapiens
  misc_RNA (1)...(19): siRNA sense strand
ggacaugcuggcuucguuu

SEQ ID NO: 735604 - RNA, 19 nt, Homo sapiens
  misc_RNA (1)...(19): siRNA sense strand
ggacacaggccaggacaug

SEQ ID NO: 735605 - RNA, 19 nt, Homo sapiens
  misc_RNA (1)...(19): siRNA sense strand
cauugguucuggaggauuu

SEQ ID NO: 735606 - RNA, 19 nt, Homo sapiens
  misc_RNA (1)...(19): siRNA sense strand
gucaggcucuuccuuuguu

SEQ ID NO: 735607 - RNA, 19 nt, Homo sapiens
  misc_RNA (1)...(19): siRNA sense strand
cuaaugcuguuucggugaa

SEQ ID NO: 735608 - RNA, 19 nt, Homo sapiens
  misc_RNA (1)...(19): siRNA sense strand
gacccuggacgacaucuuu

SEQ ID NO: 735609 - RNA, 19 nt, Homo sapiens
  misc_RNA (1)...(19): siRNA sense strand
agaaagaccauggguuuga

SEQ ID NO: 735610 - RNA, 19 nt, Homo sapiens
  misc_RNA (1)...(19): siRNA sense strand
gcucuuccuuuguucaucu

SEQ ID NO: 735611 - RNA, 19 nt, Homo sapiens
  misc_RNA (1)...(19): siRNA sense strand
gaccagagauucgcaaacc

SEQ ID NO: 735612 - RNA, 19 nt, Homo sapiens
  misc_RNA (1)...(19): siRNA sense strand
caggcaagcagcaaaguug

SEQ ID NO: 735613 - RNA, 19 nt, Homo sapiens
  misc_RNA (1)...(19): siRNA sense strand
uagggucgcuaaugcuguu

SEQ ID NO: 735614 - RNA, 19 nt, Homo sapiens
  misc_RNA (1)...(19): siRNA sense strand
ccaagaguggcuccuggua

SEQ ID NO: 735615 - RNA, 19 nt, Homo sapiens
  misc_RNA (1)...(19): siRNA sense strand
gagguucucagaccggaaa

SEQ ID NO: 735616 - RNA, 19 nt, Homo sapiens
  misc_RNA (1)...(19): siRNA sense strand
guucaucuccugcuuagag

SEQ ID NO: 735617 - RNA, 19 nt, Homo sapiens
  misc_RNA (1)...(19): siRNA sense strand
ccagaccaguggacauugg

SEQ ID NO: 735618 - RNA, 19 nt, Homo sapiens
  misc_RNA (1)...(19): siRNA sense strand
cagcuggacgccauaucua

SEQ ID NO: 735619 - RNA, 19 nt, Homo sapiens
  misc_RNA (1)...(19): siRNA sense strand
cacacccagugacaucuuu

SEQ ID NO: 735620 - RNA, 19 nt, Homo sapiens
  misc_RNA (1)...(19): siRNA sense strand
gugaaagggauuuauaaac

SEQ ID NO: 735621 - RNA, 19 nt, Homo sapiens
  misc_RNA (1)...(19): siRNA sense strand
cggugaaagggauuuauaa

SEQ ID NO: 735622 - RNA, 19 nt, Homo sapiens
  misc_RNA (1)...(19): siRNA sense strand
ucggugaaagggauuuaua

SEQ ID NO: 735623 - RNA, 19 nt, Homo sapiens
  misc_RNA (1)...(19): siRNA sense strand
gaugccugguugcuuuaau

SEQ ID NO: 735624 - RNA, 19 nt, Homo sapiens
  misc_RNA (1)...(19): siRNA sense strand
uaacaggcaagcagcaaag

SEQ ID NO: 735625 - RNA, 19 nt, Homo sapiens
  misc_RNA (1)...(19): siRNA sense strand
cagaugccugguugcuuua

SEQ ID NO: 735626 - RNA, 19 nt, Homo sapiens
  misc_RNA (1)...(19): siRNA sense strand
uggacgccauaucuaguuu

SEQ ID NO: 735627 - RNA, 19 nt, Homo sapiens
  misc_RNA (1)...(19): siRNA sense strand
gacauugguucuggaggau

SEQ ID NO: 735628 - RNA, 19 nt, Homo sapiens
  misc_RNA (1)...(19): siRNA sense strand
acucuacuuucccagguuu

SEQ ID NO: 735629 - RNA, 19 nt, Homo sapiens
  misc_RNA (1)...(19): siRNA sense strand
uauaaacagaugccugguu

SEQ ID NO: 735630 - RNA, 19 nt, Homo sapiens
  misc_RNA (1)...(19): siRNA sense strand
ggacgccauaucuaguuug

SEQ ID NO: 735631 - RNA, 19 nt, Homo sapiens
  misc_RNA (1)...(19): siRNA sense strand
ugucgaagccaacccuaga

SEQ ID NO: 735632 - RNA, 19 nt, Homo sapiens
  misc_RNA (1)...(19): siRNA sense strand
cagaaagaccauggguuug

SEQ ID NO: 735633 - RNA, 19 nt, Homo sapiens
  misc_RNA (1)...(19): siRNA sense strand
augccugguugcuuuaauu

SEQ ID NO: 735634 - RNA, 19 nt, Homo sapiens
  misc_RNA (1)...(19): siRNA sense strand
ggccaggcagcugaucaua

SEQ ID NO: 735635 - RNA, 19 nt, Homo sapiens
  misc_RNA (1)...(19): siRNA sense strand
aggacaugcuggcuucguu

SEQ ID NO: 735636 - RNA, 19 nt, Homo sapiens
  misc_RNA (1)...(19): siRNA sense strand
gaugaaagguucugccauu

SEQ ID NO: 735637 - RNA, 19 nt, Homo sapiens
  misc_RNA (1)...(19): siRNA sense strand
gguaggagcuguaaucaau

SEQ ID NO: 735638 - RNA, 19 nt, Homo sapiens
  misc_RNA (1)...(19): siRNA sense strand
gaaagguucugccauuaca

SEQ ID NO: 735639 - RNA, 19 nt, Homo sapiens
  misc_RNA (1)...(19): siRNA sense strand
ggagucauagugaacaaua

SEQ ID NO: 735640 - RNA, 19 nt, Homo sapiens
  misc_RNA (1)...(19): siRNA sense strand
uagaaaagauggcguguuu

SEQ ID NO: 735641 - RNA, 19 nt, Homo sapiens
  misc_RNA (1)...(19): siRNA sense strand
gauggcguguuucuuuauu

SEQ ID NO: 735642 - RNA, 19 nt, Homo sapiens
  misc_RNA (1)...(19): siRNA sense strand
caauaaaggcgagaugaaa

SEQ ID NO: 735643 - RNA, 19 nt, Homo sapiens
  misc_RNA (1)...(19): siRNA sense strand
cgaaagucauaccguagaa

SEQ ID NO: 735644 - RNA, 19 nt, Homo sapiens
  misc_RNA (1)...(19): siRNA sense strand
gagucauagugaacaauaa

SEQ ID NO: 735645 - RNA, 19 nt, Homo sapiens
  misc_RNA (1)...(19): siRNA sense strand
aaaggagugugcagacuug

SEQ ID NO: 735646 - RNA, 19 nt, Homo sapiens
  misc_RNA (1)...(19): siRNA sense strand
gaacaauaaaggcgagaug

SEQ ID NO: 735647 - RNA, 19 nt, Homo sapiens
  misc_RNA (1)...(19): siRNA sense strand
uaggagcuguaaucaauug

SEQ ID NO: 735648 - RNA, 19 nt, Homo sapiens
  misc_RNA (1)...(19): siRNA sense strand
gcaaaccagagcucagaaa

SEQ ID NO: 735649 - RNA, 19 nt, Homo sapiens
  misc_RNA (1)...(19): siRNA sense strand
gcaaaggagugugcagacu

SEQ ID NO: 735650 - RNA, 19 nt, Homo sapiens
  misc_RNA (1)...(19): siRNA sense strand
ugacaacacaggagccaaa

SEQ ID NO: 735651 - RNA, 19 nt, Homo sapiens
  misc_RNA (1)...(19): siRNA sense strand
gaagauaaugcaggaguca

SEQ ID NO: 735652 - RNA, 19 nt, Homo sapiens
  misc_RNA (1)...(19): siRNA sense strand
gaaagucauaccguagaaa

SEQ ID NO: 735653 - RNA, 19 nt, Homo sapiens
  misc_RNA (1)...(19): siRNA sense strand
caaaggagugugcagacuu

SEQ ID NO: 735654 - RNA, 19 nt, Homo sapiens
  misc_RNA (1)...(19): siRNA sense strand
augaaagguucugccauua

SEQ ID NO: 735655 - RNA, 19 nt, Homo sapiens
  misc_RNA (1)...(19): siRNA sense strand
agauaaugcaggagucaua

SEQ ID NO: 735656 - RNA, 19 nt, Homo sapiens
  misc_RNA (1)...(19): siRNA sense strand
guaaucaauugugcugaca

SEQ ID NO: 735657 - RNA, 19 nt, Homo sapiens
  misc_RNA (1)...(19): siRNA sense strand
gauggccacagucaagaaa

SEQ ID NO: 735658 - RNA, 19 nt, Homo sapiens
  misc_RNA (1)...(19): siRNA sense strand
acaauaaaggcgagaugaa

SEQ ID NO: 735659 - RNA, 19 nt, Homo sapiens
  misc_RNA (1)...(19): siRNA sense strand
uuacaggaccaguagcaaa

SEQ ID NO: 735660 - RNA, 19 nt, Homo sapiens
  misc_RNA (1)...(19): siRNA sense strand
ggugauggccacagucaag

SEQ ID NO: 735661 - RNA, 19 nt, Homo sapiens
  misc_RNA (1)...(19): siRNA sense strand
gauaaugcaggagucauag

SEQ ID NO: 735662 - RNA, 19 nt, Homo sapiens
  misc_RNA (1)...(19): siRNA sense strand
guaggagcuguaaucaauu

SEQ ID NO: 735663 - RNA, 19 nt, Homo sapiens
  misc_RNA (1)...(19): siRNA sense strand
caggagucauagugaacaa

SEQ ID NO: 735664 - RNA, 19 nt, Homo sapiens
  misc_RNA (1)...(19): siRNA sense strand
gcaguggucauucgacaac

SEQ ID NO: 735665 - RNA, 19 nt, Homo sapiens
  misc_RNA (1)...(19): siRNA sense strand
gguccucuggugcgaaauu

SEQ ID NO: 735666 - RNA, 19 nt, Homo sapiens
  misc_RNA (1)...(19): siRNA sense strand
gcaggagucauagugaaca

SEQ ID NO: 735667 - RNA, 19 nt, Homo sapiens
  misc_RNA (1)...(19): siRNA sense strand
caggaccaguagcaaagga

SEQ ID NO: 735668 - RNA, 19 nt, Homo sapiens
  misc_RNA (1)...(19): siRNA sense strand
uaaugcaggagucauagug

SEQ ID NO: 735669 - RNA, 19 nt, Homo sapiens
  misc_RNA (1)...(19): siRNA sense strand
ggagcuguaaucaauugug

SEQ ID NO: 735670 - RNA, 19 nt, Homo sapiens
  misc_RNA (1)...(19): siRNA sense strand
ugaaagguucugccauuac

SEQ ID NO: 735671 - RNA, 19 nt, Homo sapiens
  misc_RNA (1)...(19): siRNA sense strand
cggauuuccuugggucuuc

SEQ ID NO: 735672 - RNA, 19 nt, Homo sapiens
  misc_RNA (1)...(19): siRNA sense strand
gccauuacaggaccaguag

SEQ ID NO: 735673 - RNA, 19 nt, Homo sapiens
  misc_RNA (1)...(19): siRNA sense strand
caagggacggcugaacaga

SEQ ID NO: 735674 - RNA, 19 nt, Homo sapiens
  misc_RNA (1)...(19): siRNA sense strand
aauaaaggcgagaugaaag

SEQ ID NO: 735675 - RNA, 19 nt, Homo sapiens
  misc_RNA (1)...(19): siRNA sense strand
gcguguuucuuuauuuuga

SEQ ID NO: 735676 - RNA, 19 nt, Homo sapiens
  misc_RNA (1)...(19): siRNA sense strand
gggacaagcugcagaggua

SEQ ID NO: 735677 - RNA, 19 nt, Homo sapiens
  misc_RNA (1)...(19): siRNA sense strand
gcacguagaggccaucaaa

SEQ ID NO: 735678 - RNA, 19 nt, Homo sapiens
  misc_RNA (1)...(19): siRNA sense strand
ggacucagcaggagcuuga

SEQ ID NO: 735679 - RNA, 19 nt, Homo sapiens
  misc_RNA (1)...(19): siRNA sense strand
ccaagauccugguugaguu

SEQ ID NO: 735680 - RNA, 19 nt, Homo sapiens
  misc_RNA (1)...(19): siRNA sense strand
ggaggaagcccagaggaaa

SEQ ID NO: 735681 - RNA, 19 nt, Homo sapiens
  misc_RNA (1)...(19): siRNA sense strand
agaaggcaauugcagcuaa

SEQ ID NO: 735682 - RNA, 19 nt, Homo sapiens
  misc_RNA (1)...(19): siRNA sense strand
cagccaagauccugguuga

SEQ ID NO: 735683 - RNA, 19 nt, Homo sapiens
  misc_RNA (1)...(19): siRNA sense strand
cuucaaggcuguuggucua

SEQ ID NO: 735684 - RNA, 19 nt, Homo sapiens
  misc_RNA (1)...(19): siRNA sense strand
gcagagcaguccagaacca

SEQ ID NO: 735685 - RNA, 19 nt, Homo sapiens
  misc_RNA (1)...(19): siRNA sense strand
gguggacucucagaagaaa

SEQ ID NO: 735686 - RNA, 19 nt, Homo sapiens
  misc_RNA (1)...(19): siRNA sense strand
agaaacaaauggccaugga

SEQ ID NO: 735687 - RNA, 19 nt, Homo sapiens
  misc_RNA (1)...(19): siRNA sense strand
gaagacacgagccgacaga

SEQ ID NO: 735688 - RNA, 19 nt, Homo sapiens
  misc_RNA (1)...(19): siRNA sense strand
gaaggcaauugcagcuaag

SEQ ID NO: 735689 - RNA, 19 nt, Homo sapiens
  misc_RNA (1)...(19): siRNA sense strand
caagauccugguugaguuu

SEQ ID NO: 735690 - RNA, 19 nt, Homo sapiens
  misc_RNA (1)...(19): siRNA sense strand
gugguggacucucagaaga

SEQ ID NO: 735691 - RNA, 19 nt, Homo sapiens
  misc_RNA (1)...(19): siRNA sense strand
agaagcaucugcagcaucu

SEQ ID NO: 735692 - RNA, 19 nt, Homo sapiens
  misc_RNA (1)...(19): siRNA sense strand
uagcggauuuccugcagaa

SEQ ID NO: 735693 - RNA, 19 nt, Homo sapiens
  misc_RNA (1)...(19): siRNA sense strand
acaaccugcuggagaugua

SEQ ID NO: 735694 - RNA, 19 nt, Homo sapiens
  misc_RNA (1)...(19): siRNA sense strand
acaaauggccauggagaaa

SEQ ID NO: 735695 - RNA, 19 nt, Homo sapiens
  misc_RNA (1)...(19): siRNA sense strand
agauguaaauuugccauga

SEQ ID NO: 735696 - RNA, 19 nt, Homo sapiens
  misc_RNA (1)...(19): siRNA sense strand
ggagaagcaucugcagcau

SEQ ID NO: 735697 - RNA, 19 nt, Homo sapiens
  misc_RNA (1)...(19): siRNA sense strand
gaggugagggagcguaaga

SEQ ID NO: 735698 - RNA, 19 nt, Homo sapiens
  misc_RNA (1)...(19): siRNA sense strand
ugagguggcaggcaucuug

SEQ ID NO: 735699 - RNA, 19 nt, Homo sapiens
  misc_RNA (1)...(19): siRNA sense strand
ugcuggagauguaaauuug

SEQ ID NO: 735700 - RNA, 19 nt, Homo sapiens
  misc_RNA (1)...(19): siRNA sense strand
caaggcuguuggucuacaa

SEQ ID NO: 735701 - RNA, 19 nt, Homo sapiens
  misc_RNA (1)...(19): siRNA sense strand
ggcaauugcagcuaaggaa

SEQ ID NO: 735702 - RNA, 19 nt, Homo sapiens
  misc_RNA (1)...(19): siRNA sense strand
ucuacaaccugcuggagau

SEQ ID NO: 735703 - RNA, 19 nt, Homo sapiens
  misc_RNA (1)...(19): siRNA sense strand
ucaccaaggcccugacuca

SEQ ID NO: 735704 - RNA, 19 nt, Homo sapiens
  misc_RNA (1)...(19): siRNA sense strand
cagcuaaggaacaauggaa

SEQ ID NO: 735705 - RNA, 19 nt, Homo sapiens
  misc_RNA (1)...(19): siRNA sense strand
ugaagcagcaggcagaaca

SEQ ID NO: 735706 - RNA, 19 nt, Homo sapiens
  misc_RNA (1)...(19): siRNA sense strand
gauccugguugaguuugug

SEQ ID NO: 735707 - RNA, 19 nt, Homo sapiens
  misc_RNA (1)...(19): siRNA sense strand
gcaggaggaggcagaacug

SEQ ID NO: 735708 - RNA, 19 nt, Homo sapiens
  misc_RNA (1)...(19): siRNA sense strand
guagaggccaucaaaauug

SEQ ID NO: 735709 - RNA, 19 nt, Homo sapiens
  misc_RNA (1)...(19): siRNA sense strand
cuaaggaacaauggaaaga

SEQ ID NO: 735710 - RNA, 19 nt, Homo sapiens
  misc_RNA (1)...(19): siRNA sense strand
gcagcuccaggccaagaaa

SEQ ID NO: 735711 - RNA, 19 nt, Homo sapiens
  misc_RNA (1)...(19): siRNA sense strand
cggauuuccugcagaacau

SEQ ID NO: 735712 - RNA, 19 nt, Homo sapiens
  misc_RNA (1)...(19): siRNA sense strand
gccaagauccugguugagu

SEQ ID NO: 735713 - RNA, 19 nt, Homo sapiens
  misc_RNA (1)...(19): siRNA sense strand
gagcagaguacaggagaca

SEQ ID NO: 735714 - RNA, 19 nt, Homo sapiens
  misc_RNA (1)...(19): siRNA sense strand
gcuaaggaacaauggaaag

SEQ ID NO: 735715 - RNA, 19 nt, Homo sapiens
  misc_RNA (1)...(19): siRNA sense strand
gaaccaguggcagcuacaa

SEQ ID NO: 735716 - RNA, 19 nt, Homo sapiens
  misc_RNA (1)...(19): siRNA sense strand
cugcuggagauguaaauuu

SEQ ID NO: 735717 - RNA, 19 nt, Homo sapiens
  misc_RNA (1)...(19): siRNA sense strand
gagcugaaggccaccuaca

SEQ ID NO: 735718 - RNA, 19 nt, Homo sapiens
  misc_RNA (1)...(19): siRNA sense strand
ggacaagcugcagagguau

SEQ ID NO: 735719 - RNA, 19 nt, Homo sapiens
  misc_RNA (1)...(19): siRNA sense strand
uugacaggguguuucagaa

SEQ ID NO: 735720 - RNA, 19 nt, Homo sapiens
  misc_RNA (1)...(19): siRNA sense strand
gcggauuuccugcagaaca

SEQ ID NO: 735721 - RNA, 19 nt, Homo sapiens
  misc_RNA (1)...(19): siRNA sense strand
ggaagcugcagcccuagag

SEQ ID NO: 735722 - RNA, 19 nt, Homo sapiens
  misc_RNA (1)...(19): siRNA sense strand
caauugcagcuaaggaaca

SEQ ID NO: 735723 - RNA, 19 nt, Homo sapiens
  misc_RNA (1)...(19): siRNA sense strand
gcucaggaggacacugcua

SEQ ID NO: 735724 - RNA, 19 nt, Homo sapiens
  misc_RNA (1)...(19): siRNA sense strand
ggugagggagcguaagaca

SEQ ID NO: 735725 - RNA, 19 nt, Homo sapiens
  misc_RNA (1)...(19): siRNA sense strand
gaaacuuggaaaccugaag

SEQ ID NO: 735726 - RNA, 19 nt, Homo sapiens
  misc_RNA (1)...(19): siRNA sense strand
gcagcuaaggaacaaugga

SEQ ID NO: 735727 - RNA, 19 nt, Homo sapiens
  misc_RNA (1)...(19): siRNA sense strand
ucaaggcuguuggucuaca

SEQ ID NO: 735728 - RNA, 19 nt, Homo sapiens
  misc_RNA (1)...(19): siRNA sense strand
gguggcaggcaucuuggaa

SEQ ID NO: 735729 - RNA, 19 nt, Homo sapiens
  misc_RNA (1)...(19): siRNA sense strand
gagcuugacaggguguuuc

SEQ ID NO: 735730 - RNA, 19 nt, Homo sapiens
  misc_RNA (1)...(19): siRNA sense strand
gaggaagcccagaggaaac

SEQ ID NO: 735731 - RNA, 19 nt, Homo sapiens
  misc_RNA (1)...(19): siRNA sense strand
gggacaagcugcagaggua

SEQ ID NO: 735732 - RNA, 19 nt, Homo sapiens
  misc_RNA (1)...(19): siRNA sense strand
gcacguagaggccaucaaa

SEQ ID NO: 735733 - RNA, 19 nt, Homo sapiens
  misc_RNA (1)...(19): siRNA sense strand
ggacucagcaggagcuuga

SEQ ID NO: 735734 - RNA, 19 nt, Homo sapiens
  misc_RNA (1)...(19): siRNA sense strand
ccaagauccugguugaguu

SEQ ID NO: 735735 - RNA, 19 nt, Homo sapiens
  misc_RNA (1)...(19): siRNA sense strand
ggaggaagcccagaggaaa

SEQ ID NO: 735736 - RNA, 19 nt, Homo sapiens
  misc_RNA (1)...(19): siRNA sense strand
agaaggcaauugcagcuaa

SEQ ID NO: 735737 - RNA, 19 nt, Homo sapiens
  misc_RNA (1)...(19): siRNA sense strand
cagccaagauccugguuga

SEQ ID NO: 735738 - RNA, 19 nt, Homo sapiens
  misc_RNA (1)...(19): siRNA sense strand
cuucaaggcuguuggucua

SEQ ID NO: 735739 - RNA, 19 nt, Homo sapiens
  misc_RNA (1)...(19): siRNA sense strand
gcagagcaguccagaacca

SEQ ID NO: 735740 - RNA, 19 nt, Homo sapiens
  misc_RNA (1)...(19): siRNA sense strand
gguggacucucagaagaaa

SEQ ID NO: 735741 - RNA, 19 nt, Homo sapiens
  misc_RNA (1)...(19): siRNA sense strand
agaaacaaauggccaugga

SEQ ID NO: 735742 - RNA, 19 nt, Homo sapiens
  misc_RNA (1)...(19): siRNA sense strand
gaagacacgagccgacaga

SEQ ID NO: 735743 - RNA, 19 nt, Homo sapiens
  misc_RNA (1)...(19): siRNA sense strand
gaaggcaauugcagcuaag

SEQ ID NO: 735744 - RNA, 19 nt, Homo sapiens
  misc_RNA (1)...(19): siRNA sense strand
caagauccugguugaguuu

SEQ ID NO: 735745 - RNA, 19 nt, Homo sapiens
  misc_RNA (1)...(19): siRNA sense strand
gugguggacucucagaaga

SEQ ID NO: 735746 - RNA, 19 nt, Homo sapiens
  misc_RNA (1)...(19): siRNA sense strand
agaagcaucugcagcaucu

SEQ ID NO: 735747 - RNA, 19 nt, Homo sapiens
  misc_RNA (1)...(19): siRNA sense strand
uagcggauuuccugcagaa

SEQ ID NO: 735748 - RNA, 19 nt, Homo sapiens
  misc_RNA (1)...(19): siRNA sense strand
acaaccugcuggagaugua

SEQ ID NO: 735749 - RNA, 19 nt, Homo sapiens
  misc_RNA (1)...(19): siRNA sense strand
acaaauggccauggagaaa

SEQ ID NO: 735750 - RNA, 19 nt, Homo sapiens
  misc_RNA (1)...(19): siRNA sense strand
agauguaaauuugccauga

SEQ ID NO: 735751 - RNA, 19 nt, Homo sapiens
  misc_RNA (1)...(19): siRNA sense strand
ggagaagcaucugcagcau

SEQ ID NO: 735752 - RNA, 19 nt, Homo sapiens
  misc_RNA (1)...(19): siRNA sense strand
gaggugagggagcguaaga

SEQ ID NO: 735753 - RNA, 19 nt, Homo sapiens
  misc_RNA (1)...(19): siRNA sense strand
ugagguggcaggcaucuug

SEQ ID NO: 735754 - RNA, 19 nt, Homo sapiens
  misc_RNA (1)...(19): siRNA sense strand
ugcuggagauguaaauuug

SEQ ID NO: 735755 - RNA, 19 nt, Homo sapiens
  misc_RNA (1)...(19): siRNA sense strand
caaggcuguuggucuacaa

SEQ ID NO: 735756 - RNA, 19 nt, Homo sapiens
  misc_RNA (1)...(19): siRNA sense strand
ggcaauugcagcuaaggaa

SEQ ID NO: 735757 - RNA, 19 nt, Homo sapiens
  misc_RNA (1)...(19): siRNA sense strand
ucuacaaccugcuggagau

SEQ ID NO: 735758 - RNA, 19 nt, Homo sapiens
  misc_RNA (1)...(19): siRNA sense strand
ucaccaaggcccugacuca

SEQ ID NO: 735759 - RNA, 19 nt, Homo sapiens
  misc_RNA (1)...(19): siRNA sense strand
cagcuaaggaacaauggaa

SEQ ID NO: 735760 - RNA, 19 nt, Homo sapiens
  misc_RNA (1)...(19): siRNA sense strand
ugaagcagcaggcagaaca

SEQ ID NO: 735761 - RNA, 19 nt, Homo sapiens
  misc_RNA (1)...(19): siRNA sense strand
gauccugguugaguuugug

SEQ ID NO: 735762 - RNA, 19 nt, Homo sapiens
  misc_RNA (1)...(19): siRNA sense strand
gcaggaggaggcagaacug

SEQ ID NO: 735763 - RNA, 19 nt, Homo sapiens
  misc_RNA (1)...(19): siRNA sense strand
guagaggccaucaaaauug

SEQ ID NO: 735764 - RNA, 19 nt, Homo sapiens
  misc_RNA (1)...(19): siRNA sense strand
cuaaggaacaauggaaaga

SEQ ID NO: 735765 - RNA, 19 nt, Homo sapiens
  misc_RNA (1)...(19): siRNA sense strand
gcagcuccaggccaagaaa

SEQ ID NO: 735766 - RNA, 19 nt, Homo sapiens
  misc_RNA (1)...(19): siRNA sense strand
cggauuuccugcagaacau

SEQ ID NO: 735767 - RNA, 19 nt, Homo sapiens
  misc_RNA (1)...(19): siRNA sense strand
gccaagauccugguugagu

SEQ ID NO: 735768 - RNA, 19 nt, Homo sapiens
  misc_RNA (1)...(19): siRNA sense strand
gagcagaguacaggagaca

SEQ ID NO: 735769 - RNA, 19 nt, Homo sapiens
  misc_RNA (1)...(19): siRNA sense strand
gcuaaggaacaauggaaag

SEQ ID NO: 735770 - RNA, 19 nt, Homo sapiens
  misc_RNA (1)...(19): siRNA sense strand
gaaccaguggcagcuacaa

SEQ ID NO: 735771 - RNA, 19 nt, Homo sapiens
  misc_RNA (1)...(19): siRNA sense strand
cugcuggagauguaaauuu

SEQ ID NO: 735772 - RNA, 19 nt, Homo sapiens
  misc_RNA (1)...(19): siRNA sense strand
gagcugaaggccaccuaca

SEQ ID NO: 735773 - RNA, 19 nt, Homo sapiens
  misc_RNA (1)...(19): siRNA sense strand
ggacaagcugcagagguau

SEQ ID NO: 735774 - RNA, 19 nt, Homo sapiens
  misc_RNA (1)...(19): siRNA sense strand
uugacaggguguuucagaa

SEQ ID NO: 735775 - RNA, 19 nt, Homo sapiens
  misc_RNA (1)...(19): siRNA sense strand
gcggauuuccugcagaaca

SEQ ID NO: 735776 - RNA, 19 nt, Homo sapiens
  misc_RNA (1)...(19): siRNA sense strand
ggaagcugcagcccuagag

SEQ ID NO: 735777 - RNA, 19 nt, Homo sapiens
  misc_RNA (1)...(19): siRNA sense strand
caauugcagcuaaggaaca

SEQ ID NO: 735778 - RNA, 19 nt, Homo sapiens
  misc_RNA (1)...(19): siRNA sense strand
gcucaggaggacacugcua

SEQ ID NO: 735779 - RNA, 19 nt, Homo sapiens
  misc_RNA (1)...(19): siRNA sense strand
ggugagggagcguaagaca

SEQ ID NO: 735780 - RNA, 19 nt, Homo sapiens
  misc_RNA (1)...(19): siRNA sense strand
gaaacuuggaaaccugaag

SEQ ID NO: 735781 - RNA, 19 nt, Homo sapiens
  misc_RNA (1)...(19): siRNA sense strand
gcagcuaaggaacaaugga

SEQ ID NO: 735782 - RNA, 19 nt, Homo sapiens
  misc_RNA (1)...(19): siRNA sense strand
ucaaggcuguuggucuaca

SEQ ID NO: 735783 - RNA, 19 nt, Homo sapiens
  misc_RNA (1)...(19): siRNA sense strand
gguggcaggcaucuuggaa

SEQ ID NO: 735784 - RNA, 19 nt, Homo sapiens
  misc_RNA (1)...(19): siRNA sense strand
gagcuugacaggguguuuc

SEQ ID NO: 735785 - RNA, 19 nt, Homo sapiens
  misc_RNA (1)...(19): siRNA sense strand
gaggaagcccagaggaaac

SEQ ID NO: 735786 - RNA, 19 nt, Homo sapiens
  misc_RNA (1)...(19): siRNA sense strand
gcggagagcuguucuuagu

SEQ ID NO: 735787 - RNA, 19 nt, Homo sapiens
  misc_RNA (1)...(19): siRNA sense strand
gauacgcucugccucaaga

SEQ ID NO: 735788 - RNA, 19 nt, Homo sapiens
  misc_RNA (1)...(19): siRNA sense strand
guucaacgauguccugguu

SEQ ID NO: 735789 - RNA, 19 nt, Homo sapiens
  misc_RNA (1)...(19): siRNA sense strand
gaggauggguggcucuaug

SEQ ID NO: 735790 - RNA, 19 nt, Homo sapiens
  misc_RNA (1)...(19): siRNA sense strand
ccaacgaggucuaccaaca

SEQ ID NO: 735791 - RNA, 19 nt, Homo sapiens
  misc_RNA (1)...(19): siRNA sense strand
gcgcggagagcuguucuua

SEQ ID NO: 735792 - RNA, 19 nt, Homo sapiens
  misc_RNA (1)...(19): siRNA sense strand
ggacuuugcccgcuucauc

SEQ ID NO: 735793 - RNA, 19 nt, Homo sapiens
  misc_RNA (1)...(19): siRNA sense strand
acacacagcuggacuucag

SEQ ID NO: 735794 - RNA, 19 nt, Homo sapiens
  misc_RNA (1)...(19): siRNA sense strand
ggagcacgcugagaaguac

SEQ ID NO: 735795 - RNA, 19 nt, Homo sapiens
  misc_RNA (1)...(19): siRNA sense strand
gagaggcccugagagagau

SEQ ID NO: 735796 - RNA, 19 nt, Homo sapiens
  misc_RNA (1)...(19): siRNA sense strand
cgagaggcccugagagaga

SEQ ID NO: 735797 - RNA, 19 nt, Homo sapiens
  misc_RNA (1)...(19): siRNA sense strand
ucaagucccucccacugau

SEQ ID NO: 735798 - RNA, 19 nt, Homo sapiens
  misc_RNA (1)...(19): siRNA sense strand
cggccaacgugcuaccuuu

SEQ ID NO: 735799 - RNA, 19 nt, Homo sapiens
  misc_RNA (1)...(19): siRNA sense strand
ggacuacgcccagaugaac

SEQ ID NO: 735800 - RNA, 19 nt, Homo sapiens
  misc_RNA (1)...(19): siRNA sense strand
caccaccucuucuccaaca

SEQ ID NO: 735801 - RNA, 19 nt, Homo sapiens
  misc_RNA (1)...(19): siRNA sense strand
ugaaccacauccagguaga

SEQ ID NO: 735802 - RNA, 19 nt, Homo sapiens
  misc_RNA (1)...(19): siRNA sense strand
gcaagcagacgaggucaca

SEQ ID NO: 735803 - RNA, 19 nt, Homo sapiens
  misc_RNA (1)...(19): siRNA sense strand
gcacacacagcuggacuuc

SEQ ID NO: 735804 - RNA, 19 nt, Homo sapiens
  misc_RNA (1)...(19): siRNA sense strand
uguacacgcugcacacaca

SEQ ID NO: 735805 - RNA, 19 nt, Homo sapiens
  misc_RNA (1)...(19): siRNA sense strand
ggguggagacggacgugua

SEQ ID NO: 735806 - RNA, 19 nt, Homo sapiens
  misc_RNA (1)...(19): siRNA sense strand
gaucaccaaggccuucuuc

SEQ ID NO: 735807 - RNA, 19 nt, Homo sapiens
  misc_RNA (1)...(19): siRNA sense strand
uggaggagcacgcugagaa

SEQ ID NO: 735808 - RNA, 19 nt, Homo sapiens
  misc_RNA (1)...(19): siRNA sense strand
gcauggagcagauguacac

SEQ ID NO: 735809 - RNA, 19 nt, Homo sapiens
  misc_RNA (1)...(19): siRNA sense strand
gagcgaggagagcuacaug

SEQ ID NO: 735810 - RNA, 19 nt, Homo sapiens
  misc_RNA (1)...(19): siRNA sense strand
gcagggccucuccagcaaa

SEQ ID NO: 735811 - RNA, 19 nt, Homo sapiens
  misc_RNA (1)...(19): siRNA sense strand
ggaggagcacgcugagaag

SEQ ID NO: 735812 - RNA, 19 nt, Homo sapiens
  misc_RNA (1)...(19): siRNA sense strand
caacgaggucuaccaacag

SEQ ID NO: 735813 - RNA, 19 nt, Homo sapiens
  misc_RNA (1)...(19): siRNA sense strand
ggagcaccaccaccucuuc

SEQ ID NO: 735814 - RNA, 19 nt, Homo sapiens
  misc_RNA (1)...(19): siRNA sense strand
ccacauccagguagagaag

SEQ ID NO: 735815 - RNA, 19 nt, Homo sapiens
  misc_RNA (1)...(19): siRNA sense strand
gcccugagagagauugaga

SEQ ID NO: 735816 - RNA, 19 nt, Homo sapiens
  misc_RNA (1)...(19): siRNA sense strand
gucaagucccucccacuga

SEQ ID NO: 735817 - RNA, 19 nt, Homo sapiens
  misc_RNA (1)...(19): siRNA sense strand
gcgaggagagcuacauggu

SEQ ID NO: 735818 - RNA, 19 nt, Homo sapiens
  misc_RNA (1)...(19): siRNA sense strand
uggauacgcucugccucaa

SEQ ID NO: 735819 - RNA, 19 nt, Homo sapiens
  misc_RNA (1)...(19): siRNA sense strand
gacuuugcccgcuucauca

SEQ ID NO: 735820 - RNA, 19 nt, Homo sapiens
  misc_RNA (1)...(19): siRNA sense strand
guugugaccaagaagaaga

SEQ ID NO: 735821 - RNA, 19 nt, Homo sapiens
  misc_RNA (1)...(19): siRNA sense strand
ccaggacuacgcccagaug

SEQ ID NO: 735822 - RNA, 19 nt, Homo sapiens
  misc_RNA (1)...(19): siRNA sense strand
cagggccucuccagcaaag

SEQ ID NO: 735823 - RNA, 19 nt, Homo sapiens
  misc_RNA (1)...(19): siRNA sense strand
aggagcacgcugagaagua

SEQ ID NO: 735824 - RNA, 19 nt, Homo sapiens
  misc_RNA (1)...(19): siRNA sense strand
cuacaucaauggcucuuua

SEQ ID NO: 735825 - RNA, 19 nt, Homo sapiens
  misc_RNA (1)...(19): siRNA sense strand
aaauggacgugacuucuua

SEQ ID NO: 735826 - RNA, 19 nt, Homo sapiens
  misc_RNA (1)...(19): siRNA sense strand
ggacgugacuucuuauugg

SEQ ID NO: 735827 - RNA, 19 nt, Homo sapiens
  misc_RNA (1)...(19): siRNA sense strand
caucaauggcucuuuauua

SEQ ID NO: 735828 - RNA, 19 nt, Homo sapiens
  misc_RNA (1)...(19): siRNA sense strand
ggcaaugucuucucuaaca

SEQ ID NO: 735829 - RNA, 19 nt, Homo sapiens
  misc_RNA (1)...(19): siRNA sense strand
ucaccuaccucgaugcauu

SEQ ID NO: 735830 - RNA, 19 nt, Homo sapiens
  misc_RNA (1)...(19): siRNA sense strand
gaaauggacgugacuucuu

SEQ ID NO: 735831 - RNA, 19 nt, Homo sapiens
  misc_RNA (1)...(19): siRNA sense strand
ccaucaagcugcugguaaa

SEQ ID NO: 735832 - RNA, 19 nt, Homo sapiens
  misc_RNA (1)...(19): siRNA sense strand
gcaaugucuucucuaacaa

SEQ ID NO: 735833 - RNA, 19 nt, Homo sapiens
  misc_RNA (1)...(19): siRNA sense strand
gaccugggcuccaucaucu

SEQ ID NO: 735834 - RNA, 19 nt, Homo sapiens
  misc_RNA (1)...(19): siRNA sense strand
ucaagcugcugguaaaugu

SEQ ID NO: 735835 - RNA, 19 nt, Homo sapiens
  misc_RNA (1)...(19): siRNA sense strand
gcagggcaaugucuucucu

SEQ ID NO: 735836 - RNA, 19 nt, Homo sapiens
  misc_RNA (1)...(19): siRNA sense strand
caucaucugugacaucaag

SEQ ID NO: 735837 - RNA, 19 nt, Homo sapiens
  misc_RNA (1)...(19): siRNA sense strand
ugugugcccugaucuugua

SEQ ID NO: 735838 - RNA, 19 nt, Homo sapiens
  misc_RNA (1)...(19): siRNA sense strand
ccaaggagaagcagacaug

SEQ ID NO: 735839 - RNA, 19 nt, Homo sapiens
  misc_RNA (1)...(19): siRNA sense strand
caccagaucccaaggagaa

SEQ ID NO: 735840 - RNA, 19 nt, Homo sapiens
  misc_RNA (1)...(19): siRNA sense strand
ggagacaucaauucgcuau

SEQ ID NO: 735841 - RNA, 19 nt, Homo sapiens
  misc_RNA (1)...(19): siRNA sense strand
gaauacugccagcaugaga

SEQ ID NO: 735842 - RNA, 19 nt, Homo sapiens
  misc_RNA (1)...(19): siRNA sense strand
ccucuuuguugaugucauu

SEQ ID NO: 735843 - RNA, 19 nt, Homo sapiens
  misc_RNA (1)...(19): siRNA sense strand
cgagggagagccacacuug

SEQ ID NO: 735844 - RNA, 19 nt, Homo sapiens
  misc_RNA (1)...(19): siRNA sense strand
aucaauggcucuuuauuag

SEQ ID NO: 735845 - RNA, 19 nt, Homo sapiens
  misc_RNA (1)...(19): siRNA sense strand
ccaacaccauccucaaguc

SEQ ID NO: 735846 - RNA, 19 nt, Homo sapiens
  misc_RNA (1)...(19): siRNA sense strand
gagcugggccgacagaaac

SEQ ID NO: 735847 - RNA, 19 nt, Homo sapiens
  misc_RNA (1)...(19): siRNA sense strand
cgugcuuucuuuccucuuu

SEQ ID NO: 735848 - RNA, 19 nt, Homo sapiens
  misc_RNA (1)...(19): siRNA sense strand
gcacuuaaaggugucuuca

SEQ ID NO: 735849 - RNA, 19 nt, Homo sapiens
  misc_RNA (1)...(19): siRNA sense strand
ggaccugggcuccaucauc

SEQ ID NO: 735850 - RNA, 19 nt, Homo sapiens
  misc_RNA (1)...(19): siRNA sense strand
aggagaagcagacauguga

SEQ ID NO: 735851 - RNA, 19 nt, Homo sapiens
  misc_RNA (1)...(19): siRNA sense strand
gaugugcgcgugcuuucuu

SEQ ID NO: 735852 - RNA, 19 nt, Homo sapiens
  misc_RNA (1)...(19): siRNA sense strand
agggcaaugucuucucuaa

SEQ ID NO: 735853 - RNA, 19 nt, Homo sapiens
  misc_RNA (1)...(19): siRNA sense strand
uagacgaggaggacuauga

SEQ ID NO: 735854 - RNA, 19 nt, Homo sapiens
  misc_RNA (1)...(19): siRNA sense strand
gagaagcagacaugugaca

SEQ ID NO: 735855 - RNA, 19 nt, Homo sapiens
  misc_RNA (1)...(19): siRNA sense strand
acuuaaaggugucuucauc

SEQ ID NO: 735856 - RNA, 19 nt, Homo sapiens
  misc_RNA (1)...(19): siRNA sense strand
ucucugagcucaccuaccu

SEQ ID NO: 735857 - RNA, 19 nt, Homo sapiens
  misc_RNA (1)...(19): siRNA sense strand
uggcgugacuacaucaaug

SEQ ID NO: 735858 - RNA, 19 nt, Homo sapiens
  misc_RNA (1)...(19): siRNA sense strand
uaacaagcaggacccacuu

SEQ ID NO: 735859 - RNA, 19 nt, Homo sapiens
  misc_RNA (1)...(19): siRNA sense strand
caucacagacucccucaag

SEQ ID NO: 735860 - RNA, 19 nt, Homo sapiens
  misc_RNA (1)...(19): siRNA sense strand
ccacuugagcgccaguuug

SEQ ID NO: 735861 - RNA, 19 nt, Homo sapiens
  misc_RNA (1)...(19): siRNA sense strand
ucaauggcucuuuauuaga

SEQ ID NO: 735862 - RNA, 19 nt, Homo sapiens
  misc_RNA (1)...(19): siRNA sense strand
uuucuuuccucuuuguuga

SEQ ID NO: 735863 - RNA, 19 nt, Homo sapiens
  misc_RNA (1)...(19): siRNA sense strand
gccaucaagcugcugguaa

SEQ ID NO: 735864 - RNA, 19 nt, Homo sapiens
  misc_RNA (1)...(19): siRNA sense strand
gagaugugcgcgugcuuuc

SEQ ID NO: 735865 - RNA, 19 nt, Homo sapiens
  misc_RNA (1)...(19): siRNA sense strand
ucacagacucccucaagca

SEQ ID NO: 735866 - RNA, 19 nt, Homo sapiens
  misc_RNA (1)...(19): siRNA sense strand
cgugggcacucaucugaca

SEQ ID NO: 735867 - RNA, 19 nt, Homo sapiens
  misc_RNA (1)...(19): siRNA sense strand
ccucagugauccagaacca

SEQ ID NO: 735868 - RNA, 19 nt, Homo sapiens
  misc_RNA (1)...(19): siRNA sense strand
cacuugagcgccaguuuga

SEQ ID NO: 735869 - RNA, 19 nt, Homo sapiens
  misc_RNA (1)...(19): siRNA sense strand
cagccugcaccgcauguuu

SEQ ID NO: 735870 - RNA, 19 nt, Homo sapiens
  misc_RNA (1)...(19): siRNA sense strand
uaaaggugucuucaucaca

SEQ ID NO: 735871 - RNA, 19 nt, Homo sapiens
  misc_RNA (1)...(19): siRNA sense strand
gugcuuucuuuccucuuug

SEQ ID NO: 735872 - RNA, 19 nt, Homo sapiens
  misc_RNA (1)...(19): siRNA sense strand
caagcugcugguaaaugua

SEQ ID NO: 735873 - RNA, 19 nt, Homo sapiens
  misc_RNA (1)...(19): siRNA sense strand
acuauccugugguguguug

SEQ ID NO: 735874 - RNA, 19 nt, Homo sapiens
  misc_RNA (1)...(19): siRNA sense strand
ugagcugggccgacagaaa

SEQ ID NO: 735875 - RNA, 19 nt, Homo sapiens
  misc_RNA (1)...(19): siRNA sense strand
ccacuucggguccucagau

SEQ ID NO: 735876 - RNA, 19 nt, Homo sapiens
  misc_RNA (1)...(19): siRNA sense strand
cgaaauggacgugacuucu

SEQ ID NO: 735877 - RNA, 19 nt, Homo sapiens
  misc_RNA (1)...(19): siRNA sense strand
uuaaaggugucuucaucac

SEQ ID NO: 735878 - RNA, 19 nt, Homo sapiens
  misc_RNA (1)...(19): siRNA sense strand
gccaacaccauccucaagu

SEQ ID NO: 735879 - RNA, 19 nt, Homo sapiens
  misc_RNA (1)...(19): siRNA sense strand
guccucagauguguagcaa

SEQ ID NO: 735880 - RNA, 19 nt, Homo sapiens
  misc_RNA (1)...(19): siRNA sense strand
gcugugugcccugaucuug

SEQ ID NO: 735881 - RNA, 19 nt, Homo sapiens
  misc_RNA (1)...(19): siRNA sense strand
uccaucaucugugacauca

SEQ ID NO: 735882 - RNA, 19 nt, Homo sapiens
  misc_RNA (1)...(19): siRNA sense strand
gaugcauucuggcgugacu

SEQ ID NO: 735883 - RNA, 19 nt, Homo sapiens
  misc_RNA (1)...(19): siRNA sense strand
cuacaucaauggcucuuua

SEQ ID NO: 735884 - RNA, 19 nt, Homo sapiens
  misc_RNA (1)...(19): siRNA sense strand
aaauggacgugacuucuua

SEQ ID NO: 735885 - RNA, 19 nt, Homo sapiens
  misc_RNA (1)...(19): siRNA sense strand
ggacgugacuucuuauugg

SEQ ID NO: 735886 - RNA, 19 nt, Homo sapiens
  misc_RNA (1)...(19): siRNA sense strand
caucaauggcucuuuauua

SEQ ID NO: 735887 - RNA, 19 nt, Homo sapiens
  misc_RNA (1)...(19): siRNA sense strand
ggcaaugucuucucuaaca

SEQ ID NO: 735888 - RNA, 19 nt, Homo sapiens
  misc_RNA (1)...(19): siRNA sense strand
ucaccuaccucgaugcauu

SEQ ID NO: 735889 - RNA, 19 nt, Homo sapiens
  misc_RNA (1)...(19): siRNA sense strand
gaaauggacgugacuucuu

SEQ ID NO: 735890 - RNA, 19 nt, Homo sapiens
  misc_RNA (1)...(19): siRNA sense strand
ccaucaagcugcugguaaa

SEQ ID NO: 735891 - RNA, 19 nt, Homo sapiens
  misc_RNA (1)...(19): siRNA sense strand
gcaaugucuucucuaacaa

SEQ ID NO: 735892 - RNA, 19 nt, Homo sapiens
  misc_RNA (1)...(19): siRNA sense strand
gaccugggcuccaucaucu

SEQ ID NO: 735893 - RNA, 19 nt, Homo sapiens
  misc_RNA (1)...(19): siRNA sense strand
ucaagcugcugguaaaugu

SEQ ID NO: 735894 - RNA, 19 nt, Homo sapiens
  misc_RNA (1)...(19): siRNA sense strand
gcagggcaaugucuucucu

SEQ ID NO: 735895 - RNA, 19 nt, Homo sapiens
  misc_RNA (1)...(19): siRNA sense strand
caucaucugugacaucaag

SEQ ID NO: 735896 - RNA, 19 nt, Homo sapiens
  misc_RNA (1)...(19): siRNA sense strand
ugugugcccugaucuugua

SEQ ID NO: 735897 - RNA, 19 nt, Homo sapiens
  misc_RNA (1)...(19): siRNA sense strand
ccaaggagaagcagacaug

SEQ ID NO: 735898 - RNA, 19 nt, Homo sapiens
  misc_RNA (1)...(19): siRNA sense strand
caccagaucccaaggagaa

SEQ ID NO: 735899 - RNA, 19 nt, Homo sapiens
  misc_RNA (1)...(19): siRNA sense strand
ggagacaucaauucgcuau

SEQ ID NO: 735900 - RNA, 19 nt, Homo sapiens
  misc_RNA (1)...(19): siRNA sense strand
gaauacugccagcaugaga

SEQ ID NO: 735901 - RNA, 19 nt, Homo sapiens
  misc_RNA (1)...(19): siRNA sense strand
ccucuuuguugaugucauu

SEQ ID NO: 735902 - RNA, 19 nt, Homo sapiens
  misc_RNA (1)...(19): siRNA sense strand
cgagggagagccacacuug

SEQ ID NO: 735903 - RNA, 19 nt, Homo sapiens
  misc_RNA (1)...(19): siRNA sense strand
aucaauggcucuuuauuag

SEQ ID NO: 735904 - RNA, 19 nt, Homo sapiens
  misc_RNA (1)...(19): siRNA sense strand
ccaacaccauccucaaguc

SEQ ID NO: 735905 - RNA, 19 nt, Homo sapiens
  misc_RNA (1)...(19): siRNA sense strand
gagcugggccgacagaaac

SEQ ID NO: 735906 - RNA, 19 nt, Homo sapiens
  misc_RNA (1)...(19): siRNA sense strand
cgugcuuucuuuccucuuu

SEQ ID NO: 735907 - RNA, 19 nt, Homo sapiens
  misc_RNA (1)...(19): siRNA sense strand
gcacuuaaaggugucuuca

SEQ ID NO: 735908 - RNA, 19 nt, Homo sapiens
  misc_RNA (1)...(19): siRNA sense strand
ggaccugggcuccaucauc

SEQ ID NO: 735909 - RNA, 19 nt, Homo sapiens
  misc_RNA (1)...(19): siRNA sense strand
aggagaagcagacauguga

SEQ ID NO: 735910 - RNA, 19 nt, Homo sapiens
  misc_RNA (1)...(19): siRNA sense strand
gaugugcgcgugcuuucuu

SEQ ID NO: 735911 - RNA, 19 nt, Homo sapiens
  misc_RNA (1)...(19): siRNA sense strand
agggcaaugucuucucuaa

SEQ ID NO: 735912 - RNA, 19 nt, Homo sapiens
  misc_RNA (1)...(19): siRNA sense strand
uagacgaggaggacuauga

SEQ ID NO: 735913 - RNA, 19 nt, Homo sapiens
  misc_RNA (1)...(19): siRNA sense strand
gagaagcagacaugugaca

SEQ ID NO: 735914 - RNA, 19 nt, Homo sapiens
  misc_RNA (1)...(19): siRNA sense strand
acuuaaaggugucuucauc

SEQ ID NO: 735915 - RNA, 19 nt, Homo sapiens
  misc_RNA (1)...(19): siRNA sense strand
ucucugagcucaccuaccu

SEQ ID NO: 735916 - RNA, 19 nt, Homo sapiens
  misc_RNA (1)...(19): siRNA sense strand
uggcgugacuacaucaaug

SEQ ID NO: 735917 - RNA, 19 nt, Homo sapiens
  misc_RNA (1)...(19): siRNA sense strand
uaacaagcaggacccacuu

SEQ ID NO: 735918 - RNA, 19 nt, Homo sapiens
  misc_RNA (1)...(19): siRNA sense strand
caucacagacucccucaag

SEQ ID NO: 735919 - RNA, 19 nt, Homo sapiens
  misc_RNA (1)...(19): siRNA sense strand
ccacuugagcgccaguuug

SEQ ID NO: 735920 - RNA, 19 nt, Homo sapiens
  misc_RNA (1)...(19): siRNA sense strand
ucaauggcucuuuauuaga

SEQ ID NO: 735921 - RNA, 19 nt, Homo sapiens
  misc_RNA (1)...(19): siRNA sense strand
uuucuuuccucuuuguuga

SEQ ID NO: 735922 - RNA, 19 nt, Homo sapiens
  misc_RNA (1)...(19): siRNA sense strand
gccaucaagcugcugguaa

SEQ ID NO: 735923 - RNA, 19 nt, Homo sapiens
  misc_RNA (1)...(19): siRNA sense strand
gagaugugcgcgugcuuuc

SEQ ID NO: 735924 - RNA, 19 nt, Homo sapiens
  misc_RNA (1)...(19): siRNA sense strand
ucacagacucccucaagca

SEQ ID NO: 735925 - RNA, 19 nt, Homo sapiens
  misc_RNA (1)...(19): siRNA sense strand
cgugggcacucaucugaca

SEQ ID NO: 735926 - RNA, 19 nt, Homo sapiens
  misc_RNA (1)...(19): siRNA sense strand
ccucagugauccagaacca

SEQ ID NO: 735927 - RNA, 19 nt, Homo sapiens
  misc_RNA (1)...(19): siRNA sense strand
cacuugagcgccaguuuga

SEQ ID NO: 735928 - RNA, 19 nt, Homo sapiens
  misc_RNA (1)...(19): siRNA sense strand
cagccugcaccgcauguuu

SEQ ID NO: 735929 - RNA, 19 nt, Homo sapiens
  misc_RNA (1)...(19): siRNA sense strand
uaaaggugucuucaucaca

SEQ ID NO: 735930 - RNA, 19 nt, Homo sapiens
  misc_RNA (1)...(19): siRNA sense strand
gugcuuucuuuccucuuug

SEQ ID NO: 735931 - RNA, 19 nt, Homo sapiens
  misc_RNA (1)...(19): siRNA sense strand
caagcugcugguaaaugua

SEQ ID NO: 735932 - RNA, 19 nt, Homo sapiens
  misc_RNA (1)...(19): siRNA sense strand
acuauccugugguguguug

SEQ ID NO: 735933 - RNA, 19 nt, Homo sapiens
  misc_RNA (1)...(19): siRNA sense strand
ugagcugggccgacagaaa

SEQ ID NO: 735934 - RNA, 19 nt, Homo sapiens
  misc_RNA (1)...(19): siRNA sense strand
ccacuucggguccucagau

SEQ ID NO: 735935 - RNA, 19 nt, Homo sapiens
  misc_RNA (1)...(19): siRNA sense strand
cgaaauggacgugacuucu

SEQ ID NO: 735936 - RNA, 19 nt, Homo sapiens
  misc_RNA (1)...(19): siRNA sense strand
uuaaaggugucuucaucac

SEQ ID NO: 735937 - RNA, 19 nt, Homo sapiens
  misc_RNA (1)...(19): siRNA sense strand
gccaacaccauccucaagu

SEQ ID NO: 735938 - RNA, 19 nt, Homo sapiens
  misc_RNA (1)...(19): siRNA sense strand
guccucagauguguagcaa

SEQ ID NO: 735939 - RNA, 19 nt, Homo sapiens
  misc_RNA (1)...(19): siRNA sense strand
gcugugugcccugaucuug

SEQ ID NO: 735940 - RNA, 19 nt, Homo sapiens
  misc_RNA (1)...(19): siRNA sense strand
uccaucaucugugacauca

SEQ ID NO: 735941 - RNA, 19 nt, Homo sapiens
  misc_RNA (1)...(19): siRNA sense strand
gaugcauucuggcgugacu

SEQ ID NO: 735942 - RNA, 19 nt, Homo sapiens
  misc_RNA (1)...(19): siRNA sense strand
ggacugauguacuuguuug

SEQ ID NO: 735943 - RNA, 19 nt, Homo sapiens
  misc_RNA (1)...(19): siRNA sense strand
ucaagaaacuguaggcaau

SEQ ID NO: 735944 - RNA, 19 nt, Homo sapiens
  misc_RNA (1)...(19): siRNA sense strand
ccaaguuccugcugcguuu

SEQ ID NO: 735945 - RNA, 19 nt, Homo sapiens
  misc_RNA (1)...(19): siRNA sense strand
ggaaacgcaucauacucuu

SEQ ID NO: 735946 - RNA, 19 nt, Homo sapiens
  misc_RNA (1)...(19): siRNA sense strand
gaaagcaggacccagaaug

SEQ ID NO: 735947 - RNA, 19 nt, Homo sapiens
  misc_RNA (1)...(19): siRNA sense strand
ccggaacacuugccuuuga

SEQ ID NO: 735948 - RNA, 19 nt, Homo sapiens
  misc_RNA (1)...(19): siRNA sense strand
gaaacuguaggcaauguug

SEQ ID NO: 735949 - RNA, 19 nt, Homo sapiens
  misc_RNA (1)...(19): siRNA sense strand
gagcaccccuggcuacaua

SEQ ID NO: 735950 - RNA, 19 nt, Homo sapiens
  misc_RNA (1)...(19): siRNA sense strand
gcuggcauauucaacuauu

SEQ ID NO: 735951 - RNA, 19 nt, Homo sapiens
  misc_RNA (1)...(19): siRNA sense strand
gaccggaacacuugccuuu

SEQ ID NO: 735952 - RNA, 19 nt, Homo sapiens
  misc_RNA (1)...(19): siRNA sense strand
acuauuaccucaucuucuu

SEQ ID NO: 735953 - RNA, 19 nt, Homo sapiens
  misc_RNA (1)...(19): siRNA sense strand
guccguugcuggcauauuc

SEQ ID NO: 735954 - RNA, 19 nt, Homo sapiens
  misc_RNA (1)...(19): siRNA sense strand
cagaggaccggaacacuug

SEQ ID NO: 735955 - RNA, 19 nt, Homo sapiens
  misc_RNA (1)...(19): siRNA sense strand
gggaaacgcaucauacucu

SEQ ID NO: 735956 - RNA, 19 nt, Homo sapiens
  misc_RNA (1)...(19): siRNA sense strand
aaccagaacuguguagaug

SEQ ID NO: 735957 - RNA, 19 nt, Homo sapiens
  misc_RNA (1)...(19): siRNA sense strand
cugauguacuuguuuguga

SEQ ID NO: 735958 - RNA, 19 nt, Homo sapiens
  misc_RNA (1)...(19): siRNA sense strand
caucauacucuuccuguuc

SEQ ID NO: 735959 - RNA, 19 nt, Homo sapiens
  misc_RNA (1)...(19): siRNA sense strand
caacuauuaccucaucuuc

SEQ ID NO: 735960 - RNA, 19 nt, Homo sapiens
  misc_RNA (1)...(19): siRNA sense strand
gcaucauacucuuccuguu

SEQ ID NO: 735961 - RNA, 19 nt, Homo sapiens
  misc_RNA (1)...(19): siRNA sense strand
guacuuugucgguuaccua

SEQ ID NO: 735962 - RNA, 19 nt, Homo sapiens
  misc_RNA (1)...(19): siRNA sense strand
cauguccguugcuggcaua

SEQ ID NO: 735963 - RNA, 19 nt, Homo sapiens
  misc_RNA (1)...(19): siRNA sense strand
ccagaggaccggaacacuu

SEQ ID NO: 735964 - RNA, 19 nt, Homo sapiens
  misc_RNA (1)...(19): siRNA sense strand
caaccagaacuguguagau

SEQ ID NO: 735965 - RNA, 19 nt, Homo sapiens
  misc_RNA (1)...(19): siRNA sense strand
uggauucuuugcccauaaa

SEQ ID NO: 735966 - RNA, 19 nt, Homo sapiens
  misc_RNA (1)...(19): siRNA sense strand
gaaacgcaucauacucuuc

SEQ ID NO: 735967 - RNA, 19 nt, Homo sapiens
  misc_RNA (1)...(19): siRNA sense strand
uugcuggacugauguacuu

SEQ ID NO: 735968 - RNA, 19 nt, Homo sapiens
  misc_RNA (1)...(19): siRNA sense strand
aggcaauguuguccuguug

SEQ ID NO: 735969 - RNA, 19 nt, Homo sapiens
  misc_RNA (1)...(19): siRNA sense strand
caagaaacuguaggcaaug

SEQ ID NO: 735970 - RNA, 19 nt, Homo sapiens
  misc_RNA (1)...(19): siRNA sense strand
cuggcauauucaacuauua

SEQ ID NO: 735971 - RNA, 19 nt, Homo sapiens
  misc_RNA (1)...(19): siRNA sense strand
uaggcaauguuguccuguu

SEQ ID NO: 735972 - RNA, 19 nt, Homo sapiens
  misc_RNA (1)...(19): siRNA sense strand
aagaaacuguaggcaaugu

SEQ ID NO: 735973 - RNA, 19 nt, Homo sapiens
  misc_RNA (1)...(19): siRNA sense strand
uugcuggcauauucaacua

SEQ ID NO: 735974 - RNA, 19 nt, Homo sapiens
  misc_RNA (1)...(19): siRNA sense strand
auucaacuauuaccucauc

SEQ ID NO: 735975 - RNA, 19 nt, Homo sapiens
  misc_RNA (1)...(19): siRNA sense strand
uaaaguggagcacgaaagc

SEQ ID NO: 735976 - RNA, 19 nt, Homo sapiens
  misc_RNA (1)...(19): siRNA sense strand
cauaaaguggagcacgaaa

SEQ ID NO: 735977 - RNA, 19 nt, Homo sapiens
  misc_RNA (1)...(19): siRNA sense strand
cgaaagcaggacccagaau

SEQ ID NO: 735978 - RNA, 19 nt, Homo sapiens
  misc_RNA (1)...(19): siRNA sense strand
caucagcgugguccagaau

SEQ ID NO: 735979 - RNA, 19 nt, Homo sapiens
  misc_RNA (1)...(19): siRNA sense strand
ggaggaaacuuuaaaucua

SEQ ID NO: 735980 - RNA, 19 nt, Homo sapiens
  misc_RNA (1)...(19): siRNA sense strand
ggaagaaguuuaugaagga

SEQ ID NO: 735981 - RNA, 19 nt, Homo sapiens
  misc_RNA (1)...(19): siRNA sense strand
gcagauacacucaaaguaa

SEQ ID NO: 735982 - RNA, 19 nt, Homo sapiens
  misc_RNA (1)...(19): siRNA sense strand
ccaaagcucugcaggaauu

SEQ ID NO: 735983 - RNA, 19 nt, Homo sapiens
  misc_RNA (1)...(19): siRNA sense strand
gaggaaaggucucaguuug

SEQ ID NO: 735984 - RNA, 19 nt, Homo sapiens
  misc_RNA (1)...(19): siRNA sense strand
ggaaaggucucaguuugaa

SEQ ID NO: 735985 - RNA, 19 nt, Homo sapiens
  misc_RNA (1)...(19): siRNA sense strand
ugaaagaucuggcuucugu

SEQ ID NO: 735986 - RNA, 19 nt, Homo sapiens
  misc_RNA (1)...(19): siRNA sense strand
caaagcagauacacucaaa

SEQ ID NO: 735987 - RNA, 19 nt, Homo sapiens
  misc_RNA (1)...(19): siRNA sense strand
ugagaaaguucgaaagaaa

SEQ ID NO: 735988 - RNA, 19 nt, Homo sapiens
  misc_RNA (1)...(19): siRNA sense strand
ggaagaagaagaagaagaa

SEQ ID NO: 735989 - RNA, 19 nt, Homo sapiens
  misc_RNA (1)...(19): siRNA sense strand
gaauuugacuuggccuuaa

SEQ ID NO: 735990 - RNA, 19 nt, Homo sapiens
  misc_RNA (1)...(19): siRNA sense strand
ggaaggcucugaaccaaag

SEQ ID NO: 735991 - RNA, 19 nt, Homo sapiens
  misc_RNA (1)...(19): siRNA sense strand
ggaagaugcugaaggagau

SEQ ID NO: 735992 - RNA, 19 nt, Homo sapiens
  misc_RNA (1)...(19): siRNA sense strand
guaaucaacuucacaaugc

SEQ ID NO: 735993 - RNA, 19 nt, Homo sapiens
  misc_RNA (1)...(19): siRNA sense strand
ggagaaagaagcaaaggaa

SEQ ID NO: 735994 - RNA, 19 nt, Homo sapiens
  misc_RNA (1)...(19): siRNA sense strand
gcaagaaggcccugaaaca

SEQ ID NO: 735995 - RNA, 19 nt, Homo sapiens
  misc_RNA (1)...(19): siRNA sense strand
cagauacacucaaaguaaa

SEQ ID NO: 735996 - RNA, 19 nt, Homo sapiens
  misc_RNA (1)...(19): siRNA sense strand
gaaccgcagugcugauuuc

SEQ ID NO: 735997 - RNA, 19 nt, Homo sapiens
  misc_RNA (1)...(19): siRNA sense strand
agaaggcccugaaacagua

SEQ ID NO: 735998 - RNA, 19 nt, Homo sapiens
  misc_RNA (1)...(19): siRNA sense strand
gagggcagccacuacauua

SEQ ID NO: 735999 - RNA, 19 nt, Homo sapiens
  misc_RNA (1)...(19): siRNA sense strand
gaggaaggcucagaagaug

SEQ ID NO: 736000 - RNA, 19 nt, Homo sapiens
  misc_RNA (1)...(19): siRNA sense strand
ggagaaagauguguaugca

SEQ ID NO: 736001 - RNA, 19 nt, Homo sapiens
  misc_RNA (1)...(19): siRNA sense strand
uaaaggaucggaagaagaa

SEQ ID NO: 736002 - RNA, 19 nt, Homo sapiens
  misc_RNA (1)...(19): siRNA sense strand
ugaaggagaucauccgaau

SEQ ID NO: 736003 - RNA, 19 nt, Homo sapiens
  misc_RNA (1)...(19): siRNA sense strand
gaagaacucaccaacacaa

SEQ ID NO: 736004 - RNA, 19 nt, Homo sapiens
  misc_RNA (1)...(19): siRNA sense strand
uggagcgucugauuuauaa

SEQ ID NO: 736005 - RNA, 19 nt, Homo sapiens
  misc_RNA (1)...(19): siRNA sense strand
ucaagagaaugaugaggaa

SEQ ID NO: 736006 - RNA, 19 nt, Homo sapiens
  misc_RNA (1)...(19): siRNA sense strand
ggaauuugacuuggccuua

SEQ ID NO: 736007 - RNA, 19 nt, Homo sapiens
  misc_RNA (1)...(19): siRNA sense strand
gaaaacagaggauaaagaa

SEQ ID NO: 736008 - RNA, 19 nt, Homo sapiens
  misc_RNA (1)...(19): siRNA sense strand
gagacgaggaggaaacuuu

SEQ ID NO: 736009 - RNA, 19 nt, Homo sapiens
  misc_RNA (1)...(19): siRNA sense strand
gaagaagaaaggacaggaa

SEQ ID NO: 736010 - RNA, 19 nt, Homo sapiens
  misc_RNA (1)...(19): siRNA sense strand
ggaaggcucagaagaugaa

SEQ ID NO: 736011 - RNA, 19 nt, Homo sapiens
  misc_RNA (1)...(19): siRNA sense strand
ccuaauaccaucaaacauu

SEQ ID NO: 736012 - RNA, 19 nt, Homo sapiens
  misc_RNA (1)...(19): siRNA sense strand
gaugcuggaugaguacuuu

SEQ ID NO: 736013 - RNA, 19 nt, Homo sapiens
  misc_RNA (1)...(19): siRNA sense strand
acaggaugcuggaugagua

SEQ ID NO: 736014 - RNA, 19 nt, Homo sapiens
  misc_RNA (1)...(19): siRNA sense strand
gaccuucacugaccaugug

SEQ ID NO: 736015 - RNA, 19 nt, Homo sapiens
  misc_RNA (1)...(19): siRNA sense strand
ggagaugacagcagaggaa

SEQ ID NO: 736016 - RNA, 19 nt, Homo sapiens
  misc_RNA (1)...(19): siRNA sense strand
gagaacauccucaccaaag

SEQ ID NO: 736017 - RNA, 19 nt, Homo sapiens
  misc_RNA (1)...(19): siRNA sense strand
ucagaagcccagaucaaua

SEQ ID NO: 736018 - RNA, 19 nt, Homo sapiens
  misc_RNA (1)...(19): siRNA sense strand
gugcauaccugugggucua

SEQ ID NO: 736019 - RNA, 19 nt, Homo sapiens
  misc_RNA (1)...(19): siRNA sense strand
gaagagggcagccacuaca

SEQ ID NO: 736020 - RNA, 19 nt, Homo sapiens
  misc_RNA (1)...(19): siRNA sense strand
cauggcaacuugucacaga

SEQ ID NO: 736021 - RNA, 19 nt, Homo sapiens
  misc_RNA (1)...(19): siRNA sense strand
acaggaagcaggaggauuu

SEQ ID NO: 736022 - RNA, 19 nt, Homo sapiens
  misc_RNA (1)...(19): siRNA sense strand
gagaucauccgaauguguu

SEQ ID NO: 736023 - RNA, 19 nt, Homo sapiens
  misc_RNA (1)...(19): siRNA sense strand
gauacaagaggaggaagua

SEQ ID NO: 736024 - RNA, 19 nt, Homo sapiens
  misc_RNA (1)...(19): siRNA sense strand
ggauauuugugaacagcaa

SEQ ID NO: 736025 - RNA, 19 nt, Homo sapiens
  misc_RNA (1)...(19): siRNA sense strand
gaagaaaggacaggaagca

SEQ ID NO: 736026 - RNA, 19 nt, Homo sapiens
  misc_RNA (1)...(19): siRNA sense strand
gguaaucaacuucacaaug

SEQ ID NO: 736027 - RNA, 19 nt, Homo sapiens
  misc_RNA (1)...(19): siRNA sense strand
gcccaguucugcaacauca

SEQ ID NO: 736028 - RNA, 19 nt, Homo sapiens
  misc_RNA (1)...(19): siRNA sense strand
gaaagauguguaugcaguu

SEQ ID NO: 736029 - RNA, 19 nt, Homo sapiens
  misc_RNA (1)...(19): siRNA sense strand
caaauuccgggacaagauu

SEQ ID NO: 736030 - RNA, 19 nt, Homo sapiens
  misc_RNA (1)...(19): siRNA sense strand
ugacagacgaggugaaaga

SEQ ID NO: 736031 - RNA, 19 nt, Homo sapiens
  misc_RNA (1)...(19): siRNA sense strand
uuucaacccugauuucguu

SEQ ID NO: 736032 - RNA, 19 nt, Homo sapiens
  misc_RNA (1)...(19): siRNA sense strand
agacgaggaggaaacuuua

SEQ ID NO: 736033 - RNA, 19 nt, Homo sapiens
  misc_RNA (1)...(19): siRNA sense strand
ugagagguccugccaagaa

SEQ ID NO: 736034 - RNA, 19 nt, Homo sapiens
  misc_RNA (1)...(19): siRNA sense strand
gaagaaguuuaugaaggau

SEQ ID NO: 736035 - RNA, 19 nt, Homo sapiens
  misc_RNA (1)...(19): siRNA sense strand
gacuuggccuuaagaggaa

SEQ ID NO: 736036 - RNA, 19 nt, Homo sapiens
  misc_RNA (1)...(19): siRNA sense strand
ggcccuggcugaugucaug

SEQ ID NO: 736037 - RNA, 19 nt, Homo sapiens
  misc_RNA (1)...(19): siRNA sense strand
gaacucaccaacacaagca

SEQ ID NO: 736038 - RNA, 19 nt, Homo sapiens
  misc_RNA (1)...(19): siRNA sense strand
gagagguccugccaagaag

SEQ ID NO: 736039 - RNA, 19 nt, Homo sapiens
  misc_RNA (1)...(19): siRNA sense strand
ugacgaggaccuucacuga

SEQ ID NO: 736040 - RNA, 19 nt, Homo sapiens
  misc_RNA (1)...(19): siRNA sense strand
gcuuggaugugaagucuca

SEQ ID NO: 736041 - RNA, 19 nt, Homo sapiens
  misc_RNA (1)...(19): siRNA sense strand
gaagaagaagaagaagaaa

SEQ ID NO: 736042 - RNA, 19 nt, Homo sapiens
  misc_RNA (1)...(19): siRNA sense strand
guaaaggaucggaagaaga

SEQ ID NO: 736043 - RNA, 19 nt, Homo sapiens
  misc_RNA (1)...(19): siRNA sense strand
ccacuacauuagaugagaa

SEQ ID NO: 736044 - RNA, 19 nt, Homo sapiens
  misc_RNA (1)...(19): siRNA sense strand
ggauaaagaagccaagucu

SEQ ID NO: 736045 - RNA, 19 nt, Homo sapiens
  misc_RNA (1)...(19): siRNA sense strand
ugccaaagcucugcaggaa

SEQ ID NO: 736046 - RNA, 19 nt, Homo sapiens
  misc_RNA (1)...(19): siRNA sense strand
gauccggccuaaucgugaa

SEQ ID NO: 736047 - RNA, 19 nt, Homo sapiens
  misc_RNA (1)...(19): siRNA sense strand
cagacgaggugaaagaucu

SEQ ID NO: 736048 - RNA, 19 nt, Homo sapiens
  misc_RNA (1)...(19): siRNA sense strand
gcauccaggugcacucugu

SEQ ID NO: 736049 - RNA, 19 nt, Homo sapiens
  misc_RNA (1)...(19): siRNA sense strand
gaaagaaaaggaaaacaga

SEQ ID NO: 736050 - RNA, 19 nt, Homo sapiens
  misc_RNA (1)...(19): siRNA sense strand
gaaaggucucaguuugaaa

SEQ ID NO: 736051 - RNA, 19 nt, Homo sapiens
  misc_RNA (1)...(19): siRNA sense strand
ccaaagaagagaggaagaa

SEQ ID NO: 736052 - RNA, 19 nt, Homo sapiens
  misc_RNA (1)...(19): siRNA sense strand
caucguggcagcuuuguug

SEQ ID NO: 736053 - RNA, 19 nt, Homo sapiens
  misc_RNA (1)...(19): siRNA sense strand
ugagaagauugagaaaguu

SEQ ID NO: 736054 - RNA, 19 nt, Homo sapiens
  misc_RNA (1)...(19): siRNA sense strand
gaacauccucaccaaagca

SEQ ID NO: 736055 - RNA, 19 nt, Homo sapiens
  misc_RNA (1)...(19): siRNA sense strand
uagaugagaagauugagaa

SEQ ID NO: 736056 - RNA, 19 nt, Homo sapiens
  misc_RNA (1)...(19): siRNA sense strand
gggacaagauugagaaaau

SEQ ID NO: 736057 - RNA, 19 nt, Homo sapiens
  misc_RNA (1)...(19): siRNA sense strand
ggagaucauccgaaugugu

SEQ ID NO: 736058 - RNA, 19 nt, Homo sapiens
  misc_RNA (1)...(19): siRNA sense strand
gagaagauugagaaaguuc

SEQ ID NO: 736059 - RNA, 19 nt, Homo sapiens
  misc_RNA (1)...(19): siRNA sense strand
ccagaucaauacagcaaag

SEQ ID NO: 736060 - RNA, 19 nt, Homo sapiens
  misc_RNA (1)...(19): siRNA sense strand
gggcagccacuacauuaga

SEQ ID NO: 736061 - RNA, 19 nt, Homo sapiens
  misc_RNA (1)...(19): siRNA sense strand
ggugaaagaucuggcuucu

SEQ ID NO: 736062 - RNA, 19 nt, Homo sapiens
  misc_RNA (1)...(19): siRNA sense strand
augagaagauugagaaagu

SEQ ID NO: 736063 - RNA, 19 nt, Homo sapiens
  misc_RNA (1)...(19): siRNA sense strand
gaggaggaaacuuuaaauc

SEQ ID NO: 736064 - RNA, 19 nt, Homo sapiens
  misc_RNA (1)...(19): siRNA sense strand
ggacaagauugagaaaaug

SEQ ID NO: 736065 - RNA, 19 nt, Homo sapiens
  misc_RNA (1)...(19): siRNA sense strand
ggagacugacuacucauca

SEQ ID NO: 736066 - RNA, 19 nt, Homo sapiens
  misc_RNA (1)...(19): siRNA sense strand
gaucggaagaagaagaaga

SEQ ID NO: 736067 - RNA, 19 nt, Homo sapiens
  misc_RNA (1)...(19): siRNA sense strand
gaugaagaacucaccaaca

SEQ ID NO: 736068 - RNA, 19 nt, Homo sapiens
  misc_RNA (1)...(19): siRNA sense strand
gcgcagauguuugcugaac

SEQ ID NO: 736069 - RNA, 19 nt, Homo sapiens
  misc_RNA (1)...(19): siRNA sense strand
aagaagagaggaagaagga

SEQ ID NO: 736070 - RNA, 19 nt, Homo sapiens
  misc_RNA (1)...(19): siRNA sense strand
gaaggaggcagugguccaa

SEQ ID NO: 736071 - RNA, 19 nt, Homo sapiens
  misc_RNA (1)...(19): siRNA sense strand
gcauaccugugggucuauu

SEQ ID NO: 736072 - RNA, 19 nt, Homo sapiens
  misc_RNA (1)...(19): siRNA sense strand
ugagcuccauggcaacuug

SEQ ID NO: 736073 - RNA, 19 nt, Homo sapiens
  misc_RNA (1)...(19): siRNA sense strand
ugaagaaaggaaacaguug

SEQ ID NO: 736074 - RNA, 19 nt, Homo sapiens
  misc_RNA (1)...(19): siRNA sense strand
ccucaaggcgcagauguuu

SEQ ID NO: 736075 - RNA, 19 nt, Homo sapiens
  misc_RNA (1)...(19): siRNA sense strand
gaaccauaggcgaggauga

SEQ ID NO: 736076 - RNA, 19 nt, Homo sapiens
  misc_RNA (1)...(19): siRNA sense strand
gugcugggcagacgacaaa

SEQ ID NO: 736077 - RNA, 19 nt, Homo sapiens
  misc_RNA (1)...(19): siRNA sense strand
ucacaaugccuaauaccau

SEQ ID NO: 736078 - RNA, 19 nt, Homo sapiens
  misc_RNA (1)...(19): siRNA sense strand
cccguggacuugacauuga

SEQ ID NO: 736079 - RNA, 19 nt, Homo sapiens
  misc_RNA (1)...(19): siRNA sense strand
ggacaaaguuuaccaaaug

SEQ ID NO: 736080 - RNA, 19 nt, Homo sapiens
  misc_RNA (1)...(19): siRNA sense strand
caacgacuaugaagaauuc

SEQ ID NO: 736081 - RNA, 19 nt, Homo sapiens
  misc_RNA (1)...(19): siRNA sense strand
gaucagaauugaggucuuu

SEQ ID NO: 736082 - RNA, 19 nt, Homo sapiens
  misc_RNA (1)...(19): siRNA sense strand
gaagugagcagaucagaau

SEQ ID NO: 736083 - RNA, 19 nt, Homo sapiens
  misc_RNA (1)...(19): siRNA sense strand
gaggaaaucuccaaaugca

SEQ ID NO: 736084 - RNA, 19 nt, Homo sapiens
  misc_RNA (1)...(19): siRNA sense strand
ggaaaucuccaaaugcaaa

SEQ ID NO: 736085 - RNA, 19 nt, Homo sapiens
  misc_RNA (1)...(19): siRNA sense strand
caaacuggaugaugacaug

SEQ ID NO: 736086 - RNA, 19 nt, Homo sapiens
  misc_RNA (1)...(19): siRNA sense strand
agacuggauuugcugauua

SEQ ID NO: 736087 - RNA, 19 nt, Homo sapiens
  misc_RNA (1)...(19): siRNA sense strand
gacaugaaccugcuggaua

SEQ ID NO: 736088 - RNA, 19 nt, Homo sapiens
  misc_RNA (1)...(19): siRNA sense strand
gaagauaaucaacgacuau

SEQ ID NO: 736089 - RNA, 19 nt, Homo sapiens
  misc_RNA (1)...(19): siRNA sense strand
gacaaaguuuaccaaauga

SEQ ID NO: 736090 - RNA, 19 nt, Homo sapiens
  misc_RNA (1)...(19): siRNA sense strand
cagcagaaaucuuuaugau

SEQ ID NO: 736091 - RNA, 19 nt, Homo sapiens
  misc_RNA (1)...(19): siRNA sense strand
gaaaggaggagauggaaag

SEQ ID NO: 736092 - RNA, 19 nt, Homo sapiens
  misc_RNA (1)...(19): siRNA sense strand
gauaaucaacgacuaugaa

SEQ ID NO: 736093 - RNA, 19 nt, Homo sapiens
  misc_RNA (1)...(19): siRNA sense strand
gaucuggccucccucaagu

SEQ ID NO: 736094 - RNA, 19 nt, Homo sapiens
  misc_RNA (1)...(19): siRNA sense strand
gaauugaggucuuuuaagu

SEQ ID NO: 736095 - RNA, 19 nt, Homo sapiens
  misc_RNA (1)...(19): siRNA sense strand
aagaggaaaucuccaaaug

SEQ ID NO: 736096 - RNA, 19 nt, Homo sapiens
  misc_RNA (1)...(19): siRNA sense strand
gcaagaacccaucaaggau

SEQ ID NO: 736097 - RNA, 19 nt, Homo sapiens
  misc_RNA (1)...(19): siRNA sense strand
ggaaagggaacuucagaca

SEQ ID NO: 736098 - RNA, 19 nt, Homo sapiens
  misc_RNA (1)...(19): siRNA sense strand
gcccaaacuucacagcauu

SEQ ID NO: 736099 - RNA, 19 nt, Homo sapiens
  misc_RNA (1)...(19): siRNA sense strand
acaugaaccugcuggauau

SEQ ID NO: 736100 - RNA, 19 nt, Homo sapiens
  misc_RNA (1)...(19): siRNA sense strand
gucaugcucuaucagauuu

SEQ ID NO: 736101 - RNA, 19 nt, Homo sapiens
  misc_RNA (1)...(19): siRNA sense strand
ucauagagauggagaagag

SEQ ID NO: 736102 - RNA, 19 nt, Homo sapiens
  misc_RNA (1)...(19): siRNA sense strand
ucuaucagauuucagaaga

SEQ ID NO: 736103 - RNA, 19 nt, Homo sapiens
  misc_RNA (1)...(19): siRNA sense strand
ugaagauaaucaacgacua

SEQ ID NO: 736104 - RNA, 19 nt, Homo sapiens
  misc_RNA (1)...(19): siRNA sense strand
acaagagccugcugaagau

SEQ ID NO: 736105 - RNA, 19 nt, Homo sapiens
  misc_RNA (1)...(19): siRNA sense strand
aaugcaaacuggaugauga

SEQ ID NO: 736106 - RNA, 19 nt, Homo sapiens
  misc_RNA (1)...(19): siRNA sense strand
uggauuugcugauuaccua

SEQ ID NO: 736107 - RNA, 19 nt, Homo sapiens
  misc_RNA (1)...(19): siRNA sense strand
gugagcagaucagaauuga

SEQ ID NO: 736108 - RNA, 19 nt, Homo sapiens
  misc_RNA (1)...(19): siRNA sense strand
gaauggaacacacuuggau

SEQ ID NO: 736109 - RNA, 19 nt, Homo sapiens
  misc_RNA (1)...(19): siRNA sense strand
gggagaaagugcccaaacu

SEQ ID NO: 736110 - RNA, 19 nt, Homo sapiens
  misc_RNA (1)...(19): siRNA sense strand
aaucaacgacuaugaagaa

SEQ ID NO: 736111 - RNA, 19 nt, Homo sapiens
  misc_RNA (1)...(19): siRNA sense strand
ccaggcagggcucaaauuu

SEQ ID NO: 736112 - RNA, 19 nt, Homo sapiens
  misc_RNA (1)...(19): siRNA sense strand
gcaagaggaaaucuccaaa

SEQ ID NO: 736113 - RNA, 19 nt, Homo sapiens
  misc_RNA (1)...(19): siRNA sense strand
gaaaguuggacauccugaa

SEQ ID NO: 736114 - RNA, 19 nt, Homo sapiens
  misc_RNA (1)...(19): siRNA sense strand
gaucaucaacaaucacaau

SEQ ID NO: 736115 - RNA, 19 nt, Homo sapiens
  misc_RNA (1)...(19): siRNA sense strand
gacuucagcagaaaucuuu

SEQ ID NO: 736116 - RNA, 19 nt, Homo sapiens
  misc_RNA (1)...(19): siRNA sense strand
cagaagaagugagcagauc

SEQ ID NO: 736117 - RNA, 19 nt, Homo sapiens
  misc_RNA (1)...(19): siRNA sense strand
aacaagagccugcugaaga

SEQ ID NO: 736118 - RNA, 19 nt, Homo sapiens
  misc_RNA (1)...(19): siRNA sense strand
cugauuaccuaccuaaaca

SEQ ID NO: 736119 - RNA, 19 nt, Homo sapiens
  misc_RNA (1)...(19): siRNA sense strand
ggucaugcucuaucagauu

SEQ ID NO: 736120 - RNA, 19 nt, Homo sapiens
  misc_RNA (1)...(19): siRNA sense strand
gaagcaagaacccaucaag

SEQ ID NO: 736121 - RNA, 19 nt, Homo sapiens
  misc_RNA (1)...(19): siRNA sense strand
uuaccuaccuaaacacuag

SEQ ID NO: 736122 - RNA, 19 nt, Homo sapiens
  misc_RNA (1)...(19): siRNA sense strand
aggcagggcucaaauuucu

SEQ ID NO: 736123 - RNA, 19 nt, Homo sapiens
  misc_RNA (1)...(19): siRNA sense strand
cgaauuaauagacuggauu

SEQ ID NO: 736124 - RNA, 19 nt, Homo sapiens
  misc_RNA (1)...(19): siRNA sense strand
caagaggaaaucuccaaau

SEQ ID NO: 736125 - RNA, 19 nt, Homo sapiens
  misc_RNA (1)...(19): siRNA sense strand
ccaaaugcaaacuggauga

SEQ ID NO: 736126 - RNA, 19 nt, Homo sapiens
  misc_RNA (1)...(19): siRNA sense strand
ggacuucagcagaaaucuu

SEQ ID NO: 736127 - RNA, 19 nt, Homo sapiens
  misc_RNA (1)...(19): siRNA sense strand
aagagaauguuggaggaaa

SEQ ID NO: 736128 - RNA, 19 nt, Homo sapiens
  misc_RNA (1)...(19): siRNA sense strand
ggaauggaacacacuugga

SEQ ID NO: 736129 - RNA, 19 nt, Homo sapiens
  misc_RNA (1)...(19): siRNA sense strand
uggacaaaguuuaccaaau

SEQ ID NO: 736130 - RNA, 19 nt, Homo sapiens
  misc_RNA (1)...(19): siRNA sense strand
aaaguuggacauccugaaa

SEQ ID NO: 736131 - RNA, 19 nt, Homo sapiens
  misc_RNA (1)...(19): siRNA sense strand
gcucaaauuucugccuaca

SEQ ID NO: 736132 - RNA, 19 nt, Homo sapiens
  misc_RNA (1)...(19): siRNA sense strand
uagacuggauuugcugauu

SEQ ID NO: 736133 - RNA, 19 nt, Homo sapiens
  misc_RNA (1)...(19): siRNA sense strand
ggacuacauuccgcaaagg

SEQ ID NO: 736134 - RNA, 19 nt, Homo sapiens
  misc_RNA (1)...(19): siRNA sense strand
uaucagauuucagaagaag

SEQ ID NO: 736135 - RNA, 19 nt, Homo sapiens
  misc_RNA (1)...(19): siRNA sense strand
uuaauagacuggauuugcu

SEQ ID NO: 736136 - RNA, 19 nt, Homo sapiens
  misc_RNA (1)...(19): siRNA sense strand
gggauacugucugaucauc

SEQ ID NO: 736137 - RNA, 19 nt, Homo sapiens
  misc_RNA (1)...(19): siRNA sense strand
aagagucugugcccaaauc

SEQ ID NO: 736138 - RNA, 19 nt, Homo sapiens
  misc_RNA (1)...(19): siRNA sense strand
caagagccugcugaagaua

SEQ ID NO: 736139 - RNA, 19 nt, Homo sapiens
  misc_RNA (1)...(19): siRNA sense strand
cuagaaaggaggagaugga

SEQ ID NO: 736140 - RNA, 19 nt, Homo sapiens
  misc_RNA (1)...(19): siRNA sense strand
ggagauggaaagggaacuu

SEQ ID NO: 736141 - RNA, 19 nt, Homo sapiens
  misc_RNA (1)...(19): siRNA sense strand
aggaugccuugauguuauu

SEQ ID NO: 736142 - RNA, 19 nt, Homo sapiens
  misc_RNA (1)...(19): siRNA sense strand
ucaacgacuaugaagaauu

SEQ ID NO: 736143 - RNA, 19 nt, Homo sapiens
  misc_RNA (1)...(19): siRNA sense strand
gaauguuggaggaaagcaa

SEQ ID NO: 736144 - RNA, 19 nt, Homo sapiens
  misc_RNA (1)...(19): siRNA sense strand
gagaaggaaaguuggacau

SEQ ID NO: 736145 - RNA, 19 nt, Homo sapiens
  misc_RNA (1)...(19): siRNA sense strand
gaagaagugagcagaucag

SEQ ID NO: 736146 - RNA, 19 nt, Homo sapiens
  misc_RNA (1)...(19): siRNA sense strand
gacuggauuugcugauuac

SEQ ID NO: 736147 - RNA, 19 nt, Homo sapiens
  misc_RNA (1)...(19): siRNA sense strand
agcaagaacccaucaagga

SEQ ID NO: 736148 - RNA, 19 nt, Homo sapiens
  misc_RNA (1)...(19): siRNA sense strand
caacaagagccugcugaag

SEQ ID NO: 736149 - RNA, 19 nt, Homo sapiens
  misc_RNA (1)...(19): siRNA sense strand
ucagcagaaaucuuuauga

SEQ ID NO: 736150 - RNA, 19 nt, Homo sapiens
  misc_RNA (1)...(19): siRNA sense strand
cugcucuuccgaauuaaua

SEQ ID NO: 736151 - RNA, 19 nt, Homo sapiens
  misc_RNA (1)...(19): siRNA sense strand
ggaagcaagaacccaucaa

SEQ ID NO: 736152 - RNA, 19 nt, Homo sapiens
  misc_RNA (1)...(19): siRNA sense strand
ucagauuucagaagaagug

SEQ ID NO: 736153 - RNA, 19 nt, Homo sapiens
  misc_RNA (1)...(19): siRNA sense strand
gcugauuaccuaccuaaac

SEQ ID NO: 736154 - RNA, 19 nt, Homo sapiens
  misc_RNA (1)...(19): siRNA sense strand
cccaaacuucacagcauua

SEQ ID NO: 736155 - RNA, 19 nt, Homo sapiens
  misc_RNA (1)...(19): siRNA sense strand
ucaacaagagccugcugaa

SEQ ID NO: 736156 - RNA, 19 nt, Homo sapiens
  misc_RNA (1)...(19): siRNA sense strand
ccugggagaaggaaaguug

SEQ ID NO: 736157 - RNA, 19 nt, Homo sapiens
  misc_RNA (1)...(19): siRNA sense strand
ugaaccugcuggauauuuu

SEQ ID NO: 736158 - RNA, 19 nt, Homo sapiens
  misc_RNA (1)...(19): siRNA sense strand
gcaaucuguccuuccugaa

SEQ ID NO: 736159 - RNA, 19 nt, Homo sapiens
  misc_RNA (1)...(19): siRNA sense strand
agagaauguuggaggaaag

SEQ ID NO: 736160 - RNA, 19 nt, Homo sapiens
  misc_RNA (1)...(19): siRNA sense strand
gcaaacuggaugaugacau

SEQ ID NO: 736161 - RNA, 19 nt, Homo sapiens
  misc_RNA (1)...(19): siRNA sense strand
aaagcaaucuguccuuccu

SEQ ID NO: 736162 - RNA, 19 nt, Homo sapiens
  misc_RNA (1)...(19): siRNA sense strand
cuaucagauuucagaagaa

SEQ ID NO: 736163 - RNA, 19 nt, Homo sapiens
  misc_RNA (1)...(19): siRNA sense strand
gggucaugcucuaucagau

SEQ ID NO: 736164 - RNA, 19 nt, Homo sapiens
  misc_RNA (1)...(19): siRNA sense strand
aaaagagucugugcccaaa

SEQ ID NO: 736165 - RNA, 19 nt, Homo sapiens
  misc_RNA (1)...(19): siRNA sense strand
caaaagcacgggagaaagu

SEQ ID NO: 736166 - RNA, 19 nt, Homo sapiens
  misc_RNA (1)...(19): siRNA sense strand
gugcccaaaucaacaagag

SEQ ID NO: 736167 - RNA, 19 nt, Homo sapiens
  misc_RNA (1)...(19): siRNA sense strand
uggacuacauuccgcaaag

SEQ ID NO: 736168 - RNA, 19 nt, Homo sapiens
  misc_RNA (1)...(19): siRNA sense strand
uaaucaacgacuaugaaga

SEQ ID NO: 736169 - RNA, 19 nt, Homo sapiens
  misc_RNA (1)...(19): siRNA sense strand
agagccugcugaagauaau

SEQ ID NO: 736170 - RNA, 19 nt, Homo sapiens
  misc_RNA (1)...(19): siRNA sense strand
aagagccugcugaagauaa

SEQ ID NO: 736171 - RNA, 19 nt, Homo sapiens
  misc_RNA (1)...(19): siRNA sense strand
gcucuuccgaauuaauaga

SEQ ID NO: 736172 - RNA, 19 nt, Homo sapiens
  misc_RNA (1)...(19): siRNA sense strand
ccgaauuaauagacuggau

SEQ ID NO: 736173 - RNA, 19 nt, Homo sapiens
  misc_RNA (1)...(19): siRNA sense strand
ggacaaaguuuaccaaaug

SEQ ID NO: 736174 - RNA, 19 nt, Homo sapiens
  misc_RNA (1)...(19): siRNA sense strand
caacgacuaugaagaauuc

SEQ ID NO: 736175 - RNA, 19 nt, Homo sapiens
  misc_RNA (1)...(19): siRNA sense strand
gaucagaauugaggucuuu

SEQ ID NO: 736176 - RNA, 19 nt, Homo sapiens
  misc_RNA (1)...(19): siRNA sense strand
gaagugagcagaucagaau

SEQ ID NO: 736177 - RNA, 19 nt, Homo sapiens
  misc_RNA (1)...(19): siRNA sense strand
gaggaaaucuccaaaugca

SEQ ID NO: 736178 - RNA, 19 nt, Homo sapiens
  misc_RNA (1)...(19): siRNA sense strand
ggaaaucuccaaaugcaaa

SEQ ID NO: 736179 - RNA, 19 nt, Homo sapiens
  misc_RNA (1)...(19): siRNA sense strand
caaacuggaugaugacaug

SEQ ID NO: 736180 - RNA, 19 nt, Homo sapiens
  misc_RNA (1)...(19): siRNA sense strand
agacuggauuugcugauua

SEQ ID NO: 736181 - RNA, 19 nt, Homo sapiens
  misc_RNA (1)...(19): siRNA sense strand
gacaugaaccugcuggaua

SEQ ID NO: 736182 - RNA, 19 nt, Homo sapiens
  misc_RNA (1)...(19): siRNA sense strand
gaagauaaucaacgacuau

SEQ ID NO: 736183 - RNA, 19 nt, Homo sapiens
  misc_RNA (1)...(19): siRNA sense strand
gacaaaguuuaccaaauga

SEQ ID NO: 736184 - RNA, 19 nt, Homo sapiens
  misc_RNA (1)...(19): siRNA sense strand
cagcagaaaucuuuaugau

SEQ ID NO: 736185 - RNA, 19 nt, Homo sapiens
  misc_RNA (1)...(19): siRNA sense strand
gaaaggaggagauggaaag

SEQ ID NO: 736186 - RNA, 19 nt, Homo sapiens
  misc_RNA (1)...(19): siRNA sense strand
gauaaucaacgacuaugaa

SEQ ID NO: 736187 - RNA, 19 nt, Homo sapiens
  misc_RNA (1)...(19): siRNA sense strand
gaucuggccucccucaagu

SEQ ID NO: 736188 - RNA, 19 nt, Homo sapiens
  misc_RNA (1)...(19): siRNA sense strand
gaauugaggucuuuuaagu

SEQ ID NO: 736189 - RNA, 19 nt, Homo sapiens
  misc_RNA (1)...(19): siRNA sense strand
aagaggaaaucuccaaaug

SEQ ID NO: 736190 - RNA, 19 nt, Homo sapiens
  misc_RNA (1)...(19): siRNA sense strand
gcaagaacccaucaaggau

SEQ ID NO: 736191 - RNA, 19 nt, Homo sapiens
  misc_RNA (1)...(19): siRNA sense strand
ggaaagggaacuucagaca

SEQ ID NO: 736192 - RNA, 19 nt, Homo sapiens
  misc_RNA (1)...(19): siRNA sense strand
gcccaaacuucacagcauu

SEQ ID NO: 736193 - RNA, 19 nt, Homo sapiens
  misc_RNA (1)...(19): siRNA sense strand
acaugaaccugcuggauau

SEQ ID NO: 736194 - RNA, 19 nt, Homo sapiens
  misc_RNA (1)...(19): siRNA sense strand
gucaugcucuaucagauuu

SEQ ID NO: 736195 - RNA, 19 nt, Homo sapiens
  misc_RNA (1)...(19): siRNA sense strand
ucauagagauggagaagag

SEQ ID NO: 736196 - RNA, 19 nt, Homo sapiens
  misc_RNA (1)...(19): siRNA sense strand
ucuaucagauuucagaaga

SEQ ID NO: 736197 - RNA, 19 nt, Homo sapiens
  misc_RNA (1)...(19): siRNA sense strand
ugaagauaaucaacgacua

SEQ ID NO: 736198 - RNA, 19 nt, Homo sapiens
  misc_RNA (1)...(19): siRNA sense strand
acaagagccugcugaagau

SEQ ID NO: 736199 - RNA, 19 nt, Homo sapiens
  misc_RNA (1)...(19): siRNA sense strand
aaugcaaacuggaugauga

SEQ ID NO: 736200 - RNA, 19 nt, Homo sapiens
  misc_RNA (1)...(19): siRNA sense strand
uggauuugcugauuaccua

SEQ ID NO: 736201 - RNA, 19 nt, Homo sapiens
  misc_RNA (1)...(19): siRNA sense strand
gugagcagaucagaauuga

SEQ ID NO: 736202 - RNA, 19 nt, Homo sapiens
  misc_RNA (1)...(19): siRNA sense strand
gaauggaacacacuuggau

SEQ ID NO: 736203 - RNA, 19 nt, Homo sapiens
  misc_RNA (1)...(19): siRNA sense strand
gggagaaagugcccaaacu

SEQ ID NO: 736204 - RNA, 19 nt, Homo sapiens
  misc_RNA (1)...(19): siRNA sense strand
aaucaacgacuaugaagaa

SEQ ID NO: 736205 - RNA, 19 nt, Homo sapiens
  misc_RNA (1)...(19): siRNA sense strand
ccaggcagggcucaaauuu

SEQ ID NO: 736206 - RNA, 19 nt, Homo sapiens
  misc_RNA (1)...(19): siRNA sense strand
gcaagaggaaaucuccaaa

SEQ ID NO: 736207 - RNA, 19 nt, Homo sapiens
  misc_RNA (1)...(19): siRNA sense strand
gaaaguuggacauccugaa

SEQ ID NO: 736208 - RNA, 19 nt, Homo sapiens
  misc_RNA (1)...(19): siRNA sense strand
gaucaucaacaaucacaau

SEQ ID NO: 736209 - RNA, 19 nt, Homo sapiens
  misc_RNA (1)...(19): siRNA sense strand
gacuucagcagaaaucuuu

SEQ ID NO: 736210 - RNA, 19 nt, Homo sapiens
  misc_RNA (1)...(19): siRNA sense strand
cagaagaagugagcagauc

SEQ ID NO: 736211 - RNA, 19 nt, Homo sapiens
  misc_RNA (1)...(19): siRNA sense strand
aacaagagccugcugaaga

SEQ ID NO: 736212 - RNA, 19 nt, Homo sapiens
  misc_RNA (1)...(19): siRNA sense strand
cugauuaccuaccuaaaca

SEQ ID NO: 736213 - RNA, 19 nt, Homo sapiens
  misc_RNA (1)...(19): siRNA sense strand
ggucaugcucuaucagauu

SEQ ID NO: 736214 - RNA, 19 nt, Homo sapiens
  misc_RNA (1)...(19): siRNA sense strand
gaagcaagaacccaucaag

SEQ ID NO: 736215 - RNA, 19 nt, Homo sapiens
  misc_RNA (1)...(19): siRNA sense strand
uuaccuaccuaaacacuag

SEQ ID NO: 736216 - RNA, 19 nt, Homo sapiens
  misc_RNA (1)...(19): siRNA sense strand
aggcagggcucaaauuucu

SEQ ID NO: 736217 - RNA, 19 nt, Homo sapiens
  misc_RNA (1)...(19): siRNA sense strand
cgaauuaauagacuggauu

SEQ ID NO: 736218 - RNA, 19 nt, Homo sapiens
  misc_RNA (1)...(19): siRNA sense strand
caagaggaaaucuccaaau

SEQ ID NO: 736219 - RNA, 19 nt, Homo sapiens
  misc_RNA (1)...(19): siRNA sense strand
ccaaaugcaaacuggauga

SEQ ID NO: 736220 - RNA, 19 nt, Homo sapiens
  misc_RNA (1)...(19): siRNA sense strand
ggacuucagcagaaaucuu

SEQ ID NO: 736221 - RNA, 19 nt, Homo sapiens
  misc_RNA (1)...(19): siRNA sense strand
aagagaauguuggaggaaa

SEQ ID NO: 736222 - RNA, 19 nt, Homo sapiens
  misc_RNA (1)...(19): siRNA sense strand
ggaauggaacacacuugga

SEQ ID NO: 736223 - RNA, 19 nt, Homo sapiens
  misc_RNA (1)...(19): siRNA sense strand
uggacaaaguuuaccaaau

SEQ ID NO: 736224 - RNA, 19 nt, Homo sapiens
  misc_RNA (1)...(19): siRNA sense strand
aaaguuggacauccugaaa

SEQ ID NO: 736225 - RNA, 19 nt, Homo sapiens
  misc_RNA (1)...(19): siRNA sense strand
gcucaaauuucugccuaca

SEQ ID NO: 736226 - RNA, 19 nt, Homo sapiens
  misc_RNA (1)...(19): siRNA sense strand
uagacuggauuugcugauu

SEQ ID NO: 736227 - RNA, 19 nt, Homo sapiens
  misc_RNA (1)...(19): siRNA sense strand
ggacuacauuccgcaaagg

SEQ ID NO: 736228 - RNA, 19 nt, Homo sapiens
  misc_RNA (1)...(19): siRNA sense strand
uaucagauuucagaagaag

SEQ ID NO: 736229 - RNA, 19 nt, Homo sapiens
  misc_RNA (1)...(19): siRNA sense strand
uuaauagacuggauuugcu

SEQ ID NO: 736230 - RNA, 19 nt, Homo sapiens
  misc_RNA (1)...(19): siRNA sense strand
gggauacugucugaucauc

SEQ ID NO: 736231 - RNA, 19 nt, Homo sapiens
  misc_RNA (1)...(19): siRNA sense strand
aagagucugugcccaaauc

SEQ ID NO: 736232 - RNA, 19 nt, Homo sapiens
  misc_RNA (1)...(19): siRNA sense strand
caagagccugcugaagaua

SEQ ID NO: 736233 - RNA, 19 nt, Homo sapiens
  misc_RNA (1)...(19): siRNA sense strand
cuagaaaggaggagaugga

SEQ ID NO: 736234 - RNA, 19 nt, Homo sapiens
  misc_RNA (1)...(19): siRNA sense strand
ggagauggaaagggaacuu

SEQ ID NO: 736235 - RNA, 19 nt, Homo sapiens
  misc_RNA (1)...(19): siRNA sense strand
aggaugccuugauguuauu

SEQ ID NO: 736236 - RNA, 19 nt, Homo sapiens
  misc_RNA (1)...(19): siRNA sense strand
ucaacgacuaugaagaauu

SEQ ID NO: 736237 - RNA, 19 nt, Homo sapiens
  misc_RNA (1)...(19): siRNA sense strand
gaauguuggaggaaagcaa

SEQ ID NO: 736238 - RNA, 19 nt, Homo sapiens
  misc_RNA (1)...(19): siRNA sense strand
gagaaggaaaguuggacau

SEQ ID NO: 736239 - RNA, 19 nt, Homo sapiens
  misc_RNA (1)...(19): siRNA sense strand
gaagaagugagcagaucag

SEQ ID NO: 736240 - RNA, 19 nt, Homo sapiens
  misc_RNA (1)...(19): siRNA sense strand
gacuggauuugcugauuac

SEQ ID NO: 736241 - RNA, 19 nt, Homo sapiens
  misc_RNA (1)...(19): siRNA sense strand
agcaagaacccaucaagga

SEQ ID NO: 736242 - RNA, 19 nt, Homo sapiens
  misc_RNA (1)...(19): siRNA sense strand
caacaagagccugcugaag

SEQ ID NO: 736243 - RNA, 19 nt, Homo sapiens
  misc_RNA (1)...(19): siRNA sense strand
ucagcagaaaucuuuauga

SEQ ID NO: 736244 - RNA, 19 nt, Homo sapiens
  misc_RNA (1)...(19): siRNA sense strand
cugcucuuccgaauuaaua

SEQ ID NO: 736245 - RNA, 19 nt, Homo sapiens
  misc_RNA (1)...(19): siRNA sense strand
ggaagcaagaacccaucaa

SEQ ID NO: 736246 - RNA, 19 nt, Homo sapiens
  misc_RNA (1)...(19): siRNA sense strand
ucagauuucagaagaagug

SEQ ID NO: 736247 - RNA, 19 nt, Homo sapiens
  misc_RNA (1)...(19): siRNA sense strand
gcugauuaccuaccuaaac

SEQ ID NO: 736248 - RNA, 19 nt, Homo sapiens
  misc_RNA (1)...(19): siRNA sense strand
cccaaacuucacagcauua

SEQ ID NO: 736249 - RNA, 19 nt, Homo sapiens
  misc_RNA (1)...(19): siRNA sense strand
ucaacaagagccugcugaa

SEQ ID NO: 736250 - RNA, 19 nt, Homo sapiens
  misc_RNA (1)...(19): siRNA sense strand
ccugggagaaggaaaguug

SEQ ID NO: 736251 - RNA, 19 nt, Homo sapiens
  misc_RNA (1)...(19): siRNA sense strand
ugaaccugcuggauauuuu

SEQ ID NO: 736252 - RNA, 19 nt, Homo sapiens
  misc_RNA (1)...(19): siRNA sense strand
gcaaucuguccuuccugaa

SEQ ID NO: 736253 - RNA, 19 nt, Homo sapiens
  misc_RNA (1)...(19): siRNA sense strand
agagaauguuggaggaaag

SEQ ID NO: 736254 - RNA, 19 nt, Homo sapiens
  misc_RNA (1)...(19): siRNA sense strand
gcaaacuggaugaugacau

SEQ ID NO: 736255 - RNA, 19 nt, Homo sapiens
  misc_RNA (1)...(19): siRNA sense strand
aaagcaaucuguccuuccu

SEQ ID NO: 736256 - RNA, 19 nt, Homo sapiens
  misc_RNA (1)...(19): siRNA sense strand
cuaucagauuucagaagaa

SEQ ID NO: 736257 - RNA, 19 nt, Homo sapiens
  misc_RNA (1)...(19): siRNA sense strand
gggucaugcucuaucagau

SEQ ID NO: 736258 - RNA, 19 nt, Homo sapiens
  misc_RNA (1)...(19): siRNA sense strand
aaaagagucugugcccaaa

SEQ ID NO: 736259 - RNA, 19 nt, Homo sapiens
  misc_RNA (1)...(19): siRNA sense strand
caaaagcacgggagaaagu

SEQ ID NO: 736260 - RNA, 19 nt, Homo sapiens
  misc_RNA (1)...(19): siRNA sense strand
gugcccaaaucaacaagag

SEQ ID NO: 736261 - RNA, 19 nt, Homo sapiens
  misc_RNA (1)...(19): siRNA sense strand
uggacuacauuccgcaaag

SEQ ID NO: 736262 - RNA, 19 nt, Homo sapiens
  misc_RNA (1)...(19): siRNA sense strand
uaaucaacgacuaugaaga

SEQ ID NO: 736263 - RNA, 19 nt, Homo sapiens
  misc_RNA (1)...(19): siRNA sense strand
agagccugcugaagauaau

SEQ ID NO: 736264 - RNA, 19 nt, Homo sapiens
  misc_RNA (1)...(19): siRNA sense strand
aagagccugcugaagauaa

SEQ ID NO: 736265 - RNA, 19 nt, Homo sapiens
  misc_RNA (1)...(19): siRNA sense strand
gcucuuccgaauuaauaga

SEQ ID NO: 736266 - RNA, 19 nt, Homo sapiens
  misc_RNA (1)...(19): siRNA sense strand
ccgaauuaauagacuggau

SEQ ID NO: 736267 - RNA, 19 nt, Homo sapiens
  misc_RNA (1)...(19): siRNA sense strand
ggacaaaguuuaccaaaug

SEQ ID NO: 736268 - RNA, 19 nt, Homo sapiens
  misc_RNA (1)...(19): siRNA sense strand
caacgacuaugaagaauuc

SEQ ID NO: 736269 - RNA, 19 nt, Homo sapiens
  misc_RNA (1)...(19): siRNA sense strand
gaucagaauugaggucuuu

SEQ ID NO: 736270 - RNA, 19 nt, Homo sapiens
  misc_RNA (1)...(19): siRNA sense strand
gaagugagcagaucagaau

SEQ ID NO: 736271 - RNA, 19 nt, Homo sapiens
  misc_RNA (1)...(19): siRNA sense strand
gaggaaaucuccaaaugca

SEQ ID NO: 736272 - RNA, 19 nt, Homo sapiens
  misc_RNA (1)...(19): siRNA sense strand
ggaaaucuccaaaugcaaa

SEQ ID NO: 736273 - RNA, 19 nt, Homo sapiens
  misc_RNA (1)...(19): siRNA sense strand
caaacuggaugaugacaug

SEQ ID NO: 736274 - RNA, 19 nt, Homo sapiens
  misc_RNA (1)...(19): siRNA sense strand
agacuggauuugcugauua

SEQ ID NO: 736275 - RNA, 19 nt, Homo sapiens
  misc_RNA (1)...(19): siRNA sense strand
gacaugaaccugcuggaua

SEQ ID NO: 736276 - RNA, 19 nt, Homo sapiens
  misc_RNA (1)...(19): siRNA sense strand
gaagauaaucaacgacuau

SEQ ID NO: 736277 - RNA, 19 nt, Homo sapiens
  misc_RNA (1)...(19): siRNA sense strand
gacaaaguuuaccaaauga

SEQ ID NO: 736278 - RNA, 19 nt, Homo sapiens
  misc_RNA (1)...(19): siRNA sense strand
cagcagaaaucuuuaugau

SEQ ID NO: 736279 - RNA, 19 nt, Homo sapiens
  misc_RNA (1)...(19): siRNA sense strand
gaaaggaggagauggaaag

SEQ ID NO: 736280 - RNA, 19 nt, Homo sapiens
  misc_RNA (1)...(19): siRNA sense strand
gauaaucaacgacuaugaa

SEQ ID NO: 736281 - RNA, 19 nt, Homo sapiens
  misc_RNA (1)...(19): siRNA sense strand
gaucuggccucccucaagu

SEQ ID NO: 736282 - RNA, 19 nt, Homo sapiens
  misc_RNA (1)...(19): siRNA sense strand
gaauugaggucuuuuaagu

SEQ ID NO: 736283 - RNA, 19 nt, Homo sapiens
  misc_RNA (1)...(19): siRNA sense strand
aagaggaaaucuccaaaug

SEQ ID NO: 736284 - RNA, 19 nt, Homo sapiens
  misc_RNA (1)...(19): siRNA sense strand
gcaagaacccaucaaggau

SEQ ID NO: 736285 - RNA, 19 nt, Homo sapiens
  misc_RNA (1)...(19): siRNA sense strand
ggaaagggaacuucagaca

SEQ ID NO: 736286 - RNA, 19 nt, Homo sapiens
  misc_RNA (1)...(19): siRNA sense strand
gcccaaacuucacagcauu

SEQ ID NO: 736287 - RNA, 19 nt, Homo sapiens
  misc_RNA (1)...(19): siRNA sense strand
acaugaaccugcuggauau

SEQ ID NO: 736288 - RNA, 19 nt, Homo sapiens
  misc_RNA (1)...(19): siRNA sense strand
gucaugcucuaucagauuu

SEQ ID NO: 736289 - RNA, 19 nt, Homo sapiens
  misc_RNA (1)...(19): siRNA sense strand
ucauagagauggagaagag

SEQ ID NO: 736290 - RNA, 19 nt, Homo sapiens
  misc_RNA (1)...(19): siRNA sense strand
ucuaucagauuucagaaga

SEQ ID NO: 736291 - RNA, 19 nt, Homo sapiens
  misc_RNA (1)...(19): siRNA sense strand
ugaagauaaucaacgacua

SEQ ID NO: 736292 - RNA, 19 nt, Homo sapiens
  misc_RNA (1)...(19): siRNA sense strand
acaagagccugcugaagau

SEQ ID NO: 736293 - RNA, 19 nt, Homo sapiens
  misc_RNA (1)...(19): siRNA sense strand
aaugcaaacuggaugauga

SEQ ID NO: 736294 - RNA, 19 nt, Homo sapiens
  misc_RNA (1)...(19): siRNA sense strand
uggauuugcugauuaccua

SEQ ID NO: 736295 - RNA, 19 nt, Homo sapiens
  misc_RNA (1)...(19): siRNA sense strand
gugagcagaucagaauuga

SEQ ID NO: 736296 - RNA, 19 nt, Homo sapiens
  misc_RNA (1)...(19): siRNA sense strand
gaauggaacacacuuggau

SEQ ID NO: 736297 - RNA, 19 nt, Homo sapiens
  misc_RNA (1)...(19): siRNA sense strand
gggagaaagugcccaaacu

SEQ ID NO: 736298 - RNA, 19 nt, Homo sapiens
  misc_RNA (1)...(19): siRNA sense strand
aaucaacgacuaugaagaa

SEQ ID NO: 736299 - RNA, 19 nt, Homo sapiens
  misc_RNA (1)...(19): siRNA sense strand
ccaggcagggcucaaauuu

SEQ ID NO: 736300 - RNA, 19 nt, Homo sapiens
  misc_RNA (1)...(19): siRNA sense strand
gcaagaggaaaucuccaaa

SEQ ID NO: 736301 - RNA, 19 nt, Homo sapiens
  misc_RNA (1)...(19): siRNA sense strand
gaaaguuggacauccugaa

SEQ ID NO: 736302 - RNA, 19 nt, Homo sapiens
  misc_RNA (1)...(19): siRNA sense strand
gaucaucaacaaucacaau

SEQ ID NO: 736303 - RNA, 19 nt, Homo sapiens
  misc_RNA (1)...(19): siRNA sense strand
gacuucagcagaaaucuuu

SEQ ID NO: 736304 - RNA, 19 nt, Homo sapiens
  misc_RNA (1)...(19): siRNA sense strand
cagaagaagugagcagauc

SEQ ID NO: 736305 - RNA, 19 nt, Homo sapiens
  misc_RNA (1)...(19): siRNA sense strand
aacaagagccugcugaaga

SEQ ID NO: 736306 - RNA, 19 nt, Homo sapiens
  misc_RNA (1)...(19): siRNA sense strand
cugauuaccuaccuaaaca

SEQ ID NO: 736307 - RNA, 19 nt, Homo sapiens
  misc_RNA (1)...(19): siRNA sense strand
ggucaugcucuaucagauu

SEQ ID NO: 736308 - RNA, 19 nt, Homo sapiens
  misc_RNA (1)...(19): siRNA sense strand
gaagcaagaacccaucaag

SEQ ID NO: 736309 - RNA, 19 nt, Homo sapiens
  misc_RNA (1)...(19): siRNA sense strand
uuaccuaccuaaacacuag

SEQ ID NO: 736310 - RNA, 19 nt, Homo sapiens
  misc_RNA (1)...(19): siRNA sense strand
aggcagggcucaaauuucu

SEQ ID NO: 736311 - RNA, 19 nt, Homo sapiens
  misc_RNA (1)...(19): siRNA sense strand
cgaauuaauagacuggauu

SEQ ID NO: 736312 - RNA, 19 nt, Homo sapiens
  misc_RNA (1)...(19): siRNA sense strand
caagaggaaaucuccaaau

SEQ ID NO: 736313 - RNA, 19 nt, Homo sapiens
  misc_RNA (1)...(19): siRNA sense strand
ccaaaugcaaacuggauga

SEQ ID NO: 736314 - RNA, 19 nt, Homo sapiens
  misc_RNA (1)...(19): siRNA sense strand
ggacuucagcagaaaucuu

SEQ ID NO: 736315 - RNA, 19 nt, Homo sapiens
  misc_RNA (1)...(19): siRNA sense strand
aagagaauguuggaggaaa

SEQ ID NO: 736316 - RNA, 19 nt, Homo sapiens
  misc_RNA (1)...(19): siRNA sense strand
ggaauggaacacacuugga

SEQ ID NO: 736317 - RNA, 19 nt, Homo sapiens
  misc_RNA (1)...(19): siRNA sense strand
uggacaaaguuuaccaaau

SEQ ID NO: 736318 - RNA, 19 nt, Homo sapiens
  misc_RNA (1)...(19): siRNA sense strand
aaaguuggacauccugaaa

SEQ ID NO: 736319 - RNA, 19 nt, Homo sapiens
  misc_RNA (1)...(19): siRNA sense strand
gcucaaauuucugccuaca

SEQ ID NO: 736320 - RNA, 19 nt, Homo sapiens
  misc_RNA (1)...(19): siRNA sense strand
uagacuggauuugcugauu

SEQ ID NO: 736321 - RNA, 19 nt, Homo sapiens
  misc_RNA (1)...(19): siRNA sense strand
ggacuacauuccgcaaagg

SEQ ID NO: 736322 - RNA, 19 nt, Homo sapiens
  misc_RNA (1)...(19): siRNA sense strand
uaucagauuucagaagaag

SEQ ID NO: 736323 - RNA, 19 nt, Homo sapiens
  misc_RNA (1)...(19): siRNA sense strand
uuaauagacuggauuugcu

SEQ ID NO: 736324 - RNA, 19 nt, Homo sapiens
  misc_RNA (1)...(19): siRNA sense strand
gggauacugucugaucauc

SEQ ID NO: 736325 - RNA, 19 nt, Homo sapiens
  misc_RNA (1)...(19): siRNA sense strand
aagagucugugcccaaauc

SEQ ID NO: 736326 - RNA, 19 nt, Homo sapiens
  misc_RNA (1)...(19): siRNA sense strand
caagagccugcugaagaua

SEQ ID NO: 736327 - RNA, 19 nt, Homo sapiens
  misc_RNA (1)...(19): siRNA sense strand
cuagaaaggaggagaugga

SEQ ID NO: 736328 - RNA, 19 nt, Homo sapiens
  misc_RNA (1)...(19): siRNA sense strand
ggagauggaaagggaacuu

SEQ ID NO: 736329 - RNA, 19 nt, Homo sapiens
  misc_RNA (1)...(19): siRNA sense strand
aggaugccuugauguuauu

SEQ ID NO: 736330 - RNA, 19 nt, Homo sapiens
  misc_RNA (1)...(19): siRNA sense strand
ucaacgacuaugaagaauu

SEQ ID NO: 736331 - RNA, 19 nt, Homo sapiens
  misc_RNA (1)...(19): siRNA sense strand
gaauguuggaggaaagcaa

SEQ ID NO: 736332 - RNA, 19 nt, Homo sapiens
  misc_RNA (1)...(19): siRNA sense strand
gagaaggaaaguuggacau

SEQ ID NO: 736333 - RNA, 19 nt, Homo sapiens
  misc_RNA (1)...(19): siRNA sense strand
gaagaagugagcagaucag

SEQ ID NO: 736334 - RNA, 19 nt, Homo sapiens
  misc_RNA (1)...(19): siRNA sense strand
gacuggauuugcugauuac

SEQ ID NO: 736335 - RNA, 19 nt, Homo sapiens
  misc_RNA (1)...(19): siRNA sense strand
agcaagaacccaucaagga

SEQ ID NO: 736336 - RNA, 19 nt, Homo sapiens
  misc_RNA (1)...(19): siRNA sense strand
caacaagagccugcugaag

SEQ ID NO: 736337 - RNA, 19 nt, Homo sapiens
  misc_RNA (1)...(19): siRNA sense strand
ucagcagaaaucuuuauga

SEQ ID NO: 736338 - RNA, 19 nt, Homo sapiens
  misc_RNA (1)...(19): siRNA sense strand
cugcucuuccgaauuaaua

SEQ ID NO: 736339 - RNA, 19 nt, Homo sapiens
  misc_RNA (1)...(19): siRNA sense strand
ggaagcaagaacccaucaa

SEQ ID NO: 736340 - RNA, 19 nt, Homo sapiens
  misc_RNA (1)...(19): siRNA sense strand
ucagauuucagaagaagug

SEQ ID NO: 736341 - RNA, 19 nt, Homo sapiens
  misc_RNA (1)...(19): siRNA sense strand
gcugauuaccuaccuaaac

SEQ ID NO: 736342 - RNA, 19 nt, Homo sapiens
  misc_RNA (1)...(19): siRNA sense strand
cccaaacuucacagcauua

SEQ ID NO: 736343 - RNA, 19 nt, Homo sapiens
  misc_RNA (1)...(19): siRNA sense strand
ucaacaagagccugcugaa

SEQ ID NO: 736344 - RNA, 19 nt, Homo sapiens
  misc_RNA (1)...(19): siRNA sense strand
ccugggagaaggaaaguug

SEQ ID NO: 736345 - RNA, 19 nt, Homo sapiens
  misc_RNA (1)...(19): siRNA sense strand
ugaaccugcuggauauuuu

SEQ ID NO: 736346 - RNA, 19 nt, Homo sapiens
  misc_RNA (1)...(19): siRNA sense strand
gcaaucuguccuuccugaa

SEQ ID NO: 736347 - RNA, 19 nt, Homo sapiens
  misc_RNA (1)...(19): siRNA sense strand
agagaauguuggaggaaag

SEQ ID NO: 736348 - RNA, 19 nt, Homo sapiens
  misc_RNA (1)...(19): siRNA sense strand
gcaaacuggaugaugacau

SEQ ID NO: 736349 - RNA, 19 nt, Homo sapiens
  misc_RNA (1)...(19): siRNA sense strand
aaagcaaucuguccuuccu

SEQ ID NO: 736350 - RNA, 19 nt, Homo sapiens
  misc_RNA (1)...(19): siRNA sense strand
cuaucagauuucagaagaa

SEQ ID NO: 736351 - RNA, 19 nt, Homo sapiens
  misc_RNA (1)...(19): siRNA sense strand
gggucaugcucuaucagau

SEQ ID NO: 736352 - RNA, 19 nt, Homo sapiens
  misc_RNA (1)...(19): siRNA sense strand
aaaagagucugugcccaaa

SEQ ID NO: 736353 - RNA, 19 nt, Homo sapiens
  misc_RNA (1)...(19): siRNA sense strand
caaaagcacgggagaaagu

SEQ ID NO: 736354 - RNA, 19 nt, Homo sapiens
  misc_RNA (1)...(19): siRNA sense strand
gugcccaaaucaacaagag

SEQ ID NO: 736355 - RNA, 19 nt, Homo sapiens
  misc_RNA (1)...(19): siRNA sense strand
uggacuacauuccgcaaag

SEQ ID NO: 736356 - RNA, 19 nt, Homo sapiens
  misc_RNA (1)...(19): siRNA sense strand
uaaucaacgacuaugaaga

SEQ ID NO: 736357 - RNA, 19 nt, Homo sapiens
  misc_RNA (1)...(19): siRNA sense strand
agagccugcugaagauaau

SEQ ID NO: 736358 - RNA, 19 nt, Homo sapiens
  misc_RNA (1)...(19): siRNA sense strand
aagagccugcugaagauaa

SEQ ID NO: 736359 - RNA, 19 nt, Homo sapiens
  misc_RNA (1)...(19): siRNA sense strand
gcucuuccgaauuaauaga

SEQ ID NO: 736360 - RNA, 19 nt, Homo sapiens
  misc_RNA (1)...(19): siRNA sense strand
ccgaauuaauagacuggau

SEQ ID NO: 736361 - RNA, 19 nt, Homo sapiens
  misc_RNA (1)...(19): siRNA sense strand
ggacaaaguuuaccaaaug

SEQ ID NO: 736362 - RNA, 19 nt, Homo sapiens
  misc_RNA (1)...(19): siRNA sense strand
caacgacuaugaagaauuc

SEQ ID NO: 736363 - RNA, 19 nt, Homo sapiens
  misc_RNA (1)...(19): siRNA sense strand
gaucagaauugaggucuuu

SEQ ID NO: 736364 - RNA, 19 nt, Homo sapiens
  misc_RNA (1)...(19): siRNA sense strand
gaagugagcagaucagaau

SEQ ID NO: 736365 - RNA, 19 nt, Homo sapiens
  misc_RNA (1)...(19): siRNA sense strand
gaggaaaucuccaaaugca

SEQ ID NO: 736366 - RNA, 19 nt, Homo sapiens
  misc_RNA (1)...(19): siRNA sense strand
ggaaaucuccaaaugcaaa

SEQ ID NO: 736367 - RNA, 19 nt, Homo sapiens
  misc_RNA (1)...(19): siRNA sense strand
caaacuggaugaugacaug

SEQ ID NO: 736368 - RNA, 19 nt, Homo sapiens
  misc_RNA (1)...(19): siRNA sense strand
agacuggauuugcugauua

SEQ ID NO: 736369 - RNA, 19 nt, Homo sapiens
  misc_RNA (1)...(19): siRNA sense strand
gacaugaaccugcuggaua

SEQ ID NO: 736370 - RNA, 19 nt, Homo sapiens
  misc_RNA (1)...(19): siRNA sense strand
gaagauaaucaacgacuau

SEQ ID NO: 736371 - RNA, 19 nt, Homo sapiens
  misc_RNA (1)...(19): siRNA sense strand
gacaaaguuuaccaaauga

SEQ ID NO: 736372 - RNA, 19 nt, Homo sapiens
  misc_RNA (1)...(19): siRNA sense strand
cagcagaaaucuuuaugau

SEQ ID NO: 736373 - RNA, 19 nt, Homo sapiens
  misc_RNA (1)...(19): siRNA sense strand
gaaaggaggagauggaaag

SEQ ID NO: 736374 - RNA, 19 nt, Homo sapiens
  misc_RNA (1)...(19): siRNA sense strand
gauaaucaacgacuaugaa

SEQ ID NO: 736375 - RNA, 19 nt, Homo sapiens
  misc_RNA (1)...(19): siRNA sense strand
gaucuggccucccucaagu

SEQ ID NO: 736376 - RNA, 19 nt, Homo sapiens
  misc_RNA (1)...(19): siRNA sense strand
gaauugaggucuuuuaagu

SEQ ID NO: 736377 - RNA, 19 nt, Homo sapiens
  misc_RNA (1)...(19): siRNA sense strand
aagaggaaaucuccaaaug

SEQ ID NO: 736378 - RNA, 19 nt, Homo sapiens
  misc_RNA (1)...(19): siRNA sense strand
gcaagaacccaucaaggau

SEQ ID NO: 736379 - RNA, 19 nt, Homo sapiens
  misc_RNA (1)...(19): siRNA sense strand
ggaaagggaacuucagaca

SEQ ID NO: 736380 - RNA, 19 nt, Homo sapiens
  misc_RNA (1)...(19): siRNA sense strand
gcccaaacuucacagcauu

SEQ ID NO: 736381 - RNA, 19 nt, Homo sapiens
  misc_RNA (1)...(19): siRNA sense strand
acaugaaccugcuggauau

SEQ ID NO: 736382 - RNA, 19 nt, Homo sapiens
  misc_RNA (1)...(19): siRNA sense strand
gucaugcucuaucagauuu

SEQ ID NO: 736383 - RNA, 19 nt, Homo sapiens
  misc_RNA (1)...(19): siRNA sense strand
ucauagagauggagaagag

SEQ ID NO: 736384 - RNA, 19 nt, Homo sapiens
  misc_RNA (1)...(19): siRNA sense strand
ucuaucagauuucagaaga

SEQ ID NO: 736385 - RNA, 19 nt, Homo sapiens
  misc_RNA (1)...(19): siRNA sense strand
ugaagauaaucaacgacua

SEQ ID NO: 736386 - RNA, 19 nt, Homo sapiens
  misc_RNA (1)...(19): siRNA sense strand
acaagagccugcugaagau

SEQ ID NO: 736387 - RNA, 19 nt, Homo sapiens
  misc_RNA (1)...(19): siRNA sense strand
aaugcaaacuggaugauga

SEQ ID NO: 736388 - RNA, 19 nt, Homo sapiens
  misc_RNA (1)...(19): siRNA sense strand
uggauuugcugauuaccua

SEQ ID NO: 736389 - RNA, 19 nt, Homo sapiens
  misc_RNA (1)...(19): siRNA sense strand
gugagcagaucagaauuga

SEQ ID NO: 736390 - RNA, 19 nt, Homo sapiens
  misc_RNA (1)...(19): siRNA sense strand
gaauggaacacacuuggau

SEQ ID NO: 736391 - RNA, 19 nt, Homo sapiens
  misc_RNA (1)...(19): siRNA sense strand
gggagaaagugcccaaacu

SEQ ID NO: 736392 - RNA, 19 nt, Homo sapiens
  misc_RNA (1)...(19): siRNA sense strand
aaucaacgacuaugaagaa

SEQ ID NO: 736393 - RNA, 19 nt, Homo sapiens
  misc_RNA (1)...(19): siRNA sense strand
ccaggcagggcucaaauuu

SEQ ID NO: 736394 - RNA, 19 nt, Homo sapiens
  misc_RNA (1)...(19): siRNA sense strand
gcaagaggaaaucuccaaa

SEQ ID NO: 736395 - RNA, 19 nt, Homo sapiens
  misc_RNA (1)...(19): siRNA sense strand
gaaaguuggacauccugaa

SEQ ID NO: 736396 - RNA, 19 nt, Homo sapiens
  misc_RNA (1)...(19): siRNA sense strand
gaucaucaacaaucacaau

SEQ ID NO: 736397 - RNA, 19 nt, Homo sapiens
  misc_RNA (1)...(19): siRNA sense strand
gacuucagcagaaaucuuu

SEQ ID NO: 736398 - RNA, 19 nt, Homo sapiens
  misc_RNA (1)...(19): siRNA sense strand
cagaagaagugagcagauc

SEQ ID NO: 736399 - RNA, 19 nt, Homo sapiens
  misc_RNA (1)...(19): siRNA sense strand
aacaagagccugcugaaga

SEQ ID NO: 736400 - RNA, 19 nt, Homo sapiens
  misc_RNA (1)...(19): siRNA sense strand
cugauuaccuaccuaaaca

SEQ ID NO: 736401 - RNA, 19 nt, Homo sapiens
  misc_RNA (1)...(19): siRNA sense strand
ggucaugcucuaucagauu

SEQ ID NO: 736402 - RNA, 19 nt, Homo sapiens
  misc_RNA (1)...(19): siRNA sense strand
gaagcaagaacccaucaag

SEQ ID NO: 736403 - RNA, 19 nt, Homo sapiens
  misc_RNA (1)...(19): siRNA sense strand
uuaccuaccuaaacacuag

SEQ ID NO: 736404 - RNA, 19 nt, Homo sapiens
  misc_RNA (1)...(19): siRNA sense strand
aggcagggcucaaauuucu

SEQ ID NO: 736405 - RNA, 19 nt, Homo sapiens
  misc_RNA (1)...(19): siRNA sense strand
cgaauuaauagacuggauu

SEQ ID NO: 736406 - RNA, 19 nt, Homo sapiens
  misc_RNA (1)...(19): siRNA sense strand
caagaggaaaucuccaaau

SEQ ID NO: 736407 - RNA, 19 nt, Homo sapiens
  misc_RNA (1)...(19): siRNA sense strand
ccaaaugcaaacuggauga

SEQ ID NO: 736408 - RNA, 19 nt, Homo sapiens
  misc_RNA (1)...(19): siRNA sense strand
ggacuucagcagaaaucuu

SEQ ID NO: 736409 - RNA, 19 nt, Homo sapiens
  misc_RNA (1)...(19): siRNA sense strand
aagagaauguuggaggaaa

SEQ ID NO: 736410 - RNA, 19 nt, Homo sapiens
  misc_RNA (1)...(19): siRNA sense strand
ggaauggaacacacuugga

SEQ ID NO: 736411 - RNA, 19 nt, Homo sapiens
  misc_RNA (1)...(19): siRNA sense strand
uggacaaaguuuaccaaau

SEQ ID NO: 736412 - RNA, 19 nt, Homo sapiens
  misc_RNA (1)...(19): siRNA sense strand
aaaguuggacauccugaaa

SEQ ID NO: 736413 - RNA, 19 nt, Homo sapiens
  misc_RNA (1)...(19): siRNA sense strand
gcucaaauuucugccuaca

SEQ ID NO: 736414 - RNA, 19 nt, Homo sapiens
  misc_RNA (1)...(19): siRNA sense strand
uagacuggauuugcugauu

SEQ ID NO: 736415 - RNA, 19 nt, Homo sapiens
  misc_RNA (1)...(19): siRNA sense strand
ggacuacauuccgcaaagg

SEQ ID NO: 736416 - RNA, 19 nt, Homo sapiens
  misc_RNA (1)...(19): siRNA sense strand
uaucagauuucagaagaag

SEQ ID NO: 736417 - RNA, 19 nt, Homo sapiens
  misc_RNA (1)...(19): siRNA sense strand
uuaauagacuggauuugcu

SEQ ID NO: 736418 - RNA, 19 nt, Homo sapiens
  misc_RNA (1)...(19): siRNA sense strand
gggauacugucugaucauc

SEQ ID NO: 736419 - RNA, 19 nt, Homo sapiens
  misc_RNA (1)...(19): siRNA sense strand
aagagucugugcccaaauc

SEQ ID NO: 736420 - RNA, 19 nt, Homo sapiens
  misc_RNA (1)...(19): siRNA sense strand
caagagccugcugaagaua

SEQ ID NO: 736421 - RNA, 19 nt, Homo sapiens
  misc_RNA (1)...(19): siRNA sense strand
cuagaaaggaggagaugga

SEQ ID NO: 736422 - RNA, 19 nt, Homo sapiens
  misc_RNA (1)...(19): siRNA sense strand
ggagauggaaagggaacuu

SEQ ID NO: 736423 - RNA, 19 nt, Homo sapiens
  misc_RNA (1)...(19): siRNA sense strand
aggaugccuugauguuauu

SEQ ID NO: 736424 - RNA, 19 nt, Homo sapiens
  misc_RNA (1)...(19): siRNA sense strand
ucaacgacuaugaagaauu

SEQ ID NO: 736425 - RNA, 19 nt, Homo sapiens
  misc_RNA (1)...(19): siRNA sense strand
gaauguuggaggaaagcaa

SEQ ID NO: 736426 - RNA, 19 nt, Homo sapiens
  misc_RNA (1)...(19): siRNA sense strand
gagaaggaaaguuggacau

SEQ ID NO: 736427 - RNA, 19 nt, Homo sapiens
  misc_RNA (1)...(19): siRNA sense strand
gaagaagugagcagaucag

SEQ ID NO: 736428 - RNA, 19 nt, Homo sapiens
  misc_RNA (1)...(19): siRNA sense strand
gacuggauuugcugauuac

SEQ ID NO: 736429 - RNA, 19 nt, Homo sapiens
  misc_RNA (1)...(19): siRNA sense strand
agcaagaacccaucaagga

SEQ ID NO: 736430 - RNA, 19 nt, Homo sapiens
  misc_RNA (1)...(19): siRNA sense strand
caacaagagccugcugaag

SEQ ID NO: 736431 - RNA, 19 nt, Homo sapiens
  misc_RNA (1)...(19): siRNA sense strand
ucagcagaaaucuuuauga

SEQ ID NO: 736432 - RNA, 19 nt, Homo sapiens
  misc_RNA (1)...(19): siRNA sense strand
cugcucuuccgaauuaaua

SEQ ID NO: 736433 - RNA, 19 nt, Homo sapiens
  misc_RNA (1)...(19): siRNA sense strand
ggaagcaagaacccaucaa

SEQ ID NO: 736434 - RNA, 19 nt, Homo sapiens
  misc_RNA (1)...(19): siRNA sense strand
ucagauuucagaagaagug

SEQ ID NO: 736435 - RNA, 19 nt, Homo sapiens
  misc_RNA (1)...(19): siRNA sense strand
gcugauuaccuaccuaaac

SEQ ID NO: 736436 - RNA, 19 nt, Homo sapiens
  misc_RNA (1)...(19): siRNA sense strand
cccaaacuucacagcauua

SEQ ID NO: 736437 - RNA, 19 nt, Homo sapiens
  misc_RNA (1)...(19): siRNA sense strand
ucaacaagagccugcugaa

SEQ ID NO: 736438 - RNA, 19 nt, Homo sapiens
  misc_RNA (1)...(19): siRNA sense strand
ccugggagaaggaaaguug

SEQ ID NO: 736439 - RNA, 19 nt, Homo sapiens
  misc_RNA (1)...(19): siRNA sense strand
ugaaccugcuggauauuuu

SEQ ID NO: 736440 - RNA, 19 nt, Homo sapiens
  misc_RNA (1)...(19): siRNA sense strand
gcaaucuguccuuccugaa

SEQ ID NO: 736441 - RNA, 19 nt, Homo sapiens
  misc_RNA (1)...(19): siRNA sense strand
agagaauguuggaggaaag

SEQ ID NO: 736442 - RNA, 19 nt, Homo sapiens
  misc_RNA (1)...(19): siRNA sense strand
gcaaacuggaugaugacau

SEQ ID NO: 736443 - RNA, 19 nt, Homo sapiens
  misc_RNA (1)...(19): siRNA sense strand
aaagcaaucuguccuuccu

SEQ ID NO: 736444 - RNA, 19 nt, Homo sapiens
  misc_RNA (1)...(19): siRNA sense strand
cuaucagauuucagaagaa

SEQ ID NO: 736445 - RNA, 19 nt, Homo sapiens
  misc_RNA (1)...(19): siRNA sense strand
gggucaugcucuaucagau

SEQ ID NO: 736446 - RNA, 19 nt, Homo sapiens
  misc_RNA (1)...(19): siRNA sense strand
aaaagagucugugcccaaa

SEQ ID NO: 736447 - RNA, 19 nt, Homo sapiens
  misc_RNA (1)...(19): siRNA sense strand
caaaagcacgggagaaagu

SEQ ID NO: 736448 - RNA, 19 nt, Homo sapiens
  misc_RNA (1)...(19): siRNA sense strand
gugcccaaaucaacaagag

SEQ ID NO: 736449 - RNA, 19 nt, Homo sapiens
  misc_RNA (1)...(19): siRNA sense strand
uggacuacauuccgcaaag

SEQ ID NO: 736450 - RNA, 19 nt, Homo sapiens
  misc_RNA (1)...(19): siRNA sense strand
uaaucaacgacuaugaaga

SEQ ID NO: 736451 - RNA, 19 nt, Homo sapiens
  misc_RNA (1)...(19): siRNA sense strand
agagccugcugaagauaau

SEQ ID NO: 736452 - RNA, 19 nt, Homo sapiens
  misc_RNA (1)...(19): siRNA sense strand
aagagccugcugaagauaa

SEQ ID NO: 736453 - RNA, 19 nt, Homo sapiens
  misc_RNA (1)...(19): siRNA sense strand
gcucuuccgaauuaauaga

SEQ ID NO: 736454 - RNA, 19 nt, Homo sapiens
  misc_RNA (1)...(19): siRNA sense strand
ccgaauuaauagacuggau

SEQ ID NO: 736455 - RNA, 19 nt, Homo sapiens
  misc_RNA (1)...(19): siRNA sense strand
ggacaaaguuuaccaaaug

SEQ ID NO: 736456 - RNA, 19 nt, Homo sapiens
  misc_RNA (1)...(19): siRNA sense strand
caacgacuaugaagaauuc

SEQ ID NO: 736457 - RNA, 19 nt, Homo sapiens
  misc_RNA (1)...(19): siRNA sense strand
gaucagaauugaggucuuu

SEQ ID NO: 736458 - RNA, 19 nt, Homo sapiens
  misc_RNA (1)...(19): siRNA sense strand
gaagugagcagaucagaau

SEQ ID NO: 736459 - RNA, 19 nt, Homo sapiens
  misc_RNA (1)...(19): siRNA sense strand
gaggaaaucuccaaaugca

SEQ ID NO: 736460 - RNA, 19 nt, Homo sapiens
  misc_RNA (1)...(19): siRNA sense strand
ggaaaucuccaaaugcaaa

SEQ ID NO: 736461 - RNA, 19 nt, Homo sapiens
  misc_RNA (1)...(19): siRNA sense strand
caaacuggaugaugacaug

SEQ ID NO: 736462 - RNA, 19 nt, Homo sapiens
  misc_RNA (1)...(19): siRNA sense strand
agacuggauuugcugauua

SEQ ID NO: 736463 - RNA, 19 nt, Homo sapiens
  misc_RNA (1)...(19): siRNA sense strand
gacaugaaccugcuggaua

SEQ ID NO: 736464 - RNA, 19 nt, Homo sapiens
  misc_RNA (1)...(19): siRNA sense strand
gaagauaaucaacgacuau

SEQ ID NO: 736465 - RNA, 19 nt, Homo sapiens
  misc_RNA (1)...(19): siRNA sense strand
gacaaaguuuaccaaauga

SEQ ID NO: 736466 - RNA, 19 nt, Homo sapiens
  misc_RNA (1)...(19): siRNA sense strand
cagcagaaaucuuuaugau

SEQ ID NO: 736467 - RNA, 19 nt, Homo sapiens
  misc_RNA (1)...(19): siRNA sense strand
gaaaggaggagauggaaag

SEQ ID NO: 736468 - RNA, 19 nt, Homo sapiens
  misc_RNA (1)...(19): siRNA sense strand
gauaaucaacgacuaugaa

SEQ ID NO: 736469 - RNA, 19 nt, Homo sapiens
  misc_RNA (1)...(19): siRNA sense strand
gaucuggccucccucaagu

SEQ ID NO: 736470 - RNA, 19 nt, Homo sapiens
  misc_RNA (1)...(19): siRNA sense strand
gaauugaggucuuuuaagu

SEQ ID NO: 736471 - RNA, 19 nt, Homo sapiens
  misc_RNA (1)...(19): siRNA sense strand
aagaggaaaucuccaaaug

SEQ ID NO: 736472 - RNA, 19 nt, Homo sapiens
  misc_RNA (1)...(19): siRNA sense strand
gcaagaacccaucaaggau

SEQ ID NO: 736473 - RNA, 19 nt, Homo sapiens
  misc_RNA (1)...(19): siRNA sense strand
ggaaagggaacuucagaca

SEQ ID NO: 736474 - RNA, 19 nt, Homo sapiens
  misc_RNA (1)...(19): siRNA sense strand
gcccaaacuucacagcauu

SEQ ID NO: 736475 - RNA, 19 nt, Homo sapiens
  misc_RNA (1)...(19): siRNA sense strand
acaugaaccugcuggauau

SEQ ID NO: 736476 - RNA, 19 nt, Homo sapiens
  misc_RNA (1)...(19): siRNA sense strand
gucaugcucuaucagauuu

SEQ ID NO: 736477 - RNA, 19 nt, Homo sapiens
  misc_RNA (1)...(19): siRNA sense strand
ucauagagauggagaagag

SEQ ID NO: 736478 - RNA, 19 nt, Homo sapiens
  misc_RNA (1)...(19): siRNA sense strand
ucuaucagauuucagaaga

SEQ ID NO: 736479 - RNA, 19 nt, Homo sapiens
  misc_RNA (1)...(19): siRNA sense strand
ugaagauaaucaacgacua

SEQ ID NO: 736480 - RNA, 19 nt, Homo sapiens
  misc_RNA (1)...(19): siRNA sense strand
acaagagccugcugaagau

SEQ ID NO: 736481 - RNA, 19 nt, Homo sapiens
  misc_RNA (1)...(19): siRNA sense strand
aaugcaaacuggaugauga

SEQ ID NO: 736482 - RNA, 19 nt, Homo sapiens
  misc_RNA (1)...(19): siRNA sense strand
uggauuugcugauuaccua

SEQ ID NO: 736483 - RNA, 19 nt, Homo sapiens
  misc_RNA (1)...(19): siRNA sense strand
gugagcagaucagaauuga

SEQ ID NO: 736484 - RNA, 19 nt, Homo sapiens
  misc_RNA (1)...(19): siRNA sense strand
gggagaaagugcccaaacu

SEQ ID NO: 736485 - RNA, 19 nt, Homo sapiens
  misc_RNA (1)...(19): siRNA sense strand
aaucaacgacuaugaagaa

SEQ ID NO: 736486 - RNA, 19 nt, Homo sapiens
  misc_RNA (1)...(19): siRNA sense strand
ccaggcagggcucaaauuu

SEQ ID NO: 736487 - RNA, 19 nt, Homo sapiens
  misc_RNA (1)...(19): siRNA sense strand
gcaagaggaaaucuccaaa

SEQ ID NO: 736488 - RNA, 19 nt, Homo sapiens
  misc_RNA (1)...(19): siRNA sense strand
gaaaguuggacauccugaa

SEQ ID NO: 736489 - RNA, 19 nt, Homo sapiens
  misc_RNA (1)...(19): siRNA sense strand
gaucaucaacaaucacaau

SEQ ID NO: 736490 - RNA, 19 nt, Homo sapiens
  misc_RNA (1)...(19): siRNA sense strand
gacuucagcagaaaucuuu

SEQ ID NO: 736491 - RNA, 19 nt, Homo sapiens
  misc_RNA (1)...(19): siRNA sense strand
cagaagaagugagcagauc

SEQ ID NO: 736492 - RNA, 19 nt, Homo sapiens
  misc_RNA (1)...(19): siRNA sense strand
aacaagagccugcugaaga

SEQ ID NO: 736493 - RNA, 19 nt, Homo sapiens
  misc_RNA (1)...(19): siRNA sense strand
cugauuaccuaccuaaaca

SEQ ID NO: 736494 - RNA, 19 nt, Homo sapiens
  misc_RNA (1)...(19): siRNA sense strand
gaagcaagaacccaucaag

SEQ ID NO: 736495 - RNA, 19 nt, Homo sapiens
  misc_RNA (1)...(19): siRNA sense strand
ggucaugcucuaucagauu

SEQ ID NO: 736496 - RNA, 19 nt, Homo sapiens
  misc_RNA (1)...(19): siRNA sense strand
uuaccuaccuaaacacuag

SEQ ID NO: 736497 - RNA, 19 nt, Homo sapiens
  misc_RNA (1)...(19): siRNA sense strand
aggcagggcucaaauuucu

SEQ ID NO: 736498 - RNA, 19 nt, Homo sapiens
  misc_RNA (1)...(19): siRNA sense strand
cgaauuaauagacuggauu

SEQ ID NO: 736499 - RNA, 19 nt, Homo sapiens
  misc_RNA (1)...(19): siRNA sense strand
caagaggaaaucuccaaau

SEQ ID NO: 736500 - RNA, 19 nt, Homo sapiens
  misc_RNA (1)...(19): siRNA sense strand
ccaaaugcaaacuggauga

SEQ ID NO: 736501 - RNA, 19 nt, Homo sapiens
  misc_RNA (1)...(19): siRNA sense strand
ggacuucagcagaaaucuu

SEQ ID NO: 736502 - RNA, 19 nt, Homo sapiens
  misc_RNA (1)...(19): siRNA sense strand
aagagaauguuggaggaaa

SEQ ID NO: 736503 - RNA, 19 nt, Homo sapiens
  misc_RNA (1)...(19): siRNA sense strand
uggacaaaguuuaccaaau

SEQ ID NO: 736504 - RNA, 19 nt, Homo sapiens
  misc_RNA (1)...(19): siRNA sense strand
aaaguuggacauccugaaa

SEQ ID NO: 736505 - RNA, 19 nt, Homo sapiens
  misc_RNA (1)...(19): siRNA sense strand
gcucaaauuucugccuaca

SEQ ID NO: 736506 - RNA, 19 nt, Homo sapiens
  misc_RNA (1)...(19): siRNA sense strand
uagacuggauuugcugauu

SEQ ID NO: 736507 - RNA, 19 nt, Homo sapiens
  misc_RNA (1)...(19): siRNA sense strand
ggacuacauuccgcaaagg

SEQ ID NO: 736508 - RNA, 19 nt, Homo sapiens
  misc_RNA (1)...(19): siRNA sense strand
uaucagauuucagaagaag

SEQ ID NO: 736509 - RNA, 19 nt, Homo sapiens
  misc_RNA (1)...(19): siRNA sense strand
uuaauagacuggauuugcu

SEQ ID NO: 736510 - RNA, 19 nt, Homo sapiens
  misc_RNA (1)...(19): siRNA sense strand
gggauacugucugaucauc

SEQ ID NO: 736511 - RNA, 19 nt, Homo sapiens
  misc_RNA (1)...(19): siRNA sense strand
aagagucugugcccaaauc

SEQ ID NO: 736512 - RNA, 19 nt, Homo sapiens
  misc_RNA (1)...(19): siRNA sense strand
caagagccugcugaagaua

SEQ ID NO: 736513 - RNA, 19 nt, Homo sapiens
  misc_RNA (1)...(19): siRNA sense strand
cuagaaaggaggagaugga

SEQ ID NO: 736514 - RNA, 19 nt, Homo sapiens
  misc_RNA (1)...(19): siRNA sense strand
ggagauggaaagggaacuu

SEQ ID NO: 736515 - RNA, 19 nt, Homo sapiens
  misc_RNA (1)...(19): siRNA sense strand
ucaacgacuaugaagaauu

SEQ ID NO: 736516 - RNA, 19 nt, Homo sapiens
  misc_RNA (1)...(19): siRNA sense strand
gaauguuggaggaaagcaa

SEQ ID NO: 736517 - RNA, 19 nt, Homo sapiens
  misc_RNA (1)...(19): siRNA sense strand
aggaugccuugauguuauu

SEQ ID NO: 736518 - RNA, 19 nt, Homo sapiens
  misc_RNA (1)...(19): siRNA sense strand
gagaaggaaaguuggacau

SEQ ID NO: 736519 - RNA, 19 nt, Homo sapiens
  misc_RNA (1)...(19): siRNA sense strand
gaagaagugagcagaucag

SEQ ID NO: 736520 - RNA, 19 nt, Homo sapiens
  misc_RNA (1)...(19): siRNA sense strand
gacuggauuugcugauuac

SEQ ID NO: 736521 - RNA, 19 nt, Homo sapiens
  misc_RNA (1)...(19): siRNA sense strand
caacaagagccugcugaag

SEQ ID NO: 736522 - RNA, 19 nt, Homo sapiens
  misc_RNA (1)...(19): siRNA sense strand
agcaagaacccaucaagga

SEQ ID NO: 736523 - RNA, 19 nt, Homo sapiens
  misc_RNA (1)...(19): siRNA sense strand
ucagcagaaaucuuuauga

SEQ ID NO: 736524 - RNA, 19 nt, Homo sapiens
  misc_RNA (1)...(19): siRNA sense strand
ucagauuucagaagaagug

SEQ ID NO: 736525 - RNA, 19 nt, Homo sapiens
  misc_RNA (1)...(19): siRNA sense strand
ggaagcaagaacccaucaa

SEQ ID NO: 736526 - RNA, 19 nt, Homo sapiens
  misc_RNA (1)...(19): siRNA sense strand
cugcucuuccgaauuaaua

SEQ ID NO: 736527 - RNA, 19 nt, Homo sapiens
  misc_RNA (1)...(19): siRNA sense strand
gcugauuaccuaccuaaac

SEQ ID NO: 736528 - RNA, 19 nt, Homo sapiens
  misc_RNA (1)...(19): siRNA sense strand
cccaaacuucacagcauua

SEQ ID NO: 736529 - RNA, 19 nt, Homo sapiens
  misc_RNA (1)...(19): siRNA sense strand
ucaacaagagccugcugaa

SEQ ID NO: 736530 - RNA, 19 nt, Homo sapiens
  misc_RNA (1)...(19): siRNA sense strand
ccugggagaaggaaaguug

SEQ ID NO: 736531 - RNA, 19 nt, Homo sapiens
  misc_RNA (1)...(19): siRNA sense strand
ugaaccugcuggauauuuu

SEQ ID NO: 736532 - RNA, 19 nt, Homo sapiens
  misc_RNA (1)...(19): siRNA sense strand
cuaucagauuucagaagaa

SEQ ID NO: 736533 - RNA, 19 nt, Homo sapiens
  misc_RNA (1)...(19): siRNA sense strand
aaagcaaucuguccuuccu

SEQ ID NO: 736534 - RNA, 19 nt, Homo sapiens
  misc_RNA (1)...(19): siRNA sense strand
agagaauguuggaggaaag

SEQ ID NO: 736535 - RNA, 19 nt, Homo sapiens
  misc_RNA (1)...(19): siRNA sense strand
gcaaucuguccuuccugaa

SEQ ID NO: 736536 - RNA, 19 nt, Homo sapiens
  misc_RNA (1)...(19): siRNA sense strand
gcaaacuggaugaugacau

SEQ ID NO: 736537 - RNA, 19 nt, Homo sapiens
  misc_RNA (1)...(19): siRNA sense strand
gggucaugcucuaucagau

SEQ ID NO: 736538 - RNA, 19 nt, Homo sapiens
  misc_RNA (1)...(19): siRNA sense strand
aaaagagucugugcccaaa

SEQ ID NO: 736539 - RNA, 19 nt, Homo sapiens
  misc_RNA (1)...(19): siRNA sense strand
caaaagcacgggagaaagu

SEQ ID NO: 736540 - RNA, 19 nt, Homo sapiens
  misc_RNA (1)...(19): siRNA sense strand
gugcccaaaucaacaagag

SEQ ID NO: 736541 - RNA, 19 nt, Homo sapiens
  misc_RNA (1)...(19): siRNA sense strand
uggacuacauuccgcaaag

SEQ ID NO: 736542 - RNA, 19 nt, Homo sapiens
  misc_RNA (1)...(19): siRNA sense strand
uaaucaacgacuaugaaga

SEQ ID NO: 736543 - RNA, 19 nt, Homo sapiens
  misc_RNA (1)...(19): siRNA sense strand
agagccugcugaagauaau

SEQ ID NO: 736544 - RNA, 19 nt, Homo sapiens
  misc_RNA (1)...(19): siRNA sense strand
aagagccugcugaagauaa

SEQ ID NO: 736545 - RNA, 19 nt, Homo sapiens
  misc_RNA (1)...(19): siRNA sense strand
gcucuuccgaauuaauaga

SEQ ID NO: 736546 - RNA, 19 nt, Homo sapiens
  misc_RNA (1)...(19): siRNA sense strand
ccgaauuaauagacuggau

SEQ ID NO: 736547 - RNA, 19 nt, Homo sapiens
  misc_RNA (1)...(19): siRNA sense strand
gggaagagcuguuugauca

SEQ ID NO: 736548 - RNA, 19 nt, Homo sapiens
  misc_RNA (1)...(19): siRNA sense strand
ggaaggagaugaagaaugg

SEQ ID NO: 736549 - RNA, 19 nt, Homo sapiens
  misc_RNA (1)...(19): siRNA sense strand
gcaagugaaucaugagaaa

SEQ ID NO: 736550 - RNA, 19 nt, Homo sapiens
  misc_RNA (1)...(19): siRNA sense strand
gggaggauguguaucaaua

SEQ ID NO: 736551 - RNA, 19 nt, Homo sapiens
  misc_RNA (1)...(19): siRNA sense strand
gaaguuaccugugggauuc

SEQ ID NO: 736552 - RNA, 19 nt, Homo sapiens
  misc_RNA (1)...(19): siRNA sense strand
gcacaacaaugccgugguu

SEQ ID NO: 736553 - RNA, 19 nt, Homo sapiens
  misc_RNA (1)...(19): siRNA sense strand
ugaaggaacugucaccaaa

SEQ ID NO: 736554 - RNA, 19 nt, Homo sapiens
  misc_RNA (1)...(19): siRNA sense strand
uggagacgauggaucauua

SEQ ID NO: 736555 - RNA, 19 nt, Homo sapiens
  misc_RNA (1)...(19): siRNA sense strand
cgacggaucucuuuacaag

SEQ ID NO: 736556 - RNA, 19 nt, Homo sapiens
  misc_RNA (1)...(19): siRNA sense strand
gagcagauguggucaaacu

SEQ ID NO: 736557 - RNA, 19 nt, Homo sapiens
  misc_RNA (1)...(19): siRNA sense strand
gaucaaggacaagaaguua

SEQ ID NO: 736558 - RNA, 19 nt, Homo sapiens
  misc_RNA (1)...(19): siRNA sense strand
gagaagaugaucaguggua

SEQ ID NO: 736559 - RNA, 19 nt, Homo sapiens
  misc_RNA (1)...(19): siRNA sense strand
aaacaaagguaugagaaga

SEQ ID NO: 736560 - RNA, 19 nt, Homo sapiens
  misc_RNA (1)...(19): siRNA sense strand
gcacauugaucugguggaa

SEQ ID NO: 736561 - RNA, 19 nt, Homo sapiens
  misc_RNA (1)...(19): siRNA sense strand
aaaggaagaucaaggacaa

SEQ ID NO: 736562 - RNA, 19 nt, Homo sapiens
  misc_RNA (1)...(19): siRNA sense strand
gaacugaggcacauugauc

SEQ ID NO: 736563 - RNA, 19 nt, Homo sapiens
  misc_RNA (1)...(19): siRNA sense strand
gaagagcuguuugaucaca

SEQ ID NO: 736564 - RNA, 19 nt, Homo sapiens
  misc_RNA (1)...(19): siRNA sense strand
ggaaacaaagguaugagaa

SEQ ID NO: 736565 - RNA, 19 nt, Homo sapiens
  misc_RNA (1)...(19): siRNA sense strand
ggacaaagcgauuuaaagc

SEQ ID NO: 736566 - RNA, 19 nt, Homo sapiens
  misc_RNA (1)...(19): siRNA sense strand
ggaagcagacgcacaacaa

SEQ ID NO: 736567 - RNA, 19 nt, Homo sapiens
  misc_RNA (1)...(19): siRNA sense strand
gaagacauccggacagagu

SEQ ID NO: 736568 - RNA, 19 nt, Homo sapiens
  misc_RNA (1)...(19): siRNA sense strand
caucguagcuguggugaau

SEQ ID NO: 736569 - RNA, 19 nt, Homo sapiens
  misc_RNA (1)...(19): siRNA sense strand
ggacuggaccgucugaaug

SEQ ID NO: 736570 - RNA, 19 nt, Homo sapiens
  misc_RNA (1)...(19): siRNA sense strand
gaucuacgccauuccuauu

SEQ ID NO: 736571 - RNA, 19 nt, Homo sapiens
  misc_RNA (1)...(19): siRNA sense strand
gaugaucagugguauguac

SEQ ID NO: 736572 - RNA, 19 nt, Homo sapiens
  misc_RNA (1)...(19): siRNA sense strand
gacgauggaucauuagaag

SEQ ID NO: 736573 - RNA, 19 nt, Homo sapiens
  misc_RNA (1)...(19): siRNA sense strand
gcacagaggcaagcagcua

SEQ ID NO: 736574 - RNA, 19 nt, Homo sapiens
  misc_RNA (1)...(19): siRNA sense strand
cugcaucucugacuucuug

SEQ ID NO: 736575 - RNA, 19 nt, Homo sapiens
  misc_RNA (1)...(19): siRNA sense strand
gaguggagccguccgauga

SEQ ID NO: 736576 - RNA, 19 nt, Homo sapiens
  misc_RNA (1)...(19): siRNA sense strand
gaaacucucauagauauca

SEQ ID NO: 736577 - RNA, 19 nt, Homo sapiens
  misc_RNA (1)...(19): siRNA sense strand
caccaaugcuugcuacaug

SEQ ID NO: 736578 - RNA, 19 nt, Homo sapiens
  misc_RNA (1)...(19): siRNA sense strand
gaaaauccguagugggaaa

SEQ ID NO: 736579 - RNA, 19 nt, Homo sapiens
  misc_RNA (1)...(19): siRNA sense strand
uggcugcgguuguggauaa

SEQ ID NO: 736580 - RNA, 19 nt, Homo sapiens
  misc_RNA (1)...(19): siRNA sense strand
gggcuucacguucucauuu

SEQ ID NO: 736581 - RNA, 19 nt, Homo sapiens
  misc_RNA (1)...(19): siRNA sense strand
gagguuggacucauuguug

SEQ ID NO: 736582 - RNA, 19 nt, Homo sapiens
  misc_RNA (1)...(19): siRNA sense strand
gagcagcaccggcagauag

SEQ ID NO: 736583 - RNA, 19 nt, Homo sapiens
  misc_RNA (1)...(19): siRNA sense strand
gauaagauccgcgagaaca

SEQ ID NO: 736584 - RNA, 19 nt, Homo sapiens
  misc_RNA (1)...(19): siRNA sense strand
gaaaucguccgcaacaucu

SEQ ID NO: 736585 - RNA, 19 nt, Homo sapiens
  misc_RNA (1)...(19): siRNA sense strand
gaggagacccuggcucauu

SEQ ID NO: 736586 - RNA, 19 nt, Homo sapiens
  misc_RNA (1)...(19): siRNA sense strand
ggucaaacugcuuaacaaa

SEQ ID NO: 736587 - RNA, 19 nt, Homo sapiens
  misc_RNA (1)...(19): siRNA sense strand
ccaaguuucucucucagau

SEQ ID NO: 736588 - RNA, 19 nt, Homo sapiens
  misc_RNA (1)...(19): siRNA sense strand
guauguaccugggugaaau

SEQ ID NO: 736589 - RNA, 19 nt, Homo sapiens
  misc_RNA (1)...(19): siRNA sense strand
gaaacaaagguaugagaag

SEQ ID NO: 736590 - RNA, 19 nt, Homo sapiens
  misc_RNA (1)...(19): siRNA sense strand
gaccgagaauggugacuuc

SEQ ID NO: 736591 - RNA, 19 nt, Homo sapiens
  misc_RNA (1)...(19): siRNA sense strand
gauguggucaaacugcuua

SEQ ID NO: 736592 - RNA, 19 nt, Homo sapiens
  misc_RNA (1)...(19): siRNA sense strand
ccaugcggcucuccgauga

SEQ ID NO: 736593 - RNA, 19 nt, Homo sapiens
  misc_RNA (1)...(19): siRNA sense strand
caacaagaucuacgccauu

SEQ ID NO: 736594 - RNA, 19 nt, Homo sapiens
  misc_RNA (1)...(19): siRNA sense strand
ggagagcugguucgacuga

SEQ ID NO: 736595 - RNA, 19 nt, Homo sapiens
  misc_RNA (1)...(19): siRNA sense strand
uuaaucgacuucaccaaga

SEQ ID NO: 736596 - RNA, 19 nt, Homo sapiens
  misc_RNA (1)...(19): siRNA sense strand
gaaaugcacaacaagaucu

SEQ ID NO: 736597 - RNA, 19 nt, Homo sapiens
  misc_RNA (1)...(19): siRNA sense strand
ggaaaugcacaacaagauc

SEQ ID NO: 736598 - RNA, 19 nt, Homo sapiens
  misc_RNA (1)...(19): siRNA sense strand
aggagacccuggcucauuu

SEQ ID NO: 736599 - RNA, 19 nt, Homo sapiens
  misc_RNA (1)...(19): siRNA sense strand
gaagaucaaggacaagaag

SEQ ID NO: 736600 - RNA, 19 nt, Homo sapiens
  misc_RNA (1)...(19): siRNA sense strand
agaccaaguuucucucuca

SEQ ID NO: 736601 - RNA, 19 nt, Homo sapiens
  misc_RNA (1)...(19): siRNA sense strand
ccacaaugccaaagaaauc

SEQ ID NO: 736602 - RNA, 19 nt, Homo sapiens
  misc_RNA (1)...(19): siRNA sense strand
uaaggaaggccuccacaau

SEQ ID NO: 736603 - RNA, 19 nt, Homo sapiens
  misc_RNA (1)...(19): siRNA sense strand
uagaagacauccggacaga

SEQ ID NO: 736604 - RNA, 19 nt, Homo sapiens
  misc_RNA (1)...(19): siRNA sense strand
cagcagcuaggucugaaua

SEQ ID NO: 736605 - RNA, 19 nt, Homo sapiens
  misc_RNA (1)...(19): siRNA sense strand
gggugcaagugaaucauga

SEQ ID NO: 736606 - RNA, 19 nt, Homo sapiens
  misc_RNA (1)...(19): siRNA sense strand
uaaucgacuucaccaagaa

SEQ ID NO: 736607 - RNA, 19 nt, Homo sapiens
  misc_RNA (1)...(19): siRNA sense strand
acaaagguaugagaagaug

SEQ ID NO: 736608 - RNA, 19 nt, Homo sapiens
  misc_RNA (1)...(19): siRNA sense strand
ccuaaaugcugggaaacaa

SEQ ID NO: 736609 - RNA, 19 nt, Homo sapiens
  misc_RNA (1)...(19): siRNA sense strand
acaagacgcacccacagua

SEQ ID NO: 736610 - RNA, 19 nt, Homo sapiens
  misc_RNA (1)...(19): siRNA sense strand
ucaggaaggagaugaagaa

SEQ ID NO: 736611 - RNA, 19 nt, Homo sapiens
  misc_RNA (1)...(19): siRNA sense strand
ugaagaacguggagauggu

SEQ ID NO: 736612 - RNA, 19 nt, Homo sapiens
  misc_RNA (1)...(19): siRNA sense strand
acaaugccgugguuaagau

SEQ ID NO: 736613 - RNA, 19 nt, Homo sapiens
  misc_RNA (1)...(19): siRNA sense strand
ggaaguuuaacaccaguga

SEQ ID NO: 736614 - RNA, 19 nt, Homo sapiens
  misc_RNA (1)...(19): siRNA sense strand
ggaagaucaaggacaagaa

SEQ ID NO: 736615 - RNA, 19 nt, Homo sapiens
  misc_RNA (1)...(19): siRNA sense strand
gaagcagacgcacaacaau

SEQ ID NO: 736616 - RNA, 19 nt, Homo sapiens
  misc_RNA (1)...(19): siRNA sense strand
caucggcacuggcaccaau

SEQ ID NO: 736617 - RNA, 19 nt, Homo sapiens
  misc_RNA (1)...(19): siRNA sense strand
gauggucaguggcauguac

SEQ ID NO: 736618 - RNA, 19 nt, Homo sapiens
  misc_RNA (1)...(19): siRNA sense strand
gacaguauccucgucaaga

SEQ ID NO: 736619 - RNA, 19 nt, Homo sapiens
  misc_RNA (1)...(19): siRNA sense strand
aaagagaacgguggaaaug

SEQ ID NO: 736620 - RNA, 19 nt, Homo sapiens
  misc_RNA (1)...(19): siRNA sense strand
caacagccacagucaagau

SEQ ID NO: 736621 - RNA, 19 nt, Homo sapiens
  misc_RNA (1)...(19): siRNA sense strand
ucucugacuucuuggacua

SEQ ID NO: 736622 - RNA, 19 nt, Homo sapiens
  misc_RNA (1)...(19): siRNA sense strand
uuaagaugcugcccuccuu

SEQ ID NO: 736623 - RNA, 19 nt, Homo sapiens
  misc_RNA (1)...(19): siRNA sense strand
cagcacguuugcaccauug

SEQ ID NO: 736624 - RNA, 19 nt, Homo sapiens
  misc_RNA (1)...(19): siRNA sense strand
gaugauaucaggacacacu

SEQ ID NO: 736625 - RNA, 19 nt, Homo sapiens
  misc_RNA (1)...(19): siRNA sense strand
ggacgggacacucuacaag

SEQ ID NO: 736626 - RNA, 19 nt, Homo sapiens
  misc_RNA (1)...(19): siRNA sense strand
gaggaacugaggcacauug

SEQ ID NO: 736627 - RNA, 19 nt, Homo sapiens
  misc_RNA (1)...(19): siRNA sense strand
gaagaugaucagugguaug

SEQ ID NO: 736628 - RNA, 19 nt, Homo sapiens
  misc_RNA (1)...(19): siRNA sense strand
gggaaacaaagguaugaga

SEQ ID NO: 736629 - RNA, 19 nt, Homo sapiens
  misc_RNA (1)...(19): siRNA sense strand
caugaugaccugugcuuau

SEQ ID NO: 736630 - RNA, 19 nt, Homo sapiens
  misc_RNA (1)...(19): siRNA sense strand
agagaacgguggaaaugca

SEQ ID NO: 736631 - RNA, 19 nt, Homo sapiens
  misc_RNA (1)...(19): siRNA sense strand
ugaaccgccugcgugauaa

SEQ ID NO: 736632 - RNA, 19 nt, Homo sapiens
  misc_RNA (1)...(19): siRNA sense strand
ugggagauuucauggagaa

SEQ ID NO: 736633 - RNA, 19 nt, Homo sapiens
  misc_RNA (1)...(19): siRNA sense strand
ggugaaaucguccgcaaca

SEQ ID NO: 736634 - RNA, 19 nt, Homo sapiens
  misc_RNA (1)...(19): siRNA sense strand
caacgggugucuggaugau

SEQ ID NO: 736635 - RNA, 19 nt, Homo sapiens
  misc_RNA (1)...(19): siRNA sense strand
ucacauggaguccgagguu

SEQ ID NO: 736636 - RNA, 19 nt, Homo sapiens
  misc_RNA (1)...(19): siRNA sense strand
ucacguggacaaaggguuu

SEQ ID NO: 736637 - RNA, 19 nt, Homo sapiens
  misc_RNA (1)...(19): siRNA sense strand
caacaaugccgugguuaag

SEQ ID NO: 736638 - RNA, 19 nt, Homo sapiens
  misc_RNA (1)...(19): siRNA sense strand
ucguagcuguggugaauga

SEQ ID NO: 736639 - RNA, 19 nt, Homo sapiens
  misc_RNA (1)...(19): siRNA sense strand
cacauugucuccugcaucu

SEQ ID NO: 736640 - RNA, 19 nt, Homo sapiens
  misc_RNA (1)...(19): siRNA sense strand
cagccacagucaagauguu

SEQ ID NO: 736641 - RNA, 19 nt, Homo sapiens
  misc_RNA (1)...(19): siRNA sense strand
caagacgcacccacaguau

SEQ ID NO: 736642 - RNA, 19 nt, Homo sapiens
  misc_RNA (1)...(19): siRNA sense strand
ccagcacguuugcaccauu

SEQ ID NO: 736643 - RNA, 19 nt, Homo sapiens
  misc_RNA (1)...(19): siRNA sense strand
ccuccacaaugccaaagaa

SEQ ID NO: 736644 - RNA, 19 nt, Homo sapiens
  misc_RNA (1)...(19): siRNA sense strand
caugaugaccuguggcuau

SEQ ID NO: 736645 - RNA, 19 nt, Homo sapiens
  misc_RNA (1)...(19): siRNA sense strand
caagcuucauccacacuuc

SEQ ID NO: 736646 - RNA, 19 nt, Homo sapiens
  misc_RNA (1)...(19): siRNA sense strand
gaacugucaccaaaaugua

SEQ ID NO: 736647 - RNA, 19 nt, Homo sapiens
  misc_RNA (1)...(19): siRNA sense strand
gggaagagcuguuugauca

SEQ ID NO: 736648 - RNA, 19 nt, Homo sapiens
  misc_RNA (1)...(19): siRNA sense strand
ggaaggagaugaagaaugg

SEQ ID NO: 736649 - RNA, 19 nt, Homo sapiens
  misc_RNA (1)...(19): siRNA sense strand
gcaagugaaucaugagaaa

SEQ ID NO: 736650 - RNA, 19 nt, Homo sapiens
  misc_RNA (1)...(19): siRNA sense strand
gggaggauguguaucaaua

SEQ ID NO: 736651 - RNA, 19 nt, Homo sapiens
  misc_RNA (1)...(19): siRNA sense strand
gaaguuaccugugggauuc

SEQ ID NO: 736652 - RNA, 19 nt, Homo sapiens
  misc_RNA (1)...(19): siRNA sense strand
gcacaacaaugccgugguu

SEQ ID NO: 736653 - RNA, 19 nt, Homo sapiens
  misc_RNA (1)...(19): siRNA sense strand
ugaaggaacugucaccaaa

SEQ ID NO: 736654 - RNA, 19 nt, Homo sapiens
  misc_RNA (1)...(19): siRNA sense strand
uggagacgauggaucauua

SEQ ID NO: 736655 - RNA, 19 nt, Homo sapiens
  misc_RNA (1)...(19): siRNA sense strand
cgacggaucucuuuacaag

SEQ ID NO: 736656 - RNA, 19 nt, Homo sapiens
  misc_RNA (1)...(19): siRNA sense strand
gagcagauguggucaaacu

SEQ ID NO: 736657 - RNA, 19 nt, Homo sapiens
  misc_RNA (1)...(19): siRNA sense strand
gaucaaggacaagaaguua

SEQ ID NO: 736658 - RNA, 19 nt, Homo sapiens
  misc_RNA (1)...(19): siRNA sense strand
gagaagaugaucaguggua

SEQ ID NO: 736659 - RNA, 19 nt, Homo sapiens
  misc_RNA (1)...(19): siRNA sense strand
aaacaaagguaugagaaga

SEQ ID NO: 736660 - RNA, 19 nt, Homo sapiens
  misc_RNA (1)...(19): siRNA sense strand
gcacauugaucugguggaa

SEQ ID NO: 736661 - RNA, 19 nt, Homo sapiens
  misc_RNA (1)...(19): siRNA sense strand
aaaggaagaucaaggacaa

SEQ ID NO: 736662 - RNA, 19 nt, Homo sapiens
  misc_RNA (1)...(19): siRNA sense strand
gaacugaggcacauugauc

SEQ ID NO: 736663 - RNA, 19 nt, Homo sapiens
  misc_RNA (1)...(19): siRNA sense strand
gaagagcuguuugaucaca

SEQ ID NO: 736664 - RNA, 19 nt, Homo sapiens
  misc_RNA (1)...(19): siRNA sense strand
ggaaacaaagguaugagaa

SEQ ID NO: 736665 - RNA, 19 nt, Homo sapiens
  misc_RNA (1)...(19): siRNA sense strand
ggacaaagcgauuuaaagc

SEQ ID NO: 736666 - RNA, 19 nt, Homo sapiens
  misc_RNA (1)...(19): siRNA sense strand
ggaagcagacgcacaacaa

SEQ ID NO: 736667 - RNA, 19 nt, Homo sapiens
  misc_RNA (1)...(19): siRNA sense strand
gaagacauccggacagagu

SEQ ID NO: 736668 - RNA, 19 nt, Homo sapiens
  misc_RNA (1)...(19): siRNA sense strand
caucguagcuguggugaau

SEQ ID NO: 736669 - RNA, 19 nt, Homo sapiens
  misc_RNA (1)...(19): siRNA sense strand
ggacuggaccgucugaaug

SEQ ID NO: 736670 - RNA, 19 nt, Homo sapiens
  misc_RNA (1)...(19): siRNA sense strand
gaucuacgccauuccuauu

SEQ ID NO: 736671 - RNA, 19 nt, Homo sapiens
  misc_RNA (1)...(19): siRNA sense strand
gaugaucagugguauguac

SEQ ID NO: 736672 - RNA, 19 nt, Homo sapiens
  misc_RNA (1)...(19): siRNA sense strand
gacgauggaucauuagaag

SEQ ID NO: 736673 - RNA, 19 nt, Homo sapiens
  misc_RNA (1)...(19): siRNA sense strand
gcacagaggcaagcagcua

SEQ ID NO: 736674 - RNA, 19 nt, Homo sapiens
  misc_RNA (1)...(19): siRNA sense strand
cugcaucucugacuucuug

SEQ ID NO: 736675 - RNA, 19 nt, Homo sapiens
  misc_RNA (1)...(19): siRNA sense strand
gaguggagccguccgauga

SEQ ID NO: 736676 - RNA, 19 nt, Homo sapiens
  misc_RNA (1)...(19): siRNA sense strand
gaaacucucauagauauca

SEQ ID NO: 736677 - RNA, 19 nt, Homo sapiens
  misc_RNA (1)...(19): siRNA sense strand
caccaaugcuugcuacaug

SEQ ID NO: 736678 - RNA, 19 nt, Homo sapiens
  misc_RNA (1)...(19): siRNA sense strand
gaaaauccguagugggaaa

SEQ ID NO: 736679 - RNA, 19 nt, Homo sapiens
  misc_RNA (1)...(19): siRNA sense strand
uggcugcgguuguggauaa

SEQ ID NO: 736680 - RNA, 19 nt, Homo sapiens
  misc_RNA (1)...(19): siRNA sense strand
gggcuucacguucucauuu

SEQ ID NO: 736681 - RNA, 19 nt, Homo sapiens
  misc_RNA (1)...(19): siRNA sense strand
gagguuggacucauuguug

SEQ ID NO: 736682 - RNA, 19 nt, Homo sapiens
  misc_RNA (1)...(19): siRNA sense strand
gagcagcaccggcagauag

SEQ ID NO: 736683 - RNA, 19 nt, Homo sapiens
  misc_RNA (1)...(19): siRNA sense strand
gauaagauccgcgagaaca

SEQ ID NO: 736684 - RNA, 19 nt, Homo sapiens
  misc_RNA (1)...(19): siRNA sense strand
gaaaucguccgcaacaucu

SEQ ID NO: 736685 - RNA, 19 nt, Homo sapiens
  misc_RNA (1)...(19): siRNA sense strand
gaggagacccuggcucauu

SEQ ID NO: 736686 - RNA, 19 nt, Homo sapiens
  misc_RNA (1)...(19): siRNA sense strand
ggucaaacugcuuaacaaa

SEQ ID NO: 736687 - RNA, 19 nt, Homo sapiens
  misc_RNA (1)...(19): siRNA sense strand
ccaaguuucucucucagau

SEQ ID NO: 736688 - RNA, 19 nt, Homo sapiens
  misc_RNA (1)...(19): siRNA sense strand
guauguaccugggugaaau

SEQ ID NO: 736689 - RNA, 19 nt, Homo sapiens
  misc_RNA (1)...(19): siRNA sense strand
gaaacaaagguaugagaag

SEQ ID NO: 736690 - RNA, 19 nt, Homo sapiens
  misc_RNA (1)...(19): siRNA sense strand
gaccgagaauggugacuuc

SEQ ID NO: 736691 - RNA, 19 nt, Homo sapiens
  misc_RNA (1)...(19): siRNA sense strand
gauguggucaaacugcuua

SEQ ID NO: 736692 - RNA, 19 nt, Homo sapiens
  misc_RNA (1)...(19): siRNA sense strand
ccaugcggcucuccgauga

SEQ ID NO: 736693 - RNA, 19 nt, Homo sapiens
  misc_RNA (1)...(19): siRNA sense strand
caacaagaucuacgccauu

SEQ ID NO: 736694 - RNA, 19 nt, Homo sapiens
  misc_RNA (1)...(19): siRNA sense strand
ggagagcugguucgacuga

SEQ ID NO: 736695 - RNA, 19 nt, Homo sapiens
  misc_RNA (1)...(19): siRNA sense strand
uuaaucgacuucaccaaga

SEQ ID NO: 736696 - RNA, 19 nt, Homo sapiens
  misc_RNA (1)...(19): siRNA sense strand
gaaaugcacaacaagaucu

SEQ ID NO: 736697 - RNA, 19 nt, Homo sapiens
  misc_RNA (1)...(19): siRNA sense strand
ggaaaugcacaacaagauc

SEQ ID NO: 736698 - RNA, 19 nt, Homo sapiens
  misc_RNA (1)...(19): siRNA sense strand
aggagacccuggcucauuu

SEQ ID NO: 736699 - RNA, 19 nt, Homo sapiens
  misc_RNA (1)...(19): siRNA sense strand
gaagaucaaggacaagaag

SEQ ID NO: 736700 - RNA, 19 nt, Homo sapiens
  misc_RNA (1)...(19): siRNA sense strand
agaccaaguuucucucuca

SEQ ID NO: 736701 - RNA, 19 nt, Homo sapiens
  misc_RNA (1)...(19): siRNA sense strand
ccacaaugccaaagaaauc

SEQ ID NO: 736702 - RNA, 19 nt, Homo sapiens
  misc_RNA (1)...(19): siRNA sense strand
uaaggaaggccuccacaau

SEQ ID NO: 736703 - RNA, 19 nt, Homo sapiens
  misc_RNA (1)...(19): siRNA sense strand
uagaagacauccggacaga

SEQ ID NO: 736704 - RNA, 19 nt, Homo sapiens
  misc_RNA (1)...(19): siRNA sense strand
cagcagcuaggucugaaua

SEQ ID NO: 736705 - RNA, 19 nt, Homo sapiens
  misc_RNA (1)...(19): siRNA sense strand
gggugcaagugaaucauga

SEQ ID NO: 736706 - RNA, 19 nt, Homo sapiens
  misc_RNA (1)...(19): siRNA sense strand
uaaucgacuucaccaagaa

SEQ ID NO: 736707 - RNA, 19 nt, Homo sapiens
  misc_RNA (1)...(19): siRNA sense strand
acaaagguaugagaagaug

SEQ ID NO: 736708 - RNA, 19 nt, Homo sapiens
  misc_RNA (1)...(19): siRNA sense strand
ccuaaaugcugggaaacaa

SEQ ID NO: 736709 - RNA, 19 nt, Homo sapiens
  misc_RNA (1)...(19): siRNA sense strand
acaagacgcacccacagua

SEQ ID NO: 736710 - RNA, 19 nt, Homo sapiens
  misc_RNA (1)...(19): siRNA sense strand
ucaggaaggagaugaagaa

SEQ ID NO: 736711 - RNA, 19 nt, Homo sapiens
  misc_RNA (1)...(19): siRNA sense strand
ugaagaacguggagauggu

SEQ ID NO: 736712 - RNA, 19 nt, Homo sapiens
  misc_RNA (1)...(19): siRNA sense strand
acaaugccgugguuaagau

SEQ ID NO: 736713 - RNA, 19 nt, Homo sapiens
  misc_RNA (1)...(19): siRNA sense strand
ggaaguuuaacaccaguga

SEQ ID NO: 736714 - RNA, 19 nt, Homo sapiens
  misc_RNA (1)...(19): siRNA sense strand
ggaagaucaaggacaagaa

SEQ ID NO: 736715 - RNA, 19 nt, Homo sapiens
  misc_RNA (1)...(19): siRNA sense strand
gaagcagacgcacaacaau

SEQ ID NO: 736716 - RNA, 19 nt, Homo sapiens
  misc_RNA (1)...(19): siRNA sense strand
caucggcacuggcaccaau

SEQ ID NO: 736717 - RNA, 19 nt, Homo sapiens
  misc_RNA (1)...(19): siRNA sense strand
gauggucaguggcauguac

SEQ ID NO: 736718 - RNA, 19 nt, Homo sapiens
  misc_RNA (1)...(19): siRNA sense strand
gacaguauccucgucaaga

SEQ ID NO: 736719 - RNA, 19 nt, Homo sapiens
  misc_RNA (1)...(19): siRNA sense strand
aaagagaacgguggaaaug

SEQ ID NO: 736720 - RNA, 19 nt, Homo sapiens
  misc_RNA (1)...(19): siRNA sense strand
caacagccacagucaagau

SEQ ID NO: 736721 - RNA, 19 nt, Homo sapiens
  misc_RNA (1)...(19): siRNA sense strand
ucucugacuucuuggacua

SEQ ID NO: 736722 - RNA, 19 nt, Homo sapiens
  misc_RNA (1)...(19): siRNA sense strand
uuaagaugcugcccuccuu

SEQ ID NO: 736723 - RNA, 19 nt, Homo sapiens
  misc_RNA (1)...(19): siRNA sense strand
cagcacguuugcaccauug

SEQ ID NO: 736724 - RNA, 19 nt, Homo sapiens
  misc_RNA (1)...(19): siRNA sense strand
gaugauaucaggacacacu

SEQ ID NO: 736725 - RNA, 19 nt, Homo sapiens
  misc_RNA (1)...(19): siRNA sense strand
ggacgggacacucuacaag

SEQ ID NO: 736726 - RNA, 19 nt, Homo sapiens
  misc_RNA (1)...(19): siRNA sense strand
gaggaacugaggcacauug

SEQ ID NO: 736727 - RNA, 19 nt, Homo sapiens
  misc_RNA (1)...(19): siRNA sense strand
gaagaugaucagugguaug

SEQ ID NO: 736728 - RNA, 19 nt, Homo sapiens
  misc_RNA (1)...(19): siRNA sense strand
gggaaacaaagguaugaga

SEQ ID NO: 736729 - RNA, 19 nt, Homo sapiens
  misc_RNA (1)...(19): siRNA sense strand
caugaugaccugugcuuau

SEQ ID NO: 736730 - RNA, 19 nt, Homo sapiens
  misc_RNA (1)...(19): siRNA sense strand
agagaacgguggaaaugca

SEQ ID NO: 736731 - RNA, 19 nt, Homo sapiens
  misc_RNA (1)...(19): siRNA sense strand
ugaaccgccugcgugauaa

SEQ ID NO: 736732 - RNA, 19 nt, Homo sapiens
  misc_RNA (1)...(19): siRNA sense strand
ugggagauuucauggagaa

SEQ ID NO: 736733 - RNA, 19 nt, Homo sapiens
  misc_RNA (1)...(19): siRNA sense strand
ggugaaaucguccgcaaca

SEQ ID NO: 736734 - RNA, 19 nt, Homo sapiens
  misc_RNA (1)...(19): siRNA sense strand
caacgggugucuggaugau

SEQ ID NO: 736735 - RNA, 19 nt, Homo sapiens
  misc_RNA (1)...(19): siRNA sense strand
ucacauggaguccgagguu

SEQ ID NO: 736736 - RNA, 19 nt, Homo sapiens
  misc_RNA (1)...(19): siRNA sense strand
ucacguggacaaaggguuu

SEQ ID NO: 736737 - RNA, 19 nt, Homo sapiens
  misc_RNA (1)...(19): siRNA sense strand
caacaaugccgugguuaag

SEQ ID NO: 736738 - RNA, 19 nt, Homo sapiens
  misc_RNA (1)...(19): siRNA sense strand
ucguagcuguggugaauga

SEQ ID NO: 736739 - RNA, 19 nt, Homo sapiens
  misc_RNA (1)...(19): siRNA sense strand
cacauugucuccugcaucu

SEQ ID NO: 736740 - RNA, 19 nt, Homo sapiens
  misc_RNA (1)...(19): siRNA sense strand
cagccacagucaagauguu

SEQ ID NO: 736741 - RNA, 19 nt, Homo sapiens
  misc_RNA (1)...(19): siRNA sense strand
caagacgcacccacaguau

SEQ ID NO: 736742 - RNA, 19 nt, Homo sapiens
  misc_RNA (1)...(19): siRNA sense strand
ccagcacguuugcaccauu

SEQ ID NO: 736743 - RNA, 19 nt, Homo sapiens
  misc_RNA (1)...(19): siRNA sense strand
ccuccacaaugccaaagaa

SEQ ID NO: 736744 - RNA, 19 nt, Homo sapiens
  misc_RNA (1)...(19): siRNA sense strand
caugaugaccuguggcuau

SEQ ID NO: 736745 - RNA, 19 nt, Homo sapiens
  misc_RNA (1)...(19): siRNA sense strand
caagcuucauccacacuuc

SEQ ID NO: 736746 - RNA, 19 nt, Homo sapiens
  misc_RNA (1)...(19): siRNA sense strand
gaacugucaccaaaaugua

SEQ ID NO: 736747 - RNA, 19 nt, Homo sapiens
  misc_RNA (1)...(19): siRNA sense strand
gggaagagcuguuugauca

SEQ ID NO: 736748 - RNA, 19 nt, Homo sapiens
  misc_RNA (1)...(19): siRNA sense strand
ggaaggagaugaagaaugg

SEQ ID NO: 736749 - RNA, 19 nt, Homo sapiens
  misc_RNA (1)...(19): siRNA sense strand
gcaagugaaucaugagaaa

SEQ ID NO: 736750 - RNA, 19 nt, Homo sapiens
  misc_RNA (1)...(19): siRNA sense strand
gggaggauguguaucaaua

SEQ ID NO: 736751 - RNA, 19 nt, Homo sapiens
  misc_RNA (1)...(19): siRNA sense strand
gaaguuaccugugggauuc

SEQ ID NO: 736752 - RNA, 19 nt, Homo sapiens
  misc_RNA (1)...(19): siRNA sense strand
gcacaacaaugccgugguu

SEQ ID NO: 736753 - RNA, 19 nt, Homo sapiens
  misc_RNA (1)...(19): siRNA sense strand
ugaaggaacugucaccaaa

SEQ ID NO: 736754 - RNA, 19 nt, Homo sapiens
  misc_RNA (1)...(19): siRNA sense strand
uggagacgauggaucauua

SEQ ID NO: 736755 - RNA, 19 nt, Homo sapiens
  misc_RNA (1)...(19): siRNA sense strand
cgacggaucucuuuacaag

SEQ ID NO: 736756 - RNA, 19 nt, Homo sapiens
  misc_RNA (1)...(19): siRNA sense strand
gagcagauguggucaaacu

SEQ ID NO: 736757 - RNA, 19 nt, Homo sapiens
  misc_RNA (1)...(19): siRNA sense strand
gaucaaggacaagaaguua

SEQ ID NO: 736758 - RNA, 19 nt, Homo sapiens
  misc_RNA (1)...(19): siRNA sense strand
gagaagaugaucaguggua

SEQ ID NO: 736759 - RNA, 19 nt, Homo sapiens
  misc_RNA (1)...(19): siRNA sense strand
aaacaaagguaugagaaga

SEQ ID NO: 736760 - RNA, 19 nt, Homo sapiens
  misc_RNA (1)...(19): siRNA sense strand
gcacauugaucugguggaa

SEQ ID NO: 736761 - RNA, 19 nt, Homo sapiens
  misc_RNA (1)...(19): siRNA sense strand
aaaggaagaucaaggacaa

SEQ ID NO: 736762 - RNA, 19 nt, Homo sapiens
  misc_RNA (1)...(19): siRNA sense strand
gaacugaggcacauugauc

SEQ ID NO: 736763 - RNA, 19 nt, Homo sapiens
  misc_RNA (1)...(19): siRNA sense strand
gaagagcuguuugaucaca

SEQ ID NO: 736764 - RNA, 19 nt, Homo sapiens
  misc_RNA (1)...(19): siRNA sense strand
ggaaacaaagguaugagaa

SEQ ID NO: 736765 - RNA, 19 nt, Homo sapiens
  misc_RNA (1)...(19): siRNA sense strand
ggacaaagcgauuuaaagc

SEQ ID NO: 736766 - RNA, 19 nt, Homo sapiens
  misc_RNA (1)...(19): siRNA sense strand
ggaagcagacgcacaacaa

SEQ ID NO: 736767 - RNA, 19 nt, Homo sapiens
  misc_RNA (1)...(19): siRNA sense strand
gaagacauccggacagagu

SEQ ID NO: 736768 - RNA, 19 nt, Homo sapiens
  misc_RNA (1)...(19): siRNA sense strand
caucguagcuguggugaau

SEQ ID NO: 736769 - RNA, 19 nt, Homo sapiens
  misc_RNA (1)...(19): siRNA sense strand
ggacuggaccgucugaaug

SEQ ID NO: 736770 - RNA, 19 nt, Homo sapiens
  misc_RNA (1)...(19): siRNA sense strand
gaucuacgccauuccuauu

SEQ ID NO: 736771 - RNA, 19 nt, Homo sapiens
  misc_RNA (1)...(19): siRNA sense strand
gaugaucagugguauguac

SEQ ID NO: 736772 - RNA, 19 nt, Homo sapiens
  misc_RNA (1)...(19): siRNA sense strand
gacgauggaucauuagaag

SEQ ID NO: 736773 - RNA, 19 nt, Homo sapiens
  misc_RNA (1)...(19): siRNA sense strand
gcacagaggcaagcagcua

SEQ ID NO: 736774 - RNA, 19 nt, Homo sapiens
  misc_RNA (1)...(19): siRNA sense strand
cugcaucucugacuucuug

SEQ ID NO: 736775 - RNA, 19 nt, Homo sapiens
  misc_RNA (1)...(19): siRNA sense strand
gaguggagccguccgauga

SEQ ID NO: 736776 - RNA, 19 nt, Homo sapiens
  misc_RNA (1)...(19): siRNA sense strand
gaaacucucauagauauca

SEQ ID NO: 736777 - RNA, 19 nt, Homo sapiens
  misc_RNA (1)...(19): siRNA sense strand
caccaaugcuugcuacaug

SEQ ID NO: 736778 - RNA, 19 nt, Homo sapiens
  misc_RNA (1)...(19): siRNA sense strand
gaaaauccguagugggaaa

SEQ ID NO: 736779 - RNA, 19 nt, Homo sapiens
  misc_RNA (1)...(19): siRNA sense strand
uggcugcgguuguggauaa

SEQ ID NO: 736780 - RNA, 19 nt, Homo sapiens
  misc_RNA (1)...(19): siRNA sense strand
gggcuucacguucucauuu

SEQ ID NO: 736781 - RNA, 19 nt, Homo sapiens
  misc_RNA (1)...(19): siRNA sense strand
gagguuggacucauuguug

SEQ ID NO: 736782 - RNA, 19 nt, Homo sapiens
  misc_RNA (1)...(19): siRNA sense strand
gagcagcaccggcagauag

SEQ ID NO: 736783 - RNA, 19 nt, Homo sapiens
  misc_RNA (1)...(19): siRNA sense strand
gauaagauccgcgagaaca

SEQ ID NO: 736784 - RNA, 19 nt, Homo sapiens
  misc_RNA (1)...(19): siRNA sense strand
gaaaucguccgcaacaucu

SEQ ID NO: 736785 - RNA, 19 nt, Homo sapiens
  misc_RNA (1)...(19): siRNA sense strand
gaggagacccuggcucauu

SEQ ID NO: 736786 - RNA, 19 nt, Homo sapiens
  misc_RNA (1)...(19): siRNA sense strand
ggucaaacugcuuaacaaa

SEQ ID NO: 736787 - RNA, 19 nt, Homo sapiens
  misc_RNA (1)...(19): siRNA sense strand
ccaaguuucucucucagau

SEQ ID NO: 736788 - RNA, 19 nt, Homo sapiens
  misc_RNA (1)...(19): siRNA sense strand
guauguaccugggugaaau

SEQ ID NO: 736789 - RNA, 19 nt, Homo sapiens
  misc_RNA (1)...(19): siRNA sense strand
gaaacaaagguaugagaag

SEQ ID NO: 736790 - RNA, 19 nt, Homo sapiens
  misc_RNA (1)...(19): siRNA sense strand
gaccgagaauggugacuuc

SEQ ID NO: 736791 - RNA, 19 nt, Homo sapiens
  misc_RNA (1)...(19): siRNA sense strand
gauguggucaaacugcuua

SEQ ID NO: 736792 - RNA, 19 nt, Homo sapiens
  misc_RNA (1)...(19): siRNA sense strand
ccaugcggcucuccgauga

SEQ ID NO: 736793 - RNA, 19 nt, Homo sapiens
  misc_RNA (1)...(19): siRNA sense strand
caacaagaucuacgccauu

SEQ ID NO: 736794 - RNA, 19 nt, Homo sapiens
  misc_RNA (1)...(19): siRNA sense strand
ggagagcugguucgacuga

SEQ ID NO: 736795 - RNA, 19 nt, Homo sapiens
  misc_RNA (1)...(19): siRNA sense strand
uuaaucgacuucaccaaga

SEQ ID NO: 736796 - RNA, 19 nt, Homo sapiens
  misc_RNA (1)...(19): siRNA sense strand
gaaaugcacaacaagaucu

SEQ ID NO: 736797 - RNA, 19 nt, Homo sapiens
  misc_RNA (1)...(19): siRNA sense strand
ggaaaugcacaacaagauc

SEQ ID NO: 736798 - RNA, 19 nt, Homo sapiens
  misc_RNA (1)...(19): siRNA sense strand
aggagacccuggcucauuu

SEQ ID NO: 736799 - RNA, 19 nt, Homo sapiens
  misc_RNA (1)...(19): siRNA sense strand
gaagaucaaggacaagaag

SEQ ID NO: 736800 - RNA, 19 nt, Homo sapiens
  misc_RNA (1)...(19): siRNA sense strand
agaccaaguuucucucuca

SEQ ID NO: 736801 - RNA, 19 nt, Homo sapiens
  misc_RNA (1)...(19): siRNA sense strand
ccacaaugccaaagaaauc

SEQ ID NO: 736802 - RNA, 19 nt, Homo sapiens
  misc_RNA (1)...(19): siRNA sense strand
uaaggaaggccuccacaau

SEQ ID NO: 736803 - RNA, 19 nt, Homo sapiens
  misc_RNA (1)...(19): siRNA sense strand
uagaagacauccggacaga

SEQ ID NO: 736804 - RNA, 19 nt, Homo sapiens
  misc_RNA (1)...(19): siRNA sense strand
cagcagcuaggucugaaua

SEQ ID NO: 736805 - RNA, 19 nt, Homo sapiens
  misc_RNA (1)...(19): siRNA sense strand
gggugcaagugaaucauga

SEQ ID NO: 736806 - RNA, 19 nt, Homo sapiens
  misc_RNA (1)...(19): siRNA sense strand
uaaucgacuucaccaagaa

SEQ ID NO: 736807 - RNA, 19 nt, Homo sapiens
  misc_RNA (1)...(19): siRNA sense strand
acaaagguaugagaagaug

SEQ ID NO: 736808 - RNA, 19 nt, Homo sapiens
  misc_RNA (1)...(19): siRNA sense strand
ccuaaaugcugggaaacaa

SEQ ID NO: 736809 - RNA, 19 nt, Homo sapiens
  misc_RNA (1)...(19): siRNA sense strand
acaagacgcacccacagua

SEQ ID NO: 736810 - RNA, 19 nt, Homo sapiens
  misc_RNA (1)...(19): siRNA sense strand
ucaggaaggagaugaagaa

SEQ ID NO: 736811 - RNA, 19 nt, Homo sapiens
  misc_RNA (1)...(19): siRNA sense strand
ugaagaacguggagauggu

SEQ ID NO: 736812 - RNA, 19 nt, Homo sapiens
  misc_RNA (1)...(19): siRNA sense strand
acaaugccgugguuaagau

SEQ ID NO: 736813 - RNA, 19 nt, Homo sapiens
  misc_RNA (1)...(19): siRNA sense strand
ggaaguuuaacaccaguga

SEQ ID NO: 736814 - RNA, 19 nt, Homo sapiens
  misc_RNA (1)...(19): siRNA sense strand
ggaagaucaaggacaagaa

SEQ ID NO: 736815 - RNA, 19 nt, Homo sapiens
  misc_RNA (1)...(19): siRNA sense strand
gaagcagacgcacaacaau

SEQ ID NO: 736816 - RNA, 19 nt, Homo sapiens
  misc_RNA (1)...(19): siRNA sense strand
caucggcacuggcaccaau

SEQ ID NO: 736817 - RNA, 19 nt, Homo sapiens
  misc_RNA (1)...(19): siRNA sense strand
gauggucaguggcauguac

SEQ ID NO: 736818 - RNA, 19 nt, Homo sapiens
  misc_RNA (1)...(19): siRNA sense strand
gacaguauccucgucaaga

SEQ ID NO: 736819 - RNA, 19 nt, Homo sapiens
  misc_RNA (1)...(19): siRNA sense strand
aaagagaacgguggaaaug

SEQ ID NO: 736820 - RNA, 19 nt, Homo sapiens
  misc_RNA (1)...(19): siRNA sense strand
caacagccacagucaagau

SEQ ID NO: 736821 - RNA, 19 nt, Homo sapiens
  misc_RNA (1)...(19): siRNA sense strand
ucucugacuucuuggacua

SEQ ID NO: 736822 - RNA, 19 nt, Homo sapiens
  misc_RNA (1)...(19): siRNA sense strand
uuaagaugcugcccuccuu

SEQ ID NO: 736823 - RNA, 19 nt, Homo sapiens
  misc_RNA (1)...(19): siRNA sense strand
cagcacguuugcaccauug

SEQ ID NO: 736824 - RNA, 19 nt, Homo sapiens
  misc_RNA (1)...(19): siRNA sense strand
gaugauaucaggacacacu

SEQ ID NO: 736825 - RNA, 19 nt, Homo sapiens
  misc_RNA (1)...(19): siRNA sense strand
ggacgggacacucuacaag

SEQ ID NO: 736826 - RNA, 19 nt, Homo sapiens
  misc_RNA (1)...(19): siRNA sense strand
gaggaacugaggcacauug

SEQ ID NO: 736827 - RNA, 19 nt, Homo sapiens
  misc_RNA (1)...(19): siRNA sense strand
gaagaugaucagugguaug

SEQ ID NO: 736828 - RNA, 19 nt, Homo sapiens
  misc_RNA (1)...(19): siRNA sense strand
gggaaacaaagguaugaga

SEQ ID NO: 736829 - RNA, 19 nt, Homo sapiens
  misc_RNA (1)...(19): siRNA sense strand
caugaugaccugugcuuau

SEQ ID NO: 736830 - RNA, 19 nt, Homo sapiens
  misc_RNA (1)...(19): siRNA sense strand
agagaacgguggaaaugca

SEQ ID NO: 736831 - RNA, 19 nt, Homo sapiens
  misc_RNA (1)...(19): siRNA sense strand
ugaaccgccugcgugauaa

SEQ ID NO: 736832 - RNA, 19 nt, Homo sapiens
  misc_RNA (1)...(19): siRNA sense strand
ugggagauuucauggagaa

SEQ ID NO: 736833 - RNA, 19 nt, Homo sapiens
  misc_RNA (1)...(19): siRNA sense strand
ggugaaaucguccgcaaca

SEQ ID NO: 736834 - RNA, 19 nt, Homo sapiens
  misc_RNA (1)...(19): siRNA sense strand
caacgggugucuggaugau

SEQ ID NO: 736835 - RNA, 19 nt, Homo sapiens
  misc_RNA (1)...(19): siRNA sense strand
ucacauggaguccgagguu

SEQ ID NO: 736836 - RNA, 19 nt, Homo sapiens
  misc_RNA (1)...(19): siRNA sense strand
ucacguggacaaaggguuu

SEQ ID NO: 736837 - RNA, 19 nt, Homo sapiens
  misc_RNA (1)...(19): siRNA sense strand
caacaaugccgugguuaag

SEQ ID NO: 736838 - RNA, 19 nt, Homo sapiens
  misc_RNA (1)...(19): siRNA sense strand
ucguagcuguggugaauga

SEQ ID NO: 736839 - RNA, 19 nt, Homo sapiens
  misc_RNA (1)...(19): siRNA sense strand
cacauugucuccugcaucu

SEQ ID NO: 736840 - RNA, 19 nt, Homo sapiens
  misc_RNA (1)...(19): siRNA sense strand
cagccacagucaagauguu

SEQ ID NO: 736841 - RNA, 19 nt, Homo sapiens
  misc_RNA (1)...(19): siRNA sense strand
caagacgcacccacaguau

SEQ ID NO: 736842 - RNA, 19 nt, Homo sapiens
  misc_RNA (1)...(19): siRNA sense strand
ccagcacguuugcaccauu

SEQ ID NO: 736843 - RNA, 19 nt, Homo sapiens
  misc_RNA (1)...(19): siRNA sense strand
ccuccacaaugccaaagaa

SEQ ID NO: 736844 - RNA, 19 nt, Homo sapiens
  misc_RNA (1)...(19): siRNA sense strand
caugaugaccuguggcuau

SEQ ID NO: 736845 - RNA, 19 nt, Homo sapiens
  misc_RNA (1)...(19): siRNA sense strand
caagcuucauccacacuuc

SEQ ID NO: 736846 - RNA, 19 nt, Homo sapiens
  misc_RNA (1)...(19): siRNA sense strand
gaacugucaccaaaaugua

SEQ ID NO: 736847 - RNA, 19 nt, Homo sapiens
  misc_RNA (1)...(19): siRNA sense strand
gggaagagcuguuugauca

SEQ ID NO: 736848 - RNA, 19 nt, Homo sapiens
  misc_RNA (1)...(19): siRNA sense strand
ggaaggagaugaagaaugg

SEQ ID NO: 736849 - RNA, 19 nt, Homo sapiens
  misc_RNA (1)...(19): siRNA sense strand
gcaagugaaucaugagaaa

SEQ ID NO: 736850 - RNA, 19 nt, Homo sapiens
  misc_RNA (1)...(19): siRNA sense strand
gggaggauguguaucaaua

SEQ ID NO: 736851 - RNA, 19 nt, Homo sapiens
  misc_RNA (1)...(19): siRNA sense strand
gaaguuaccugugggauuc

SEQ ID NO: 736852 - RNA, 19 nt, Homo sapiens
  misc_RNA (1)...(19): siRNA sense strand
gcacaacaaugccgugguu

SEQ ID NO: 736853 - RNA, 19 nt, Homo sapiens
  misc_RNA (1)...(19): siRNA sense strand
ugaaggaacugucaccaaa

SEQ ID NO: 736854 - RNA, 19 nt, Homo sapiens
  misc_RNA (1)...(19): siRNA sense strand
uggagacgauggaucauua

SEQ ID NO: 736855 - RNA, 19 nt, Homo sapiens
  misc_RNA (1)...(19): siRNA sense strand
cgacggaucucuuuacaag

SEQ ID NO: 736856 - RNA, 19 nt, Homo sapiens
  misc_RNA (1)...(19): siRNA sense strand
gagcagauguggucaaacu

SEQ ID NO: 736857 - RNA, 19 nt, Homo sapiens
  misc_RNA (1)...(19): siRNA sense strand
gaucaaggacaagaaguua

SEQ ID NO: 736858 - RNA, 19 nt, Homo sapiens
  misc_RNA (1)...(19): siRNA sense strand
gagaagaugaucaguggua

SEQ ID NO: 736859 - RNA, 19 nt, Homo sapiens
  misc_RNA (1)...(19): siRNA sense strand
aaacaaagguaugagaaga

SEQ ID NO: 736860 - RNA, 19 nt, Homo sapiens
  misc_RNA (1)...(19): siRNA sense strand
gcacauugaucugguggaa

SEQ ID NO: 736861 - RNA, 19 nt, Homo sapiens
  misc_RNA (1)...(19): siRNA sense strand
aaaggaagaucaaggacaa

SEQ ID NO: 736862 - RNA, 19 nt, Homo sapiens
  misc_RNA (1)...(19): siRNA sense strand
gaacugaggcacauugauc

SEQ ID NO: 736863 - RNA, 19 nt, Homo sapiens
  misc_RNA (1)...(19): siRNA sense strand
gaagagcuguuugaucaca

SEQ ID NO: 736864 - RNA, 19 nt, Homo sapiens
  misc_RNA (1)...(19): siRNA sense strand
ggaaacaaagguaugagaa

SEQ ID NO: 736865 - RNA, 19 nt, Homo sapiens
  misc_RNA (1)...(19): siRNA sense strand
ggacaaagcgauuuaaagc

SEQ ID NO: 736866 - RNA, 19 nt, Homo sapiens
  misc_RNA (1)...(19): siRNA sense strand
ggaagcagacgcacaacaa

SEQ ID NO: 736867 - RNA, 19 nt, Homo sapiens
  misc_RNA (1)...(19): siRNA sense strand
gaagacauccggacagagu

SEQ ID NO: 736868 - RNA, 19 nt, Homo sapiens
  misc_RNA (1)...(19): siRNA sense strand
caucguagcuguggugaau

SEQ ID NO: 736869 - RNA, 19 nt, Homo sapiens
  misc_RNA (1)...(19): siRNA sense strand
ggacuggaccgucugaaug

SEQ ID NO: 736870 - RNA, 19 nt, Homo sapiens
  misc_RNA (1)...(19): siRNA sense strand
gaucuacgccauuccuauu

SEQ ID NO: 736871 - RNA, 19 nt, Homo sapiens
  misc_RNA (1)...(19): siRNA sense strand
gaugaucagugguauguac

SEQ ID NO: 736872 - RNA, 19 nt, Homo sapiens
  misc_RNA (1)...(19): siRNA sense strand
gacgauggaucauuagaag

SEQ ID NO: 736873 - RNA, 19 nt, Homo sapiens
  misc_RNA (1)...(19): siRNA sense strand
gcacagaggcaagcagcua

SEQ ID NO: 736874 - RNA, 19 nt, Homo sapiens
  misc_RNA (1)...(19): siRNA sense strand
cugcaucucugacuucuug

SEQ ID NO: 736875 - RNA, 19 nt, Homo sapiens
  misc_RNA (1)...(19): siRNA sense strand
gaguggagccguccgauga

SEQ ID NO: 736876 - RNA, 19 nt, Homo sapiens
  misc_RNA (1)...(19): siRNA sense strand
gaaacucucauagauauca

SEQ ID NO: 736877 - RNA, 19 nt, Homo sapiens
  misc_RNA (1)...(19): siRNA sense strand
caccaaugcuugcuacaug

SEQ ID NO: 736878 - RNA, 19 nt, Homo sapiens
  misc_RNA (1)...(19): siRNA sense strand
gaaaauccguagugggaaa

SEQ ID NO: 736879 - RNA, 19 nt, Homo sapiens
  misc_RNA (1)...(19): siRNA sense strand
uggcugcgguuguggauaa

SEQ ID NO: 736880 - RNA, 19 nt, Homo sapiens
  misc_RNA (1)...(19): siRNA sense strand
gggcuucacguucucauuu

SEQ ID NO: 736881 - RNA, 19 nt, Homo sapiens
  misc_RNA (1)...(19): siRNA sense strand
gagguuggacucauuguug

SEQ ID NO: 736882 - RNA, 19 nt, Homo sapiens
  misc_RNA (1)...(19): siRNA sense strand
gagcagcaccggcagauag

SEQ ID NO: 736883 - RNA, 19 nt, Homo sapiens
  misc_RNA (1)...(19): siRNA sense strand
gauaagauccgcgagaaca

SEQ ID NO: 736884 - RNA, 19 nt, Homo sapiens
  misc_RNA (1)...(19): siRNA sense strand
gaaaucguccgcaacaucu

SEQ ID NO: 736885 - RNA, 19 nt, Homo sapiens
  misc_RNA (1)...(19): siRNA sense strand
gaggagacccuggcucauu

SEQ ID NO: 736886 - RNA, 19 nt, Homo sapiens
  misc_RNA (1)...(19): siRNA sense strand
ggucaaacugcuuaacaaa

SEQ ID NO: 736887 - RNA, 19 nt, Homo sapiens
  misc_RNA (1)...(19): siRNA sense strand
ccaaguuucucucucagau

SEQ ID NO: 736888 - RNA, 19 nt, Homo sapiens
  misc_RNA (1)...(19): siRNA sense strand
guauguaccugggugaaau

SEQ ID NO: 736889 - RNA, 19 nt, Homo sapiens
  misc_RNA (1)...(19): siRNA sense strand
gaaacaaagguaugagaag

SEQ ID NO: 736890 - RNA, 19 nt, Homo sapiens
  misc_RNA (1)...(19): siRNA sense strand
gaccgagaauggugacuuc

SEQ ID NO: 736891 - RNA, 19 nt, Homo sapiens
  misc_RNA (1)...(19): siRNA sense strand
gauguggucaaacugcuua

SEQ ID NO: 736892 - RNA, 19 nt, Homo sapiens
  misc_RNA (1)...(19): siRNA sense strand
ccaugcggcucuccgauga

SEQ ID NO: 736893 - RNA, 19 nt, Homo sapiens
  misc_RNA (1)...(19): siRNA sense strand
caacaagaucuacgccauu

SEQ ID NO: 736894 - RNA, 19 nt, Homo sapiens
  misc_RNA (1)...(19): siRNA sense strand
ggagagcugguucgacuga

SEQ ID NO: 736895 - RNA, 19 nt, Homo sapiens
  misc_RNA (1)...(19): siRNA sense strand
uuaaucgacuucaccaaga

SEQ ID NO: 736896 - RNA, 19 nt, Homo sapiens
  misc_RNA (1)...(19): siRNA sense strand
gaaaugcacaacaagaucu

SEQ ID NO: 736897 - RNA, 19 nt, Homo sapiens
  misc_RNA (1)...(19): siRNA sense strand
ggaaaugcacaacaagauc

SEQ ID NO: 736898 - RNA, 19 nt, Homo sapiens
  misc_RNA (1)...(19): siRNA sense strand
aggagacccuggcucauuu

SEQ ID NO: 736899 - RNA, 19 nt, Homo sapiens
  misc_RNA (1)...(19): siRNA sense strand
gaagaucaaggacaagaag

SEQ ID NO: 736900 - RNA, 19 nt, Homo sapiens
  misc_RNA (1)...(19): siRNA sense strand
agaccaaguuucucucuca

SEQ ID NO: 736901 - RNA, 19 nt, Homo sapiens
  misc_RNA (1)...(19): siRNA sense strand
ccacaaugccaaagaaauc

SEQ ID NO: 736902 - RNA, 19 nt, Homo sapiens
  misc_RNA (1)...(19): siRNA sense strand
uaaggaaggccuccacaau

SEQ ID NO: 736903 - RNA, 19 nt, Homo sapiens
  misc_RNA (1)...(19): siRNA sense strand
uagaagacauccggacaga

SEQ ID NO: 736904 - RNA, 19 nt, Homo sapiens
  misc_RNA (1)...(19): siRNA sense strand
cagcagcuaggucugaaua

SEQ ID NO: 736905 - RNA, 19 nt, Homo sapiens
  misc_RNA (1)...(19): siRNA sense strand
gggugcaagugaaucauga

SEQ ID NO: 736906 - RNA, 19 nt, Homo sapiens
  misc_RNA (1)...(19): siRNA sense strand
uaaucgacuucaccaagaa

SEQ ID NO: 736907 - RNA, 19 nt, Homo sapiens
  misc_RNA (1)...(19): siRNA sense strand
acaaagguaugagaagaug

SEQ ID NO: 736908 - RNA, 19 nt, Homo sapiens
  misc_RNA (1)...(19): siRNA sense strand
ccuaaaugcugggaaacaa

SEQ ID NO: 736909 - RNA, 19 nt, Homo sapiens
  misc_RNA (1)...(19): siRNA sense strand
acaagacgcacccacagua

SEQ ID NO: 736910 - RNA, 19 nt, Homo sapiens
  misc_RNA (1)...(19): siRNA sense strand
ucaggaaggagaugaagaa

SEQ ID NO: 736911 - RNA, 19 nt, Homo sapiens
  misc_RNA (1)...(19): siRNA sense strand
ugaagaacguggagauggu

SEQ ID NO: 736912 - RNA, 19 nt, Homo sapiens
  misc_RNA (1)...(19): siRNA sense strand
acaaugccgugguuaagau

SEQ ID NO: 736913 - RNA, 19 nt, Homo sapiens
  misc_RNA (1)...(19): siRNA sense strand
ggaaguuuaacaccaguga

SEQ ID NO: 736914 - RNA, 19 nt, Homo sapiens
  misc_RNA (1)...(19): siRNA sense strand
ggaagaucaaggacaagaa

SEQ ID NO: 736915 - RNA, 19 nt, Homo sapiens
  misc_RNA (1)...(19): siRNA sense strand
gaagcagacgcacaacaau

SEQ ID NO: 736916 - RNA, 19 nt, Homo sapiens
  misc_RNA (1)...(19): siRNA sense strand
caucggcacuggcaccaau

SEQ ID NO: 736917 - RNA, 19 nt, Homo sapiens
  misc_RNA (1)...(19): siRNA sense strand
gauggucaguggcauguac

SEQ ID NO: 736918 - RNA, 19 nt, Homo sapiens
  misc_RNA (1)...(19): siRNA sense strand
gacaguauccucgucaaga

SEQ ID NO: 736919 - RNA, 19 nt, Homo sapiens
  misc_RNA (1)...(19): siRNA sense strand
aaagagaacgguggaaaug

SEQ ID NO: 736920 - RNA, 19 nt, Homo sapiens
  misc_RNA (1)...(19): siRNA sense strand
caacagccacagucaagau

SEQ ID NO: 736921 - RNA, 19 nt, Homo sapiens
  misc_RNA (1)...(19): siRNA sense strand
ucucugacuucuuggacua

SEQ ID NO: 736922 - RNA, 19 nt, Homo sapiens
  misc_RNA (1)...(19): siRNA sense strand
uuaagaugcugcccuccuu

SEQ ID NO: 736923 - RNA, 19 nt, Homo sapiens
  misc_RNA (1)...(19): siRNA sense strand
cagcacguuugcaccauug

SEQ ID NO: 736924 - RNA, 19 nt, Homo sapiens
  misc_RNA (1)...(19): siRNA sense strand
gaugauaucaggacacacu

SEQ ID NO: 736925 - RNA, 19 nt, Homo sapiens
  misc_RNA (1)...(19): siRNA sense strand
ggacgggacacucuacaag

SEQ ID NO: 736926 - RNA, 19 nt, Homo sapiens
  misc_RNA (1)...(19): siRNA sense strand
gaggaacugaggcacauug

SEQ ID NO: 736927 - RNA, 19 nt, Homo sapiens
  misc_RNA (1)...(19): siRNA sense strand
gaagaugaucagugguaug

SEQ ID NO: 736928 - RNA, 19 nt, Homo sapiens
  misc_RNA (1)...(19): siRNA sense strand
gggaaacaaagguaugaga

SEQ ID NO: 736929 - RNA, 19 nt, Homo sapiens
  misc_RNA (1)...(19): siRNA sense strand
caugaugaccugugcuuau

SEQ ID NO: 736930 - RNA, 19 nt, Homo sapiens
  misc_RNA (1)...(19): siRNA sense strand
agagaacgguggaaaugca

SEQ ID NO: 736931 - RNA, 19 nt, Homo sapiens
  misc_RNA (1)...(19): siRNA sense strand
ugaaccgccugcgugauaa

SEQ ID NO: 736932 - RNA, 19 nt, Homo sapiens
  misc_RNA (1)...(19): siRNA sense strand
ugggagauuucauggagaa

SEQ ID NO: 736933 - RNA, 19 nt, Homo sapiens
  misc_RNA (1)...(19): siRNA sense strand
ggugaaaucguccgcaaca

SEQ ID NO: 736934 - RNA, 19 nt, Homo sapiens
  misc_RNA (1)...(19): siRNA sense strand
caacgggugucuggaugau

SEQ ID NO: 736935 - RNA, 19 nt, Homo sapiens
  misc_RNA (1)...(19): siRNA sense strand
ucacauggaguccgagguu

SEQ ID NO: 736936 - RNA, 19 nt, Homo sapiens
  misc_RNA (1)...(19): siRNA sense strand
ucacguggacaaaggguuu

SEQ ID NO: 736937 - RNA, 19 nt, Homo sapiens
  misc_RNA (1)...(19): siRNA sense strand
caacaaugccgugguuaag

SEQ ID NO: 736938 - RNA, 19 nt, Homo sapiens
  misc_RNA (1)...(19): siRNA sense strand
ucguagcuguggugaauga

SEQ ID NO: 736939 - RNA, 19 nt, Homo sapiens
  misc_RNA (1)...(19): siRNA sense strand
cacauugucuccugcaucu

SEQ ID NO: 736940 - RNA, 19 nt, Homo sapiens
  misc_RNA (1)...(19): siRNA sense strand
cagccacagucaagauguu

SEQ ID NO: 736941 - RNA, 19 nt, Homo sapiens
  misc_RNA (1)...(19): siRNA sense strand
caagacgcacccacaguau

SEQ ID NO: 736942 - RNA, 19 nt, Homo sapiens
  misc_RNA (1)...(19): siRNA sense strand
ccagcacguuugcaccauu

SEQ ID NO: 736943 - RNA, 19 nt, Homo sapiens
  misc_RNA (1)...(19): siRNA sense strand
ccuccacaaugccaaagaa

SEQ ID NO: 736944 - RNA, 19 nt, Homo sapiens
  misc_RNA (1)...(19): siRNA sense strand
caugaugaccuguggcuau

SEQ ID NO: 736945 - RNA, 19 nt, Homo sapiens
  misc_RNA (1)...(19): siRNA sense strand
caagcuucauccacacuuc

SEQ ID NO: 736946 - RNA, 19 nt, Homo sapiens
  misc_RNA (1)...(19): siRNA sense strand
gaacugucaccaaaaugua

SEQ ID NO: 736947 - RNA, 19 nt, Homo sapiens
  misc_RNA (1)...(19): siRNA sense strand
gggaagagcuguuugauca

SEQ ID NO: 736948 - RNA, 19 nt, Homo sapiens
  misc_RNA (1)...(19): siRNA sense strand
ggaaggagaugaagaaugg

SEQ ID NO: 736949 - RNA, 19 nt, Homo sapiens
  misc_RNA (1)...(19): siRNA sense strand
gcaagugaaucaugagaaa

SEQ ID NO: 736950 - RNA, 19 nt, Homo sapiens
  misc_RNA (1)...(19): siRNA sense strand
gggaggauguguaucaaua

SEQ ID NO: 736951 - RNA, 19 nt, Homo sapiens
  misc_RNA (1)...(19): siRNA sense strand
gaaguuaccugugggauuc

SEQ ID NO: 736952 - RNA, 19 nt, Homo sapiens
  misc_RNA (1)...(19): siRNA sense strand
gcacaacaaugccgugguu

SEQ ID NO: 736953 - RNA, 19 nt, Homo sapiens
  misc_RNA (1)...(19): siRNA sense strand
ugaaggaacugucaccaaa

SEQ ID NO: 736954 - RNA, 19 nt, Homo sapiens
  misc_RNA (1)...(19): siRNA sense strand
uggagacgauggaucauua

SEQ ID NO: 736955 - RNA, 19 nt, Homo sapiens
  misc_RNA (1)...(19): siRNA sense strand
cgacggaucucuuuacaag

SEQ ID NO: 736956 - RNA, 19 nt, Homo sapiens
  misc_RNA (1)...(19): siRNA sense strand
gagcagauguggucaaacu

SEQ ID NO: 736957 - RNA, 19 nt, Homo sapiens
  misc_RNA (1)...(19): siRNA sense strand
gaucaaggacaagaaguua

SEQ ID NO: 736958 - RNA, 19 nt, Homo sapiens
  misc_RNA (1)...(19): siRNA sense strand
gagaagaugaucaguggua

SEQ ID NO: 736959 - RNA, 19 nt, Homo sapiens
  misc_RNA (1)...(19): siRNA sense strand
aaacaaagguaugagaaga

SEQ ID NO: 736960 - RNA, 19 nt, Homo sapiens
  misc_RNA (1)...(19): siRNA sense strand
gcacauugaucugguggaa

SEQ ID NO: 736961 - RNA, 19 nt, Homo sapiens
  misc_RNA (1)...(19): siRNA sense strand
aaaggaagaucaaggacaa

SEQ ID NO: 736962 - RNA, 19 nt, Homo sapiens
  misc_RNA (1)...(19): siRNA sense strand
gaacugaggcacauugauc

SEQ ID NO: 736963 - RNA, 19 nt, Homo sapiens
  misc_RNA (1)...(19): siRNA sense strand
gaagagcuguuugaucaca

SEQ ID NO: 736964 - RNA, 19 nt, Homo sapiens
  misc_RNA (1)...(19): siRNA sense strand
ggaaacaaagguaugagaa

SEQ ID NO: 736965 - RNA, 19 nt, Homo sapiens
  misc_RNA (1)...(19): siRNA sense strand
ggacaaagcgauuuaaagc

SEQ ID NO: 736966 - RNA, 19 nt, Homo sapiens
  misc_RNA (1)...(19): siRNA sense strand
ggaagcagacgcacaacaa

SEQ ID NO: 736967 - RNA, 19 nt, Homo sapiens
  misc_RNA (1)...(19): siRNA sense strand
gaagacauccggacagagu

SEQ ID NO: 736968 - RNA, 19 nt, Homo sapiens
  misc_RNA (1)...(19): siRNA sense strand
caucguagcuguggugaau

SEQ ID NO: 736969 - RNA, 19 nt, Homo sapiens
  misc_RNA (1)...(19): siRNA sense strand
ggacuggaccgucugaaug

SEQ ID NO: 736970 - RNA, 19 nt, Homo sapiens
  misc_RNA (1)...(19): siRNA sense strand
gaucuacgccauuccuauu

SEQ ID NO: 736971 - RNA, 19 nt, Homo sapiens
  misc_RNA (1)...(19): siRNA sense strand
gaugaucagugguauguac

SEQ ID NO: 736972 - RNA, 19 nt, Homo sapiens
  misc_RNA (1)...(19): siRNA sense strand
gacgauggaucauuagaag

SEQ ID NO: 736973 - RNA, 19 nt, Homo sapiens
  misc_RNA (1)...(19): siRNA sense strand
gcacagaggcaagcagcua

SEQ ID NO: 736974 - RNA, 19 nt, Homo sapiens
  misc_RNA (1)...(19): siRNA sense strand
cugcaucucugacuucuug

SEQ ID NO: 736975 - RNA, 19 nt, Homo sapiens
  misc_RNA (1)...(19): siRNA sense strand
gaguggagccguccgauga

SEQ ID NO: 736976 - RNA, 19 nt, Homo sapiens
  misc_RNA (1)...(19): siRNA sense strand
gaaacucucauagauauca

SEQ ID NO: 736977 - RNA, 19 nt, Homo sapiens
  misc_RNA (1)...(19): siRNA sense strand
caccaaugcuugcuacaug

SEQ ID NO: 736978 - RNA, 19 nt, Homo sapiens
  misc_RNA (1)...(19): siRNA sense strand
gaaaauccguagugggaaa

SEQ ID NO: 736979 - RNA, 19 nt, Homo sapiens
  misc_RNA (1)...(19): siRNA sense strand
uggcugcgguuguggauaa

SEQ ID NO: 736980 - RNA, 19 nt, Homo sapiens
  misc_RNA (1)...(19): siRNA sense strand
gggcuucacguucucauuu

SEQ ID NO: 736981 - RNA, 19 nt, Homo sapiens
  misc_RNA (1)...(19): siRNA sense strand
gagguuggacucauuguug

SEQ ID NO: 736982 - RNA, 19 nt, Homo sapiens
  misc_RNA (1)...(19): siRNA sense strand
gagcagcaccggcagauag

SEQ ID NO: 736983 - RNA, 19 nt, Homo sapiens
  misc_RNA (1)...(19): siRNA sense strand
gauaagauccgcgagaaca

SEQ ID NO: 736984 - RNA, 19 nt, Homo sapiens
  misc_RNA (1)...(19): siRNA sense strand
gaaaucguccgcaacaucu

SEQ ID NO: 736985 - RNA, 19 nt, Homo sapiens
  misc_RNA (1)...(19): siRNA sense strand
gaggagacccuggcucauu

SEQ ID NO: 736986 - RNA, 19 nt, Homo sapiens
  misc_RNA (1)...(19): siRNA sense strand
ggucaaacugcuuaacaaa

SEQ ID NO: 736987 - RNA, 19 nt, Homo sapiens
  misc_RNA (1)...(19): siRNA sense strand
ccaaguuucucucucagau

SEQ ID NO: 736988 - RNA, 19 nt, Homo sapiens
  misc_RNA (1)...(19): siRNA sense strand
guauguaccugggugaaau

SEQ ID NO: 736989 - RNA, 19 nt, Homo sapiens
  misc_RNA (1)...(19): siRNA sense strand
gaaacaaagguaugagaag

SEQ ID NO: 736990 - RNA, 19 nt, Homo sapiens
  misc_RNA (1)...(19): siRNA sense strand
gaccgagaauggugacuuc

SEQ ID NO: 736991 - RNA, 19 nt, Homo sapiens
  misc_RNA (1)...(19): siRNA sense strand
gauguggucaaacugcuua

SEQ ID NO: 736992 - RNA, 19 nt, Homo sapiens
  misc_RNA (1)...(19): siRNA sense strand
ccaugcggcucuccgauga

SEQ ID NO: 736993 - RNA, 19 nt, Homo sapiens
  misc_RNA (1)...(19): siRNA sense strand
caacaagaucuacgccauu

SEQ ID NO: 736994 - RNA, 19 nt, Homo sapiens
  misc_RNA (1)...(19): siRNA sense strand
ggagagcugguucgacuga

SEQ ID NO: 736995 - RNA, 19 nt, Homo sapiens
  misc_RNA (1)...(19): siRNA sense strand
uuaaucgacuucaccaaga

SEQ ID NO: 736996 - RNA, 19 nt, Homo sapiens
  misc_RNA (1)...(19): siRNA sense strand
gaaaugcacaacaagaucu

SEQ ID NO: 736997 - RNA, 19 nt, Homo sapiens
  misc_RNA (1)...(19): siRNA sense strand
ggaaaugcacaacaagauc

SEQ ID NO: 736998 - RNA, 19 nt, Homo sapiens
  misc_RNA (1)...(19): siRNA sense strand
aggagacccuggcucauuu

SEQ ID NO: 736999 - RNA, 19 nt, Homo sapiens
  misc_RNA (1)...(19): siRNA sense strand
gaagaucaaggacaagaag

SEQ ID NO: 737000 - RNA, 19 nt, Homo sapiens
  misc_RNA (1)...(19): siRNA sense strand
agaccaaguuucucucuca

SEQ ID NO: 737001 - RNA, 19 nt, Homo sapiens
  misc_RNA (1)...(19): siRNA sense strand
ccacaaugccaaagaaauc

SEQ ID NO: 737002 - RNA, 19 nt, Homo sapiens
  misc_RNA (1)...(19): siRNA sense strand
uaaggaaggccuccacaau

SEQ ID NO: 737003 - RNA, 19 nt, Homo sapiens
  misc_RNA (1)...(19): siRNA sense strand
uagaagacauccggacaga

SEQ ID NO: 737004 - RNA, 19 nt, Homo sapiens
  misc_RNA (1)...(19): siRNA sense strand
cagcagcuaggucugaaua

SEQ ID NO: 737005 - RNA, 19 nt, Homo sapiens
  misc_RNA (1)...(19): siRNA sense strand
gggugcaagugaaucauga

SEQ ID NO: 737006 - RNA, 19 nt, Homo sapiens
  misc_RNA (1)...(19): siRNA sense strand
uaaucgacuucaccaagaa

SEQ ID NO: 737007 - RNA, 19 nt, Homo sapiens
  misc_RNA (1)...(19): siRNA sense strand
acaaagguaugagaagaug

SEQ ID NO: 737008 - RNA, 19 nt, Homo sapiens
  misc_RNA (1)...(19): siRNA sense strand
ccuaaaugcugggaaacaa

SEQ ID NO: 737009 - RNA, 19 nt, Homo sapiens
  misc_RNA (1)...(19): siRNA sense strand
acaagacgcacccacagua

SEQ ID NO: 737010 - RNA, 19 nt, Homo sapiens
  misc_RNA (1)...(19): siRNA sense strand
ucaggaaggagaugaagaa

SEQ ID NO: 737011 - RNA, 19 nt, Homo sapiens
  misc_RNA (1)...(19): siRNA sense strand
ugaagaacguggagauggu

SEQ ID NO: 737012 - RNA, 19 nt, Homo sapiens
  misc_RNA (1)...(19): siRNA sense strand
acaaugccgugguuaagau

SEQ ID NO: 737013 - RNA, 19 nt, Homo sapiens
  misc_RNA (1)...(19): siRNA sense strand
ggaaguuuaacaccaguga

SEQ ID NO: 737014 - RNA, 19 nt, Homo sapiens
  misc_RNA (1)...(19): siRNA sense strand
ggaagaucaaggacaagaa

SEQ ID NO: 737015 - RNA, 19 nt, Homo sapiens
  misc_RNA (1)...(19): siRNA sense strand
gaagcagacgcacaacaau

SEQ ID NO: 737016 - RNA, 19 nt, Homo sapiens
  misc_RNA (1)...(19): siRNA sense strand
caucggcacuggcaccaau

SEQ ID NO: 737017 - RNA, 19 nt, Homo sapiens
  misc_RNA (1)...(19): siRNA sense strand
gauggucaguggcauguac

SEQ ID NO: 737018 - RNA, 19 nt, Homo sapiens
  misc_RNA (1)...(19): siRNA sense strand
gacaguauccucgucaaga

SEQ ID NO: 737019 - RNA, 19 nt, Homo sapiens
  misc_RNA (1)...(19): siRNA sense strand
aaagagaacgguggaaaug

SEQ ID NO: 737020 - RNA, 19 nt, Homo sapiens
  misc_RNA (1)...(19): siRNA sense strand
caacagccacagucaagau

SEQ ID NO: 737021 - RNA, 19 nt, Homo sapiens
  misc_RNA (1)...(19): siRNA sense strand
ucucugacuucuuggacua

SEQ ID NO: 737022 - RNA, 19 nt, Homo sapiens
  misc_RNA (1)...(19): siRNA sense strand
uuaagaugcugcccuccuu

SEQ ID NO: 737023 - RNA, 19 nt, Homo sapiens
  misc_RNA (1)...(19): siRNA sense strand
cagcacguuugcaccauug

SEQ ID NO: 737024 - RNA, 19 nt, Homo sapiens
  misc_RNA (1)...(19): siRNA sense strand
gaugauaucaggacacacu

SEQ ID NO: 737025 - RNA, 19 nt, Homo sapiens
  misc_RNA (1)...(19): siRNA sense strand
ggacgggacacucuacaag

SEQ ID NO: 737026 - RNA, 19 nt, Homo sapiens
  misc_RNA (1)...(19): siRNA sense strand
gaggaacugaggcacauug

SEQ ID NO: 737027 - RNA, 19 nt, Homo sapiens
  misc_RNA (1)...(19): siRNA sense strand
gaagaugaucagugguaug

SEQ ID NO: 737028 - RNA, 19 nt, Homo sapiens
  misc_RNA (1)...(19): siRNA sense strand
gggaaacaaagguaugaga

SEQ ID NO: 737029 - RNA, 19 nt, Homo sapiens
  misc_RNA (1)...(19): siRNA sense strand
caugaugaccugugcuuau

SEQ ID NO: 737030 - RNA, 19 nt, Homo sapiens
  misc_RNA (1)...(19): siRNA sense strand
agagaacgguggaaaugca

SEQ ID NO: 737031 - RNA, 19 nt, Homo sapiens
  misc_RNA (1)...(19): siRNA sense strand
ugaaccgccugcgugauaa

SEQ ID NO: 737032 - RNA, 19 nt, Homo sapiens
  misc_RNA (1)...(19): siRNA sense strand
ugggagauuucauggagaa

SEQ ID NO: 737033 - RNA, 19 nt, Homo sapiens
  misc_RNA (1)...(19): siRNA sense strand
ggugaaaucguccgcaaca

SEQ ID NO: 737034 - RNA, 19 nt, Homo sapiens
  misc_RNA (1)...(19): siRNA sense strand
caacgggugucuggaugau

SEQ ID NO: 737035 - RNA, 19 nt, Homo sapiens
  misc_RNA (1)...(19): siRNA sense strand
ucacauggaguccgagguu

SEQ ID NO: 737036 - RNA, 19 nt, Homo sapiens
  misc_RNA (1)...(19): siRNA sense strand
ucacguggacaaaggguuu

SEQ ID NO: 737037 - RNA, 19 nt, Homo sapiens
  misc_RNA (1)...(19): siRNA sense strand
caacaaugccgugguuaag

SEQ ID NO: 737038 - RNA, 19 nt, Homo sapiens
  misc_RNA (1)...(19): siRNA sense strand
ucguagcuguggugaauga

SEQ ID NO: 737039 - RNA, 19 nt, Homo sapiens
  misc_RNA (1)...(19): siRNA sense strand
cacauugucuccugcaucu

SEQ ID NO: 737040 - RNA, 19 nt, Homo sapiens
  misc_RNA (1)...(19): siRNA sense strand
cagccacagucaagauguu

SEQ ID NO: 737041 - RNA, 19 nt, Homo sapiens
  misc_RNA (1)...(19): siRNA sense strand
caagacgcacccacaguau

SEQ ID NO: 737042 - RNA, 19 nt, Homo sapiens
  misc_RNA (1)...(19): siRNA sense strand
ccagcacguuugcaccauu

SEQ ID NO: 737043 - RNA, 19 nt, Homo sapiens
  misc_RNA (1)...(19): siRNA sense strand
ccuccacaaugccaaagaa

SEQ ID NO: 737044 - RNA, 19 nt, Homo sapiens
  misc_RNA (1)...(19): siRNA sense strand
caugaugaccuguggcuau

SEQ ID NO: 737045 - RNA, 19 nt, Homo sapiens
  misc_RNA (1)...(19): siRNA sense strand
caagcuucauccacacuuc

SEQ ID NO: 737046 - RNA, 19 nt, Homo sapiens
  misc_RNA (1)...(19): siRNA sense strand
gaacugucaccaaaaugua

SEQ ID NO: 737047 - RNA, 19 nt, Homo sapiens
  misc_RNA (1)...(19): siRNA sense strand
gaaacacucugauuuggaa

SEQ ID NO: 737048 - RNA, 19 nt, Homo sapiens
  misc_RNA (1)...(19): siRNA sense strand
ggaaugaacuggaucacau

SEQ ID NO: 737049 - RNA, 19 nt, Homo sapiens
  misc_RNA (1)...(19): siRNA sense strand
cagcaggccuucagagcua

SEQ ID NO: 737050 - RNA, 19 nt, Homo sapiens
  misc_RNA (1)...(19): siRNA sense strand
gaggaaacacucugauuug

SEQ ID NO: 737051 - RNA, 19 nt, Homo sapiens
  misc_RNA (1)...(19): siRNA sense strand
ugacacaucugcgguagaa

SEQ ID NO: 737052 - RNA, 19 nt, Homo sapiens
  misc_RNA (1)...(19): siRNA sense strand
ggcauguccucauccauaa

SEQ ID NO: 737053 - RNA, 19 nt, Homo sapiens
  misc_RNA (1)...(19): siRNA sense strand
ggaguggaaugaacuggau

SEQ ID NO: 737054 - RNA, 19 nt, Homo sapiens
  misc_RNA (1)...(19): siRNA sense strand
ugaacuggaucacaucaug

SEQ ID NO: 737055 - RNA, 19 nt, Homo sapiens
  misc_RNA (1)...(19): siRNA sense strand
gaucacaucauggaaauca

SEQ ID NO: 737056 - RNA, 19 nt, Homo sapiens
  misc_RNA (1)...(19): siRNA sense strand
ggaaacacucugauuugga

SEQ ID NO: 737057 - RNA, 19 nt, Homo sapiens
  misc_RNA (1)...(19): siRNA sense strand
uggccuggaugacuucuuu

SEQ ID NO: 737058 - RNA, 19 nt, Homo sapiens
  misc_RNA (1)...(19): siRNA sense strand
caccagagccuccucacaa

SEQ ID NO: 737059 - RNA, 19 nt, Homo sapiens
  misc_RNA (1)...(19): siRNA sense strand
ccgcaucucccuagacaaa

SEQ ID NO: 737060 - RNA, 19 nt, Homo sapiens
  misc_RNA (1)...(19): siRNA sense strand
gcaucucccuagacaaagu

SEQ ID NO: 737061 - RNA, 19 nt, Homo sapiens
  misc_RNA (1)...(19): siRNA sense strand
ugacuucuuucuggacauu

SEQ ID NO: 737062 - RNA, 19 nt, Homo sapiens
  misc_RNA (1)...(19): siRNA sense strand
aggcauguccucauccaua

SEQ ID NO: 737063 - RNA, 19 nt, Homo sapiens
  misc_RNA (1)...(19): siRNA sense strand
ucacaucauggaaaucauu

SEQ ID NO: 737064 - RNA, 19 nt, Homo sapiens
  misc_RNA (1)...(19): siRNA sense strand
gcaggcauguccucaucca

SEQ ID NO: 737065 - RNA, 19 nt, Homo sapiens
  misc_RNA (1)...(19): siRNA sense strand
uggaucacaucauggaaau

SEQ ID NO: 737066 - RNA, 19 nt, Homo sapiens
  misc_RNA (1)...(19): siRNA sense strand
gaaugaacuggaucacauc

SEQ ID NO: 737067 - RNA, 19 nt, Homo sapiens
  misc_RNA (1)...(19): siRNA sense strand
ccgcaggcauguccucauc

SEQ ID NO: 737068 - RNA, 19 nt, Homo sapiens
  misc_RNA (1)...(19): siRNA sense strand
cccuuggccuccagaauga

SEQ ID NO: 737069 - RNA, 19 nt, Homo sapiens
  misc_RNA (1)...(19): siRNA sense strand
acucuggccuggaugacuu

SEQ ID NO: 737070 - RNA, 19 nt, Homo sapiens
  misc_RNA (1)...(19): siRNA sense strand
guucuugggaguggaauga

SEQ ID NO: 737071 - RNA, 19 nt, Homo sapiens
  misc_RNA (1)...(19): siRNA sense strand
aggaaacacucugauuugg

SEQ ID NO: 737072 - RNA, 19 nt, Homo sapiens
  misc_RNA (1)...(19): siRNA sense strand
gccugauccagucuucuua

SEQ ID NO: 737073 - RNA, 19 nt, Homo sapiens
  misc_RNA (1)...(19): siRNA sense strand
ugggaggcuugaagaggaa

SEQ ID NO: 737074 - RNA, 19 nt, Homo sapiens
  misc_RNA (1)...(19): siRNA sense strand
cugauccagucuucuuaga

SEQ ID NO: 737075 - RNA, 19 nt, Homo sapiens
  misc_RNA (1)...(19): siRNA sense strand
gcagagaucuuauugcaua

SEQ ID NO: 737076 - RNA, 19 nt, Homo sapiens
  misc_RNA (1)...(19): siRNA sense strand
agaaagagcugacgaguuu

SEQ ID NO: 737077 - RNA, 19 nt, Homo sapiens
  misc_RNA (1)...(19): siRNA sense strand
gaacucacuuccucuuuau

SEQ ID NO: 737078 - RNA, 19 nt, Homo sapiens
  misc_RNA (1)...(19): siRNA sense strand
cauaugaagucaaggcuaa

SEQ ID NO: 737079 - RNA, 19 nt, Homo sapiens
  misc_RNA (1)...(19): siRNA sense strand
agaacucacuuccucuuua

SEQ ID NO: 737080 - RNA, 19 nt, Homo sapiens
  misc_RNA (1)...(19): siRNA sense strand
gagaucuuauugcauauga

SEQ ID NO: 737081 - RNA, 19 nt, Homo sapiens
  misc_RNA (1)...(19): siRNA sense strand
gagagacgcugcucaucug

SEQ ID NO: 737082 - RNA, 19 nt, Homo sapiens
  misc_RNA (1)...(19): siRNA sense strand
gcggaagucuccagguuca

SEQ ID NO: 737083 - RNA, 19 nt, Homo sapiens
  misc_RNA (1)...(19): siRNA sense strand
ugaagcaugugguugaugu

SEQ ID NO: 737084 - RNA, 19 nt, Homo sapiens
  misc_RNA (1)...(19): siRNA sense strand
gcacugggcucugguuucg

SEQ ID NO: 737085 - RNA, 19 nt, Homo sapiens
  misc_RNA (1)...(19): siRNA sense strand
gagcaacaucccagccaua

SEQ ID NO: 737086 - RNA, 19 nt, Homo sapiens
  misc_RNA (1)...(19): siRNA sense strand
ggagagacgcugcucaucu

SEQ ID NO: 737087 - RNA, 19 nt, Homo sapiens
  misc_RNA (1)...(19): siRNA sense strand
uggaugcccucuuccugua

SEQ ID NO: 737088 - RNA, 19 nt, Homo sapiens
  misc_RNA (1)...(19): siRNA sense strand
cgggacaacugaagcaugu

SEQ ID NO: 737089 - RNA, 19 nt, Homo sapiens
  misc_RNA (1)...(19): siRNA sense strand
gggacaggcagagaucuua

SEQ ID NO: 737090 - RNA, 19 nt, Homo sapiens
  misc_RNA (1)...(19): siRNA sense strand
caacaucccagccauaagg

SEQ ID NO: 737091 - RNA, 19 nt, Homo sapiens
  misc_RNA (1)...(19): siRNA sense strand
aggcagagaucuuauugca

SEQ ID NO: 737092 - RNA, 19 nt, Homo sapiens
  misc_RNA (1)...(19): siRNA sense strand
gcuaaccagcgaaauauag

SEQ ID NO: 737093 - RNA, 19 nt, Homo sapiens
  misc_RNA (1)...(19): siRNA sense strand
ggacaggcagagaucuuau

SEQ ID NO: 737094 - RNA, 19 nt, Homo sapiens
  misc_RNA (1)...(19): siRNA sense strand
uggacaaucuggugcugaa

SEQ ID NO: 737095 - RNA, 19 nt, Homo sapiens
  misc_RNA (1)...(19): siRNA sense strand
ccuaagagaauauuucaag

SEQ ID NO: 737096 - RNA, 19 nt, Homo sapiens
  misc_RNA (1)...(19): siRNA sense strand
guuccuggaugcccucuuc

SEQ ID NO: 737097 - RNA, 19 nt, Homo sapiens
  misc_RNA (1)...(19): siRNA sense strand
gggcucugguuucggaaga

SEQ ID NO: 737098 - RNA, 19 nt, Homo sapiens
  misc_RNA (1)...(19): siRNA sense strand
ggauguucguggacaaucu

SEQ ID NO: 737099 - RNA, 19 nt, Homo sapiens
  misc_RNA (1)...(19): siRNA sense strand
gaucuuauugcauaugaag

SEQ ID NO: 737100 - RNA, 19 nt, Homo sapiens
  misc_RNA (1)...(19): siRNA sense strand
aaggcuaaccagcgaaaua

SEQ ID NO: 737101 - RNA, 19 nt, Homo sapiens
  misc_RNA (1)...(19): siRNA sense strand
ccaagcuggugaagaacug

SEQ ID NO: 737102 - RNA, 19 nt, Homo sapiens
  misc_RNA (1)...(19): siRNA sense strand
acaaucuggugcugaacaa

SEQ ID NO: 737103 - RNA, 19 nt, Homo sapiens
  misc_RNA (1)...(19): siRNA sense strand
gcugacgaguuugggcuuu

SEQ ID NO: 737104 - RNA, 19 nt, Homo sapiens
  misc_RNA (1)...(19): siRNA sense strand
uagaagacaucugcaucug

SEQ ID NO: 737105 - RNA, 19 nt, Homo sapiens
  misc_RNA (1)...(19): siRNA sense strand
acucacuuccucuuuauaa

SEQ ID NO: 737106 - RNA, 19 nt, Homo sapiens
  misc_RNA (1)...(19): siRNA sense strand
cugcggaagucuccagguu

SEQ ID NO: 737107 - RNA, 19 nt, Homo sapiens
  misc_RNA (1)...(19): siRNA sense strand
gacaggcagagaucuuauu

SEQ ID NO: 737108 - RNA, 19 nt, Homo sapiens
  misc_RNA (1)...(19): siRNA sense strand
gcucucaagcuccguuuca

SEQ ID NO: 737109 - RNA, 19 nt, Homo sapiens
  misc_RNA (1)...(19): siRNA sense strand
cagaacucacuuccucuuu

SEQ ID NO: 737110 - RNA, 19 nt, Homo sapiens
  misc_RNA (1)...(19): siRNA sense strand
ggaagucuccagguucaca

SEQ ID NO: 737111 - RNA, 19 nt, Homo sapiens
  misc_RNA (1)...(19): siRNA sense strand
gcggauccuugcagaaugc

SEQ ID NO: 737112 - RNA, 19 nt, Homo sapiens
  misc_RNA (1)...(19): siRNA sense strand
ggcggauccuugcagaaug

SEQ ID NO: 737113 - RNA, 19 nt, Homo sapiens
  misc_RNA (1)...(19): siRNA sense strand
gcuacugcuucgagugugu

SEQ ID NO: 737114 - RNA, 19 nt, Homo sapiens
  misc_RNA (1)...(19): siRNA sense strand
cagagaucuuauugcauau

SEQ ID NO: 737115 - RNA, 19 nt, Homo sapiens
  misc_RNA (1)...(19): siRNA sense strand
ggcuaaccagcgaaauaua

SEQ ID NO: 737116 - RNA, 19 nt, Homo sapiens
  misc_RNA (1)...(19): siRNA sense strand
aagaaagagcugacgaguu

SEQ ID NO: 737117 - RNA, 19 nt, Homo sapiens
  misc_RNA (1)...(19): siRNA sense strand
uaaccagcgaaauauagaa

SEQ ID NO: 737118 - RNA, 19 nt, Homo sapiens
  misc_RNA (1)...(19): siRNA sense strand
ggaaggugcacgccaugag

SEQ ID NO: 737119 - RNA, 19 nt, Homo sapiens
  misc_RNA (1)...(19): siRNA sense strand
gaaauauagaagacaucug

SEQ ID NO: 737120 - RNA, 19 nt, Homo sapiens
  misc_RNA (1)...(19): siRNA sense strand
gacaaucuggugcugaaca

SEQ ID NO: 737121 - RNA, 19 nt, Homo sapiens
  misc_RNA (1)...(19): siRNA sense strand
cuaaccagcgaaauauaga

SEQ ID NO: 737122 - RNA, 19 nt, Homo sapiens
  misc_RNA (1)...(19): siRNA sense strand
gcaacugggugugcuaccu

SEQ ID NO: 737123 - RNA, 19 nt, Homo sapiens
  misc_RNA (1)...(19): siRNA sense strand
ccagcgaaauauagaagac

SEQ ID NO: 737124 - RNA, 19 nt, Homo sapiens
  misc_RNA (1)...(19): siRNA sense strand
uccaccggcuccugcagua

SEQ ID NO: 737125 - RNA, 19 nt, Homo sapiens
  misc_RNA (1)...(19): siRNA sense strand
acaggcagagaucuuauug

SEQ ID NO: 737126 - RNA, 19 nt, Homo sapiens
  misc_RNA (1)...(19): siRNA sense strand
gacgaugacggguaccaau

SEQ ID NO: 737127 - RNA, 19 nt, Homo sapiens
  misc_RNA (1)...(19): siRNA sense strand
ucaaggcuaaccagcgaaa

SEQ ID NO: 737128 - RNA, 19 nt, Homo sapiens
  misc_RNA (1)...(19): siRNA sense strand
agaacaagcagagcucgaa

SEQ ID NO: 737129 - RNA, 19 nt, Homo sapiens
  misc_RNA (1)...(19): siRNA sense strand
gguuucggaagaagaauug

SEQ ID NO: 737130 - RNA, 19 nt, Homo sapiens
  misc_RNA (1)...(19): siRNA sense strand
cgaaauauagaagacaucu

SEQ ID NO: 737131 - RNA, 19 nt, Homo sapiens
  misc_RNA (1)...(19): siRNA sense strand
uauugcauaugaagucaag

SEQ ID NO: 737132 - RNA, 19 nt, Homo sapiens
  misc_RNA (1)...(19): siRNA sense strand
cagacacagugaggaagga

SEQ ID NO: 737133 - RNA, 19 nt, Homo sapiens
  misc_RNA (1)...(19): siRNA sense strand
gcagagaucuuauugcaua

SEQ ID NO: 737134 - RNA, 19 nt, Homo sapiens
  misc_RNA (1)...(19): siRNA sense strand
agaaagagcugacgaguuu

SEQ ID NO: 737135 - RNA, 19 nt, Homo sapiens
  misc_RNA (1)...(19): siRNA sense strand
gaacucacuuccucuuuau

SEQ ID NO: 737136 - RNA, 19 nt, Homo sapiens
  misc_RNA (1)...(19): siRNA sense strand
cauaugaagucaaggcuaa

SEQ ID NO: 737137 - RNA, 19 nt, Homo sapiens
  misc_RNA (1)...(19): siRNA sense strand
agaacucacuuccucuuua

SEQ ID NO: 737138 - RNA, 19 nt, Homo sapiens
  misc_RNA (1)...(19): siRNA sense strand
gagaucuuauugcauauga

SEQ ID NO: 737139 - RNA, 19 nt, Homo sapiens
  misc_RNA (1)...(19): siRNA sense strand
gagagacgcugcucaucug

SEQ ID NO: 737140 - RNA, 19 nt, Homo sapiens
  misc_RNA (1)...(19): siRNA sense strand
gcggaagucuccagguuca

SEQ ID NO: 737141 - RNA, 19 nt, Homo sapiens
  misc_RNA (1)...(19): siRNA sense strand
ugaagcaugugguugaugu

SEQ ID NO: 737142 - RNA, 19 nt, Homo sapiens
  misc_RNA (1)...(19): siRNA sense strand
gcacugggcucugguuucg

SEQ ID NO: 737143 - RNA, 19 nt, Homo sapiens
  misc_RNA (1)...(19): siRNA sense strand
gagcaacaucccagccaua

SEQ ID NO: 737144 - RNA, 19 nt, Homo sapiens
  misc_RNA (1)...(19): siRNA sense strand
ggagagacgcugcucaucu

SEQ ID NO: 737145 - RNA, 19 nt, Homo sapiens
  misc_RNA (1)...(19): siRNA sense strand
uggaugcccucuuccugua

SEQ ID NO: 737146 - RNA, 19 nt, Homo sapiens
  misc_RNA (1)...(19): siRNA sense strand
cgggacaacugaagcaugu

SEQ ID NO: 737147 - RNA, 19 nt, Homo sapiens
  misc_RNA (1)...(19): siRNA sense strand
gggacaggcagagaucuua

SEQ ID NO: 737148 - RNA, 19 nt, Homo sapiens
  misc_RNA (1)...(19): siRNA sense strand
caacaucccagccauaagg

SEQ ID NO: 737149 - RNA, 19 nt, Homo sapiens
  misc_RNA (1)...(19): siRNA sense strand
aggcagagaucuuauugca

SEQ ID NO: 737150 - RNA, 19 nt, Homo sapiens
  misc_RNA (1)...(19): siRNA sense strand
gcuaaccagcgaaauauag

SEQ ID NO: 737151 - RNA, 19 nt, Homo sapiens
  misc_RNA (1)...(19): siRNA sense strand
ggacaggcagagaucuuau

SEQ ID NO: 737152 - RNA, 19 nt, Homo sapiens
  misc_RNA (1)...(19): siRNA sense strand
uggacaaucuggugcugaa

SEQ ID NO: 737153 - RNA, 19 nt, Homo sapiens
  misc_RNA (1)...(19): siRNA sense strand
ccuaagagaauauuucaag

SEQ ID NO: 737154 - RNA, 19 nt, Homo sapiens
  misc_RNA (1)...(19): siRNA sense strand
guuccuggaugcccucuuc

SEQ ID NO: 737155 - RNA, 19 nt, Homo sapiens
  misc_RNA (1)...(19): siRNA sense strand
gggcucugguuucggaaga

SEQ ID NO: 737156 - RNA, 19 nt, Homo sapiens
  misc_RNA (1)...(19): siRNA sense strand
ggauguucguggacaaucu

SEQ ID NO: 737157 - RNA, 19 nt, Homo sapiens
  misc_RNA (1)...(19): siRNA sense strand
gaucuuauugcauaugaag

SEQ ID NO: 737158 - RNA, 19 nt, Homo sapiens
  misc_RNA (1)...(19): siRNA sense strand
aaggcuaaccagcgaaaua

SEQ ID NO: 737159 - RNA, 19 nt, Homo sapiens
  misc_RNA (1)...(19): siRNA sense strand
ccaagcuggugaagaacug

SEQ ID NO: 737160 - RNA, 19 nt, Homo sapiens
  misc_RNA (1)...(19): siRNA sense strand
acaaucuggugcugaacaa

SEQ ID NO: 737161 - RNA, 19 nt, Homo sapiens
  misc_RNA (1)...(19): siRNA sense strand
gcugacgaguuugggcuuu

SEQ ID NO: 737162 - RNA, 19 nt, Homo sapiens
  misc_RNA (1)...(19): siRNA sense strand
uagaagacaucugcaucug

SEQ ID NO: 737163 - RNA, 19 nt, Homo sapiens
  misc_RNA (1)...(19): siRNA sense strand
acucacuuccucuuuauaa

SEQ ID NO: 737164 - RNA, 19 nt, Homo sapiens
  misc_RNA (1)...(19): siRNA sense strand
cugcggaagucuccagguu

SEQ ID NO: 737165 - RNA, 19 nt, Homo sapiens
  misc_RNA (1)...(19): siRNA sense strand
gacaggcagagaucuuauu

SEQ ID NO: 737166 - RNA, 19 nt, Homo sapiens
  misc_RNA (1)...(19): siRNA sense strand
gcucucaagcuccguuuca

SEQ ID NO: 737167 - RNA, 19 nt, Homo sapiens
  misc_RNA (1)...(19): siRNA sense strand
cagaacucacuuccucuuu

SEQ ID NO: 737168 - RNA, 19 nt, Homo sapiens
  misc_RNA (1)...(19): siRNA sense strand
ggaagucuccagguucaca

SEQ ID NO: 737169 - RNA, 19 nt, Homo sapiens
  misc_RNA (1)...(19): siRNA sense strand
gcggauccuugcagaaugc

SEQ ID NO: 737170 - RNA, 19 nt, Homo sapiens
  misc_RNA (1)...(19): siRNA sense strand
ggcggauccuugcagaaug

SEQ ID NO: 737171 - RNA, 19 nt, Homo sapiens
  misc_RNA (1)...(19): siRNA sense strand
gcuacugcuucgagugugu

SEQ ID NO: 737172 - RNA, 19 nt, Homo sapiens
  misc_RNA (1)...(19): siRNA sense strand
cagagaucuuauugcauau

SEQ ID NO: 737173 - RNA, 19 nt, Homo sapiens
  misc_RNA (1)...(19): siRNA sense strand
ggcuaaccagcgaaauaua

SEQ ID NO: 737174 - RNA, 19 nt, Homo sapiens
  misc_RNA (1)...(19): siRNA sense strand
aagaaagagcugacgaguu

SEQ ID NO: 737175 - RNA, 19 nt, Homo sapiens
  misc_RNA (1)...(19): siRNA sense strand
uaaccagcgaaauauagaa

SEQ ID NO: 737176 - RNA, 19 nt, Homo sapiens
  misc_RNA (1)...(19): siRNA sense strand
ggaaggugcacgccaugag

SEQ ID NO: 737177 - RNA, 19 nt, Homo sapiens
  misc_RNA (1)...(19): siRNA sense strand
gaaauauagaagacaucug

SEQ ID NO: 737178 - RNA, 19 nt, Homo sapiens
  misc_RNA (1)...(19): siRNA sense strand
gacaaucuggugcugaaca

SEQ ID NO: 737179 - RNA, 19 nt, Homo sapiens
  misc_RNA (1)...(19): siRNA sense strand
cuaaccagcgaaauauaga

SEQ ID NO: 737180 - RNA, 19 nt, Homo sapiens
  misc_RNA (1)...(19): siRNA sense strand
gcaacugggugugcuaccu

SEQ ID NO: 737181 - RNA, 19 nt, Homo sapiens
  misc_RNA (1)...(19): siRNA sense strand
ccagcgaaauauagaagac

SEQ ID NO: 737182 - RNA, 19 nt, Homo sapiens
  misc_RNA (1)...(19): siRNA sense strand
uccaccggcuccugcagua

SEQ ID NO: 737183 - RNA, 19 nt, Homo sapiens
  misc_RNA (1)...(19): siRNA sense strand
acaggcagagaucuuauug

SEQ ID NO: 737184 - RNA, 19 nt, Homo sapiens
  misc_RNA (1)...(19): siRNA sense strand
gacgaugacggguaccaau

SEQ ID NO: 737185 - RNA, 19 nt, Homo sapiens
  misc_RNA (1)...(19): siRNA sense strand
ucaaggcuaaccagcgaaa

SEQ ID NO: 737186 - RNA, 19 nt, Homo sapiens
  misc_RNA (1)...(19): siRNA sense strand
agaacaagcagagcucgaa

SEQ ID NO: 737187 - RNA, 19 nt, Homo sapiens
  misc_RNA (1)...(19): siRNA sense strand
gguuucggaagaagaauug

SEQ ID NO: 737188 - RNA, 19 nt, Homo sapiens
  misc_RNA (1)...(19): siRNA sense strand
cgaaauauagaagacaucu

SEQ ID NO: 737189 - RNA, 19 nt, Homo sapiens
  misc_RNA (1)...(19): siRNA sense strand
uauugcauaugaagucaag

SEQ ID NO: 737190 - RNA, 19 nt, Homo sapiens
  misc_RNA (1)...(19): siRNA sense strand
cagacacagugaggaagga

SEQ ID NO: 737191 - RNA, 19 nt, Homo sapiens
  misc_RNA (1)...(19): siRNA sense strand
cagaagauccugauuauua

SEQ ID NO: 737192 - RNA, 19 nt, Homo sapiens
  misc_RNA (1)...(19): siRNA sense strand
guaaagaacuggccaaguc

SEQ ID NO: 737193 - RNA, 19 nt, Homo sapiens
  misc_RNA (1)...(19): siRNA sense strand
gggauuucauucaucauua

SEQ ID NO: 737194 - RNA, 19 nt, Homo sapiens
  misc_RNA (1)...(19): siRNA sense strand
gaguguagaugcuguagaa

SEQ ID NO: 737195 - RNA, 19 nt, Homo sapiens
  misc_RNA (1)...(19): siRNA sense strand
ugggaaagcuuuaggcaaa

SEQ ID NO: 737196 - RNA, 19 nt, Homo sapiens
  misc_RNA (1)...(19): siRNA sense strand
gcaggaugguggugacauu

SEQ ID NO: 737197 - RNA, 19 nt, Homo sapiens
  misc_RNA (1)...(19): siRNA sense strand
gaaauugaaacacucagaa

SEQ ID NO: 737198 - RNA, 19 nt, Homo sapiens
  misc_RNA (1)...(19): siRNA sense strand
uguagaugcuguagaaauu

SEQ ID NO: 737199 - RNA, 19 nt, Homo sapiens
  misc_RNA (1)...(19): siRNA sense strand
ggaaauggcagcugugaca

SEQ ID NO: 737200 - RNA, 19 nt, Homo sapiens
  misc_RNA (1)...(19): siRNA sense strand
gcaaaucggaugaguguag

SEQ ID NO: 737201 - RNA, 19 nt, Homo sapiens
  misc_RNA (1)...(19): siRNA sense strand
aaacugaacccacagaaga

SEQ ID NO: 737202 - RNA, 19 nt, Homo sapiens
  misc_RNA (1)...(19): siRNA sense strand
ugaggacuauuucugcuuu

SEQ ID NO: 737203 - RNA, 19 nt, Homo sapiens
  misc_RNA (1)...(19): siRNA sense strand
gcaaugaaggcacagaaau

SEQ ID NO: 737204 - RNA, 19 nt, Homo sapiens
  misc_RNA (1)...(19): siRNA sense strand
caaggaagccaccauucuu

SEQ ID NO: 737205 - RNA, 19 nt, Homo sapiens
  misc_RNA (1)...(19): siRNA sense strand
ggaaagcuuuaggcaaauc

SEQ ID NO: 737206 - RNA, 19 nt, Homo sapiens
  misc_RNA (1)...(19): siRNA sense strand
aaacaguugaggacuauuu

SEQ ID NO: 737207 - RNA, 19 nt, Homo sapiens
  misc_RNA (1)...(19): siRNA sense strand
caaaucggaugaguguaga

SEQ ID NO: 737208 - RNA, 19 nt, Homo sapiens
  misc_RNA (1)...(19): siRNA sense strand
uagaugcuguagaaauuga

SEQ ID NO: 737209 - RNA, 19 nt, Homo sapiens
  misc_RNA (1)...(19): siRNA sense strand
caaugaaggcacagaaaug

SEQ ID NO: 737210 - RNA, 19 nt, Homo sapiens
  misc_RNA (1)...(19): siRNA sense strand
gacaguaaaggaagaauca

SEQ ID NO: 737211 - RNA, 19 nt, Homo sapiens
  misc_RNA (1)...(19): siRNA sense strand
gcucucgaguccaugugua

SEQ ID NO: 737212 - RNA, 19 nt, Homo sapiens
  misc_RNA (1)...(19): siRNA sense strand
cgagaacuaugaucuugca

SEQ ID NO: 737213 - RNA, 19 nt, Homo sapiens
  misc_RNA (1)...(19): siRNA sense strand
gcagagaugcauaaaauga

SEQ ID NO: 737214 - RNA, 19 nt, Homo sapiens
  misc_RNA (1)...(19): siRNA sense strand
gaacuggccaaguccaaag

SEQ ID NO: 737215 - RNA, 19 nt, Homo sapiens
  misc_RNA (1)...(19): siRNA sense strand
aaaggaagaaucagaagau

SEQ ID NO: 737216 - RNA, 19 nt, Homo sapiens
  misc_RNA (1)...(19): siRNA sense strand
uaaaggaagaaucagaaga

SEQ ID NO: 737217 - RNA, 19 nt, Homo sapiens
  misc_RNA (1)...(19): siRNA sense strand
gucaauaccagaaaggauu

SEQ ID NO: 737218 - RNA, 19 nt, Homo sapiens
  misc_RNA (1)...(19): siRNA sense strand
gcauugcaguguaugaaac

SEQ ID NO: 737219 - RNA, 19 nt, Homo sapiens
  misc_RNA (1)...(19): siRNA sense strand
ggacgugcuuuugucaaua

SEQ ID NO: 737220 - RNA, 19 nt, Homo sapiens
  misc_RNA (1)...(19): siRNA sense strand
gggaaagcuuuaggcaaau

SEQ ID NO: 737221 - RNA, 19 nt, Homo sapiens
  misc_RNA (1)...(19): siRNA sense strand
ugaaggcacagaaauggaa

SEQ ID NO: 737222 - RNA, 19 nt, Homo sapiens
  misc_RNA (1)...(19): siRNA sense strand
ccagucggcugugguagug

SEQ ID NO: 737223 - RNA, 19 nt, Homo sapiens
  misc_RNA (1)...(19): siRNA sense strand
ucaauaccagaaaggauuu

SEQ ID NO: 737224 - RNA, 19 nt, Homo sapiens
  misc_RNA (1)...(19): siRNA sense strand
gaagauccugauuauuauc

SEQ ID NO: 737225 - RNA, 19 nt, Homo sapiens
  misc_RNA (1)...(19): siRNA sense strand
ggaagaaucagaagauccu

SEQ ID NO: 737226 - RNA, 19 nt, Homo sapiens
  misc_RNA (1)...(19): siRNA sense strand
guagaaauugaaacacuca

SEQ ID NO: 737227 - RNA, 19 nt, Homo sapiens
  misc_RNA (1)...(19): siRNA sense strand
uugcaacccugaaauggau

SEQ ID NO: 737228 - RNA, 19 nt, Homo sapiens
  misc_RNA (1)...(19): siRNA sense strand
gaucuugcaacccugaaau

SEQ ID NO: 737229 - RNA, 19 nt, Homo sapiens
  misc_RNA (1)...(19): siRNA sense strand
cccgagaacuaugaucuug

SEQ ID NO: 737230 - RNA, 19 nt, Homo sapiens
  misc_RNA (1)...(19): siRNA sense strand
ggcaaugaaggcacagaaa

SEQ ID NO: 737231 - RNA, 19 nt, Homo sapiens
  misc_RNA (1)...(19): siRNA sense strand
ugucagcucucgaguccau

SEQ ID NO: 737232 - RNA, 19 nt, Homo sapiens
  misc_RNA (1)...(19): siRNA sense strand
guagaugcuguagaaauug

SEQ ID NO: 737233 - RNA, 19 nt, Homo sapiens
  misc_RNA (1)...(19): siRNA sense strand
gaugaguguagaugcugua

SEQ ID NO: 737234 - RNA, 19 nt, Homo sapiens
  misc_RNA (1)...(19): siRNA sense strand
gggcaaugaaggcacagaa

SEQ ID NO: 737235 - RNA, 19 nt, Homo sapiens
  misc_RNA (1)...(19): siRNA sense strand
ucgaguccauguguaaaga

SEQ ID NO: 737236 - RNA, 19 nt, Homo sapiens
  misc_RNA (1)...(19): siRNA sense strand
guaaaggaagaaucagaag

SEQ ID NO: 737237 - RNA, 19 nt, Homo sapiens
  misc_RNA (1)...(19): siRNA sense strand
guccauguguaaagaacug

SEQ ID NO: 737238 - RNA, 19 nt, Homo sapiens
  misc_RNA (1)...(19): siRNA sense strand
gguggugacauuccucaug

SEQ ID NO: 737239 - RNA, 19 nt, Homo sapiens
  misc_RNA (1)...(19): siRNA sense strand
uguagguggucgugugaug

SEQ ID NO: 737240 - RNA, 19 nt, Homo sapiens
  misc_RNA (1)...(19): siRNA sense strand
guguagaugcuguagaaau

SEQ ID NO: 737241 - RNA, 19 nt, Homo sapiens
  misc_RNA (1)...(19): siRNA sense strand
aggcaaaucggaugagugu

SEQ ID NO: 737242 - RNA, 19 nt, Homo sapiens
  misc_RNA (1)...(19): siRNA sense strand
aguaaaggaagaaucagaa

SEQ ID NO: 737243 - RNA, 19 nt, Homo sapiens
  misc_RNA (1)...(19): siRNA sense strand
caguaaaggaagaaucaga

SEQ ID NO: 737244 - RNA, 19 nt, Homo sapiens
  misc_RNA (1)...(19): siRNA sense strand
gguggucgugugaugguaa

SEQ ID NO: 737245 - RNA, 19 nt, Homo sapiens
  misc_RNA (1)...(19): siRNA sense strand
gaugcuguagaaauugaaa

SEQ ID NO: 737246 - RNA, 19 nt, Homo sapiens
  misc_RNA (1)...(19): siRNA sense strand
ccaucaaagugaaaacuga

SEQ ID NO: 737247 - RNA, 19 nt, Homo sapiens
  misc_RNA (1)...(19): siRNA sense strand
gucgugugaugguaacaga

SEQ ID NO: 737248 - RNA, 19 nt, Homo sapiens
  misc_RNA (1)...(19): siRNA sense strand
cuacaacccaggcaaaucg

SEQ ID NO: 737249 - RNA, 19 nt, Homo sapiens
  misc_RNA (1)...(19): siRNA sense strand
uuaaacaccccgagaacua

SEQ ID NO: 737250 - RNA, 19 nt, Homo sapiens
  misc_RNA (1)...(19): siRNA sense strand
ccaggcaaaucggaugagu

SEQ ID NO: 737251 - RNA, 19 nt, Homo sapiens
  misc_RNA (1)...(19): siRNA sense strand
agaaauugaaacacucaga

SEQ ID NO: 737252 - RNA, 19 nt, Homo sapiens
  misc_RNA (1)...(19): siRNA sense strand
gaaaacugaacccacagaa

SEQ ID NO: 737253 - RNA, 19 nt, Homo sapiens
  misc_RNA (1)...(19): siRNA sense strand
gagccaaagaagcauguag

SEQ ID NO: 737254 - RNA, 19 nt, Homo sapiens
  misc_RNA (1)...(19): siRNA sense strand
cagaagauccugauuauua

SEQ ID NO: 737255 - RNA, 19 nt, Homo sapiens
  misc_RNA (1)...(19): siRNA sense strand
guaaagaacuggccaaguc

SEQ ID NO: 737256 - RNA, 19 nt, Homo sapiens
  misc_RNA (1)...(19): siRNA sense strand
gggauuucauucaucauua

SEQ ID NO: 737257 - RNA, 19 nt, Homo sapiens
  misc_RNA (1)...(19): siRNA sense strand
gaguguagaugcuguagaa

SEQ ID NO: 737258 - RNA, 19 nt, Homo sapiens
  misc_RNA (1)...(19): siRNA sense strand
ugggaaagcuuuaggcaaa

SEQ ID NO: 737259 - RNA, 19 nt, Homo sapiens
  misc_RNA (1)...(19): siRNA sense strand
gcaggaugguggugacauu

SEQ ID NO: 737260 - RNA, 19 nt, Homo sapiens
  misc_RNA (1)...(19): siRNA sense strand
gaaauugaaacacucagaa

SEQ ID NO: 737261 - RNA, 19 nt, Homo sapiens
  misc_RNA (1)...(19): siRNA sense strand
uguagaugcuguagaaauu

SEQ ID NO: 737262 - RNA, 19 nt, Homo sapiens
  misc_RNA (1)...(19): siRNA sense strand
ggaaauggcagcugugaca

SEQ ID NO: 737263 - RNA, 19 nt, Homo sapiens
  misc_RNA (1)...(19): siRNA sense strand
gcaaaucggaugaguguag

SEQ ID NO: 737264 - RNA, 19 nt, Homo sapiens
  misc_RNA (1)...(19): siRNA sense strand
aaacugaacccacagaaga

SEQ ID NO: 737265 - RNA, 19 nt, Homo sapiens
  misc_RNA (1)...(19): siRNA sense strand
ugaggacuauuucugcuuu

SEQ ID NO: 737266 - RNA, 19 nt, Homo sapiens
  misc_RNA (1)...(19): siRNA sense strand
gcaaugaaggcacagaaau

SEQ ID NO: 737267 - RNA, 19 nt, Homo sapiens
  misc_RNA (1)...(19): siRNA sense strand
caaggaagccaccauucuu

SEQ ID NO: 737268 - RNA, 19 nt, Homo sapiens
  misc_RNA (1)...(19): siRNA sense strand
ggaaagcuuuaggcaaauc

SEQ ID NO: 737269 - RNA, 19 nt, Homo sapiens
  misc_RNA (1)...(19): siRNA sense strand
aaacaguugaggacuauuu

SEQ ID NO: 737270 - RNA, 19 nt, Homo sapiens
  misc_RNA (1)...(19): siRNA sense strand
caaaucggaugaguguaga

SEQ ID NO: 737271 - RNA, 19 nt, Homo sapiens
  misc_RNA (1)...(19): siRNA sense strand
uagaugcuguagaaauuga

SEQ ID NO: 737272 - RNA, 19 nt, Homo sapiens
  misc_RNA (1)...(19): siRNA sense strand
caaugaaggcacagaaaug

SEQ ID NO: 737273 - RNA, 19 nt, Homo sapiens
  misc_RNA (1)...(19): siRNA sense strand
gacaguaaaggaagaauca

SEQ ID NO: 737274 - RNA, 19 nt, Homo sapiens
  misc_RNA (1)...(19): siRNA sense strand
gcucucgaguccaugugua

SEQ ID NO: 737275 - RNA, 19 nt, Homo sapiens
  misc_RNA (1)...(19): siRNA sense strand
cgagaacuaugaucuugca

SEQ ID NO: 737276 - RNA, 19 nt, Homo sapiens
  misc_RNA (1)...(19): siRNA sense strand
gcagagaugcauaaaauga

SEQ ID NO: 737277 - RNA, 19 nt, Homo sapiens
  misc_RNA (1)...(19): siRNA sense strand
gaacuggccaaguccaaag

SEQ ID NO: 737278 - RNA, 19 nt, Homo sapiens
  misc_RNA (1)...(19): siRNA sense strand
aaaggaagaaucagaagau

SEQ ID NO: 737279 - RNA, 19 nt, Homo sapiens
  misc_RNA (1)...(19): siRNA sense strand
uaaaggaagaaucagaaga

SEQ ID NO: 737280 - RNA, 19 nt, Homo sapiens
  misc_RNA (1)...(19): siRNA sense strand
gucaauaccagaaaggauu

SEQ ID NO: 737281 - RNA, 19 nt, Homo sapiens
  misc_RNA (1)...(19): siRNA sense strand
gcauugcaguguaugaaac

SEQ ID NO: 737282 - RNA, 19 nt, Homo sapiens
  misc_RNA (1)...(19): siRNA sense strand
ggacgugcuuuugucaaua

SEQ ID NO: 737283 - RNA, 19 nt, Homo sapiens
  misc_RNA (1)...(19): siRNA sense strand
gggaaagcuuuaggcaaau

SEQ ID NO: 737284 - RNA, 19 nt, Homo sapiens
  misc_RNA (1)...(19): siRNA sense strand
ugaaggcacagaaauggaa

SEQ ID NO: 737285 - RNA, 19 nt, Homo sapiens
  misc_RNA (1)...(19): siRNA sense strand
ccagucggcugugguagug

SEQ ID NO: 737286 - RNA, 19 nt, Homo sapiens
  misc_RNA (1)...(19): siRNA sense strand
ucaauaccagaaaggauuu

SEQ ID NO: 737287 - RNA, 19 nt, Homo sapiens
  misc_RNA (1)...(19): siRNA sense strand
gaagauccugauuauuauc

SEQ ID NO: 737288 - RNA, 19 nt, Homo sapiens
  misc_RNA (1)...(19): siRNA sense strand
ggaagaaucagaagauccu

SEQ ID NO: 737289 - RNA, 19 nt, Homo sapiens
  misc_RNA (1)...(19): siRNA sense strand
guagaaauugaaacacuca

SEQ ID NO: 737290 - RNA, 19 nt, Homo sapiens
  misc_RNA (1)...(19): siRNA sense strand
uugcaacccugaaauggau

SEQ ID NO: 737291 - RNA, 19 nt, Homo sapiens
  misc_RNA (1)...(19): siRNA sense strand
gaucuugcaacccugaaau

SEQ ID NO: 737292 - RNA, 19 nt, Homo sapiens
  misc_RNA (1)...(19): siRNA sense strand
cccgagaacuaugaucuug

SEQ ID NO: 737293 - RNA, 19 nt, Homo sapiens
  misc_RNA (1)...(19): siRNA sense strand
ggcaaugaaggcacagaaa

SEQ ID NO: 737294 - RNA, 19 nt, Homo sapiens
  misc_RNA (1)...(19): siRNA sense strand
ugucagcucucgaguccau

SEQ ID NO: 737295 - RNA, 19 nt, Homo sapiens
  misc_RNA (1)...(19): siRNA sense strand
guagaugcuguagaaauug

SEQ ID NO: 737296 - RNA, 19 nt, Homo sapiens
  misc_RNA (1)...(19): siRNA sense strand
gaugaguguagaugcugua

SEQ ID NO: 737297 - RNA, 19 nt, Homo sapiens
  misc_RNA (1)...(19): siRNA sense strand
gggcaaugaaggcacagaa

SEQ ID NO: 737298 - RNA, 19 nt, Homo sapiens
  misc_RNA (1)...(19): siRNA sense strand
ucgaguccauguguaaaga

SEQ ID NO: 737299 - RNA, 19 nt, Homo sapiens
  misc_RNA (1)...(19): siRNA sense strand
guaaaggaagaaucagaag

SEQ ID NO: 737300 - RNA, 19 nt, Homo sapiens
  misc_RNA (1)...(19): siRNA sense strand
guccauguguaaagaacug

SEQ ID NO: 737301 - RNA, 19 nt, Homo sapiens
  misc_RNA (1)...(19): siRNA sense strand
gguggugacauuccucaug

SEQ ID NO: 737302 - RNA, 19 nt, Homo sapiens
  misc_RNA (1)...(19): siRNA sense strand
uguagguggucgugugaug

SEQ ID NO: 737303 - RNA, 19 nt, Homo sapiens
  misc_RNA (1)...(19): siRNA sense strand
guguagaugcuguagaaau

SEQ ID NO: 737304 - RNA, 19 nt, Homo sapiens
  misc_RNA (1)...(19): siRNA sense strand
aggcaaaucggaugagugu

SEQ ID NO: 737305 - RNA, 19 nt, Homo sapiens
  misc_RNA (1)...(19): siRNA sense strand
aguaaaggaagaaucagaa

SEQ ID NO: 737306 - RNA, 19 nt, Homo sapiens
  misc_RNA (1)...(19): siRNA sense strand
caguaaaggaagaaucaga

SEQ ID NO: 737307 - RNA, 19 nt, Homo sapiens
  misc_RNA (1)...(19): siRNA sense strand
gguggucgugugaugguaa

SEQ ID NO: 737308 - RNA, 19 nt, Homo sapiens
  misc_RNA (1)...(19): siRNA sense strand
gaugcuguagaaauugaaa

SEQ ID NO: 737309 - RNA, 19 nt, Homo sapiens
  misc_RNA (1)...(19): siRNA sense strand
ccaucaaagugaaaacuga

SEQ ID NO: 737310 - RNA, 19 nt, Homo sapiens
  misc_RNA (1)...(19): siRNA sense strand
gucgugugaugguaacaga

SEQ ID NO: 737311 - RNA, 19 nt, Homo sapiens
  misc_RNA (1)...(19): siRNA sense strand
cuacaacccaggcaaaucg

SEQ ID NO: 737312 - RNA, 19 nt, Homo sapiens
  misc_RNA (1)...(19): siRNA sense strand
uuaaacaccccgagaacua

SEQ ID NO: 737313 - RNA, 19 nt, Homo sapiens
  misc_RNA (1)...(19): siRNA sense strand
ccaggcaaaucggaugagu

SEQ ID NO: 737314 - RNA, 19 nt, Homo sapiens
  misc_RNA (1)...(19): siRNA sense strand
agaaauugaaacacucaga

SEQ ID NO: 737315 - RNA, 19 nt, Homo sapiens
  misc_RNA (1)...(19): siRNA sense strand
gaaaacugaacccacagaa

SEQ ID NO: 737316 - RNA, 19 nt, Homo sapiens
  misc_RNA (1)...(19): siRNA sense strand
gagccaaagaagcauguag

SEQ ID NO: 737317 - RNA, 19 nt, Homo sapiens
  misc_RNA (1)...(19): siRNA sense strand
cagaagauccugauuauua

SEQ ID NO: 737318 - RNA, 19 nt, Homo sapiens
  misc_RNA (1)...(19): siRNA sense strand
guaaagaacuggccaaguc

SEQ ID NO: 737319 - RNA, 19 nt, Homo sapiens
  misc_RNA (1)...(19): siRNA sense strand
gggauuucauucaucauua

SEQ ID NO: 737320 - RNA, 19 nt, Homo sapiens
  misc_RNA (1)...(19): siRNA sense strand
gaguguagaugcuguagaa

SEQ ID NO: 737321 - RNA, 19 nt, Homo sapiens
  misc_RNA (1)...(19): siRNA sense strand
ugggaaagcuuuaggcaaa

SEQ ID NO: 737322 - RNA, 19 nt, Homo sapiens
  misc_RNA (1)...(19): siRNA sense strand
gcaggaugguggugacauu

SEQ ID NO: 737323 - RNA, 19 nt, Homo sapiens
  misc_RNA (1)...(19): siRNA sense strand
gaaauugaaacacucagaa

SEQ ID NO: 737324 - RNA, 19 nt, Homo sapiens
  misc_RNA (1)...(19): siRNA sense strand
uguagaugcuguagaaauu

SEQ ID NO: 737325 - RNA, 19 nt, Homo sapiens
  misc_RNA (1)...(19): siRNA sense strand
ggaaauggcagcugugaca

SEQ ID NO: 737326 - RNA, 19 nt, Homo sapiens
  misc_RNA (1)...(19): siRNA sense strand
gcaaaucggaugaguguag

SEQ ID NO: 737327 - RNA, 19 nt, Homo sapiens
  misc_RNA (1)...(19): siRNA sense strand
aaacugaacccacagaaga

SEQ ID NO: 737328 - RNA, 19 nt, Homo sapiens
  misc_RNA (1)...(19): siRNA sense strand
ugaggacuauuucugcuuu

SEQ ID NO: 737329 - RNA, 19 nt, Homo sapiens
  misc_RNA (1)...(19): siRNA sense strand
gcaaugaaggcacagaaau

SEQ ID NO: 737330 - RNA, 19 nt, Homo sapiens
  misc_RNA (1)...(19): siRNA sense strand
caaggaagccaccauucuu

SEQ ID NO: 737331 - RNA, 19 nt, Homo sapiens
  misc_RNA (1)...(19): siRNA sense strand
ggaaagcuuuaggcaaauc

SEQ ID NO: 737332 - RNA, 19 nt, Homo sapiens
  misc_RNA (1)...(19): siRNA sense strand
aaacaguugaggacuauuu

SEQ ID NO: 737333 - RNA, 19 nt, Homo sapiens
  misc_RNA (1)...(19): siRNA sense strand
caaaucggaugaguguaga

SEQ ID NO: 737334 - RNA, 19 nt, Homo sapiens
  misc_RNA (1)...(19): siRNA sense strand
uagaugcuguagaaauuga

SEQ ID NO: 737335 - RNA, 19 nt, Homo sapiens
  misc_RNA (1)...(19): siRNA sense strand
caaugaaggcacagaaaug

SEQ ID NO: 737336 - RNA, 19 nt, Homo sapiens
  misc_RNA (1)...(19): siRNA sense strand
gacaguaaaggaagaauca

SEQ ID NO: 737337 - RNA, 19 nt, Homo sapiens
  misc_RNA (1)...(19): siRNA sense strand
gcucucgaguccaugugua

SEQ ID NO: 737338 - RNA, 19 nt, Homo sapiens
  misc_RNA (1)...(19): siRNA sense strand
cgagaacuaugaucuugca

SEQ ID NO: 737339 - RNA, 19 nt, Homo sapiens
  misc_RNA (1)...(19): siRNA sense strand
gcagagaugcauaaaauga

SEQ ID NO: 737340 - RNA, 19 nt, Homo sapiens
  misc_RNA (1)...(19): siRNA sense strand
gaacuggccaaguccaaag

SEQ ID NO: 737341 - RNA, 19 nt, Homo sapiens
  misc_RNA (1)...(19): siRNA sense strand
aaaggaagaaucagaagau

SEQ ID NO: 737342 - RNA, 19 nt, Homo sapiens
  misc_RNA (1)...(19): siRNA sense strand
uaaaggaagaaucagaaga

SEQ ID NO: 737343 - RNA, 19 nt, Homo sapiens
  misc_RNA (1)...(19): siRNA sense strand
gucaauaccagaaaggauu

SEQ ID NO: 737344 - RNA, 19 nt, Homo sapiens
  misc_RNA (1)...(19): siRNA sense strand
gcauugcaguguaugaaac

SEQ ID NO: 737345 - RNA, 19 nt, Homo sapiens
  misc_RNA (1)...(19): siRNA sense strand
ggacgugcuuuugucaaua

SEQ ID NO: 737346 - RNA, 19 nt, Homo sapiens
  misc_RNA (1)...(19): siRNA sense strand
gggaaagcuuuaggcaaau

SEQ ID NO: 737347 - RNA, 19 nt, Homo sapiens
  misc_RNA (1)...(19): siRNA sense strand
ugaaggcacagaaauggaa

SEQ ID NO: 737348 - RNA, 19 nt, Homo sapiens
  misc_RNA (1)...(19): siRNA sense strand
ccagucggcugugguagug

SEQ ID NO: 737349 - RNA, 19 nt, Homo sapiens
  misc_RNA (1)...(19): siRNA sense strand
ucaauaccagaaaggauuu

SEQ ID NO: 737350 - RNA, 19 nt, Homo sapiens
  misc_RNA (1)...(19): siRNA sense strand
gaagauccugauuauuauc

SEQ ID NO: 737351 - RNA, 19 nt, Homo sapiens
  misc_RNA (1)...(19): siRNA sense strand
ggaagaaucagaagauccu

SEQ ID NO: 737352 - RNA, 19 nt, Homo sapiens
  misc_RNA (1)...(19): siRNA sense strand
guagaaauugaaacacuca

SEQ ID NO: 737353 - RNA, 19 nt, Homo sapiens
  misc_RNA (1)...(19): siRNA sense strand
uugcaacccugaaauggau

SEQ ID NO: 737354 - RNA, 19 nt, Homo sapiens
  misc_RNA (1)...(19): siRNA sense strand
gaucuugcaacccugaaau

SEQ ID NO: 737355 - RNA, 19 nt, Homo sapiens
  misc_RNA (1)...(19): siRNA sense strand
cccgagaacuaugaucuug

SEQ ID NO: 737356 - RNA, 19 nt, Homo sapiens
  misc_RNA (1)...(19): siRNA sense strand
ggcaaugaaggcacagaaa

SEQ ID NO: 737357 - RNA, 19 nt, Homo sapiens
  misc_RNA (1)...(19): siRNA sense strand
ugucagcucucgaguccau

SEQ ID NO: 737358 - RNA, 19 nt, Homo sapiens
  misc_RNA (1)...(19): siRNA sense strand
guagaugcuguagaaauug

SEQ ID NO: 737359 - RNA, 19 nt, Homo sapiens
  misc_RNA (1)...(19): siRNA sense strand
gaugaguguagaugcugua

SEQ ID NO: 737360 - RNA, 19 nt, Homo sapiens
  misc_RNA (1)...(19): siRNA sense strand
gggcaaugaaggcacagaa

SEQ ID NO: 737361 - RNA, 19 nt, Homo sapiens
  misc_RNA (1)...(19): siRNA sense strand
ucgaguccauguguaaaga

SEQ ID NO: 737362 - RNA, 19 nt, Homo sapiens
  misc_RNA (1)...(19): siRNA sense strand
guaaaggaagaaucagaag

SEQ ID NO: 737363 - RNA, 19 nt, Homo sapiens
  misc_RNA (1)...(19): siRNA sense strand
guccauguguaaagaacug

SEQ ID NO: 737364 - RNA, 19 nt, Homo sapiens
  misc_RNA (1)...(19): siRNA sense strand
gguggugacauuccucaug

SEQ ID NO: 737365 - RNA, 19 nt, Homo sapiens
  misc_RNA (1)...(19): siRNA sense strand
uguagguggucgugugaug

SEQ ID NO: 737366 - RNA, 19 nt, Homo sapiens
  misc_RNA (1)...(19): siRNA sense strand
guguagaugcuguagaaau

SEQ ID NO: 737367 - RNA, 19 nt, Homo sapiens
  misc_RNA (1)...(19): siRNA sense strand
aggcaaaucggaugagugu

SEQ ID NO: 737368 - RNA, 19 nt, Homo sapiens
  misc_RNA (1)...(19): siRNA sense strand
aguaaaggaagaaucagaa

SEQ ID NO: 737369 - RNA, 19 nt, Homo sapiens
  misc_RNA (1)...(19): siRNA sense strand
caguaaaggaagaaucaga

SEQ ID NO: 737370 - RNA, 19 nt, Homo sapiens
  misc_RNA (1)...(19): siRNA sense strand
gguggucgugugaugguaa

SEQ ID NO: 737371 - RNA, 19 nt, Homo sapiens
  misc_RNA (1)...(19): siRNA sense strand
gaugcuguagaaauugaaa

SEQ ID NO: 737372 - RNA, 19 nt, Homo sapiens
  misc_RNA (1)...(19): siRNA sense strand
ccaucaaagugaaaacuga

SEQ ID NO: 737373 - RNA, 19 nt, Homo sapiens
  misc_RNA (1)...(19): siRNA sense strand
gucgugugaugguaacaga

SEQ ID NO: 737374 - RNA, 19 nt, Homo sapiens
  misc_RNA (1)...(19): siRNA sense strand
cuacaacccaggcaaaucg

SEQ ID NO: 737375 - RNA, 19 nt, Homo sapiens
  misc_RNA (1)...(19): siRNA sense strand
uuaaacaccccgagaacua

SEQ ID NO: 737376 - RNA, 19 nt, Homo sapiens
  misc_RNA (1)...(19): siRNA sense strand
ccaggcaaaucggaugagu

SEQ ID NO: 737377 - RNA, 19 nt, Homo sapiens
  misc_RNA (1)...(19): siRNA sense strand
agaaauugaaacacucaga

SEQ ID NO: 737378 - RNA, 19 nt, Homo sapiens
  misc_RNA (1)...(19): siRNA sense strand
gaaaacugaacccacagaa

SEQ ID NO: 737379 - RNA, 19 nt, Homo sapiens
  misc_RNA (1)...(19): siRNA sense strand
gagccaaagaagcauguag

SEQ ID NO: 737380 - RNA, 19 nt, Homo sapiens
  misc_RNA (1)...(19): siRNA sense strand
cagaagauccugauuauua

SEQ ID NO: 737381 - RNA, 19 nt, Homo sapiens
  misc_RNA (1)...(19): siRNA sense strand
guaaagaacuggccaaguc

SEQ ID NO: 737382 - RNA, 19 nt, Homo sapiens
  misc_RNA (1)...(19): siRNA sense strand
gggauuucauucaucauua

SEQ ID NO: 737383 - RNA, 19 nt, Homo sapiens
  misc_RNA (1)...(19): siRNA sense strand
gaguguagaugcuguagaa

SEQ ID NO: 737384 - RNA, 19 nt, Homo sapiens
  misc_RNA (1)...(19): siRNA sense strand
ugggaaagcuuuaggcaaa

SEQ ID NO: 737385 - RNA, 19 nt, Homo sapiens
  misc_RNA (1)...(19): siRNA sense strand
gcaggaugguggugacauu

SEQ ID NO: 737386 - RNA, 19 nt, Homo sapiens
  misc_RNA (1)...(19): siRNA sense strand
gaaauugaaacacucagaa

SEQ ID NO: 737387 - RNA, 19 nt, Homo sapiens
  misc_RNA (1)...(19): siRNA sense strand
uguagaugcuguagaaauu

SEQ ID NO: 737388 - RNA, 19 nt, Homo sapiens
  misc_RNA (1)...(19): siRNA sense strand
ggaaauggcagcugugaca

SEQ ID NO: 737389 - RNA, 19 nt, Homo sapiens
  misc_RNA (1)...(19): siRNA sense strand
gcaaaucggaugaguguag

SEQ ID NO: 737390 - RNA, 19 nt, Homo sapiens
  misc_RNA (1)...(19): siRNA sense strand
aaacugaacccacagaaga

SEQ ID NO: 737391 - RNA, 19 nt, Homo sapiens
  misc_RNA (1)...(19): siRNA sense strand
ugaggacuauuucugcuuu

SEQ ID NO: 737392 - RNA, 19 nt, Homo sapiens
  misc_RNA (1)...(19): siRNA sense strand
gcaaugaaggcacagaaau

SEQ ID NO: 737393 - RNA, 19 nt, Homo sapiens
  misc_RNA (1)...(19): siRNA sense strand
caaggaagccaccauucuu

SEQ ID NO: 737394 - RNA, 19 nt, Homo sapiens
  misc_RNA (1)...(19): siRNA sense strand
ggaaagcuuuaggcaaauc

SEQ ID NO: 737395 - RNA, 19 nt, Homo sapiens
  misc_RNA (1)...(19): siRNA sense strand
aaacaguugaggacuauuu

SEQ ID NO: 737396 - RNA, 19 nt, Homo sapiens
  misc_RNA (1)...(19): siRNA sense strand
caaaucggaugaguguaga

SEQ ID NO: 737397 - RNA, 19 nt, Homo sapiens
  misc_RNA (1)...(19): siRNA sense strand
uagaugcuguagaaauuga

SEQ ID NO: 737398 - RNA, 19 nt, Homo sapiens
  misc_RNA (1)...(19): siRNA sense strand
caaugaaggcacagaaaug

SEQ ID NO: 737399 - RNA, 19 nt, Homo sapiens
  misc_RNA (1)...(19): siRNA sense strand
gacaguaaaggaagaauca

SEQ ID NO: 737400 - RNA, 19 nt, Homo sapiens
  misc_RNA (1)...(19): siRNA sense strand
gcucucgaguccaugugua

SEQ ID NO: 737401 - RNA, 19 nt, Homo sapiens
  misc_RNA (1)...(19): siRNA sense strand
cgagaacuaugaucuugca

SEQ ID NO: 737402 - RNA, 19 nt, Homo sapiens
  misc_RNA (1)...(19): siRNA sense strand
gcagagaugcauaaaauga

SEQ ID NO: 737403 - RNA, 19 nt, Homo sapiens
  misc_RNA (1)...(19): siRNA sense strand
gaacuggccaaguccaaag

SEQ ID NO: 737404 - RNA, 19 nt, Homo sapiens
  misc_RNA (1)...(19): siRNA sense strand
aaaggaagaaucagaagau

SEQ ID NO: 737405 - RNA, 19 nt, Homo sapiens
  misc_RNA (1)...(19): siRNA sense strand
uaaaggaagaaucagaaga

SEQ ID NO: 737406 - RNA, 19 nt, Homo sapiens
  misc_RNA (1)...(19): siRNA sense strand
gucaauaccagaaaggauu

SEQ ID NO: 737407 - RNA, 19 nt, Homo sapiens
  misc_RNA (1)...(19): siRNA sense strand
gcauugcaguguaugaaac

SEQ ID NO: 737408 - RNA, 19 nt, Homo sapiens
  misc_RNA (1)...(19): siRNA sense strand
ggacgugcuuuugucaaua

SEQ ID NO: 737409 - RNA, 19 nt, Homo sapiens
  misc_RNA (1)...(19): siRNA sense strand
gggaaagcuuuaggcaaau

SEQ ID NO: 737410 - RNA, 19 nt, Homo sapiens
  misc_RNA (1)...(19): siRNA sense strand
ugaaggcacagaaauggaa

SEQ ID NO: 737411 - RNA, 19 nt, Homo sapiens
  misc_RNA (1)...(19): siRNA sense strand
ccagucggcugugguagug

SEQ ID NO: 737412 - RNA, 19 nt, Homo sapiens
  misc_RNA (1)...(19): siRNA sense strand
ucaauaccagaaaggauuu

SEQ ID NO: 737413 - RNA, 19 nt, Homo sapiens
  misc_RNA (1)...(19): siRNA sense strand
gaagauccugauuauuauc

SEQ ID NO: 737414 - RNA, 19 nt, Homo sapiens
  misc_RNA (1)...(19): siRNA sense strand
ggaagaaucagaagauccu

SEQ ID NO: 737415 - RNA, 19 nt, Homo sapiens
  misc_RNA (1)...(19): siRNA sense strand
guagaaauugaaacacuca

SEQ ID NO: 737416 - RNA, 19 nt, Homo sapiens
  misc_RNA (1)...(19): siRNA sense strand
uugcaacccugaaauggau

SEQ ID NO: 737417 - RNA, 19 nt, Homo sapiens
  misc_RNA (1)...(19): siRNA sense strand
gaucuugcaacccugaaau

SEQ ID NO: 737418 - RNA, 19 nt, Homo sapiens
  misc_RNA (1)...(19): siRNA sense strand
cccgagaacuaugaucuug

SEQ ID NO: 737419 - RNA, 19 nt, Homo sapiens
  misc_RNA (1)...(19): siRNA sense strand
ggcaaugaaggcacagaaa

SEQ ID NO: 737420 - RNA, 19 nt, Homo sapiens
  misc_RNA (1)...(19): siRNA sense strand
ugucagcucucgaguccau

SEQ ID NO: 737421 - RNA, 19 nt, Homo sapiens
  misc_RNA (1)...(19): siRNA sense strand
guagaugcuguagaaauug

SEQ ID NO: 737422 - RNA, 19 nt, Homo sapiens
  misc_RNA (1)...(19): siRNA sense strand
gaugaguguagaugcugua

SEQ ID NO: 737423 - RNA, 19 nt, Homo sapiens
  misc_RNA (1)...(19): siRNA sense strand
gggcaaugaaggcacagaa

SEQ ID NO: 737424 - RNA, 19 nt, Homo sapiens
  misc_RNA (1)...(19): siRNA sense strand
ucgaguccauguguaaaga

SEQ ID NO: 737425 - RNA, 19 nt, Homo sapiens
  misc_RNA (1)...(19): siRNA sense strand
guaaaggaagaaucagaag

SEQ ID NO: 737426 - RNA, 19 nt, Homo sapiens
  misc_RNA (1)...(19): siRNA sense strand
guccauguguaaagaacug

SEQ ID NO: 737427 - RNA, 19 nt, Homo sapiens
  misc_RNA (1)...(19): siRNA sense strand
gguggugacauuccucaug

SEQ ID NO: 737428 - RNA, 19 nt, Homo sapiens
  misc_RNA (1)...(19): siRNA sense strand
uguagguggucgugugaug

SEQ ID NO: 737429 - RNA, 19 nt, Homo sapiens
  misc_RNA (1)...(19): siRNA sense strand
guguagaugcuguagaaau

SEQ ID NO: 737430 - RNA, 19 nt, Homo sapiens
  misc_RNA (1)...(19): siRNA sense strand
aggcaaaucggaugagugu

SEQ ID NO: 737431 - RNA, 19 nt, Homo sapiens
  misc_RNA (1)...(19): siRNA sense strand
aguaaaggaagaaucagaa

SEQ ID NO: 737432 - RNA, 19 nt, Homo sapiens
  misc_RNA (1)...(19): siRNA sense strand
caguaaaggaagaaucaga

SEQ ID NO: 737433 - RNA, 19 nt, Homo sapiens
  misc_RNA (1)...(19): siRNA sense strand
gguggucgugugaugguaa

SEQ ID NO: 737434 - RNA, 19 nt, Homo sapiens
  misc_RNA (1)...(19): siRNA sense strand
gaugcuguagaaauugaaa

SEQ ID NO: 737435 - RNA, 19 nt, Homo sapiens
  misc_RNA (1)...(19): siRNA sense strand
ccaucaaagugaaaacuga

SEQ ID NO: 737436 - RNA, 19 nt, Homo sapiens
  misc_RNA (1)...(19): siRNA sense strand
gucgugugaugguaacaga

SEQ ID NO: 737437 - RNA, 19 nt, Homo sapiens
  misc_RNA (1)...(19): siRNA sense strand
cuacaacccaggcaaaucg

SEQ ID NO: 737438 - RNA, 19 nt, Homo sapiens
  misc_RNA (1)...(19): siRNA sense strand
uuaaacaccccgagaacua

SEQ ID NO: 737439 - RNA, 19 nt, Homo sapiens
  misc_RNA (1)...(19): siRNA sense strand
ccaggcaaaucggaugagu

SEQ ID NO: 737440 - RNA, 19 nt, Homo sapiens
  misc_RNA (1)...(19): siRNA sense strand
agaaauugaaacacucaga

SEQ ID NO: 737441 - RNA, 19 nt, Homo sapiens
  misc_RNA (1)...(19): siRNA sense strand
gaaaacugaacccacagaa

SEQ ID NO: 737442 - RNA, 19 nt, Homo sapiens
  misc_RNA (1)...(19): siRNA sense strand
gagccaaagaagcauguag

SEQ ID NO: 737443 - RNA, 19 nt, Homo sapiens
  misc_RNA (1)...(19): siRNA sense strand
cagaagauccugauuauua

SEQ ID NO: 737444 - RNA, 19 nt, Homo sapiens
  misc_RNA (1)...(19): siRNA sense strand
guaaagaacuggccaaguc

SEQ ID NO: 737445 - RNA, 19 nt, Homo sapiens
  misc_RNA (1)...(19): siRNA sense strand
gggauuucauucaucauua

SEQ ID NO: 737446 - RNA, 19 nt, Homo sapiens
  misc_RNA (1)...(19): siRNA sense strand
gaguguagaugcuguagaa

SEQ ID NO: 737447 - RNA, 19 nt, Homo sapiens
  misc_RNA (1)...(19): siRNA sense strand
ugggaaagcuuuaggcaaa

SEQ ID NO: 737448 - RNA, 19 nt, Homo sapiens
  misc_RNA (1)...(19): siRNA sense strand
gcaggaugguggugacauu

SEQ ID NO: 737449 - RNA, 19 nt, Homo sapiens
  misc_RNA (1)...(19): siRNA sense strand
gaaauugaaacacucagaa

SEQ ID NO: 737450 - RNA, 19 nt, Homo sapiens
  misc_RNA (1)...(19): siRNA sense strand
uguagaugcuguagaaauu

SEQ ID NO: 737451 - RNA, 19 nt, Homo sapiens
  misc_RNA (1)...(19): siRNA sense strand
ggaaauggcagcugugaca

SEQ ID NO: 737452 - RNA, 19 nt, Homo sapiens
  misc_RNA (1)...(19): siRNA sense strand
gcaaaucggaugaguguag

SEQ ID NO: 737453 - RNA, 19 nt, Homo sapiens
  misc_RNA (1)...(19): siRNA sense strand
aaacugaacccacagaaga

SEQ ID NO: 737454 - RNA, 19 nt, Homo sapiens
  misc_RNA (1)...(19): siRNA sense strand
ugaggacuauuucugcuuu

SEQ ID NO: 737455 - RNA, 19 nt, Homo sapiens
  misc_RNA (1)...(19): siRNA sense strand
gcaaugaaggcacagaaau

SEQ ID NO: 737456 - RNA, 19 nt, Homo sapiens
  misc_RNA (1)...(19): siRNA sense strand
caaggaagccaccauucuu

SEQ ID NO: 737457 - RNA, 19 nt, Homo sapiens
  misc_RNA (1)...(19): siRNA sense strand
ggaaagcuuuaggcaaauc

SEQ ID NO: 737458 - RNA, 19 nt, Homo sapiens
  misc_RNA (1)...(19): siRNA sense strand
aaacaguugaggacuauuu

SEQ ID NO: 737459 - RNA, 19 nt, Homo sapiens
  misc_RNA (1)...(19): siRNA sense strand
caaaucggaugaguguaga

SEQ ID NO: 737460 - RNA, 19 nt, Homo sapiens
  misc_RNA (1)...(19): siRNA sense strand
uagaugcuguagaaauuga

SEQ ID NO: 737461 - RNA, 19 nt, Homo sapiens
  misc_RNA (1)...(19): siRNA sense strand
caaugaaggcacagaaaug

SEQ ID NO: 737462 - RNA, 19 nt, Homo sapiens
  misc_RNA (1)...(19): siRNA sense strand
gacaguaaaggaagaauca

SEQ ID NO: 737463 - RNA, 19 nt, Homo sapiens
  misc_RNA (1)...(19): siRNA sense strand
gcucucgaguccaugugua

SEQ ID NO: 737464 - RNA, 19 nt, Homo sapiens
  misc_RNA (1)...(19): siRNA sense strand
cgagaacuaugaucuugca

SEQ ID NO: 737465 - RNA, 19 nt, Homo sapiens
  misc_RNA (1)...(19): siRNA sense strand
gcagagaugcauaaaauga

SEQ ID NO: 737466 - RNA, 19 nt, Homo sapiens
  misc_RNA (1)...(19): siRNA sense strand
gaacuggccaaguccaaag

SEQ ID NO: 737467 - RNA, 19 nt, Homo sapiens
  misc_RNA (1)...(19): siRNA sense strand
aaaggaagaaucagaagau

SEQ ID NO: 737468 - RNA, 19 nt, Homo sapiens
  misc_RNA (1)...(19): siRNA sense strand
uaaaggaagaaucagaaga

SEQ ID NO: 737469 - RNA, 19 nt, Homo sapiens
  misc_RNA (1)...(19): siRNA sense strand
gucaauaccagaaaggauu

SEQ ID NO: 737470 - RNA, 19 nt, Homo sapiens
  misc_RNA (1)...(19): siRNA sense strand
gcauugcaguguaugaaac

SEQ ID NO: 737471 - RNA, 19 nt, Homo sapiens
  misc_RNA (1)...(19): siRNA sense strand
ggacgugcuuuugucaaua

SEQ ID NO: 737472 - RNA, 19 nt, Homo sapiens
  misc_RNA (1)...(19): siRNA sense strand
gggaaagcuuuaggcaaau

SEQ ID NO: 737473 - RNA, 19 nt, Homo sapiens
  misc_RNA (1)...(19): siRNA sense strand
ugaaggcacagaaauggaa

SEQ ID NO: 737474 - RNA, 19 nt, Homo sapiens
  misc_RNA (1)...(19): siRNA sense strand
ccagucggcugugguagug

SEQ ID NO: 737475 - RNA, 19 nt, Homo sapiens
  misc_RNA (1)...(19): siRNA sense strand
ucaauaccagaaaggauuu

SEQ ID NO: 737476 - RNA, 19 nt, Homo sapiens
  misc_RNA (1)...(19): siRNA sense strand
gaagauccugauuauuauc

SEQ ID NO: 737477 - RNA, 19 nt, Homo sapiens
  misc_RNA (1)...(19): siRNA sense strand
ggaagaaucagaagauccu

SEQ ID NO: 737478 - RNA, 19 nt, Homo sapiens
  misc_RNA (1)...(19): siRNA sense strand
guagaaauugaaacacuca

SEQ ID NO: 737479 - RNA, 19 nt, Homo sapiens
  misc_RNA (1)...(19): siRNA sense strand
uugcaacccugaaauggau

SEQ ID NO: 737480 - RNA, 19 nt, Homo sapiens
  misc_RNA (1)...(19): siRNA sense strand
gaucuugcaacccugaaau

SEQ ID NO: 737481 - RNA, 19 nt, Homo sapiens
  misc_RNA (1)...(19): siRNA sense strand
cccgagaacuaugaucuug

SEQ ID NO: 737482 - RNA, 19 nt, Homo sapiens
  misc_RNA (1)...(19): siRNA sense strand
ggcaaugaaggcacagaaa

SEQ ID NO: 737483 - RNA, 19 nt, Homo sapiens
  misc_RNA (1)...(19): siRNA sense strand
ugucagcucucgaguccau

SEQ ID NO: 737484 - RNA, 19 nt, Homo sapiens
  misc_RNA (1)...(19): siRNA sense strand
guagaugcuguagaaauug

SEQ ID NO: 737485 - RNA, 19 nt, Homo sapiens
  misc_RNA (1)...(19): siRNA sense strand
gaugaguguagaugcugua

SEQ ID NO: 737486 - RNA, 19 nt, Homo sapiens
  misc_RNA (1)...(19): siRNA sense strand
gggcaaugaaggcacagaa

SEQ ID NO: 737487 - RNA, 19 nt, Homo sapiens
  misc_RNA (1)...(19): siRNA sense strand
ucgaguccauguguaaaga

SEQ ID NO: 737488 - RNA, 19 nt, Homo sapiens
  misc_RNA (1)...(19): siRNA sense strand
guaaaggaagaaucagaag

SEQ ID NO: 737489 - RNA, 19 nt, Homo sapiens
  misc_RNA (1)...(19): siRNA sense strand
guccauguguaaagaacug

SEQ ID NO: 737490 - RNA, 19 nt, Homo sapiens
  misc_RNA (1)...(19): siRNA sense strand
gguggugacauuccucaug

SEQ ID NO: 737491 - RNA, 19 nt, Homo sapiens
  misc_RNA (1)...(19): siRNA sense strand
uguagguggucgugugaug

SEQ ID NO: 737492 - RNA, 19 nt, Homo sapiens
  misc_RNA (1)...(19): siRNA sense strand
guguagaugcuguagaaau

SEQ ID NO: 737493 - RNA, 19 nt, Homo sapiens
  misc_RNA (1)...(19): siRNA sense strand
aggcaaaucggaugagugu

SEQ ID NO: 737494 - RNA, 19 nt, Homo sapiens
  misc_RNA (1)...(19): siRNA sense strand
aguaaaggaagaaucagaa

SEQ ID NO: 737495 - RNA, 19 nt, Homo sapiens
  misc_RNA (1)...(19): siRNA sense strand
caguaaaggaagaaucaga

SEQ ID NO: 737496 - RNA, 19 nt, Homo sapiens
  misc_RNA (1)...(19): siRNA sense strand
gguggucgugugaugguaa

SEQ ID NO: 737497 - RNA, 19 nt, Homo sapiens
  misc_RNA (1)...(19): siRNA sense strand
gaugcuguagaaauugaaa

SEQ ID NO: 737498 - RNA, 19 nt, Homo sapiens
  misc_RNA (1)...(19): siRNA sense strand
ccaucaaagugaaaacuga

SEQ ID NO: 737499 - RNA, 19 nt, Homo sapiens
  misc_RNA (1)...(19): siRNA sense strand
gucgugugaugguaacaga

SEQ ID NO: 737500 - RNA, 19 nt, Homo sapiens
  misc_RNA (1)...(19): siRNA sense strand
cuacaacccaggcaaaucg

SEQ ID NO: 737501 - RNA, 19 nt, Homo sapiens
  misc_RNA (1)...(19): siRNA sense strand
uuaaacaccccgagaacua

SEQ ID NO: 737502 - RNA, 19 nt, Homo sapiens
  misc_RNA (1)...(19): siRNA sense strand
ccaggcaaaucggaugagu

SEQ ID NO: 737503 - RNA, 19 nt, Homo sapiens
  misc_RNA (1)...(19): siRNA sense strand
agaaauugaaacacucaga

SEQ ID NO: 737504 - RNA, 19 nt, Homo sapiens
  misc_RNA (1)...(19): siRNA sense strand
gaaaacugaacccacagaa

SEQ ID NO: 737505 - RNA, 19 nt, Homo sapiens
  misc_RNA (1)...(19): siRNA sense strand
gagccaaagaagcauguag

SEQ ID NO: 737506 - RNA, 19 nt, Homo sapiens
  misc_RNA (1)...(19): siRNA sense strand
cagaagauccugauuauua

SEQ ID NO: 737507 - RNA, 19 nt, Homo sapiens
  misc_RNA (1)...(19): siRNA sense strand
guaaagaacuggccaaguc

SEQ ID NO: 737508 - RNA, 19 nt, Homo sapiens
  misc_RNA (1)...(19): siRNA sense strand
gggauuucauucaucauua

SEQ ID NO: 737509 - RNA, 19 nt, Homo sapiens
  misc_RNA (1)...(19): siRNA sense strand
gaguguagaugcuguagaa

SEQ ID NO: 737510 - RNA, 19 nt, Homo sapiens
  misc_RNA (1)...(19): siRNA sense strand
ugggaaagcuuuaggcaaa

SEQ ID NO: 737511 - RNA, 19 nt, Homo sapiens
  misc_RNA (1)...(19): siRNA sense strand
gcaggaugguggugacauu

SEQ ID NO: 737512 - RNA, 19 nt, Homo sapiens
  misc_RNA (1)...(19): siRNA sense strand
gaaauugaaacacucagaa

SEQ ID NO: 737513 - RNA, 19 nt, Homo sapiens
  misc_RNA (1)...(19): siRNA sense strand
uguagaugcuguagaaauu

SEQ ID NO: 737514 - RNA, 19 nt, Homo sapiens
  misc_RNA (1)...(19): siRNA sense strand
ggaaauggcagcugugaca

SEQ ID NO: 737515 - RNA, 19 nt, Homo sapiens
  misc_RNA (1)...(19): siRNA sense strand
gcaaaucggaugaguguag

SEQ ID NO: 737516 - RNA, 19 nt, Homo sapiens
  misc_RNA (1)...(19): siRNA sense strand
aaacugaacccacagaaga

SEQ ID NO: 737517 - RNA, 19 nt, Homo sapiens
  misc_RNA (1)...(19): siRNA sense strand
ugaggacuauuucugcuuu

SEQ ID NO: 737518 - RNA, 19 nt, Homo sapiens
  misc_RNA (1)...(19): siRNA sense strand
gcaaugaaggcacagaaau

SEQ ID NO: 737519 - RNA, 19 nt, Homo sapiens
  misc_RNA (1)...(19): siRNA sense strand
caaggaagccaccauucuu

SEQ ID NO: 737520 - RNA, 19 nt, Homo sapiens
  misc_RNA (1)...(19): siRNA sense strand
ggaaagcuuuaggcaaauc

SEQ ID NO: 737521 - RNA, 19 nt, Homo sapiens
  misc_RNA (1)...(19): siRNA sense strand
aaacaguugaggacuauuu

SEQ ID NO: 737522 - RNA, 19 nt, Homo sapiens
  misc_RNA (1)...(19): siRNA sense strand
caaaucggaugaguguaga

SEQ ID NO: 737523 - RNA, 19 nt, Homo sapiens
  misc_RNA (1)...(19): siRNA sense strand
uagaugcuguagaaauuga

SEQ ID NO: 737524 - RNA, 19 nt, Homo sapiens
  misc_RNA (1)...(19): siRNA sense strand
caaugaaggcacagaaaug

SEQ ID NO: 737525 - RNA, 19 nt, Homo sapiens
  misc_RNA (1)...(19): siRNA sense strand
gacaguaaaggaagaauca

SEQ ID NO: 737526 - RNA, 19 nt, Homo sapiens
  misc_RNA (1)...(19): siRNA sense strand
gcucucgaguccaugugua

SEQ ID NO: 737527 - RNA, 19 nt, Homo sapiens
  misc_RNA (1)...(19): siRNA sense strand
cgagaacuaugaucuugca

SEQ ID NO: 737528 - RNA, 19 nt, Homo sapiens
  misc_RNA (1)...(19): siRNA sense strand
gcagagaugcauaaaauga

SEQ ID NO: 737529 - RNA, 19 nt, Homo sapiens
  misc_RNA (1)...(19): siRNA sense strand
gaacuggccaaguccaaag

SEQ ID NO: 737530 - RNA, 19 nt, Homo sapiens
  misc_RNA (1)...(19): siRNA sense strand
aaaggaagaaucagaagau

SEQ ID NO: 737531 - RNA, 19 nt, Homo sapiens
  misc_RNA (1)...(19): siRNA sense strand
uaaaggaagaaucagaaga

SEQ ID NO: 737532 - RNA, 19 nt, Homo sapiens
  misc_RNA (1)...(19): siRNA sense strand
gucaauaccagaaaggauu

SEQ ID NO: 737533 - RNA, 19 nt, Homo sapiens
  misc_RNA (1)...(19): siRNA sense strand
gcauugcaguguaugaaac

SEQ ID NO: 737534 - RNA, 19 nt, Homo sapiens
  misc_RNA (1)...(19): siRNA sense strand
ggacgugcuuuugucaaua

SEQ ID NO: 737535 - RNA, 19 nt, Homo sapiens
  misc_RNA (1)...(19): siRNA sense strand
gggaaagcuuuaggcaaau

SEQ ID NO: 737536 - RNA, 19 nt, Homo sapiens
  misc_RNA (1)...(19): siRNA sense strand
ugaaggcacagaaauggaa

SEQ ID NO: 737537 - RNA, 19 nt, Homo sapiens
  misc_RNA (1)...(19): siRNA sense strand
ccagucggcugugguagug

SEQ ID NO: 737538 - RNA, 19 nt, Homo sapiens
  misc_RNA (1)...(19): siRNA sense strand
ucaauaccagaaaggauuu

SEQ ID NO: 737539 - RNA, 19 nt, Homo sapiens
  misc_RNA (1)...(19): siRNA sense strand
gaagauccugauuauuauc

SEQ ID NO: 737540 - RNA, 19 nt, Homo sapiens
  misc_RNA (1)...(19): siRNA sense strand
ggaagaaucagaagauccu

SEQ ID NO: 737541 - RNA, 19 nt, Homo sapiens
  misc_RNA (1)...(19): siRNA sense strand
guagaaauugaaacacuca

SEQ ID NO: 737542 - RNA, 19 nt, Homo sapiens
  misc_RNA (1)...(19): siRNA sense strand
uugcaacccugaaauggau

SEQ ID NO: 737543 - RNA, 19 nt, Homo sapiens
  misc_RNA (1)...(19): siRNA sense strand
gaucuugcaacccugaaau

SEQ ID NO: 737544 - RNA, 19 nt, Homo sapiens
  misc_RNA (1)...(19): siRNA sense strand
cccgagaacuaugaucuug

SEQ ID NO: 737545 - RNA, 19 nt, Homo sapiens
  misc_RNA (1)...(19): siRNA sense strand
ggcaaugaaggcacagaaa

SEQ ID NO: 737546 - RNA, 19 nt, Homo sapiens
  misc_RNA (1)...(19): siRNA sense strand
ugucagcucucgaguccau

SEQ ID NO: 737547 - RNA, 19 nt, Homo sapiens
  misc_RNA (1)...(19): siRNA sense strand
guagaugcuguagaaauug

SEQ ID NO: 737548 - RNA, 19 nt, Homo sapiens
  misc_RNA (1)...(19): siRNA sense strand
gaugaguguagaugcugua

SEQ ID NO: 737549 - RNA, 19 nt, Homo sapiens
  misc_RNA (1)...(19): siRNA sense strand
gggcaaugaaggcacagaa

SEQ ID NO: 737550 - RNA, 19 nt, Homo sapiens
  misc_RNA (1)...(19): siRNA sense strand
ucgaguccauguguaaaga

SEQ ID NO: 737551 - RNA, 19 nt, Homo sapiens
  misc_RNA (1)...(19): siRNA sense strand
guaaaggaagaaucagaag

SEQ ID NO: 737552 - RNA, 19 nt, Homo sapiens
  misc_RNA (1)...(19): siRNA sense strand
guccauguguaaagaacug

SEQ ID NO: 737553 - RNA, 19 nt, Homo sapiens
  misc_RNA (1)...(19): siRNA sense strand
gguggugacauuccucaug

SEQ ID NO: 737554 - RNA, 19 nt, Homo sapiens
  misc_RNA (1)...(19): siRNA sense strand
uguagguggucgugugaug

SEQ ID NO: 737555 - RNA, 19 nt, Homo sapiens
  misc_RNA (1)...(19): siRNA sense strand
guguagaugcuguagaaau

SEQ ID NO: 737556 - RNA, 19 nt, Homo sapiens
  misc_RNA (1)...(19): siRNA sense strand
aggcaaaucggaugagugu

SEQ ID NO: 737557 - RNA, 19 nt, Homo sapiens
  misc_RNA (1)...(19): siRNA sense strand
aguaaaggaagaaucagaa

SEQ ID NO: 737558 - RNA, 19 nt, Homo sapiens
  misc_RNA (1)...(19): siRNA sense strand
caguaaaggaagaaucaga

SEQ ID NO: 737559 - RNA, 19 nt, Homo sapiens
  misc_RNA (1)...(19): siRNA sense strand
gguggucgugugaugguaa

SEQ ID NO: 737560 - RNA, 19 nt, Homo sapiens
  misc_RNA (1)...(19): siRNA sense strand
gaugcuguagaaauugaaa

SEQ ID NO: 737561 - RNA, 19 nt, Homo sapiens
  misc_RNA (1)...(19): siRNA sense strand
ccaucaaagugaaaacuga

SEQ ID NO: 737562 - RNA, 19 nt, Homo sapiens
  misc_RNA (1)...(19): siRNA sense strand
gucgugugaugguaacaga

SEQ ID NO: 737563 - RNA, 19 nt, Homo sapiens
  misc_RNA (1)...(19): siRNA sense strand
cuacaacccaggcaaaucg

SEQ ID NO: 737564 - RNA, 19 nt, Homo sapiens
  misc_RNA (1)...(19): siRNA sense strand
uuaaacaccccgagaacua

SEQ ID NO: 737565 - RNA, 19 nt, Homo sapiens
  misc_RNA (1)...(19): siRNA sense strand
ccaggcaaaucggaugagu

SEQ ID NO: 737566 - RNA, 19 nt, Homo sapiens
  misc_RNA (1)...(19): siRNA sense strand
agaaauugaaacacucaga

SEQ ID NO: 737567 - RNA, 19 nt, Homo sapiens
  misc_RNA (1)...(19): siRNA sense strand
gaaaacugaacccacagaa

SEQ ID NO: 737568 - RNA, 19 nt, Homo sapiens
  misc_RNA (1)...(19): siRNA sense strand
gagccaaagaagcauguag

SEQ ID NO: 737569 - RNA, 19 nt, Homo sapiens
  misc_RNA (1)...(19): siRNA sense strand
cagaagauccugauuauua

SEQ ID NO: 737570 - RNA, 19 nt, Homo sapiens
  misc_RNA (1)...(19): siRNA sense strand
guaaagaacuggccaaguc

SEQ ID NO: 737571 - RNA, 19 nt, Homo sapiens
  misc_RNA (1)...(19): siRNA sense strand
gggauuucauucaucauua

SEQ ID NO: 737572 - RNA, 19 nt, Homo sapiens
  misc_RNA (1)...(19): siRNA sense strand
gaguguagaugcuguagaa

SEQ ID NO: 737573 - RNA, 19 nt, Homo sapiens
  misc_RNA (1)...(19): siRNA sense strand
ugggaaagcuuuaggcaaa

SEQ ID NO: 737574 - RNA, 19 nt, Homo sapiens
  misc_RNA (1)...(19): siRNA sense strand
gcaggaugguggugacauu

SEQ ID NO: 737575 - RNA, 19 nt, Homo sapiens
  misc_RNA (1)...(19): siRNA sense strand
gaaauugaaacacucagaa

SEQ ID NO: 737576 - RNA, 19 nt, Homo sapiens
  misc_RNA (1)...(19): siRNA sense strand
uguagaugcuguagaaauu

SEQ ID NO: 737577 - RNA, 19 nt, Homo sapiens
  misc_RNA (1)...(19): siRNA sense strand
ggaaauggcagcugugaca

SEQ ID NO: 737578 - RNA, 19 nt, Homo sapiens
  misc_RNA (1)...(19): siRNA sense strand
gcaaaucggaugaguguag

SEQ ID NO: 737579 - RNA, 19 nt, Homo sapiens
  misc_RNA (1)...(19): siRNA sense strand
aaacugaacccacagaaga

SEQ ID NO: 737580 - RNA, 19 nt, Homo sapiens
  misc_RNA (1)...(19): siRNA sense strand
ugaggacuauuucugcuuu

SEQ ID NO: 737581 - RNA, 19 nt, Homo sapiens
  misc_RNA (1)...(19): siRNA sense strand
gcaaugaaggcacagaaau

SEQ ID NO: 737582 - RNA, 19 nt, Homo sapiens
  misc_RNA (1)...(19): siRNA sense strand
caaggaagccaccauucuu

SEQ ID NO: 737583 - RNA, 19 nt, Homo sapiens
  misc_RNA (1)...(19): siRNA sense strand
ggaaagcuuuaggcaaauc

SEQ ID NO: 737584 - RNA, 19 nt, Homo sapiens
  misc_RNA (1)...(19): siRNA sense strand
aaacaguugaggacuauuu

SEQ ID NO: 737585 - RNA, 19 nt, Homo sapiens
  misc_RNA (1)...(19): siRNA sense strand
caaaucggaugaguguaga

SEQ ID NO: 737586 - RNA, 19 nt, Homo sapiens
  misc_RNA (1)...(19): siRNA sense strand
uagaugcuguagaaauuga

SEQ ID NO: 737587 - RNA, 19 nt, Homo sapiens
  misc_RNA (1)...(19): siRNA sense strand
caaugaaggcacagaaaug

SEQ ID NO: 737588 - RNA, 19 nt, Homo sapiens
  misc_RNA (1)...(19): siRNA sense strand
gacaguaaaggaagaauca

SEQ ID NO: 737589 - RNA, 19 nt, Homo sapiens
  misc_RNA (1)...(19): siRNA sense strand
gcucucgaguccaugugua

SEQ ID NO: 737590 - RNA, 19 nt, Homo sapiens
  misc_RNA (1)...(19): siRNA sense strand
cgagaacuaugaucuugca

SEQ ID NO: 737591 - RNA, 19 nt, Homo sapiens
  misc_RNA (1)...(19): siRNA sense strand
gcagagaugcauaaaauga

SEQ ID NO: 737592 - RNA, 19 nt, Homo sapiens
  misc_RNA (1)...(19): siRNA sense strand
gaacuggccaaguccaaag

SEQ ID NO: 737593 - RNA, 19 nt, Homo sapiens
  misc_RNA (1)...(19): siRNA sense strand
aaaggaagaaucagaagau

SEQ ID NO: 737594 - RNA, 19 nt, Homo sapiens
  misc_RNA (1)...(19): siRNA sense strand
uaaaggaagaaucagaaga

SEQ ID NO: 737595 - RNA, 19 nt, Homo sapiens
  misc_RNA (1)...(19): siRNA sense strand
gucaauaccagaaaggauu

SEQ ID NO: 737596 - RNA, 19 nt, Homo sapiens
  misc_RNA (1)...(19): siRNA sense strand
gcauugcaguguaugaaac

SEQ ID NO: 737597 - RNA, 19 nt, Homo sapiens
  misc_RNA (1)...(19): siRNA sense strand
ggacgugcuuuugucaaua

SEQ ID NO: 737598 - RNA, 19 nt, Homo sapiens
  misc_RNA (1)...(19): siRNA sense strand
gggaaagcuuuaggcaaau

SEQ ID NO: 737599 - RNA, 19 nt, Homo sapiens
  misc_RNA (1)...(19): siRNA sense strand
ugaaggcacagaaauggaa

SEQ ID NO: 737600 - RNA, 19 nt, Homo sapiens
  misc_RNA (1)...(19): siRNA sense strand
ccagucggcugugguagug

SEQ ID NO: 737601 - RNA, 19 nt, Homo sapiens
  misc_RNA (1)...(19): siRNA sense strand
ucaauaccagaaaggauuu

SEQ ID NO: 737602 - RNA, 19 nt, Homo sapiens
  misc_RNA (1)...(19): siRNA sense strand
gaagauccugauuauuauc

SEQ ID NO: 737603 - RNA, 19 nt, Homo sapiens
  misc_RNA (1)...(19): siRNA sense strand
ggaagaaucagaagauccu

SEQ ID NO: 737604 - RNA, 19 nt, Homo sapiens
  misc_RNA (1)...(19): siRNA sense strand
guagaaauugaaacacuca

SEQ ID NO: 737605 - RNA, 19 nt, Homo sapiens
  misc_RNA (1)...(19): siRNA sense strand
uugcaacccugaaauggau

SEQ ID NO: 737606 - RNA, 19 nt, Homo sapiens
  misc_RNA (1)...(19): siRNA sense strand
gaucuugcaacccugaaau

SEQ ID NO: 737607 - RNA, 19 nt, Homo sapiens
  misc_RNA (1)...(19): siRNA sense strand
cccgagaacuaugaucuug

SEQ ID NO: 737608 - RNA, 19 nt, Homo sapiens
  misc_RNA (1)...(19): siRNA sense strand
ggcaaugaaggcacagaaa

SEQ ID NO: 737609 - RNA, 19 nt, Homo sapiens
  misc_RNA (1)...(19): siRNA sense strand
ugucagcucucgaguccau

SEQ ID NO: 737610 - RNA, 19 nt, Homo sapiens
  misc_RNA (1)...(19): siRNA sense strand
guagaugcuguagaaauug

SEQ ID NO: 737611 - RNA, 19 nt, Homo sapiens
  misc_RNA (1)...(19): siRNA sense strand
gaugaguguagaugcugua

SEQ ID NO: 737612 - RNA, 19 nt, Homo sapiens
  misc_RNA (1)...(19): siRNA sense strand
gggcaaugaaggcacagaa

SEQ ID NO: 737613 - RNA, 19 nt, Homo sapiens
  misc_RNA (1)...(19): siRNA sense strand
ucgaguccauguguaaaga

SEQ ID NO: 737614 - RNA, 19 nt, Homo sapiens
  misc_RNA (1)...(19): siRNA sense strand
guaaaggaagaaucagaag

SEQ ID NO: 737615 - RNA, 19 nt, Homo sapiens
  misc_RNA (1)...(19): siRNA sense strand
guccauguguaaagaacug

SEQ ID NO: 737616 - RNA, 19 nt, Homo sapiens
  misc_RNA (1)...(19): siRNA sense strand
gguggugacauuccucaug

SEQ ID NO: 737617 - RNA, 19 nt, Homo sapiens
  misc_RNA (1)...(19): siRNA sense strand
uguagguggucgugugaug

SEQ ID NO: 737618 - RNA, 19 nt, Homo sapiens
  misc_RNA (1)...(19): siRNA sense strand
guguagaugcuguagaaau

SEQ ID NO: 737619 - RNA, 19 nt, Homo sapiens
  misc_RNA (1)...(19): siRNA sense strand
aggcaaaucggaugagugu

SEQ ID NO: 737620 - RNA, 19 nt, Homo sapiens
  misc_RNA (1)...(19): siRNA sense strand
aguaaaggaagaaucagaa

SEQ ID NO: 737621 - RNA, 19 nt, Homo sapiens
  misc_RNA (1)...(19): siRNA sense strand
caguaaaggaagaaucaga

SEQ ID NO: 737622 - RNA, 19 nt, Homo sapiens
  misc_RNA (1)...(19): siRNA sense strand
gguggucgugugaugguaa

SEQ ID NO: 737623 - RNA, 19 nt, Homo sapiens
  misc_RNA (1)...(19): siRNA sense strand
gaugcuguagaaauugaaa

SEQ ID NO: 737624 - RNA, 19 nt, Homo sapiens
  misc_RNA (1)...(19): siRNA sense strand
ccaucaaagugaaaacuga

SEQ ID NO: 737625 - RNA, 19 nt, Homo sapiens
  misc_RNA (1)...(19): siRNA sense strand
gucgugugaugguaacaga

SEQ ID NO: 737626 - RNA, 19 nt, Homo sapiens
  misc_RNA (1)...(19): siRNA sense strand
cuacaacccaggcaaaucg

SEQ ID NO: 737627 - RNA, 19 nt, Homo sapiens
  misc_RNA (1)...(19): siRNA sense strand
uuaaacaccccgagaacua

SEQ ID NO: 737628 - RNA, 19 nt, Homo sapiens
  misc_RNA (1)...(19): siRNA sense strand
ccaggcaaaucggaugagu

SEQ ID NO: 737629 - RNA, 19 nt, Homo sapiens
  misc_RNA (1)...(19): siRNA sense strand
agaaauugaaacacucaga

SEQ ID NO: 737630 - RNA, 19 nt, Homo sapiens
  misc_RNA (1)...(19): siRNA sense strand
gaaaacugaacccacagaa

SEQ ID NO: 737631 - RNA, 19 nt, Homo sapiens
  misc_RNA (1)...(19): siRNA sense strand
gagccaaagaagcauguag

SEQ ID NO: 737632 - RNA, 19 nt, Homo sapiens
  misc_RNA (1)...(19): siRNA sense strand
cagaagauccugauuauua

SEQ ID NO: 737633 - RNA, 19 nt, Homo sapiens
  misc_RNA (1)...(19): siRNA sense strand
guaaagaacuggccaaguc

SEQ ID NO: 737634 - RNA, 19 nt, Homo sapiens
  misc_RNA (1)...(19): siRNA sense strand
gggauuucauucaucauua

SEQ ID NO: 737635 - RNA, 19 nt, Homo sapiens
  misc_RNA (1)...(19): siRNA sense strand
gaguguagaugcuguagaa

SEQ ID NO: 737636 - RNA, 19 nt, Homo sapiens
  misc_RNA (1)...(19): siRNA sense strand
ugggaaagcuuuaggcaaa

SEQ ID NO: 737637 - RNA, 19 nt, Homo sapiens
  misc_RNA (1)...(19): siRNA sense strand
gcaggaugguggugacauu

SEQ ID NO: 737638 - RNA, 19 nt, Homo sapiens
  misc_RNA (1)...(19): siRNA sense strand
gaaauugaaacacucagaa

SEQ ID NO: 737639 - RNA, 19 nt, Homo sapiens
  misc_RNA (1)...(19): siRNA sense strand
uguagaugcuguagaaauu

SEQ ID NO: 737640 - RNA, 19 nt, Homo sapiens
  misc_RNA (1)...(19): siRNA sense strand
ggaaauggcagcugugaca

SEQ ID NO: 737641 - RNA, 19 nt, Homo sapiens
  misc_RNA (1)...(19): siRNA sense strand
gcaaaucggaugaguguag

SEQ ID NO: 737642 - RNA, 19 nt, Homo sapiens
  misc_RNA (1)...(19): siRNA sense strand
aaacugaacccacagaaga

SEQ ID NO: 737643 - RNA, 19 nt, Homo sapiens
  misc_RNA (1)...(19): siRNA sense strand
ugaggacuauuucugcuuu

SEQ ID NO: 737644 - RNA, 19 nt, Homo sapiens
  misc_RNA (1)...(19): siRNA sense strand
gcaaugaaggcacagaaau

SEQ ID NO: 737645 - RNA, 19 nt, Homo sapiens
  misc_RNA (1)...(19): siRNA sense strand
caaggaagccaccauucuu

SEQ ID NO: 737646 - RNA, 19 nt, Homo sapiens
  misc_RNA (1)...(19): siRNA sense strand
ggaaagcuuuaggcaaauc

SEQ ID NO: 737647 - RNA, 19 nt, Homo sapiens
  misc_RNA (1)...(19): siRNA sense strand
aaacaguugaggacuauuu

SEQ ID NO: 737648 - RNA, 19 nt, Homo sapiens
  misc_RNA (1)...(19): siRNA sense strand
caaaucggaugaguguaga

SEQ ID NO: 737649 - RNA, 19 nt, Homo sapiens
  misc_RNA (1)...(19): siRNA sense strand
uagaugcuguagaaauuga

SEQ ID NO: 737650 - RNA, 19 nt, Homo sapiens
  misc_RNA (1)...(19): siRNA sense strand
caaugaaggcacagaaaug

SEQ ID NO: 737651 - RNA, 19 nt, Homo sapiens
  misc_RNA (1)...(19): siRNA sense strand
gacaguaaaggaagaauca

SEQ ID NO: 737652 - RNA, 19 nt, Homo sapiens
  misc_RNA (1)...(19): siRNA sense strand
gcucucgaguccaugugua

SEQ ID NO: 737653 - RNA, 19 nt, Homo sapiens
  misc_RNA (1)...(19): siRNA sense strand
cgagaacuaugaucuugca

SEQ ID NO: 737654 - RNA, 19 nt, Homo sapiens
  misc_RNA (1)...(19): siRNA sense strand
gcagagaugcauaaaauga

SEQ ID NO: 737655 - RNA, 19 nt, Homo sapiens
  misc_RNA (1)...(19): siRNA sense strand
gaacuggccaaguccaaag

SEQ ID NO: 737656 - RNA, 19 nt, Homo sapiens
  misc_RNA (1)...(19): siRNA sense strand
aaaggaagaaucagaagau

SEQ ID NO: 737657 - RNA, 19 nt, Homo sapiens
  misc_RNA (1)...(19): siRNA sense strand
uaaaggaagaaucagaaga

SEQ ID NO: 737658 - RNA, 19 nt, Homo sapiens
  misc_RNA (1)...(19): siRNA sense strand
gucaauaccagaaaggauu

SEQ ID NO: 737659 - RNA, 19 nt, Homo sapiens
  misc_RNA (1)...(19): siRNA sense strand
gcauugcaguguaugaaac

SEQ ID NO: 737660 - RNA, 19 nt, Homo sapiens
  misc_RNA (1)...(19): siRNA sense strand
ggacgugcuuuugucaaua

SEQ ID NO: 737661 - RNA, 19 nt, Homo sapiens
  misc_RNA (1)...(19): siRNA sense strand
gggaaagcuuuaggcaaau

SEQ ID NO: 737662 - RNA, 19 nt, Homo sapiens
  misc_RNA (1)...(19): siRNA sense strand
ugaaggcacagaaauggaa

SEQ ID NO: 737663 - RNA, 19 nt, Homo sapiens
  misc_RNA (1)...(19): siRNA sense strand
ccagucggcugugguagug

SEQ ID NO: 737664 - RNA, 19 nt, Homo sapiens
  misc_RNA (1)...(19): siRNA sense strand
ucaauaccagaaaggauuu

SEQ ID NO: 737665 - RNA, 19 nt, Homo sapiens
  misc_RNA (1)...(19): siRNA sense strand
gaagauccugauuauuauc

SEQ ID NO: 737666 - RNA, 19 nt, Homo sapiens
  misc_RNA (1)...(19): siRNA sense strand
ggaagaaucagaagauccu

SEQ ID NO: 737667 - RNA, 19 nt, Homo sapiens
  misc_RNA (1)...(19): siRNA sense strand
guagaaauugaaacacuca

SEQ ID NO: 737668 - RNA, 19 nt, Homo sapiens
  misc_RNA (1)...(19): siRNA sense strand
uugcaacccugaaauggau

SEQ ID NO: 737669 - RNA, 19 nt, Homo sapiens
  misc_RNA (1)...(19): siRNA sense strand
gaucuugcaacccugaaau

SEQ ID NO: 737670 - RNA, 19 nt, Homo sapiens
  misc_RNA (1)...(19): siRNA sense strand
cccgagaacuaugaucuug

SEQ ID NO: 737671 - RNA, 19 nt, Homo sapiens
  misc_RNA (1)...(19): siRNA sense strand
ggcaaugaaggcacagaaa

SEQ ID NO: 737672 - RNA, 19 nt, Homo sapiens
  misc_RNA (1)...(19): siRNA sense strand
ugucagcucucgaguccau

SEQ ID NO: 737673 - RNA, 19 nt, Homo sapiens
  misc_RNA (1)...(19): siRNA sense strand
guagaugcuguagaaauug

SEQ ID NO: 737674 - RNA, 19 nt, Homo sapiens
  misc_RNA (1)...(19): siRNA sense strand
gaugaguguagaugcugua

SEQ ID NO: 737675 - RNA, 19 nt, Homo sapiens
  misc_RNA (1)...(19): siRNA sense strand
gggcaaugaaggcacagaa

SEQ ID NO: 737676 - RNA, 19 nt, Homo sapiens
  misc_RNA (1)...(19): siRNA sense strand
ucgaguccauguguaaaga

SEQ ID NO: 737677 - RNA, 19 nt, Homo sapiens
  misc_RNA (1)...(19): siRNA sense strand
guaaaggaagaaucagaag

SEQ ID NO: 737678 - RNA, 19 nt, Homo sapiens
  misc_RNA (1)...(19): siRNA sense strand
guccauguguaaagaacug

SEQ ID NO: 737679 - RNA, 19 nt, Homo sapiens
  misc_RNA (1)...(19): siRNA sense strand
gguggugacauuccucaug

SEQ ID NO: 737680 - RNA, 19 nt, Homo sapiens
  misc_RNA (1)...(19): siRNA sense strand
uguagguggucgugugaug

SEQ ID NO: 737681 - RNA, 19 nt, Homo sapiens
  misc_RNA (1)...(19): siRNA sense strand
guguagaugcuguagaaau

SEQ ID NO: 737682 - RNA, 19 nt, Homo sapiens
  misc_RNA (1)...(19): siRNA sense strand
aggcaaaucggaugagugu

SEQ ID NO: 737683 - RNA, 19 nt, Homo sapiens
  misc_RNA (1)...(19): siRNA sense strand
aguaaaggaagaaucagaa

SEQ ID NO: 737684 - RNA, 19 nt, Homo sapiens
  misc_RNA (1)...(19): siRNA sense strand
caguaaaggaagaaucaga

SEQ ID NO: 737685 - RNA, 19 nt, Homo sapiens
  misc_RNA (1)...(19): siRNA sense strand
gguggucgugugaugguaa

SEQ ID NO: 737686 - RNA, 19 nt, Homo sapiens
  misc_RNA (1)...(19): siRNA sense strand
gaugcuguagaaauugaaa

SEQ ID NO: 737687 - RNA, 19 nt, Homo sapiens
  misc_RNA (1)...(19): siRNA sense strand
ccaucaaagugaaaacuga

SEQ ID NO: 737688 - RNA, 19 nt, Homo sapiens
  misc_RNA (1)...(19): siRNA sense strand
gucgugugaugguaacaga

SEQ ID NO: 737689 - RNA, 19 nt, Homo sapiens
  misc_RNA (1)...(19): siRNA sense strand
cuacaacccaggcaaaucg

SEQ ID NO: 737690 - RNA, 19 nt, Homo sapiens
  misc_RNA (1)...(19): siRNA sense strand
uuaaacaccccgagaacua

SEQ ID NO: 737691 - RNA, 19 nt, Homo sapiens
  misc_RNA (1)...(19): siRNA sense strand
ccaggcaaaucggaugagu

SEQ ID NO: 737692 - RNA, 19 nt, Homo sapiens
  misc_RNA (1)...(19): siRNA sense strand
agaaauugaaacacucaga

SEQ ID NO: 737693 - RNA, 19 nt, Homo sapiens
  misc_RNA (1)...(19): siRNA sense strand
gaaaacugaacccacagaa

SEQ ID NO: 737694 - RNA, 19 nt, Homo sapiens
  misc_RNA (1)...(19): siRNA sense strand
gagccaaagaagcauguag

SEQ ID NO: 737695 - RNA, 19 nt, Homo sapiens
  misc_RNA (1)...(19): siRNA sense strand
cagaagauccugauuauua

SEQ ID NO: 737696 - RNA, 19 nt, Homo sapiens
  misc_RNA (1)...(19): siRNA sense strand
guaaagaacuggccaaguc

SEQ ID NO: 737697 - RNA, 19 nt, Homo sapiens
  misc_RNA (1)...(19): siRNA sense strand
gggauuucauucaucauua

SEQ ID NO: 737698 - RNA, 19 nt, Homo sapiens
  misc_RNA (1)...(19): siRNA sense strand
gaguguagaugcuguagaa

SEQ ID NO: 737699 - RNA, 19 nt, Homo sapiens
  misc_RNA (1)...(19): siRNA sense strand
ugggaaagcuuuaggcaaa

SEQ ID NO: 737700 - RNA, 19 nt, Homo sapiens
  misc_RNA (1)...(19): siRNA sense strand
gcaggaugguggugacauu

SEQ ID NO: 737701 - RNA, 19 nt, Homo sapiens
  misc_RNA (1)...(19): siRNA sense strand
gaaauugaaacacucagaa

SEQ ID NO: 737702 - RNA, 19 nt, Homo sapiens
  misc_RNA (1)...(19): siRNA sense strand
uguagaugcuguagaaauu

SEQ ID NO: 737703 - RNA, 19 nt, Homo sapiens
  misc_RNA (1)...(19): siRNA sense strand
ggaaauggcagcugugaca

SEQ ID NO: 737704 - RNA, 19 nt, Homo sapiens
  misc_RNA (1)...(19): siRNA sense strand
gcaaaucggaugaguguag

SEQ ID NO: 737705 - RNA, 19 nt, Homo sapiens
  misc_RNA (1)...(19): siRNA sense strand
aaacugaacccacagaaga

SEQ ID NO: 737706 - RNA, 19 nt, Homo sapiens
  misc_RNA (1)...(19): siRNA sense strand
ugaggacuauuucugcuuu

SEQ ID NO: 737707 - RNA, 19 nt, Homo sapiens
  misc_RNA (1)...(19): siRNA sense strand
gcaaugaaggcacagaaau

SEQ ID NO: 737708 - RNA, 19 nt, Homo sapiens
  misc_RNA (1)...(19): siRNA sense strand
caaggaagccaccauucuu

SEQ ID NO: 737709 - RNA, 19 nt, Homo sapiens
  misc_RNA (1)...(19): siRNA sense strand
ggaaagcuuuaggcaaauc

SEQ ID NO: 737710 - RNA, 19 nt, Homo sapiens
  misc_RNA (1)...(19): siRNA sense strand
aaacaguugaggacuauuu

SEQ ID NO: 737711 - RNA, 19 nt, Homo sapiens
  misc_RNA (1)...(19): siRNA sense strand
caaaucggaugaguguaga

SEQ ID NO: 737712 - RNA, 19 nt, Homo sapiens
  misc_RNA (1)...(19): siRNA sense strand
uagaugcuguagaaauuga

SEQ ID NO: 737713 - RNA, 19 nt, Homo sapiens
  misc_RNA (1)...(19): siRNA sense strand
caaugaaggcacagaaaug

SEQ ID NO: 737714 - RNA, 19 nt, Homo sapiens
  misc_RNA (1)...(19): siRNA sense strand
gacaguaaaggaagaauca

SEQ ID NO: 737715 - RNA, 19 nt, Homo sapiens
  misc_RNA (1)...(19): siRNA sense strand
gcucucgaguccaugugua

SEQ ID NO: 737716 - RNA, 19 nt, Homo sapiens
  misc_RNA (1)...(19): siRNA sense strand
cgagaacuaugaucuugca

SEQ ID NO: 737717 - RNA, 19 nt, Homo sapiens
  misc_RNA (1)...(19): siRNA sense strand
gcagagaugcauaaaauga

SEQ ID NO: 737718 - RNA, 19 nt, Homo sapiens
  misc_RNA (1)...(19): siRNA sense strand
gaacuggccaaguccaaag

SEQ ID NO: 737719 - RNA, 19 nt, Homo sapiens
  misc_RNA (1)...(19): siRNA sense strand
aaaggaagaaucagaagau

SEQ ID NO: 737720 - RNA, 19 nt, Homo sapiens
  misc_RNA (1)...(19): siRNA sense strand
uaaaggaagaaucagaaga

SEQ ID NO: 737721 - RNA, 19 nt, Homo sapiens
  misc_RNA (1)...(19): siRNA sense strand
gucaauaccagaaaggauu

SEQ ID NO: 737722 - RNA, 19 nt, Homo sapiens
  misc_RNA (1)...(19): siRNA sense strand
gcauugcaguguaugaaac

SEQ ID NO: 737723 - RNA, 19 nt, Homo sapiens
  misc_RNA (1)...(19): siRNA sense strand
ggacgugcuuuugucaaua

SEQ ID NO: 737724 - RNA, 19 nt, Homo sapiens
  misc_RNA (1)...(19): siRNA sense strand
gggaaagcuuuaggcaaau

SEQ ID NO: 737725 - RNA, 19 nt, Homo sapiens
  misc_RNA (1)...(19): siRNA sense strand
ugaaggcacagaaauggaa

SEQ ID NO: 737726 - RNA, 19 nt, Homo sapiens
  misc_RNA (1)...(19): siRNA sense strand
ccagucggcugugguagug

SEQ ID NO: 737727 - RNA, 19 nt, Homo sapiens
  misc_RNA (1)...(19): siRNA sense strand
ucaauaccagaaaggauuu

SEQ ID NO: 737728 - RNA, 19 nt, Homo sapiens
  misc_RNA (1)...(19): siRNA sense strand
gaagauccugauuauuauc

SEQ ID NO: 737729 - RNA, 19 nt, Homo sapiens
  misc_RNA (1)...(19): siRNA sense strand
ggaagaaucagaagauccu

SEQ ID NO: 737730 - RNA, 19 nt, Homo sapiens
  misc_RNA (1)...(19): siRNA sense strand
guagaaauugaaacacuca

SEQ ID NO: 737731 - RNA, 19 nt, Homo sapiens
  misc_RNA (1)...(19): siRNA sense strand
uugcaacccugaaauggau

SEQ ID NO: 737732 - RNA, 19 nt, Homo sapiens
  misc_RNA (1)...(19): siRNA sense strand
gaucuugcaacccugaaau

SEQ ID NO: 737733 - RNA, 19 nt, Homo sapiens
  misc_RNA (1)...(19): siRNA sense strand
cccgagaacuaugaucuug

SEQ ID NO: 737734 - RNA, 19 nt, Homo sapiens
  misc_RNA (1)...(19): siRNA sense strand
ggcaaugaaggcacagaaa

SEQ ID NO: 737735 - RNA, 19 nt, Homo sapiens
  misc_RNA (1)...(19): siRNA sense strand
ugucagcucucgaguccau

SEQ ID NO: 737736 - RNA, 19 nt, Homo sapiens
  misc_RNA (1)...(19): siRNA sense strand
guagaugcuguagaaauug

SEQ ID NO: 737737 - RNA, 19 nt, Homo sapiens
  misc_RNA (1)...(19): siRNA sense strand
gaugaguguagaugcugua

SEQ ID NO: 737738 - RNA, 19 nt, Homo sapiens
  misc_RNA (1)...(19): siRNA sense strand
gggcaaugaaggcacagaa

SEQ ID NO: 737739 - RNA, 19 nt, Homo sapiens
  misc_RNA (1)...(19): siRNA sense strand
ucgaguccauguguaaaga

SEQ ID NO: 737740 - RNA, 19 nt, Homo sapiens
  misc_RNA (1)...(19): siRNA sense strand
guaaaggaagaaucagaag

SEQ ID NO: 737741 - RNA, 19 nt, Homo sapiens
  misc_RNA (1)...(19): siRNA sense strand
guccauguguaaagaacug

SEQ ID NO: 737742 - RNA, 19 nt, Homo sapiens
  misc_RNA (1)...(19): siRNA sense strand
gguggugacauuccucaug

SEQ ID NO: 737743 - RNA, 19 nt, Homo sapiens
  misc_RNA (1)...(19): siRNA sense strand
uguagguggucgugugaug

SEQ ID NO: 737744 - RNA, 19 nt, Homo sapiens
  misc_RNA (1)...(19): siRNA sense strand
guguagaugcuguagaaau

SEQ ID NO: 737745 - RNA, 19 nt, Homo sapiens
  misc_RNA (1)...(19): siRNA sense strand
aggcaaaucggaugagugu

SEQ ID NO: 737746 - RNA, 19 nt, Homo sapiens
  misc_RNA (1)...(19): siRNA sense strand
aguaaaggaagaaucagaa

SEQ ID NO: 737747 - RNA, 19 nt, Homo sapiens
  misc_RNA (1)...(19): siRNA sense strand
caguaaaggaagaaucaga

SEQ ID NO: 737748 - RNA, 19 nt, Homo sapiens
  misc_RNA (1)...(19): siRNA sense strand
gguggucgugugaugguaa

SEQ ID NO: 737749 - RNA, 19 nt, Homo sapiens
  misc_RNA (1)...(19): siRNA sense strand
gaugcuguagaaauugaaa

SEQ ID NO: 737750 - RNA, 19 nt, Homo sapiens
  misc_RNA (1)...(19): siRNA sense strand
ccaucaaagugaaaacuga

SEQ ID NO: 737751 - RNA, 19 nt, Homo sapiens
  misc_RNA (1)...(19): siRNA sense strand
gucgugugaugguaacaga

SEQ ID NO: 737752 - RNA, 19 nt, Homo sapiens
  misc_RNA (1)...(19): siRNA sense strand
cuacaacccaggcaaaucg

SEQ ID NO: 737753 - RNA, 19 nt, Homo sapiens
  misc_RNA (1)...(19): siRNA sense strand
uuaaacaccccgagaacua

SEQ ID NO: 737754 - RNA, 19 nt, Homo sapiens
  misc_RNA (1)...(19): siRNA sense strand
ccaggcaaaucggaugagu

SEQ ID NO: 737755 - RNA, 19 nt, Homo sapiens
  misc_RNA (1)...(19): siRNA sense strand
agaaauugaaacacucaga

SEQ ID NO: 737756 - RNA, 19 nt, Homo sapiens
  misc_RNA (1)...(19): siRNA sense strand
gaaaacugaacccacagaa

SEQ ID NO: 737757 - RNA, 19 nt, Homo sapiens
  misc_RNA (1)...(19): siRNA sense strand
gagccaaagaagcauguag

SEQ ID NO: 737758 - RNA, 19 nt, Homo sapiens
  misc_RNA (1)...(19): siRNA sense strand
cagaagauccugauuauua

SEQ ID NO: 737759 - RNA, 19 nt, Homo sapiens
  misc_RNA (1)...(19): siRNA sense strand
guaaagaacuggccaaguc

SEQ ID NO: 737760 - RNA, 19 nt, Homo sapiens
  misc_RNA (1)...(19): siRNA sense strand
gggauuucauucaucauua

SEQ ID NO: 737761 - RNA, 19 nt, Homo sapiens
  misc_RNA (1)...(19): siRNA sense strand
gaguguagaugcuguagaa

SEQ ID NO: 737762 - RNA, 19 nt, Homo sapiens
  misc_RNA (1)...(19): siRNA sense strand
ugggaaagcuuuaggcaaa

SEQ ID NO: 737763 - RNA, 19 nt, Homo sapiens
  misc_RNA (1)...(19): siRNA sense strand
gcaggaugguggugacauu

SEQ ID NO: 737764 - RNA, 19 nt, Homo sapiens
  misc_RNA (1)...(19): siRNA sense strand
gaaauugaaacacucagaa

SEQ ID NO: 737765 - RNA, 19 nt, Homo sapiens
  misc_RNA (1)...(19): siRNA sense strand
uguagaugcuguagaaauu

SEQ ID NO: 737766 - RNA, 19 nt, Homo sapiens
  misc_RNA (1)...(19): siRNA sense strand
ggaaauggcagcugugaca

SEQ ID NO: 737767 - RNA, 19 nt, Homo sapiens
  misc_RNA (1)...(19): siRNA sense strand
gcaaaucggaugaguguag

SEQ ID NO: 737768 - RNA, 19 nt, Homo sapiens
  misc_RNA (1)...(19): siRNA sense strand
aaacugaacccacagaaga

SEQ ID NO: 737769 - RNA, 19 nt, Homo sapiens
  misc_RNA (1)...(19): siRNA sense strand
ugaggacuauuucugcuuu

SEQ ID NO: 737770 - RNA, 19 nt, Homo sapiens
  misc_RNA (1)...(19): siRNA sense strand
gcaaugaaggcacagaaau

SEQ ID NO: 737771 - RNA, 19 nt, Homo sapiens
  misc_RNA (1)...(19): siRNA sense strand
caaggaagccaccauucuu

SEQ ID NO: 737772 - RNA, 19 nt, Homo sapiens
  misc_RNA (1)...(19): siRNA sense strand
ggaaagcuuuaggcaaauc

SEQ ID NO: 737773 - RNA, 19 nt, Homo sapiens
  misc_RNA (1)...(19): siRNA sense strand
aaacaguugaggacuauuu

SEQ ID NO: 737774 - RNA, 19 nt, Homo sapiens
  misc_RNA (1)...(19): siRNA sense strand
caaaucggaugaguguaga

SEQ ID NO: 737775 - RNA, 19 nt, Homo sapiens
  misc_RNA (1)...(19): siRNA sense strand
uagaugcuguagaaauuga

SEQ ID NO: 737776 - RNA, 19 nt, Homo sapiens
  misc_RNA (1)...(19): siRNA sense strand
caaugaaggcacagaaaug

SEQ ID NO: 737777 - RNA, 19 nt, Homo sapiens
  misc_RNA (1)...(19): siRNA sense strand
gacaguaaaggaagaauca

SEQ ID NO: 737778 - RNA, 19 nt, Homo sapiens
  misc_RNA (1)...(19): siRNA sense strand
gcucucgaguccaugugua

SEQ ID NO: 737779 - RNA, 19 nt, Homo sapiens
  misc_RNA (1)...(19): siRNA sense strand
cgagaacuaugaucuugca

SEQ ID NO: 737780 - RNA, 19 nt, Homo sapiens
  misc_RNA (1)...(19): siRNA sense strand
gcagagaugcauaaaauga

SEQ ID NO: 737781 - RNA, 19 nt, Homo sapiens
  misc_RNA (1)...(19): siRNA sense strand
gaacuggccaaguccaaag

SEQ ID NO: 737782 - RNA, 19 nt, Homo sapiens
  misc_RNA (1)...(19): siRNA sense strand
aaaggaagaaucagaagau

SEQ ID NO: 737783 - RNA, 19 nt, Homo sapiens
  misc_RNA (1)...(19): siRNA sense strand
uaaaggaagaaucagaaga

SEQ ID NO: 737784 - RNA, 19 nt, Homo sapiens
  misc_RNA (1)...(19): siRNA sense strand
gucaauaccagaaaggauu

SEQ ID NO: 737785 - RNA, 19 nt, Homo sapiens
  misc_RNA (1)...(19): siRNA sense strand
gcauugcaguguaugaaac

SEQ ID NO: 737786 - RNA, 19 nt, Homo sapiens
  misc_RNA (1)...(19): siRNA sense strand
ggacgugcuuuugucaaua

SEQ ID NO: 737787 - RNA, 19 nt, Homo sapiens
  misc_RNA (1)...(19): siRNA sense strand
gggaaagcuuuaggcaaau

SEQ ID NO: 737788 - RNA, 19 nt, Homo sapiens
  misc_RNA (1)...(19): siRNA sense strand
ugaaggcacagaaauggaa

SEQ ID NO: 737789 - RNA, 19 nt, Homo sapiens
  misc_RNA (1)...(19): siRNA sense strand
ccagucggcugugguagug

SEQ ID NO: 737790 - RNA, 19 nt, Homo sapiens
  misc_RNA (1)...(19): siRNA sense strand
ucaauaccagaaaggauuu

SEQ ID NO: 737791 - RNA, 19 nt, Homo sapiens
  misc_RNA (1)...(19): siRNA sense strand
gaagauccugauuauuauc

SEQ ID NO: 737792 - RNA, 19 nt, Homo sapiens
  misc_RNA (1)...(19): siRNA sense strand
ggaagaaucagaagauccu

SEQ ID NO: 737793 - RNA, 19 nt, Homo sapiens
  misc_RNA (1)...(19): siRNA sense strand
guagaaauugaaacacuca

SEQ ID NO: 737794 - RNA, 19 nt, Homo sapiens
  misc_RNA (1)...(19): siRNA sense strand
uugcaacccugaaauggau

SEQ ID NO: 737795 - RNA, 19 nt, Homo sapiens
  misc_RNA (1)...(19): siRNA sense strand
gaucuugcaacccugaaau

SEQ ID NO: 737796 - RNA, 19 nt, Homo sapiens
  misc_RNA (1)...(19): siRNA sense strand
cccgagaacuaugaucuug

SEQ ID NO: 737797 - RNA, 19 nt, Homo sapiens
  misc_RNA (1)...(19): siRNA sense strand
ggcaaugaaggcacagaaa

SEQ ID NO: 737798 - RNA, 19 nt, Homo sapiens
  misc_RNA (1)...(19): siRNA sense strand
ugucagcucucgaguccau

SEQ ID NO: 737799 - RNA, 19 nt, Homo sapiens
  misc_RNA (1)...(19): siRNA sense strand
guagaugcuguagaaauug

SEQ ID NO: 737800 - RNA, 19 nt, Homo sapiens
  misc_RNA (1)...(19): siRNA sense strand
gaugaguguagaugcugua

SEQ ID NO: 737801 - RNA, 19 nt, Homo sapiens
  misc_RNA (1)...(19): siRNA sense strand
gggcaaugaaggcacagaa

SEQ ID NO: 737802 - RNA, 19 nt, Homo sapiens
  misc_RNA (1)...(19): siRNA sense strand
ucgaguccauguguaaaga

SEQ ID NO: 737803 - RNA, 19 nt, Homo sapiens
  misc_RNA (1)...(19): siRNA sense strand
guaaaggaagaaucagaag

SEQ ID NO: 737804 - RNA, 19 nt, Homo sapiens
  misc_RNA (1)...(19): siRNA sense strand
guccauguguaaagaacug

SEQ ID NO: 737805 - RNA, 19 nt, Homo sapiens
  misc_RNA (1)...(19): siRNA sense strand
gguggugacauuccucaug

SEQ ID NO: 737806 - RNA, 19 nt, Homo sapiens
  misc_RNA (1)...(19): siRNA sense strand
uguagguggucgugugaug

SEQ ID NO: 737807 - RNA, 19 nt, Homo sapiens
  misc_RNA (1)...(19): siRNA sense strand
guguagaugcuguagaaau

SEQ ID NO: 737808 - RNA, 19 nt, Homo sapiens
  misc_RNA (1)...(19): siRNA sense strand
aggcaaaucggaugagugu

SEQ ID NO: 737809 - RNA, 19 nt, Homo sapiens
  misc_RNA (1)...(19): siRNA sense strand
aguaaaggaagaaucagaa

SEQ ID NO: 737810 - RNA, 19 nt, Homo sapiens
  misc_RNA (1)...(19): siRNA sense strand
caguaaaggaagaaucaga

SEQ ID NO: 737811 - RNA, 19 nt, Homo sapiens
  misc_RNA (1)...(19): siRNA sense strand
gguggucgugugaugguaa

SEQ ID NO: 737812 - RNA, 19 nt, Homo sapiens
  misc_RNA (1)...(19): siRNA sense strand
gaugcuguagaaauugaaa

SEQ ID NO: 737813 - RNA, 19 nt, Homo sapiens
  misc_RNA (1)...(19): siRNA sense strand
ccaucaaagugaaaacuga

SEQ ID NO: 737814 - RNA, 19 nt, Homo sapiens
  misc_RNA (1)...(19): siRNA sense strand
gucgugugaugguaacaga

SEQ ID NO: 737815 - RNA, 19 nt, Homo sapiens
  misc_RNA (1)...(19): siRNA sense strand
cuacaacccaggcaaaucg

SEQ ID NO: 737816 - RNA, 19 nt, Homo sapiens
  misc_RNA (1)...(19): siRNA sense strand
uuaaacaccccgagaacua

SEQ ID NO: 737817 - RNA, 19 nt, Homo sapiens
  misc_RNA (1)...(19): siRNA sense strand
ccaggcaaaucggaugagu

SEQ ID NO: 737818 - RNA, 19 nt, Homo sapiens
  misc_RNA (1)...(19): siRNA sense strand
agaaauugaaacacucaga

SEQ ID NO: 737819 - RNA, 19 nt, Homo sapiens
  misc_RNA (1)...(19): siRNA sense strand
gaaaacugaacccacagaa

SEQ ID NO: 737820 - RNA, 19 nt, Homo sapiens
  misc_RNA (1)...(19): siRNA sense strand
gagccaaagaagcauguag

SEQ ID NO: 737821 - RNA, 19 nt, Homo sapiens
  misc_RNA (1)...(19): siRNA sense strand
cagaagauccugauuauua

SEQ ID NO: 737822 - RNA, 19 nt, Homo sapiens
  misc_RNA (1)...(19): siRNA sense strand
guaaagaacuggccaaguc

SEQ ID NO: 737823 - RNA, 19 nt, Homo sapiens
  misc_RNA (1)...(19): siRNA sense strand
gggauuucauucaucauua

SEQ ID NO: 737824 - RNA, 19 nt, Homo sapiens
  misc_RNA (1)...(19): siRNA sense strand
gaguguagaugcuguagaa

SEQ ID NO: 737825 - RNA, 19 nt, Homo sapiens
  misc_RNA (1)...(19): siRNA sense strand
ugggaaagcuuuaggcaaa

SEQ ID NO: 737826 - RNA, 19 nt, Homo sapiens
  misc_RNA (1)...(19): siRNA sense strand
gcaggaugguggugacauu

SEQ ID NO: 737827 - RNA, 19 nt, Homo sapiens
  misc_RNA (1)...(19): siRNA sense strand
gaaauugaaacacucagaa

SEQ ID NO: 737828 - RNA, 19 nt, Homo sapiens
  misc_RNA (1)...(19): siRNA sense strand
uguagaugcuguagaaauu

SEQ ID NO: 737829 - RNA, 19 nt, Homo sapiens
  misc_RNA (1)...(19): siRNA sense strand
ggaaauggcagcugugaca

SEQ ID NO: 737830 - RNA, 19 nt, Homo sapiens
  misc_RNA (1)...(19): siRNA sense strand
gcaaaucggaugaguguag

SEQ ID NO: 737831 - RNA, 19 nt, Homo sapiens
  misc_RNA (1)...(19): siRNA sense strand
aaacugaacccacagaaga

SEQ ID NO: 737832 - RNA, 19 nt, Homo sapiens
  misc_RNA (1)...(19): siRNA sense strand
ugaggacuauuucugcuuu

SEQ ID NO: 737833 - RNA, 19 nt, Homo sapiens
  misc_RNA (1)...(19): siRNA sense strand
gcaaugaaggcacagaaau

SEQ ID NO: 737834 - RNA, 19 nt, Homo sapiens
  misc_RNA (1)...(19): siRNA sense strand
caaggaagccaccauucuu

SEQ ID NO: 737835 - RNA, 19 nt, Homo sapiens
  misc_RNA (1)...(19): siRNA sense strand
ggaaagcuuuaggcaaauc

SEQ ID NO: 737836 - RNA, 19 nt, Homo sapiens
  misc_RNA (1)...(19): siRNA sense strand
aaacaguugaggacuauuu

SEQ ID NO: 737837 - RNA, 19 nt, Homo sapiens
  misc_RNA (1)...(19): siRNA sense strand
caaaucggaugaguguaga

SEQ ID NO: 737838 - RNA, 19 nt, Homo sapiens
  misc_RNA (1)...(19): siRNA sense strand
uagaugcuguagaaauuga

SEQ ID NO: 737839 - RNA, 19 nt, Homo sapiens
  misc_RNA (1)...(19): siRNA sense strand
caaugaaggcacagaaaug

SEQ ID NO: 737840 - RNA, 19 nt, Homo sapiens
  misc_RNA (1)...(19): siRNA sense strand
gacaguaaaggaagaauca

SEQ ID NO: 737841 - RNA, 19 nt, Homo sapiens
  misc_RNA (1)...(19): siRNA sense strand
gcucucgaguccaugugua

SEQ ID NO: 737842 - RNA, 19 nt, Homo sapiens
  misc_RNA (1)...(19): siRNA sense strand
cgagaacuaugaucuugca

SEQ ID NO: 737843 - RNA, 19 nt, Homo sapiens
  misc_RNA (1)...(19): siRNA sense strand
gcagagaugcauaaaauga

SEQ ID NO: 737844 - RNA, 19 nt, Homo sapiens
  misc_RNA (1)...(19): siRNA sense strand
gaacuggccaaguccaaag

SEQ ID NO: 737845 - RNA, 19 nt, Homo sapiens
  misc_RNA (1)...(19): siRNA sense strand
aaaggaagaaucagaagau

SEQ ID NO: 737846 - RNA, 19 nt, Homo sapiens
  misc_RNA (1)...(19): siRNA sense strand
uaaaggaagaaucagaaga

SEQ ID NO: 737847 - RNA, 19 nt, Homo sapiens
  misc_RNA (1)...(19): siRNA sense strand
gucaauaccagaaaggauu

SEQ ID NO: 737848 - RNA, 19 nt, Homo sapiens
  misc_RNA (1)...(19): siRNA sense strand
gcauugcaguguaugaaac

SEQ ID NO: 737849 - RNA, 19 nt, Homo sapiens
  misc_RNA (1)...(19): siRNA sense strand
ggacgugcuuuugucaaua

SEQ ID NO: 737850 - RNA, 19 nt, Homo sapiens
  misc_RNA (1)...(19): siRNA sense strand
gggaaagcuuuaggcaaau

SEQ ID NO: 737851 - RNA, 19 nt, Homo sapiens
  misc_RNA (1)...(19): siRNA sense strand
ugaaggcacagaaauggaa

SEQ ID NO: 737852 - RNA, 19 nt, Homo sapiens
  misc_RNA (1)...(19): siRNA sense strand
ccagucggcugugguagug

SEQ ID NO: 737853 - RNA, 19 nt, Homo sapiens
  misc_RNA (1)...(19): siRNA sense strand
ucaauaccagaaaggauuu

SEQ ID NO: 737854 - RNA, 19 nt, Homo sapiens
  misc_RNA (1)...(19): siRNA sense strand
gaagauccugauuauuauc

SEQ ID NO: 737855 - RNA, 19 nt, Homo sapiens
  misc_RNA (1)...(19): siRNA sense strand
ggaagaaucagaagauccu

SEQ ID NO: 737856 - RNA, 19 nt, Homo sapiens
  misc_RNA (1)...(19): siRNA sense strand
guagaaauugaaacacuca

SEQ ID NO: 737857 - RNA, 19 nt, Homo sapiens
  misc_RNA (1)...(19): siRNA sense strand
uugcaacccugaaauggau

SEQ ID NO: 737858 - RNA, 19 nt, Homo sapiens
  misc_RNA (1)...(19): siRNA sense strand
gaucuugcaacccugaaau

SEQ ID NO: 737859 - RNA, 19 nt, Homo sapiens
  misc_RNA (1)...(19): siRNA sense strand
cccgagaacuaugaucuug

SEQ ID NO: 737860 - RNA, 19 nt, Homo sapiens
  misc_RNA (1)...(19): siRNA sense strand
ggcaaugaaggcacagaaa

SEQ ID NO: 737861 - RNA, 19 nt, Homo sapiens
  misc_RNA (1)...(19): siRNA sense strand
ugucagcucucgaguccau

SEQ ID NO: 737862 - RNA, 19 nt, Homo sapiens
  misc_RNA (1)...(19): siRNA sense strand
guagaugcuguagaaauug

SEQ ID NO: 737863 - RNA, 19 nt, Homo sapiens
  misc_RNA (1)...(19): siRNA sense strand
gaugaguguagaugcugua

SEQ ID NO: 737864 - RNA, 19 nt, Homo sapiens
  misc_RNA (1)...(19): siRNA sense strand
gggcaaugaaggcacagaa

SEQ ID NO: 737865 - RNA, 19 nt, Homo sapiens
  misc_RNA (1)...(19): siRNA sense strand
ucgaguccauguguaaaga

SEQ ID NO: 737866 - RNA, 19 nt, Homo sapiens
  misc_RNA (1)...(19): siRNA sense strand
guaaaggaagaaucagaag

SEQ ID NO: 737867 - RNA, 19 nt, Homo sapiens
  misc_RNA (1)...(19): siRNA sense strand
guccauguguaaagaacug

SEQ ID NO: 737868 - RNA, 19 nt, Homo sapiens
  misc_RNA (1)...(19): siRNA sense strand
gguggugacauuccucaug

SEQ ID NO: 737869 - RNA, 19 nt, Homo sapiens
  misc_RNA (1)...(19): siRNA sense strand
uguagguggucgugugaug

SEQ ID NO: 737870 - RNA, 19 nt, Homo sapiens
  misc_RNA (1)...(19): siRNA sense strand
guguagaugcuguagaaau

SEQ ID NO: 737871 - RNA, 19 nt, Homo sapiens
  misc_RNA (1)...(19): siRNA sense strand
aggcaaaucggaugagugu

SEQ ID NO: 737872 - RNA, 19 nt, Homo sapiens
  misc_RNA (1)...(19): siRNA sense strand
aguaaaggaagaaucagaa

SEQ ID NO: 737873 - RNA, 19 nt, Homo sapiens
  misc_RNA (1)...(19): siRNA sense strand
caguaaaggaagaaucaga

SEQ ID NO: 737874 - RNA, 19 nt, Homo sapiens
  misc_RNA (1)...(19): siRNA sense strand
gguggucgugugaugguaa

SEQ ID NO: 737875 - RNA, 19 nt, Homo sapiens
  misc_RNA (1)...(19): siRNA sense strand
gaugcuguagaaauugaaa

SEQ ID NO: 737876 - RNA, 19 nt, Homo sapiens
  misc_RNA (1)...(19): siRNA sense strand
ccaucaaagugaaaacuga

SEQ ID NO: 737877 - RNA, 19 nt, Homo sapiens
  misc_RNA (1)...(19): siRNA sense strand
gucgugugaugguaacaga

SEQ ID NO: 737878 - RNA, 19 nt, Homo sapiens
  misc_RNA (1)...(19): siRNA sense strand
cuacaacccaggcaaaucg

SEQ ID NO: 737879 - RNA, 19 nt, Homo sapiens
  misc_RNA (1)...(19): siRNA sense strand
uuaaacaccccgagaacua

SEQ ID NO: 737880 - RNA, 19 nt, Homo sapiens
  misc_RNA (1)...(19): siRNA sense strand
ccaggcaaaucggaugagu

SEQ ID NO: 737881 - RNA, 19 nt, Homo sapiens
  misc_RNA (1)...(19): siRNA sense strand
agaaauugaaacacucaga

SEQ ID NO: 737882 - RNA, 19 nt, Homo sapiens
  misc_RNA (1)...(19): siRNA sense strand
gaaaacugaacccacagaa

SEQ ID NO: 737883 - RNA, 19 nt, Homo sapiens
  misc_RNA (1)...(19): siRNA sense strand
gagccaaagaagcauguag

SEQ ID NO: 737884 - RNA, 19 nt, Homo sapiens
  misc_RNA (1)...(19): siRNA sense strand
cagaagauccugauuauua

SEQ ID NO: 737885 - RNA, 19 nt, Homo sapiens
  misc_RNA (1)...(19): siRNA sense strand
guaaagaacuggccaaguc

SEQ ID NO: 737886 - RNA, 19 nt, Homo sapiens
  misc_RNA (1)...(19): siRNA sense strand
gggauuucauucaucauua

SEQ ID NO: 737887 - RNA, 19 nt, Homo sapiens
  misc_RNA (1)...(19): siRNA sense strand
gaguguagaugcuguagaa

SEQ ID NO: 737888 - RNA, 19 nt, Homo sapiens
  misc_RNA (1)...(19): siRNA sense strand
ugggaaagcuuuaggcaaa

SEQ ID NO: 737889 - RNA, 19 nt, Homo sapiens
  misc_RNA (1)...(19): siRNA sense strand
gcaggaugguggugacauu

SEQ ID NO: 737890 - RNA, 19 nt, Homo sapiens
  misc_RNA (1)...(19): siRNA sense strand
gaaauugaaacacucagaa

SEQ ID NO: 737891 - RNA, 19 nt, Homo sapiens
  misc_RNA (1)...(19): siRNA sense strand
uguagaugcuguagaaauu

SEQ ID NO: 737892 - RNA, 19 nt, Homo sapiens
  misc_RNA (1)...(19): siRNA sense strand
ggaaauggcagcugugaca

SEQ ID NO: 737893 - RNA, 19 nt, Homo sapiens
  misc_RNA (1)...(19): siRNA sense strand
gcaaaucggaugaguguag

SEQ ID NO: 737894 - RNA, 19 nt, Homo sapiens
  misc_RNA (1)...(19): siRNA sense strand
aaacugaacccacagaaga

SEQ ID NO: 737895 - RNA, 19 nt, Homo sapiens
  misc_RNA (1)...(19): siRNA sense strand
ugaggacuauuucugcuuu

SEQ ID NO: 737896 - RNA, 19 nt, Homo sapiens
  misc_RNA (1)...(19): siRNA sense strand
gcaaugaaggcacagaaau

SEQ ID NO: 737897 - RNA, 19 nt, Homo sapiens
  misc_RNA (1)...(19): siRNA sense strand
caaggaagccaccauucuu

SEQ ID NO: 737898 - RNA, 19 nt, Homo sapiens
  misc_RNA (1)...(19): siRNA sense strand
ggaaagcuuuaggcaaauc

SEQ ID NO: 737899 - RNA, 19 nt, Homo sapiens
  misc_RNA (1)...(19): siRNA sense strand
aaacaguugaggacuauuu

SEQ ID NO: 737900 - RNA, 19 nt, Homo sapiens
  misc_RNA (1)...(19): siRNA sense strand
caaaucggaugaguguaga

SEQ ID NO: 737901 - RNA, 19 nt, Homo sapiens
  misc_RNA (1)...(19): siRNA sense strand
uagaugcuguagaaauuga

SEQ ID NO: 737902 - RNA, 19 nt, Homo sapiens
  misc_RNA (1)...(19): siRNA sense strand
caaugaaggcacagaaaug

SEQ ID NO: 737903 - RNA, 19 nt, Homo sapiens
  misc_RNA (1)...(19): siRNA sense strand
gacaguaaaggaagaauca

SEQ ID NO: 737904 - RNA, 19 nt, Homo sapiens
  misc_RNA (1)...(19): siRNA sense strand
gcucucgaguccaugugua

SEQ ID NO: 737905 - RNA, 19 nt, Homo sapiens
  misc_RNA (1)...(19): siRNA sense strand
cgagaacuaugaucuugca

SEQ ID NO: 737906 - RNA, 19 nt, Homo sapiens
  misc_RNA (1)...(19): siRNA sense strand
gcagagaugcauaaaauga

SEQ ID NO: 737907 - RNA, 19 nt, Homo sapiens
  misc_RNA (1)...(19): siRNA sense strand
gaacuggccaaguccaaag

SEQ ID NO: 737908 - RNA, 19 nt, Homo sapiens
  misc_RNA (1)...(19): siRNA sense strand
aaaggaagaaucagaagau

SEQ ID NO: 737909 - RNA, 19 nt, Homo sapiens
  misc_RNA (1)...(19): siRNA sense strand
uaaaggaagaaucagaaga

SEQ ID NO: 737910 - RNA, 19 nt, Homo sapiens
  misc_RNA (1)...(19): siRNA sense strand
gucaauaccagaaaggauu

SEQ ID NO: 737911 - RNA, 19 nt, Homo sapiens
  misc_RNA (1)...(19): siRNA sense strand
gcauugcaguguaugaaac

SEQ ID NO: 737912 - RNA, 19 nt, Homo sapiens
  misc_RNA (1)...(19): siRNA sense strand
ggacgugcuuuugucaaua

SEQ ID NO: 737913 - RNA, 19 nt, Homo sapiens
  misc_RNA (1)...(19): siRNA sense strand
gggaaagcuuuaggcaaau

SEQ ID NO: 737914 - RNA, 19 nt, Homo sapiens
  misc_RNA (1)...(19): siRNA sense strand
ugaaggcacagaaauggaa

SEQ ID NO: 737915 - RNA, 19 nt, Homo sapiens
  misc_RNA (1)...(19): siRNA sense strand
ccagucggcugugguagug

SEQ ID NO: 737916 - RNA, 19 nt, Homo sapiens
  misc_RNA (1)...(19): siRNA sense strand
ucaauaccagaaaggauuu

SEQ ID NO: 737917 - RNA, 19 nt, Homo sapiens
  misc_RNA (1)...(19): siRNA sense strand
gaagauccugauuauuauc

SEQ ID NO: 737918 - RNA, 19 nt, Homo sapiens
  misc_RNA (1)...(19): siRNA sense strand
ggaagaaucagaagauccu

SEQ ID NO: 737919 - RNA, 19 nt, Homo sapiens
  misc_RNA (1)...(19): siRNA sense strand
guagaaauugaaacacuca

SEQ ID NO: 737920 - RNA, 19 nt, Homo sapiens
  misc_RNA (1)...(19): siRNA sense strand
uugcaacccugaaauggau

SEQ ID NO: 737921 - RNA, 19 nt, Homo sapiens
  misc_RNA (1)...(19): siRNA sense strand
gaucuugcaacccugaaau

SEQ ID NO: 737922 - RNA, 19 nt, Homo sapiens
  misc_RNA (1)...(19): siRNA sense strand
cccgagaacuaugaucuug

SEQ ID NO: 737923 - RNA, 19 nt, Homo sapiens
  misc_RNA (1)...(19): siRNA sense strand
ggcaaugaaggcacagaaa

SEQ ID NO: 737924 - RNA, 19 nt, Homo sapiens
  misc_RNA (1)...(19): siRNA sense strand
ugucagcucucgaguccau

SEQ ID NO: 737925 - RNA, 19 nt, Homo sapiens
  misc_RNA (1)...(19): siRNA sense strand
guagaugcuguagaaauug

SEQ ID NO: 737926 - RNA, 19 nt, Homo sapiens
  misc_RNA (1)...(19): siRNA sense strand
gaugaguguagaugcugua

SEQ ID NO: 737927 - RNA, 19 nt, Homo sapiens
  misc_RNA (1)...(19): siRNA sense strand
gggcaaugaaggcacagaa

SEQ ID NO: 737928 - RNA, 19 nt, Homo sapiens
  misc_RNA (1)...(19): siRNA sense strand
ucgaguccauguguaaaga

SEQ ID NO: 737929 - RNA, 19 nt, Homo sapiens
  misc_RNA (1)...(19): siRNA sense strand
guaaaggaagaaucagaag

SEQ ID NO: 737930 - RNA, 19 nt, Homo sapiens
  misc_RNA (1)...(19): siRNA sense strand
guccauguguaaagaacug

SEQ ID NO: 737931 - RNA, 19 nt, Homo sapiens
  misc_RNA (1)...(19): siRNA sense strand
gguggugacauuccucaug

SEQ ID NO: 737932 - RNA, 19 nt, Homo sapiens
  misc_RNA (1)...(19): siRNA sense strand
uguagguggucgugugaug

SEQ ID NO: 737933 - RNA, 19 nt, Homo sapiens
  misc_RNA (1)...(19): siRNA sense strand
guguagaugcuguagaaau

SEQ ID NO: 737934 - RNA, 19 nt, Homo sapiens
  misc_RNA (1)...(19): siRNA sense strand
aggcaaaucggaugagugu

SEQ ID NO: 737935 - RNA, 19 nt, Homo sapiens
  misc_RNA (1)...(19): siRNA sense strand
aguaaaggaagaaucagaa

SEQ ID NO: 737936 - RNA, 19 nt, Homo sapiens
  misc_RNA (1)...(19): siRNA sense strand
caguaaaggaagaaucaga

SEQ ID NO: 737937 - RNA, 19 nt, Homo sapiens
  misc_RNA (1)...(19): siRNA sense strand
gguggucgugugaugguaa

SEQ ID NO: 737938 - RNA, 19 nt, Homo sapiens
  misc_RNA (1)...(19): siRNA sense strand
gaugcuguagaaauugaaa

SEQ ID NO: 737939 - RNA, 19 nt, Homo sapiens
  misc_RNA (1)...(19): siRNA sense strand
ccaucaaagugaaaacuga

SEQ ID NO: 737940 - RNA, 19 nt, Homo sapiens
  misc_RNA (1)...(19): siRNA sense strand
gucgugugaugguaacaga

SEQ ID NO: 737941 - RNA, 19 nt, Homo sapiens
  misc_RNA (1)...(19): siRNA sense strand
cuacaacccaggcaaaucg

SEQ ID NO: 737942 - RNA, 19 nt, Homo sapiens
  misc_RNA (1)...(19): siRNA sense strand
uuaaacaccccgagaacua

SEQ ID NO: 737943 - RNA, 19 nt, Homo sapiens
  misc_RNA (1)...(19): siRNA sense strand
ccaggcaaaucggaugagu

SEQ ID NO: 737944 - RNA, 19 nt, Homo sapiens
  misc_RNA (1)...(19): siRNA sense strand
agaaauugaaacacucaga

SEQ ID NO: 737945 - RNA, 19 nt, Homo sapiens
  misc_RNA (1)...(19): siRNA sense strand
gaaaacugaacccacagaa

SEQ ID NO: 737946 - RNA, 19 nt, Homo sapiens
  misc_RNA (1)...(19): siRNA sense strand
gagccaaagaagcauguag

SEQ ID NO: 737947 - RNA, 19 nt, Homo sapiens
  misc_RNA (1)...(19): siRNA sense strand
cagaagauccugauuauua

SEQ ID NO: 737948 - RNA, 19 nt, Homo sapiens
  misc_RNA (1)...(19): siRNA sense strand
guaaagaacuggccaaguc

SEQ ID NO: 737949 - RNA, 19 nt, Homo sapiens
  misc_RNA (1)...(19): siRNA sense strand
gggauuucauucaucauua

SEQ ID NO: 737950 - RNA, 19 nt, Homo sapiens
  misc_RNA (1)...(19): siRNA sense strand
gaguguagaugcuguagaa

SEQ ID NO: 737951 - RNA, 19 nt, Homo sapiens
  misc_RNA (1)...(19): siRNA sense strand
ugggaaagcuuuaggcaaa

SEQ ID NO: 737952 - RNA, 19 nt, Homo sapiens
  misc_RNA (1)...(19): siRNA sense strand
gcaggaugguggugacauu

SEQ ID NO: 737953 - RNA, 19 nt, Homo sapiens
  misc_RNA (1)...(19): siRNA sense strand
gaaauugaaacacucagaa

SEQ ID NO: 737954 - RNA, 19 nt, Homo sapiens
  misc_RNA (1)...(19): siRNA sense strand
uguagaugcuguagaaauu

SEQ ID NO: 737955 - RNA, 19 nt, Homo sapiens
  misc_RNA (1)...(19): siRNA sense strand
ggaaauggcagcugugaca

SEQ ID NO: 737956 - RNA, 19 nt, Homo sapiens
  misc_RNA (1)...(19): siRNA sense strand
gcaaaucggaugaguguag

SEQ ID NO: 737957 - RNA, 19 nt, Homo sapiens
  misc_RNA (1)...(19): siRNA sense strand
aaacugaacccacagaaga

SEQ ID NO: 737958 - RNA, 19 nt, Homo sapiens
  misc_RNA (1)...(19): siRNA sense strand
ugaggacuauuucugcuuu

SEQ ID NO: 737959 - RNA, 19 nt, Homo sapiens
  misc_RNA (1)...(19): siRNA sense strand
gcaaugaaggcacagaaau

SEQ ID NO: 737960 - RNA, 19 nt, Homo sapiens
  misc_RNA (1)...(19): siRNA sense strand
caaggaagccaccauucuu

SEQ ID NO: 737961 - RNA, 19 nt, Homo sapiens
  misc_RNA (1)...(19): siRNA sense strand
ggaaagcuuuaggcaaauc

SEQ ID NO: 737962 - RNA, 19 nt, Homo sapiens
  misc_RNA (1)...(19): siRNA sense strand
aaacaguugaggacuauuu

SEQ ID NO: 737963 - RNA, 19 nt, Homo sapiens
  misc_RNA (1)...(19): siRNA sense strand
caaaucggaugaguguaga

SEQ ID NO: 737964 - RNA, 19 nt, Homo sapiens
  misc_RNA (1)...(19): siRNA sense strand
uagaugcuguagaaauuga

SEQ ID NO: 737965 - RNA, 19 nt, Homo sapiens
  misc_RNA (1)...(19): siRNA sense strand
caaugaaggcacagaaaug

SEQ ID NO: 737966 - RNA, 19 nt, Homo sapiens
  misc_RNA (1)...(19): siRNA sense strand
gacaguaaaggaagaauca

SEQ ID NO: 737967 - RNA, 19 nt, Homo sapiens
  misc_RNA (1)...(19): siRNA sense strand
gcucucgaguccaugugua

SEQ ID NO: 737968 - RNA, 19 nt, Homo sapiens
  misc_RNA (1)...(19): siRNA sense strand
cgagaacuaugaucuugca

SEQ ID NO: 737969 - RNA, 19 nt, Homo sapiens
  misc_RNA (1)...(19): siRNA sense strand
gcagagaugcauaaaauga

SEQ ID NO: 737970 - RNA, 19 nt, Homo sapiens
  misc_RNA (1)...(19): siRNA sense strand
gaacuggccaaguccaaag

SEQ ID NO: 737971 - RNA, 19 nt, Homo sapiens
  misc_RNA (1)...(19): siRNA sense strand
aaaggaagaaucagaagau

SEQ ID NO: 737972 - RNA, 19 nt, Homo sapiens
  misc_RNA (1)...(19): siRNA sense strand
uaaaggaagaaucagaaga

SEQ ID NO: 737973 - RNA, 19 nt, Homo sapiens
  misc_RNA (1)...(19): siRNA sense strand
gucaauaccagaaaggauu

SEQ ID NO: 737974 - RNA, 19 nt, Homo sapiens
  misc_RNA (1)...(19): siRNA sense strand
gcauugcaguguaugaaac

SEQ ID NO: 737975 - RNA, 19 nt, Homo sapiens
  misc_RNA (1)...(19): siRNA sense strand
ggacgugcuuuugucaaua

SEQ ID NO: 737976 - RNA, 19 nt, Homo sapiens
  misc_RNA (1)...(19): siRNA sense strand
gggaaagcuuuaggcaaau

SEQ ID NO: 737977 - RNA, 19 nt, Homo sapiens
  misc_RNA (1)...(19): siRNA sense strand
ugaaggcacagaaauggaa

SEQ ID NO: 737978 - RNA, 19 nt, Homo sapiens
  misc_RNA (1)...(19): siRNA sense strand
ccagucggcugugguagug

SEQ ID NO: 737979 - RNA, 19 nt, Homo sapiens
  misc_RNA (1)...(19): siRNA sense strand
ucaauaccagaaaggauuu

SEQ ID NO: 737980 - RNA, 19 nt, Homo sapiens
  misc_RNA (1)...(19): siRNA sense strand
gaagauccugauuauuauc

SEQ ID NO: 737981 - RNA, 19 nt, Homo sapiens
  misc_RNA (1)...(19): siRNA sense strand
ggaagaaucagaagauccu

SEQ ID NO: 737982 - RNA, 19 nt, Homo sapiens
  misc_RNA (1)...(19): siRNA sense strand
guagaaauugaaacacuca

SEQ ID NO: 737983 - RNA, 19 nt, Homo sapiens
  misc_RNA (1)...(19): siRNA sense strand
uugcaacccugaaauggau

SEQ ID NO: 737984 - RNA, 19 nt, Homo sapiens
  misc_RNA (1)...(19): siRNA sense strand
gaucuugcaacccugaaau

SEQ ID NO: 737985 - RNA, 19 nt, Homo sapiens
  misc_RNA (1)...(19): siRNA sense strand
cccgagaacuaugaucuug

SEQ ID NO: 737986 - RNA, 19 nt, Homo sapiens
  misc_RNA (1)...(19): siRNA sense strand
ggcaaugaaggcacagaaa

SEQ ID NO: 737987 - RNA, 19 nt, Homo sapiens
  misc_RNA (1)...(19): siRNA sense strand
ugucagcucucgaguccau

SEQ ID NO: 737988 - RNA, 19 nt, Homo sapiens
  misc_RNA (1)...(19): siRNA sense strand
guagaugcuguagaaauug

SEQ ID NO: 737989 - RNA, 19 nt, Homo sapiens
  misc_RNA (1)...(19): siRNA sense strand
gaugaguguagaugcugua

SEQ ID NO: 737990 - RNA, 19 nt, Homo sapiens
  misc_RNA (1)...(19): siRNA sense strand
gggcaaugaaggcacagaa

SEQ ID NO: 737991 - RNA, 19 nt, Homo sapiens
  misc_RNA (1)...(19): siRNA sense strand
ucgaguccauguguaaaga

SEQ ID NO: 737992 - RNA, 19 nt, Homo sapiens
  misc_RNA (1)...(19): siRNA sense strand
guaaaggaagaaucagaag

SEQ ID NO: 737993 - RNA, 19 nt, Homo sapiens
  misc_RNA (1)...(19): siRNA sense strand
guccauguguaaagaacug

SEQ ID NO: 737994 - RNA, 19 nt, Homo sapiens
  misc_RNA (1)...(19): siRNA sense strand
gguggugacauuccucaug

SEQ ID NO: 737995 - RNA, 19 nt, Homo sapiens
  misc_RNA (1)...(19): siRNA sense strand
uguagguggucgugugaug

SEQ ID NO: 737996 - RNA, 19 nt, Homo sapiens
  misc_RNA (1)...(19): siRNA sense strand
guguagaugcuguagaaau

SEQ ID NO: 737997 - RNA, 19 nt, Homo sapiens
  misc_RNA (1)...(19): siRNA sense strand
aggcaaaucggaugagugu

SEQ ID NO: 737998 - RNA, 19 nt, Homo sapiens
  misc_RNA (1)...(19): siRNA sense strand
aguaaaggaagaaucagaa

SEQ ID NO: 737999 - RNA, 19 nt, Homo sapiens
  misc_RNA (1)...(19): siRNA sense strand
caguaaaggaagaaucaga

SEQ ID NO: 738000 - RNA, 19 nt, Homo sapiens
  misc_RNA (1)...(19): siRNA sense strand
gguggucgugugaugguaa

SEQ ID NO: 738001 - RNA, 19 nt, Homo sapiens
  misc_RNA (1)...(19): siRNA sense strand
gaugcuguagaaauugaaa

SEQ ID NO: 738002 - RNA, 19 nt, Homo sapiens
  misc_RNA (1)...(19): siRNA sense strand
ccaucaaagugaaaacuga

SEQ ID NO: 738003 - RNA, 19 nt, Homo sapiens
  misc_RNA (1)...(19): siRNA sense strand
gucgugugaugguaacaga

SEQ ID NO: 738004 - RNA, 19 nt, Homo sapiens
  misc_RNA (1)...(19): siRNA sense strand
cuacaacccaggcaaaucg

SEQ ID NO: 738005 - RNA, 19 nt, Homo sapiens
  misc_RNA (1)...(19): siRNA sense strand
uuaaacaccccgagaacua

SEQ ID NO: 738006 - RNA, 19 nt, Homo sapiens
  misc_RNA (1)...(19): siRNA sense strand
ccaggcaaaucggaugagu

SEQ ID NO: 738007 - RNA, 19 nt, Homo sapiens
  misc_RNA (1)...(19): siRNA sense strand
agaaauugaaacacucaga

SEQ ID NO: 738008 - RNA, 19 nt, Homo sapiens
  misc_RNA (1)...(19): siRNA sense strand
gaaaacugaacccacagaa

SEQ ID NO: 738009 - RNA, 19 nt, Homo sapiens
  misc_RNA (1)...(19): siRNA sense strand
gagccaaagaagcauguag

SEQ ID NO: 738010 - RNA, 19 nt, Homo sapiens
  misc_RNA (1)...(19): siRNA sense strand
cagaagauccugauuauua

SEQ ID NO: 738011 - RNA, 19 nt, Homo sapiens
  misc_RNA (1)...(19): siRNA sense strand
guaaagaacuggccaaguc

SEQ ID NO: 738012 - RNA, 19 nt, Homo sapiens
  misc_RNA (1)...(19): siRNA sense strand
gggauuucauucaucauua

SEQ ID NO: 738013 - RNA, 19 nt, Homo sapiens
  misc_RNA (1)...(19): siRNA sense strand
gaguguagaugcuguagaa

SEQ ID NO: 738014 - RNA, 19 nt, Homo sapiens
  misc_RNA (1)...(19): siRNA sense strand
ugggaaagcuuuaggcaaa

SEQ ID NO: 738015 - RNA, 19 nt, Homo sapiens
  misc_RNA (1)...(19): siRNA sense strand
gcaggaugguggugacauu

SEQ ID NO: 738016 - RNA, 19 nt, Homo sapiens
  misc_RNA (1)...(19): siRNA sense strand
gaaauugaaacacucagaa

SEQ ID NO: 738017 - RNA, 19 nt, Homo sapiens
  misc_RNA (1)...(19): siRNA sense strand
uguagaugcuguagaaauu

SEQ ID NO: 738018 - RNA, 19 nt, Homo sapiens
  misc_RNA (1)...(19): siRNA sense strand
ggaaauggcagcugugaca

SEQ ID NO: 738019 - RNA, 19 nt, Homo sapiens
  misc_RNA (1)...(19): siRNA sense strand
gcaaaucggaugaguguag

SEQ ID NO: 738020 - RNA, 19 nt, Homo sapiens
  misc_RNA (1)...(19): siRNA sense strand
aaacugaacccacagaaga

SEQ ID NO: 738021 - RNA, 19 nt, Homo sapiens
  misc_RNA (1)...(19): siRNA sense strand
ugaggacuauuucugcuuu

SEQ ID NO: 738022 - RNA, 19 nt, Homo sapiens
  misc_RNA (1)...(19): siRNA sense strand
gcaaugaaggcacagaaau

SEQ ID NO: 738023 - RNA, 19 nt, Homo sapiens
  misc_RNA (1)...(19): siRNA sense strand
caaggaagccaccauucuu

SEQ ID NO: 738024 - RNA, 19 nt, Homo sapiens
  misc_RNA (1)...(19): siRNA sense strand
ggaaagcuuuaggcaaauc

SEQ ID NO: 738025 - RNA, 19 nt, Homo sapiens
  misc_RNA (1)...(19): siRNA sense strand
aaacaguugaggacuauuu

SEQ ID NO: 738026 - RNA, 19 nt, Homo sapiens
  misc_RNA (1)...(19): siRNA sense strand
caaaucggaugaguguaga

SEQ ID NO: 738027 - RNA, 19 nt, Homo sapiens
  misc_RNA (1)...(19): siRNA sense strand
uagaugcuguagaaauuga

SEQ ID NO: 738028 - RNA, 19 nt, Homo sapiens
  misc_RNA (1)...(19): siRNA sense strand
caaugaaggcacagaaaug

SEQ ID NO: 738029 - RNA, 19 nt, Homo sapiens
  misc_RNA (1)...(19): siRNA sense strand
gacaguaaaggaagaauca

SEQ ID NO: 738030 - RNA, 19 nt, Homo sapiens
  misc_RNA (1)...(19): siRNA sense strand
gcucucgaguccaugugua

SEQ ID NO: 738031 - RNA, 19 nt, Homo sapiens
  misc_RNA (1)...(19): siRNA sense strand
cgagaacuaugaucuugca

SEQ ID NO: 738032 - RNA, 19 nt, Homo sapiens
  misc_RNA (1)...(19): siRNA sense strand
gcagagaugcauaaaauga

SEQ ID NO: 738033 - RNA, 19 nt, Homo sapiens
  misc_RNA (1)...(19): siRNA sense strand
gaacuggccaaguccaaag

SEQ ID NO: 738034 - RNA, 19 nt, Homo sapiens
  misc_RNA (1)...(19): siRNA sense strand
aaaggaagaaucagaagau

SEQ ID NO: 738035 - RNA, 19 nt, Homo sapiens
  misc_RNA (1)...(19): siRNA sense strand
uaaaggaagaaucagaaga

SEQ ID NO: 738036 - RNA, 19 nt, Homo sapiens
  misc_RNA (1)...(19): siRNA sense strand
gucaauaccagaaaggauu

SEQ ID NO: 738037 - RNA, 19 nt, Homo sapiens
  misc_RNA (1)...(19): siRNA sense strand
gcauugcaguguaugaaac

SEQ ID NO: 738038 - RNA, 19 nt, Homo sapiens
  misc_RNA (1)...(19): siRNA sense strand
ggacgugcuuuugucaaua

SEQ ID NO: 738039 - RNA, 19 nt, Homo sapiens
  misc_RNA (1)...(19): siRNA sense strand
gggaaagcuuuaggcaaau

SEQ ID NO: 738040 - RNA, 19 nt, Homo sapiens
  misc_RNA (1)...(19): siRNA sense strand
ugaaggcacagaaauggaa

SEQ ID NO: 738041 - RNA, 19 nt, Homo sapiens
  misc_RNA (1)...(19): siRNA sense strand
ccagucggcugugguagug

SEQ ID NO: 738042 - RNA, 19 nt, Homo sapiens
  misc_RNA (1)...(19): siRNA sense strand
ucaauaccagaaaggauuu

SEQ ID NO: 738043 - RNA, 19 nt, Homo sapiens
  misc_RNA (1)...(19): siRNA sense strand
gaagauccugauuauuauc

SEQ ID NO: 738044 - RNA, 19 nt, Homo sapiens
  misc_RNA (1)...(19): siRNA sense strand
ggaagaaucagaagauccu

SEQ ID NO: 738045 - RNA, 19 nt, Homo sapiens
  misc_RNA (1)...(19): siRNA sense strand
guagaaauugaaacacuca

SEQ ID NO: 738046 - RNA, 19 nt, Homo sapiens
  misc_RNA (1)...(19): siRNA sense strand
uugcaacccugaaauggau

SEQ ID NO: 738047 - RNA, 19 nt, Homo sapiens
  misc_RNA (1)...(19): siRNA sense strand
gaucuugcaacccugaaau

SEQ ID NO: 738048 - RNA, 19 nt, Homo sapiens
  misc_RNA (1)...(19): siRNA sense strand
cccgagaacuaugaucuug

SEQ ID NO: 738049 - RNA, 19 nt, Homo sapiens
  misc_RNA (1)...(19): siRNA sense strand
ggcaaugaaggcacagaaa

SEQ ID NO: 738050 - RNA, 19 nt, Homo sapiens
  misc_RNA (1)...(19): siRNA sense strand
ugucagcucucgaguccau

SEQ ID NO: 738051 - RNA, 19 nt, Homo sapiens
  misc_RNA (1)...(19): siRNA sense strand
guagaugcuguagaaauug

SEQ ID NO: 738052 - RNA, 19 nt, Homo sapiens
  misc_RNA (1)...(19): siRNA sense strand
gaugaguguagaugcugua

SEQ ID NO: 738053 - RNA, 19 nt, Homo sapiens
  misc_RNA (1)...(19): siRNA sense strand
gggcaaugaaggcacagaa

SEQ ID NO: 738054 - RNA, 19 nt, Homo sapiens
  misc_RNA (1)...(19): siRNA sense strand
ucgaguccauguguaaaga

SEQ ID NO: 738055 - RNA, 19 nt, Homo sapiens
  misc_RNA (1)...(19): siRNA sense strand
guaaaggaagaaucagaag

SEQ ID NO: 738056 - RNA, 19 nt, Homo sapiens
  misc_RNA (1)...(19): siRNA sense strand
guccauguguaaagaacug

SEQ ID NO: 738057 - RNA, 19 nt, Homo sapiens
  misc_RNA (1)...(19): siRNA sense strand
gguggugacauuccucaug

SEQ ID NO: 738058 - RNA, 19 nt, Homo sapiens
  misc_RNA (1)...(19): siRNA sense strand
uguagguggucgugugaug

SEQ ID NO: 738059 - RNA, 19 nt, Homo sapiens
  misc_RNA (1)...(19): siRNA sense strand
guguagaugcuguagaaau

SEQ ID NO: 738060 - RNA, 19 nt, Homo sapiens
  misc_RNA (1)...(19): siRNA sense strand
aggcaaaucggaugagugu

SEQ ID NO: 738061 - RNA, 19 nt, Homo sapiens
  misc_RNA (1)...(19): siRNA sense strand
aguaaaggaagaaucagaa

SEQ ID NO: 738062 - RNA, 19 nt, Homo sapiens
  misc_RNA (1)...(19): siRNA sense strand
caguaaaggaagaaucaga

SEQ ID NO: 738063 - RNA, 19 nt, Homo sapiens
  misc_RNA (1)...(19): siRNA sense strand
gguggucgugugaugguaa

SEQ ID NO: 738064 - RNA, 19 nt, Homo sapiens
  misc_RNA (1)...(19): siRNA sense strand
gaugcuguagaaauugaaa

SEQ ID NO: 738065 - RNA, 19 nt, Homo sapiens
  misc_RNA (1)...(19): siRNA sense strand
ccaucaaagugaaaacuga

SEQ ID NO: 738066 - RNA, 19 nt, Homo sapiens
  misc_RNA (1)...(19): siRNA sense strand
gucgugugaugguaacaga

SEQ ID NO: 738067 - RNA, 19 nt, Homo sapiens
  misc_RNA (1)...(19): siRNA sense strand
cuacaacccaggcaaaucg

SEQ ID NO: 738068 - RNA, 19 nt, Homo sapiens
  misc_RNA (1)...(19): siRNA sense strand
uuaaacaccccgagaacua

SEQ ID NO: 738069 - RNA, 19 nt, Homo sapiens
  misc_RNA (1)...(19): siRNA sense strand
ccaggcaaaucggaugagu

SEQ ID NO: 738070 - RNA, 19 nt, Homo sapiens
  misc_RNA (1)...(19): siRNA sense strand
agaaauugaaacacucaga

SEQ ID NO: 738071 - RNA, 19 nt, Homo sapiens
  misc_RNA (1)...(19): siRNA sense strand
gaaaacugaacccacagaa

SEQ ID NO: 738072 - RNA, 19 nt, Homo sapiens
  misc_RNA (1)...(19): siRNA sense strand
gagccaaagaagcauguag

SEQ ID NO: 738073 - RNA, 19 nt, Homo sapiens
  misc_RNA (1)...(19): siRNA sense strand
cagaagauccugauuauua

SEQ ID NO: 738074 - RNA, 19 nt, Homo sapiens
  misc_RNA (1)...(19): siRNA sense strand
guaaagaacuggccaaguc

SEQ ID NO: 738075 - RNA, 19 nt, Homo sapiens
  misc_RNA (1)...(19): siRNA sense strand
gggauuucauucaucauua

SEQ ID NO: 738076 - RNA, 19 nt, Homo sapiens
  misc_RNA (1)...(19): siRNA sense strand
gaguguagaugcuguagaa

SEQ ID NO: 738077 - RNA, 19 nt, Homo sapiens
  misc_RNA (1)...(19): siRNA sense strand
ugggaaagcuuuaggcaaa

SEQ ID NO: 738078 - RNA, 19 nt, Homo sapiens
  misc_RNA (1)...(19): siRNA sense strand
gcaggaugguggugacauu

SEQ ID NO: 738079 - RNA, 19 nt, Homo sapiens
  misc_RNA (1)...(19): siRNA sense strand
gaaauugaaacacucagaa

SEQ ID NO: 738080 - RNA, 19 nt, Homo sapiens
  misc_RNA (1)...(19): siRNA sense strand
uguagaugcuguagaaauu

SEQ ID NO: 738081 - RNA, 19 nt, Homo sapiens
  misc_RNA (1)...(19): siRNA sense strand
ggaaauggcagcugugaca

SEQ ID NO: 738082 - RNA, 19 nt, Homo sapiens
  misc_RNA (1)...(19): siRNA sense strand
gcaaaucggaugaguguag

SEQ ID NO: 738083 - RNA, 19 nt, Homo sapiens
  misc_RNA (1)...(19): siRNA sense strand
aaacugaacccacagaaga

SEQ ID NO: 738084 - RNA, 19 nt, Homo sapiens
  misc_RNA (1)...(19): siRNA sense strand
ugaggacuauuucugcuuu

SEQ ID NO: 738085 - RNA, 19 nt, Homo sapiens
  misc_RNA (1)...(19): siRNA sense strand
gcaaugaaggcacagaaau

SEQ ID NO: 738086 - RNA, 19 nt, Homo sapiens
  misc_RNA (1)...(19): siRNA sense strand
caaggaagccaccauucuu

SEQ ID NO: 738087 - RNA, 19 nt, Homo sapiens
  misc_RNA (1)...(19): siRNA sense strand
ggaaagcuuuaggcaaauc

SEQ ID NO: 738088 - RNA, 19 nt, Homo sapiens
  misc_RNA (1)...(19): siRNA sense strand
aaacaguugaggacuauuu

SEQ ID NO: 738089 - RNA, 19 nt, Homo sapiens
  misc_RNA (1)...(19): siRNA sense strand
caaaucggaugaguguaga

SEQ ID NO: 738090 - RNA, 19 nt, Homo sapiens
  misc_RNA (1)...(19): siRNA sense strand
uagaugcuguagaaauuga

SEQ ID NO: 738091 - RNA, 19 nt, Homo sapiens
  misc_RNA (1)...(19): siRNA sense strand
caaugaaggcacagaaaug

SEQ ID NO: 738092 - RNA, 19 nt, Homo sapiens
  misc_RNA (1)...(19): siRNA sense strand
gacaguaaaggaagaauca

SEQ ID NO: 738093 - RNA, 19 nt, Homo sapiens
  misc_RNA (1)...(19): siRNA sense strand
gcucucgaguccaugugua

SEQ ID NO: 738094 - RNA, 19 nt, Homo sapiens
  misc_RNA (1)...(19): siRNA sense strand
cgagaacuaugaucuugca

SEQ ID NO: 738095 - RNA, 19 nt, Homo sapiens
  misc_RNA (1)...(19): siRNA sense strand
gcagagaugcauaaaauga

SEQ ID NO: 738096 - RNA, 19 nt, Homo sapiens
  misc_RNA (1)...(19): siRNA sense strand
gaacuggccaaguccaaag

SEQ ID NO: 738097 - RNA, 19 nt, Homo sapiens
  misc_RNA (1)...(19): siRNA sense strand
aaaggaagaaucagaagau

SEQ ID NO: 738098 - RNA, 19 nt, Homo sapiens
  misc_RNA (1)...(19): siRNA sense strand
uaaaggaagaaucagaaga

SEQ ID NO: 738099 - RNA, 19 nt, Homo sapiens
  misc_RNA (1)...(19): siRNA sense strand
gucaauaccagaaaggauu

SEQ ID NO: 738100 - RNA, 19 nt, Homo sapiens
  misc_RNA (1)...(19): siRNA sense strand
gcauugcaguguaugaaac

SEQ ID NO: 738101 - RNA, 19 nt, Homo sapiens
  misc_RNA (1)...(19): siRNA sense strand
ggacgugcuuuugucaaua

SEQ ID NO: 738102 - RNA, 19 nt, Homo sapiens
  misc_RNA (1)...(19): siRNA sense strand
gggaaagcuuuaggcaaau

SEQ ID NO: 738103 - RNA, 19 nt, Homo sapiens
  misc_RNA (1)...(19): siRNA sense strand
ugaaggcacagaaauggaa

SEQ ID NO: 738104 - RNA, 19 nt, Homo sapiens
  misc_RNA (1)...(19): siRNA sense strand
ccagucggcugugguagug

SEQ ID NO: 738105 - RNA, 19 nt, Homo sapiens
  misc_RNA (1)...(19): siRNA sense strand
ucaauaccagaaaggauuu

SEQ ID NO: 738106 - RNA, 19 nt, Homo sapiens
  misc_RNA (1)...(19): siRNA sense strand
gaagauccugauuauuauc

SEQ ID NO: 738107 - RNA, 19 nt, Homo sapiens
  misc_RNA (1)...(19): siRNA sense strand
ggaagaaucagaagauccu

SEQ ID NO: 738108 - RNA, 19 nt, Homo sapiens
  misc_RNA (1)...(19): siRNA sense strand
guagaaauugaaacacuca

SEQ ID NO: 738109 - RNA, 19 nt, Homo sapiens
  misc_RNA (1)...(19): siRNA sense strand
uugcaacccugaaauggau

SEQ ID NO: 738110 - RNA, 19 nt, Homo sapiens
  misc_RNA (1)...(19): siRNA sense strand
gaucuugcaacccugaaau

SEQ ID NO: 738111 - RNA, 19 nt, Homo sapiens
  misc_RNA (1)...(19): siRNA sense strand
cccgagaacuaugaucuug

SEQ ID NO: 738112 - RNA, 19 nt, Homo sapiens
  misc_RNA (1)...(19): siRNA sense strand
ggcaaugaaggcacagaaa

SEQ ID NO: 738113 - RNA, 19 nt, Homo sapiens
  misc_RNA (1)...(19): siRNA sense strand
ugucagcucucgaguccau

SEQ ID NO: 738114 - RNA, 19 nt, Homo sapiens
  misc_RNA (1)...(19): siRNA sense strand
guagaugcuguagaaauug

SEQ ID NO: 738115 - RNA, 19 nt, Homo sapiens
  misc_RNA (1)...(19): siRNA sense strand
gaugaguguagaugcugua

SEQ ID NO: 738116 - RNA, 19 nt, Homo sapiens
  misc_RNA (1)...(19): siRNA sense strand
gggcaaugaaggcacagaa

SEQ ID NO: 738117 - RNA, 19 nt, Homo sapiens
  misc_RNA (1)...(19): siRNA sense strand
ucgaguccauguguaaaga

SEQ ID NO: 738118 - RNA, 19 nt, Homo sapiens
  misc_RNA (1)...(19): siRNA sense strand
guaaaggaagaaucagaag

SEQ ID NO: 738119 - RNA, 19 nt, Homo sapiens
  misc_RNA (1)...(19): siRNA sense strand
guccauguguaaagaacug

SEQ ID NO: 738120 - RNA, 19 nt, Homo sapiens
  misc_RNA (1)...(19): siRNA sense strand
gguggugacauuccucaug

SEQ ID NO: 738121 - RNA, 19 nt, Homo sapiens
  misc_RNA (1)...(19): siRNA sense strand
uguagguggucgugugaug

SEQ ID NO: 738122 - RNA, 19 nt, Homo sapiens
  misc_RNA (1)...(19): siRNA sense strand
guguagaugcuguagaaau

SEQ ID NO: 738123 - RNA, 19 nt, Homo sapiens
  misc_RNA (1)...(19): siRNA sense strand
aggcaaaucggaugagugu

SEQ ID NO: 738124 - RNA, 19 nt, Homo sapiens
  misc_RNA (1)...(19): siRNA sense strand
aguaaaggaagaaucagaa

SEQ ID NO: 738125 - RNA, 19 nt, Homo sapiens
  misc_RNA (1)...(19): siRNA sense strand
caguaaaggaagaaucaga

SEQ ID NO: 738126 - RNA, 19 nt, Homo sapiens
  misc_RNA (1)...(19): siRNA sense strand
gguggucgugugaugguaa

SEQ ID NO: 738127 - RNA, 19 nt, Homo sapiens
  misc_RNA (1)...(19): siRNA sense strand
gaugcuguagaaauugaaa

SEQ ID NO: 738128 - RNA, 19 nt, Homo sapiens
  misc_RNA (1)...(19): siRNA sense strand
ccaucaaagugaaaacuga

SEQ ID NO: 738129 - RNA, 19 nt, Homo sapiens
  misc_RNA (1)...(19): siRNA sense strand
gucgugugaugguaacaga

SEQ ID NO: 738130 - RNA, 19 nt, Homo sapiens
  misc_RNA (1)...(19): siRNA sense strand
cuacaacccaggcaaaucg

SEQ ID NO: 738131 - RNA, 19 nt, Homo sapiens
  misc_RNA (1)...(19): siRNA sense strand
uuaaacaccccgagaacua

SEQ ID NO: 738132 - RNA, 19 nt, Homo sapiens
  misc_RNA (1)...(19): siRNA sense strand
ccaggcaaaucggaugagu

SEQ ID NO: 738133 - RNA, 19 nt, Homo sapiens
  misc_RNA (1)...(19): siRNA sense strand
agaaauugaaacacucaga

SEQ ID NO: 738134 - RNA, 19 nt, Homo sapiens
  misc_RNA (1)...(19): siRNA sense strand
gaaaacugaacccacagaa

SEQ ID NO: 738135 - RNA, 19 nt, Homo sapiens
  misc_RNA (1)...(19): siRNA sense strand
gagccaaagaagcauguag

SEQ ID NO: 738136 - RNA, 19 nt, Homo sapiens
  misc_RNA (1)...(19): siRNA sense strand
cagaagauccugauuauua

SEQ ID NO: 738137 - RNA, 19 nt, Homo sapiens
  misc_RNA (1)...(19): siRNA sense strand
guaaagaacuggccaaguc

SEQ ID NO: 738138 - RNA, 19 nt, Homo sapiens
  misc_RNA (1)...(19): siRNA sense strand
gggauuucauucaucauua

SEQ ID NO: 738139 - RNA, 19 nt, Homo sapiens
  misc_RNA (1)...(19): siRNA sense strand
gaguguagaugcuguagaa

SEQ ID NO: 738140 - RNA, 19 nt, Homo sapiens
  misc_RNA (1)...(19): siRNA sense strand
ugggaaagcuuuaggcaaa

SEQ ID NO: 738141 - RNA, 19 nt, Homo sapiens
  misc_RNA (1)...(19): siRNA sense strand
gcaggaugguggugacauu

SEQ ID NO: 738142 - RNA, 19 nt, Homo sapiens
  misc_RNA (1)...(19): siRNA sense strand
gaaauugaaacacucagaa

SEQ ID NO: 738143 - RNA, 19 nt, Homo sapiens
  misc_RNA (1)...(19): siRNA sense strand
uguagaugcuguagaaauu

SEQ ID NO: 738144 - RNA, 19 nt, Homo sapiens
  misc_RNA (1)...(19): siRNA sense strand
ggaaauggcagcugugaca

SEQ ID NO: 738145 - RNA, 19 nt, Homo sapiens
  misc_RNA (1)...(19): siRNA sense strand
gcaaaucggaugaguguag

SEQ ID NO: 738146 - RNA, 19 nt, Homo sapiens
  misc_RNA (1)...(19): siRNA sense strand
aaacugaacccacagaaga

SEQ ID NO: 738147 - RNA, 19 nt, Homo sapiens
  misc_RNA (1)...(19): siRNA sense strand
ugaggacuauuucugcuuu

SEQ ID NO: 738148 - RNA, 19 nt, Homo sapiens
  misc_RNA (1)...(19): siRNA sense strand
gcaaugaaggcacagaaau

SEQ ID NO: 738149 - RNA, 19 nt, Homo sapiens
  misc_RNA (1)...(19): siRNA sense strand
caaggaagccaccauucuu

SEQ ID NO: 738150 - RNA, 19 nt, Homo sapiens
  misc_RNA (1)...(19): siRNA sense strand
ggaaagcuuuaggcaaauc

SEQ ID NO: 738151 - RNA, 19 nt, Homo sapiens
  misc_RNA (1)...(19): siRNA sense strand
aaacaguugaggacuauuu

SEQ ID NO: 738152 - RNA, 19 nt, Homo sapiens
  misc_RNA (1)...(19): siRNA sense strand
caaaucggaugaguguaga

SEQ ID NO: 738153 - RNA, 19 nt, Homo sapiens
  misc_RNA (1)...(19): siRNA sense strand
uagaugcuguagaaauuga

SEQ ID NO: 738154 - RNA, 19 nt, Homo sapiens
  misc_RNA (1)...(19): siRNA sense strand
caaugaaggcacagaaaug

SEQ ID NO: 738155 - RNA, 19 nt, Homo sapiens
  misc_RNA (1)...(19): siRNA sense strand
gacaguaaaggaagaauca

SEQ ID NO: 738156 - RNA, 19 nt, Homo sapiens
  misc_RNA (1)...(19): siRNA sense strand
gcucucgaguccaugugua

SEQ ID NO: 738157 - RNA, 19 nt, Homo sapiens
  misc_RNA (1)...(19): siRNA sense strand
cgagaacuaugaucuugca

SEQ ID NO: 738158 - RNA, 19 nt, Homo sapiens
  misc_RNA (1)...(19): siRNA sense strand
gcagagaugcauaaaauga

SEQ ID NO: 738159 - RNA, 19 nt, Homo sapiens
  misc_RNA (1)...(19): siRNA sense strand
gaacuggccaaguccaaag

SEQ ID NO: 738160 - RNA, 19 nt, Homo sapiens
  misc_RNA (1)...(19): siRNA sense strand
aaaggaagaaucagaagau

SEQ ID NO: 738161 - RNA, 19 nt, Homo sapiens
  misc_RNA (1)...(19): siRNA sense strand
uaaaggaagaaucagaaga

SEQ ID NO: 738162 - RNA, 19 nt, Homo sapiens
  misc_RNA (1)...(19): siRNA sense strand
gucaauaccagaaaggauu

SEQ ID NO: 738163 - RNA, 19 nt, Homo sapiens
  misc_RNA (1)...(19): siRNA sense strand
gcauugcaguguaugaaac

SEQ ID NO: 738164 - RNA, 19 nt, Homo sapiens
  misc_RNA (1)...(19): siRNA sense strand
ggacgugcuuuugucaaua

SEQ ID NO: 738165 - RNA, 19 nt, Homo sapiens
  misc_RNA (1)...(19): siRNA sense strand
gggaaagcuuuaggcaaau

SEQ ID NO: 738166 - RNA, 19 nt, Homo sapiens
  misc_RNA (1)...(19): siRNA sense strand
ugaaggcacagaaauggaa

SEQ ID NO: 738167 - RNA, 19 nt, Homo sapiens
  misc_RNA (1)...(19): siRNA sense strand
ccagucggcugugguagug

SEQ ID NO: 738168 - RNA, 19 nt, Homo sapiens
  misc_RNA (1)...(19): siRNA sense strand
ucaauaccagaaaggauuu

SEQ ID NO: 738169 - RNA, 19 nt, Homo sapiens
  misc_RNA (1)...(19): siRNA sense strand
gaagauccugauuauuauc

SEQ ID NO: 738170 - RNA, 19 nt, Homo sapiens
  misc_RNA (1)...(19): siRNA sense strand
ggaagaaucagaagauccu

SEQ ID NO: 738171 - RNA, 19 nt, Homo sapiens
  misc_RNA (1)...(19): siRNA sense strand
guagaaauugaaacacuca

SEQ ID NO: 738172 - RNA, 19 nt, Homo sapiens
  misc_RNA (1)...(19): siRNA sense strand
uugcaacccugaaauggau

SEQ ID NO: 738173 - RNA, 19 nt, Homo sapiens
  misc_RNA (1)...(19): siRNA sense strand
gaucuugcaacccugaaau

SEQ ID NO: 738174 - RNA, 19 nt, Homo sapiens
  misc_RNA (1)...(19): siRNA sense strand
cccgagaacuaugaucuug

SEQ ID NO: 738175 - RNA, 19 nt, Homo sapiens
  misc_RNA (1)...(19): siRNA sense strand
ggcaaugaaggcacagaaa

SEQ ID NO: 738176 - RNA, 19 nt, Homo sapiens
  misc_RNA (1)...(19): siRNA sense strand
ugucagcucucgaguccau

SEQ ID NO: 738177 - RNA, 19 nt, Homo sapiens
  misc_RNA (1)...(19): siRNA sense strand
guagaugcuguagaaauug

SEQ ID NO: 738178 - RNA, 19 nt, Homo sapiens
  misc_RNA (1)...(19): siRNA sense strand
gaugaguguagaugcugua

SEQ ID NO: 738179 - RNA, 19 nt, Homo sapiens
  misc_RNA (1)...(19): siRNA sense strand
gggcaaugaaggcacagaa

SEQ ID NO: 738180 - RNA, 19 nt, Homo sapiens
  misc_RNA (1)...(19): siRNA sense strand
ucgaguccauguguaaaga

SEQ ID NO: 738181 - RNA, 19 nt, Homo sapiens
  misc_RNA (1)...(19): siRNA sense strand
guaaaggaagaaucagaag

SEQ ID NO: 738182 - RNA, 19 nt, Homo sapiens
  misc_RNA (1)...(19): siRNA sense strand
guccauguguaaagaacug

SEQ ID NO: 738183 - RNA, 19 nt, Homo sapiens
  misc_RNA (1)...(19): siRNA sense strand
gguggugacauuccucaug

SEQ ID NO: 738184 - RNA, 19 nt, Homo sapiens
  misc_RNA (1)...(19): siRNA sense strand
uguagguggucgugugaug

SEQ ID NO: 738185 - RNA, 19 nt, Homo sapiens
  misc_RNA (1)...(19): siRNA sense strand
guguagaugcuguagaaau

SEQ ID NO: 738186 - RNA, 19 nt, Homo sapiens
  misc_RNA (1)...(19): siRNA sense strand
aggcaaaucggaugagugu

SEQ ID NO: 738187 - RNA, 19 nt, Homo sapiens
  misc_RNA (1)...(19): siRNA sense strand
aguaaaggaagaaucagaa

SEQ ID NO: 738188 - RNA, 19 nt, Homo sapiens
  misc_RNA (1)...(19): siRNA sense strand
caguaaaggaagaaucaga

SEQ ID NO: 738189 - RNA, 19 nt, Homo sapiens
  misc_RNA (1)...(19): siRNA sense strand
gguggucgugugaugguaa

SEQ ID NO: 738190 - RNA, 19 nt, Homo sapiens
  misc_RNA (1)...(19): siRNA sense strand
gaugcuguagaaauugaaa

SEQ ID NO: 738191 - RNA, 19 nt, Homo sapiens
  misc_RNA (1)...(19): siRNA sense strand
ccaucaaagugaaaacuga

SEQ ID NO: 738192 - RNA, 19 nt, Homo sapiens
  misc_RNA (1)...(19): siRNA sense strand
gucgugugaugguaacaga

SEQ ID NO: 738193 - RNA, 19 nt, Homo sapiens
  misc_RNA (1)...(19): siRNA sense strand
cuacaacccaggcaaaucg

SEQ ID NO: 738194 - RNA, 19 nt, Homo sapiens
  misc_RNA (1)...(19): siRNA sense strand
uuaaacaccccgagaacua

SEQ ID NO: 738195 - RNA, 19 nt, Homo sapiens
  misc_RNA (1)...(19): siRNA sense strand
ccaggcaaaucggaugagu

SEQ ID NO: 738196 - RNA, 19 nt, Homo sapiens
  misc_RNA (1)...(19): siRNA sense strand
agaaauugaaacacucaga

SEQ ID NO: 738197 - RNA, 19 nt, Homo sapiens
  misc_RNA (1)...(19): siRNA sense strand
gaaaacugaacccacagaa

SEQ ID NO: 738198 - RNA, 19 nt, Homo sapiens
  misc_RNA (1)...(19): siRNA sense strand
gagccaaagaagcauguag

SEQ ID NO: 738199 - RNA, 19 nt, Homo sapiens
  misc_RNA (1)...(19): siRNA sense strand
cagaagauccugauuauua

SEQ ID NO: 738200 - RNA, 19 nt, Homo sapiens
  misc_RNA (1)...(19): siRNA sense strand
guaaagaacuggccaaguc

SEQ ID NO: 738201 - RNA, 19 nt, Homo sapiens
  misc_RNA (1)...(19): siRNA sense strand
gggauuucauucaucauua

SEQ ID NO: 738202 - RNA, 19 nt, Homo sapiens
  misc_RNA (1)...(19): siRNA sense strand
gaguguagaugcuguagaa

SEQ ID NO: 738203 - RNA, 19 nt, Homo sapiens
  misc_RNA (1)...(19): siRNA sense strand
ugggaaagcuuuaggcaaa

SEQ ID NO: 738204 - RNA, 19 nt, Homo sapiens
  misc_RNA (1)...(19): siRNA sense strand
gcaggaugguggugacauu

SEQ ID NO: 738205 - RNA, 19 nt, Homo sapiens
  misc_RNA (1)...(19): siRNA sense strand
gaaauugaaacacucagaa

SEQ ID NO: 738206 - RNA, 19 nt, Homo sapiens
  misc_RNA (1)...(19): siRNA sense strand
uguagaugcuguagaaauu

SEQ ID NO: 738207 - RNA, 19 nt, Homo sapiens
  misc_RNA (1)...(19): siRNA sense strand
ggaaauggcagcugugaca

SEQ ID NO: 738208 - RNA, 19 nt, Homo sapiens
  misc_RNA (1)...(19): siRNA sense strand
gcaaaucggaugaguguag

SEQ ID NO: 738209 - RNA, 19 nt, Homo sapiens
  misc_RNA (1)...(19): siRNA sense strand
aaacugaacccacagaaga

SEQ ID NO: 738210 - RNA, 19 nt, Homo sapiens
  misc_RNA (1)...(19): siRNA sense strand
ugaggacuauuucugcuuu

SEQ ID NO: 738211 - RNA, 19 nt, Homo sapiens
  misc_RNA (1)...(19): siRNA sense strand
gcaaugaaggcacagaaau

SEQ ID NO: 738212 - RNA, 19 nt, Homo sapiens
  misc_RNA (1)...(19): siRNA sense strand
caaggaagccaccauucuu

SEQ ID NO: 738213 - RNA, 19 nt, Homo sapiens
  misc_RNA (1)...(19): siRNA sense strand
ggaaagcuuuaggcaaauc

SEQ ID NO: 738214 - RNA, 19 nt, Homo sapiens
  misc_RNA (1)...(19): siRNA sense strand
aaacaguugaggacuauuu

SEQ ID NO: 738215 - RNA, 19 nt, Homo sapiens
  misc_RNA (1)...(19): siRNA sense strand
caaaucggaugaguguaga

SEQ ID NO: 738216 - RNA, 19 nt, Homo sapiens
  misc_RNA (1)...(19): siRNA sense strand
uagaugcuguagaaauuga

SEQ ID NO: 738217 - RNA, 19 nt, Homo sapiens
  misc_RNA (1)...(19): siRNA sense strand
caaugaaggcacagaaaug

SEQ ID NO: 738218 - RNA, 19 nt, Homo sapiens
  misc_RNA (1)...(19): siRNA sense strand
gacaguaaaggaagaauca

SEQ ID NO: 738219 - RNA, 19 nt, Homo sapiens
  misc_RNA (1)...(19): siRNA sense strand
gcucucgaguccaugugua

SEQ ID NO: 738220 - RNA, 19 nt, Homo sapiens
  misc_RNA (1)...(19): siRNA sense strand
cgagaacuaugaucuugca

SEQ ID NO: 738221 - RNA, 19 nt, Homo sapiens
  misc_RNA (1)...(19): siRNA sense strand
gcagagaugcauaaaauga

SEQ ID NO: 738222 - RNA, 19 nt, Homo sapiens
  misc_RNA (1)...(19): siRNA sense strand
gaacuggccaaguccaaag

SEQ ID NO: 738223 - RNA, 19 nt, Homo sapiens
  misc_RNA (1)...(19): siRNA sense strand
aaaggaagaaucagaagau

SEQ ID NO: 738224 - RNA, 19 nt, Homo sapiens
  misc_RNA (1)...(19): siRNA sense strand
uaaaggaagaaucagaaga

SEQ ID NO: 738225 - RNA, 19 nt, Homo sapiens
  misc_RNA (1)...(19): siRNA sense strand
gucaauaccagaaaggauu

SEQ ID NO: 738226 - RNA, 19 nt, Homo sapiens
  misc_RNA (1)...(19): siRNA sense strand
gcauugcaguguaugaaac

SEQ ID NO: 738227 - RNA, 19 nt, Homo sapiens
  misc_RNA (1)...(19): siRNA sense strand
ggacgugcuuuugucaaua

SEQ ID NO: 738228 - RNA, 19 nt, Homo sapiens
  misc_RNA (1)...(19): siRNA sense strand
gggaaagcuuuaggcaaau

SEQ ID NO: 738229 - RNA, 19 nt, Homo sapiens
  misc_RNA (1)...(19): siRNA sense strand
ugaaggcacagaaauggaa

SEQ ID NO: 738230 - RNA, 19 nt, Homo sapiens
  misc_RNA (1)...(19): siRNA sense strand
ccagucggcugugguagug

SEQ ID NO: 738231 - RNA, 19 nt, Homo sapiens
  misc_RNA (1)...(19): siRNA sense strand
ucaauaccagaaaggauuu

SEQ ID NO: 738232 - RNA, 19 nt, Homo sapiens
  misc_RNA (1)...(19): siRNA sense strand
gaagauccugauuauuauc

SEQ ID NO: 738233 - RNA, 19 nt, Homo sapiens
  misc_RNA (1)...(19): siRNA sense strand
ggaagaaucagaagauccu

SEQ ID NO: 738234 - RNA, 19 nt, Homo sapiens
  misc_RNA (1)...(19): siRNA sense strand
guagaaauugaaacacuca

SEQ ID NO: 738235 - RNA, 19 nt, Homo sapiens
  misc_RNA (1)...(19): siRNA sense strand
uugcaacccugaaauggau

SEQ ID NO: 738236 - RNA, 19 nt, Homo sapiens
  misc_RNA (1)...(19): siRNA sense strand
gaucuugcaacccugaaau

SEQ ID NO: 738237 - RNA, 19 nt, Homo sapiens
  misc_RNA (1)...(19): siRNA sense strand
cccgagaacuaugaucuug

SEQ ID NO: 738238 - RNA, 19 nt, Homo sapiens
  misc_RNA (1)...(19): siRNA sense strand
ggcaaugaaggcacagaaa

SEQ ID NO: 738239 - RNA, 19 nt, Homo sapiens
  misc_RNA (1)...(19): siRNA sense strand
ugucagcucucgaguccau

SEQ ID NO: 738240 - RNA, 19 nt, Homo sapiens
  misc_RNA (1)...(19): siRNA sense strand
guagaugcuguagaaauug

SEQ ID NO: 738241 - RNA, 19 nt, Homo sapiens
  misc_RNA (1)...(19): siRNA sense strand
gaugaguguagaugcugua

SEQ ID NO: 738242 - RNA, 19 nt, Homo sapiens
  misc_RNA (1)...(19): siRNA sense strand
gggcaaugaaggcacagaa

SEQ ID NO: 738243 - RNA, 19 nt, Homo sapiens
  misc_RNA (1)...(19): siRNA sense strand
ucgaguccauguguaaaga

SEQ ID NO: 738244 - RNA, 19 nt, Homo sapiens
  misc_RNA (1)...(19): siRNA sense strand
guaaaggaagaaucagaag

SEQ ID NO: 738245 - RNA, 19 nt, Homo sapiens
  misc_RNA (1)...(19): siRNA sense strand
guccauguguaaagaacug

SEQ ID NO: 738246 - RNA, 19 nt, Homo sapiens
  misc_RNA (1)...(19): siRNA sense strand
gguggugacauuccucaug

SEQ ID NO: 738247 - RNA, 19 nt, Homo sapiens
  misc_RNA (1)...(19): siRNA sense strand
uguagguggucgugugaug

SEQ ID NO: 738248 - RNA, 19 nt, Homo sapiens
  misc_RNA (1)...(19): siRNA sense strand
guguagaugcuguagaaau

SEQ ID NO: 738249 - RNA, 19 nt, Homo sapiens
  misc_RNA (1)...(19): siRNA sense strand
aggcaaaucggaugagugu

SEQ ID NO: 738250 - RNA, 19 nt, Homo sapiens
  misc_RNA (1)...(19): siRNA sense strand
aguaaaggaagaaucagaa

SEQ ID NO: 738251 - RNA, 19 nt, Homo sapiens
  misc_RNA (1)...(19): siRNA sense strand
caguaaaggaagaaucaga

SEQ ID NO: 738252 - RNA, 19 nt, Homo sapiens
  misc_RNA (1)...(19): siRNA sense strand
gguggucgugugaugguaa

SEQ ID NO: 738253 - RNA, 19 nt, Homo sapiens
  misc_RNA (1)...(19): siRNA sense strand
gaugcuguagaaauugaaa

SEQ ID NO: 738254 - RNA, 19 nt, Homo sapiens
  misc_RNA (1)...(19): siRNA sense strand
ccaucaaagugaaaacuga

SEQ ID NO: 738255 - RNA, 19 nt, Homo sapiens
  misc_RNA (1)...(19): siRNA sense strand
gucgugugaugguaacaga

SEQ ID NO: 738256 - RNA, 19 nt, Homo sapiens
  misc_RNA (1)...(19): siRNA sense strand
cuacaacccaggcaaaucg

SEQ ID NO: 738257 - RNA, 19 nt, Homo sapiens
  misc_RNA (1)...(19): siRNA sense strand
uuaaacaccccgagaacua

SEQ ID NO: 738258 - RNA, 19 nt, Homo sapiens
  misc_RNA (1)...(19): siRNA sense strand
ccaggcaaaucggaugagu

SEQ ID NO: 738259 - RNA, 19 nt, Homo sapiens
  misc_RNA (1)...(19): siRNA sense strand
agaaauugaaacacucaga

SEQ ID NO: 738260 - RNA, 19 nt, Homo sapiens
  misc_RNA (1)...(19): siRNA sense strand
gaaaacugaacccacagaa

SEQ ID NO: 738261 - RNA, 19 nt, Homo sapiens
  misc_RNA (1)...(19): siRNA sense strand
gagccaaagaagcauguag

SEQ ID NO: 738262 - RNA, 19 nt, Homo sapiens
  misc_RNA (1)...(19): siRNA sense strand
cagaagauccugauuauua

SEQ ID NO: 738263 - RNA, 19 nt, Homo sapiens
  misc_RNA (1)...(19): siRNA sense strand
guaaagaacuggccaaguc

SEQ ID NO: 738264 - RNA, 19 nt, Homo sapiens
  misc_RNA (1)...(19): siRNA sense strand
gggauuucauucaucauua

SEQ ID NO: 738265 - RNA, 19 nt, Homo sapiens
  misc_RNA (1)...(19): siRNA sense strand
gaguguagaugcuguagaa

SEQ ID NO: 738266 - RNA, 19 nt, Homo sapiens
  misc_RNA (1)...(19): siRNA sense strand
ugggaaagcuuuaggcaaa

SEQ ID NO: 738267 - RNA, 19 nt, Homo sapiens
  misc_RNA (1)...(19): siRNA sense strand
gcaggaugguggugacauu

SEQ ID NO: 738268 - RNA, 19 nt, Homo sapiens
  misc_RNA (1)...(19): siRNA sense strand
gaaauugaaacacucagaa

SEQ ID NO: 738269 - RNA, 19 nt, Homo sapiens
  misc_RNA (1)...(19): siRNA sense strand
uguagaugcuguagaaauu

SEQ ID NO: 738270 - RNA, 19 nt, Homo sapiens
  misc_RNA (1)...(19): siRNA sense strand
ggaaauggcagcugugaca

SEQ ID NO: 738271 - RNA, 19 nt, Homo sapiens
  misc_RNA (1)...(19): siRNA sense strand
gcaaaucggaugaguguag

SEQ ID NO: 738272 - RNA, 19 nt, Homo sapiens
  misc_RNA (1)...(19): siRNA sense strand
aaacugaacccacagaaga

SEQ ID NO: 738273 - RNA, 19 nt, Homo sapiens
  misc_RNA (1)...(19): siRNA sense strand
ugaggacuauuucugcuuu

SEQ ID NO: 738274 - RNA, 19 nt, Homo sapiens
  misc_RNA (1)...(19): siRNA sense strand
gcaaugaaggcacagaaau

SEQ ID NO: 738275 - RNA, 19 nt, Homo sapiens
  misc_RNA (1)...(19): siRNA sense strand
caaggaagccaccauucuu

SEQ ID NO: 738276 - RNA, 19 nt, Homo sapiens
  misc_RNA (1)...(19): siRNA sense strand
ggaaagcuuuaggcaaauc

SEQ ID NO: 738277 - RNA, 19 nt, Homo sapiens
  misc_RNA (1)...(19): siRNA sense strand
aaacaguugaggacuauuu

SEQ ID NO: 738278 - RNA, 19 nt, Homo sapiens
  misc_RNA (1)...(19): siRNA sense strand
caaaucggaugaguguaga

SEQ ID NO: 738279 - RNA, 19 nt, Homo sapiens
  misc_RNA (1)...(19): siRNA sense strand
uagaugcuguagaaauuga

SEQ ID NO: 738280 - RNA, 19 nt, Homo sapiens
  misc_RNA (1)...(19): siRNA sense strand
caaugaaggcacagaaaug

SEQ ID NO: 738281 - RNA, 19 nt, Homo sapiens
  misc_RNA (1)...(19): siRNA sense strand
gacaguaaaggaagaauca

SEQ ID NO: 738282 - RNA, 19 nt, Homo sapiens
  misc_RNA (1)...(19): siRNA sense strand
gcucucgaguccaugugua

SEQ ID NO: 738283 - RNA, 19 nt, Homo sapiens
  misc_RNA (1)...(19): siRNA sense strand
cgagaacuaugaucuugca

SEQ ID NO: 738284 - RNA, 19 nt, Homo sapiens
  misc_RNA (1)...(19): siRNA sense strand
gcagagaugcauaaaauga

SEQ ID NO: 738285 - RNA, 19 nt, Homo sapiens
  misc_RNA (1)...(19): siRNA sense strand
gaacuggccaaguccaaag

SEQ ID NO: 738286 - RNA, 19 nt, Homo sapiens
  misc_RNA (1)...(19): siRNA sense strand
aaaggaagaaucagaagau

SEQ ID NO: 738287 - RNA, 19 nt, Homo sapiens
  misc_RNA (1)...(19): siRNA sense strand
uaaaggaagaaucagaaga

SEQ ID NO: 738288 - RNA, 19 nt, Homo sapiens
  misc_RNA (1)...(19): siRNA sense strand
gucaauaccagaaaggauu

SEQ ID NO: 738289 - RNA, 19 nt, Homo sapiens
  misc_RNA (1)...(19): siRNA sense strand
gcauugcaguguaugaaac

SEQ ID NO: 738290 - RNA, 19 nt, Homo sapiens
  misc_RNA (1)...(19): siRNA sense strand
ggacgugcuuuugucaaua

SEQ ID NO: 738291 - RNA, 19 nt, Homo sapiens
  misc_RNA (1)...(19): siRNA sense strand
gggaaagcuuuaggcaaau

SEQ ID NO: 738292 - RNA, 19 nt, Homo sapiens
  misc_RNA (1)...(19): siRNA sense strand
ugaaggcacagaaauggaa

SEQ ID NO: 738293 - RNA, 19 nt, Homo sapiens
  misc_RNA (1)...(19): siRNA sense strand
ccagucggcugugguagug

SEQ ID NO: 738294 - RNA, 19 nt, Homo sapiens
  misc_RNA (1)...(19): siRNA sense strand
ucaauaccagaaaggauuu

SEQ ID NO: 738295 - RNA, 19 nt, Homo sapiens
  misc_RNA (1)...(19): siRNA sense strand
gaagauccugauuauuauc

SEQ ID NO: 738296 - RNA, 19 nt, Homo sapiens
  misc_RNA (1)...(19): siRNA sense strand
ggaagaaucagaagauccu

SEQ ID NO: 738297 - RNA, 19 nt, Homo sapiens
  misc_RNA (1)...(19): siRNA sense strand
guagaaauugaaacacuca

SEQ ID NO: 738298 - RNA, 19 nt, Homo sapiens
  misc_RNA (1)...(19): siRNA sense strand
uugcaacccugaaauggau

SEQ ID NO: 738299 - RNA, 19 nt, Homo sapiens
  misc_RNA (1)...(19): siRNA sense strand
gaucuugcaacccugaaau

SEQ ID NO: 738300 - RNA, 19 nt, Homo sapiens
  misc_RNA (1)...(19): siRNA sense strand
cccgagaacuaugaucuug

SEQ ID NO: 738301 - RNA, 19 nt, Homo sapiens
  misc_RNA (1)...(19): siRNA sense strand
ggcaaugaaggcacagaaa

SEQ ID NO: 738302 - RNA, 19 nt, Homo sapiens
  misc_RNA (1)...(19): siRNA sense strand
ugucagcucucgaguccau

SEQ ID NO: 738303 - RNA, 19 nt, Homo sapiens
  misc_RNA (1)...(19): siRNA sense strand
guagaugcuguagaaauug

SEQ ID NO: 738304 - RNA, 19 nt, Homo sapiens
  misc_RNA (1)...(19): siRNA sense strand
gaugaguguagaugcugua

SEQ ID NO: 738305 - RNA, 19 nt, Homo sapiens
  misc_RNA (1)...(19): siRNA sense strand
gggcaaugaaggcacagaa

SEQ ID NO: 738306 - RNA, 19 nt, Homo sapiens
  misc_RNA (1)...(19): siRNA sense strand
ucgaguccauguguaaaga

SEQ ID NO: 738307 - RNA, 19 nt, Homo sapiens
  misc_RNA (1)...(19): siRNA sense strand
guaaaggaagaaucagaag

SEQ ID NO: 738308 - RNA, 19 nt, Homo sapiens
  misc_RNA (1)...(19): siRNA sense strand
guccauguguaaagaacug

SEQ ID NO: 738309 - RNA, 19 nt, Homo sapiens
  misc_RNA (1)...(19): siRNA sense strand
gguggugacauuccucaug

SEQ ID NO: 738310 - RNA, 19 nt, Homo sapiens
  misc_RNA (1)...(19): siRNA sense strand
uguagguggucgugugaug

SEQ ID NO: 738311 - RNA, 19 nt, Homo sapiens
  misc_RNA (1)...(19): siRNA sense strand
guguagaugcuguagaaau

SEQ ID NO: 738312 - RNA, 19 nt, Homo sapiens
  misc_RNA (1)...(19): siRNA sense strand
aggcaaaucggaugagugu

SEQ ID NO: 738313 - RNA, 19 nt, Homo sapiens
  misc_RNA (1)...(19): siRNA sense strand
aguaaaggaagaaucagaa

SEQ ID NO: 738314 - RNA, 19 nt, Homo sapiens
  misc_RNA (1)...(19): siRNA sense strand
caguaaaggaagaaucaga

SEQ ID NO: 738315 - RNA, 19 nt, Homo sapiens
  misc_RNA (1)...(19): siRNA sense strand
gguggucgugugaugguaa

SEQ ID NO: 738316 - RNA, 19 nt, Homo sapiens
  misc_RNA (1)...(19): siRNA sense strand
gaugcuguagaaauugaaa

SEQ ID NO: 738317 - RNA, 19 nt, Homo sapiens
  misc_RNA (1)...(19): siRNA sense strand
ccaucaaagugaaaacuga

SEQ ID NO: 738318 - RNA, 19 nt, Homo sapiens
  misc_RNA (1)...(19): siRNA sense strand
gucgugugaugguaacaga

SEQ ID NO: 738319 - RNA, 19 nt, Homo sapiens
  misc_RNA (1)...(19): siRNA sense strand
cuacaacccaggcaaaucg

SEQ ID NO: 738320 - RNA, 19 nt, Homo sapiens
  misc_RNA (1)...(19): siRNA sense strand
uuaaacaccccgagaacua

SEQ ID NO: 738321 - RNA, 19 nt, Homo sapiens
  misc_RNA (1)...(19): siRNA sense strand
ccaggcaaaucggaugagu

SEQ ID NO: 738322 - RNA, 19 nt, Homo sapiens
  misc_RNA (1)...(19): siRNA sense strand
agaaauugaaacacucaga

SEQ ID NO: 738323 - RNA, 19 nt, Homo sapiens
  misc_RNA (1)...(19): siRNA sense strand
gaaaacugaacccacagaa

SEQ ID NO: 738324 - RNA, 19 nt, Homo sapiens
  misc_RNA (1)...(19): siRNA sense strand
gagccaaagaagcauguag

SEQ ID NO: 738325 - RNA, 19 nt, Homo sapiens
  misc_RNA (1)...(19): siRNA sense strand
cagaagauccugauuauua

SEQ ID NO: 738326 - RNA, 19 nt, Homo sapiens
  misc_RNA (1)...(19): siRNA sense strand
guaaagaacuggccaaguc

SEQ ID NO: 738327 - RNA, 19 nt, Homo sapiens
  misc_RNA (1)...(19): siRNA sense strand
gggauuucauucaucauua

SEQ ID NO: 738328 - RNA, 19 nt, Homo sapiens
  misc_RNA (1)...(19): siRNA sense strand
gaguguagaugcuguagaa

SEQ ID NO: 738329 - RNA, 19 nt, Homo sapiens
  misc_RNA (1)...(19): siRNA sense strand
ugggaaagcuuuaggcaaa

SEQ ID NO: 738330 - RNA, 19 nt, Homo sapiens
  misc_RNA (1)...(19): siRNA sense strand
gcaggaugguggugacauu

SEQ ID NO: 738331 - RNA, 19 nt, Homo sapiens
  misc_RNA (1)...(19): siRNA sense strand
gaaauugaaacacucagaa

SEQ ID NO: 738332 - RNA, 19 nt, Homo sapiens
  misc_RNA (1)...(19): siRNA sense strand
uguagaugcuguagaaauu

SEQ ID NO: 738333 - RNA, 19 nt, Homo sapiens
  misc_RNA (1)...(19): siRNA sense strand
ggaaauggcagcugugaca

SEQ ID NO: 738334 - RNA, 19 nt, Homo sapiens
  misc_RNA (1)...(19): siRNA sense strand
gcaaaucggaugaguguag

SEQ ID NO: 738335 - RNA, 19 nt, Homo sapiens
  misc_RNA (1)...(19): siRNA sense strand
aaacugaacccacagaaga

SEQ ID NO: 738336 - RNA, 19 nt, Homo sapiens
  misc_RNA (1)...(19): siRNA sense strand
ugaggacuauuucugcuuu

SEQ ID NO: 738337 - RNA, 19 nt, Homo sapiens
  misc_RNA (1)...(19): siRNA sense strand
gcaaugaaggcacagaaau

SEQ ID NO: 738338 - RNA, 19 nt, Homo sapiens
  misc_RNA (1)...(19): siRNA sense strand
caaggaagccaccauucuu

SEQ ID NO: 738339 - RNA, 19 nt, Homo sapiens
  misc_RNA (1)...(19): siRNA sense strand
ggaaagcuuuaggcaaauc

SEQ ID NO: 738340 - RNA, 19 nt, Homo sapiens
  misc_RNA (1)...(19): siRNA sense strand
aaacaguugaggacuauuu

SEQ ID NO: 738341 - RNA, 19 nt, Homo sapiens
  misc_RNA (1)...(19): siRNA sense strand
caaaucggaugaguguaga

SEQ ID NO: 738342 - RNA, 19 nt, Homo sapiens
  misc_RNA (1)...(19): siRNA sense strand
uagaugcuguagaaauuga

SEQ ID NO: 738343 - RNA, 19 nt, Homo sapiens
  misc_RNA (1)...(19): siRNA sense strand
caaugaaggcacagaaaug

SEQ ID NO: 738344 - RNA, 19 nt, Homo sapiens
  misc_RNA (1)...(19): siRNA sense strand
gacaguaaaggaagaauca

SEQ ID NO: 738345 - RNA, 19 nt, Homo sapiens
  misc_RNA (1)...(19): siRNA sense strand
gcucucgaguccaugugua

SEQ ID NO: 738346 - RNA, 19 nt, Homo sapiens
  misc_RNA (1)...(19): siRNA sense strand
cgagaacuaugaucuugca

SEQ ID NO: 738347 - RNA, 19 nt, Homo sapiens
  misc_RNA (1)...(19): siRNA sense strand
gcagagaugcauaaaauga

SEQ ID NO: 738348 - RNA, 19 nt, Homo sapiens
  misc_RNA (1)...(19): siRNA sense strand
gaacuggccaaguccaaag

SEQ ID NO: 738349 - RNA, 19 nt, Homo sapiens
  misc_RNA (1)...(19): siRNA sense strand
aaaggaagaaucagaagau

SEQ ID NO: 738350 - RNA, 19 nt, Homo sapiens
  misc_RNA (1)...(19): siRNA sense strand
uaaaggaagaaucagaaga

SEQ ID NO: 738351 - RNA, 19 nt, Homo sapiens
  misc_RNA (1)...(19): siRNA sense strand
gucaauaccagaaaggauu

SEQ ID NO: 738352 - RNA, 19 nt, Homo sapiens
  misc_RNA (1)...(19): siRNA sense strand
gcauugcaguguaugaaac

SEQ ID NO: 738353 - RNA, 19 nt, Homo sapiens
  misc_RNA (1)...(19): siRNA sense strand
ggacgugcuuuugucaaua

SEQ ID NO: 738354 - RNA, 19 nt, Homo sapiens
  misc_RNA (1)...(19): siRNA sense strand
gggaaagcuuuaggcaaau

SEQ ID NO: 738355 - RNA, 19 nt, Homo sapiens
  misc_RNA (1)...(19): siRNA sense strand
ugaaggcacagaaauggaa

SEQ ID NO: 738356 - RNA, 19 nt, Homo sapiens
  misc_RNA (1)...(19): siRNA sense strand
ccagucggcugugguagug

SEQ ID NO: 738357 - RNA, 19 nt, Homo sapiens
  misc_RNA (1)...(19): siRNA sense strand
ucaauaccagaaaggauuu

SEQ ID NO: 738358 - RNA, 19 nt, Homo sapiens
  misc_RNA (1)...(19): siRNA sense strand
gaagauccugauuauuauc

SEQ ID NO: 738359 - RNA, 19 nt, Homo sapiens
  misc_RNA (1)...(19): siRNA sense strand
ggaagaaucagaagauccu

SEQ ID NO: 738360 - RNA, 19 nt, Homo sapiens
  misc_RNA (1)...(19): siRNA sense strand
guagaaauugaaacacuca

SEQ ID NO: 738361 - RNA, 19 nt, Homo sapiens
  misc_RNA (1)...(19): siRNA sense strand
uugcaacccugaaauggau

SEQ ID NO: 738362 - RNA, 19 nt, Homo sapiens
  misc_RNA (1)...(19): siRNA sense strand
gaucuugcaacccugaaau

SEQ ID NO: 738363 - RNA, 19 nt, Homo sapiens
  misc_RNA (1)...(19): siRNA sense strand
cccgagaacuaugaucuug

SEQ ID NO: 738364 - RNA, 19 nt, Homo sapiens
  misc_RNA (1)...(19): siRNA sense strand
ggcaaugaaggcacagaaa

SEQ ID NO: 738365 - RNA, 19 nt, Homo sapiens
  misc_RNA (1)...(19): siRNA sense strand
ugucagcucucgaguccau

SEQ ID NO: 738366 - RNA, 19 nt, Homo sapiens
  misc_RNA (1)...(19): siRNA sense strand
guagaugcuguagaaauug

SEQ ID NO: 738367 - RNA, 19 nt, Homo sapiens
  misc_RNA (1)...(19): siRNA sense strand
gaugaguguagaugcugua

SEQ ID NO: 738368 - RNA, 19 nt, Homo sapiens
  misc_RNA (1)...(19): siRNA sense strand
gggcaaugaaggcacagaa

SEQ ID NO: 738369 - RNA, 19 nt, Homo sapiens
  misc_RNA (1)...(19): siRNA sense strand
ucgaguccauguguaaaga

SEQ ID NO: 738370 - RNA, 19 nt, Homo sapiens
  misc_RNA (1)...(19): siRNA sense strand
guaaaggaagaaucagaag

SEQ ID NO: 738371 - RNA, 19 nt, Homo sapiens
  misc_RNA (1)...(19): siRNA sense strand
guccauguguaaagaacug

SEQ ID NO: 738372 - RNA, 19 nt, Homo sapiens
  misc_RNA (1)...(19): siRNA sense strand
gguggugacauuccucaug

SEQ ID NO: 738373 - RNA, 19 nt, Homo sapiens
  misc_RNA (1)...(19): siRNA sense strand
uguagguggucgugugaug

SEQ ID NO: 738374 - RNA, 19 nt, Homo sapiens
  misc_RNA (1)...(19): siRNA sense strand
guguagaugcuguagaaau

SEQ ID NO: 738375 - RNA, 19 nt, Homo sapiens
  misc_RNA (1)...(19): siRNA sense strand
aggcaaaucggaugagugu

SEQ ID NO: 738376 - RNA, 19 nt, Homo sapiens
  misc_RNA (1)...(19): siRNA sense strand
aguaaaggaagaaucagaa

SEQ ID NO: 738377 - RNA, 19 nt, Homo sapiens
  misc_RNA (1)...(19): siRNA sense strand
caguaaaggaagaaucaga

SEQ ID NO: 738378 - RNA, 19 nt, Homo sapiens
  misc_RNA (1)...(19): siRNA sense strand
gguggucgugugaugguaa

SEQ ID NO: 738379 - RNA, 19 nt, Homo sapiens
  misc_RNA (1)...(19): siRNA sense strand
gaugcuguagaaauugaaa

SEQ ID NO: 738380 - RNA, 19 nt, Homo sapiens
  misc_RNA (1)...(19): siRNA sense strand
ccaucaaagugaaaacuga

SEQ ID NO: 738381 - RNA, 19 nt, Homo sapiens
  misc_RNA (1)...(19): siRNA sense strand
gucgugugaugguaacaga

SEQ ID NO: 738382 - RNA, 19 nt, Homo sapiens
  misc_RNA (1)...(19): siRNA sense strand
cuacaacccaggcaaaucg

SEQ ID NO: 738383 - RNA, 19 nt, Homo sapiens
  misc_RNA (1)...(19): siRNA sense strand
uuaaacaccccgagaacua

SEQ ID NO: 738384 - RNA, 19 nt, Homo sapiens
  misc_RNA (1)...(19): siRNA sense strand
ccaggcaaaucggaugagu

SEQ ID NO: 738385 - RNA, 19 nt, Homo sapiens
  misc_RNA (1)...(19): siRNA sense strand
agaaauugaaacacucaga

SEQ ID NO: 738386 - RNA, 19 nt, Homo sapiens
  misc_RNA (1)...(19): siRNA sense strand
gaaaacugaacccacagaa

SEQ ID NO: 738387 - RNA, 19 nt, Homo sapiens
  misc_RNA (1)...(19): siRNA sense strand
gagccaaagaagcauguag

SEQ ID NO: 738388 - RNA, 19 nt, Homo sapiens
  misc_RNA (1)...(19): siRNA sense strand
cagaagauccugauuauua

SEQ ID NO: 738389 - RNA, 19 nt, Homo sapiens
  misc_RNA (1)...(19): siRNA sense strand
guaaagaacuggccaaguc

SEQ ID NO: 738390 - RNA, 19 nt, Homo sapiens
  misc_RNA (1)...(19): siRNA sense strand
gggauuucauucaucauua

SEQ ID NO: 738391 - RNA, 19 nt, Homo sapiens
  misc_RNA (1)...(19): siRNA sense strand
gaguguagaugcuguagaa

SEQ ID NO: 738392 - RNA, 19 nt, Homo sapiens
  misc_RNA (1)...(19): siRNA sense strand
ugggaaagcuuuaggcaaa

SEQ ID NO: 738393 - RNA, 19 nt, Homo sapiens
  misc_RNA (1)...(19): siRNA sense strand
gcaggaugguggugacauu

SEQ ID NO: 738394 - RNA, 19 nt, Homo sapiens
  misc_RNA (1)...(19): siRNA sense strand
gaaauugaaacacucagaa

SEQ ID NO: 738395 - RNA, 19 nt, Homo sapiens
  misc_RNA (1)...(19): siRNA sense strand
uguagaugcuguagaaauu

SEQ ID NO: 738396 - RNA, 19 nt, Homo sapiens
  misc_RNA (1)...(19): siRNA sense strand
ggaaauggcagcugugaca

SEQ ID NO: 738397 - RNA, 19 nt, Homo sapiens
  misc_RNA (1)...(19): siRNA sense strand
gcaaaucggaugaguguag

SEQ ID NO: 738398 - RNA, 19 nt, Homo sapiens
  misc_RNA (1)...(19): siRNA sense strand
aaacugaacccacagaaga

SEQ ID NO: 738399 - RNA, 19 nt, Homo sapiens
  misc_RNA (1)...(19): siRNA sense strand
ugaggacuauuucugcuuu

SEQ ID NO: 738400 - RNA, 19 nt, Homo sapiens
  misc_RNA (1)...(19): siRNA sense strand
gcaaugaaggcacagaaau

SEQ ID NO: 738401 - RNA, 19 nt, Homo sapiens
  misc_RNA (1)...(19): siRNA sense strand
caaggaagccaccauucuu

SEQ ID NO: 738402 - RNA, 19 nt, Homo sapiens
  misc_RNA (1)...(19): siRNA sense strand
ggaaagcuuuaggcaaauc

SEQ ID NO: 738403 - RNA, 19 nt, Homo sapiens
  misc_RNA (1)...(19): siRNA sense strand
aaacaguugaggacuauuu

SEQ ID NO: 738404 - RNA, 19 nt, Homo sapiens
  misc_RNA (1)...(19): siRNA sense strand
caaaucggaugaguguaga

SEQ ID NO: 738405 - RNA, 19 nt, Homo sapiens
  misc_RNA (1)...(19): siRNA sense strand
uagaugcuguagaaauuga

SEQ ID NO: 738406 - RNA, 19 nt, Homo sapiens
  misc_RNA (1)...(19): siRNA sense strand
caaugaaggcacagaaaug

SEQ ID NO: 738407 - RNA, 19 nt, Homo sapiens
  misc_RNA (1)...(19): siRNA sense strand
gacaguaaaggaagaauca

SEQ ID NO: 738408 - RNA, 19 nt, Homo sapiens
  misc_RNA (1)...(19): siRNA sense strand
gcucucgaguccaugugua

SEQ ID NO: 738409 - RNA, 19 nt, Homo sapiens
  misc_RNA (1)...(19): siRNA sense strand
cgagaacuaugaucuugca

SEQ ID NO: 738410 - RNA, 19 nt, Homo sapiens
  misc_RNA (1)...(19): siRNA sense strand
gcagagaugcauaaaauga

SEQ ID NO: 738411 - RNA, 19 nt, Homo sapiens
  misc_RNA (1)...(19): siRNA sense strand
gaacuggccaaguccaaag

SEQ ID NO: 738412 - RNA, 19 nt, Homo sapiens
  misc_RNA (1)...(19): siRNA sense strand
aaaggaagaaucagaagau

SEQ ID NO: 738413 - RNA, 19 nt, Homo sapiens
  misc_RNA (1)...(19): siRNA sense strand
uaaaggaagaaucagaaga

SEQ ID NO: 738414 - RNA, 19 nt, Homo sapiens
  misc_RNA (1)...(19): siRNA sense strand
gucaauaccagaaaggauu

SEQ ID NO: 738415 - RNA, 19 nt, Homo sapiens
  misc_RNA (1)...(19): siRNA sense strand
gcauugcaguguaugaaac

SEQ ID NO: 738416 - RNA, 19 nt, Homo sapiens
  misc_RNA (1)...(19): siRNA sense strand
ggacgugcuuuugucaaua

SEQ ID NO: 738417 - RNA, 19 nt, Homo sapiens
  misc_RNA (1)...(19): siRNA sense strand
gggaaagcuuuaggcaaau

SEQ ID NO: 738418 - RNA, 19 nt, Homo sapiens
  misc_RNA (1)...(19): siRNA sense strand
ugaaggcacagaaauggaa

SEQ ID NO: 738419 - RNA, 19 nt, Homo sapiens
  misc_RNA (1)...(19): siRNA sense strand
ccagucggcugugguagug

SEQ ID NO: 738420 - RNA, 19 nt, Homo sapiens
  misc_RNA (1)...(19): siRNA sense strand
ucaauaccagaaaggauuu

SEQ ID NO: 738421 - RNA, 19 nt, Homo sapiens
  misc_RNA (1)...(19): siRNA sense strand
gaagauccugauuauuauc

SEQ ID NO: 738422 - RNA, 19 nt, Homo sapiens
  misc_RNA (1)...(19): siRNA sense strand
ggaagaaucagaagauccu

SEQ ID NO: 738423 - RNA, 19 nt, Homo sapiens
  misc_RNA (1)...(19): siRNA sense strand
guagaaauugaaacacuca

SEQ ID NO: 738424 - RNA, 19 nt, Homo sapiens
  misc_RNA (1)...(19): siRNA sense strand
uugcaacccugaaauggau

SEQ ID NO: 738425 - RNA, 19 nt, Homo sapiens
  misc_RNA (1)...(19): siRNA sense strand
gaucuugcaacccugaaau

SEQ ID NO: 738426 - RNA, 19 nt, Homo sapiens
  misc_RNA (1)...(19): siRNA sense strand
cccgagaacuaugaucuug

SEQ ID NO: 738427 - RNA, 19 nt, Homo sapiens
  misc_RNA (1)...(19): siRNA sense strand
ggcaaugaaggcacagaaa

SEQ ID NO: 738428 - RNA, 19 nt, Homo sapiens
  misc_RNA (1)...(19): siRNA sense strand
ugucagcucucgaguccau

SEQ ID NO: 738429 - RNA, 19 nt, Homo sapiens
  misc_RNA (1)...(19): siRNA sense strand
guagaugcuguagaaauug

SEQ ID NO: 738430 - RNA, 19 nt, Homo sapiens
  misc_RNA (1)...(19): siRNA sense strand
gaugaguguagaugcugua

SEQ ID NO: 738431 - RNA, 19 nt, Homo sapiens
  misc_RNA (1)...(19): siRNA sense strand
gggcaaugaaggcacagaa

SEQ ID NO: 738432 - RNA, 19 nt, Homo sapiens
  misc_RNA (1)...(19): siRNA sense strand
ucgaguccauguguaaaga

SEQ ID NO: 738433 - RNA, 19 nt, Homo sapiens
  misc_RNA (1)...(19): siRNA sense strand
guaaaggaagaaucagaag

SEQ ID NO: 738434 - RNA, 19 nt, Homo sapiens
  misc_RNA (1)...(19): siRNA sense strand
guccauguguaaagaacug

SEQ ID NO: 738435 - RNA, 19 nt, Homo sapiens
  misc_RNA (1)...(19): siRNA sense strand
gguggugacauuccucaug

SEQ ID NO: 738436 - RNA, 19 nt, Homo sapiens
  misc_RNA (1)...(19): siRNA sense strand
uguagguggucgugugaug

SEQ ID NO: 738437 - RNA, 19 nt, Homo sapiens
  misc_RNA (1)...(19): siRNA sense strand
guguagaugcuguagaaau

SEQ ID NO: 738438 - RNA, 19 nt, Homo sapiens
  misc_RNA (1)...(19): siRNA sense strand
aggcaaaucggaugagugu

SEQ ID NO: 738439 - RNA, 19 nt, Homo sapiens
  misc_RNA (1)...(19): siRNA sense strand
aguaaaggaagaaucagaa

SEQ ID NO: 738440 - RNA, 19 nt, Homo sapiens
  misc_RNA (1)...(19): siRNA sense strand
caguaaaggaagaaucaga

SEQ ID NO: 738441 - RNA, 19 nt, Homo sapiens
  misc_RNA (1)...(19): siRNA sense strand
gguggucgugugaugguaa

SEQ ID NO: 738442 - RNA, 19 nt, Homo sapiens
  misc_RNA (1)...(19): siRNA sense strand
gaugcuguagaaauugaaa

SEQ ID NO: 738443 - RNA, 19 nt, Homo sapiens
  misc_RNA (1)...(19): siRNA sense strand
ccaucaaagugaaaacuga

SEQ ID NO: 738444 - RNA, 19 nt, Homo sapiens
  misc_RNA (1)...(19): siRNA sense strand
gucgugugaugguaacaga

SEQ ID NO: 738445 - RNA, 19 nt, Homo sapiens
  misc_RNA (1)...(19): siRNA sense strand
cuacaacccaggcaaaucg

SEQ ID NO: 738446 - RNA, 19 nt, Homo sapiens
  misc_RNA (1)...(19): siRNA sense strand
uuaaacaccccgagaacua

SEQ ID NO: 738447 - RNA, 19 nt, Homo sapiens
  misc_RNA (1)...(19): siRNA sense strand
ccaggcaaaucggaugagu

SEQ ID NO: 738448 - RNA, 19 nt, Homo sapiens
  misc_RNA (1)...(19): siRNA sense strand
agaaauugaaacacucaga

SEQ ID NO: 738449 - RNA, 19 nt, Homo sapiens
  misc_RNA (1)...(19): siRNA sense strand
gaaaacugaacccacagaa

SEQ ID NO: 738450 - RNA, 19 nt, Homo sapiens
  misc_RNA (1)...(19): siRNA sense strand
gagccaaagaagcauguag

SEQ ID NO: 738451 - RNA, 19 nt, Homo sapiens
  misc_RNA (1)...(19): siRNA sense strand
caaggugacugguuguuua

SEQ ID NO: 738452 - RNA, 19 nt, Homo sapiens
  misc_RNA (1)...(19): siRNA sense strand
gaaagacagugcaguaaau

SEQ ID NO: 738453 - RNA, 19 nt, Homo sapiens
  misc_RNA (1)...(19): siRNA sense strand
acaacacgcugaagaauuu

SEQ ID NO: 738454 - RNA, 19 nt, Homo sapiens
  misc_RNA (1)...(19): siRNA sense strand
uaucaaaccugaauccaaa

SEQ ID NO: 738455 - RNA, 19 nt, Homo sapiens
  misc_RNA (1)...(19): siRNA sense strand
ugaauacgauccugaaaga

SEQ ID NO: 738456 - RNA, 19 nt, Homo sapiens
  misc_RNA (1)...(19): siRNA sense strand
ggacagguuucauuaaucu

SEQ ID NO: 738457 - RNA, 19 nt, Homo sapiens
  misc_RNA (1)...(19): siRNA sense strand
ggaagucauugccagaaga

SEQ ID NO: 738458 - RNA, 19 nt, Homo sapiens
  misc_RNA (1)...(19): siRNA sense strand
gcaccuacauucggacauu

SEQ ID NO: 738459 - RNA, 19 nt, Homo sapiens
  misc_RNA (1)...(19): siRNA sense strand
ggugguugcugaaguggua

SEQ ID NO: 738460 - RNA, 19 nt, Homo sapiens
  misc_RNA (1)...(19): siRNA sense strand
gcaccuugguuuguuauug

SEQ ID NO: 738461 - RNA, 19 nt, Homo sapiens
  misc_RNA (1)...(19): siRNA sense strand
ccaagaagaagaagaagaa

SEQ ID NO: 738462 - RNA, 19 nt, Homo sapiens
  misc_RNA (1)...(19): siRNA sense strand
gcagguaguugccgaagca

SEQ ID NO: 738463 - RNA, 19 nt, Homo sapiens
  misc_RNA (1)...(19): siRNA sense strand
guaaggacaacacacuaua

SEQ ID NO: 738464 - RNA, 19 nt, Homo sapiens
  misc_RNA (1)...(19): siRNA sense strand
gaagaaagcaaaagaggua

SEQ ID NO: 738465 - RNA, 19 nt, Homo sapiens
  misc_RNA (1)...(19): siRNA sense strand
ccacagcggucaucucuac

SEQ ID NO: 738466 - RNA, 19 nt, Homo sapiens
  misc_RNA (1)...(19): siRNA sense strand
caggacagguuucauuaau

SEQ ID NO: 738467 - RNA, 19 nt, Homo sapiens
  misc_RNA (1)...(19): siRNA sense strand
gcucaguggcuguaugaua

SEQ ID NO: 738468 - RNA, 19 nt, Homo sapiens
  misc_RNA (1)...(19): siRNA sense strand
ccaaagaaacauaagaaga

SEQ ID NO: 738469 - RNA, 19 nt, Homo sapiens
  misc_RNA (1)...(19): siRNA sense strand
gacaaugcaugaugugcuu

SEQ ID NO: 738470 - RNA, 19 nt, Homo sapiens
  misc_RNA (1)...(19): siRNA sense strand
aaaccugaauccaaaguug

SEQ ID NO: 738471 - RNA, 19 nt, Homo sapiens
  misc_RNA (1)...(19): siRNA sense strand
gcauggcuauugcauuaau

SEQ ID NO: 738472 - RNA, 19 nt, Homo sapiens
  misc_RNA (1)...(19): siRNA sense strand
cucaguggcuguaugauaa

SEQ ID NO: 738473 - RNA, 19 nt, Homo sapiens
  misc_RNA (1)...(19): siRNA sense strand
gcacagugguacucuggau

SEQ ID NO: 738474 - RNA, 19 nt, Homo sapiens
  misc_RNA (1)...(19): siRNA sense strand
gcaggaguauguugacuac

SEQ ID NO: 738475 - RNA, 19 nt, Homo sapiens
  misc_RNA (1)...(19): siRNA sense strand
ggaagcaggaguauguuga

SEQ ID NO: 738476 - RNA, 19 nt, Homo sapiens
  misc_RNA (1)...(19): siRNA sense strand
ucucauaaacggcugguua

SEQ ID NO: 738477 - RNA, 19 nt, Homo sapiens
  misc_RNA (1)...(19): siRNA sense strand
guucuggagucaugaguga

SEQ ID NO: 738478 - RNA, 19 nt, Homo sapiens
  misc_RNA (1)...(19): siRNA sense strand
agaagaagaagaagaagaa

SEQ ID NO: 738479 - RNA, 19 nt, Homo sapiens
  misc_RNA (1)...(19): siRNA sense strand
agaagaagaagaagaagaa

SEQ ID NO: 738480 - RNA, 19 nt, Homo sapiens
  misc_RNA (1)...(19): siRNA sense strand
gcaaaaugauugaauacga

SEQ ID NO: 738481 - RNA, 19 nt, Homo sapiens
  misc_RNA (1)...(19): siRNA sense strand
aauccaaaguugcuaaguu

SEQ ID NO: 738482 - RNA, 19 nt, Homo sapiens
  misc_RNA (1)...(19): siRNA sense strand
guaaaugccaucugcuaug

SEQ ID NO: 738483 - RNA, 19 nt, Homo sapiens
  misc_RNA (1)...(19): siRNA sense strand
ccaccaagaagaagaagaa

SEQ ID NO: 738484 - RNA, 19 nt, Homo sapiens
  misc_RNA (1)...(19): siRNA sense strand
caaaggcaagucagaagaa

SEQ ID NO: 738485 - RNA, 19 nt, Homo sapiens
  misc_RNA (1)...(19): siRNA sense strand
cuauacaccucuugcaugu

SEQ ID NO: 738486 - RNA, 19 nt, Homo sapiens
  misc_RNA (1)...(19): siRNA sense strand
ucaagagagugaucaugga

SEQ ID NO: 738487 - RNA, 19 nt, Homo sapiens
  misc_RNA (1)...(19): siRNA sense strand
ugaaagacagugcaguaaa

SEQ ID NO: 738488 - RNA, 19 nt, Homo sapiens
  misc_RNA (1)...(19): siRNA sense strand
uaugaaagacagugcagua

SEQ ID NO: 738489 - RNA, 19 nt, Homo sapiens
  misc_RNA (1)...(19): siRNA sense strand
ucugacaggugccuuauuc

SEQ ID NO: 738490 - RNA, 19 nt, Homo sapiens
  misc_RNA (1)...(19): siRNA sense strand
gaagucauugccagaagaa

SEQ ID NO: 738491 - RNA, 19 nt, Homo sapiens
  misc_RNA (1)...(19): siRNA sense strand
gaaaagaagaagaguaaga

SEQ ID NO: 738492 - RNA, 19 nt, Homo sapiens
  misc_RNA (1)...(19): siRNA sense strand
gauaugaggacggcauuga

SEQ ID NO: 738493 - RNA, 19 nt, Homo sapiens
  misc_RNA (1)...(19): siRNA sense strand
gaugcggaaguaauuauuu

SEQ ID NO: 738494 - RNA, 19 nt, Homo sapiens
  misc_RNA (1)...(19): siRNA sense strand
agaagaagaagaaagcaaa

SEQ ID NO: 738495 - RNA, 19 nt, Homo sapiens
  misc_RNA (1)...(19): siRNA sense strand
gaagaagaagaagaagaaa

SEQ ID NO: 738496 - RNA, 19 nt, Homo sapiens
  misc_RNA (1)...(19): siRNA sense strand
gcuccucaguugaucaaga

SEQ ID NO: 738497 - RNA, 19 nt, Homo sapiens
  misc_RNA (1)...(19): siRNA sense strand
ggaguauguugacuacagu

SEQ ID NO: 738498 - RNA, 19 nt, Homo sapiens
  misc_RNA (1)...(19): siRNA sense strand
cugcgaccaugguauagua

SEQ ID NO: 738499 - RNA, 19 nt, Homo sapiens
  misc_RNA (1)...(19): siRNA sense strand
gggaguugguggucagaug

SEQ ID NO: 738500 - RNA, 19 nt, Homo sapiens
  misc_RNA (1)...(19): siRNA sense strand
cgaaauacaacacgcugaa

SEQ ID NO: 738501 - RNA, 19 nt, Homo sapiens
  misc_RNA (1)...(19): siRNA sense strand
aagaagauguagccgaaau

SEQ ID NO: 738502 - RNA, 19 nt, Homo sapiens
  misc_RNA (1)...(19): siRNA sense strand
uugauaagcugaauguaag

SEQ ID NO: 738503 - RNA, 19 nt, Homo sapiens
  misc_RNA (1)...(19): siRNA sense strand
agaagaagaguaagaagga

SEQ ID NO: 738504 - RNA, 19 nt, Homo sapiens
  misc_RNA (1)...(19): siRNA sense strand
uccagcagcuccucaguug

SEQ ID NO: 738505 - RNA, 19 nt, Homo sapiens
  misc_RNA (1)...(19): siRNA sense strand
gcacaccugccaccuggaa

SEQ ID NO: 738506 - RNA, 19 nt, Homo sapiens
  misc_RNA (1)...(19): siRNA sense strand
gccaagaucaagagaguga

SEQ ID NO: 738507 - RNA, 19 nt, Homo sapiens
  misc_RNA (1)...(19): siRNA sense strand
ccacaaggaugagaguuac

SEQ ID NO: 738508 - RNA, 19 nt, Homo sapiens
  misc_RNA (1)...(19): siRNA sense strand
ggugacugguuguuuaauc

SEQ ID NO: 738509 - RNA, 19 nt, Homo sapiens
  misc_RNA (1)...(19): siRNA sense strand
uaucaggacagguuucauu

SEQ ID NO: 738510 - RNA, 19 nt, Homo sapiens
  misc_RNA (1)...(19): siRNA sense strand
gcgaguuguuuacccuuug

SEQ ID NO: 738511 - RNA, 19 nt, Homo sapiens
  misc_RNA (1)...(19): siRNA sense strand
uagccaagaucaagagagu

SEQ ID NO: 738512 - RNA, 19 nt, Homo sapiens
  misc_RNA (1)...(19): siRNA sense strand
caccuacauucggacauua

SEQ ID NO: 738513 - RNA, 19 nt, Homo sapiens
  misc_RNA (1)...(19): siRNA sense strand
caaaagagguagaauuggu

SEQ ID NO: 738514 - RNA, 19 nt, Homo sapiens
  misc_RNA (1)...(19): siRNA sense strand
ucauggagagagacacuua

SEQ ID NO: 738515 - RNA, 19 nt, Homo sapiens
  misc_RNA (1)...(19): siRNA sense strand
cagguguucuucgauauga

SEQ ID NO: 738516 - RNA, 19 nt, Homo sapiens
  misc_RNA (1)...(19): siRNA sense strand
gcuguugacaucucauaaa

SEQ ID NO: 738517 - RNA, 19 nt, Homo sapiens
  misc_RNA (1)...(19): siRNA sense strand
gaaaagcuguugacaucuc

SEQ ID NO: 738518 - RNA, 19 nt, Homo sapiens
  misc_RNA (1)...(19): siRNA sense strand
auacgauccugaaagaaga

SEQ ID NO: 738519 - RNA, 19 nt, Homo sapiens
  misc_RNA (1)...(19): siRNA sense strand
agagugagagugaaaguga

SEQ ID NO: 738520 - RNA, 19 nt, Homo sapiens
  misc_RNA (1)...(19): siRNA sense strand
gauuaugcuuccagguguu

SEQ ID NO: 738521 - RNA, 19 nt, Homo sapiens
  misc_RNA (1)...(19): siRNA sense strand
ggcgaguuguuuacccuuu

SEQ ID NO: 738522 - RNA, 19 nt, Homo sapiens
  misc_RNA (1)...(19): siRNA sense strand
gacuauaucaggacagguu

SEQ ID NO: 738523 - RNA, 19 nt, Homo sapiens
  misc_RNA (1)...(19): siRNA sense strand
ccaaaggcaagucagaaga

SEQ ID NO: 738524 - RNA, 19 nt, Homo sapiens
  misc_RNA (1)...(19): siRNA sense strand
gaagauguagccgaaauac

SEQ ID NO: 738525 - RNA, 19 nt, Homo sapiens
  misc_RNA (1)...(19): siRNA sense strand
cagguuucauuaaucuuga

SEQ ID NO: 738526 - RNA, 19 nt, Homo sapiens
  misc_RNA (1)...(19): siRNA sense strand
acagugauaccaccaagaa

SEQ ID NO: 738527 - RNA, 19 nt, Homo sapiens
  misc_RNA (1)...(19): siRNA sense strand
cgagagagugagagugaaa

SEQ ID NO: 738528 - RNA, 19 nt, Homo sapiens
  misc_RNA (1)...(19): siRNA sense strand
ccugaaagaagauuaggaa

SEQ ID NO: 738529 - RNA, 19 nt, Homo sapiens
  misc_RNA (1)...(19): siRNA sense strand
uggaaaagcuguugacauc

SEQ ID NO: 738530 - RNA, 19 nt, Homo sapiens
  misc_RNA (1)...(19): siRNA sense strand
auccaaaguugcuaaguug

SEQ ID NO: 738531 - RNA, 19 nt, Homo sapiens
  misc_RNA (1)...(19): siRNA sense strand
ggaugcggaaguaauuauu

SEQ ID NO: 738532 - RNA, 19 nt, Homo sapiens
  misc_RNA (1)...(19): siRNA sense strand
acaacagagugcaggcaaa

SEQ ID NO: 738533 - RNA, 19 nt, Homo sapiens
  misc_RNA (1)...(19): siRNA sense strand
gagugaaagugacgagacu

SEQ ID NO: 738534 - RNA, 19 nt, Homo sapiens
  misc_RNA (1)...(19): siRNA sense strand
caguaaaugccaucugcua

SEQ ID NO: 738535 - RNA, 19 nt, Homo sapiens
  misc_RNA (1)...(19): siRNA sense strand
gauugaauacgauccugaa

SEQ ID NO: 738536 - RNA, 19 nt, Homo sapiens
  misc_RNA (1)...(19): siRNA sense strand
ucaggacagguuucauuaa

SEQ ID NO: 738537 - RNA, 19 nt, Homo sapiens
  misc_RNA (1)...(19): siRNA sense strand
gugauaccaccaagaagaa

SEQ ID NO: 738538 - RNA, 19 nt, Homo sapiens
  misc_RNA (1)...(19): siRNA sense strand
aaaaggagcggaagucauu

SEQ ID NO: 738539 - RNA, 19 nt, Homo sapiens
  misc_RNA (1)...(19): siRNA sense strand
gaagaagauguagccgaaa

SEQ ID NO: 738540 - RNA, 19 nt, Homo sapiens
  misc_RNA (1)...(19): siRNA sense strand
gaugcucaguggcuguaug

SEQ ID NO: 738541 - RNA, 19 nt, Homo sapiens
  misc_RNA (1)...(19): siRNA sense strand
ccacuuauugcugcaguaa

SEQ ID NO: 738542 - RNA, 19 nt, Homo sapiens
  misc_RNA (1)...(19): siRNA sense strand
ccaaggugacugguuguuu

SEQ ID NO: 738543 - RNA, 19 nt, Homo sapiens
  misc_RNA (1)...(19): siRNA sense strand
gcggaugcggaaguaauua

SEQ ID NO: 738544 - RNA, 19 nt, Homo sapiens
  misc_RNA (1)...(19): siRNA sense strand
agaagauguagccgaaaua

SEQ ID NO: 738545 - RNA, 19 nt, Homo sapiens
  misc_RNA (1)...(19): siRNA sense strand
cagcagcuccucaguugau

SEQ ID NO: 738546 - RNA, 19 nt, Homo sapiens
  misc_RNA (1)...(19): siRNA sense strand
agaggugguugcugaagug

SEQ ID NO: 738547 - RNA, 19 nt, Homo sapiens
  misc_RNA (1)...(19): siRNA sense strand
gagugaucauggagagaga

SEQ ID NO: 738548 - RNA, 19 nt, Homo sapiens
  misc_RNA (1)...(19): siRNA sense strand
uuccagguguucuucgaua

SEQ ID NO: 738549 - RNA, 19 nt, Homo sapiens
  misc_RNA (1)...(19): siRNA sense strand
ugugcaccuugguuuguua

SEQ ID NO: 738550 - RNA, 19 nt, Homo sapiens
  misc_RNA (1)...(19): siRNA sense strand
aaauacaacacgcugaaga

SEQ ID NO: 738551 - RNA, 19 nt, Homo sapiens
  misc_RNA (1)...(19): siRNA sense strand
cagaagauccugauuauua

SEQ ID NO: 738552 - RNA, 19 nt, Homo sapiens
  misc_RNA (1)...(19): siRNA sense strand
guaaagaacuggccaaguc

SEQ ID NO: 738553 - RNA, 19 nt, Homo sapiens
  misc_RNA (1)...(19): siRNA sense strand
gggauuucauucaucauua

SEQ ID NO: 738554 - RNA, 19 nt, Homo sapiens
  misc_RNA (1)...(19): siRNA sense strand
gaguguagaugcuguagaa

SEQ ID NO: 738555 - RNA, 19 nt, Homo sapiens
  misc_RNA (1)...(19): siRNA sense strand
ugggaaagcuuuaggcaaa

SEQ ID NO: 738556 - RNA, 19 nt, Homo sapiens
  misc_RNA (1)...(19): siRNA sense strand
gcaggaugguggugacauu

SEQ ID NO: 738557 - RNA, 19 nt, Homo sapiens
  misc_RNA (1)...(19): siRNA sense strand
gaaauugaaacacucagaa

SEQ ID NO: 738558 - RNA, 19 nt, Homo sapiens
  misc_RNA (1)...(19): siRNA sense strand
uguagaugcuguagaaauu

SEQ ID NO: 738559 - RNA, 19 nt, Homo sapiens
  misc_RNA (1)...(19): siRNA sense strand
ggaaauggcagcugugaca

SEQ ID NO: 738560 - RNA, 19 nt, Homo sapiens
  misc_RNA (1)...(19): siRNA sense strand
gcaaaucggaugaguguag

SEQ ID NO: 738561 - RNA, 19 nt, Homo sapiens
  misc_RNA (1)...(19): siRNA sense strand
aaacugaacccacagaaga

SEQ ID NO: 738562 - RNA, 19 nt, Homo sapiens
  misc_RNA (1)...(19): siRNA sense strand
ugaggacuauuucugcuuu

SEQ ID NO: 738563 - RNA, 19 nt, Homo sapiens
  misc_RNA (1)...(19): siRNA sense strand
gcaaugaaggcacagaaau

SEQ ID NO: 738564 - RNA, 19 nt, Homo sapiens
  misc_RNA (1)...(19): siRNA sense strand
caaggaagccaccauucuu

SEQ ID NO: 738565 - RNA, 19 nt, Homo sapiens
  misc_RNA (1)...(19): siRNA sense strand
ggaaagcuuuaggcaaauc

SEQ ID NO: 738566 - RNA, 19 nt, Homo sapiens
  misc_RNA (1)...(19): siRNA sense strand
aaacaguugaggacuauuu

SEQ ID NO: 738567 - RNA, 19 nt, Homo sapiens
  misc_RNA (1)...(19): siRNA sense strand
caaaucggaugaguguaga

SEQ ID NO: 738568 - RNA, 19 nt, Homo sapiens
  misc_RNA (1)...(19): siRNA sense strand
uagaugcuguagaaauuga

SEQ ID NO: 738569 - RNA, 19 nt, Homo sapiens
  misc_RNA (1)...(19): siRNA sense strand
caaugaaggcacagaaaug

SEQ ID NO: 738570 - RNA, 19 nt, Homo sapiens
  misc_RNA (1)...(19): siRNA sense strand
gacaguaaaggaagaauca

SEQ ID NO: 738571 - RNA, 19 nt, Homo sapiens
  misc_RNA (1)...(19): siRNA sense strand
gcucucgaguccaugugua

SEQ ID NO: 738572 - RNA, 19 nt, Homo sapiens
  misc_RNA (1)...(19): siRNA sense strand
cgagaacuaugaucuugca

SEQ ID NO: 738573 - RNA, 19 nt, Homo sapiens
  misc_RNA (1)...(19): siRNA sense strand
gcagagaugcauaaaauga

SEQ ID NO: 738574 - RNA, 19 nt, Homo sapiens
  misc_RNA (1)...(19): siRNA sense strand
gaacuggccaaguccaaag

SEQ ID NO: 738575 - RNA, 19 nt, Homo sapiens
  misc_RNA (1)...(19): siRNA sense strand
aaaggaagaaucagaagau

SEQ ID NO: 738576 - RNA, 19 nt, Homo sapiens
  misc_RNA (1)...(19): siRNA sense strand
uaaaggaagaaucagaaga

SEQ ID NO: 738577 - RNA, 19 nt, Homo sapiens
  misc_RNA (1)...(19): siRNA sense strand
gucaauaccagaaaggauu

SEQ ID NO: 738578 - RNA, 19 nt, Homo sapiens
  misc_RNA (1)...(19): siRNA sense strand
gcauugcaguguaugaaac

SEQ ID NO: 738579 - RNA, 19 nt, Homo sapiens
  misc_RNA (1)...(19): siRNA sense strand
ggacgugcuuuugucaaua

SEQ ID NO: 738580 - RNA, 19 nt, Homo sapiens
  misc_RNA (1)...(19): siRNA sense strand
gggaaagcuuuaggcaaau

SEQ ID NO: 738581 - RNA, 19 nt, Homo sapiens
  misc_RNA (1)...(19): siRNA sense strand
ugaaggcacagaaauggaa

SEQ ID NO: 738582 - RNA, 19 nt, Homo sapiens
  misc_RNA (1)...(19): siRNA sense strand
ccagucggcugugguagug

SEQ ID NO: 738583 - RNA, 19 nt, Homo sapiens
  misc_RNA (1)...(19): siRNA sense strand
ucaauaccagaaaggauuu

SEQ ID NO: 738584 - RNA, 19 nt, Homo sapiens
  misc_RNA (1)...(19): siRNA sense strand
gaagauccugauuauuauc

SEQ ID NO: 738585 - RNA, 19 nt, Homo sapiens
  misc_RNA (1)...(19): siRNA sense strand
ggaagaaucagaagauccu

SEQ ID NO: 738586 - RNA, 19 nt, Homo sapiens
  misc_RNA (1)...(19): siRNA sense strand
guagaaauugaaacacuca

SEQ ID NO: 738587 - RNA, 19 nt, Homo sapiens
  misc_RNA (1)...(19): siRNA sense strand
uugcaacccugaaauggau

SEQ ID NO: 738588 - RNA, 19 nt, Homo sapiens
  misc_RNA (1)...(19): siRNA sense strand
gaucuugcaacccugaaau

SEQ ID NO: 738589 - RNA, 19 nt, Homo sapiens
  misc_RNA (1)...(19): siRNA sense strand
cccgagaacuaugaucuug

SEQ ID NO: 738590 - RNA, 19 nt, Homo sapiens
  misc_RNA (1)...(19): siRNA sense strand
ggcaaugaaggcacagaaa

SEQ ID NO: 738591 - RNA, 19 nt, Homo sapiens
  misc_RNA (1)...(19): siRNA sense strand
ugucagcucucgaguccau

SEQ ID NO: 738592 - RNA, 19 nt, Homo sapiens
  misc_RNA (1)...(19): siRNA sense strand
guagaugcuguagaaauug

SEQ ID NO: 738593 - RNA, 19 nt, Homo sapiens
  misc_RNA (1)...(19): siRNA sense strand
gaugaguguagaugcugua

SEQ ID NO: 738594 - RNA, 19 nt, Homo sapiens
  misc_RNA (1)...(19): siRNA sense strand
gggcaaugaaggcacagaa

SEQ ID NO: 738595 - RNA, 19 nt, Homo sapiens
  misc_RNA (1)...(19): siRNA sense strand
ucgaguccauguguaaaga

SEQ ID NO: 738596 - RNA, 19 nt, Homo sapiens
  misc_RNA (1)...(19): siRNA sense strand
guaaaggaagaaucagaag

SEQ ID NO: 738597 - RNA, 19 nt, Homo sapiens
  misc_RNA (1)...(19): siRNA sense strand
guccauguguaaagaacug

SEQ ID NO: 738598 - RNA, 19 nt, Homo sapiens
  misc_RNA (1)...(19): siRNA sense strand
gguggugacauuccucaug

SEQ ID NO: 738599 - RNA, 19 nt, Homo sapiens
  misc_RNA (1)...(19): siRNA sense strand
uguagguggucgugugaug

SEQ ID NO: 738600 - RNA, 19 nt, Homo sapiens
  misc_RNA (1)...(19): siRNA sense strand
guguagaugcuguagaaau

SEQ ID NO: 738601 - RNA, 19 nt, Homo sapiens
  misc_RNA (1)...(19): siRNA sense strand
aggcaaaucggaugagugu

SEQ ID NO: 738602 - RNA, 19 nt, Homo sapiens
  misc_RNA (1)...(19): siRNA sense strand
aguaaaggaagaaucagaa

SEQ ID NO: 738603 - RNA, 19 nt, Homo sapiens
  misc_RNA (1)...(19): siRNA sense strand
caguaaaggaagaaucaga

SEQ ID NO: 738604 - RNA, 19 nt, Homo sapiens
  misc_RNA (1)...(19): siRNA sense strand
gguggucgugugaugguaa

SEQ ID NO: 738605 - RNA, 19 nt, Homo sapiens
  misc_RNA (1)...(19): siRNA sense strand
gaugcuguagaaauugaaa

SEQ ID NO: 738606 - RNA, 19 nt, Homo sapiens
  misc_RNA (1)...(19): siRNA sense strand
ccaucaaagugaaaacuga

SEQ ID NO: 738607 - RNA, 19 nt, Homo sapiens
  misc_RNA (1)...(19): siRNA sense strand
gucgugugaugguaacaga

SEQ ID NO: 738608 - RNA, 19 nt, Homo sapiens
  misc_RNA (1)...(19): siRNA sense strand
cuacaacccaggcaaaucg

SEQ ID NO: 738609 - RNA, 19 nt, Homo sapiens
  misc_RNA (1)...(19): siRNA sense strand
uuaaacaccccgagaacua

SEQ ID NO: 738610 - RNA, 19 nt, Homo sapiens
  misc_RNA (1)...(19): siRNA sense strand
ccaggcaaaucggaugagu

SEQ ID NO: 738611 - RNA, 19 nt, Homo sapiens
  misc_RNA (1)...(19): siRNA sense strand
agaaauugaaacacucaga

SEQ ID NO: 738612 - RNA, 19 nt, Homo sapiens
  misc_RNA (1)...(19): siRNA sense strand
gaaaacugaacccacagaa

SEQ ID NO: 738613 - RNA, 19 nt, Homo sapiens
  misc_RNA (1)...(19): siRNA sense strand
gagccaaagaagcauguag

SEQ ID NO: 738614 - RNA, 19 nt, Homo sapiens
  misc_RNA (1)...(19): siRNA sense strand
cagaagauccugauuauua

SEQ ID NO: 738615 - RNA, 19 nt, Homo sapiens
  misc_RNA (1)...(19): siRNA sense strand
guaaagaacuggccaaguc

SEQ ID NO: 738616 - RNA, 19 nt, Homo sapiens
  misc_RNA (1)...(19): siRNA sense strand
gggauuucauucaucauua

SEQ ID NO: 738617 - RNA, 19 nt, Homo sapiens
  misc_RNA (1)...(19): siRNA sense strand
gaguguagaugcuguagaa

SEQ ID NO: 738618 - RNA, 19 nt, Homo sapiens
  misc_RNA (1)...(19): siRNA sense strand
ugggaaagcuuuaggcaaa

SEQ ID NO: 738619 - RNA, 19 nt, Homo sapiens
  misc_RNA (1)...(19): siRNA sense strand
gcaggaugguggugacauu

SEQ ID NO: 738620 - RNA, 19 nt, Homo sapiens
  misc_RNA (1)...(19): siRNA sense strand
gaaauugaaacacucagaa

SEQ ID NO: 738621 - RNA, 19 nt, Homo sapiens
  misc_RNA (1)...(19): siRNA sense strand
uguagaugcuguagaaauu

SEQ ID NO: 738622 - RNA, 19 nt, Homo sapiens
  misc_RNA (1)...(19): siRNA sense strand
ggaaauggcagcugugaca

SEQ ID NO: 738623 - RNA, 19 nt, Homo sapiens
  misc_RNA (1)...(19): siRNA sense strand
gcaaaucggaugaguguag

SEQ ID NO: 738624 - RNA, 19 nt, Homo sapiens
  misc_RNA (1)...(19): siRNA sense strand
aaacugaacccacagaaga

SEQ ID NO: 738625 - RNA, 19 nt, Homo sapiens
  misc_RNA (1)...(19): siRNA sense strand
ugaggacuauuucugcuuu

SEQ ID NO: 738626 - RNA, 19 nt, Homo sapiens
  misc_RNA (1)...(19): siRNA sense strand
gcaaugaaggcacagaaau

SEQ ID NO: 738627 - RNA, 19 nt, Homo sapiens
  misc_RNA (1)...(19): siRNA sense strand
caaggaagccaccauucuu

SEQ ID NO: 738628 - RNA, 19 nt, Homo sapiens
  misc_RNA (1)...(19): siRNA sense strand
ggaaagcuuuaggcaaauc

SEQ ID NO: 738629 - RNA, 19 nt, Homo sapiens
  misc_RNA (1)...(19): siRNA sense strand
aaacaguugaggacuauuu

SEQ ID NO: 738630 - RNA, 19 nt, Homo sapiens
  misc_RNA (1)...(19): siRNA sense strand
caaaucggaugaguguaga

SEQ ID NO: 738631 - RNA, 19 nt, Homo sapiens
  misc_RNA (1)...(19): siRNA sense strand
uagaugcuguagaaauuga

SEQ ID NO: 738632 - RNA, 19 nt, Homo sapiens
  misc_RNA (1)...(19): siRNA sense strand
caaugaaggcacagaaaug

SEQ ID NO: 738633 - RNA, 19 nt, Homo sapiens
  misc_RNA (1)...(19): siRNA sense strand
gacaguaaaggaagaauca

SEQ ID NO: 738634 - RNA, 19 nt, Homo sapiens
  misc_RNA (1)...(19): siRNA sense strand
gcucucgaguccaugugua

SEQ ID NO: 738635 - RNA, 19 nt, Homo sapiens
  misc_RNA (1)...(19): siRNA sense strand
cgagaacuaugaucuugca

SEQ ID NO: 738636 - RNA, 19 nt, Homo sapiens
  misc_RNA (1)...(19): siRNA sense strand
gcagagaugcauaaaauga

SEQ ID NO: 738637 - RNA, 19 nt, Homo sapiens
  misc_RNA (1)...(19): siRNA sense strand
gaacuggccaaguccaaag

SEQ ID NO: 738638 - RNA, 19 nt, Homo sapiens
  misc_RNA (1)...(19): siRNA sense strand
aaaggaagaaucagaagau

SEQ ID NO: 738639 - RNA, 19 nt, Homo sapiens
  misc_RNA (1)...(19): siRNA sense strand
uaaaggaagaaucagaaga

SEQ ID NO: 738640 - RNA, 19 nt, Homo sapiens
  misc_RNA (1)...(19): siRNA sense strand
gucaauaccagaaaggauu

SEQ ID NO: 738641 - RNA, 19 nt, Homo sapiens
  misc_RNA (1)...(19): siRNA sense strand
gcauugcaguguaugaaac

SEQ ID NO: 738642 - RNA, 19 nt, Homo sapiens
  misc_RNA (1)...(19): siRNA sense strand
ggacgugcuuuugucaaua

SEQ ID NO: 738643 - RNA, 19 nt, Homo sapiens
  misc_RNA (1)...(19): siRNA sense strand
gggaaagcuuuaggcaaau

SEQ ID NO: 738644 - RNA, 19 nt, Homo sapiens
  misc_RNA (1)...(19): siRNA sense strand
ugaaggcacagaaauggaa

SEQ ID NO: 738645 - RNA, 19 nt, Homo sapiens
  misc_RNA (1)...(19): siRNA sense strand
ccagucggcugugguagug

SEQ ID NO: 738646 - RNA, 19 nt, Homo sapiens
  misc_RNA (1)...(19): siRNA sense strand
ucaauaccagaaaggauuu

SEQ ID NO: 738647 - RNA, 19 nt, Homo sapiens
  misc_RNA (1)...(19): siRNA sense strand
gaagauccugauuauuauc

SEQ ID NO: 738648 - RNA, 19 nt, Homo sapiens
  misc_RNA (1)...(19): siRNA sense strand
ggaagaaucagaagauccu

SEQ ID NO: 738649 - RNA, 19 nt, Homo sapiens
  misc_RNA (1)...(19): siRNA sense strand
guagaaauugaaacacuca

SEQ ID NO: 738650 - RNA, 19 nt, Homo sapiens
  misc_RNA (1)...(19): siRNA sense strand
uugcaacccugaaauggau

SEQ ID NO: 738651 - RNA, 19 nt, Homo sapiens
  misc_RNA (1)...(19): siRNA sense strand
gaucuugcaacccugaaau

SEQ ID NO: 738652 - RNA, 19 nt, Homo sapiens
  misc_RNA (1)...(19): siRNA sense strand
cccgagaacuaugaucuug

SEQ ID NO: 738653 - RNA, 19 nt, Homo sapiens
  misc_RNA (1)...(19): siRNA sense strand
ggcaaugaaggcacagaaa

SEQ ID NO: 738654 - RNA, 19 nt, Homo sapiens
  misc_RNA (1)...(19): siRNA sense strand
ugucagcucucgaguccau

SEQ ID NO: 738655 - RNA, 19 nt, Homo sapiens
  misc_RNA (1)...(19): siRNA sense strand
guagaugcuguagaaauug

SEQ ID NO: 738656 - RNA, 19 nt, Homo sapiens
  misc_RNA (1)...(19): siRNA sense strand
gaugaguguagaugcugua

SEQ ID NO: 738657 - RNA, 19 nt, Homo sapiens
  misc_RNA (1)...(19): siRNA sense strand
gggcaaugaaggcacagaa

SEQ ID NO: 738658 - RNA, 19 nt, Homo sapiens
  misc_RNA (1)...(19): siRNA sense strand
ucgaguccauguguaaaga

SEQ ID NO: 738659 - RNA, 19 nt, Homo sapiens
  misc_RNA (1)...(19): siRNA sense strand
guaaaggaagaaucagaag

SEQ ID NO: 738660 - RNA, 19 nt, Homo sapiens
  misc_RNA (1)...(19): siRNA sense strand
guccauguguaaagaacug

SEQ ID NO: 738661 - RNA, 19 nt, Homo sapiens
  misc_RNA (1)...(19): siRNA sense strand
gguggugacauuccucaug

SEQ ID NO: 738662 - RNA, 19 nt, Homo sapiens
  misc_RNA (1)...(19): siRNA sense strand
uguagguggucgugugaug

SEQ ID NO: 738663 - RNA, 19 nt, Homo sapiens
  misc_RNA (1)...(19): siRNA sense strand
guguagaugcuguagaaau

SEQ ID NO: 738664 - RNA, 19 nt, Homo sapiens
  misc_RNA (1)...(19): siRNA sense strand
aggcaaaucggaugagugu

SEQ ID NO: 738665 - RNA, 19 nt, Homo sapiens
  misc_RNA (1)...(19): siRNA sense strand
aguaaaggaagaaucagaa

SEQ ID NO: 738666 - RNA, 19 nt, Homo sapiens
  misc_RNA (1)...(19): siRNA sense strand
caguaaaggaagaaucaga

SEQ ID NO: 738667 - RNA, 19 nt, Homo sapiens
  misc_RNA (1)...(19): siRNA sense strand
gguggucgugugaugguaa

SEQ ID NO: 738668 - RNA, 19 nt, Homo sapiens
  misc_RNA (1)...(19): siRNA sense strand
gaugcuguagaaauugaaa

SEQ ID NO: 738669 - RNA, 19 nt, Homo sapiens
  misc_RNA (1)...(19): siRNA sense strand
ccaucaaagugaaaacuga

SEQ ID NO: 738670 - RNA, 19 nt, Homo sapiens
  misc_RNA (1)...(19): siRNA sense strand
gucgugugaugguaacaga

SEQ ID NO: 738671 - RNA, 19 nt, Homo sapiens
  misc_RNA (1)...(19): siRNA sense strand
cuacaacccaggcaaaucg

SEQ ID NO: 738672 - RNA, 19 nt, Homo sapiens
  misc_RNA (1)...(19): siRNA sense strand
uuaaacaccccgagaacua

SEQ ID NO: 738673 - RNA, 19 nt, Homo sapiens
  misc_RNA (1)...(19): siRNA sense strand
ccaggcaaaucggaugagu

SEQ ID NO: 738674 - RNA, 19 nt, Homo sapiens
  misc_RNA (1)...(19): siRNA sense strand
agaaauugaaacacucaga

SEQ ID NO: 738675 - RNA, 19 nt, Homo sapiens
  misc_RNA (1)...(19): siRNA sense strand
gaaaacugaacccacagaa

SEQ ID NO: 738676 - RNA, 19 nt, Homo sapiens
  misc_RNA (1)...(19): siRNA sense strand
gagccaaagaagcauguag

SEQ ID NO: 738677 - RNA, 19 nt, Homo sapiens
  misc_RNA (1)...(19): siRNA sense strand
cagaagauccugauuauua

SEQ ID NO: 738678 - RNA, 19 nt, Homo sapiens
  misc_RNA (1)...(19): siRNA sense strand
guaaagaacuggccaaguc

SEQ ID NO: 738679 - RNA, 19 nt, Homo sapiens
  misc_RNA (1)...(19): siRNA sense strand
gggauuucauucaucauua

SEQ ID NO: 738680 - RNA, 19 nt, Homo sapiens
  misc_RNA (1)...(19): siRNA sense strand
gaguguagaugcuguagaa

SEQ ID NO: 738681 - RNA, 19 nt, Homo sapiens
  misc_RNA (1)...(19): siRNA sense strand
ugggaaagcuuuaggcaaa

SEQ ID NO: 738682 - RNA, 19 nt, Homo sapiens
  misc_RNA (1)...(19): siRNA sense strand
gcaggaugguggugacauu

SEQ ID NO: 738683 - RNA, 19 nt, Homo sapiens
  misc_RNA (1)...(19): siRNA sense strand
gaaauugaaacacucagaa

SEQ ID NO: 738684 - RNA, 19 nt, Homo sapiens
  misc_RNA (1)...(19): siRNA sense strand
uguagaugcuguagaaauu

SEQ ID NO: 738685 - RNA, 19 nt, Homo sapiens
  misc_RNA (1)...(19): siRNA sense strand
ggaaauggcagcugugaca

SEQ ID NO: 738686 - RNA, 19 nt, Homo sapiens
  misc_RNA (1)...(19): siRNA sense strand
gcaaaucggaugaguguag

SEQ ID NO: 738687 - RNA, 19 nt, Homo sapiens
  misc_RNA (1)...(19): siRNA sense strand
aaacugaacccacagaaga

SEQ ID NO: 738688 - RNA, 19 nt, Homo sapiens
  misc_RNA (1)...(19): siRNA sense strand
ugaggacuauuucugcuuu

SEQ ID NO: 738689 - RNA, 19 nt, Homo sapiens
  misc_RNA (1)...(19): siRNA sense strand
gcaaugaaggcacagaaau

SEQ ID NO: 738690 - RNA, 19 nt, Homo sapiens
  misc_RNA (1)...(19): siRNA sense strand
caaggaagccaccauucuu

SEQ ID NO: 738691 - RNA, 19 nt, Homo sapiens
  misc_RNA (1)...(19): siRNA sense strand
ggaaagcuuuaggcaaauc

SEQ ID NO: 738692 - RNA, 19 nt, Homo sapiens
  misc_RNA (1)...(19): siRNA sense strand
aaacaguugaggacuauuu

SEQ ID NO: 738693 - RNA, 19 nt, Homo sapiens
  misc_RNA (1)...(19): siRNA sense strand
caaaucggaugaguguaga

SEQ ID NO: 738694 - RNA, 19 nt, Homo sapiens
  misc_RNA (1)...(19): siRNA sense strand
uagaugcuguagaaauuga

SEQ ID NO: 738695 - RNA, 19 nt, Homo sapiens
  misc_RNA (1)...(19): siRNA sense strand
caaugaaggcacagaaaug

SEQ ID NO: 738696 - RNA, 19 nt, Homo sapiens
  misc_RNA (1)...(19): siRNA sense strand
gacaguaaaggaagaauca

SEQ ID NO: 738697 - RNA, 19 nt, Homo sapiens
  misc_RNA (1)...(19): siRNA sense strand
gcucucgaguccaugugua

SEQ ID NO: 738698 - RNA, 19 nt, Homo sapiens
  misc_RNA (1)...(19): siRNA sense strand
cgagaacuaugaucuugca

SEQ ID NO: 738699 - RNA, 19 nt, Homo sapiens
  misc_RNA (1)...(19): siRNA sense strand
gcagagaugcauaaaauga

SEQ ID NO: 738700 - RNA, 19 nt, Homo sapiens
  misc_RNA (1)...(19): siRNA sense strand
gaacuggccaaguccaaag

SEQ ID NO: 738701 - RNA, 19 nt, Homo sapiens
  misc_RNA (1)...(19): siRNA sense strand
aaaggaagaaucagaagau

SEQ ID NO: 738702 - RNA, 19 nt, Homo sapiens
  misc_RNA (1)...(19): siRNA sense strand
uaaaggaagaaucagaaga

SEQ ID NO: 738703 - RNA, 19 nt, Homo sapiens
  misc_RNA (1)...(19): siRNA sense strand
gucaauaccagaaaggauu

SEQ ID NO: 738704 - RNA, 19 nt, Homo sapiens
  misc_RNA (1)...(19): siRNA sense strand
gcauugcaguguaugaaac

SEQ ID NO: 738705 - RNA, 19 nt, Homo sapiens
  misc_RNA (1)...(19): siRNA sense strand
ggacgugcuuuugucaaua

SEQ ID NO: 738706 - RNA, 19 nt, Homo sapiens
  misc_RNA (1)...(19): siRNA sense strand
gggaaagcuuuaggcaaau

SEQ ID NO: 738707 - RNA, 19 nt, Homo sapiens
  misc_RNA (1)...(19): siRNA sense strand
ugaaggcacagaaauggaa

SEQ ID NO: 738708 - RNA, 19 nt, Homo sapiens
  misc_RNA (1)...(19): siRNA sense strand
ccagucggcugugguagug

SEQ ID NO: 738709 - RNA, 19 nt, Homo sapiens
  misc_RNA (1)...(19): siRNA sense strand
ucaauaccagaaaggauuu

SEQ ID NO: 738710 - RNA, 19 nt, Homo sapiens
  misc_RNA (1)...(19): siRNA sense strand
gaagauccugauuauuauc

SEQ ID NO: 738711 - RNA, 19 nt, Homo sapiens
  misc_RNA (1)...(19): siRNA sense strand
ggaagaaucagaagauccu

SEQ ID NO: 738712 - RNA, 19 nt, Homo sapiens
  misc_RNA (1)...(19): siRNA sense strand
guagaaauugaaacacuca

SEQ ID NO: 738713 - RNA, 19 nt, Homo sapiens
  misc_RNA (1)...(19): siRNA sense strand
uugcaacccugaaauggau

SEQ ID NO: 738714 - RNA, 19 nt, Homo sapiens
  misc_RNA (1)...(19): siRNA sense strand
gaucuugcaacccugaaau

SEQ ID NO: 738715 - RNA, 19 nt, Homo sapiens
  misc_RNA (1)...(19): siRNA sense strand
cccgagaacuaugaucuug

SEQ ID NO: 738716 - RNA, 19 nt, Homo sapiens
  misc_RNA (1)...(19): siRNA sense strand
ggcaaugaaggcacagaaa

SEQ ID NO: 738717 - RNA, 19 nt, Homo sapiens
  misc_RNA (1)...(19): siRNA sense strand
ugucagcucucgaguccau

SEQ ID NO: 738718 - RNA, 19 nt, Homo sapiens
  misc_RNA (1)...(19): siRNA sense strand
guagaugcuguagaaauug

SEQ ID NO: 738719 - RNA, 19 nt, Homo sapiens
  misc_RNA (1)...(19): siRNA sense strand
gaugaguguagaugcugua

SEQ ID NO: 738720 - RNA, 19 nt, Homo sapiens
  misc_RNA (1)...(19): siRNA sense strand
gggcaaugaaggcacagaa

SEQ ID NO: 738721 - RNA, 19 nt, Homo sapiens
  misc_RNA (1)...(19): siRNA sense strand
ucgaguccauguguaaaga

SEQ ID NO: 738722 - RNA, 19 nt, Homo sapiens
  misc_RNA (1)...(19): siRNA sense strand
guaaaggaagaaucagaag

SEQ ID NO: 738723 - RNA, 19 nt, Homo sapiens
  misc_RNA (1)...(19): siRNA sense strand
guccauguguaaagaacug

SEQ ID NO: 738724 - RNA, 19 nt, Homo sapiens
  misc_RNA (1)...(19): siRNA sense strand
gguggugacauuccucaug

SEQ ID NO: 738725 - RNA, 19 nt, Homo sapiens
  misc_RNA (1)...(19): siRNA sense strand
uguagguggucgugugaug

SEQ ID NO: 738726 - RNA, 19 nt, Homo sapiens
  misc_RNA (1)...(19): siRNA sense strand
guguagaugcuguagaaau

SEQ ID NO: 738727 - RNA, 19 nt, Homo sapiens
  misc_RNA (1)...(19): siRNA sense strand
aggcaaaucggaugagugu

SEQ ID NO: 738728 - RNA, 19 nt, Homo sapiens
  misc_RNA (1)...(19): siRNA sense strand
aguaaaggaagaaucagaa

SEQ ID NO: 738729 - RNA, 19 nt, Homo sapiens
  misc_RNA (1)...(19): siRNA sense strand
caguaaaggaagaaucaga

SEQ ID NO: 738730 - RNA, 19 nt, Homo sapiens
  misc_RNA (1)...(19): siRNA sense strand
gguggucgugugaugguaa

SEQ ID NO: 738731 - RNA, 19 nt, Homo sapiens
  misc_RNA (1)...(19): siRNA sense strand
gaugcuguagaaauugaaa

SEQ ID NO: 738732 - RNA, 19 nt, Homo sapiens
  misc_RNA (1)...(19): siRNA sense strand
ccaucaaagugaaaacuga

SEQ ID NO: 738733 - RNA, 19 nt, Homo sapiens
  misc_RNA (1)...(19): siRNA sense strand
gucgugugaugguaacaga

SEQ ID NO: 738734 - RNA, 19 nt, Homo sapiens
  misc_RNA (1)...(19): siRNA sense strand
cuacaacccaggcaaaucg

SEQ ID NO: 738735 - RNA, 19 nt, Homo sapiens
  misc_RNA (1)...(19): siRNA sense strand
uuaaacaccccgagaacua

SEQ ID NO: 738736 - RNA, 19 nt, Homo sapiens
  misc_RNA (1)...(19): siRNA sense strand
ccaggcaaaucggaugagu

SEQ ID NO: 738737 - RNA, 19 nt, Homo sapiens
  misc_RNA (1)...(19): siRNA sense strand
agaaauugaaacacucaga

SEQ ID NO: 738738 - RNA, 19 nt, Homo sapiens
  misc_RNA (1)...(19): siRNA sense strand
gaaaacugaacccacagaa

SEQ ID NO: 738739 - RNA, 19 nt, Homo sapiens
  misc_RNA (1)...(19): siRNA sense strand
gagccaaagaagcauguag

SEQ ID NO: 738740 - RNA, 19 nt, Homo sapiens
  misc_RNA (1)...(19): siRNA sense strand
cagaagauccugauuauua

SEQ ID NO: 738741 - RNA, 19 nt, Homo sapiens
  misc_RNA (1)...(19): siRNA sense strand
guaaagaacuggccaaguc

SEQ ID NO: 738742 - RNA, 19 nt, Homo sapiens
  misc_RNA (1)...(19): siRNA sense strand
gggauuucauucaucauua

SEQ ID NO: 738743 - RNA, 19 nt, Homo sapiens
  misc_RNA (1)...(19): siRNA sense strand
gaguguagaugcuguagaa

SEQ ID NO: 738744 - RNA, 19 nt, Homo sapiens
  misc_RNA (1)...(19): siRNA sense strand
ugggaaagcuuuaggcaaa

SEQ ID NO: 738745 - RNA, 19 nt, Homo sapiens
  misc_RNA (1)...(19): siRNA sense strand
gcaggaugguggugacauu

SEQ ID NO: 738746 - RNA, 19 nt, Homo sapiens
  misc_RNA (1)...(19): siRNA sense strand
gaaauugaaacacucagaa

SEQ ID NO: 738747 - RNA, 19 nt, Homo sapiens
  misc_RNA (1)...(19): siRNA sense strand
uguagaugcuguagaaauu

SEQ ID NO: 738748 - RNA, 19 nt, Homo sapiens
  misc_RNA (1)...(19): siRNA sense strand
ggaaauggcagcugugaca

SEQ ID NO: 738749 - RNA, 19 nt, Homo sapiens
  misc_RNA (1)...(19): siRNA sense strand
gcaaaucggaugaguguag

SEQ ID NO: 738750 - RNA, 19 nt, Homo sapiens
  misc_RNA (1)...(19): siRNA sense strand
aaacugaacccacagaaga

SEQ ID NO: 738751 - RNA, 19 nt, Homo sapiens
  misc_RNA (1)...(19): siRNA sense strand
ugaggacuauuucugcuuu

SEQ ID NO: 738752 - RNA, 19 nt, Homo sapiens
  misc_RNA (1)...(19): siRNA sense strand
gcaaugaaggcacagaaau

SEQ ID NO: 738753 - RNA, 19 nt, Homo sapiens
  misc_RNA (1)...(19): siRNA sense strand
caaggaagccaccauucuu

SEQ ID NO: 738754 - RNA, 19 nt, Homo sapiens
  misc_RNA (1)...(19): siRNA sense strand
ggaaagcuuuaggcaaauc

SEQ ID NO: 738755 - RNA, 19 nt, Homo sapiens
  misc_RNA (1)...(19): siRNA sense strand
aaacaguugaggacuauuu

SEQ ID NO: 738756 - RNA, 19 nt, Homo sapiens
  misc_RNA (1)...(19): siRNA sense strand
caaaucggaugaguguaga

SEQ ID NO: 738757 - RNA, 19 nt, Homo sapiens
  misc_RNA (1)...(19): siRNA sense strand
uagaugcuguagaaauuga

SEQ ID NO: 738758 - RNA, 19 nt, Homo sapiens
  misc_RNA (1)...(19): siRNA sense strand
caaugaaggcacagaaaug

SEQ ID NO: 738759 - RNA, 19 nt, Homo sapiens
  misc_RNA (1)...(19): siRNA sense strand
gacaguaaaggaagaauca

SEQ ID NO: 738760 - RNA, 19 nt, Homo sapiens
  misc_RNA (1)...(19): siRNA sense strand
gcucucgaguccaugugua

SEQ ID NO: 738761 - RNA, 19 nt, Homo sapiens
  misc_RNA (1)...(19): siRNA sense strand
cgagaacuaugaucuugca

SEQ ID NO: 738762 - RNA, 19 nt, Homo sapiens
  misc_RNA (1)...(19): siRNA sense strand
gcagagaugcauaaaauga

SEQ ID NO: 738763 - RNA, 19 nt, Homo sapiens
  misc_RNA (1)...(19): siRNA sense strand
gaacuggccaaguccaaag

SEQ ID NO: 738764 - RNA, 19 nt, Homo sapiens
  misc_RNA (1)...(19): siRNA sense strand
aaaggaagaaucagaagau

SEQ ID NO: 738765 - RNA, 19 nt, Homo sapiens
  misc_RNA (1)...(19): siRNA sense strand
uaaaggaagaaucagaaga

SEQ ID NO: 738766 - RNA, 19 nt, Homo sapiens
  misc_RNA (1)...(19): siRNA sense strand
gucaauaccagaaaggauu

SEQ ID NO: 738767 - RNA, 19 nt, Homo sapiens
  misc_RNA (1)...(19): siRNA sense strand
gcauugcaguguaugaaac

SEQ ID NO: 738768 - RNA, 19 nt, Homo sapiens
  misc_RNA (1)...(19): siRNA sense strand
ggacgugcuuuugucaaua

SEQ ID NO: 738769 - RNA, 19 nt, Homo sapiens
  misc_RNA (1)...(19): siRNA sense strand
gggaaagcuuuaggcaaau

SEQ ID NO: 738770 - RNA, 19 nt, Homo sapiens
  misc_RNA (1)...(19): siRNA sense strand
ugaaggcacagaaauggaa

SEQ ID NO: 738771 - RNA, 19 nt, Homo sapiens
  misc_RNA (1)...(19): siRNA sense strand
ccagucggcugugguagug

SEQ ID NO: 738772 - RNA, 19 nt, Homo sapiens
  misc_RNA (1)...(19): siRNA sense strand
ucaauaccagaaaggauuu

SEQ ID NO: 738773 - RNA, 19 nt, Homo sapiens
  misc_RNA (1)...(19): siRNA sense strand
gaagauccugauuauuauc

SEQ ID NO: 738774 - RNA, 19 nt, Homo sapiens
  misc_RNA (1)...(19): siRNA sense strand
ggaagaaucagaagauccu

SEQ ID NO: 738775 - RNA, 19 nt, Homo sapiens
  misc_RNA (1)...(19): siRNA sense strand
guagaaauugaaacacuca

SEQ ID NO: 738776 - RNA, 19 nt, Homo sapiens
  misc_RNA (1)...(19): siRNA sense strand
uugcaacccugaaauggau

SEQ ID NO: 738777 - RNA, 19 nt, Homo sapiens
  misc_RNA (1)...(19): siRNA sense strand
gaucuugcaacccugaaau

SEQ ID NO: 738778 - RNA, 19 nt, Homo sapiens
  misc_RNA (1)...(19): siRNA sense strand
cccgagaacuaugaucuug

SEQ ID NO: 738779 - RNA, 19 nt, Homo sapiens
  misc_RNA (1)...(19): siRNA sense strand
ggcaaugaaggcacagaaa

SEQ ID NO: 738780 - RNA, 19 nt, Homo sapiens
  misc_RNA (1)...(19): siRNA sense strand
ugucagcucucgaguccau

SEQ ID NO: 738781 - RNA, 19 nt, Homo sapiens
  misc_RNA (1)...(19): siRNA sense strand
guagaugcuguagaaauug

SEQ ID NO: 738782 - RNA, 19 nt, Homo sapiens
  misc_RNA (1)...(19): siRNA sense strand
gaugaguguagaugcugua

SEQ ID NO: 738783 - RNA, 19 nt, Homo sapiens
  misc_RNA (1)...(19): siRNA sense strand
gggcaaugaaggcacagaa

SEQ ID NO: 738784 - RNA, 19 nt, Homo sapiens
  misc_RNA (1)...(19): siRNA sense strand
ucgaguccauguguaaaga

SEQ ID NO: 738785 - RNA, 19 nt, Homo sapiens
  misc_RNA (1)...(19): siRNA sense strand
guaaaggaagaaucagaag

SEQ ID NO: 738786 - RNA, 19 nt, Homo sapiens
  misc_RNA (1)...(19): siRNA sense strand
guccauguguaaagaacug

SEQ ID NO: 738787 - RNA, 19 nt, Homo sapiens
  misc_RNA (1)...(19): siRNA sense strand
gguggugacauuccucaug

SEQ ID NO: 738788 - RNA, 19 nt, Homo sapiens
  misc_RNA (1)...(19): siRNA sense strand
uguagguggucgugugaug

SEQ ID NO: 738789 - RNA, 19 nt, Homo sapiens
  misc_RNA (1)...(19): siRNA sense strand
guguagaugcuguagaaau

SEQ ID NO: 738790 - RNA, 19 nt, Homo sapiens
  misc_RNA (1)...(19): siRNA sense strand
aggcaaaucggaugagugu

SEQ ID NO: 738791 - RNA, 19 nt, Homo sapiens
  misc_RNA (1)...(19): siRNA sense strand
aguaaaggaagaaucagaa

SEQ ID NO: 738792 - RNA, 19 nt, Homo sapiens
  misc_RNA (1)...(19): siRNA sense strand
caguaaaggaagaaucaga

SEQ ID NO: 738793 - RNA, 19 nt, Homo sapiens
  misc_RNA (1)...(19): siRNA sense strand
gguggucgugugaugguaa

SEQ ID NO: 738794 - RNA, 19 nt, Homo sapiens
  misc_RNA (1)...(19): siRNA sense strand
gaugcuguagaaauugaaa

SEQ ID NO: 738795 - RNA, 19 nt, Homo sapiens
  misc_RNA (1)...(19): siRNA sense strand
ccaucaaagugaaaacuga

SEQ ID NO: 738796 - RNA, 19 nt, Homo sapiens
  misc_RNA (1)...(19): siRNA sense strand
gucgugugaugguaacaga

SEQ ID NO: 738797 - RNA, 19 nt, Homo sapiens
  misc_RNA (1)...(19): siRNA sense strand
cuacaacccaggcaaaucg

SEQ ID NO: 738798 - RNA, 19 nt, Homo sapiens
  misc_RNA (1)...(19): siRNA sense strand
uuaaacaccccgagaacua

SEQ ID NO: 738799 - RNA, 19 nt, Homo sapiens
  misc_RNA (1)...(19): siRNA sense strand
ccaggcaaaucggaugagu

SEQ ID NO: 738800 - RNA, 19 nt, Homo sapiens
  misc_RNA (1)...(19): siRNA sense strand
agaaauugaaacacucaga

SEQ ID NO: 738801 - RNA, 19 nt, Homo sapiens
  misc_RNA (1)...(19): siRNA sense strand
gaaaacugaacccacagaa

SEQ ID NO: 738802 - RNA, 19 nt, Homo sapiens
  misc_RNA (1)...(19): siRNA sense strand
gagccaaagaagcauguag

SEQ ID NO: 738803 - RNA, 19 nt, Homo sapiens
  misc_RNA (1)...(19): siRNA sense strand
cagaagauccugauuauua

SEQ ID NO: 738804 - RNA, 19 nt, Homo sapiens
  misc_RNA (1)...(19): siRNA sense strand
guaaagaacuggccaaguc

SEQ ID NO: 738805 - RNA, 19 nt, Homo sapiens
  misc_RNA (1)...(19): siRNA sense strand
gggauuucauucaucauua

SEQ ID NO: 738806 - RNA, 19 nt, Homo sapiens
  misc_RNA (1)...(19): siRNA sense strand
gaguguagaugcuguagaa

SEQ ID NO: 738807 - RNA, 19 nt, Homo sapiens
  misc_RNA (1)...(19): siRNA sense strand
ugggaaagcuuuaggcaaa

SEQ ID NO: 738808 - RNA, 19 nt, Homo sapiens
  misc_RNA (1)...(19): siRNA sense strand
gcaggaugguggugacauu

SEQ ID NO: 738809 - RNA, 19 nt, Homo sapiens
  misc_RNA (1)...(19): siRNA sense strand
gaaauugaaacacucagaa

SEQ ID NO: 738810 - RNA, 19 nt, Homo sapiens
  misc_RNA (1)...(19): siRNA sense strand
uguagaugcuguagaaauu

SEQ ID NO: 738811 - RNA, 19 nt, Homo sapiens
  misc_RNA (1)...(19): siRNA sense strand
ggaaauggcagcugugaca

SEQ ID NO: 738812 - RNA, 19 nt, Homo sapiens
  misc_RNA (1)...(19): siRNA sense strand
gcaaaucggaugaguguag

SEQ ID NO: 738813 - RNA, 19 nt, Homo sapiens
  misc_RNA (1)...(19): siRNA sense strand
aaacugaacccacagaaga

SEQ ID NO: 738814 - RNA, 19 nt, Homo sapiens
  misc_RNA (1)...(19): siRNA sense strand
ugaggacuauuucugcuuu

SEQ ID NO: 738815 - RNA, 19 nt, Homo sapiens
  misc_RNA (1)...(19): siRNA sense strand
gcaaugaaggcacagaaau

SEQ ID NO: 738816 - RNA, 19 nt, Homo sapiens
  misc_RNA (1)...(19): siRNA sense strand
caaggaagccaccauucuu

SEQ ID NO: 738817 - RNA, 19 nt, Homo sapiens
  misc_RNA (1)...(19): siRNA sense strand
ggaaagcuuuaggcaaauc

SEQ ID NO: 738818 - RNA, 19 nt, Homo sapiens
  misc_RNA (1)...(19): siRNA sense strand
aaacaguugaggacuauuu

SEQ ID NO: 738819 - RNA, 19 nt, Homo sapiens
  misc_RNA (1)...(19): siRNA sense strand
caaaucggaugaguguaga

SEQ ID NO: 738820 - RNA, 19 nt, Homo sapiens
  misc_RNA (1)...(19): siRNA sense strand
uagaugcuguagaaauuga

SEQ ID NO: 738821 - RNA, 19 nt, Homo sapiens
  misc_RNA (1)...(19): siRNA sense strand
caaugaaggcacagaaaug

SEQ ID NO: 738822 - RNA, 19 nt, Homo sapiens
  misc_RNA (1)...(19): siRNA sense strand
gacaguaaaggaagaauca

SEQ ID NO: 738823 - RNA, 19 nt, Homo sapiens
  misc_RNA (1)...(19): siRNA sense strand
gcucucgaguccaugugua

SEQ ID NO: 738824 - RNA, 19 nt, Homo sapiens
  misc_RNA (1)...(19): siRNA sense strand
cgagaacuaugaucuugca

SEQ ID NO: 738825 - RNA, 19 nt, Homo sapiens
  misc_RNA (1)...(19): siRNA sense strand
gcagagaugcauaaaauga

SEQ ID NO: 738826 - RNA, 19 nt, Homo sapiens
  misc_RNA (1)...(19): siRNA sense strand
gaacuggccaaguccaaag

SEQ ID NO: 738827 - RNA, 19 nt, Homo sapiens
  misc_RNA (1)...(19): siRNA sense strand
aaaggaagaaucagaagau

SEQ ID NO: 738828 - RNA, 19 nt, Homo sapiens
  misc_RNA (1)...(19): siRNA sense strand
uaaaggaagaaucagaaga

SEQ ID NO: 738829 - RNA, 19 nt, Homo sapiens
  misc_RNA (1)...(19): siRNA sense strand
gucaauaccagaaaggauu

SEQ ID NO: 738830 - RNA, 19 nt, Homo sapiens
  misc_RNA (1)...(19): siRNA sense strand
gcauugcaguguaugaaac

SEQ ID NO: 738831 - RNA, 19 nt, Homo sapiens
  misc_RNA (1)...(19): siRNA sense strand
ggacgugcuuuugucaaua

SEQ ID NO: 738832 - RNA, 19 nt, Homo sapiens
  misc_RNA (1)...(19): siRNA sense strand
gggaaagcuuuaggcaaau

SEQ ID NO: 738833 - RNA, 19 nt, Homo sapiens
  misc_RNA (1)...(19): siRNA sense strand
ugaaggcacagaaauggaa

SEQ ID NO: 738834 - RNA, 19 nt, Homo sapiens
  misc_RNA (1)...(19): siRNA sense strand
ccagucggcugugguagug

SEQ ID NO: 738835 - RNA, 19 nt, Homo sapiens
  misc_RNA (1)...(19): siRNA sense strand
ucaauaccagaaaggauuu

SEQ ID NO: 738836 - RNA, 19 nt, Homo sapiens
  misc_RNA (1)...(19): siRNA sense strand
gaagauccugauuauuauc

SEQ ID NO: 738837 - RNA, 19 nt, Homo sapiens
  misc_RNA (1)...(19): siRNA sense strand
ggaagaaucagaagauccu

SEQ ID NO: 738838 - RNA, 19 nt, Homo sapiens
  misc_RNA (1)...(19): siRNA sense strand
guagaaauugaaacacuca

SEQ ID NO: 738839 - RNA, 19 nt, Homo sapiens
  misc_RNA (1)...(19): siRNA sense strand
uugcaacccugaaauggau

SEQ ID NO: 738840 - RNA, 19 nt, Homo sapiens
  misc_RNA (1)...(19): siRNA sense strand
gaucuugcaacccugaaau

SEQ ID NO: 738841 - RNA, 19 nt, Homo sapiens
  misc_RNA (1)...(19): siRNA sense strand
cccgagaacuaugaucuug

SEQ ID NO: 738842 - RNA, 19 nt, Homo sapiens
  misc_RNA (1)...(19): siRNA sense strand
ggcaaugaaggcacagaaa

SEQ ID NO: 738843 - RNA, 19 nt, Homo sapiens
  misc_RNA (1)...(19): siRNA sense strand
ugucagcucucgaguccau

SEQ ID NO: 738844 - RNA, 19 nt, Homo sapiens
  misc_RNA (1)...(19): siRNA sense strand
guagaugcuguagaaauug

SEQ ID NO: 738845 - RNA, 19 nt, Homo sapiens
  misc_RNA (1)...(19): siRNA sense strand
gaugaguguagaugcugua

SEQ ID NO: 738846 - RNA, 19 nt, Homo sapiens
  misc_RNA (1)...(19): siRNA sense strand
gggcaaugaaggcacagaa

SEQ ID NO: 738847 - RNA, 19 nt, Homo sapiens
  misc_RNA (1)...(19): siRNA sense strand
ucgaguccauguguaaaga

SEQ ID NO: 738848 - RNA, 19 nt, Homo sapiens
  misc_RNA (1)...(19): siRNA sense strand
guaaaggaagaaucagaag

SEQ ID NO: 738849 - RNA, 19 nt, Homo sapiens
  misc_RNA (1)...(19): siRNA sense strand
guccauguguaaagaacug

SEQ ID NO: 738850 - RNA, 19 nt, Homo sapiens
  misc_RNA (1)...(19): siRNA sense strand
gguggugacauuccucaug

SEQ ID NO: 738851 - RNA, 19 nt, Homo sapiens
  misc_RNA (1)...(19): siRNA sense strand
uguagguggucgugugaug

SEQ ID NO: 738852 - RNA, 19 nt, Homo sapiens
  misc_RNA (1)...(19): siRNA sense strand
guguagaugcuguagaaau

SEQ ID NO: 738853 - RNA, 19 nt, Homo sapiens
  misc_RNA (1)...(19): siRNA sense strand
aggcaaaucggaugagugu

SEQ ID NO: 738854 - RNA, 19 nt, Homo sapiens
  misc_RNA (1)...(19): siRNA sense strand
aguaaaggaagaaucagaa

SEQ ID NO: 738855 - RNA, 19 nt, Homo sapiens
  misc_RNA (1)...(19): siRNA sense strand
caguaaaggaagaaucaga

SEQ ID NO: 738856 - RNA, 19 nt, Homo sapiens
  misc_RNA (1)...(19): siRNA sense strand
gguggucgugugaugguaa

SEQ ID NO: 738857 - RNA, 19 nt, Homo sapiens
  misc_RNA (1)...(19): siRNA sense strand
gaugcuguagaaauugaaa

SEQ ID NO: 738858 - RNA, 19 nt, Homo sapiens
  misc_RNA (1)...(19): siRNA sense strand
ccaucaaagugaaaacuga

SEQ ID NO: 738859 - RNA, 19 nt, Homo sapiens
  misc_RNA (1)...(19): siRNA sense strand
gucgugugaugguaacaga

SEQ ID NO: 738860 - RNA, 19 nt, Homo sapiens
  misc_RNA (1)...(19): siRNA sense strand
cuacaacccaggcaaaucg

SEQ ID NO: 738861 - RNA, 19 nt, Homo sapiens
  misc_RNA (1)...(19): siRNA sense strand
uuaaacaccccgagaacua

SEQ ID NO: 738862 - RNA, 19 nt, Homo sapiens
  misc_RNA (1)...(19): siRNA sense strand
ccaggcaaaucggaugagu

SEQ ID NO: 738863 - RNA, 19 nt, Homo sapiens
  misc_RNA (1)...(19): siRNA sense strand
agaaauugaaacacucaga

SEQ ID NO: 738864 - RNA, 19 nt, Homo sapiens
  misc_RNA (1)...(19): siRNA sense strand
gaaaacugaacccacagaa

SEQ ID NO: 738865 - RNA, 19 nt, Homo sapiens
  misc_RNA (1)...(19): siRNA sense strand
gagccaaagaagcauguag

SEQ ID NO: 738866 - RNA, 19 nt, Homo sapiens
  misc_RNA (1)...(19): siRNA sense strand
gaaggaauauuucuacaga

SEQ ID NO: 738867 - RNA, 19 nt, Homo sapiens
  misc_RNA (1)...(19): siRNA sense strand
gaugaaacgucaggaauuu

SEQ ID NO: 738868 - RNA, 19 nt, Homo sapiens
  misc_RNA (1)...(19): siRNA sense strand
ggacgccgcuggagagaaa

SEQ ID NO: 738869 - RNA, 19 nt, Homo sapiens
  misc_RNA (1)...(19): siRNA sense strand
gcuagaagcauauggaaua

SEQ ID NO: 738870 - RNA, 19 nt, Homo sapiens
  misc_RNA (1)...(19): siRNA sense strand
ggaauuuacuacacagaaa

SEQ ID NO: 738871 - RNA, 19 nt, Homo sapiens
  misc_RNA (1)...(19): siRNA sense strand
caacacgggucucugcuuu

SEQ ID NO: 738872 - RNA, 19 nt, Homo sapiens
  misc_RNA (1)...(19): siRNA sense strand
ccaaauggcccacuuuaaa

SEQ ID NO: 738873 - RNA, 19 nt, Homo sapiens
  misc_RNA (1)...(19): siRNA sense strand
gaugaaaggcaagcaauua

SEQ ID NO: 738874 - RNA, 19 nt, Homo sapiens
  misc_RNA (1)...(19): siRNA sense strand
gagaaucgaggacauuuaa

SEQ ID NO: 738875 - RNA, 19 nt, Homo sapiens
  misc_RNA (1)...(19): siRNA sense strand
aagagaagcuggccugauu

SEQ ID NO: 738876 - RNA, 19 nt, Homo sapiens
  misc_RNA (1)...(19): siRNA sense strand
gagguaaacauucuaauug

SEQ ID NO: 738877 - RNA, 19 nt, Homo sapiens
  misc_RNA (1)...(19): siRNA sense strand
gaaaugggcauguguguag

SEQ ID NO: 738878 - RNA, 19 nt, Homo sapiens
  misc_RNA (1)...(19): siRNA sense strand
ccaagaaccucgcauaguc

SEQ ID NO: 738879 - RNA, 19 nt, Homo sapiens
  misc_RNA (1)...(19): siRNA sense strand
gaagcuggccugauuaugu

SEQ ID NO: 738880 - RNA, 19 nt, Homo sapiens
  misc_RNA (1)...(19): siRNA sense strand
uggaauacauggccuguuu

SEQ ID NO: 738881 - RNA, 19 nt, Homo sapiens
  misc_RNA (1)...(19): siRNA sense strand
ugagguaguugacaaagaa

SEQ ID NO: 738882 - RNA, 19 nt, Homo sapiens
  misc_RNA (1)...(19): siRNA sense strand
ccaagugacugcuccauuc

SEQ ID NO: 738883 - RNA, 19 nt, Homo sapiens
  misc_RNA (1)...(19): siRNA sense strand
gagauugaauucugugugu

SEQ ID NO: 738884 - RNA, 19 nt, Homo sapiens
  misc_RNA (1)...(19): siRNA sense strand
gaaucgaggacauuuaauu

SEQ ID NO: 738885 - RNA, 19 nt, Homo sapiens
  misc_RNA (1)...(19): siRNA sense strand
gaaccucauuccuucuuug

SEQ ID NO: 738886 - RNA, 19 nt, Homo sapiens
  misc_RNA (1)...(19): siRNA sense strand
cuacagauauuucacagau

SEQ ID NO: 738887 - RNA, 19 nt, Homo sapiens
  misc_RNA (1)...(19): siRNA sense strand
gcaagcaauuagagccuuu

SEQ ID NO: 738888 - RNA, 19 nt, Homo sapiens
  misc_RNA (1)...(19): siRNA sense strand
acagauauuucacagauga

SEQ ID NO: 738889 - RNA, 19 nt, Homo sapiens
  misc_RNA (1)...(19): siRNA sense strand
acacaucccuguuccaaau

SEQ ID NO: 738890 - RNA, 19 nt, Homo sapiens
  misc_RNA (1)...(19): siRNA sense strand
cagcaugucuucuacuuca

SEQ ID NO: 738891 - RNA, 19 nt, Homo sapiens
  misc_RNA (1)...(19): siRNA sense strand
agcaagaucuucccaauug

SEQ ID NO: 738892 - RNA, 19 nt, Homo sapiens
  misc_RNA (1)...(19): siRNA sense strand
gaccuggccucugugcuua

SEQ ID NO: 738893 - RNA, 19 nt, Homo sapiens
  misc_RNA (1)...(19): siRNA sense strand
ucgcugagcucaucggaaa

SEQ ID NO: 738894 - RNA, 19 nt, Homo sapiens
  misc_RNA (1)...(19): siRNA sense strand
gugcaaagauggacucuac

SEQ ID NO: 738895 - RNA, 19 nt, Homo sapiens
  misc_RNA (1)...(19): siRNA sense strand
ggagcugcaucacauaguu

SEQ ID NO: 738896 - RNA, 19 nt, Homo sapiens
  misc_RNA (1)...(19): siRNA sense strand
gcaccucccucacuuugug

SEQ ID NO: 738897 - RNA, 19 nt, Homo sapiens
  misc_RNA (1)...(19): siRNA sense strand
ugaaggagcuggaccuaag

SEQ ID NO: 738898 - RNA, 19 nt, Homo sapiens
  misc_RNA (1)...(19): siRNA sense strand
gggcauguguguagaaaca

SEQ ID NO: 738899 - RNA, 19 nt, Homo sapiens
  misc_RNA (1)...(19): siRNA sense strand
gaaaucagagaaagagaga

SEQ ID NO: 738900 - RNA, 19 nt, Homo sapiens
  misc_RNA (1)...(19): siRNA sense strand
gaccggaagugcaaagaug

SEQ ID NO: 738901 - RNA, 19 nt, Homo sapiens
  misc_RNA (1)...(19): siRNA sense strand
aaacagacauggagcucuu

SEQ ID NO: 738902 - RNA, 19 nt, Homo sapiens
  misc_RNA (1)...(19): siRNA sense strand
ucacacagcugcuacuucu

SEQ ID NO: 738903 - RNA, 19 nt, Homo sapiens
  misc_RNA (1)...(19): siRNA sense strand
ggagaaucgaggacauuua

SEQ ID NO: 738904 - RNA, 19 nt, Homo sapiens
  misc_RNA (1)...(19): siRNA sense strand
cagcacagaucaacaugga

SEQ ID NO: 738905 - RNA, 19 nt, Homo sapiens
  misc_RNA (1)...(19): siRNA sense strand
ggaugaaacgucaggaauu

SEQ ID NO: 738906 - RNA, 19 nt, Homo sapiens
  misc_RNA (1)...(19): siRNA sense strand
ugaaagacaagaaagauga

SEQ ID NO: 738907 - RNA, 19 nt, Homo sapiens
  misc_RNA (1)...(19): siRNA sense strand
gcaagugaaagacaagaaa

SEQ ID NO: 738908 - RNA, 19 nt, Homo sapiens
  misc_RNA (1)...(19): siRNA sense strand
gcaauuagagccuuuaggu

SEQ ID NO: 738909 - RNA, 19 nt, Homo sapiens
  misc_RNA (1)...(19): siRNA sense strand
gcuguggccucacgucuga

SEQ ID NO: 738910 - RNA, 19 nt, Homo sapiens
  misc_RNA (1)...(19): siRNA sense strand
agagagagauggagaacau

SEQ ID NO: 738911 - RNA, 19 nt, Homo sapiens
  misc_RNA (1)...(19): siRNA sense strand
ggaucaggcugcaagugaa

SEQ ID NO: 738912 - RNA, 19 nt, Homo sapiens
  misc_RNA (1)...(19): siRNA sense strand
gcaggaaggaauauuucua

SEQ ID NO: 738913 - RNA, 19 nt, Homo sapiens
  misc_RNA (1)...(19): siRNA sense strand
ugacaucgguggagguugu

SEQ ID NO: 738914 - RNA, 19 nt, Homo sapiens
  misc_RNA (1)...(19): siRNA sense strand
cgaguucacuucccuguag

SEQ ID NO: 738915 - RNA, 19 nt, Homo sapiens
  misc_RNA (1)...(19): siRNA sense strand
ggagagguaaacauucuaa

SEQ ID NO: 738916 - RNA, 19 nt, Homo sapiens
  misc_RNA (1)...(19): siRNA sense strand
aggaggagcugaaggaguu

SEQ ID NO: 738917 - RNA, 19 nt, Homo sapiens
  misc_RNA (1)...(19): siRNA sense strand
ccucugugguguugcuuua

SEQ ID NO: 738918 - RNA, 19 nt, Homo sapiens
  misc_RNA (1)...(19): siRNA sense strand
gcagcaauguccuaugucu

SEQ ID NO: 738919 - RNA, 19 nt, Homo sapiens
  misc_RNA (1)...(19): siRNA sense strand
gaacaaccuggaugacguu

SEQ ID NO: 738920 - RNA, 19 nt, Homo sapiens
  misc_RNA (1)...(19): siRNA sense strand
gagcuggaccuaaguggaa

SEQ ID NO: 738921 - RNA, 19 nt, Homo sapiens
  misc_RNA (1)...(19): siRNA sense strand
ccaauggccucuggaugaa

SEQ ID NO: 738922 - RNA, 19 nt, Homo sapiens
  misc_RNA (1)...(19): siRNA sense strand
gcugauagcccgagugaca

SEQ ID NO: 738923 - RNA, 19 nt, Homo sapiens
  misc_RNA (1)...(19): siRNA sense strand
gaaaccaggagaucucaug

SEQ ID NO: 738924 - RNA, 19 nt, Homo sapiens
  misc_RNA (1)...(19): siRNA sense strand
gagcaagaucuucccaauu

SEQ ID NO: 738925 - RNA, 19 nt, Homo sapiens
  misc_RNA (1)...(19): siRNA sense strand
ugagaucagagacuuauuu

SEQ ID NO: 738926 - RNA, 19 nt, Homo sapiens
  misc_RNA (1)...(19): siRNA sense strand
aaaagacgcuagaagcaua

SEQ ID NO: 738927 - RNA, 19 nt, Homo sapiens
  misc_RNA (1)...(19): siRNA sense strand
ggacacaucccuguuccaa

SEQ ID NO: 738928 - RNA, 19 nt, Homo sapiens
  misc_RNA (1)...(19): siRNA sense strand
ggagagaugaguaauagca

SEQ ID NO: 738929 - RNA, 19 nt, Homo sapiens
  misc_RNA (1)...(19): siRNA sense strand
aaccacacguuuccuauug

SEQ ID NO: 738930 - RNA, 19 nt, Homo sapiens
  misc_RNA (1)...(19): siRNA sense strand
gcauguguguagaaacaga

SEQ ID NO: 738931 - RNA, 19 nt, Homo sapiens
  misc_RNA (1)...(19): siRNA sense strand
agaaagagagagagagaaa

SEQ ID NO: 738932 - RNA, 19 nt, Homo sapiens
  misc_RNA (1)...(19): siRNA sense strand
guucuacguuggccacuug

SEQ ID NO: 738933 - RNA, 19 nt, Homo sapiens
  misc_RNA (1)...(19): siRNA sense strand
ggaaagcuccccagaggua

SEQ ID NO: 738934 - RNA, 19 nt, Homo sapiens
  misc_RNA (1)...(19): siRNA sense strand
cgggagagaugaguaauag

SEQ ID NO: 738935 - RNA, 19 nt, Homo sapiens
  misc_RNA (1)...(19): siRNA sense strand
ggaccuggccucugugcuu

SEQ ID NO: 738936 - RNA, 19 nt, Homo sapiens
  misc_RNA (1)...(19): siRNA sense strand
gggcaucaaccacacguuu

SEQ ID NO: 738937 - RNA, 19 nt, Homo sapiens
  misc_RNA (1)...(19): siRNA sense strand
gguaaacauucuaauugca

SEQ ID NO: 738938 - RNA, 19 nt, Homo sapiens
  misc_RNA (1)...(19): siRNA sense strand
uaauugagaucagagacuu

SEQ ID NO: 738939 - RNA, 19 nt, Homo sapiens
  misc_RNA (1)...(19): siRNA sense strand
cgaggacauuuaauugaga

SEQ ID NO: 738940 - RNA, 19 nt, Homo sapiens
  misc_RNA (1)...(19): siRNA sense strand
gcugcuacuucuacaaaga

SEQ ID NO: 738941 - RNA, 19 nt, Homo sapiens
  misc_RNA (1)...(19): siRNA sense strand
gagagagaaaucagagaaa

SEQ ID NO: 738942 - RNA, 19 nt, Homo sapiens
  misc_RNA (1)...(19): siRNA sense strand
gagaucagagacuuauuug

SEQ ID NO: 738943 - RNA, 19 nt, Homo sapiens
  misc_RNA (1)...(19): siRNA sense strand
ggagaucucaugccugcaa

SEQ ID NO: 738944 - RNA, 19 nt, Homo sapiens
  misc_RNA (1)...(19): siRNA sense strand
gggaucaggcugcaaguga

SEQ ID NO: 738945 - RNA, 19 nt, Homo sapiens
  misc_RNA (1)...(19): siRNA sense strand
caaauggcccacuuuaaag

SEQ ID NO: 738946 - RNA, 19 nt, Homo sapiens
  misc_RNA (1)...(19): siRNA sense strand
ggucucugcuuugugauga

SEQ ID NO: 738947 - RNA, 19 nt, Homo sapiens
  misc_RNA (1)...(19): siRNA sense strand
ggccugcacuugccugaug

SEQ ID NO: 738948 - RNA, 19 nt, Homo sapiens
  misc_RNA (1)...(19): siRNA sense strand
gaaaggcaagcaauuagag

SEQ ID NO: 738949 - RNA, 19 nt, Homo sapiens
  misc_RNA (1)...(19): siRNA sense strand
gagaagcuggccugauuau

SEQ ID NO: 738950 - RNA, 19 nt, Homo sapiens
  misc_RNA (1)...(19): siRNA sense strand
gcacuuucugcauuaaauu

SEQ ID NO: 738951 - RNA, 19 nt, Homo sapiens
  misc_RNA (1)...(19): siRNA sense strand
acacagaaaucagagaaag

SEQ ID NO: 738952 - RNA, 19 nt, Homo sapiens
  misc_RNA (1)...(19): siRNA sense strand
gacccauccucaccucauu

SEQ ID NO: 738953 - RNA, 19 nt, Homo sapiens
  misc_RNA (1)...(19): siRNA sense strand
ccgcauagccguaccuuca

SEQ ID NO: 738954 - RNA, 19 nt, Homo sapiens
  misc_RNA (1)...(19): siRNA sense strand
gaacuggagcucugcuauc

SEQ ID NO: 738955 - RNA, 19 nt, Homo sapiens
  misc_RNA (1)...(19): siRNA sense strand
ugagcaagaucuucccaau

SEQ ID NO: 738956 - RNA, 19 nt, Homo sapiens
  misc_RNA (1)...(19): siRNA sense strand
cauccugccugcaaacuca

SEQ ID NO: 738957 - RNA, 19 nt, Homo sapiens
  misc_RNA (1)...(19): siRNA sense strand
aaacguuccugacacaagu

SEQ ID NO: 738958 - RNA, 19 nt, Homo sapiens
  misc_RNA (1)...(19): siRNA sense strand
uauugggccuguuaaguga

SEQ ID NO: 738959 - RNA, 19 nt, Homo sapiens
  misc_RNA (1)...(19): siRNA sense strand
caucaucuccaccuucuug

SEQ ID NO: 738960 - RNA, 19 nt, Homo sapiens
  misc_RNA (1)...(19): siRNA sense strand
acaacccucugucuacauu

SEQ ID NO: 738961 - RNA, 19 nt, Homo sapiens
  misc_RNA (1)...(19): siRNA sense strand
ccacaacccucugucuaca

SEQ ID NO: 738962 - RNA, 19 nt, Homo sapiens
  misc_RNA (1)...(19): siRNA sense strand
uuagguuggucaaaucaaa

SEQ ID NO: 738963 - RNA, 19 nt, Homo sapiens
  misc_RNA (1)...(19): siRNA sense strand
ccacagcucugcagaaccu

SEQ ID NO: 738964 - RNA, 19 nt, Homo sapiens
  misc_RNA (1)...(19): siRNA sense strand
ggaggagaaucgaggacau

SEQ ID NO: 738965 - RNA, 19 nt, Homo sapiens
  misc_RNA (1)...(19): siRNA sense strand
ggguggagcugcaucacau

SEQ ID NO: 738966 - RNA, 19 nt, Homo sapiens
  misc_RNA (1)...(19): siRNA sense strand
gaaggaauauuucuacaga

SEQ ID NO: 738967 - RNA, 19 nt, Homo sapiens
  misc_RNA (1)...(19): siRNA sense strand
gaugaaacgucaggaauuu

SEQ ID NO: 738968 - RNA, 19 nt, Homo sapiens
  misc_RNA (1)...(19): siRNA sense strand
ggacgccgcuggagagaaa

SEQ ID NO: 738969 - RNA, 19 nt, Homo sapiens
  misc_RNA (1)...(19): siRNA sense strand
gcuagaagcauauggaaua

SEQ ID NO: 738970 - RNA, 19 nt, Homo sapiens
  misc_RNA (1)...(19): siRNA sense strand
ggaauuuacuacacagaaa

SEQ ID NO: 738971 - RNA, 19 nt, Homo sapiens
  misc_RNA (1)...(19): siRNA sense strand
caacacgggucucugcuuu

SEQ ID NO: 738972 - RNA, 19 nt, Homo sapiens
  misc_RNA (1)...(19): siRNA sense strand
ccaaauggcccacuuuaaa

SEQ ID NO: 738973 - RNA, 19 nt, Homo sapiens
  misc_RNA (1)...(19): siRNA sense strand
gaugaaaggcaagcaauua

SEQ ID NO: 738974 - RNA, 19 nt, Homo sapiens
  misc_RNA (1)...(19): siRNA sense strand
gagaaucgaggacauuuaa

SEQ ID NO: 738975 - RNA, 19 nt, Homo sapiens
  misc_RNA (1)...(19): siRNA sense strand
aagagaagcuggccugauu

SEQ ID NO: 738976 - RNA, 19 nt, Homo sapiens
  misc_RNA (1)...(19): siRNA sense strand
gagguaaacauucuaauug

SEQ ID NO: 738977 - RNA, 19 nt, Homo sapiens
  misc_RNA (1)...(19): siRNA sense strand
gaaaugggcauguguguag

SEQ ID NO: 738978 - RNA, 19 nt, Homo sapiens
  misc_RNA (1)...(19): siRNA sense strand
ccaagaaccucgcauaguc

SEQ ID NO: 738979 - RNA, 19 nt, Homo sapiens
  misc_RNA (1)...(19): siRNA sense strand
gaagcuggccugauuaugu

SEQ ID NO: 738980 - RNA, 19 nt, Homo sapiens
  misc_RNA (1)...(19): siRNA sense strand
uggaauacauggccuguuu

SEQ ID NO: 738981 - RNA, 19 nt, Homo sapiens
  misc_RNA (1)...(19): siRNA sense strand
ugagguaguugacaaagaa

SEQ ID NO: 738982 - RNA, 19 nt, Homo sapiens
  misc_RNA (1)...(19): siRNA sense strand
ccaagugacugcuccauuc

SEQ ID NO: 738983 - RNA, 19 nt, Homo sapiens
  misc_RNA (1)...(19): siRNA sense strand
gagauugaauucugugugu

SEQ ID NO: 738984 - RNA, 19 nt, Homo sapiens
  misc_RNA (1)...(19): siRNA sense strand
gaaucgaggacauuuaauu

SEQ ID NO: 738985 - RNA, 19 nt, Homo sapiens
  misc_RNA (1)...(19): siRNA sense strand
gaaccucauuccuucuuug

SEQ ID NO: 738986 - RNA, 19 nt, Homo sapiens
  misc_RNA (1)...(19): siRNA sense strand
cuacagauauuucacagau

SEQ ID NO: 738987 - RNA, 19 nt, Homo sapiens
  misc_RNA (1)...(19): siRNA sense strand
gcaagcaauuagagccuuu

SEQ ID NO: 738988 - RNA, 19 nt, Homo sapiens
  misc_RNA (1)...(19): siRNA sense strand
acagauauuucacagauga

SEQ ID NO: 738989 - RNA, 19 nt, Homo sapiens
  misc_RNA (1)...(19): siRNA sense strand
acacaucccuguuccaaau

SEQ ID NO: 738990 - RNA, 19 nt, Homo sapiens
  misc_RNA (1)...(19): siRNA sense strand
cagcaugucuucuacuuca

SEQ ID NO: 738991 - RNA, 19 nt, Homo sapiens
  misc_RNA (1)...(19): siRNA sense strand
agcaagaucuucccaauug

SEQ ID NO: 738992 - RNA, 19 nt, Homo sapiens
  misc_RNA (1)...(19): siRNA sense strand
gaccuggccucugugcuua

SEQ ID NO: 738993 - RNA, 19 nt, Homo sapiens
  misc_RNA (1)...(19): siRNA sense strand
ucgcugagcucaucggaaa

SEQ ID NO: 738994 - RNA, 19 nt, Homo sapiens
  misc_RNA (1)...(19): siRNA sense strand
gugcaaagauggacucuac

SEQ ID NO: 738995 - RNA, 19 nt, Homo sapiens
  misc_RNA (1)...(19): siRNA sense strand
ggagcugcaucacauaguu

SEQ ID NO: 738996 - RNA, 19 nt, Homo sapiens
  misc_RNA (1)...(19): siRNA sense strand
gcaccucccucacuuugug

SEQ ID NO: 738997 - RNA, 19 nt, Homo sapiens
  misc_RNA (1)...(19): siRNA sense strand
ugaaggagcuggaccuaag

SEQ ID NO: 738998 - RNA, 19 nt, Homo sapiens
  misc_RNA (1)...(19): siRNA sense strand
gggcauguguguagaaaca

SEQ ID NO: 738999 - RNA, 19 nt, Homo sapiens
  misc_RNA (1)...(19): siRNA sense strand
gaaaucagagaaagagaga

SEQ ID NO: 739000 - RNA, 19 nt, Homo sapiens
  misc_RNA (1)...(19): siRNA sense strand
gaccggaagugcaaagaug

SEQ ID NO: 739001 - RNA, 19 nt, Homo sapiens
  misc_RNA (1)...(19): siRNA sense strand
aaacagacauggagcucuu

SEQ ID NO: 739002 - RNA, 19 nt, Homo sapiens
  misc_RNA (1)...(19): siRNA sense strand
ucacacagcugcuacuucu

SEQ ID NO: 739003 - RNA, 19 nt, Homo sapiens
  misc_RNA (1)...(19): siRNA sense strand
ggagaaucgaggacauuua

SEQ ID NO: 739004 - RNA, 19 nt, Homo sapiens
  misc_RNA (1)...(19): siRNA sense strand
cagcacagaucaacaugga

SEQ ID NO: 739005 - RNA, 19 nt, Homo sapiens
  misc_RNA (1)...(19): siRNA sense strand
ggaugaaacgucaggaauu

SEQ ID NO: 739006 - RNA, 19 nt, Homo sapiens
  misc_RNA (1)...(19): siRNA sense strand
ugaaagacaagaaagauga

SEQ ID NO: 739007 - RNA, 19 nt, Homo sapiens
  misc_RNA (1)...(19): siRNA sense strand
gcaagugaaagacaagaaa

SEQ ID NO: 739008 - RNA, 19 nt, Homo sapiens
  misc_RNA (1)...(19): siRNA sense strand
gcaauuagagccuuuaggu

SEQ ID NO: 739009 - RNA, 19 nt, Homo sapiens
  misc_RNA (1)...(19): siRNA sense strand
gcuguggccucacgucuga

SEQ ID NO: 739010 - RNA, 19 nt, Homo sapiens
  misc_RNA (1)...(19): siRNA sense strand
agagagagauggagaacau

SEQ ID NO: 739011 - RNA, 19 nt, Homo sapiens
  misc_RNA (1)...(19): siRNA sense strand
ggaucaggcugcaagugaa

SEQ ID NO: 739012 - RNA, 19 nt, Homo sapiens
  misc_RNA (1)...(19): siRNA sense strand
gcaggaaggaauauuucua

SEQ ID NO: 739013 - RNA, 19 nt, Homo sapiens
  misc_RNA (1)...(19): siRNA sense strand
ugacaucgguggagguugu

SEQ ID NO: 739014 - RNA, 19 nt, Homo sapiens
  misc_RNA (1)...(19): siRNA sense strand
cgaguucacuucccuguag

SEQ ID NO: 739015 - RNA, 19 nt, Homo sapiens
  misc_RNA (1)...(19): siRNA sense strand
ggagagguaaacauucuaa

SEQ ID NO: 739016 - RNA, 19 nt, Homo sapiens
  misc_RNA (1)...(19): siRNA sense strand
aggaggagcugaaggaguu

SEQ ID NO: 739017 - RNA, 19 nt, Homo sapiens
  misc_RNA (1)...(19): siRNA sense strand
ccucugugguguugcuuua

SEQ ID NO: 739018 - RNA, 19 nt, Homo sapiens
  misc_RNA (1)...(19): siRNA sense strand
gcagcaauguccuaugucu

SEQ ID NO: 739019 - RNA, 19 nt, Homo sapiens
  misc_RNA (1)...(19): siRNA sense strand
gaacaaccuggaugacguu

SEQ ID NO: 739020 - RNA, 19 nt, Homo sapiens
  misc_RNA (1)...(19): siRNA sense strand
gagcuggaccuaaguggaa

SEQ ID NO: 739021 - RNA, 19 nt, Homo sapiens
  misc_RNA (1)...(19): siRNA sense strand
ccaauggccucuggaugaa

SEQ ID NO: 739022 - RNA, 19 nt, Homo sapiens
  misc_RNA (1)...(19): siRNA sense strand
gcugauagcccgagugaca

SEQ ID NO: 739023 - RNA, 19 nt, Homo sapiens
  misc_RNA (1)...(19): siRNA sense strand
gaaaccaggagaucucaug

SEQ ID NO: 739024 - RNA, 19 nt, Homo sapiens
  misc_RNA (1)...(19): siRNA sense strand
gagcaagaucuucccaauu

SEQ ID NO: 739025 - RNA, 19 nt, Homo sapiens
  misc_RNA (1)...(19): siRNA sense strand
ugagaucagagacuuauuu

SEQ ID NO: 739026 - RNA, 19 nt, Homo sapiens
  misc_RNA (1)...(19): siRNA sense strand
aaaagacgcuagaagcaua

SEQ ID NO: 739027 - RNA, 19 nt, Homo sapiens
  misc_RNA (1)...(19): siRNA sense strand
ggacacaucccuguuccaa

SEQ ID NO: 739028 - RNA, 19 nt, Homo sapiens
  misc_RNA (1)...(19): siRNA sense strand
ggagagaugaguaauagca

SEQ ID NO: 739029 - RNA, 19 nt, Homo sapiens
  misc_RNA (1)...(19): siRNA sense strand
aaccacacguuuccuauug

SEQ ID NO: 739030 - RNA, 19 nt, Homo sapiens
  misc_RNA (1)...(19): siRNA sense strand
gcauguguguagaaacaga

SEQ ID NO: 739031 - RNA, 19 nt, Homo sapiens
  misc_RNA (1)...(19): siRNA sense strand
agaaagagagagagagaaa

SEQ ID NO: 739032 - RNA, 19 nt, Homo sapiens
  misc_RNA (1)...(19): siRNA sense strand
guucuacguuggccacuug

SEQ ID NO: 739033 - RNA, 19 nt, Homo sapiens
  misc_RNA (1)...(19): siRNA sense strand
ggaaagcuccccagaggua

SEQ ID NO: 739034 - RNA, 19 nt, Homo sapiens
  misc_RNA (1)...(19): siRNA sense strand
cgggagagaugaguaauag

SEQ ID NO: 739035 - RNA, 19 nt, Homo sapiens
  misc_RNA (1)...(19): siRNA sense strand
ggaccuggccucugugcuu

SEQ ID NO: 739036 - RNA, 19 nt, Homo sapiens
  misc_RNA (1)...(19): siRNA sense strand
gggcaucaaccacacguuu

SEQ ID NO: 739037 - RNA, 19 nt, Homo sapiens
  misc_RNA (1)...(19): siRNA sense strand
gguaaacauucuaauugca

SEQ ID NO: 739038 - RNA, 19 nt, Homo sapiens
  misc_RNA (1)...(19): siRNA sense strand
uaauugagaucagagacuu

SEQ ID NO: 739039 - RNA, 19 nt, Homo sapiens
  misc_RNA (1)...(19): siRNA sense strand
cgaggacauuuaauugaga

SEQ ID NO: 739040 - RNA, 19 nt, Homo sapiens
  misc_RNA (1)...(19): siRNA sense strand
gcugcuacuucuacaaaga

SEQ ID NO: 739041 - RNA, 19 nt, Homo sapiens
  misc_RNA (1)...(19): siRNA sense strand
gagagagaaaucagagaaa

SEQ ID NO: 739042 - RNA, 19 nt, Homo sapiens
  misc_RNA (1)...(19): siRNA sense strand
gagaucagagacuuauuug

SEQ ID NO: 739043 - RNA, 19 nt, Homo sapiens
  misc_RNA (1)...(19): siRNA sense strand
ggagaucucaugccugcaa

SEQ ID NO: 739044 - RNA, 19 nt, Homo sapiens
  misc_RNA (1)...(19): siRNA sense strand
gggaucaggcugcaaguga

SEQ ID NO: 739045 - RNA, 19 nt, Homo sapiens
  misc_RNA (1)...(19): siRNA sense strand
caaauggcccacuuuaaag

SEQ ID NO: 739046 - RNA, 19 nt, Homo sapiens
  misc_RNA (1)...(19): siRNA sense strand
ggucucugcuuugugauga

SEQ ID NO: 739047 - RNA, 19 nt, Homo sapiens
  misc_RNA (1)...(19): siRNA sense strand
ggccugcacuugccugaug

SEQ ID NO: 739048 - RNA, 19 nt, Homo sapiens
  misc_RNA (1)...(19): siRNA sense strand
gaaaggcaagcaauuagag

SEQ ID NO: 739049 - RNA, 19 nt, Homo sapiens
  misc_RNA (1)...(19): siRNA sense strand
gagaagcuggccugauuau

SEQ ID NO: 739050 - RNA, 19 nt, Homo sapiens
  misc_RNA (1)...(19): siRNA sense strand
gcacuuucugcauuaaauu

SEQ ID NO: 739051 - RNA, 19 nt, Homo sapiens
  misc_RNA (1)...(19): siRNA sense strand
acacagaaaucagagaaag

SEQ ID NO: 739052 - RNA, 19 nt, Homo sapiens
  misc_RNA (1)...(19): siRNA sense strand
gacccauccucaccucauu

SEQ ID NO: 739053 - RNA, 19 nt, Homo sapiens
  misc_RNA (1)...(19): siRNA sense strand
ccgcauagccguaccuuca

SEQ ID NO: 739054 - RNA, 19 nt, Homo sapiens
  misc_RNA (1)...(19): siRNA sense strand
gaacuggagcucugcuauc

SEQ ID NO: 739055 - RNA, 19 nt, Homo sapiens
  misc_RNA (1)...(19): siRNA sense strand
ugagcaagaucuucccaau

SEQ ID NO: 739056 - RNA, 19 nt, Homo sapiens
  misc_RNA (1)...(19): siRNA sense strand
cauccugccugcaaacuca

SEQ ID NO: 739057 - RNA, 19 nt, Homo sapiens
  misc_RNA (1)...(19): siRNA sense strand
aaacguuccugacacaagu

SEQ ID NO: 739058 - RNA, 19 nt, Homo sapiens
  misc_RNA (1)...(19): siRNA sense strand
uauugggccuguuaaguga

SEQ ID NO: 739059 - RNA, 19 nt, Homo sapiens
  misc_RNA (1)...(19): siRNA sense strand
caucaucuccaccuucuug

SEQ ID NO: 739060 - RNA, 19 nt, Homo sapiens
  misc_RNA (1)...(19): siRNA sense strand
acaacccucugucuacauu

SEQ ID NO: 739061 - RNA, 19 nt, Homo sapiens
  misc_RNA (1)...(19): siRNA sense strand
ccacaacccucugucuaca

SEQ ID NO: 739062 - RNA, 19 nt, Homo sapiens
  misc_RNA (1)...(19): siRNA sense strand
uuagguuggucaaaucaaa

SEQ ID NO: 739063 - RNA, 19 nt, Homo sapiens
  misc_RNA (1)...(19): siRNA sense strand
ccacagcucugcagaaccu

SEQ ID NO: 739064 - RNA, 19 nt, Homo sapiens
  misc_RNA (1)...(19): siRNA sense strand
ggaggagaaucgaggacau

SEQ ID NO: 739065 - RNA, 19 nt, Homo sapiens
  misc_RNA (1)...(19): siRNA sense strand
ggguggagcugcaucacau

SEQ ID NO: 739066 - RNA, 19 nt, Homo sapiens
  misc_RNA (1)...(19): siRNA sense strand
gaaggaauauuucuacaga

SEQ ID NO: 739067 - RNA, 19 nt, Homo sapiens
  misc_RNA (1)...(19): siRNA sense strand
gaugaaacgucaggaauuu

SEQ ID NO: 739068 - RNA, 19 nt, Homo sapiens
  misc_RNA (1)...(19): siRNA sense strand
ggacgccgcuggagagaaa

SEQ ID NO: 739069 - RNA, 19 nt, Homo sapiens
  misc_RNA (1)...(19): siRNA sense strand
gcuagaagcauauggaaua

SEQ ID NO: 739070 - RNA, 19 nt, Homo sapiens
  misc_RNA (1)...(19): siRNA sense strand
ggaauuuacuacacagaaa

SEQ ID NO: 739071 - RNA, 19 nt, Homo sapiens
  misc_RNA (1)...(19): siRNA sense strand
caacacgggucucugcuuu

SEQ ID NO: 739072 - RNA, 19 nt, Homo sapiens
  misc_RNA (1)...(19): siRNA sense strand
ccaaauggcccacuuuaaa

SEQ ID NO: 739073 - RNA, 19 nt, Homo sapiens
  misc_RNA (1)...(19): siRNA sense strand
gaugaaaggcaagcaauua

SEQ ID NO: 739074 - RNA, 19 nt, Homo sapiens
  misc_RNA (1)...(19): siRNA sense strand
gagaaucgaggacauuuaa

SEQ ID NO: 739075 - RNA, 19 nt, Homo sapiens
  misc_RNA (1)...(19): siRNA sense strand
aagagaagcuggccugauu

SEQ ID NO: 739076 - RNA, 19 nt, Homo sapiens
  misc_RNA (1)...(19): siRNA sense strand
gagguaaacauucuaauug

SEQ ID NO: 739077 - RNA, 19 nt, Homo sapiens
  misc_RNA (1)...(19): siRNA sense strand
gaaaugggcauguguguag

SEQ ID NO: 739078 - RNA, 19 nt, Homo sapiens
  misc_RNA (1)...(19): siRNA sense strand
ccaagaaccucgcauaguc

SEQ ID NO: 739079 - RNA, 19 nt, Homo sapiens
  misc_RNA (1)...(19): siRNA sense strand
gaagcuggccugauuaugu

SEQ ID NO: 739080 - RNA, 19 nt, Homo sapiens
  misc_RNA (1)...(19): siRNA sense strand
uggaauacauggccuguuu

SEQ ID NO: 739081 - RNA, 19 nt, Homo sapiens
  misc_RNA (1)...(19): siRNA sense strand
ugagguaguugacaaagaa

SEQ ID NO: 739082 - RNA, 19 nt, Homo sapiens
  misc_RNA (1)...(19): siRNA sense strand
ccaagugacugcuccauuc

SEQ ID NO: 739083 - RNA, 19 nt, Homo sapiens
  misc_RNA (1)...(19): siRNA sense strand
gagauugaauucugugugu

SEQ ID NO: 739084 - RNA, 19 nt, Homo sapiens
  misc_RNA (1)...(19): siRNA sense strand
gaaucgaggacauuuaauu

SEQ ID NO: 739085 - RNA, 19 nt, Homo sapiens
  misc_RNA (1)...(19): siRNA sense strand
gaaccucauuccuucuuug

SEQ ID NO: 739086 - RNA, 19 nt, Homo sapiens
  misc_RNA (1)...(19): siRNA sense strand
cuacagauauuucacagau

SEQ ID NO: 739087 - RNA, 19 nt, Homo sapiens
  misc_RNA (1)...(19): siRNA sense strand
gcaagcaauuagagccuuu

SEQ ID NO: 739088 - RNA, 19 nt, Homo sapiens
  misc_RNA (1)...(19): siRNA sense strand
acagauauuucacagauga

SEQ ID NO: 739089 - RNA, 19 nt, Homo sapiens
  misc_RNA (1)...(19): siRNA sense strand
acacaucccuguuccaaau

SEQ ID NO: 739090 - RNA, 19 nt, Homo sapiens
  misc_RNA (1)...(19): siRNA sense strand
cagcaugucuucuacuuca

SEQ ID NO: 739091 - RNA, 19 nt, Homo sapiens
  misc_RNA (1)...(19): siRNA sense strand
agcaagaucuucccaauug

SEQ ID NO: 739092 - RNA, 19 nt, Homo sapiens
  misc_RNA (1)...(19): siRNA sense strand
gaccuggccucugugcuua

SEQ ID NO: 739093 - RNA, 19 nt, Homo sapiens
  misc_RNA (1)...(19): siRNA sense strand
ucgcugagcucaucggaaa

SEQ ID NO: 739094 - RNA, 19 nt, Homo sapiens
  misc_RNA (1)...(19): siRNA sense strand
gugcaaagauggacucuac

SEQ ID NO: 739095 - RNA, 19 nt, Homo sapiens
  misc_RNA (1)...(19): siRNA sense strand
ggagcugcaucacauaguu

SEQ ID NO: 739096 - RNA, 19 nt, Homo sapiens
  misc_RNA (1)...(19): siRNA sense strand
gcaccucccucacuuugug

SEQ ID NO: 739097 - RNA, 19 nt, Homo sapiens
  misc_RNA (1)...(19): siRNA sense strand
ugaaggagcuggaccuaag

SEQ ID NO: 739098 - RNA, 19 nt, Homo sapiens
  misc_RNA (1)...(19): siRNA sense strand
gggcauguguguagaaaca

SEQ ID NO: 739099 - RNA, 19 nt, Homo sapiens
  misc_RNA (1)...(19): siRNA sense strand
gaaaucagagaaagagaga

SEQ ID NO: 739100 - RNA, 19 nt, Homo sapiens
  misc_RNA (1)...(19): siRNA sense strand
gaccggaagugcaaagaug

SEQ ID NO: 739101 - RNA, 19 nt, Homo sapiens
  misc_RNA (1)...(19): siRNA sense strand
aaacagacauggagcucuu

SEQ ID NO: 739102 - RNA, 19 nt, Homo sapiens
  misc_RNA (1)...(19): siRNA sense strand
ucacacagcugcuacuucu

SEQ ID NO: 739103 - RNA, 19 nt, Homo sapiens
  misc_RNA (1)...(19): siRNA sense strand
ggagaaucgaggacauuua

SEQ ID NO: 739104 - RNA, 19 nt, Homo sapiens
  misc_RNA (1)...(19): siRNA sense strand
cagcacagaucaacaugga

SEQ ID NO: 739105 - RNA, 19 nt, Homo sapiens
  misc_RNA (1)...(19): siRNA sense strand
ggaugaaacgucaggaauu

SEQ ID NO: 739106 - RNA, 19 nt, Homo sapiens
  misc_RNA (1)...(19): siRNA sense strand
ugaaagacaagaaagauga

SEQ ID NO: 739107 - RNA, 19 nt, Homo sapiens
  misc_RNA (1)...(19): siRNA sense strand
gcaagugaaagacaagaaa

SEQ ID NO: 739108 - RNA, 19 nt, Homo sapiens
  misc_RNA (1)...(19): siRNA sense strand
gcaauuagagccuuuaggu

SEQ ID NO: 739109 - RNA, 19 nt, Homo sapiens
  misc_RNA (1)...(19): siRNA sense strand
gcuguggccucacgucuga

SEQ ID NO: 739110 - RNA, 19 nt, Homo sapiens
  misc_RNA (1)...(19): siRNA sense strand
agagagagauggagaacau

SEQ ID NO: 739111 - RNA, 19 nt, Homo sapiens
  misc_RNA (1)...(19): siRNA sense strand
ggaucaggcugcaagugaa

SEQ ID NO: 739112 - RNA, 19 nt, Homo sapiens
  misc_RNA (1)...(19): siRNA sense strand
gcaggaaggaauauuucua

SEQ ID NO: 739113 - RNA, 19 nt, Homo sapiens
  misc_RNA (1)...(19): siRNA sense strand
ugacaucgguggagguugu

SEQ ID NO: 739114 - RNA, 19 nt, Homo sapiens
  misc_RNA (1)...(19): siRNA sense strand
cgaguucacuucccuguag

SEQ ID NO: 739115 - RNA, 19 nt, Homo sapiens
  misc_RNA (1)...(19): siRNA sense strand
ggagagguaaacauucuaa

SEQ ID NO: 739116 - RNA, 19 nt, Homo sapiens
  misc_RNA (1)...(19): siRNA sense strand
aggaggagcugaaggaguu

SEQ ID NO: 739117 - RNA, 19 nt, Homo sapiens
  misc_RNA (1)...(19): siRNA sense strand
ccucugugguguugcuuua

SEQ ID NO: 739118 - RNA, 19 nt, Homo sapiens
  misc_RNA (1)...(19): siRNA sense strand
gcagcaauguccuaugucu

SEQ ID NO: 739119 - RNA, 19 nt, Homo sapiens
  misc_RNA (1)...(19): siRNA sense strand
gaacaaccuggaugacguu

SEQ ID NO: 739120 - RNA, 19 nt, Homo sapiens
  misc_RNA (1)...(19): siRNA sense strand
gagcuggaccuaaguggaa

SEQ ID NO: 739121 - RNA, 19 nt, Homo sapiens
  misc_RNA (1)...(19): siRNA sense strand
ccaauggccucuggaugaa

SEQ ID NO: 739122 - RNA, 19 nt, Homo sapiens
  misc_RNA (1)...(19): siRNA sense strand
gcugauagcccgagugaca

SEQ ID NO: 739123 - RNA, 19 nt, Homo sapiens
  misc_RNA (1)...(19): siRNA sense strand
gaaaccaggagaucucaug

SEQ ID NO: 739124 - RNA, 19 nt, Homo sapiens
  misc_RNA (1)...(19): siRNA sense strand
gagcaagaucuucccaauu

SEQ ID NO: 739125 - RNA, 19 nt, Homo sapiens
  misc_RNA (1)...(19): siRNA sense strand
ugagaucagagacuuauuu

SEQ ID NO: 739126 - RNA, 19 nt, Homo sapiens
  misc_RNA (1)...(19): siRNA sense strand
aaaagacgcuagaagcaua

SEQ ID NO: 739127 - RNA, 19 nt, Homo sapiens
  misc_RNA (1)...(19): siRNA sense strand
ggacacaucccuguuccaa

SEQ ID NO: 739128 - RNA, 19 nt, Homo sapiens
  misc_RNA (1)...(19): siRNA sense strand
ggagagaugaguaauagca

SEQ ID NO: 739129 - RNA, 19 nt, Homo sapiens
  misc_RNA (1)...(19): siRNA sense strand
aaccacacguuuccuauug

SEQ ID NO: 739130 - RNA, 19 nt, Homo sapiens
  misc_RNA (1)...(19): siRNA sense strand
gcauguguguagaaacaga

SEQ ID NO: 739131 - RNA, 19 nt, Homo sapiens
  misc_RNA (1)...(19): siRNA sense strand
agaaagagagagagagaaa

SEQ ID NO: 739132 - RNA, 19 nt, Homo sapiens
  misc_RNA (1)...(19): siRNA sense strand
guucuacguuggccacuug

SEQ ID NO: 739133 - RNA, 19 nt, Homo sapiens
  misc_RNA (1)...(19): siRNA sense strand
ggaaagcuccccagaggua

SEQ ID NO: 739134 - RNA, 19 nt, Homo sapiens
  misc_RNA (1)...(19): siRNA sense strand
cgggagagaugaguaauag

SEQ ID NO: 739135 - RNA, 19 nt, Homo sapiens
  misc_RNA (1)...(19): siRNA sense strand
ggaccuggccucugugcuu

SEQ ID NO: 739136 - RNA, 19 nt, Homo sapiens
  misc_RNA (1)...(19): siRNA sense strand
gggcaucaaccacacguuu

SEQ ID NO: 739137 - RNA, 19 nt, Homo sapiens
  misc_RNA (1)...(19): siRNA sense strand
gguaaacauucuaauugca

SEQ ID NO: 739138 - RNA, 19 nt, Homo sapiens
  misc_RNA (1)...(19): siRNA sense strand
uaauugagaucagagacuu

SEQ ID NO: 739139 - RNA, 19 nt, Homo sapiens
  misc_RNA (1)...(19): siRNA sense strand
cgaggacauuuaauugaga

SEQ ID NO: 739140 - RNA, 19 nt, Homo sapiens
  misc_RNA (1)...(19): siRNA sense strand
gcugcuacuucuacaaaga

SEQ ID NO: 739141 - RNA, 19 nt, Homo sapiens
  misc_RNA (1)...(19): siRNA sense strand
gagagagaaaucagagaaa

SEQ ID NO: 739142 - RNA, 19 nt, Homo sapiens
  misc_RNA (1)...(19): siRNA sense strand
gagaucagagacuuauuug

SEQ ID NO: 739143 - RNA, 19 nt, Homo sapiens
  misc_RNA (1)...(19): siRNA sense strand
ggagaucucaugccugcaa

SEQ ID NO: 739144 - RNA, 19 nt, Homo sapiens
  misc_RNA (1)...(19): siRNA sense strand
gggaucaggcugcaaguga

SEQ ID NO: 739145 - RNA, 19 nt, Homo sapiens
  misc_RNA (1)...(19): siRNA sense strand
caaauggcccacuuuaaag

SEQ ID NO: 739146 - RNA, 19 nt, Homo sapiens
  misc_RNA (1)...(19): siRNA sense strand
ggucucugcuuugugauga

SEQ ID NO: 739147 - RNA, 19 nt, Homo sapiens
  misc_RNA (1)...(19): siRNA sense strand
ggccugcacuugccugaug

SEQ ID NO: 739148 - RNA, 19 nt, Homo sapiens
  misc_RNA (1)...(19): siRNA sense strand
gaaaggcaagcaauuagag

SEQ ID NO: 739149 - RNA, 19 nt, Homo sapiens
  misc_RNA (1)...(19): siRNA sense strand
gagaagcuggccugauuau

SEQ ID NO: 739150 - RNA, 19 nt, Homo sapiens
  misc_RNA (1)...(19): siRNA sense strand
gcacuuucugcauuaaauu

SEQ ID NO: 739151 - RNA, 19 nt, Homo sapiens
  misc_RNA (1)...(19): siRNA sense strand
acacagaaaucagagaaag

SEQ ID NO: 739152 - RNA, 19 nt, Homo sapiens
  misc_RNA (1)...(19): siRNA sense strand
gacccauccucaccucauu

SEQ ID NO: 739153 - RNA, 19 nt, Homo sapiens
  misc_RNA (1)...(19): siRNA sense strand
ccgcauagccguaccuuca

SEQ ID NO: 739154 - RNA, 19 nt, Homo sapiens
  misc_RNA (1)...(19): siRNA sense strand
gaacuggagcucugcuauc

SEQ ID NO: 739155 - RNA, 19 nt, Homo sapiens
  misc_RNA (1)...(19): siRNA sense strand
ugagcaagaucuucccaau

SEQ ID NO: 739156 - RNA, 19 nt, Homo sapiens
  misc_RNA (1)...(19): siRNA sense strand
cauccugccugcaaacuca

SEQ ID NO: 739157 - RNA, 19 nt, Homo sapiens
  misc_RNA (1)...(19): siRNA sense strand
aaacguuccugacacaagu

SEQ ID NO: 739158 - RNA, 19 nt, Homo sapiens
  misc_RNA (1)...(19): siRNA sense strand
uauugggccuguuaaguga

SEQ ID NO: 739159 - RNA, 19 nt, Homo sapiens
  misc_RNA (1)...(19): siRNA sense strand
caucaucuccaccuucuug

SEQ ID NO: 739160 - RNA, 19 nt, Homo sapiens
  misc_RNA (1)...(19): siRNA sense strand
acaacccucugucuacauu

SEQ ID NO: 739161 - RNA, 19 nt, Homo sapiens
  misc_RNA (1)...(19): siRNA sense strand
ccacaacccucugucuaca

SEQ ID NO: 739162 - RNA, 19 nt, Homo sapiens
  misc_RNA (1)...(19): siRNA sense strand
uuagguuggucaaaucaaa

SEQ ID NO: 739163 - RNA, 19 nt, Homo sapiens
  misc_RNA (1)...(19): siRNA sense strand
ccacagcucugcagaaccu

SEQ ID NO: 739164 - RNA, 19 nt, Homo sapiens
  misc_RNA (1)...(19): siRNA sense strand
ggaggagaaucgaggacau

SEQ ID NO: 739165 - RNA, 19 nt, Homo sapiens
  misc_RNA (1)...(19): siRNA sense strand
ggguggagcugcaucacau

SEQ ID NO: 739166 - RNA, 19 nt, Homo sapiens
  misc_RNA (1)...(19): siRNA sense strand
gaaggaauauuucuacaga

SEQ ID NO: 739167 - RNA, 19 nt, Homo sapiens
  misc_RNA (1)...(19): siRNA sense strand
gaugaaacgucaggaauuu

SEQ ID NO: 739168 - RNA, 19 nt, Homo sapiens
  misc_RNA (1)...(19): siRNA sense strand
ggacgccgcuggagagaaa

SEQ ID NO: 739169 - RNA, 19 nt, Homo sapiens
  misc_RNA (1)...(19): siRNA sense strand
gcuagaagcauauggaaua

SEQ ID NO: 739170 - RNA, 19 nt, Homo sapiens
  misc_RNA (1)...(19): siRNA sense strand
ggaauuuacuacacagaaa

SEQ ID NO: 739171 - RNA, 19 nt, Homo sapiens
  misc_RNA (1)...(19): siRNA sense strand
caacacgggucucugcuuu

SEQ ID NO: 739172 - RNA, 19 nt, Homo sapiens
  misc_RNA (1)...(19): siRNA sense strand
ccaaauggcccacuuuaaa

SEQ ID NO: 739173 - RNA, 19 nt, Homo sapiens
  misc_RNA (1)...(19): siRNA sense strand
gaugaaaggcaagcaauua

SEQ ID NO: 739174 - RNA, 19 nt, Homo sapiens
  misc_RNA (1)...(19): siRNA sense strand
gagaaucgaggacauuuaa

SEQ ID NO: 739175 - RNA, 19 nt, Homo sapiens
  misc_RNA (1)...(19): siRNA sense strand
aagagaagcuggccugauu

SEQ ID NO: 739176 - RNA, 19 nt, Homo sapiens
  misc_RNA (1)...(19): siRNA sense strand
gagguaaacauucuaauug

SEQ ID NO: 739177 - RNA, 19 nt, Homo sapiens
  misc_RNA (1)...(19): siRNA sense strand
gaaaugggcauguguguag

SEQ ID NO: 739178 - RNA, 19 nt, Homo sapiens
  misc_RNA (1)...(19): siRNA sense strand
ccaagaaccucgcauaguc

SEQ ID NO: 739179 - RNA, 19 nt, Homo sapiens
  misc_RNA (1)...(19): siRNA sense strand
gaagcuggccugauuaugu

SEQ ID NO: 739180 - RNA, 19 nt, Homo sapiens
  misc_RNA (1)...(19): siRNA sense strand
uggaauacauggccuguuu

SEQ ID NO: 739181 - RNA, 19 nt, Homo sapiens
  misc_RNA (1)...(19): siRNA sense strand
ugagguaguugacaaagaa

SEQ ID NO: 739182 - RNA, 19 nt, Homo sapiens
  misc_RNA (1)...(19): siRNA sense strand
ccaagugacugcuccauuc

SEQ ID NO: 739183 - RNA, 19 nt, Homo sapiens
  misc_RNA (1)...(19): siRNA sense strand
gagauugaauucugugugu

SEQ ID NO: 739184 - RNA, 19 nt, Homo sapiens
  misc_RNA (1)...(19): siRNA sense strand
gaaucgaggacauuuaauu

SEQ ID NO: 739185 - RNA, 19 nt, Homo sapiens
  misc_RNA (1)...(19): siRNA sense strand
gaaccucauuccuucuuug

SEQ ID NO: 739186 - RNA, 19 nt, Homo sapiens
  misc_RNA (1)...(19): siRNA sense strand
cuacagauauuucacagau

SEQ ID NO: 739187 - RNA, 19 nt, Homo sapiens
  misc_RNA (1)...(19): siRNA sense strand
gcaagcaauuagagccuuu

SEQ ID NO: 739188 - RNA, 19 nt, Homo sapiens
  misc_RNA (1)...(19): siRNA sense strand
acagauauuucacagauga

SEQ ID NO: 739189 - RNA, 19 nt, Homo sapiens
  misc_RNA (1)...(19): siRNA sense strand
acacaucccuguuccaaau

SEQ ID NO: 739190 - RNA, 19 nt, Homo sapiens
  misc_RNA (1)...(19): siRNA sense strand
cagcaugucuucuacuuca

SEQ ID NO: 739191 - RNA, 19 nt, Homo sapiens
  misc_RNA (1)...(19): siRNA sense strand
agcaagaucuucccaauug

SEQ ID NO: 739192 - RNA, 19 nt, Homo sapiens
  misc_RNA (1)...(19): siRNA sense strand
gaccuggccucugugcuua

SEQ ID NO: 739193 - RNA, 19 nt, Homo sapiens
  misc_RNA (1)...(19): siRNA sense strand
ucgcugagcucaucggaaa

SEQ ID NO: 739194 - RNA, 19 nt, Homo sapiens
  misc_RNA (1)...(19): siRNA sense strand
gugcaaagauggacucuac

SEQ ID NO: 739195 - RNA, 19 nt, Homo sapiens
  misc_RNA (1)...(19): siRNA sense strand
ggagcugcaucacauaguu

SEQ ID NO: 739196 - RNA, 19 nt, Homo sapiens
  misc_RNA (1)...(19): siRNA sense strand
gcaccucccucacuuugug

SEQ ID NO: 739197 - RNA, 19 nt, Homo sapiens
  misc_RNA (1)...(19): siRNA sense strand
ugaaggagcuggaccuaag

SEQ ID NO: 739198 - RNA, 19 nt, Homo sapiens
  misc_RNA (1)...(19): siRNA sense strand
gggcauguguguagaaaca

SEQ ID NO: 739199 - RNA, 19 nt, Homo sapiens
  misc_RNA (1)...(19): siRNA sense strand
gaaaucagagaaagagaga

SEQ ID NO: 739200 - RNA, 19 nt, Homo sapiens
  misc_RNA (1)...(19): siRNA sense strand
gaccggaagugcaaagaug

SEQ ID NO: 739201 - RNA, 19 nt, Homo sapiens
  misc_RNA (1)...(19): siRNA sense strand
aaacagacauggagcucuu

SEQ ID NO: 739202 - RNA, 19 nt, Homo sapiens
  misc_RNA (1)...(19): siRNA sense strand
ucacacagcugcuacuucu

SEQ ID NO: 739203 - RNA, 19 nt, Homo sapiens
  misc_RNA (1)...(19): siRNA sense strand
ggagaaucgaggacauuua

SEQ ID NO: 739204 - RNA, 19 nt, Homo sapiens
  misc_RNA (1)...(19): siRNA sense strand
cagcacagaucaacaugga

SEQ ID NO: 739205 - RNA, 19 nt, Homo sapiens
  misc_RNA (1)...(19): siRNA sense strand
ggaugaaacgucaggaauu

SEQ ID NO: 739206 - RNA, 19 nt, Homo sapiens
  misc_RNA (1)...(19): siRNA sense strand
ugaaagacaagaaagauga

SEQ ID NO: 739207 - RNA, 19 nt, Homo sapiens
  misc_RNA (1)...(19): siRNA sense strand
gcaagugaaagacaagaaa

SEQ ID NO: 739208 - RNA, 19 nt, Homo sapiens
  misc_RNA (1)...(19): siRNA sense strand
gcaauuagagccuuuaggu

SEQ ID NO: 739209 - RNA, 19 nt, Homo sapiens
  misc_RNA (1)...(19): siRNA sense strand
gcuguggccucacgucuga

SEQ ID NO: 739210 - RNA, 19 nt, Homo sapiens
  misc_RNA (1)...(19): siRNA sense strand
agagagagauggagaacau

SEQ ID NO: 739211 - RNA, 19 nt, Homo sapiens
  misc_RNA (1)...(19): siRNA sense strand
ggaucaggcugcaagugaa

SEQ ID NO: 739212 - RNA, 19 nt, Homo sapiens
  misc_RNA (1)...(19): siRNA sense strand
gcaggaaggaauauuucua

SEQ ID NO: 739213 - RNA, 19 nt, Homo sapiens
  misc_RNA (1)...(19): siRNA sense strand
ugacaucgguggagguugu

SEQ ID NO: 739214 - RNA, 19 nt, Homo sapiens
  misc_RNA (1)...(19): siRNA sense strand
cgaguucacuucccuguag

SEQ ID NO: 739215 - RNA, 19 nt, Homo sapiens
  misc_RNA (1)...(19): siRNA sense strand
ggagagguaaacauucuaa

SEQ ID NO: 739216 - RNA, 19 nt, Homo sapiens
  misc_RNA (1)...(19): siRNA sense strand
aggaggagcugaaggaguu

SEQ ID NO: 739217 - RNA, 19 nt, Homo sapiens
  misc_RNA (1)...(19): siRNA sense strand
ccucugugguguugcuuua

SEQ ID NO: 739218 - RNA, 19 nt, Homo sapiens
  misc_RNA (1)...(19): siRNA sense strand
gcagcaauguccuaugucu

SEQ ID NO: 739219 - RNA, 19 nt, Homo sapiens
  misc_RNA (1)...(19): siRNA sense strand
gaacaaccuggaugacguu

SEQ ID NO: 739220 - RNA, 19 nt, Homo sapiens
  misc_RNA (1)...(19): siRNA sense strand
gagcuggaccuaaguggaa

SEQ ID NO: 739221 - RNA, 19 nt, Homo sapiens
  misc_RNA (1)...(19): siRNA sense strand
ccaauggccucuggaugaa

SEQ ID NO: 739222 - RNA, 19 nt, Homo sapiens
  misc_RNA (1)...(19): siRNA sense strand
gcugauagcccgagugaca

SEQ ID NO: 739223 - RNA, 19 nt, Homo sapiens
  misc_RNA (1)...(19): siRNA sense strand
gaaaccaggagaucucaug

SEQ ID NO: 739224 - RNA, 19 nt, Homo sapiens
  misc_RNA (1)...(19): siRNA sense strand
gagcaagaucuucccaauu

SEQ ID NO: 739225 - RNA, 19 nt, Homo sapiens
  misc_RNA (1)...(19): siRNA sense strand
ugagaucagagacuuauuu

SEQ ID NO: 739226 - RNA, 19 nt, Homo sapiens
  misc_RNA (1)...(19): siRNA sense strand
aaaagacgcuagaagcaua

SEQ ID NO: 739227 - RNA, 19 nt, Homo sapiens
  misc_RNA (1)...(19): siRNA sense strand
ggacacaucccuguuccaa

SEQ ID NO: 739228 - RNA, 19 nt, Homo sapiens
  misc_RNA (1)...(19): siRNA sense strand
ggagagaugaguaauagca

SEQ ID NO: 739229 - RNA, 19 nt, Homo sapiens
  misc_RNA (1)...(19): siRNA sense strand
aaccacacguuuccuauug

SEQ ID NO: 739230 - RNA, 19 nt, Homo sapiens
  misc_RNA (1)...(19): siRNA sense strand
gcauguguguagaaacaga

SEQ ID NO: 739231 - RNA, 19 nt, Homo sapiens
  misc_RNA (1)...(19): siRNA sense strand
agaaagagagagagagaaa

SEQ ID NO: 739232 - RNA, 19 nt, Homo sapiens
  misc_RNA (1)...(19): siRNA sense strand
guucuacguuggccacuug

SEQ ID NO: 739233 - RNA, 19 nt, Homo sapiens
  misc_RNA (1)...(19): siRNA sense strand
ggaaagcuccccagaggua

SEQ ID NO: 739234 - RNA, 19 nt, Homo sapiens
  misc_RNA (1)...(19): siRNA sense strand
cgggagagaugaguaauag

SEQ ID NO: 739235 - RNA, 19 nt, Homo sapiens
  misc_RNA (1)...(19): siRNA sense strand
ggaccuggccucugugcuu

SEQ ID NO: 739236 - RNA, 19 nt, Homo sapiens
  misc_RNA (1)...(19): siRNA sense strand
gggcaucaaccacacguuu

SEQ ID NO: 739237 - RNA, 19 nt, Homo sapiens
  misc_RNA (1)...(19): siRNA sense strand
gguaaacauucuaauugca

SEQ ID NO: 739238 - RNA, 19 nt, Homo sapiens
  misc_RNA (1)...(19): siRNA sense strand
uaauugagaucagagacuu

SEQ ID NO: 739239 - RNA, 19 nt, Homo sapiens
  misc_RNA (1)...(19): siRNA sense strand
cgaggacauuuaauugaga

SEQ ID NO: 739240 - RNA, 19 nt, Homo sapiens
  misc_RNA (1)...(19): siRNA sense strand
gcugcuacuucuacaaaga

SEQ ID NO: 739241 - RNA, 19 nt, Homo sapiens
  misc_RNA (1)...(19): siRNA sense strand
gagagagaaaucagagaaa

SEQ ID NO: 739242 - RNA, 19 nt, Homo sapiens
  misc_RNA (1)...(19): siRNA sense strand
gagaucagagacuuauuug

SEQ ID NO: 739243 - RNA, 19 nt, Homo sapiens
  misc_RNA (1)...(19): siRNA sense strand
ggagaucucaugccugcaa

SEQ ID NO: 739244 - RNA, 19 nt, Homo sapiens
  misc_RNA (1)...(19): siRNA sense strand
gggaucaggcugcaaguga

SEQ ID NO: 739245 - RNA, 19 nt, Homo sapiens
  misc_RNA (1)...(19): siRNA sense strand
caaauggcccacuuuaaag

SEQ ID NO: 739246 - RNA, 19 nt, Homo sapiens
  misc_RNA (1)...(19): siRNA sense strand
ggucucugcuuugugauga

SEQ ID NO: 739247 - RNA, 19 nt, Homo sapiens
  misc_RNA (1)...(19): siRNA sense strand
ggccugcacuugccugaug

SEQ ID NO: 739248 - RNA, 19 nt, Homo sapiens
  misc_RNA (1)...(19): siRNA sense strand
gaaaggcaagcaauuagag

SEQ ID NO: 739249 - RNA, 19 nt, Homo sapiens
  misc_RNA (1)...(19): siRNA sense strand
gagaagcuggccugauuau

SEQ ID NO: 739250 - RNA, 19 nt, Homo sapiens
  misc_RNA (1)...(19): siRNA sense strand
gcacuuucugcauuaaauu

SEQ ID NO: 739251 - RNA, 19 nt, Homo sapiens
  misc_RNA (1)...(19): siRNA sense strand
acacagaaaucagagaaag

SEQ ID NO: 739252 - RNA, 19 nt, Homo sapiens
  misc_RNA (1)...(19): siRNA sense strand
gacccauccucaccucauu

SEQ ID NO: 739253 - RNA, 19 nt, Homo sapiens
  misc_RNA (1)...(19): siRNA sense strand
ccgcauagccguaccuuca

SEQ ID NO: 739254 - RNA, 19 nt, Homo sapiens
  misc_RNA (1)...(19): siRNA sense strand
gaacuggagcucugcuauc

SEQ ID NO: 739255 - RNA, 19 nt, Homo sapiens
  misc_RNA (1)...(19): siRNA sense strand
ugagcaagaucuucccaau

SEQ ID NO: 739256 - RNA, 19 nt, Homo sapiens
  misc_RNA (1)...(19): siRNA sense strand
cauccugccugcaaacuca

SEQ ID NO: 739257 - RNA, 19 nt, Homo sapiens
  misc_RNA (1)...(19): siRNA sense strand
aaacguuccugacacaagu

SEQ ID NO: 739258 - RNA, 19 nt, Homo sapiens
  misc_RNA (1)...(19): siRNA sense strand
uauugggccuguuaaguga

SEQ ID NO: 739259 - RNA, 19 nt, Homo sapiens
  misc_RNA (1)...(19): siRNA sense strand
caucaucuccaccuucuug

SEQ ID NO: 739260 - RNA, 19 nt, Homo sapiens
  misc_RNA (1)...(19): siRNA sense strand
acaacccucugucuacauu

SEQ ID NO: 739261 - RNA, 19 nt, Homo sapiens
  misc_RNA (1)...(19): siRNA sense strand
ccacaacccucugucuaca

SEQ ID NO: 739262 - RNA, 19 nt, Homo sapiens
  misc_RNA (1)...(19): siRNA sense strand
uuagguuggucaaaucaaa

SEQ ID NO: 739263 - RNA, 19 nt, Homo sapiens
  misc_RNA (1)...(19): siRNA sense strand
ccacagcucugcagaaccu

SEQ ID NO: 739264 - RNA, 19 nt, Homo sapiens
  misc_RNA (1)...(19): siRNA sense strand
ggaggagaaucgaggacau

SEQ ID NO: 739265 - RNA, 19 nt, Homo sapiens
  misc_RNA (1)...(19): siRNA sense strand
ggguggagcugcaucacau

SEQ ID NO: 739266 - RNA, 19 nt, Homo sapiens
  misc_RNA (1)...(19): siRNA sense strand
gaaggaauauuucuacaga

SEQ ID NO: 739267 - RNA, 19 nt, Homo sapiens
  misc_RNA (1)...(19): siRNA sense strand
gaugaaacgucaggaauuu

SEQ ID NO: 739268 - RNA, 19 nt, Homo sapiens
  misc_RNA (1)...(19): siRNA sense strand
ggacgccgcuggagagaaa

SEQ ID NO: 739269 - RNA, 19 nt, Homo sapiens
  misc_RNA (1)...(19): siRNA sense strand
gcuagaagcauauggaaua

SEQ ID NO: 739270 - RNA, 19 nt, Homo sapiens
  misc_RNA (1)...(19): siRNA sense strand
ggaauuuacuacacagaaa

SEQ ID NO: 739271 - RNA, 19 nt, Homo sapiens
  misc_RNA (1)...(19): siRNA sense strand
caacacgggucucugcuuu

SEQ ID NO: 739272 - RNA, 19 nt, Homo sapiens
  misc_RNA (1)...(19): siRNA sense strand
ccaaauggcccacuuuaaa

SEQ ID NO: 739273 - RNA, 19 nt, Homo sapiens
  misc_RNA (1)...(19): siRNA sense strand
gaugaaaggcaagcaauua

SEQ ID NO: 739274 - RNA, 19 nt, Homo sapiens
  misc_RNA (1)...(19): siRNA sense strand
gagaaucgaggacauuuaa

SEQ ID NO: 739275 - RNA, 19 nt, Homo sapiens
  misc_RNA (1)...(19): siRNA sense strand
aagagaagcuggccugauu

SEQ ID NO: 739276 - RNA, 19 nt, Homo sapiens
  misc_RNA (1)...(19): siRNA sense strand
gagguaaacauucuaauug

SEQ ID NO: 739277 - RNA, 19 nt, Homo sapiens
  misc_RNA (1)...(19): siRNA sense strand
gaaaugggcauguguguag

SEQ ID NO: 739278 - RNA, 19 nt, Homo sapiens
  misc_RNA (1)...(19): siRNA sense strand
ccaagaaccucgcauaguc

SEQ ID NO: 739279 - RNA, 19 nt, Homo sapiens
  misc_RNA (1)...(19): siRNA sense strand
gaagcuggccugauuaugu

SEQ ID NO: 739280 - RNA, 19 nt, Homo sapiens
  misc_RNA (1)...(19): siRNA sense strand
uggaauacauggccuguuu

SEQ ID NO: 739281 - RNA, 19 nt, Homo sapiens
  misc_RNA (1)...(19): siRNA sense strand
ugagguaguugacaaagaa

SEQ ID NO: 739282 - RNA, 19 nt, Homo sapiens
  misc_RNA (1)...(19): siRNA sense strand
ccaagugacugcuccauuc

SEQ ID NO: 739283 - RNA, 19 nt, Homo sapiens
  misc_RNA (1)...(19): siRNA sense strand
gagauugaauucugugugu

SEQ ID NO: 739284 - RNA, 19 nt, Homo sapiens
  misc_RNA (1)...(19): siRNA sense strand
gaaucgaggacauuuaauu

SEQ ID NO: 739285 - RNA, 19 nt, Homo sapiens
  misc_RNA (1)...(19): siRNA sense strand
gaaccucauuccuucuuug

SEQ ID NO: 739286 - RNA, 19 nt, Homo sapiens
  misc_RNA (1)...(19): siRNA sense strand
cuacagauauuucacagau

SEQ ID NO: 739287 - RNA, 19 nt, Homo sapiens
  misc_RNA (1)...(19): siRNA sense strand
gcaagcaauuagagccuuu

SEQ ID NO: 739288 - RNA, 19 nt, Homo sapiens
  misc_RNA (1)...(19): siRNA sense strand
acagauauuucacagauga

SEQ ID NO: 739289 - RNA, 19 nt, Homo sapiens
  misc_RNA (1)...(19): siRNA sense strand
acacaucccuguuccaaau

SEQ ID NO: 739290 - RNA, 19 nt, Homo sapiens
  misc_RNA (1)...(19): siRNA sense strand
cagcaugucuucuacuuca

SEQ ID NO: 739291 - RNA, 19 nt, Homo sapiens
  misc_RNA (1)...(19): siRNA sense strand
agcaagaucuucccaauug

SEQ ID NO: 739292 - RNA, 19 nt, Homo sapiens
  misc_RNA (1)...(19): siRNA sense strand
gaccuggccucugugcuua

SEQ ID NO: 739293 - RNA, 19 nt, Homo sapiens
  misc_RNA (1)...(19): siRNA sense strand
ucgcugagcucaucggaaa

SEQ ID NO: 739294 - RNA, 19 nt, Homo sapiens
  misc_RNA (1)...(19): siRNA sense strand
gugcaaagauggacucuac

SEQ ID NO: 739295 - RNA, 19 nt, Homo sapiens
  misc_RNA (1)...(19): siRNA sense strand
ggagcugcaucacauaguu

SEQ ID NO: 739296 - RNA, 19 nt, Homo sapiens
  misc_RNA (1)...(19): siRNA sense strand
gcaccucccucacuuugug

SEQ ID NO: 739297 - RNA, 19 nt, Homo sapiens
  misc_RNA (1)...(19): siRNA sense strand
ugaaggagcuggaccuaag

SEQ ID NO: 739298 - RNA, 19 nt, Homo sapiens
  misc_RNA (1)...(19): siRNA sense strand
gggcauguguguagaaaca

SEQ ID NO: 739299 - RNA, 19 nt, Homo sapiens
  misc_RNA (1)...(19): siRNA sense strand
gaaaucagagaaagagaga

SEQ ID NO: 739300 - RNA, 19 nt, Homo sapiens
  misc_RNA (1)...(19): siRNA sense strand
gaccggaagugcaaagaug

SEQ ID NO: 739301 - RNA, 19 nt, Homo sapiens
  misc_RNA (1)...(19): siRNA sense strand
aaacagacauggagcucuu

SEQ ID NO: 739302 - RNA, 19 nt, Homo sapiens
  misc_RNA (1)...(19): siRNA sense strand
ucacacagcugcuacuucu

SEQ ID NO: 739303 - RNA, 19 nt, Homo sapiens
  misc_RNA (1)...(19): siRNA sense strand
ggagaaucgaggacauuua

SEQ ID NO: 739304 - RNA, 19 nt, Homo sapiens
  misc_RNA (1)...(19): siRNA sense strand
cagcacagaucaacaugga

SEQ ID NO: 739305 - RNA, 19 nt, Homo sapiens
  misc_RNA (1)...(19): siRNA sense strand
ggaugaaacgucaggaauu

SEQ ID NO: 739306 - RNA, 19 nt, Homo sapiens
  misc_RNA (1)...(19): siRNA sense strand
ugaaagacaagaaagauga

SEQ ID NO: 739307 - RNA, 19 nt, Homo sapiens
  misc_RNA (1)...(19): siRNA sense strand
gcaagugaaagacaagaaa

SEQ ID NO: 739308 - RNA, 19 nt, Homo sapiens
  misc_RNA (1)...(19): siRNA sense strand
gcaauuagagccuuuaggu

SEQ ID NO: 739309 - RNA, 19 nt, Homo sapiens
  misc_RNA (1)...(19): siRNA sense strand
gcuguggccucacgucuga

SEQ ID NO: 739310 - RNA, 19 nt, Homo sapiens
  misc_RNA (1)...(19): siRNA sense strand
agagagagauggagaacau

SEQ ID NO: 739311 - RNA, 19 nt, Homo sapiens
  misc_RNA (1)...(19): siRNA sense strand
ggaucaggcugcaagugaa

SEQ ID NO: 739312 - RNA, 19 nt, Homo sapiens
  misc_RNA (1)...(19): siRNA sense strand
gcaggaaggaauauuucua

SEQ ID NO: 739313 - RNA, 19 nt, Homo sapiens
  misc_RNA (1)...(19): siRNA sense strand
ugacaucgguggagguugu

SEQ ID NO: 739314 - RNA, 19 nt, Homo sapiens
  misc_RNA (1)...(19): siRNA sense strand
cgaguucacuucccuguag

SEQ ID NO: 739315 - RNA, 19 nt, Homo sapiens
  misc_RNA (1)...(19): siRNA sense strand
ggagagguaaacauucuaa

SEQ ID NO: 739316 - RNA, 19 nt, Homo sapiens
  misc_RNA (1)...(19): siRNA sense strand
aggaggagcugaaggaguu

SEQ ID NO: 739317 - RNA, 19 nt, Homo sapiens
  misc_RNA (1)...(19): siRNA sense strand
ccucugugguguugcuuua

SEQ ID NO: 739318 - RNA, 19 nt, Homo sapiens
  misc_RNA (1)...(19): siRNA sense strand
gcagcaauguccuaugucu

SEQ ID NO: 739319 - RNA, 19 nt, Homo sapiens
  misc_RNA (1)...(19): siRNA sense strand
gaacaaccuggaugacguu

SEQ ID NO: 739320 - RNA, 19 nt, Homo sapiens
  misc_RNA (1)...(19): siRNA sense strand
gagcuggaccuaaguggaa

SEQ ID NO: 739321 - RNA, 19 nt, Homo sapiens
  misc_RNA (1)...(19): siRNA sense strand
ccaauggccucuggaugaa

SEQ ID NO: 739322 - RNA, 19 nt, Homo sapiens
  misc_RNA (1)...(19): siRNA sense strand
gcugauagcccgagugaca

SEQ ID NO: 739323 - RNA, 19 nt, Homo sapiens
  misc_RNA (1)...(19): siRNA sense strand
gaaaccaggagaucucaug

SEQ ID NO: 739324 - RNA, 19 nt, Homo sapiens
  misc_RNA (1)...(19): siRNA sense strand
gagcaagaucuucccaauu

SEQ ID NO: 739325 - RNA, 19 nt, Homo sapiens
  misc_RNA (1)...(19): siRNA sense strand
ugagaucagagacuuauuu

SEQ ID NO: 739326 - RNA, 19 nt, Homo sapiens
  misc_RNA (1)...(19): siRNA sense strand
aaaagacgcuagaagcaua

SEQ ID NO: 739327 - RNA, 19 nt, Homo sapiens
  misc_RNA (1)...(19): siRNA sense strand
ggacacaucccuguuccaa

SEQ ID NO: 739328 - RNA, 19 nt, Homo sapiens
  misc_RNA (1)...(19): siRNA sense strand
ggagagaugaguaauagca

SEQ ID NO: 739329 - RNA, 19 nt, Homo sapiens
  misc_RNA (1)...(19): siRNA sense strand
aaccacacguuuccuauug

SEQ ID NO: 739330 - RNA, 19 nt, Homo sapiens
  misc_RNA (1)...(19): siRNA sense strand
gcauguguguagaaacaga

SEQ ID NO: 739331 - RNA, 19 nt, Homo sapiens
  misc_RNA (1)...(19): siRNA sense strand
agaaagagagagagagaaa

SEQ ID NO: 739332 - RNA, 19 nt, Homo sapiens
  misc_RNA (1)...(19): siRNA sense strand
guucuacguuggccacuug

SEQ ID NO: 739333 - RNA, 19 nt, Homo sapiens
  misc_RNA (1)...(19): siRNA sense strand
ggaaagcuccccagaggua

SEQ ID NO: 739334 - RNA, 19 nt, Homo sapiens
  misc_RNA (1)...(19): siRNA sense strand
cgggagagaugaguaauag

SEQ ID NO: 739335 - RNA, 19 nt, Homo sapiens
  misc_RNA (1)...(19): siRNA sense strand
ggaccuggccucugugcuu

SEQ ID NO: 739336 - RNA, 19 nt, Homo sapiens
  misc_RNA (1)...(19): siRNA sense strand
gggcaucaaccacacguuu

SEQ ID NO: 739337 - RNA, 19 nt, Homo sapiens
  misc_RNA (1)...(19): siRNA sense strand
gguaaacauucuaauugca

SEQ ID NO: 739338 - RNA, 19 nt, Homo sapiens
  misc_RNA (1)...(19): siRNA sense strand
uaauugagaucagagacuu

SEQ ID NO: 739339 - RNA, 19 nt, Homo sapiens
  misc_RNA (1)...(19): siRNA sense strand
cgaggacauuuaauugaga

SEQ ID NO: 739340 - RNA, 19 nt, Homo sapiens
  misc_RNA (1)...(19): siRNA sense strand
gcugcuacuucuacaaaga

SEQ ID NO: 739341 - RNA, 19 nt, Homo sapiens
  misc_RNA (1)...(19): siRNA sense strand
gagagagaaaucagagaaa

SEQ ID NO: 739342 - RNA, 19 nt, Homo sapiens
  misc_RNA (1)...(19): siRNA sense strand
gagaucagagacuuauuug

SEQ ID NO: 739343 - RNA, 19 nt, Homo sapiens
  misc_RNA (1)...(19): siRNA sense strand
ggagaucucaugccugcaa

SEQ ID NO: 739344 - RNA, 19 nt, Homo sapiens
  misc_RNA (1)...(19): siRNA sense strand
gggaucaggcugcaaguga

SEQ ID NO: 739345 - RNA, 19 nt, Homo sapiens
  misc_RNA (1)...(19): siRNA sense strand
caaauggcccacuuuaaag

SEQ ID NO: 739346 - RNA, 19 nt, Homo sapiens
  misc_RNA (1)...(19): siRNA sense strand
ggucucugcuuugugauga

SEQ ID NO: 739347 - RNA, 19 nt, Homo sapiens
  misc_RNA (1)...(19): siRNA sense strand
ggccugcacuugccugaug

SEQ ID NO: 739348 - RNA, 19 nt, Homo sapiens
  misc_RNA (1)...(19): siRNA sense strand
gaaaggcaagcaauuagag

SEQ ID NO: 739349 - RNA, 19 nt, Homo sapiens
  misc_RNA (1)...(19): siRNA sense strand
gagaagcuggccugauuau

SEQ ID NO: 739350 - RNA, 19 nt, Homo sapiens
  misc_RNA (1)...(19): siRNA sense strand
gcacuuucugcauuaaauu

SEQ ID NO: 739351 - RNA, 19 nt, Homo sapiens
  misc_RNA (1)...(19): siRNA sense strand
acacagaaaucagagaaag

SEQ ID NO: 739352 - RNA, 19 nt, Homo sapiens
  misc_RNA (1)...(19): siRNA sense strand
gacccauccucaccucauu

SEQ ID NO: 739353 - RNA, 19 nt, Homo sapiens
  misc_RNA (1)...(19): siRNA sense strand
ccgcauagccguaccuuca

SEQ ID NO: 739354 - RNA, 19 nt, Homo sapiens
  misc_RNA (1)...(19): siRNA sense strand
gaacuggagcucugcuauc

SEQ ID NO: 739355 - RNA, 19 nt, Homo sapiens
  misc_RNA (1)...(19): siRNA sense strand
ugagcaagaucuucccaau

SEQ ID NO: 739356 - RNA, 19 nt, Homo sapiens
  misc_RNA (1)...(19): siRNA sense strand
cauccugccugcaaacuca

SEQ ID NO: 739357 - RNA, 19 nt, Homo sapiens
  misc_RNA (1)...(19): siRNA sense strand
aaacguuccugacacaagu

SEQ ID NO: 739358 - RNA, 19 nt, Homo sapiens
  misc_RNA (1)...(19): siRNA sense strand
uauugggccuguuaaguga

SEQ ID NO: 739359 - RNA, 19 nt, Homo sapiens
  misc_RNA (1)...(19): siRNA sense strand
caucaucuccaccuucuug

SEQ ID NO: 739360 - RNA, 19 nt, Homo sapiens
  misc_RNA (1)...(19): siRNA sense strand
acaacccucugucuacauu

SEQ ID NO: 739361 - RNA, 19 nt, Homo sapiens
  misc_RNA (1)...(19): siRNA sense strand
ccacaacccucugucuaca

SEQ ID NO: 739362 - RNA, 19 nt, Homo sapiens
  misc_RNA (1)...(19): siRNA sense strand
uuagguuggucaaaucaaa

SEQ ID NO: 739363 - RNA, 19 nt, Homo sapiens
  misc_RNA (1)...(19): siRNA sense strand
ccacagcucugcagaaccu

SEQ ID NO: 739364 - RNA, 19 nt, Homo sapiens
  misc_RNA (1)...(19): siRNA sense strand
ggaggagaaucgaggacau

SEQ ID NO: 739365 - RNA, 19 nt, Homo sapiens
  misc_RNA (1)...(19): siRNA sense strand
ggguggagcugcaucacau

SEQ ID NO: 739366 - RNA, 19 nt, Homo sapiens
  misc_RNA (1)...(19): siRNA sense strand
gaaggaauauuucuacaga

SEQ ID NO: 739367 - RNA, 19 nt, Homo sapiens
  misc_RNA (1)...(19): siRNA sense strand
gaugaaacgucaggaauuu

SEQ ID NO: 739368 - RNA, 19 nt, Homo sapiens
  misc_RNA (1)...(19): siRNA sense strand
ggacgccgcuggagagaaa

SEQ ID NO: 739369 - RNA, 19 nt, Homo sapiens
  misc_RNA (1)...(19): siRNA sense strand
gcuagaagcauauggaaua

SEQ ID NO: 739370 - RNA, 19 nt, Homo sapiens
  misc_RNA (1)...(19): siRNA sense strand
ggaauuuacuacacagaaa

SEQ ID NO: 739371 - RNA, 19 nt, Homo sapiens
  misc_RNA (1)...(19): siRNA sense strand
caacacgggucucugcuuu

SEQ ID NO: 739372 - RNA, 19 nt, Homo sapiens
  misc_RNA (1)...(19): siRNA sense strand
ccaaauggcccacuuuaaa

SEQ ID NO: 739373 - RNA, 19 nt, Homo sapiens
  misc_RNA (1)...(19): siRNA sense strand
gaugaaaggcaagcaauua

SEQ ID NO: 739374 - RNA, 19 nt, Homo sapiens
  misc_RNA (1)...(19): siRNA sense strand
gagaaucgaggacauuuaa

SEQ ID NO: 739375 - RNA, 19 nt, Homo sapiens
  misc_RNA (1)...(19): siRNA sense strand
aagagaagcuggccugauu

SEQ ID NO: 739376 - RNA, 19 nt, Homo sapiens
  misc_RNA (1)...(19): siRNA sense strand
gagguaaacauucuaauug

SEQ ID NO: 739377 - RNA, 19 nt, Homo sapiens
  misc_RNA (1)...(19): siRNA sense strand
gaaaugggcauguguguag

SEQ ID NO: 739378 - RNA, 19 nt, Homo sapiens
  misc_RNA (1)...(19): siRNA sense strand
ccaagaaccucgcauaguc

SEQ ID NO: 739379 - RNA, 19 nt, Homo sapiens
  misc_RNA (1)...(19): siRNA sense strand
gaagcuggccugauuaugu

SEQ ID NO: 739380 - RNA, 19 nt, Homo sapiens
  misc_RNA (1)...(19): siRNA sense strand
uggaauacauggccuguuu

SEQ ID NO: 739381 - RNA, 19 nt, Homo sapiens
  misc_RNA (1)...(19): siRNA sense strand
ugagguaguugacaaagaa

SEQ ID NO: 739382 - RNA, 19 nt, Homo sapiens
  misc_RNA (1)...(19): siRNA sense strand
ccaagugacugcuccauuc

SEQ ID NO: 739383 - RNA, 19 nt, Homo sapiens
  misc_RNA (1)...(19): siRNA sense strand
gagauugaauucugugugu

SEQ ID NO: 739384 - RNA, 19 nt, Homo sapiens
  misc_RNA (1)...(19): siRNA sense strand
gaaucgaggacauuuaauu

SEQ ID NO: 739385 - RNA, 19 nt, Homo sapiens
  misc_RNA (1)...(19): siRNA sense strand
gaaccucauuccuucuuug

SEQ ID NO: 739386 - RNA, 19 nt, Homo sapiens
  misc_RNA (1)...(19): siRNA sense strand
cuacagauauuucacagau

SEQ ID NO: 739387 - RNA, 19 nt, Homo sapiens
  misc_RNA (1)...(19): siRNA sense strand
gcaagcaauuagagccuuu

SEQ ID NO: 739388 - RNA, 19 nt, Homo sapiens
  misc_RNA (1)...(19): siRNA sense strand
acagauauuucacagauga

SEQ ID NO: 739389 - RNA, 19 nt, Homo sapiens
  misc_RNA (1)...(19): siRNA sense strand
acacaucccuguuccaaau

SEQ ID NO: 739390 - RNA, 19 nt, Homo sapiens
  misc_RNA (1)...(19): siRNA sense strand
cagcaugucuucuacuuca

SEQ ID NO: 739391 - RNA, 19 nt, Homo sapiens
  misc_RNA (1)...(19): siRNA sense strand
agcaagaucuucccaauug

SEQ ID NO: 739392 - RNA, 19 nt, Homo sapiens
  misc_RNA (1)...(19): siRNA sense strand
gaccuggccucugugcuua

SEQ ID NO: 739393 - RNA, 19 nt, Homo sapiens
  misc_RNA (1)...(19): siRNA sense strand
ucgcugagcucaucggaaa

SEQ ID NO: 739394 - RNA, 19 nt, Homo sapiens
  misc_RNA (1)...(19): siRNA sense strand
gugcaaagauggacucuac

SEQ ID NO: 739395 - RNA, 19 nt, Homo sapiens
  misc_RNA (1)...(19): siRNA sense strand
ggagcugcaucacauaguu

SEQ ID NO: 739396 - RNA, 19 nt, Homo sapiens
  misc_RNA (1)...(19): siRNA sense strand
gcaccucccucacuuugug

SEQ ID NO: 739397 - RNA, 19 nt, Homo sapiens
  misc_RNA (1)...(19): siRNA sense strand
ugaaggagcuggaccuaag

SEQ ID NO: 739398 - RNA, 19 nt, Homo sapiens
  misc_RNA (1)...(19): siRNA sense strand
gggcauguguguagaaaca

SEQ ID NO: 739399 - RNA, 19 nt, Homo sapiens
  misc_RNA (1)...(19): siRNA sense strand
gaaaucagagaaagagaga

SEQ ID NO: 739400 - RNA, 19 nt, Homo sapiens
  misc_RNA (1)...(19): siRNA sense strand
gaccggaagugcaaagaug

SEQ ID NO: 739401 - RNA, 19 nt, Homo sapiens
  misc_RNA (1)...(19): siRNA sense strand
aaacagacauggagcucuu

SEQ ID NO: 739402 - RNA, 19 nt, Homo sapiens
  misc_RNA (1)...(19): siRNA sense strand
ucacacagcugcuacuucu

SEQ ID NO: 739403 - RNA, 19 nt, Homo sapiens
  misc_RNA (1)...(19): siRNA sense strand
ggagaaucgaggacauuua

SEQ ID NO: 739404 - RNA, 19 nt, Homo sapiens
  misc_RNA (1)...(19): siRNA sense strand
cagcacagaucaacaugga

SEQ ID NO: 739405 - RNA, 19 nt, Homo sapiens
  misc_RNA (1)...(19): siRNA sense strand
ggaugaaacgucaggaauu

SEQ ID NO: 739406 - RNA, 19 nt, Homo sapiens
  misc_RNA (1)...(19): siRNA sense strand
ugaaagacaagaaagauga

SEQ ID NO: 739407 - RNA, 19 nt, Homo sapiens
  misc_RNA (1)...(19): siRNA sense strand
gcaagugaaagacaagaaa

SEQ ID NO: 739408 - RNA, 19 nt, Homo sapiens
  misc_RNA (1)...(19): siRNA sense strand
gcaauuagagccuuuaggu

SEQ ID NO: 739409 - RNA, 19 nt, Homo sapiens
  misc_RNA (1)...(19): siRNA sense strand
gcuguggccucacgucuga

SEQ ID NO: 739410 - RNA, 19 nt, Homo sapiens
  misc_RNA (1)...(19): siRNA sense strand
agagagagauggagaacau

SEQ ID NO: 739411 - RNA, 19 nt, Homo sapiens
  misc_RNA (1)...(19): siRNA sense strand
ggaucaggcugcaagugaa

SEQ ID NO: 739412 - RNA, 19 nt, Homo sapiens
  misc_RNA (1)...(19): siRNA sense strand
gcaggaaggaauauuucua

SEQ ID NO: 739413 - RNA, 19 nt, Homo sapiens
  misc_RNA (1)...(19): siRNA sense strand
ugacaucgguggagguugu

SEQ ID NO: 739414 - RNA, 19 nt, Homo sapiens
  misc_RNA (1)...(19): siRNA sense strand
cgaguucacuucccuguag

SEQ ID NO: 739415 - RNA, 19 nt, Homo sapiens
  misc_RNA (1)...(19): siRNA sense strand
ggagagguaaacauucuaa

SEQ ID NO: 739416 - RNA, 19 nt, Homo sapiens
  misc_RNA (1)...(19): siRNA sense strand
aggaggagcugaaggaguu

SEQ ID NO: 739417 - RNA, 19 nt, Homo sapiens
  misc_RNA (1)...(19): siRNA sense strand
ccucugugguguugcuuua

SEQ ID NO: 739418 - RNA, 19 nt, Homo sapiens
  misc_RNA (1)...(19): siRNA sense strand
gcagcaauguccuaugucu

SEQ ID NO: 739419 - RNA, 19 nt, Homo sapiens
  misc_RNA (1)...(19): siRNA sense strand
gaacaaccuggaugacguu

SEQ ID NO: 739420 - RNA, 19 nt, Homo sapiens
  misc_RNA (1)...(19): siRNA sense strand
gagcuggaccuaaguggaa

SEQ ID NO: 739421 - RNA, 19 nt, Homo sapiens
  misc_RNA (1)...(19): siRNA sense strand
ccaauggccucuggaugaa

SEQ ID NO: 739422 - RNA, 19 nt, Homo sapiens
  misc_RNA (1)...(19): siRNA sense strand
gcugauagcccgagugaca

SEQ ID NO: 739423 - RNA, 19 nt, Homo sapiens
  misc_RNA (1)...(19): siRNA sense strand
gaaaccaggagaucucaug

SEQ ID NO: 739424 - RNA, 19 nt, Homo sapiens
  misc_RNA (1)...(19): siRNA sense strand
gagcaagaucuucccaauu

SEQ ID NO: 739425 - RNA, 19 nt, Homo sapiens
  misc_RNA (1)...(19): siRNA sense strand
ugagaucagagacuuauuu

SEQ ID NO: 739426 - RNA, 19 nt, Homo sapiens
  misc_RNA (1)...(19): siRNA sense strand
aaaagacgcuagaagcaua

SEQ ID NO: 739427 - RNA, 19 nt, Homo sapiens
  misc_RNA (1)...(19): siRNA sense strand
ggacacaucccuguuccaa

SEQ ID NO: 739428 - RNA, 19 nt, Homo sapiens
  misc_RNA (1)...(19): siRNA sense strand
ggagagaugaguaauagca

SEQ ID NO: 739429 - RNA, 19 nt, Homo sapiens
  misc_RNA (1)...(19): siRNA sense strand
aaccacacguuuccuauug

SEQ ID NO: 739430 - RNA, 19 nt, Homo sapiens
  misc_RNA (1)...(19): siRNA sense strand
gcauguguguagaaacaga

SEQ ID NO: 739431 - RNA, 19 nt, Homo sapiens
  misc_RNA (1)...(19): siRNA sense strand
agaaagagagagagagaaa

SEQ ID NO: 739432 - RNA, 19 nt, Homo sapiens
  misc_RNA (1)...(19): siRNA sense strand
guucuacguuggccacuug

SEQ ID NO: 739433 - RNA, 19 nt, Homo sapiens
  misc_RNA (1)...(19): siRNA sense strand
ggaaagcuccccagaggua

SEQ ID NO: 739434 - RNA, 19 nt, Homo sapiens
  misc_RNA (1)...(19): siRNA sense strand
cgggagagaugaguaauag

SEQ ID NO: 739435 - RNA, 19 nt, Homo sapiens
  misc_RNA (1)...(19): siRNA sense strand
ggaccuggccucugugcuu

SEQ ID NO: 739436 - RNA, 19 nt, Homo sapiens
  misc_RNA (1)...(19): siRNA sense strand
gggcaucaaccacacguuu

SEQ ID NO: 739437 - RNA, 19 nt, Homo sapiens
  misc_RNA (1)...(19): siRNA sense strand
gguaaacauucuaauugca

SEQ ID NO: 739438 - RNA, 19 nt, Homo sapiens
  misc_RNA (1)...(19): siRNA sense strand
uaauugagaucagagacuu

SEQ ID NO: 739439 - RNA, 19 nt, Homo sapiens
  misc_RNA (1)...(19): siRNA sense strand
cgaggacauuuaauugaga

SEQ ID NO: 739440 - RNA, 19 nt, Homo sapiens
  misc_RNA (1)...(19): siRNA sense strand
gcugcuacuucuacaaaga

SEQ ID NO: 739441 - RNA, 19 nt, Homo sapiens
  misc_RNA (1)...(19): siRNA sense strand
gagagagaaaucagagaaa

SEQ ID NO: 739442 - RNA, 19 nt, Homo sapiens
  misc_RNA (1)...(19): siRNA sense strand
gagaucagagacuuauuug

SEQ ID NO: 739443 - RNA, 19 nt, Homo sapiens
  misc_RNA (1)...(19): siRNA sense strand
ggagaucucaugccugcaa

SEQ ID NO: 739444 - RNA, 19 nt, Homo sapiens
  misc_RNA (1)...(19): siRNA sense strand
gggaucaggcugcaaguga

SEQ ID NO: 739445 - RNA, 19 nt, Homo sapiens
  misc_RNA (1)...(19): siRNA sense strand
caaauggcccacuuuaaag

SEQ ID NO: 739446 - RNA, 19 nt, Homo sapiens
  misc_RNA (1)...(19): siRNA sense strand
ggucucugcuuugugauga

SEQ ID NO: 739447 - RNA, 19 nt, Homo sapiens
  misc_RNA (1)...(19): siRNA sense strand
ggccugcacuugccugaug

SEQ ID NO: 739448 - RNA, 19 nt, Homo sapiens
  misc_RNA (1)...(19): siRNA sense strand
gaaaggcaagcaauuagag

SEQ ID NO: 739449 - RNA, 19 nt, Homo sapiens
  misc_RNA (1)...(19): siRNA sense strand
gagaagcuggccugauuau

SEQ ID NO: 739450 - RNA, 19 nt, Homo sapiens
  misc_RNA (1)...(19): siRNA sense strand
gcacuuucugcauuaaauu

SEQ ID NO: 739451 - RNA, 19 nt, Homo sapiens
  misc_RNA (1)...(19): siRNA sense strand
acacagaaaucagagaaag

SEQ ID NO: 739452 - RNA, 19 nt, Homo sapiens
  misc_RNA (1)...(19): siRNA sense strand
gacccauccucaccucauu

SEQ ID NO: 739453 - RNA, 19 nt, Homo sapiens
  misc_RNA (1)...(19): siRNA sense strand
ccgcauagccguaccuuca

SEQ ID NO: 739454 - RNA, 19 nt, Homo sapiens
  misc_RNA (1)...(19): siRNA sense strand
gaacuggagcucugcuauc

SEQ ID NO: 739455 - RNA, 19 nt, Homo sapiens
  misc_RNA (1)...(19): siRNA sense strand
ugagcaagaucuucccaau

SEQ ID NO: 739456 - RNA, 19 nt, Homo sapiens
  misc_RNA (1)...(19): siRNA sense strand
cauccugccugcaaacuca

SEQ ID NO: 739457 - RNA, 19 nt, Homo sapiens
  misc_RNA (1)...(19): siRNA sense strand
aaacguuccugacacaagu

SEQ ID NO: 739458 - RNA, 19 nt, Homo sapiens
  misc_RNA (1)...(19): siRNA sense strand
uauugggccuguuaaguga

SEQ ID NO: 739459 - RNA, 19 nt, Homo sapiens
  misc_RNA (1)...(19): siRNA sense strand
caucaucuccaccuucuug

SEQ ID NO: 739460 - RNA, 19 nt, Homo sapiens
  misc_RNA (1)...(19): siRNA sense strand
acaacccucugucuacauu

SEQ ID NO: 739461 - RNA, 19 nt, Homo sapiens
  misc_RNA (1)...(19): siRNA sense strand
ccacaacccucugucuaca

SEQ ID NO: 739462 - RNA, 19 nt, Homo sapiens
  misc_RNA (1)...(19): siRNA sense strand
uuagguuggucaaaucaaa

SEQ ID NO: 739463 - RNA, 19 nt, Homo sapiens
  misc_RNA (1)...(19): siRNA sense strand
ccacagcucugcagaaccu

SEQ ID NO: 739464 - RNA, 19 nt, Homo sapiens
  misc_RNA (1)...(19): siRNA sense strand
ggaggagaaucgaggacau

SEQ ID NO: 739465 - RNA, 19 nt, Homo sapiens
  misc_RNA (1)...(19): siRNA sense strand
ggguggagcugcaucacau

SEQ ID NO: 739466 - RNA, 19 nt, Homo sapiens
  misc_RNA (1)...(19): siRNA sense strand
gaaggaauauuucuacaga

SEQ ID NO: 739467 - RNA, 19 nt, Homo sapiens
  misc_RNA (1)...(19): siRNA sense strand
gaugaaacgucaggaauuu

SEQ ID NO: 739468 - RNA, 19 nt, Homo sapiens
  misc_RNA (1)...(19): siRNA sense strand
ggacgccgcuggagagaaa

SEQ ID NO: 739469 - RNA, 19 nt, Homo sapiens
  misc_RNA (1)...(19): siRNA sense strand
gcuagaagcauauggaaua

SEQ ID NO: 739470 - RNA, 19 nt, Homo sapiens
  misc_RNA (1)...(19): siRNA sense strand
ggaauuuacuacacagaaa

SEQ ID NO: 739471 - RNA, 19 nt, Homo sapiens
  misc_RNA (1)...(19): siRNA sense strand
caacacgggucucugcuuu

SEQ ID NO: 739472 - RNA, 19 nt, Homo sapiens
  misc_RNA (1)...(19): siRNA sense strand
ccaaauggcccacuuuaaa

SEQ ID NO: 739473 - RNA, 19 nt, Homo sapiens
  misc_RNA (1)...(19): siRNA sense strand
gaugaaaggcaagcaauua

SEQ ID NO: 739474 - RNA, 19 nt, Homo sapiens
  misc_RNA (1)...(19): siRNA sense strand
gagaaucgaggacauuuaa

SEQ ID NO: 739475 - RNA, 19 nt, Homo sapiens
  misc_RNA (1)...(19): siRNA sense strand
aagagaagcuggccugauu

SEQ ID NO: 739476 - RNA, 19 nt, Homo sapiens
  misc_RNA (1)...(19): siRNA sense strand
gagguaaacauucuaauug

SEQ ID NO: 739477 - RNA, 19 nt, Homo sapiens
  misc_RNA (1)...(19): siRNA sense strand
gaaaugggcauguguguag

SEQ ID NO: 739478 - RNA, 19 nt, Homo sapiens
  misc_RNA (1)...(19): siRNA sense strand
ccaagaaccucgcauaguc

SEQ ID NO: 739479 - RNA, 19 nt, Homo sapiens
  misc_RNA (1)...(19): siRNA sense strand
gaagcuggccugauuaugu

SEQ ID NO: 739480 - RNA, 19 nt, Homo sapiens
  misc_RNA (1)...(19): siRNA sense strand
uggaauacauggccuguuu

SEQ ID NO: 739481 - RNA, 19 nt, Homo sapiens
  misc_RNA (1)...(19): siRNA sense strand
ugagguaguugacaaagaa

SEQ ID NO: 739482 - RNA, 19 nt, Homo sapiens
  misc_RNA (1)...(19): siRNA sense strand
ccaagugacugcuccauuc

SEQ ID NO: 739483 - RNA, 19 nt, Homo sapiens
  misc_RNA (1)...(19): siRNA sense strand
gagauugaauucugugugu

SEQ ID NO: 739484 - RNA, 19 nt, Homo sapiens
  misc_RNA (1)...(19): siRNA sense strand
gaaucgaggacauuuaauu

SEQ ID NO: 739485 - RNA, 19 nt, Homo sapiens
  misc_RNA (1)...(19): siRNA sense strand
gaaccucauuccuucuuug

SEQ ID NO: 739486 - RNA, 19 nt, Homo sapiens
  misc_RNA (1)...(19): siRNA sense strand
cuacagauauuucacagau

SEQ ID NO: 739487 - RNA, 19 nt, Homo sapiens
  misc_RNA (1)...(19): siRNA sense strand
gcaagcaauuagagccuuu

SEQ ID NO: 739488 - RNA, 19 nt, Homo sapiens
  misc_RNA (1)...(19): siRNA sense strand
acagauauuucacagauga

SEQ ID NO: 739489 - RNA, 19 nt, Homo sapiens
  misc_RNA (1)...(19): siRNA sense strand
acacaucccuguuccaaau

SEQ ID NO: 739490 - RNA, 19 nt, Homo sapiens
  misc_RNA (1)...(19): siRNA sense strand
cagcaugucuucuacuuca

SEQ ID NO: 739491 - RNA, 19 nt, Homo sapiens
  misc_RNA (1)...(19): siRNA sense strand
agcaagaucuucccaauug

SEQ ID NO: 739492 - RNA, 19 nt, Homo sapiens
  misc_RNA (1)...(19): siRNA sense strand
gaccuggccucugugcuua

SEQ ID NO: 739493 - RNA, 19 nt, Homo sapiens
  misc_RNA (1)...(19): siRNA sense strand
ucgcugagcucaucggaaa

SEQ ID NO: 739494 - RNA, 19 nt, Homo sapiens
  misc_RNA (1)...(19): siRNA sense strand
gugcaaagauggacucuac

SEQ ID NO: 739495 - RNA, 19 nt, Homo sapiens
  misc_RNA (1)...(19): siRNA sense strand
ggagcugcaucacauaguu

SEQ ID NO: 739496 - RNA, 19 nt, Homo sapiens
  misc_RNA (1)...(19): siRNA sense strand
gcaccucccucacuuugug

SEQ ID NO: 739497 - RNA, 19 nt, Homo sapiens
  misc_RNA (1)...(19): siRNA sense strand
ugaaggagcuggaccuaag

SEQ ID NO: 739498 - RNA, 19 nt, Homo sapiens
  misc_RNA (1)...(19): siRNA sense strand
gggcauguguguagaaaca

SEQ ID NO: 739499 - RNA, 19 nt, Homo sapiens
  misc_RNA (1)...(19): siRNA sense strand
gaaaucagagaaagagaga

SEQ ID NO: 739500 - RNA, 19 nt, Homo sapiens
  misc_RNA (1)...(19): siRNA sense strand
gaccggaagugcaaagaug

SEQ ID NO: 739501 - RNA, 19 nt, Homo sapiens
  misc_RNA (1)...(19): siRNA sense strand
aaacagacauggagcucuu

SEQ ID NO: 739502 - RNA, 19 nt, Homo sapiens
  misc_RNA (1)...(19): siRNA sense strand
ucacacagcugcuacuucu

SEQ ID NO: 739503 - RNA, 19 nt, Homo sapiens
  misc_RNA (1)...(19): siRNA sense strand
ggagaaucgaggacauuua

SEQ ID NO: 739504 - RNA, 19 nt, Homo sapiens
  misc_RNA (1)...(19): siRNA sense strand
cagcacagaucaacaugga

SEQ ID NO: 739505 - RNA, 19 nt, Homo sapiens
  misc_RNA (1)...(19): siRNA sense strand
ggaugaaacgucaggaauu

SEQ ID NO: 739506 - RNA, 19 nt, Homo sapiens
  misc_RNA (1)...(19): siRNA sense strand
ugaaagacaagaaagauga

SEQ ID NO: 739507 - RNA, 19 nt, Homo sapiens
  misc_RNA (1)...(19): siRNA sense strand
gcaagugaaagacaagaaa

SEQ ID NO: 739508 - RNA, 19 nt, Homo sapiens
  misc_RNA (1)...(19): siRNA sense strand
gcaauuagagccuuuaggu

SEQ ID NO: 739509 - RNA, 19 nt, Homo sapiens
  misc_RNA (1)...(19): siRNA sense strand
gcuguggccucacgucuga

SEQ ID NO: 739510 - RNA, 19 nt, Homo sapiens
  misc_RNA (1)...(19): siRNA sense strand
agagagagauggagaacau

SEQ ID NO: 739511 - RNA, 19 nt, Homo sapiens
  misc_RNA (1)...(19): siRNA sense strand
ggaucaggcugcaagugaa

SEQ ID NO: 739512 - RNA, 19 nt, Homo sapiens
  misc_RNA (1)...(19): siRNA sense strand
gcaggaaggaauauuucua

SEQ ID NO: 739513 - RNA, 19 nt, Homo sapiens
  misc_RNA (1)...(19): siRNA sense strand
ugacaucgguggagguugu

SEQ ID NO: 739514 - RNA, 19 nt, Homo sapiens
  misc_RNA (1)...(19): siRNA sense strand
cgaguucacuucccuguag

SEQ ID NO: 739515 - RNA, 19 nt, Homo sapiens
  misc_RNA (1)...(19): siRNA sense strand
ggagagguaaacauucuaa

SEQ ID NO: 739516 - RNA, 19 nt, Homo sapiens
  misc_RNA (1)...(19): siRNA sense strand
aggaggagcugaaggaguu

SEQ ID NO: 739517 - RNA, 19 nt, Homo sapiens
  misc_RNA (1)...(19): siRNA sense strand
ccucugugguguugcuuua

SEQ ID NO: 739518 - RNA, 19 nt, Homo sapiens
  misc_RNA (1)...(19): siRNA sense strand
gcagcaauguccuaugucu

SEQ ID NO: 739519 - RNA, 19 nt, Homo sapiens
  misc_RNA (1)...(19): siRNA sense strand
gaacaaccuggaugacguu

SEQ ID NO: 739520 - RNA, 19 nt, Homo sapiens
  misc_RNA (1)...(19): siRNA sense strand
gagcuggaccuaaguggaa

SEQ ID NO: 739521 - RNA, 19 nt, Homo sapiens
  misc_RNA (1)...(19): siRNA sense strand
ccaauggccucuggaugaa

SEQ ID NO: 739522 - RNA, 19 nt, Homo sapiens
  misc_RNA (1)...(19): siRNA sense strand
gcugauagcccgagugaca

SEQ ID NO: 739523 - RNA, 19 nt, Homo sapiens
  misc_RNA (1)...(19): siRNA sense strand
gaaaccaggagaucucaug

SEQ ID NO: 739524 - RNA, 19 nt, Homo sapiens
  misc_RNA (1)...(19): siRNA sense strand
gagcaagaucuucccaauu

SEQ ID NO: 739525 - RNA, 19 nt, Homo sapiens
  misc_RNA (1)...(19): siRNA sense strand
ugagaucagagacuuauuu

SEQ ID NO: 739526 - RNA, 19 nt, Homo sapiens
  misc_RNA (1)...(19): siRNA sense strand
aaaagacgcuagaagcaua

SEQ ID NO: 739527 - RNA, 19 nt, Homo sapiens
  misc_RNA (1)...(19): siRNA sense strand
ggacacaucccuguuccaa

SEQ ID NO: 739528 - RNA, 19 nt, Homo sapiens
  misc_RNA (1)...(19): siRNA sense strand
ggagagaugaguaauagca

SEQ ID NO: 739529 - RNA, 19 nt, Homo sapiens
  misc_RNA (1)...(19): siRNA sense strand
aaccacacguuuccuauug

SEQ ID NO: 739530 - RNA, 19 nt, Homo sapiens
  misc_RNA (1)...(19): siRNA sense strand
gcauguguguagaaacaga

SEQ ID NO: 739531 - RNA, 19 nt, Homo sapiens
  misc_RNA (1)...(19): siRNA sense strand
agaaagagagagagagaaa

SEQ ID NO: 739532 - RNA, 19 nt, Homo sapiens
  misc_RNA (1)...(19): siRNA sense strand
guucuacguuggccacuug

SEQ ID NO: 739533 - RNA, 19 nt, Homo sapiens
  misc_RNA (1)...(19): siRNA sense strand
ggaaagcuccccagaggua

SEQ ID NO: 739534 - RNA, 19 nt, Homo sapiens
  misc_RNA (1)...(19): siRNA sense strand
cgggagagaugaguaauag

SEQ ID NO: 739535 - RNA, 19 nt, Homo sapiens
  misc_RNA (1)...(19): siRNA sense strand
ggaccuggccucugugcuu

SEQ ID NO: 739536 - RNA, 19 nt, Homo sapiens
  misc_RNA (1)...(19): siRNA sense strand
gggcaucaaccacacguuu

SEQ ID NO: 739537 - RNA, 19 nt, Homo sapiens
  misc_RNA (1)...(19): siRNA sense strand
gguaaacauucuaauugca

SEQ ID NO: 739538 - RNA, 19 nt, Homo sapiens
  misc_RNA (1)...(19): siRNA sense strand
uaauugagaucagagacuu

SEQ ID NO: 739539 - RNA, 19 nt, Homo sapiens
  misc_RNA (1)...(19): siRNA sense strand
cgaggacauuuaauugaga

SEQ ID NO: 739540 - RNA, 19 nt, Homo sapiens
  misc_RNA (1)...(19): siRNA sense strand
gcugcuacuucuacaaaga

SEQ ID NO: 739541 - RNA, 19 nt, Homo sapiens
  misc_RNA (1)...(19): siRNA sense strand
gagagagaaaucagagaaa

SEQ ID NO: 739542 - RNA, 19 nt, Homo sapiens
  misc_RNA (1)...(19): siRNA sense strand
gagaucagagacuuauuug

SEQ ID NO: 739543 - RNA, 19 nt, Homo sapiens
  misc_RNA (1)...(19): siRNA sense strand
ggagaucucaugccugcaa

SEQ ID NO: 739544 - RNA, 19 nt, Homo sapiens
  misc_RNA (1)...(19): siRNA sense strand
gggaucaggcugcaaguga

SEQ ID NO: 739545 - RNA, 19 nt, Homo sapiens
  misc_RNA (1)...(19): siRNA sense strand
caaauggcccacuuuaaag

SEQ ID NO: 739546 - RNA, 19 nt, Homo sapiens
  misc_RNA (1)...(19): siRNA sense strand
ggucucugcuuugugauga

SEQ ID NO: 739547 - RNA, 19 nt, Homo sapiens
  misc_RNA (1)...(19): siRNA sense strand
ggccugcacuugccugaug

SEQ ID NO: 739548 - RNA, 19 nt, Homo sapiens
  misc_RNA (1)...(19): siRNA sense strand
gaaaggcaagcaauuagag

SEQ ID NO: 739549 - RNA, 19 nt, Homo sapiens
  misc_RNA (1)...(19): siRNA sense strand
gagaagcuggccugauuau

SEQ ID NO: 739550 - RNA, 19 nt, Homo sapiens
  misc_RNA (1)...(19): siRNA sense strand
gcacuuucugcauuaaauu

SEQ ID NO: 739551 - RNA, 19 nt, Homo sapiens
  misc_RNA (1)...(19): siRNA sense strand
acacagaaaucagagaaag

SEQ ID NO: 739552 - RNA, 19 nt, Homo sapiens
  misc_RNA (1)...(19): siRNA sense strand
gacccauccucaccucauu

SEQ ID NO: 739553 - RNA, 19 nt, Homo sapiens
  misc_RNA (1)...(19): siRNA sense strand
ccgcauagccguaccuuca

SEQ ID NO: 739554 - RNA, 19 nt, Homo sapiens
  misc_RNA (1)...(19): siRNA sense strand
gaacuggagcucugcuauc

SEQ ID NO: 739555 - RNA, 19 nt, Homo sapiens
  misc_RNA (1)...(19): siRNA sense strand
ugagcaagaucuucccaau

SEQ ID NO: 739556 - RNA, 19 nt, Homo sapiens
  misc_RNA (1)...(19): siRNA sense strand
cauccugccugcaaacuca

SEQ ID NO: 739557 - RNA, 19 nt, Homo sapiens
  misc_RNA (1)...(19): siRNA sense strand
aaacguuccugacacaagu

SEQ ID NO: 739558 - RNA, 19 nt, Homo sapiens
  misc_RNA (1)...(19): siRNA sense strand
uauugggccuguuaaguga

SEQ ID NO: 739559 - RNA, 19 nt, Homo sapiens
  misc_RNA (1)...(19): siRNA sense strand
caucaucuccaccuucuug

SEQ ID NO: 739560 - RNA, 19 nt, Homo sapiens
  misc_RNA (1)...(19): siRNA sense strand
acaacccucugucuacauu

SEQ ID NO: 739561 - RNA, 19 nt, Homo sapiens
  misc_RNA (1)...(19): siRNA sense strand
ccacaacccucugucuaca

SEQ ID NO: 739562 - RNA, 19 nt, Homo sapiens
  misc_RNA (1)...(19): siRNA sense strand
uuagguuggucaaaucaaa

SEQ ID NO: 739563 - RNA, 19 nt, Homo sapiens
  misc_RNA (1)...(19): siRNA sense strand
ccacagcucugcagaaccu

SEQ ID NO: 739564 - RNA, 19 nt, Homo sapiens
  misc_RNA (1)...(19): siRNA sense strand
ggaggagaaucgaggacau

SEQ ID NO: 739565 - RNA, 19 nt, Homo sapiens
  misc_RNA (1)...(19): siRNA sense strand
ggguggagcugcaucacau

SEQ ID NO: 739566 - RNA, 19 nt, Homo sapiens
  misc_RNA (1)...(19): siRNA sense strand
gaaggaauauuucuacaga

SEQ ID NO: 739567 - RNA, 19 nt, Homo sapiens
  misc_RNA (1)...(19): siRNA sense strand
gaugaaacgucaggaauuu

SEQ ID NO: 739568 - RNA, 19 nt, Homo sapiens
  misc_RNA (1)...(19): siRNA sense strand
ggacgccgcuggagagaaa

SEQ ID NO: 739569 - RNA, 19 nt, Homo sapiens
  misc_RNA (1)...(19): siRNA sense strand
gcuagaagcauauggaaua

SEQ ID NO: 739570 - RNA, 19 nt, Homo sapiens
  misc_RNA (1)...(19): siRNA sense strand
ggaauuuacuacacagaaa

SEQ ID NO: 739571 - RNA, 19 nt, Homo sapiens
  misc_RNA (1)...(19): siRNA sense strand
caacacgggucucugcuuu

SEQ ID NO: 739572 - RNA, 19 nt, Homo sapiens
  misc_RNA (1)...(19): siRNA sense strand
ccaaauggcccacuuuaaa

SEQ ID NO: 739573 - RNA, 19 nt, Homo sapiens
  misc_RNA (1)...(19): siRNA sense strand
gaugaaaggcaagcaauua

SEQ ID NO: 739574 - RNA, 19 nt, Homo sapiens
  misc_RNA (1)...(19): siRNA sense strand
gagaaucgaggacauuuaa

SEQ ID NO: 739575 - RNA, 19 nt, Homo sapiens
  misc_RNA (1)...(19): siRNA sense strand
aagagaagcuggccugauu

SEQ ID NO: 739576 - RNA, 19 nt, Homo sapiens
  misc_RNA (1)...(19): siRNA sense strand
gagguaaacauucuaauug

SEQ ID NO: 739577 - RNA, 19 nt, Homo sapiens
  misc_RNA (1)...(19): siRNA sense strand
gaaaugggcauguguguag

SEQ ID NO: 739578 - RNA, 19 nt, Homo sapiens
  misc_RNA (1)...(19): siRNA sense strand
ccaagaaccucgcauaguc

SEQ ID NO: 739579 - RNA, 19 nt, Homo sapiens
  misc_RNA (1)...(19): siRNA sense strand
gaagcuggccugauuaugu

SEQ ID NO: 739580 - RNA, 19 nt, Homo sapiens
  misc_RNA (1)...(19): siRNA sense strand
uggaauacauggccuguuu

SEQ ID NO: 739581 - RNA, 19 nt, Homo sapiens
  misc_RNA (1)...(19): siRNA sense strand
ugagguaguugacaaagaa

SEQ ID NO: 739582 - RNA, 19 nt, Homo sapiens
  misc_RNA (1)...(19): siRNA sense strand
ccaagugacugcuccauuc

SEQ ID NO: 739583 - RNA, 19 nt, Homo sapiens
  misc_RNA (1)...(19): siRNA sense strand
gagauugaauucugugugu

SEQ ID NO: 739584 - RNA, 19 nt, Homo sapiens
  misc_RNA (1)...(19): siRNA sense strand
gaaucgaggacauuuaauu

SEQ ID NO: 739585 - RNA, 19 nt, Homo sapiens
  misc_RNA (1)...(19): siRNA sense strand
gaaccucauuccuucuuug

SEQ ID NO: 739586 - RNA, 19 nt, Homo sapiens
  misc_RNA (1)...(19): siRNA sense strand
cuacagauauuucacagau

SEQ ID NO: 739587 - RNA, 19 nt, Homo sapiens
  misc_RNA (1)...(19): siRNA sense strand
gcaagcaauuagagccuuu

SEQ ID NO: 739588 - RNA, 19 nt, Homo sapiens
  misc_RNA (1)...(19): siRNA sense strand
acagauauuucacagauga

SEQ ID NO: 739589 - RNA, 19 nt, Homo sapiens
  misc_RNA (1)...(19): siRNA sense strand
acacaucccuguuccaaau

SEQ ID NO: 739590 - RNA, 19 nt, Homo sapiens
  misc_RNA (1)...(19): siRNA sense strand
cagcaugucuucuacuuca

SEQ ID NO: 739591 - RNA, 19 nt, Homo sapiens
  misc_RNA (1)...(19): siRNA sense strand
agcaagaucuucccaauug

SEQ ID NO: 739592 - RNA, 19 nt, Homo sapiens
  misc_RNA (1)...(19): siRNA sense strand
gaccuggccucugugcuua

SEQ ID NO: 739593 - RNA, 19 nt, Homo sapiens
  misc_RNA (1)...(19): siRNA sense strand
ucgcugagcucaucggaaa

SEQ ID NO: 739594 - RNA, 19 nt, Homo sapiens
  misc_RNA (1)...(19): siRNA sense strand
gugcaaagauggacucuac

SEQ ID NO: 739595 - RNA, 19 nt, Homo sapiens
  misc_RNA (1)...(19): siRNA sense strand
ggagcugcaucacauaguu

SEQ ID NO: 739596 - RNA, 19 nt, Homo sapiens
  misc_RNA (1)...(19): siRNA sense strand
gcaccucccucacuuugug

SEQ ID NO: 739597 - RNA, 19 nt, Homo sapiens
  misc_RNA (1)...(19): siRNA sense strand
ugaaggagcuggaccuaag

SEQ ID NO: 739598 - RNA, 19 nt, Homo sapiens
  misc_RNA (1)...(19): siRNA sense strand
gggcauguguguagaaaca

SEQ ID NO: 739599 - RNA, 19 nt, Homo sapiens
  misc_RNA (1)...(19): siRNA sense strand
gaaaucagagaaagagaga

SEQ ID NO: 739600 - RNA, 19 nt, Homo sapiens
  misc_RNA (1)...(19): siRNA sense strand
gaccggaagugcaaagaug

SEQ ID NO: 739601 - RNA, 19 nt, Homo sapiens
  misc_RNA (1)...(19): siRNA sense strand
aaacagacauggagcucuu

SEQ ID NO: 739602 - RNA, 19 nt, Homo sapiens
  misc_RNA (1)...(19): siRNA sense strand
ucacacagcugcuacuucu

SEQ ID NO: 739603 - RNA, 19 nt, Homo sapiens
  misc_RNA (1)...(19): siRNA sense strand
ggagaaucgaggacauuua

SEQ ID NO: 739604 - RNA, 19 nt, Homo sapiens
  misc_RNA (1)...(19): siRNA sense strand
cagcacagaucaacaugga

SEQ ID NO: 739605 - RNA, 19 nt, Homo sapiens
  misc_RNA (1)...(19): siRNA sense strand
ggaugaaacgucaggaauu

SEQ ID NO: 739606 - RNA, 19 nt, Homo sapiens
  misc_RNA (1)...(19): siRNA sense strand
ugaaagacaagaaagauga

SEQ ID NO: 739607 - RNA, 19 nt, Homo sapiens
  misc_RNA (1)...(19): siRNA sense strand
gcaagugaaagacaagaaa

SEQ ID NO: 739608 - RNA, 19 nt, Homo sapiens
  misc_RNA (1)...(19): siRNA sense strand
gcaauuagagccuuuaggu

SEQ ID NO: 739609 - RNA, 19 nt, Homo sapiens
  misc_RNA (1)...(19): siRNA sense strand
gcuguggccucacgucuga

SEQ ID NO: 739610 - RNA, 19 nt, Homo sapiens
  misc_RNA (1)...(19): siRNA sense strand
agagagagauggagaacau

SEQ ID NO: 739611 - RNA, 19 nt, Homo sapiens
  misc_RNA (1)...(19): siRNA sense strand
ggaucaggcugcaagugaa

SEQ ID NO: 739612 - RNA, 19 nt, Homo sapiens
  misc_RNA (1)...(19): siRNA sense strand
gcaggaaggaauauuucua

SEQ ID NO: 739613 - RNA, 19 nt, Homo sapiens
  misc_RNA (1)...(19): siRNA sense strand
ugacaucgguggagguugu

SEQ ID NO: 739614 - RNA, 19 nt, Homo sapiens
  misc_RNA (1)...(19): siRNA sense strand
cgaguucacuucccuguag

SEQ ID NO: 739615 - RNA, 19 nt, Homo sapiens
  misc_RNA (1)...(19): siRNA sense strand
ggagagguaaacauucuaa

SEQ ID NO: 739616 - RNA, 19 nt, Homo sapiens
  misc_RNA (1)...(19): siRNA sense strand
aggaggagcugaaggaguu

SEQ ID NO: 739617 - RNA, 19 nt, Homo sapiens
  misc_RNA (1)...(19): siRNA sense strand
ccucugugguguugcuuua

SEQ ID NO: 739618 - RNA, 19 nt, Homo sapiens
  misc_RNA (1)...(19): siRNA sense strand
gcagcaauguccuaugucu

SEQ ID NO: 739619 - RNA, 19 nt, Homo sapiens
  misc_RNA (1)...(19): siRNA sense strand
gaacaaccuggaugacguu

SEQ ID NO: 739620 - RNA, 19 nt, Homo sapiens
  misc_RNA (1)...(19): siRNA sense strand
gagcuggaccuaaguggaa

SEQ ID NO: 739621 - RNA, 19 nt, Homo sapiens
  misc_RNA (1)...(19): siRNA sense strand
ccaauggccucuggaugaa

SEQ ID NO: 739622 - RNA, 19 nt, Homo sapiens
  misc_RNA (1)...(19): siRNA sense strand
gcugauagcccgagugaca

SEQ ID NO: 739623 - RNA, 19 nt, Homo sapiens
  misc_RNA (1)...(19): siRNA sense strand
gaaaccaggagaucucaug

SEQ ID NO: 739624 - RNA, 19 nt, Homo sapiens
  misc_RNA (1)...(19): siRNA sense strand
gagcaagaucuucccaauu

SEQ ID NO: 739625 - RNA, 19 nt, Homo sapiens
  misc_RNA (1)...(19): siRNA sense strand
ugagaucagagacuuauuu

SEQ ID NO: 739626 - RNA, 19 nt, Homo sapiens
  misc_RNA (1)...(19): siRNA sense strand
aaaagacgcuagaagcaua

SEQ ID NO: 739627 - RNA, 19 nt, Homo sapiens
  misc_RNA (1)...(19): siRNA sense strand
ggacacaucccuguuccaa

SEQ ID NO: 739628 - RNA, 19 nt, Homo sapiens
  misc_RNA (1)...(19): siRNA sense strand
ggagagaugaguaauagca

SEQ ID NO: 739629 - RNA, 19 nt, Homo sapiens
  misc_RNA (1)...(19): siRNA sense strand
aaccacacguuuccuauug

SEQ ID NO: 739630 - RNA, 19 nt, Homo sapiens
  misc_RNA (1)...(19): siRNA sense strand
gcauguguguagaaacaga

SEQ ID NO: 739631 - RNA, 19 nt, Homo sapiens
  misc_RNA (1)...(19): siRNA sense strand
agaaagagagagagagaaa

SEQ ID NO: 739632 - RNA, 19 nt, Homo sapiens
  misc_RNA (1)...(19): siRNA sense strand
guucuacguuggccacuug

SEQ ID NO: 739633 - RNA, 19 nt, Homo sapiens
  misc_RNA (1)...(19): siRNA sense strand
ggaaagcuccccagaggua

SEQ ID NO: 739634 - RNA, 19 nt, Homo sapiens
  misc_RNA (1)...(19): siRNA sense strand
cgggagagaugaguaauag

SEQ ID NO: 739635 - RNA, 19 nt, Homo sapiens
  misc_RNA (1)...(19): siRNA sense strand
ggaccuggccucugugcuu

SEQ ID NO: 739636 - RNA, 19 nt, Homo sapiens
  misc_RNA (1)...(19): siRNA sense strand
gggcaucaaccacacguuu

SEQ ID NO: 739637 - RNA, 19 nt, Homo sapiens
  misc_RNA (1)...(19): siRNA sense strand
gguaaacauucuaauugca

SEQ ID NO: 739638 - RNA, 19 nt, Homo sapiens
  misc_RNA (1)...(19): siRNA sense strand
uaauugagaucagagacuu

SEQ ID NO: 739639 - RNA, 19 nt, Homo sapiens
  misc_RNA (1)...(19): siRNA sense strand
cgaggacauuuaauugaga

SEQ ID NO: 739640 - RNA, 19 nt, Homo sapiens
  misc_RNA (1)...(19): siRNA sense strand
gcugcuacuucuacaaaga

SEQ ID NO: 739641 - RNA, 19 nt, Homo sapiens
  misc_RNA (1)...(19): siRNA sense strand
gagagagaaaucagagaaa

SEQ ID NO: 739642 - RNA, 19 nt, Homo sapiens
  misc_RNA (1)...(19): siRNA sense strand
gagaucagagacuuauuug

SEQ ID NO: 739643 - RNA, 19 nt, Homo sapiens
  misc_RNA (1)...(19): siRNA sense strand
ggagaucucaugccugcaa

SEQ ID NO: 739644 - RNA, 19 nt, Homo sapiens
  misc_RNA (1)...(19): siRNA sense strand
gggaucaggcugcaaguga

SEQ ID NO: 739645 - RNA, 19 nt, Homo sapiens
  misc_RNA (1)...(19): siRNA sense strand
caaauggcccacuuuaaag

SEQ ID NO: 739646 - RNA, 19 nt, Homo sapiens
  misc_RNA (1)...(19): siRNA sense strand
ggucucugcuuugugauga

SEQ ID NO: 739647 - RNA, 19 nt, Homo sapiens
  misc_RNA (1)...(19): siRNA sense strand
ggccugcacuugccugaug

SEQ ID NO: 739648 - RNA, 19 nt, Homo sapiens
  misc_RNA (1)...(19): siRNA sense strand
gaaaggcaagcaauuagag

SEQ ID NO: 739649 - RNA, 19 nt, Homo sapiens
  misc_RNA (1)...(19): siRNA sense strand
gagaagcuggccugauuau

SEQ ID NO: 739650 - RNA, 19 nt, Homo sapiens
  misc_RNA (1)...(19): siRNA sense strand
gcacuuucugcauuaaauu

SEQ ID NO: 739651 - RNA, 19 nt, Homo sapiens
  misc_RNA (1)...(19): siRNA sense strand
acacagaaaucagagaaag

SEQ ID NO: 739652 - RNA, 19 nt, Homo sapiens
  misc_RNA (1)...(19): siRNA sense strand
gacccauccucaccucauu

SEQ ID NO: 739653 - RNA, 19 nt, Homo sapiens
  misc_RNA (1)...(19): siRNA sense strand
ccgcauagccguaccuuca

SEQ ID NO: 739654 - RNA, 19 nt, Homo sapiens
  misc_RNA (1)...(19): siRNA sense strand
gaacuggagcucugcuauc

SEQ ID NO: 739655 - RNA, 19 nt, Homo sapiens
  misc_RNA (1)...(19): siRNA sense strand
ugagcaagaucuucccaau

SEQ ID NO: 739656 - RNA, 19 nt, Homo sapiens
  misc_RNA (1)...(19): siRNA sense strand
cauccugccugcaaacuca

SEQ ID NO: 739657 - RNA, 19 nt, Homo sapiens
  misc_RNA (1)...(19): siRNA sense strand
aaacguuccugacacaagu

SEQ ID NO: 739658 - RNA, 19 nt, Homo sapiens
  misc_RNA (1)...(19): siRNA sense strand
uauugggccuguuaaguga

SEQ ID NO: 739659 - RNA, 19 nt, Homo sapiens
  misc_RNA (1)...(19): siRNA sense strand
caucaucuccaccuucuug

SEQ ID NO: 739660 - RNA, 19 nt, Homo sapiens
  misc_RNA (1)...(19): siRNA sense strand
acaacccucugucuacauu

SEQ ID NO: 739661 - RNA, 19 nt, Homo sapiens
  misc_RNA (1)...(19): siRNA sense strand
ccacaacccucugucuaca

SEQ ID NO: 739662 - RNA, 19 nt, Homo sapiens
  misc_RNA (1)...(19): siRNA sense strand
uuagguuggucaaaucaaa

SEQ ID NO: 739663 - RNA, 19 nt, Homo sapiens
  misc_RNA (1)...(19): siRNA sense strand
ccacagcucugcagaaccu

SEQ ID NO: 739664 - RNA, 19 nt, Homo sapiens
  misc_RNA (1)...(19): siRNA sense strand
ggaggagaaucgaggacau

SEQ ID NO: 739665 - RNA, 19 nt, Homo sapiens
  misc_RNA (1)...(19): siRNA sense strand
ggguggagcugcaucacau

SEQ ID NO: 739666 - RNA, 19 nt, Homo sapiens
  misc_RNA (1)...(19): siRNA sense strand
gaaggaauauuucuacaga

SEQ ID NO: 739667 - RNA, 19 nt, Homo sapiens
  misc_RNA (1)...(19): siRNA sense strand
gaugaaacgucaggaauuu

SEQ ID NO: 739668 - RNA, 19 nt, Homo sapiens
  misc_RNA (1)...(19): siRNA sense strand
ggacgccgcuggagagaaa

SEQ ID NO: 739669 - RNA, 19 nt, Homo sapiens
  misc_RNA (1)...(19): siRNA sense strand
gcuagaagcauauggaaua

SEQ ID NO: 739670 - RNA, 19 nt, Homo sapiens
  misc_RNA (1)...(19): siRNA sense strand
ggaauuuacuacacagaaa

SEQ ID NO: 739671 - RNA, 19 nt, Homo sapiens
  misc_RNA (1)...(19): siRNA sense strand
caacacgggucucugcuuu

SEQ ID NO: 739672 - RNA, 19 nt, Homo sapiens
  misc_RNA (1)...(19): siRNA sense strand
ccaaauggcccacuuuaaa

SEQ ID NO: 739673 - RNA, 19 nt, Homo sapiens
  misc_RNA (1)...(19): siRNA sense strand
gaugaaaggcaagcaauua

SEQ ID NO: 739674 - RNA, 19 nt, Homo sapiens
  misc_RNA (1)...(19): siRNA sense strand
gagaaucgaggacauuuaa

SEQ ID NO: 739675 - RNA, 19 nt, Homo sapiens
  misc_RNA (1)...(19): siRNA sense strand
aagagaagcuggccugauu

SEQ ID NO: 739676 - RNA, 19 nt, Homo sapiens
  misc_RNA (1)...(19): siRNA sense strand
gagguaaacauucuaauug

SEQ ID NO: 739677 - RNA, 19 nt, Homo sapiens
  misc_RNA (1)...(19): siRNA sense strand
gaaaugggcauguguguag

SEQ ID NO: 739678 - RNA, 19 nt, Homo sapiens
  misc_RNA (1)...(19): siRNA sense strand
ccaagaaccucgcauaguc

SEQ ID NO: 739679 - RNA, 19 nt, Homo sapiens
  misc_RNA (1)...(19): siRNA sense strand
gaagcuggccugauuaugu

SEQ ID NO: 739680 - RNA, 19 nt, Homo sapiens
  misc_RNA (1)...(19): siRNA sense strand
uggaauacauggccuguuu

SEQ ID NO: 739681 - RNA, 19 nt, Homo sapiens
  misc_RNA (1)...(19): siRNA sense strand
ugagguaguugacaaagaa

SEQ ID NO: 739682 - RNA, 19 nt, Homo sapiens
  misc_RNA (1)...(19): siRNA sense strand
ccaagugacugcuccauuc

SEQ ID NO: 739683 - RNA, 19 nt, Homo sapiens
  misc_RNA (1)...(19): siRNA sense strand
gagauugaauucugugugu

SEQ ID NO: 739684 - RNA, 19 nt, Homo sapiens
  misc_RNA (1)...(19): siRNA sense strand
gaaucgaggacauuuaauu

SEQ ID NO: 739685 - RNA, 19 nt, Homo sapiens
  misc_RNA (1)...(19): siRNA sense strand
gaaccucauuccuucuuug

SEQ ID NO: 739686 - RNA, 19 nt, Homo sapiens
  misc_RNA (1)...(19): siRNA sense strand
cuacagauauuucacagau

SEQ ID NO: 739687 - RNA, 19 nt, Homo sapiens
  misc_RNA (1)...(19): siRNA sense strand
gcaagcaauuagagccuuu

SEQ ID NO: 739688 - RNA, 19 nt, Homo sapiens
  misc_RNA (1)...(19): siRNA sense strand
acagauauuucacagauga

SEQ ID NO: 739689 - RNA, 19 nt, Homo sapiens
  misc_RNA (1)...(19): siRNA sense strand
acacaucccuguuccaaau

SEQ ID NO: 739690 - RNA, 19 nt, Homo sapiens
  misc_RNA (1)...(19): siRNA sense strand
cagcaugucuucuacuuca

SEQ ID NO: 739691 - RNA, 19 nt, Homo sapiens
  misc_RNA (1)...(19): siRNA sense strand
agcaagaucuucccaauug

SEQ ID NO: 739692 - RNA, 19 nt, Homo sapiens
  misc_RNA (1)...(19): siRNA sense strand
gaccuggccucugugcuua

SEQ ID NO: 739693 - RNA, 19 nt, Homo sapiens
  misc_RNA (1)...(19): siRNA sense strand
ucgcugagcucaucggaaa

SEQ ID NO: 739694 - RNA, 19 nt, Homo sapiens
  misc_RNA (1)...(19): siRNA sense strand
gugcaaagauggacucuac

SEQ ID NO: 739695 - RNA, 19 nt, Homo sapiens
  misc_RNA (1)...(19): siRNA sense strand
ggagcugcaucacauaguu

SEQ ID NO: 739696 - RNA, 19 nt, Homo sapiens
  misc_RNA (1)...(19): siRNA sense strand
gcaccucccucacuuugug

SEQ ID NO: 739697 - RNA, 19 nt, Homo sapiens
  misc_RNA (1)...(19): siRNA sense strand
ugaaggagcuggaccuaag

SEQ ID NO: 739698 - RNA, 19 nt, Homo sapiens
  misc_RNA (1)...(19): siRNA sense strand
gggcauguguguagaaaca

SEQ ID NO: 739699 - RNA, 19 nt, Homo sapiens
  misc_RNA (1)...(19): siRNA sense strand
gaaaucagagaaagagaga

SEQ ID NO: 739700 - RNA, 19 nt, Homo sapiens
  misc_RNA (1)...(19): siRNA sense strand
gaccggaagugcaaagaug

SEQ ID NO: 739701 - RNA, 19 nt, Homo sapiens
  misc_RNA (1)...(19): siRNA sense strand
aaacagacauggagcucuu

SEQ ID NO: 739702 - RNA, 19 nt, Homo sapiens
  misc_RNA (1)...(19): siRNA sense strand
ucacacagcugcuacuucu

SEQ ID NO: 739703 - RNA, 19 nt, Homo sapiens
  misc_RNA (1)...(19): siRNA sense strand
ggagaaucgaggacauuua

SEQ ID NO: 739704 - RNA, 19 nt, Homo sapiens
  misc_RNA (1)...(19): siRNA sense strand
cagcacagaucaacaugga

SEQ ID NO: 739705 - RNA, 19 nt, Homo sapiens
  misc_RNA (1)...(19): siRNA sense strand
ggaugaaacgucaggaauu

SEQ ID NO: 739706 - RNA, 19 nt, Homo sapiens
  misc_RNA (1)...(19): siRNA sense strand
ugaaagacaagaaagauga

SEQ ID NO: 739707 - RNA, 19 nt, Homo sapiens
  misc_RNA (1)...(19): siRNA sense strand
gcaagugaaagacaagaaa

SEQ ID NO: 739708 - RNA, 19 nt, Homo sapiens
  misc_RNA (1)...(19): siRNA sense strand
gcaauuagagccuuuaggu

SEQ ID NO: 739709 - RNA, 19 nt, Homo sapiens
  misc_RNA (1)...(19): siRNA sense strand
gcuguggccucacgucuga

SEQ ID NO: 739710 - RNA, 19 nt, Homo sapiens
  misc_RNA (1)...(19): siRNA sense strand
agagagagauggagaacau

SEQ ID NO: 739711 - RNA, 19 nt, Homo sapiens
  misc_RNA (1)...(19): siRNA sense strand
ggaucaggcugcaagugaa

SEQ ID NO: 739712 - RNA, 19 nt, Homo sapiens
  misc_RNA (1)...(19): siRNA sense strand
gcaggaaggaauauuucua

SEQ ID NO: 739713 - RNA, 19 nt, Homo sapiens
  misc_RNA (1)...(19): siRNA sense strand
ugacaucgguggagguugu

SEQ ID NO: 739714 - RNA, 19 nt, Homo sapiens
  misc_RNA (1)...(19): siRNA sense strand
cgaguucacuucccuguag

SEQ ID NO: 739715 - RNA, 19 nt, Homo sapiens
  misc_RNA (1)...(19): siRNA sense strand
ggagagguaaacauucuaa

SEQ ID NO: 739716 - RNA, 19 nt, Homo sapiens
  misc_RNA (1)...(19): siRNA sense strand
aggaggagcugaaggaguu

SEQ ID NO: 739717 - RNA, 19 nt, Homo sapiens
  misc_RNA (1)...(19): siRNA sense strand
ccucugugguguugcuuua

SEQ ID NO: 739718 - RNA, 19 nt, Homo sapiens
  misc_RNA (1)...(19): siRNA sense strand
gcagcaauguccuaugucu

SEQ ID NO: 739719 - RNA, 19 nt, Homo sapiens
  misc_RNA (1)...(19): siRNA sense strand
gaacaaccuggaugacguu

SEQ ID NO: 739720 - RNA, 19 nt, Homo sapiens
  misc_RNA (1)...(19): siRNA sense strand
gagcuggaccuaaguggaa

SEQ ID NO: 739721 - RNA, 19 nt, Homo sapiens
  misc_RNA (1)...(19): siRNA sense strand
ccaauggccucuggaugaa

SEQ ID NO: 739722 - RNA, 19 nt, Homo sapiens
  misc_RNA (1)...(19): siRNA sense strand
gcugauagcccgagugaca

SEQ ID NO: 739723 - RNA, 19 nt, Homo sapiens
  misc_RNA (1)...(19): siRNA sense strand
gaaaccaggagaucucaug

SEQ ID NO: 739724 - RNA, 19 nt, Homo sapiens
  misc_RNA (1)...(19): siRNA sense strand
gagcaagaucuucccaauu

SEQ ID NO: 739725 - RNA, 19 nt, Homo sapiens
  misc_RNA (1)...(19): siRNA sense strand
ugagaucagagacuuauuu

SEQ ID NO: 739726 - RNA, 19 nt, Homo sapiens
  misc_RNA (1)...(19): siRNA sense strand
aaaagacgcuagaagcaua

SEQ ID NO: 739727 - RNA, 19 nt, Homo sapiens
  misc_RNA (1)...(19): siRNA sense strand
ggacacaucccuguuccaa

SEQ ID NO: 739728 - RNA, 19 nt, Homo sapiens
  misc_RNA (1)...(19): siRNA sense strand
ggagagaugaguaauagca

SEQ ID NO: 739729 - RNA, 19 nt, Homo sapiens
  misc_RNA (1)...(19): siRNA sense strand
aaccacacguuuccuauug

SEQ ID NO: 739730 - RNA, 19 nt, Homo sapiens
  misc_RNA (1)...(19): siRNA sense strand
gcauguguguagaaacaga

SEQ ID NO: 739731 - RNA, 19 nt, Homo sapiens
  misc_RNA (1)...(19): siRNA sense strand
agaaagagagagagagaaa

SEQ ID NO: 739732 - RNA, 19 nt, Homo sapiens
  misc_RNA (1)...(19): siRNA sense strand
guucuacguuggccacuug

SEQ ID NO: 739733 - RNA, 19 nt, Homo sapiens
  misc_RNA (1)...(19): siRNA sense strand
ggaaagcuccccagaggua

SEQ ID NO: 739734 - RNA, 19 nt, Homo sapiens
  misc_RNA (1)...(19): siRNA sense strand
cgggagagaugaguaauag

SEQ ID NO: 739735 - RNA, 19 nt, Homo sapiens
  misc_RNA (1)...(19): siRNA sense strand
ggaccuggccucugugcuu

SEQ ID NO: 739736 - RNA, 19 nt, Homo sapiens
  misc_RNA (1)...(19): siRNA sense strand
gggcaucaaccacacguuu

SEQ ID NO: 739737 - RNA, 19 nt, Homo sapiens
  misc_RNA (1)...(19): siRNA sense strand
gguaaacauucuaauugca

SEQ ID NO: 739738 - RNA, 19 nt, Homo sapiens
  misc_RNA (1)...(19): siRNA sense strand
uaauugagaucagagacuu

SEQ ID NO: 739739 - RNA, 19 nt, Homo sapiens
  misc_RNA (1)...(19): siRNA sense strand
cgaggacauuuaauugaga

SEQ ID NO: 739740 - RNA, 19 nt, Homo sapiens
  misc_RNA (1)...(19): siRNA sense strand
gcugcuacuucuacaaaga

SEQ ID NO: 739741 - RNA, 19 nt, Homo sapiens
  misc_RNA (1)...(19): siRNA sense strand
gagagagaaaucagagaaa

SEQ ID NO: 739742 - RNA, 19 nt, Homo sapiens
  misc_RNA (1)...(19): siRNA sense strand
gagaucagagacuuauuug

SEQ ID NO: 739743 - RNA, 19 nt, Homo sapiens
  misc_RNA (1)...(19): siRNA sense strand
ggagaucucaugccugcaa

SEQ ID NO: 739744 - RNA, 19 nt, Homo sapiens
  misc_RNA (1)...(19): siRNA sense strand
gggaucaggcugcaaguga

SEQ ID NO: 739745 - RNA, 19 nt, Homo sapiens
  misc_RNA (1)...(19): siRNA sense strand
caaauggcccacuuuaaag

SEQ ID NO: 739746 - RNA, 19 nt, Homo sapiens
  misc_RNA (1)...(19): siRNA sense strand
ggucucugcuuugugauga

SEQ ID NO: 739747 - RNA, 19 nt, Homo sapiens
  misc_RNA (1)...(19): siRNA sense strand
ggccugcacuugccugaug

SEQ ID NO: 739748 - RNA, 19 nt, Homo sapiens
  misc_RNA (1)...(19): siRNA sense strand
gaaaggcaagcaauuagag

SEQ ID NO: 739749 - RNA, 19 nt, Homo sapiens
  misc_RNA (1)...(19): siRNA sense strand
gagaagcuggccugauuau

SEQ ID NO: 739750 - RNA, 19 nt, Homo sapiens
  misc_RNA (1)...(19): siRNA sense strand
gcacuuucugcauuaaauu

SEQ ID NO: 739751 - RNA, 19 nt, Homo sapiens
  misc_RNA (1)...(19): siRNA sense strand
acacagaaaucagagaaag

SEQ ID NO: 739752 - RNA, 19 nt, Homo sapiens
  misc_RNA (1)...(19): siRNA sense strand
gacccauccucaccucauu

SEQ ID NO: 739753 - RNA, 19 nt, Homo sapiens
  misc_RNA (1)...(19): siRNA sense strand
ccgcauagccguaccuuca

SEQ ID NO: 739754 - RNA, 19 nt, Homo sapiens
  misc_RNA (1)...(19): siRNA sense strand
gaacuggagcucugcuauc

SEQ ID NO: 739755 - RNA, 19 nt, Homo sapiens
  misc_RNA (1)...(19): siRNA sense strand
ugagcaagaucuucccaau

SEQ ID NO: 739756 - RNA, 19 nt, Homo sapiens
  misc_RNA (1)...(19): siRNA sense strand
cauccugccugcaaacuca

SEQ ID NO: 739757 - RNA, 19 nt, Homo sapiens
  misc_RNA (1)...(19): siRNA sense strand
aaacguuccugacacaagu

SEQ ID NO: 739758 - RNA, 19 nt, Homo sapiens
  misc_RNA (1)...(19): siRNA sense strand
uauugggccuguuaaguga

SEQ ID NO: 739759 - RNA, 19 nt, Homo sapiens
  misc_RNA (1)...(19): siRNA sense strand
caucaucuccaccuucuug

SEQ ID NO: 739760 - RNA, 19 nt, Homo sapiens
  misc_RNA (1)...(19): siRNA sense strand
acaacccucugucuacauu

SEQ ID NO: 739761 - RNA, 19 nt, Homo sapiens
  misc_RNA (1)...(19): siRNA sense strand
ccacaacccucugucuaca

SEQ ID NO: 739762 - RNA, 19 nt, Homo sapiens
  misc_RNA (1)...(19): siRNA sense strand
uuagguuggucaaaucaaa

SEQ ID NO: 739763 - RNA, 19 nt, Homo sapiens
  misc_RNA (1)...(19): siRNA sense strand
ccacagcucugcagaaccu

SEQ ID NO: 739764 - RNA, 19 nt, Homo sapiens
  misc_RNA (1)...(19): siRNA sense strand
ggaggagaaucgaggacau

SEQ ID NO: 739765 - RNA, 19 nt, Homo sapiens
  misc_RNA (1)...(19): siRNA sense strand
ggguggagcugcaucacau

SEQ ID NO: 739766 - RNA, 19 nt, Homo sapiens
  misc_RNA (1)...(19): siRNA sense strand
gaaggaauauuucuacaga

SEQ ID NO: 739767 - RNA, 19 nt, Homo sapiens
  misc_RNA (1)...(19): siRNA sense strand
gaugaaacgucaggaauuu

SEQ ID NO: 739768 - RNA, 19 nt, Homo sapiens
  misc_RNA (1)...(19): siRNA sense strand
ggacgccgcuggagagaaa

SEQ ID NO: 739769 - RNA, 19 nt, Homo sapiens
  misc_RNA (1)...(19): siRNA sense strand
gcuagaagcauauggaaua

SEQ ID NO: 739770 - RNA, 19 nt, Homo sapiens
  misc_RNA (1)...(19): siRNA sense strand
ggaauuuacuacacagaaa

SEQ ID NO: 739771 - RNA, 19 nt, Homo sapiens
  misc_RNA (1)...(19): siRNA sense strand
caacacgggucucugcuuu

SEQ ID NO: 739772 - RNA, 19 nt, Homo sapiens
  misc_RNA (1)...(19): siRNA sense strand
ccaaauggcccacuuuaaa

SEQ ID NO: 739773 - RNA, 19 nt, Homo sapiens
  misc_RNA (1)...(19): siRNA sense strand
gaugaaaggcaagcaauua

SEQ ID NO: 739774 - RNA, 19 nt, Homo sapiens
  misc_RNA (1)...(19): siRNA sense strand
gagaaucgaggacauuuaa

SEQ ID NO: 739775 - RNA, 19 nt, Homo sapiens
  misc_RNA (1)...(19): siRNA sense strand
aagagaagcuggccugauu

SEQ ID NO: 739776 - RNA, 19 nt, Homo sapiens
  misc_RNA (1)...(19): siRNA sense strand
gagguaaacauucuaauug

SEQ ID NO: 739777 - RNA, 19 nt, Homo sapiens
  misc_RNA (1)...(19): siRNA sense strand
gaaaugggcauguguguag

SEQ ID NO: 739778 - RNA, 19 nt, Homo sapiens
  misc_RNA (1)...(19): siRNA sense strand
ccaagaaccucgcauaguc

SEQ ID NO: 739779 - RNA, 19 nt, Homo sapiens
  misc_RNA (1)...(19): siRNA sense strand
gaagcuggccugauuaugu

SEQ ID NO: 739780 - RNA, 19 nt, Homo sapiens
  misc_RNA (1)...(19): siRNA sense strand
uggaauacauggccuguuu

SEQ ID NO: 739781 - RNA, 19 nt, Homo sapiens
  misc_RNA (1)...(19): siRNA sense strand
ugagguaguugacaaagaa

SEQ ID NO: 739782 - RNA, 19 nt, Homo sapiens
  misc_RNA (1)...(19): siRNA sense strand
ccaagugacugcuccauuc

SEQ ID NO: 739783 - RNA, 19 nt, Homo sapiens
  misc_RNA (1)...(19): siRNA sense strand
gagauugaauucugugugu

SEQ ID NO: 739784 - RNA, 19 nt, Homo sapiens
  misc_RNA (1)...(19): siRNA sense strand
gaaucgaggacauuuaauu

SEQ ID NO: 739785 - RNA, 19 nt, Homo sapiens
  misc_RNA (1)...(19): siRNA sense strand
gaaccucauuccuucuuug

SEQ ID NO: 739786 - RNA, 19 nt, Homo sapiens
  misc_RNA (1)...(19): siRNA sense strand
cuacagauauuucacagau

SEQ ID NO: 739787 - RNA, 19 nt, Homo sapiens
  misc_RNA (1)...(19): siRNA sense strand
gcaagcaauuagagccuuu

SEQ ID NO: 739788 - RNA, 19 nt, Homo sapiens
  misc_RNA (1)...(19): siRNA sense strand
acagauauuucacagauga

SEQ ID NO: 739789 - RNA, 19 nt, Homo sapiens
  misc_RNA (1)...(19): siRNA sense strand
acacaucccuguuccaaau

SEQ ID NO: 739790 - RNA, 19 nt, Homo sapiens
  misc_RNA (1)...(19): siRNA sense strand
cagcaugucuucuacuuca

SEQ ID NO: 739791 - RNA, 19 nt, Homo sapiens
  misc_RNA (1)...(19): siRNA sense strand
agcaagaucuucccaauug

SEQ ID NO: 739792 - RNA, 19 nt, Homo sapiens
  misc_RNA (1)...(19): siRNA sense strand
gaccuggccucugugcuua

SEQ ID NO: 739793 - RNA, 19 nt, Homo sapiens
  misc_RNA (1)...(19): siRNA sense strand
ucgcugagcucaucggaaa

SEQ ID NO: 739794 - RNA, 19 nt, Homo sapiens
  misc_RNA (1)...(19): siRNA sense strand
gugcaaagauggacucuac

SEQ ID NO: 739795 - RNA, 19 nt, Homo sapiens
  misc_RNA (1)...(19): siRNA sense strand
ggagcugcaucacauaguu

SEQ ID NO: 739796 - RNA, 19 nt, Homo sapiens
  misc_RNA (1)...(19): siRNA sense strand
gcaccucccucacuuugug

SEQ ID NO: 739797 - RNA, 19 nt, Homo sapiens
  misc_RNA (1)...(19): siRNA sense strand
ugaaggagcuggaccuaag

SEQ ID NO: 739798 - RNA, 19 nt, Homo sapiens
  misc_RNA (1)...(19): siRNA sense strand
gggcauguguguagaaaca

SEQ ID NO: 739799 - RNA, 19 nt, Homo sapiens
  misc_RNA (1)...(19): siRNA sense strand
gaaaucagagaaagagaga

SEQ ID NO: 739800 - RNA, 19 nt, Homo sapiens
  misc_RNA (1)...(19): siRNA sense strand
gaccggaagugcaaagaug

SEQ ID NO: 739801 - RNA, 19 nt, Homo sapiens
  misc_RNA (1)...(19): siRNA sense strand
aaacagacauggagcucuu

SEQ ID NO: 739802 - RNA, 19 nt, Homo sapiens
  misc_RNA (1)...(19): siRNA sense strand
ucacacagcugcuacuucu

SEQ ID NO: 739803 - RNA, 19 nt, Homo sapiens
  misc_RNA (1)...(19): siRNA sense strand
ggagaaucgaggacauuua

SEQ ID NO: 739804 - RNA, 19 nt, Homo sapiens
  misc_RNA (1)...(19): siRNA sense strand
cagcacagaucaacaugga

SEQ ID NO: 739805 - RNA, 19 nt, Homo sapiens
  misc_RNA (1)...(19): siRNA sense strand
ggaugaaacgucaggaauu

SEQ ID NO: 739806 - RNA, 19 nt, Homo sapiens
  misc_RNA (1)...(19): siRNA sense strand
ugaaagacaagaaagauga

SEQ ID NO: 739807 - RNA, 19 nt, Homo sapiens
  misc_RNA (1)...(19): siRNA sense strand
gcaagugaaagacaagaaa

SEQ ID NO: 739808 - RNA, 19 nt, Homo sapiens
  misc_RNA (1)...(19): siRNA sense strand
gcaauuagagccuuuaggu

SEQ ID NO: 739809 - RNA, 19 nt, Homo sapiens
  misc_RNA (1)...(19): siRNA sense strand
gcuguggccucacgucuga

SEQ ID NO: 739810 - RNA, 19 nt, Homo sapiens
  misc_RNA (1)...(19): siRNA sense strand
agagagagauggagaacau

SEQ ID NO: 739811 - RNA, 19 nt, Homo sapiens
  misc_RNA (1)...(19): siRNA sense strand
ggaucaggcugcaagugaa

SEQ ID NO: 739812 - RNA, 19 nt, Homo sapiens
  misc_RNA (1)...(19): siRNA sense strand
gcaggaaggaauauuucua

SEQ ID NO: 739813 - RNA, 19 nt, Homo sapiens
  misc_RNA (1)...(19): siRNA sense strand
ugacaucgguggagguugu

SEQ ID NO: 739814 - RNA, 19 nt, Homo sapiens
  misc_RNA (1)...(19): siRNA sense strand
cgaguucacuucccuguag

SEQ ID NO: 739815 - RNA, 19 nt, Homo sapiens
  misc_RNA (1)...(19): siRNA sense strand
ggagagguaaacauucuaa

SEQ ID NO: 739816 - RNA, 19 nt, Homo sapiens
  misc_RNA (1)...(19): siRNA sense strand
aggaggagcugaaggaguu

SEQ ID NO: 739817 - RNA, 19 nt, Homo sapiens
  misc_RNA (1)...(19): siRNA sense strand
ccucugugguguugcuuua

SEQ ID NO: 739818 - RNA, 19 nt, Homo sapiens
  misc_RNA (1)...(19): siRNA sense strand
gcagcaauguccuaugucu

SEQ ID NO: 739819 - RNA, 19 nt, Homo sapiens
  misc_RNA (1)...(19): siRNA sense strand
gaacaaccuggaugacguu

SEQ ID NO: 739820 - RNA, 19 nt, Homo sapiens
  misc_RNA (1)...(19): siRNA sense strand
gagcuggaccuaaguggaa

SEQ ID NO: 739821 - RNA, 19 nt, Homo sapiens
  misc_RNA (1)...(19): siRNA sense strand
ccaauggccucuggaugaa

SEQ ID NO: 739822 - RNA, 19 nt, Homo sapiens
  misc_RNA (1)...(19): siRNA sense strand
gcugauagcccgagugaca

SEQ ID NO: 739823 - RNA, 19 nt, Homo sapiens
  misc_RNA (1)...(19): siRNA sense strand
gaaaccaggagaucucaug

SEQ ID NO: 739824 - RNA, 19 nt, Homo sapiens
  misc_RNA (1)...(19): siRNA sense strand
gagcaagaucuucccaauu

SEQ ID NO: 739825 - RNA, 19 nt, Homo sapiens
  misc_RNA (1)...(19): siRNA sense strand
ugagaucagagacuuauuu

SEQ ID NO: 739826 - RNA, 19 nt, Homo sapiens
  misc_RNA (1)...(19): siRNA sense strand
aaaagacgcuagaagcaua

SEQ ID NO: 739827 - RNA, 19 nt, Homo sapiens
  misc_RNA (1)...(19): siRNA sense strand
ggacacaucccuguuccaa

SEQ ID NO: 739828 - RNA, 19 nt, Homo sapiens
  misc_RNA (1)...(19): siRNA sense strand
ggagagaugaguaauagca

SEQ ID NO: 739829 - RNA, 19 nt, Homo sapiens
  misc_RNA (1)...(19): siRNA sense strand
aaccacacguuuccuauug

SEQ ID NO: 739830 - RNA, 19 nt, Homo sapiens
  misc_RNA (1)...(19): siRNA sense strand
gcauguguguagaaacaga

SEQ ID NO: 739831 - RNA, 19 nt, Homo sapiens
  misc_RNA (1)...(19): siRNA sense strand
agaaagagagagagagaaa

SEQ ID NO: 739832 - RNA, 19 nt, Homo sapiens
  misc_RNA (1)...(19): siRNA sense strand
guucuacguuggccacuug

SEQ ID NO: 739833 - RNA, 19 nt, Homo sapiens
  misc_RNA (1)...(19): siRNA sense strand
ggaaagcuccccagaggua

SEQ ID NO: 739834 - RNA, 19 nt, Homo sapiens
  misc_RNA (1)...(19): siRNA sense strand
cgggagagaugaguaauag

SEQ ID NO: 739835 - RNA, 19 nt, Homo sapiens
  misc_RNA (1)...(19): siRNA sense strand
ggaccuggccucugugcuu

SEQ ID NO: 739836 - RNA, 19 nt, Homo sapiens
  misc_RNA (1)...(19): siRNA sense strand
gggcaucaaccacacguuu

SEQ ID NO: 739837 - RNA, 19 nt, Homo sapiens
  misc_RNA (1)...(19): siRNA sense strand
gguaaacauucuaauugca

SEQ ID NO: 739838 - RNA, 19 nt, Homo sapiens
  misc_RNA (1)...(19): siRNA sense strand
uaauugagaucagagacuu

SEQ ID NO: 739839 - RNA, 19 nt, Homo sapiens
  misc_RNA (1)...(19): siRNA sense strand
cgaggacauuuaauugaga

SEQ ID NO: 739840 - RNA, 19 nt, Homo sapiens
  misc_RNA (1)...(19): siRNA sense strand
gcugcuacuucuacaaaga

SEQ ID NO: 739841 - RNA, 19 nt, Homo sapiens
  misc_RNA (1)...(19): siRNA sense strand
gagagagaaaucagagaaa

SEQ ID NO: 739842 - RNA, 19 nt, Homo sapiens
  misc_RNA (1)...(19): siRNA sense strand
gagaucagagacuuauuug

SEQ ID NO: 739843 - RNA, 19 nt, Homo sapiens
  misc_RNA (1)...(19): siRNA sense strand
ggagaucucaugccugcaa

SEQ ID NO: 739844 - RNA, 19 nt, Homo sapiens
  misc_RNA (1)...(19): siRNA sense strand
gggaucaggcugcaaguga

SEQ ID NO: 739845 - RNA, 19 nt, Homo sapiens
  misc_RNA (1)...(19): siRNA sense strand
caaauggcccacuuuaaag

SEQ ID NO: 739846 - RNA, 19 nt, Homo sapiens
  misc_RNA (1)...(19): siRNA sense strand
ggucucugcuuugugauga

SEQ ID NO: 739847 - RNA, 19 nt, Homo sapiens
  misc_RNA (1)...(19): siRNA sense strand
ggccugcacuugccugaug

SEQ ID NO: 739848 - RNA, 19 nt, Homo sapiens
  misc_RNA (1)...(19): siRNA sense strand
gaaaggcaagcaauuagag

SEQ ID NO: 739849 - RNA, 19 nt, Homo sapiens
  misc_RNA (1)...(19): siRNA sense strand
gagaagcuggccugauuau

SEQ ID NO: 739850 - RNA, 19 nt, Homo sapiens
  misc_RNA (1)...(19): siRNA sense strand
gcacuuucugcauuaaauu

SEQ ID NO: 739851 - RNA, 19 nt, Homo sapiens
  misc_RNA (1)...(19): siRNA sense strand
acacagaaaucagagaaag

SEQ ID NO: 739852 - RNA, 19 nt, Homo sapiens
  misc_RNA (1)...(19): siRNA sense strand
gacccauccucaccucauu

SEQ ID NO: 739853 - RNA, 19 nt, Homo sapiens
  misc_RNA (1)...(19): siRNA sense strand
ccgcauagccguaccuuca

SEQ ID NO: 739854 - RNA, 19 nt, Homo sapiens
  misc_RNA (1)...(19): siRNA sense strand
gaacuggagcucugcuauc

SEQ ID NO: 739855 - RNA, 19 nt, Homo sapiens
  misc_RNA (1)...(19): siRNA sense strand
ugagcaagaucuucccaau

SEQ ID NO: 739856 - RNA, 19 nt, Homo sapiens
  misc_RNA (1)...(19): siRNA sense strand
cauccugccugcaaacuca

SEQ ID NO: 739857 - RNA, 19 nt, Homo sapiens
  misc_RNA (1)...(19): siRNA sense strand
aaacguuccugacacaagu

SEQ ID NO: 739858 - RNA, 19 nt, Homo sapiens
  misc_RNA (1)...(19): siRNA sense strand
uauugggccuguuaaguga

SEQ ID NO: 739859 - RNA, 19 nt, Homo sapiens
  misc_RNA (1)...(19): siRNA sense strand
caucaucuccaccuucuug

SEQ ID NO: 739860 - RNA, 19 nt, Homo sapiens
  misc_RNA (1)...(19): siRNA sense strand
acaacccucugucuacauu

SEQ ID NO: 739861 - RNA, 19 nt, Homo sapiens
  misc_RNA (1)...(19): siRNA sense strand
ccacaacccucugucuaca

SEQ ID NO: 739862 - RNA, 19 nt, Homo sapiens
  misc_RNA (1)...(19): siRNA sense strand
uuagguuggucaaaucaaa

SEQ ID NO: 739863 - RNA, 19 nt, Homo sapiens
  misc_RNA (1)...(19): siRNA sense strand
ccacagcucugcagaaccu

SEQ ID NO: 739864 - RNA, 19 nt, Homo sapiens
  misc_RNA (1)...(19): siRNA sense strand
ggaggagaaucgaggacau

SEQ ID NO: 739865 - RNA, 19 nt, Homo sapiens
  misc_RNA (1)...(19): siRNA sense strand
ggguggagcugcaucacau

SEQ ID NO: 739866 - RNA, 19 nt, Homo sapiens
  misc_RNA (1)...(19): siRNA sense strand
gaaggaauauuucuacaga

SEQ ID NO: 739867 - RNA, 19 nt, Homo sapiens
  misc_RNA (1)...(19): siRNA sense strand
gaugaaacgucaggaauuu

SEQ ID NO: 739868 - RNA, 19 nt, Homo sapiens
  misc_RNA (1)...(19): siRNA sense strand
ggacgccgcuggagagaaa

SEQ ID NO: 739869 - RNA, 19 nt, Homo sapiens
  misc_RNA (1)...(19): siRNA sense strand
gcuagaagcauauggaaua

SEQ ID NO: 739870 - RNA, 19 nt, Homo sapiens
  misc_RNA (1)...(19): siRNA sense strand
ggaauuuacuacacagaaa

SEQ ID NO: 739871 - RNA, 19 nt, Homo sapiens
  misc_RNA (1)...(19): siRNA sense strand
caacacgggucucugcuuu

SEQ ID NO: 739872 - RNA, 19 nt, Homo sapiens
  misc_RNA (1)...(19): siRNA sense strand
ccaaauggcccacuuuaaa

SEQ ID NO: 739873 - RNA, 19 nt, Homo sapiens
  misc_RNA (1)...(19): siRNA sense strand
gaugaaaggcaagcaauua

SEQ ID NO: 739874 - RNA, 19 nt, Homo sapiens
  misc_RNA (1)...(19): siRNA sense strand
gagaaucgaggacauuuaa

SEQ ID NO: 739875 - RNA, 19 nt, Homo sapiens
  misc_RNA (1)...(19): siRNA sense strand
aagagaagcuggccugauu

SEQ ID NO: 739876 - RNA, 19 nt, Homo sapiens
  misc_RNA (1)...(19): siRNA sense strand
gagguaaacauucuaauug

SEQ ID NO: 739877 - RNA, 19 nt, Homo sapiens
  misc_RNA (1)...(19): siRNA sense strand
gaaaugggcauguguguag

SEQ ID NO: 739878 - RNA, 19 nt, Homo sapiens
  misc_RNA (1)...(19): siRNA sense strand
ccaagaaccucgcauaguc

SEQ ID NO: 739879 - RNA, 19 nt, Homo sapiens
  misc_RNA (1)...(19): siRNA sense strand
gaagcuggccugauuaugu

SEQ ID NO: 739880 - RNA, 19 nt, Homo sapiens
  misc_RNA (1)...(19): siRNA sense strand
uggaauacauggccuguuu

SEQ ID NO: 739881 - RNA, 19 nt, Homo sapiens
  misc_RNA (1)...(19): siRNA sense strand
ugagguaguugacaaagaa

SEQ ID NO: 739882 - RNA, 19 nt, Homo sapiens
  misc_RNA (1)...(19): siRNA sense strand
ccaagugacugcuccauuc

SEQ ID NO: 739883 - RNA, 19 nt, Homo sapiens
  misc_RNA (1)...(19): siRNA sense strand
gagauugaauucugugugu

SEQ ID NO: 739884 - RNA, 19 nt, Homo sapiens
  misc_RNA (1)...(19): siRNA sense strand
gaaucgaggacauuuaauu

SEQ ID NO: 739885 - RNA, 19 nt, Homo sapiens
  misc_RNA (1)...(19): siRNA sense strand
gaaccucauuccuucuuug

SEQ ID NO: 739886 - RNA, 19 nt, Homo sapiens
  misc_RNA (1)...(19): siRNA sense strand
cuacagauauuucacagau

SEQ ID NO: 739887 - RNA, 19 nt, Homo sapiens
  misc_RNA (1)...(19): siRNA sense strand
gcaagcaauuagagccuuu

SEQ ID NO: 739888 - RNA, 19 nt, Homo sapiens
  misc_RNA (1)...(19): siRNA sense strand
acagauauuucacagauga

SEQ ID NO: 739889 - RNA, 19 nt, Homo sapiens
  misc_RNA (1)...(19): siRNA sense strand
acacaucccuguuccaaau

SEQ ID NO: 739890 - RNA, 19 nt, Homo sapiens
  misc_RNA (1)...(19): siRNA sense strand
cagcaugucuucuacuuca

SEQ ID NO: 739891 - RNA, 19 nt, Homo sapiens
  misc_RNA (1)...(19): siRNA sense strand
agcaagaucuucccaauug

SEQ ID NO: 739892 - RNA, 19 nt, Homo sapiens
  misc_RNA (1)...(19): siRNA sense strand
gaccuggccucugugcuua

SEQ ID NO: 739893 - RNA, 19 nt, Homo sapiens
  misc_RNA (1)...(19): siRNA sense strand
ucgcugagcucaucggaaa

SEQ ID NO: 739894 - RNA, 19 nt, Homo sapiens
  misc_RNA (1)...(19): siRNA sense strand
gugcaaagauggacucuac

SEQ ID NO: 739895 - RNA, 19 nt, Homo sapiens
  misc_RNA (1)...(19): siRNA sense strand
ggagcugcaucacauaguu

SEQ ID NO: 739896 - RNA, 19 nt, Homo sapiens
  misc_RNA (1)...(19): siRNA sense strand
gcaccucccucacuuugug

SEQ ID NO: 739897 - RNA, 19 nt, Homo sapiens
  misc_RNA (1)...(19): siRNA sense strand
ugaaggagcuggaccuaag

SEQ ID NO: 739898 - RNA, 19 nt, Homo sapiens
  misc_RNA (1)...(19): siRNA sense strand
gggcauguguguagaaaca

SEQ ID NO: 739899 - RNA, 19 nt, Homo sapiens
  misc_RNA (1)...(19): siRNA sense strand
gaaaucagagaaagagaga

SEQ ID NO: 739900 - RNA, 19 nt, Homo sapiens
  misc_RNA (1)...(19): siRNA sense strand
gaccggaagugcaaagaug

SEQ ID NO: 739901 - RNA, 19 nt, Homo sapiens
  misc_RNA (1)...(19): siRNA sense strand
aaacagacauggagcucuu

SEQ ID NO: 739902 - RNA, 19 nt, Homo sapiens
  misc_RNA (1)...(19): siRNA sense strand
ucacacagcugcuacuucu

SEQ ID NO: 739903 - RNA, 19 nt, Homo sapiens
  misc_RNA (1)...(19): siRNA sense strand
ggagaaucgaggacauuua

SEQ ID NO: 739904 - RNA, 19 nt, Homo sapiens
  misc_RNA (1)...(19): siRNA sense strand
cagcacagaucaacaugga

SEQ ID NO: 739905 - RNA, 19 nt, Homo sapiens
  misc_RNA (1)...(19): siRNA sense strand
ggaugaaacgucaggaauu

SEQ ID NO: 739906 - RNA, 19 nt, Homo sapiens
  misc_RNA (1)...(19): siRNA sense strand
ugaaagacaagaaagauga

SEQ ID NO: 739907 - RNA, 19 nt, Homo sapiens
  misc_RNA (1)...(19): siRNA sense strand
gcaagugaaagacaagaaa

SEQ ID NO: 739908 - RNA, 19 nt, Homo sapiens
  misc_RNA (1)...(19): siRNA sense strand
gcaauuagagccuuuaggu

SEQ ID NO: 739909 - RNA, 19 nt, Homo sapiens
  misc_RNA (1)...(19): siRNA sense strand
gcuguggccucacgucuga

SEQ ID NO: 739910 - RNA, 19 nt, Homo sapiens
  misc_RNA (1)...(19): siRNA sense strand
agagagagauggagaacau

SEQ ID NO: 739911 - RNA, 19 nt, Homo sapiens
  misc_RNA (1)...(19): siRNA sense strand
ggaucaggcugcaagugaa

SEQ ID NO: 739912 - RNA, 19 nt, Homo sapiens
  misc_RNA (1)...(19): siRNA sense strand
gcaggaaggaauauuucua

SEQ ID NO: 739913 - RNA, 19 nt, Homo sapiens
  misc_RNA (1)...(19): siRNA sense strand
ugacaucgguggagguugu

SEQ ID NO: 739914 - RNA, 19 nt, Homo sapiens
  misc_RNA (1)...(19): siRNA sense strand
cgaguucacuucccuguag

SEQ ID NO: 739915 - RNA, 19 nt, Homo sapiens
  misc_RNA (1)...(19): siRNA sense strand
ggagagguaaacauucuaa

SEQ ID NO: 739916 - RNA, 19 nt, Homo sapiens
  misc_RNA (1)...(19): siRNA sense strand
aggaggagcugaaggaguu

SEQ ID NO: 739917 - RNA, 19 nt, Homo sapiens
  misc_RNA (1)...(19): siRNA sense strand
ccucugugguguugcuuua

SEQ ID NO: 739918 - RNA, 19 nt, Homo sapiens
  misc_RNA (1)...(19): siRNA sense strand
gcagcaauguccuaugucu

SEQ ID NO: 739919 - RNA, 19 nt, Homo sapiens
  misc_RNA (1)...(19): siRNA sense strand
gaacaaccuggaugacguu

SEQ ID NO: 739920 - RNA, 19 nt, Homo sapiens
  misc_RNA (1)...(19): siRNA sense strand
gagcuggaccuaaguggaa

SEQ ID NO: 739921 - RNA, 19 nt, Homo sapiens
  misc_RNA (1)...(19): siRNA sense strand
ccaauggccucuggaugaa

SEQ ID NO: 739922 - RNA, 19 nt, Homo sapiens
  misc_RNA (1)...(19): siRNA sense strand
gcugauagcccgagugaca

SEQ ID NO: 739923 - RNA, 19 nt, Homo sapiens
  misc_RNA (1)...(19): siRNA sense strand
gaaaccaggagaucucaug

SEQ ID NO: 739924 - RNA, 19 nt, Homo sapiens
  misc_RNA (1)...(19): siRNA sense strand
gagcaagaucuucccaauu

SEQ ID NO: 739925 - RNA, 19 nt, Homo sapiens
  misc_RNA (1)...(19): siRNA sense strand
ugagaucagagacuuauuu

SEQ ID NO: 739926 - RNA, 19 nt, Homo sapiens
  misc_RNA (1)...(19): siRNA sense strand
aaaagacgcuagaagcaua

SEQ ID NO: 739927 - RNA, 19 nt, Homo sapiens
  misc_RNA (1)...(19): siRNA sense strand
ggacacaucccuguuccaa

SEQ ID NO: 739928 - RNA, 19 nt, Homo sapiens
  misc_RNA (1)...(19): siRNA sense strand
ggagagaugaguaauagca

SEQ ID NO: 739929 - RNA, 19 nt, Homo sapiens
  misc_RNA (1)...(19): siRNA sense strand
aaccacacguuuccuauug

SEQ ID NO: 739930 - RNA, 19 nt, Homo sapiens
  misc_RNA (1)...(19): siRNA sense strand
gcauguguguagaaacaga

SEQ ID NO: 739931 - RNA, 19 nt, Homo sapiens
  misc_RNA (1)...(19): siRNA sense strand
agaaagagagagagagaaa

SEQ ID NO: 739932 - RNA, 19 nt, Homo sapiens
  misc_RNA (1)...(19): siRNA sense strand
guucuacguuggccacuug

SEQ ID NO: 739933 - RNA, 19 nt, Homo sapiens
  misc_RNA (1)...(19): siRNA sense strand
ggaaagcuccccagaggua

SEQ ID NO: 739934 - RNA, 19 nt, Homo sapiens
  misc_RNA (1)...(19): siRNA sense strand
cgggagagaugaguaauag

SEQ ID NO: 739935 - RNA, 19 nt, Homo sapiens
  misc_RNA (1)...(19): siRNA sense strand
ggaccuggccucugugcuu

SEQ ID NO: 739936 - RNA, 19 nt, Homo sapiens
  misc_RNA (1)...(19): siRNA sense strand
gggcaucaaccacacguuu

SEQ ID NO: 739937 - RNA, 19 nt, Homo sapiens
  misc_RNA (1)...(19): siRNA sense strand
gguaaacauucuaauugca

SEQ ID NO: 739938 - RNA, 19 nt, Homo sapiens
  misc_RNA (1)...(19): siRNA sense strand
uaauugagaucagagacuu

SEQ ID NO: 739939 - RNA, 19 nt, Homo sapiens
  misc_RNA (1)...(19): siRNA sense strand
cgaggacauuuaauugaga

SEQ ID NO: 739940 - RNA, 19 nt, Homo sapiens
  misc_RNA (1)...(19): siRNA sense strand
gcugcuacuucuacaaaga

SEQ ID NO: 739941 - RNA, 19 nt, Homo sapiens
  misc_RNA (1)...(19): siRNA sense strand
gagagagaaaucagagaaa

SEQ ID NO: 739942 - RNA, 19 nt, Homo sapiens
  misc_RNA (1)...(19): siRNA sense strand
gagaucagagacuuauuug

SEQ ID NO: 739943 - RNA, 19 nt, Homo sapiens
  misc_RNA (1)...(19): siRNA sense strand
ggagaucucaugccugcaa

SEQ ID NO: 739944 - RNA, 19 nt, Homo sapiens
  misc_RNA (1)...(19): siRNA sense strand
gggaucaggcugcaaguga

SEQ ID NO: 739945 - RNA, 19 nt, Homo sapiens
  misc_RNA (1)...(19): siRNA sense strand
caaauggcccacuuuaaag

SEQ ID NO: 739946 - RNA, 19 nt, Homo sapiens
  misc_RNA (1)...(19): siRNA sense strand
ggucucugcuuugugauga

SEQ ID NO: 739947 - RNA, 19 nt, Homo sapiens
  misc_RNA (1)...(19): siRNA sense strand
ggccugcacuugccugaug

SEQ ID NO: 739948 - RNA, 19 nt, Homo sapiens
  misc_RNA (1)...(19): siRNA sense strand
gaaaggcaagcaauuagag

SEQ ID NO: 739949 - RNA, 19 nt, Homo sapiens
  misc_RNA (1)...(19): siRNA sense strand
gagaagcuggccugauuau

SEQ ID NO: 739950 - RNA, 19 nt, Homo sapiens
  misc_RNA (1)...(19): siRNA sense strand
gcacuuucugcauuaaauu

SEQ ID NO: 739951 - RNA, 19 nt, Homo sapiens
  misc_RNA (1)...(19): siRNA sense strand
acacagaaaucagagaaag

SEQ ID NO: 739952 - RNA, 19 nt, Homo sapiens
  misc_RNA (1)...(19): siRNA sense strand
gacccauccucaccucauu

SEQ ID NO: 739953 - RNA, 19 nt, Homo sapiens
  misc_RNA (1)...(19): siRNA sense strand
ccgcauagccguaccuuca

SEQ ID NO: 739954 - RNA, 19 nt, Homo sapiens
  misc_RNA (1)...(19): siRNA sense strand
gaacuggagcucugcuauc

SEQ ID NO: 739955 - RNA, 19 nt, Homo sapiens
  misc_RNA (1)...(19): siRNA sense strand
ugagcaagaucuucccaau

SEQ ID NO: 739956 - RNA, 19 nt, Homo sapiens
  misc_RNA (1)...(19): siRNA sense strand
cauccugccugcaaacuca

SEQ ID NO: 739957 - RNA, 19 nt, Homo sapiens
  misc_RNA (1)...(19): siRNA sense strand
aaacguuccugacacaagu

SEQ ID NO: 739958 - RNA, 19 nt, Homo sapiens
  misc_RNA (1)...(19): siRNA sense strand
uauugggccuguuaaguga

SEQ ID NO: 739959 - RNA, 19 nt, Homo sapiens
  misc_RNA (1)...(19): siRNA sense strand
caucaucuccaccuucuug

SEQ ID NO: 739960 - RNA, 19 nt, Homo sapiens
  misc_RNA (1)...(19): siRNA sense strand
acaacccucugucuacauu

SEQ ID NO: 739961 - RNA, 19 nt, Homo sapiens
  misc_RNA (1)...(19): siRNA sense strand
ccacaacccucugucuaca

SEQ ID NO: 739962 - RNA, 19 nt, Homo sapiens
  misc_RNA (1)...(19): siRNA sense strand
uuagguuggucaaaucaaa

SEQ ID NO: 739963 - RNA, 19 nt, Homo sapiens
  misc_RNA (1)...(19): siRNA sense strand
ccacagcucugcagaaccu

SEQ ID NO: 739964 - RNA, 19 nt, Homo sapiens
  misc_RNA (1)...(19): siRNA sense strand
ggaggagaaucgaggacau

SEQ ID NO: 739965 - RNA, 19 nt, Homo sapiens
  misc_RNA (1)...(19): siRNA sense strand
ggguggagcugcaucacau

SEQ ID NO: 739966 - RNA, 19 nt, Homo sapiens
  misc_RNA (1)...(19): siRNA sense strand
gaaggaauauuucuacaga

SEQ ID NO: 739967 - RNA, 19 nt, Homo sapiens
  misc_RNA (1)...(19): siRNA sense strand
gaugaaacgucaggaauuu

SEQ ID NO: 739968 - RNA, 19 nt, Homo sapiens
  misc_RNA (1)...(19): siRNA sense strand
ggacgccgcuggagagaaa

SEQ ID NO: 739969 - RNA, 19 nt, Homo sapiens
  misc_RNA (1)...(19): siRNA sense strand
gcuagaagcauauggaaua

SEQ ID NO: 739970 - RNA, 19 nt, Homo sapiens
  misc_RNA (1)...(19): siRNA sense strand
ggaauuuacuacacagaaa

SEQ ID NO: 739971 - RNA, 19 nt, Homo sapiens
  misc_RNA (1)...(19): siRNA sense strand
caacacgggucucugcuuu

SEQ ID NO: 739972 - RNA, 19 nt, Homo sapiens
  misc_RNA (1)...(19): siRNA sense strand
ccaaauggcccacuuuaaa

SEQ ID NO: 739973 - RNA, 19 nt, Homo sapiens
  misc_RNA (1)...(19): siRNA sense strand
gaugaaaggcaagcaauua

SEQ ID NO: 739974 - RNA, 19 nt, Homo sapiens
  misc_RNA (1)...(19): siRNA sense strand
gagaaucgaggacauuuaa

SEQ ID NO: 739975 - RNA, 19 nt, Homo sapiens
  misc_RNA (1)...(19): siRNA sense strand
aagagaagcuggccugauu

SEQ ID NO: 739976 - RNA, 19 nt, Homo sapiens
  misc_RNA (1)...(19): siRNA sense strand
gagguaaacauucuaauug

SEQ ID NO: 739977 - RNA, 19 nt, Homo sapiens
  misc_RNA (1)...(19): siRNA sense strand
gaaaugggcauguguguag

SEQ ID NO: 739978 - RNA, 19 nt, Homo sapiens
  misc_RNA (1)...(19): siRNA sense strand
ccaagaaccucgcauaguc

SEQ ID NO: 739979 - RNA, 19 nt, Homo sapiens
  misc_RNA (1)...(19): siRNA sense strand
gaagcuggccugauuaugu

SEQ ID NO: 739980 - RNA, 19 nt, Homo sapiens
  misc_RNA (1)...(19): siRNA sense strand
uggaauacauggccuguuu

SEQ ID NO: 739981 - RNA, 19 nt, Homo sapiens
  misc_RNA (1)...(19): siRNA sense strand
ugagguaguugacaaagaa

SEQ ID NO: 739982 - RNA, 19 nt, Homo sapiens
  misc_RNA (1)...(19): siRNA sense strand
ccaagugacugcuccauuc

SEQ ID NO: 739983 - RNA, 19 nt, Homo sapiens
  misc_RNA (1)...(19): siRNA sense strand
gagauugaauucugugugu

SEQ ID NO: 739984 - RNA, 19 nt, Homo sapiens
  misc_RNA (1)...(19): siRNA sense strand
gaaucgaggacauuuaauu

SEQ ID NO: 739985 - RNA, 19 nt, Homo sapiens
  misc_RNA (1)...(19): siRNA sense strand
gaaccucauuccuucuuug

SEQ ID NO: 739986 - RNA, 19 nt, Homo sapiens
  misc_RNA (1)...(19): siRNA sense strand
cuacagauauuucacagau

SEQ ID NO: 739987 - RNA, 19 nt, Homo sapiens
  misc_RNA (1)...(19): siRNA sense strand
gcaagcaauuagagccuuu

SEQ ID NO: 739988 - RNA, 19 nt, Homo sapiens
  misc_RNA (1)...(19): siRNA sense strand
acagauauuucacagauga

SEQ ID NO: 739989 - RNA, 19 nt, Homo sapiens
  misc_RNA (1)...(19): siRNA sense strand
acacaucccuguuccaaau

SEQ ID NO: 739990 - RNA, 19 nt, Homo sapiens
  misc_RNA (1)...(19): siRNA sense strand
cagcaugucuucuacuuca

SEQ ID NO: 739991 - RNA, 19 nt, Homo sapiens
  misc_RNA (1)...(19): siRNA sense strand
agcaagaucuucccaauug

SEQ ID NO: 739992 - RNA, 19 nt, Homo sapiens
  misc_RNA (1)...(19): siRNA sense strand
gaccuggccucugugcuua

SEQ ID NO: 739993 - RNA, 19 nt, Homo sapiens
  misc_RNA (1)...(19): siRNA sense strand
ucgcugagcucaucggaaa

SEQ ID NO: 739994 - RNA, 19 nt, Homo sapiens
  misc_RNA (1)...(19): siRNA sense strand
gugcaaagauggacucuac

SEQ ID NO: 739995 - RNA, 19 nt, Homo sapiens
  misc_RNA (1)...(19): siRNA sense strand
ggagcugcaucacauaguu

SEQ ID NO: 739996 - RNA, 19 nt, Homo sapiens
  misc_RNA (1)...(19): siRNA sense strand
gcaccucccucacuuugug

SEQ ID NO: 739997 - RNA, 19 nt, Homo sapiens
  misc_RNA (1)...(19): siRNA sense strand
ugaaggagcuggaccuaag

SEQ ID NO: 739998 - RNA, 19 nt, Homo sapiens
  misc_RNA (1)...(19): siRNA sense strand
gggcauguguguagaaaca

SEQ ID NO: 739999 - RNA, 19 nt, Homo sapiens
  misc_RNA (1)...(19): siRNA sense strand
gaaaucagagaaagagaga

SEQ ID NO: 740000 - RNA, 19 nt, Homo sapiens
  misc_RNA (1)...(19): siRNA sense strand
gaccggaagugcaaagaug

SEQ ID NO: 740001 - RNA, 19 nt, Homo sapiens
  misc_RNA (1)...(19): siRNA sense strand
aaacagacauggagcucuu

SEQ ID NO: 740002 - RNA, 19 nt, Homo sapiens
  misc_RNA (1)...(19): siRNA sense strand
ucacacagcugcuacuucu

SEQ ID NO: 740003 - RNA, 19 nt, Homo sapiens
  misc_RNA (1)...(19): siRNA sense strand
ggagaaucgaggacauuua

SEQ ID NO: 740004 - RNA, 19 nt, Homo sapiens
  misc_RNA (1)...(19): siRNA sense strand
cagcacagaucaacaugga

SEQ ID NO: 740005 - RNA, 19 nt, Homo sapiens
  misc_RNA (1)...(19): siRNA sense strand
ggaugaaacgucaggaauu

SEQ ID NO: 740006 - RNA, 19 nt, Homo sapiens
  misc_RNA (1)...(19): siRNA sense strand
ugaaagacaagaaagauga

SEQ ID NO: 740007 - RNA, 19 nt, Homo sapiens
  misc_RNA (1)...(19): siRNA sense strand
gcaagugaaagacaagaaa

SEQ ID NO: 740008 - RNA, 19 nt, Homo sapiens
  misc_RNA (1)...(19): siRNA sense strand
gcaauuagagccuuuaggu

SEQ ID NO: 740009 - RNA, 19 nt, Homo sapiens
  misc_RNA (1)...(19): siRNA sense strand
gcuguggccucacgucuga

SEQ ID NO: 740010 - RNA, 19 nt, Homo sapiens
  misc_RNA (1)...(19): siRNA sense strand
agagagagauggagaacau

SEQ ID NO: 740011 - RNA, 19 nt, Homo sapiens
  misc_RNA (1)...(19): siRNA sense strand
ggaucaggcugcaagugaa

SEQ ID NO: 740012 - RNA, 19 nt, Homo sapiens
  misc_RNA (1)...(19): siRNA sense strand
gcaggaaggaauauuucua

SEQ ID NO: 740013 - RNA, 19 nt, Homo sapiens
  misc_RNA (1)...(19): siRNA sense strand
ugacaucgguggagguugu

SEQ ID NO: 740014 - RNA, 19 nt, Homo sapiens
  misc_RNA (1)...(19): siRNA sense strand
cgaguucacuucccuguag

SEQ ID NO: 740015 - RNA, 19 nt, Homo sapiens
  misc_RNA (1)...(19): siRNA sense strand
ggagagguaaacauucuaa

SEQ ID NO: 740016 - RNA, 19 nt, Homo sapiens
  misc_RNA (1)...(19): siRNA sense strand
aggaggagcugaaggaguu

SEQ ID NO: 740017 - RNA, 19 nt, Homo sapiens
  misc_RNA (1)...(19): siRNA sense strand
ccucugugguguugcuuua

SEQ ID NO: 740018 - RNA, 19 nt, Homo sapiens
  misc_RNA (1)...(19): siRNA sense strand
gcagcaauguccuaugucu

SEQ ID NO: 740019 - RNA, 19 nt, Homo sapiens
  misc_RNA (1)...(19): siRNA sense strand
gaacaaccuggaugacguu

SEQ ID NO: 740020 - RNA, 19 nt, Homo sapiens
  misc_RNA (1)...(19): siRNA sense strand
gagcuggaccuaaguggaa

SEQ ID NO: 740021 - RNA, 19 nt, Homo sapiens
  misc_RNA (1)...(19): siRNA sense strand
ccaauggccucuggaugaa

SEQ ID NO: 740022 - RNA, 19 nt, Homo sapiens
  misc_RNA (1)...(19): siRNA sense strand
gcugauagcccgagugaca

SEQ ID NO: 740023 - RNA, 19 nt, Homo sapiens
  misc_RNA (1)...(19): siRNA sense strand
gaaaccaggagaucucaug

SEQ ID NO: 740024 - RNA, 19 nt, Homo sapiens
  misc_RNA (1)...(19): siRNA sense strand
gagcaagaucuucccaauu

SEQ ID NO: 740025 - RNA, 19 nt, Homo sapiens
  misc_RNA (1)...(19): siRNA sense strand
ugagaucagagacuuauuu

SEQ ID NO: 740026 - RNA, 19 nt, Homo sapiens
  misc_RNA (1)...(19): siRNA sense strand
aaaagacgcuagaagcaua

SEQ ID NO: 740027 - RNA, 19 nt, Homo sapiens
  misc_RNA (1)...(19): siRNA sense strand
ggacacaucccuguuccaa

SEQ ID NO: 740028 - RNA, 19 nt, Homo sapiens
  misc_RNA (1)...(19): siRNA sense strand
ggagagaugaguaauagca

SEQ ID NO: 740029 - RNA, 19 nt, Homo sapiens
  misc_RNA (1)...(19): siRNA sense strand
aaccacacguuuccuauug

SEQ ID NO: 740030 - RNA, 19 nt, Homo sapiens
  misc_RNA (1)...(19): siRNA sense strand
gcauguguguagaaacaga

SEQ ID NO: 740031 - RNA, 19 nt, Homo sapiens
  misc_RNA (1)...(19): siRNA sense strand
agaaagagagagagagaaa

SEQ ID NO: 740032 - RNA, 19 nt, Homo sapiens
  misc_RNA (1)...(19): siRNA sense strand
guucuacguuggccacuug

SEQ ID NO: 740033 - RNA, 19 nt, Homo sapiens
  misc_RNA (1)...(19): siRNA sense strand
ggaaagcuccccagaggua

SEQ ID NO: 740034 - RNA, 19 nt, Homo sapiens
  misc_RNA (1)...(19): siRNA sense strand
cgggagagaugaguaauag

SEQ ID NO: 740035 - RNA, 19 nt, Homo sapiens
  misc_RNA (1)...(19): siRNA sense strand
ggaccuggccucugugcuu

SEQ ID NO: 740036 - RNA, 19 nt, Homo sapiens
  misc_RNA (1)...(19): siRNA sense strand
gggcaucaaccacacguuu

SEQ ID NO: 740037 - RNA, 19 nt, Homo sapiens
  misc_RNA (1)...(19): siRNA sense strand
gguaaacauucuaauugca

SEQ ID NO: 740038 - RNA, 19 nt, Homo sapiens
  misc_RNA (1)...(19): siRNA sense strand
uaauugagaucagagacuu

SEQ ID NO: 740039 - RNA, 19 nt, Homo sapiens
  misc_RNA (1)...(19): siRNA sense strand
cgaggacauuuaauugaga

SEQ ID NO: 740040 - RNA, 19 nt, Homo sapiens
  misc_RNA (1)...(19): siRNA sense strand
gcugcuacuucuacaaaga

SEQ ID NO: 740041 - RNA, 19 nt, Homo sapiens
  misc_RNA (1)...(19): siRNA sense strand
gagagagaaaucagagaaa

SEQ ID NO: 740042 - RNA, 19 nt, Homo sapiens
  misc_RNA (1)...(19): siRNA sense strand
gagaucagagacuuauuug

SEQ ID NO: 740043 - RNA, 19 nt, Homo sapiens
  misc_RNA (1)...(19): siRNA sense strand
ggagaucucaugccugcaa

SEQ ID NO: 740044 - RNA, 19 nt, Homo sapiens
  misc_RNA (1)...(19): siRNA sense strand
gggaucaggcugcaaguga

SEQ ID NO: 740045 - RNA, 19 nt, Homo sapiens
  misc_RNA (1)...(19): siRNA sense strand
caaauggcccacuuuaaag

SEQ ID NO: 740046 - RNA, 19 nt, Homo sapiens
  misc_RNA (1)...(19): siRNA sense strand
ggucucugcuuugugauga

SEQ ID NO: 740047 - RNA, 19 nt, Homo sapiens
  misc_RNA (1)...(19): siRNA sense strand
ggccugcacuugccugaug

SEQ ID NO: 740048 - RNA, 19 nt, Homo sapiens
  misc_RNA (1)...(19): siRNA sense strand
gaaaggcaagcaauuagag

SEQ ID NO: 740049 - RNA, 19 nt, Homo sapiens
  misc_RNA (1)...(19): siRNA sense strand
gagaagcuggccugauuau

SEQ ID NO: 740050 - RNA, 19 nt, Homo sapiens
  misc_RNA (1)...(19): siRNA sense strand
gcacuuucugcauuaaauu

SEQ ID NO: 740051 - RNA, 19 nt, Homo sapiens
  misc_RNA (1)...(19): siRNA sense strand
acacagaaaucagagaaag

SEQ ID NO: 740052 - RNA, 19 nt, Homo sapiens
  misc_RNA (1)...(19): siRNA sense strand
gacccauccucaccucauu

SEQ ID NO: 740053 - RNA, 19 nt, Homo sapiens
  misc_RNA (1)...(19): siRNA sense strand
ccgcauagccguaccuuca

SEQ ID NO: 740054 - RNA, 19 nt, Homo sapiens
  misc_RNA (1)...(19): siRNA sense strand
gaacuggagcucugcuauc

SEQ ID NO: 740055 - RNA, 19 nt, Homo sapiens
  misc_RNA (1)...(19): siRNA sense strand
ugagcaagaucuucccaau

SEQ ID NO: 740056 - RNA, 19 nt, Homo sapiens
  misc_RNA (1)...(19): siRNA sense strand
cauccugccugcaaacuca

SEQ ID NO: 740057 - RNA, 19 nt, Homo sapiens
  misc_RNA (1)...(19): siRNA sense strand
aaacguuccugacacaagu

SEQ ID NO: 740058 - RNA, 19 nt, Homo sapiens
  misc_RNA (1)...(19): siRNA sense strand
uauugggccuguuaaguga

SEQ ID NO: 740059 - RNA, 19 nt, Homo sapiens
  misc_RNA (1)...(19): siRNA sense strand
caucaucuccaccuucuug

SEQ ID NO: 740060 - RNA, 19 nt, Homo sapiens
  misc_RNA (1)...(19): siRNA sense strand
acaacccucugucuacauu

SEQ ID NO: 740061 - RNA, 19 nt, Homo sapiens
  misc_RNA (1)...(19): siRNA sense strand
ccacaacccucugucuaca

SEQ ID NO: 740062 - RNA, 19 nt, Homo sapiens
  misc_RNA (1)...(19): siRNA sense strand
uuagguuggucaaaucaaa

SEQ ID NO: 740063 - RNA, 19 nt, Homo sapiens
  misc_RNA (1)...(19): siRNA sense strand
ccacagcucugcagaaccu

SEQ ID NO: 740064 - RNA, 19 nt, Homo sapiens
  misc_RNA (1)...(19): siRNA sense strand
ggaggagaaucgaggacau

SEQ ID NO: 740065 - RNA, 19 nt, Homo sapiens
  misc_RNA (1)...(19): siRNA sense strand
ggguggagcugcaucacau

SEQ ID NO: 740066 - RNA, 19 nt, Homo sapiens
  misc_RNA (1)...(19): siRNA sense strand
gaaggaauauuucuacaga

SEQ ID NO: 740067 - RNA, 19 nt, Homo sapiens
  misc_RNA (1)...(19): siRNA sense strand
gaugaaacgucaggaauuu

SEQ ID NO: 740068 - RNA, 19 nt, Homo sapiens
  misc_RNA (1)...(19): siRNA sense strand
ggacgccgcuggagagaaa

SEQ ID NO: 740069 - RNA, 19 nt, Homo sapiens
  misc_RNA (1)...(19): siRNA sense strand
gcuagaagcauauggaaua

SEQ ID NO: 740070 - RNA, 19 nt, Homo sapiens
  misc_RNA (1)...(19): siRNA sense strand
ggaauuuacuacacagaaa

SEQ ID NO: 740071 - RNA, 19 nt, Homo sapiens
  misc_RNA (1)...(19): siRNA sense strand
caacacgggucucugcuuu

SEQ ID NO: 740072 - RNA, 19 nt, Homo sapiens
  misc_RNA (1)...(19): siRNA sense strand
ccaaauggcccacuuuaaa

SEQ ID NO: 740073 - RNA, 19 nt, Homo sapiens
  misc_RNA (1)...(19): siRNA sense strand
gaugaaaggcaagcaauua

SEQ ID NO: 740074 - RNA, 19 nt, Homo sapiens
  misc_RNA (1)...(19): siRNA sense strand
gagaaucgaggacauuuaa

SEQ ID NO: 740075 - RNA, 19 nt, Homo sapiens
  misc_RNA (1)...(19): siRNA sense strand
aagagaagcuggccugauu

SEQ ID NO: 740076 - RNA, 19 nt, Homo sapiens
  misc_RNA (1)...(19): siRNA sense strand
gagguaaacauucuaauug

SEQ ID NO: 740077 - RNA, 19 nt, Homo sapiens
  misc_RNA (1)...(19): siRNA sense strand
gaaaugggcauguguguag

SEQ ID NO: 740078 - RNA, 19 nt, Homo sapiens
  misc_RNA (1)...(19): siRNA sense strand
ccaagaaccucgcauaguc

SEQ ID NO: 740079 - RNA, 19 nt, Homo sapiens
  misc_RNA (1)...(19): siRNA sense strand
gaagcuggccugauuaugu

SEQ ID NO: 740080 - RNA, 19 nt, Homo sapiens
  misc_RNA (1)...(19): siRNA sense strand
uggaauacauggccuguuu

SEQ ID NO: 740081 - RNA, 19 nt, Homo sapiens
  misc_RNA (1)...(19): siRNA sense strand
ugagguaguugacaaagaa

SEQ ID NO: 740082 - RNA, 19 nt, Homo sapiens
  misc_RNA (1)...(19): siRNA sense strand
ccaagugacugcuccauuc

SEQ ID NO: 740083 - RNA, 19 nt, Homo sapiens
  misc_RNA (1)...(19): siRNA sense strand
gagauugaauucugugugu

SEQ ID NO: 740084 - RNA, 19 nt, Homo sapiens
  misc_RNA (1)...(19): siRNA sense strand
gaaucgaggacauuuaauu

SEQ ID NO: 740085 - RNA, 19 nt, Homo sapiens
  misc_RNA (1)...(19): siRNA sense strand
gaaccucauuccuucuuug

SEQ ID NO: 740086 - RNA, 19 nt, Homo sapiens
  misc_RNA (1)...(19): siRNA sense strand
cuacagauauuucacagau

SEQ ID NO: 740087 - RNA, 19 nt, Homo sapiens
  misc_RNA (1)...(19): siRNA sense strand
gcaagcaauuagagccuuu

SEQ ID NO: 740088 - RNA, 19 nt, Homo sapiens
  misc_RNA (1)...(19): siRNA sense strand
acagauauuucacagauga

SEQ ID NO: 740089 - RNA, 19 nt, Homo sapiens
  misc_RNA (1)...(19): siRNA sense strand
acacaucccuguuccaaau

SEQ ID NO: 740090 - RNA, 19 nt, Homo sapiens
  misc_RNA (1)...(19): siRNA sense strand
cagcaugucuucuacuuca

SEQ ID NO: 740091 - RNA, 19 nt, Homo sapiens
  misc_RNA (1)...(19): siRNA sense strand
agcaagaucuucccaauug

SEQ ID NO: 740092 - RNA, 19 nt, Homo sapiens
  misc_RNA (1)...(19): siRNA sense strand
gaccuggccucugugcuua

SEQ ID NO: 740093 - RNA, 19 nt, Homo sapiens
  misc_RNA (1)...(19): siRNA sense strand
ucgcugagcucaucggaaa

SEQ ID NO: 740094 - RNA, 19 nt, Homo sapiens
  misc_RNA (1)...(19): siRNA sense strand
gugcaaagauggacucuac

SEQ ID NO: 740095 - RNA, 19 nt, Homo sapiens
  misc_RNA (1)...(19): siRNA sense strand
ggagcugcaucacauaguu

SEQ ID NO: 740096 - RNA, 19 nt, Homo sapiens
  misc_RNA (1)...(19): siRNA sense strand
gcaccucccucacuuugug

SEQ ID NO: 740097 - RNA, 19 nt, Homo sapiens
  misc_RNA (1)...(19): siRNA sense strand
ugaaggagcuggaccuaag

SEQ ID NO: 740098 - RNA, 19 nt, Homo sapiens
  misc_RNA (1)...(19): siRNA sense strand
gggcauguguguagaaaca

SEQ ID NO: 740099 - RNA, 19 nt, Homo sapiens
  misc_RNA (1)...(19): siRNA sense strand
gaaaucagagaaagagaga

SEQ ID NO: 740100 - RNA, 19 nt, Homo sapiens
  misc_RNA (1)...(19): siRNA sense strand
gaccggaagugcaaagaug

SEQ ID NO: 740101 - RNA, 19 nt, Homo sapiens
  misc_RNA (1)...(19): siRNA sense strand
aaacagacauggagcucuu

SEQ ID NO: 740102 - RNA, 19 nt, Homo sapiens
  misc_RNA (1)...(19): siRNA sense strand
ucacacagcugcuacuucu

SEQ ID NO: 740103 - RNA, 19 nt, Homo sapiens
  misc_RNA (1)...(19): siRNA sense strand
ggagaaucgaggacauuua

SEQ ID NO: 740104 - RNA, 19 nt, Homo sapiens
  misc_RNA (1)...(19): siRNA sense strand
cagcacagaucaacaugga

SEQ ID NO: 740105 - RNA, 19 nt, Homo sapiens
  misc_RNA (1)...(19): siRNA sense strand
ggaugaaacgucaggaauu

SEQ ID NO: 740106 - RNA, 19 nt, Homo sapiens
  misc_RNA (1)...(19): siRNA sense strand
ugaaagacaagaaagauga

SEQ ID NO: 740107 - RNA, 19 nt, Homo sapiens
  misc_RNA (1)...(19): siRNA sense strand
gcaagugaaagacaagaaa

SEQ ID NO: 740108 - RNA, 19 nt, Homo sapiens
  misc_RNA (1)...(19): siRNA sense strand
gcaauuagagccuuuaggu

SEQ ID NO: 740109 - RNA, 19 nt, Homo sapiens
  misc_RNA (1)...(19): siRNA sense strand
gcuguggccucacgucuga

SEQ ID NO: 740110 - RNA, 19 nt, Homo sapiens
  misc_RNA (1)...(19): siRNA sense strand
agagagagauggagaacau

SEQ ID NO: 740111 - RNA, 19 nt, Homo sapiens
  misc_RNA (1)...(19): siRNA sense strand
ggaucaggcugcaagugaa

SEQ ID NO: 740112 - RNA, 19 nt, Homo sapiens
  misc_RNA (1)...(19): siRNA sense strand
gcaggaaggaauauuucua

SEQ ID NO: 740113 - RNA, 19 nt, Homo sapiens
  misc_RNA (1)...(19): siRNA sense strand
ugacaucgguggagguugu

SEQ ID NO: 740114 - RNA, 19 nt, Homo sapiens
  misc_RNA (1)...(19): siRNA sense strand
cgaguucacuucccuguag

SEQ ID NO: 740115 - RNA, 19 nt, Homo sapiens
  misc_RNA (1)...(19): siRNA sense strand
ggagagguaaacauucuaa

SEQ ID NO: 740116 - RNA, 19 nt, Homo sapiens
  misc_RNA (1)...(19): siRNA sense strand
aggaggagcugaaggaguu

SEQ ID NO: 740117 - RNA, 19 nt, Homo sapiens
  misc_RNA (1)...(19): siRNA sense strand
ccucugugguguugcuuua

SEQ ID NO: 740118 - RNA, 19 nt, Homo sapiens
  misc_RNA (1)...(19): siRNA sense strand
gcagcaauguccuaugucu

SEQ ID NO: 740119 - RNA, 19 nt, Homo sapiens
  misc_RNA (1)...(19): siRNA sense strand
gaacaaccuggaugacguu

SEQ ID NO: 740120 - RNA, 19 nt, Homo sapiens
  misc_RNA (1)...(19): siRNA sense strand
gagcuggaccuaaguggaa

SEQ ID NO: 740121 - RNA, 19 nt, Homo sapiens
  misc_RNA (1)...(19): siRNA sense strand
ccaauggccucuggaugaa

SEQ ID NO: 740122 - RNA, 19 nt, Homo sapiens
  misc_RNA (1)...(19): siRNA sense strand
gcugauagcccgagugaca

SEQ ID NO: 740123 - RNA, 19 nt, Homo sapiens
  misc_RNA (1)...(19): siRNA sense strand
gaaaccaggagaucucaug

SEQ ID NO: 740124 - RNA, 19 nt, Homo sapiens
  misc_RNA (1)...(19): siRNA sense strand
gagcaagaucuucccaauu

SEQ ID NO: 740125 - RNA, 19 nt, Homo sapiens
  misc_RNA (1)...(19): siRNA sense strand
ugagaucagagacuuauuu

SEQ ID NO: 740126 - RNA, 19 nt, Homo sapiens
  misc_RNA (1)...(19): siRNA sense strand
aaaagacgcuagaagcaua

SEQ ID NO: 740127 - RNA, 19 nt, Homo sapiens
  misc_RNA (1)...(19): siRNA sense strand
ggacacaucccuguuccaa

SEQ ID NO: 740128 - RNA, 19 nt, Homo sapiens
  misc_RNA (1)...(19): siRNA sense strand
ggagagaugaguaauagca

SEQ ID NO: 740129 - RNA, 19 nt, Homo sapiens
  misc_RNA (1)...(19): siRNA sense strand
aaccacacguuuccuauug

SEQ ID NO: 740130 - RNA, 19 nt, Homo sapiens
  misc_RNA (1)...(19): siRNA sense strand
gcauguguguagaaacaga

SEQ ID NO: 740131 - RNA, 19 nt, Homo sapiens
  misc_RNA (1)...(19): siRNA sense strand
agaaagagagagagagaaa

SEQ ID NO: 740132 - RNA, 19 nt, Homo sapiens
  misc_RNA (1)...(19): siRNA sense strand
guucuacguuggccacuug

SEQ ID NO: 740133 - RNA, 19 nt, Homo sapiens
  misc_RNA (1)...(19): siRNA sense strand
ggaaagcuccccagaggua

SEQ ID NO: 740134 - RNA, 19 nt, Homo sapiens
  misc_RNA (1)...(19): siRNA sense strand
cgggagagaugaguaauag

SEQ ID NO: 740135 - RNA, 19 nt, Homo sapiens
  misc_RNA (1)...(19): siRNA sense strand
ggaccuggccucugugcuu

SEQ ID NO: 740136 - RNA, 19 nt, Homo sapiens
  misc_RNA (1)...(19): siRNA sense strand
gggcaucaaccacacguuu

SEQ ID NO: 740137 - RNA, 19 nt, Homo sapiens
  misc_RNA (1)...(19): siRNA sense strand
gguaaacauucuaauugca

SEQ ID NO: 740138 - RNA, 19 nt, Homo sapiens
  misc_RNA (1)...(19): siRNA sense strand
uaauugagaucagagacuu

SEQ ID NO: 740139 - RNA, 19 nt, Homo sapiens
  misc_RNA (1)...(19): siRNA sense strand
cgaggacauuuaauugaga

SEQ ID NO: 740140 - RNA, 19 nt, Homo sapiens
  misc_RNA (1)...(19): siRNA sense strand
gcugcuacuucuacaaaga

SEQ ID NO: 740141 - RNA, 19 nt, Homo sapiens
  misc_RNA (1)...(19): siRNA sense strand
gagagagaaaucagagaaa

SEQ ID NO: 740142 - RNA, 19 nt, Homo sapiens
  misc_RNA (1)...(19): siRNA sense strand
gagaucagagacuuauuug

SEQ ID NO: 740143 - RNA, 19 nt, Homo sapiens
  misc_RNA (1)...(19): siRNA sense strand
ggagaucucaugccugcaa

SEQ ID NO: 740144 - RNA, 19 nt, Homo sapiens
  misc_RNA (1)...(19): siRNA sense strand
gggaucaggcugcaaguga

SEQ ID NO: 740145 - RNA, 19 nt, Homo sapiens
  misc_RNA (1)...(19): siRNA sense strand
caaauggcccacuuuaaag

SEQ ID NO: 740146 - RNA, 19 nt, Homo sapiens
  misc_RNA (1)...(19): siRNA sense strand
ggucucugcuuugugauga

SEQ ID NO: 740147 - RNA, 19 nt, Homo sapiens
  misc_RNA (1)...(19): siRNA sense strand
ggccugcacuugccugaug

SEQ ID NO: 740148 - RNA, 19 nt, Homo sapiens
  misc_RNA (1)...(19): siRNA sense strand
gaaaggcaagcaauuagag

SEQ ID NO: 740149 - RNA, 19 nt, Homo sapiens
  misc_RNA (1)...(19): siRNA sense strand
gagaagcuggccugauuau

SEQ ID NO: 740150 - RNA, 19 nt, Homo sapiens
  misc_RNA (1)...(19): siRNA sense strand
gcacuuucugcauuaaauu

SEQ ID NO: 740151 - RNA, 19 nt, Homo sapiens
  misc_RNA (1)...(19): siRNA sense strand
acacagaaaucagagaaag

SEQ ID NO: 740152 - RNA, 19 nt, Homo sapiens
  misc_RNA (1)...(19): siRNA sense strand
gacccauccucaccucauu

SEQ ID NO: 740153 - RNA, 19 nt, Homo sapiens
  misc_RNA (1)...(19): siRNA sense strand
ccgcauagccguaccuuca

SEQ ID NO: 740154 - RNA, 19 nt, Homo sapiens
  misc_RNA (1)...(19): siRNA sense strand
gaacuggagcucugcuauc

SEQ ID NO: 740155 - RNA, 19 nt, Homo sapiens
  misc_RNA (1)...(19): siRNA sense strand
ugagcaagaucuucccaau

SEQ ID NO: 740156 - RNA, 19 nt, Homo sapiens
  misc_RNA (1)...(19): siRNA sense strand
cauccugccugcaaacuca

SEQ ID NO: 740157 - RNA, 19 nt, Homo sapiens
  misc_RNA (1)...(19): siRNA sense strand
aaacguuccugacacaagu

SEQ ID NO: 740158 - RNA, 19 nt, Homo sapiens
  misc_RNA (1)...(19): siRNA sense strand
uauugggccuguuaaguga

SEQ ID NO: 740159 - RNA, 19 nt, Homo sapiens
  misc_RNA (1)...(19): siRNA sense strand
caucaucuccaccuucuug

SEQ ID NO: 740160 - RNA, 19 nt, Homo sapiens
  misc_RNA (1)...(19): siRNA sense strand
acaacccucugucuacauu

SEQ ID NO: 740161 - RNA, 19 nt, Homo sapiens
  misc_RNA (1)...(19): siRNA sense strand
ccacaacccucugucuaca

SEQ ID NO: 740162 - RNA, 19 nt, Homo sapiens
  misc_RNA (1)...(19): siRNA sense strand
uuagguuggucaaaucaaa

SEQ ID NO: 740163 - RNA, 19 nt, Homo sapiens
  misc_RNA (1)...(19): siRNA sense strand
ccacagcucugcagaaccu

SEQ ID NO: 740164 - RNA, 19 nt, Homo sapiens
  misc_RNA (1)...(19): siRNA sense strand
ggaggagaaucgaggacau

SEQ ID NO: 740165 - RNA, 19 nt, Homo sapiens
  misc_RNA (1)...(19): siRNA sense strand
ggguggagcugcaucacau

SEQ ID NO: 740166 - RNA, 19 nt, Homo sapiens
  misc_RNA (1)...(19): siRNA sense strand
gaaggaauauuucuacaga

SEQ ID NO: 740167 - RNA, 19 nt, Homo sapiens
  misc_RNA (1)...(19): siRNA sense strand
gaugaaacgucaggaauuu

SEQ ID NO: 740168 - RNA, 19 nt, Homo sapiens
  misc_RNA (1)...(19): siRNA sense strand
ggacgccgcuggagagaaa

SEQ ID NO: 740169 - RNA, 19 nt, Homo sapiens
  misc_RNA (1)...(19): siRNA sense strand
gcuagaagcauauggaaua

SEQ ID NO: 740170 - RNA, 19 nt, Homo sapiens
  misc_RNA (1)...(19): siRNA sense strand
ggaauuuacuacacagaaa

SEQ ID NO: 740171 - RNA, 19 nt, Homo sapiens
  misc_RNA (1)...(19): siRNA sense strand
caacacgggucucugcuuu

SEQ ID NO: 740172 - RNA, 19 nt, Homo sapiens
  misc_RNA (1)...(19): siRNA sense strand
ccaaauggcccacuuuaaa

SEQ ID NO: 740173 - RNA, 19 nt, Homo sapiens
  misc_RNA (1)...(19): siRNA sense strand
gaugaaaggcaagcaauua

SEQ ID NO: 740174 - RNA, 19 nt, Homo sapiens
  misc_RNA (1)...(19): siRNA sense strand
gagaaucgaggacauuuaa

SEQ ID NO: 740175 - RNA, 19 nt, Homo sapiens
  misc_RNA (1)...(19): siRNA sense strand
aagagaagcuggccugauu

SEQ ID NO: 740176 - RNA, 19 nt, Homo sapiens
  misc_RNA (1)...(19): siRNA sense strand
gagguaaacauucuaauug

SEQ ID NO: 740177 - RNA, 19 nt, Homo sapiens
  misc_RNA (1)...(19): siRNA sense strand
gaaaugggcauguguguag

SEQ ID NO: 740178 - RNA, 19 nt, Homo sapiens
  misc_RNA (1)...(19): siRNA sense strand
ccaagaaccucgcauaguc

SEQ ID NO: 740179 - RNA, 19 nt, Homo sapiens
  misc_RNA (1)...(19): siRNA sense strand
gaagcuggccugauuaugu

SEQ ID NO: 740180 - RNA, 19 nt, Homo sapiens
  misc_RNA (1)...(19): siRNA sense strand
uggaauacauggccuguuu

SEQ ID NO: 740181 - RNA, 19 nt, Homo sapiens
  misc_RNA (1)...(19): siRNA sense strand
ugagguaguugacaaagaa

SEQ ID NO: 740182 - RNA, 19 nt, Homo sapiens
  misc_RNA (1)...(19): siRNA sense strand
ccaagugacugcuccauuc

SEQ ID NO: 740183 - RNA, 19 nt, Homo sapiens
  misc_RNA (1)...(19): siRNA sense strand
gagauugaauucugugugu

SEQ ID NO: 740184 - RNA, 19 nt, Homo sapiens
  misc_RNA (1)...(19): siRNA sense strand
gaaucgaggacauuuaauu

SEQ ID NO: 740185 - RNA, 19 nt, Homo sapiens
  misc_RNA (1)...(19): siRNA sense strand
gaaccucauuccuucuuug

SEQ ID NO: 740186 - RNA, 19 nt, Homo sapiens
  misc_RNA (1)...(19): siRNA sense strand
cuacagauauuucacagau

SEQ ID NO: 740187 - RNA, 19 nt, Homo sapiens
  misc_RNA (1)...(19): siRNA sense strand
gcaagcaauuagagccuuu

SEQ ID NO: 740188 - RNA, 19 nt, Homo sapiens
  misc_RNA (1)...(19): siRNA sense strand
acagauauuucacagauga

SEQ ID NO: 740189 - RNA, 19 nt, Homo sapiens
  misc_RNA (1)...(19): siRNA sense strand
acacaucccuguuccaaau

SEQ ID NO: 740190 - RNA, 19 nt, Homo sapiens
  misc_RNA (1)...(19): siRNA sense strand
cagcaugucuucuacuuca

SEQ ID NO: 740191 - RNA, 19 nt, Homo sapiens
  misc_RNA (1)...(19): siRNA sense strand
agcaagaucuucccaauug

SEQ ID NO: 740192 - RNA, 19 nt, Homo sapiens
  misc_RNA (1)...(19): siRNA sense strand
gaccuggccucugugcuua

SEQ ID NO: 740193 - RNA, 19 nt, Homo sapiens
  misc_RNA (1)...(19): siRNA sense strand
ucgcugagcucaucggaaa

SEQ ID NO: 740194 - RNA, 19 nt, Homo sapiens
  misc_RNA (1)...(19): siRNA sense strand
gugcaaagauggacucuac

SEQ ID NO: 740195 - RNA, 19 nt, Homo sapiens
  misc_RNA (1)...(19): siRNA sense strand
ggagcugcaucacauaguu

SEQ ID NO: 740196 - RNA, 19 nt, Homo sapiens
  misc_RNA (1)...(19): siRNA sense strand
gcaccucccucacuuugug

SEQ ID NO: 740197 - RNA, 19 nt, Homo sapiens
  misc_RNA (1)...(19): siRNA sense strand
ugaaggagcuggaccuaag

SEQ ID NO: 740198 - RNA, 19 nt, Homo sapiens
  misc_RNA (1)...(19): siRNA sense strand
gggcauguguguagaaaca

SEQ ID NO: 740199 - RNA, 19 nt, Homo sapiens
  misc_RNA (1)...(19): siRNA sense strand
gaaaucagagaaagagaga

SEQ ID NO: 740200 - RNA, 19 nt, Homo sapiens
  misc_RNA (1)...(19): siRNA sense strand
gaccggaagugcaaagaug

SEQ ID NO: 740201 - RNA, 19 nt, Homo sapiens
  misc_RNA (1)...(19): siRNA sense strand
aaacagacauggagcucuu

SEQ ID NO: 740202 - RNA, 19 nt, Homo sapiens
  misc_RNA (1)...(19): siRNA sense strand
ucacacagcugcuacuucu

SEQ ID NO: 740203 - RNA, 19 nt, Homo sapiens
  misc_RNA (1)...(19): siRNA sense strand
ggagaaucgaggacauuua

SEQ ID NO: 740204 - RNA, 19 nt, Homo sapiens
  misc_RNA (1)...(19): siRNA sense strand
cagcacagaucaacaugga

SEQ ID NO: 740205 - RNA, 19 nt, Homo sapiens
  misc_RNA (1)...(19): siRNA sense strand
ggaugaaacgucaggaauu

SEQ ID NO: 740206 - RNA, 19 nt, Homo sapiens
  misc_RNA (1)...(19): siRNA sense strand
ugaaagacaagaaagauga

SEQ ID NO: 740207 - RNA, 19 nt, Homo sapiens
  misc_RNA (1)...(19): siRNA sense strand
gcaagugaaagacaagaaa

SEQ ID NO: 740208 - RNA, 19 nt, Homo sapiens
  misc_RNA (1)...(19): siRNA sense strand
gcaauuagagccuuuaggu

SEQ ID NO: 740209 - RNA, 19 nt, Homo sapiens
  misc_RNA (1)...(19): siRNA sense strand
gcuguggccucacgucuga

SEQ ID NO: 740210 - RNA, 19 nt, Homo sapiens
  misc_RNA (1)...(19): siRNA sense strand
agagagagauggagaacau

SEQ ID NO: 740211 - RNA, 19 nt, Homo sapiens
  misc_RNA (1)...(19): siRNA sense strand
ggaucaggcugcaagugaa

SEQ ID NO: 740212 - RNA, 19 nt, Homo sapiens
  misc_RNA (1)...(19): siRNA sense strand
gcaggaaggaauauuucua

SEQ ID NO: 740213 - RNA, 19 nt, Homo sapiens
  misc_RNA (1)...(19): siRNA sense strand
ugacaucgguggagguugu

SEQ ID NO: 740214 - RNA, 19 nt, Homo sapiens
  misc_RNA (1)...(19): siRNA sense strand
cgaguucacuucccuguag

SEQ ID NO: 740215 - RNA, 19 nt, Homo sapiens
  misc_RNA (1)...(19): siRNA sense strand
ggagagguaaacauucuaa

SEQ ID NO: 740216 - RNA, 19 nt, Homo sapiens
  misc_RNA (1)...(19): siRNA sense strand
aggaggagcugaaggaguu

SEQ ID NO: 740217 - RNA, 19 nt, Homo sapiens
  misc_RNA (1)...(19): siRNA sense strand
ccucugugguguugcuuua

SEQ ID NO: 740218 - RNA, 19 nt, Homo sapiens
  misc_RNA (1)...(19): siRNA sense strand
gcagcaauguccuaugucu

SEQ ID NO: 740219 - RNA, 19 nt, Homo sapiens
  misc_RNA (1)...(19): siRNA sense strand
gaacaaccuggaugacguu

SEQ ID NO: 740220 - RNA, 19 nt, Homo sapiens
  misc_RNA (1)...(19): siRNA sense strand
gagcuggaccuaaguggaa

SEQ ID NO: 740221 - RNA, 19 nt, Homo sapiens
  misc_RNA (1)...(19): siRNA sense strand
ccaauggccucuggaugaa

SEQ ID NO: 740222 - RNA, 19 nt, Homo sapiens
  misc_RNA (1)...(19): siRNA sense strand
gcugauagcccgagugaca

SEQ ID NO: 740223 - RNA, 19 nt, Homo sapiens
  misc_RNA (1)...(19): siRNA sense strand
gaaaccaggagaucucaug

SEQ ID NO: 740224 - RNA, 19 nt, Homo sapiens
  misc_RNA (1)...(19): siRNA sense strand
gagcaagaucuucccaauu

SEQ ID NO: 740225 - RNA, 19 nt, Homo sapiens
  misc_RNA (1)...(19): siRNA sense strand
ugagaucagagacuuauuu

SEQ ID NO: 740226 - RNA, 19 nt, Homo sapiens
  misc_RNA (1)...(19): siRNA sense strand
aaaagacgcuagaagcaua

SEQ ID NO: 740227 - RNA, 19 nt, Homo sapiens
  misc_RNA (1)...(19): siRNA sense strand
ggacacaucccuguuccaa

SEQ ID NO: 740228 - RNA, 19 nt, Homo sapiens
  misc_RNA (1)...(19): siRNA sense strand
ggagagaugaguaauagca

SEQ ID NO: 740229 - RNA, 19 nt, Homo sapiens
  misc_RNA (1)...(19): siRNA sense strand
aaccacacguuuccuauug

SEQ ID NO: 740230 - RNA, 19 nt, Homo sapiens
  misc_RNA (1)...(19): siRNA sense strand
gcauguguguagaaacaga

SEQ ID NO: 740231 - RNA, 19 nt, Homo sapiens
  misc_RNA (1)...(19): siRNA sense strand
agaaagagagagagagaaa

SEQ ID NO: 740232 - RNA, 19 nt, Homo sapiens
  misc_RNA (1)...(19): siRNA sense strand
guucuacguuggccacuug

SEQ ID NO: 740233 - RNA, 19 nt, Homo sapiens
  misc_RNA (1)...(19): siRNA sense strand
ggaaagcuccccagaggua

SEQ ID NO: 740234 - RNA, 19 nt, Homo sapiens
  misc_RNA (1)...(19): siRNA sense strand
cgggagagaugaguaauag

SEQ ID NO: 740235 - RNA, 19 nt, Homo sapiens
  misc_RNA (1)...(19): siRNA sense strand
ggaccuggccucugugcuu

SEQ ID NO: 740236 - RNA, 19 nt, Homo sapiens
  misc_RNA (1)...(19): siRNA sense strand
gggcaucaaccacacguuu

SEQ ID NO: 740237 - RNA, 19 nt, Homo sapiens
  misc_RNA (1)...(19): siRNA sense strand
gguaaacauucuaauugca

SEQ ID NO: 740238 - RNA, 19 nt, Homo sapiens
  misc_RNA (1)...(19): siRNA sense strand
uaauugagaucagagacuu

SEQ ID NO: 740239 - RNA, 19 nt, Homo sapiens
  misc_RNA (1)...(19): siRNA sense strand
cgaggacauuuaauugaga

SEQ ID NO: 740240 - RNA, 19 nt, Homo sapiens
  misc_RNA (1)...(19): siRNA sense strand
gcugcuacuucuacaaaga

SEQ ID NO: 740241 - RNA, 19 nt, Homo sapiens
  misc_RNA (1)...(19): siRNA sense strand
gagagagaaaucagagaaa

SEQ ID NO: 740242 - RNA, 19 nt, Homo sapiens
  misc_RNA (1)...(19): siRNA sense strand
gagaucagagacuuauuug

SEQ ID NO: 740243 - RNA, 19 nt, Homo sapiens
  misc_RNA (1)...(19): siRNA sense strand
ggagaucucaugccugcaa

SEQ ID NO: 740244 - RNA, 19 nt, Homo sapiens
  misc_RNA (1)...(19): siRNA sense strand
gggaucaggcugcaaguga

SEQ ID NO: 740245 - RNA, 19 nt, Homo sapiens
  misc_RNA (1)...(19): siRNA sense strand
caaauggcccacuuuaaag

SEQ ID NO: 740246 - RNA, 19 nt, Homo sapiens
  misc_RNA (1)...(19): siRNA sense strand
ggucucugcuuugugauga

SEQ ID NO: 740247 - RNA, 19 nt, Homo sapiens
  misc_RNA (1)...(19): siRNA sense strand
ggccugcacuugccugaug

SEQ ID NO: 740248 - RNA, 19 nt, Homo sapiens
  misc_RNA (1)...(19): siRNA sense strand
gaaaggcaagcaauuagag

SEQ ID NO: 740249 - RNA, 19 nt, Homo sapiens
  misc_RNA (1)...(19): siRNA sense strand
gagaagcuggccugauuau

SEQ ID NO: 740250 - RNA, 19 nt, Homo sapiens
  misc_RNA (1)...(19): siRNA sense strand
gcacuuucugcauuaaauu

SEQ ID NO: 740251 - RNA, 19 nt, Homo sapiens
  misc_RNA (1)...(19): siRNA sense strand
acacagaaaucagagaaag

SEQ ID NO: 740252 - RNA, 19 nt, Homo sapiens
  misc_RNA (1)...(19): siRNA sense strand
gacccauccucaccucauu

SEQ ID NO: 740253 - RNA, 19 nt, Homo sapiens
  misc_RNA (1)...(19): siRNA sense strand
ccgcauagccguaccuuca

SEQ ID NO: 740254 - RNA, 19 nt, Homo sapiens
  misc_RNA (1)...(19): siRNA sense strand
gaacuggagcucugcuauc

SEQ ID NO: 740255 - RNA, 19 nt, Homo sapiens
  misc_RNA (1)...(19): siRNA sense strand
ugagcaagaucuucccaau

SEQ ID NO: 740256 - RNA, 19 nt, Homo sapiens
  misc_RNA (1)...(19): siRNA sense strand
cauccugccugcaaacuca

SEQ ID NO: 740257 - RNA, 19 nt, Homo sapiens
  misc_RNA (1)...(19): siRNA sense strand
aaacguuccugacacaagu

SEQ ID NO: 740258 - RNA, 19 nt, Homo sapiens
  misc_RNA (1)...(19): siRNA sense strand
uauugggccuguuaaguga

SEQ ID NO: 740259 - RNA, 19 nt, Homo sapiens
  misc_RNA (1)...(19): siRNA sense strand
caucaucuccaccuucuug

SEQ ID NO: 740260 - RNA, 19 nt, Homo sapiens
  misc_RNA (1)...(19): siRNA sense strand
acaacccucugucuacauu

SEQ ID NO: 740261 - RNA, 19 nt, Homo sapiens
  misc_RNA (1)...(19): siRNA sense strand
ccacaacccucugucuaca

SEQ ID NO: 740262 - RNA, 19 nt, Homo sapiens
  misc_RNA (1)...(19): siRNA sense strand
uuagguuggucaaaucaaa

SEQ ID NO: 740263 - RNA, 19 nt, Homo sapiens
  misc_RNA (1)...(19): siRNA sense strand
ccacagcucugcagaaccu

SEQ ID NO: 740264 - RNA, 19 nt, Homo sapiens
  misc_RNA (1)...(19): siRNA sense strand
ggaggagaaucgaggacau

SEQ ID NO: 740265 - RNA, 19 nt, Homo sapiens
  misc_RNA (1)...(19): siRNA sense strand
ggguggagcugcaucacau

SEQ ID NO: 740266 - RNA, 19 nt, Homo sapiens
  misc_RNA (1)...(19): siRNA sense strand
gaaggaauauuucuacaga

SEQ ID NO: 740267 - RNA, 19 nt, Homo sapiens
  misc_RNA (1)...(19): siRNA sense strand
gaugaaacgucaggaauuu

SEQ ID NO: 740268 - RNA, 19 nt, Homo sapiens
  misc_RNA (1)...(19): siRNA sense strand
ggacgccgcuggagagaaa

SEQ ID NO: 740269 - RNA, 19 nt, Homo sapiens
  misc_RNA (1)...(19): siRNA sense strand
gcuagaagcauauggaaua

SEQ ID NO: 740270 - RNA, 19 nt, Homo sapiens
  misc_RNA (1)...(19): siRNA sense strand
ggaauuuacuacacagaaa

SEQ ID NO: 740271 - RNA, 19 nt, Homo sapiens
  misc_RNA (1)...(19): siRNA sense strand
caacacgggucucugcuuu

SEQ ID NO: 740272 - RNA, 19 nt, Homo sapiens
  misc_RNA (1)...(19): siRNA sense strand
ccaaauggcccacuuuaaa

SEQ ID NO: 740273 - RNA, 19 nt, Homo sapiens
  misc_RNA (1)...(19): siRNA sense strand
gaugaaaggcaagcaauua

SEQ ID NO: 740274 - RNA, 19 nt, Homo sapiens
  misc_RNA (1)...(19): siRNA sense strand
gagaaucgaggacauuuaa

SEQ ID NO: 740275 - RNA, 19 nt, Homo sapiens
  misc_RNA (1)...(19): siRNA sense strand
aagagaagcuggccugauu

SEQ ID NO: 740276 - RNA, 19 nt, Homo sapiens
  misc_RNA (1)...(19): siRNA sense strand
gagguaaacauucuaauug

SEQ ID NO: 740277 - RNA, 19 nt, Homo sapiens
  misc_RNA (1)...(19): siRNA sense strand
gaaaugggcauguguguag

SEQ ID NO: 740278 - RNA, 19 nt, Homo sapiens
  misc_RNA (1)...(19): siRNA sense strand
ccaagaaccucgcauaguc

SEQ ID NO: 740279 - RNA, 19 nt, Homo sapiens
  misc_RNA (1)...(19): siRNA sense strand
gaagcuggccugauuaugu

SEQ ID NO: 740280 - RNA, 19 nt, Homo sapiens
  misc_RNA (1)...(19): siRNA sense strand
uggaauacauggccuguuu

SEQ ID NO: 740281 - RNA, 19 nt, Homo sapiens
  misc_RNA (1)...(19): siRNA sense strand
ugagguaguugacaaagaa

SEQ ID NO: 740282 - RNA, 19 nt, Homo sapiens
  misc_RNA (1)...(19): siRNA sense strand
ccaagugacugcuccauuc

SEQ ID NO: 740283 - RNA, 19 nt, Homo sapiens
  misc_RNA (1)...(19): siRNA sense strand
gagauugaauucugugugu

SEQ ID NO: 740284 - RNA, 19 nt, Homo sapiens
  misc_RNA (1)...(19): siRNA sense strand
gaaucgaggacauuuaauu

SEQ ID NO: 740285 - RNA, 19 nt, Homo sapiens
  misc_RNA (1)...(19): siRNA sense strand
gaaccucauuccuucuuug

SEQ ID NO: 740286 - RNA, 19 nt, Homo sapiens
  misc_RNA (1)...(19): siRNA sense strand
cuacagauauuucacagau

SEQ ID NO: 740287 - RNA, 19 nt, Homo sapiens
  misc_RNA (1)...(19): siRNA sense strand
gcaagcaauuagagccuuu

SEQ ID NO: 740288 - RNA, 19 nt, Homo sapiens
  misc_RNA (1)...(19): siRNA sense strand
acagauauuucacagauga

SEQ ID NO: 740289 - RNA, 19 nt, Homo sapiens
  misc_RNA (1)...(19): siRNA sense strand
acacaucccuguuccaaau

SEQ ID NO: 740290 - RNA, 19 nt, Homo sapiens
  misc_RNA (1)...(19): siRNA sense strand
cagcaugucuucuacuuca

SEQ ID NO: 740291 - RNA, 19 nt, Homo sapiens
  misc_RNA (1)...(19): siRNA sense strand
agcaagaucuucccaauug

SEQ ID NO: 740292 - RNA, 19 nt, Homo sapiens
  misc_RNA (1)...(19): siRNA sense strand
gaccuggccucugugcuua

SEQ ID NO: 740293 - RNA, 19 nt, Homo sapiens
  misc_RNA (1)...(19): siRNA sense strand
ucgcugagcucaucggaaa

SEQ ID NO: 740294 - RNA, 19 nt, Homo sapiens
  misc_RNA (1)...(19): siRNA sense strand
gugcaaagauggacucuac

SEQ ID NO: 740295 - RNA, 19 nt, Homo sapiens
  misc_RNA (1)...(19): siRNA sense strand
ggagcugcaucacauaguu

SEQ ID NO: 740296 - RNA, 19 nt, Homo sapiens
  misc_RNA (1)...(19): siRNA sense strand
gcaccucccucacuuugug

SEQ ID NO: 740297 - RNA, 19 nt, Homo sapiens
  misc_RNA (1)...(19): siRNA sense strand
ugaaggagcuggaccuaag

SEQ ID NO: 740298 - RNA, 19 nt, Homo sapiens
  misc_RNA (1)...(19): siRNA sense strand
gggcauguguguagaaaca

SEQ ID NO: 740299 - RNA, 19 nt, Homo sapiens
  misc_RNA (1)...(19): siRNA sense strand
gaaaucagagaaagagaga

SEQ ID NO: 740300 - RNA, 19 nt, Homo sapiens
  misc_RNA (1)...(19): siRNA sense strand
gaccggaagugcaaagaug

SEQ ID NO: 740301 - RNA, 19 nt, Homo sapiens
  misc_RNA (1)...(19): siRNA sense strand
aaacagacauggagcucuu

SEQ ID NO: 740302 - RNA, 19 nt, Homo sapiens
  misc_RNA (1)...(19): siRNA sense strand
ucacacagcugcuacuucu

SEQ ID NO: 740303 - RNA, 19 nt, Homo sapiens
  misc_RNA (1)...(19): siRNA sense strand
ggagaaucgaggacauuua

SEQ ID NO: 740304 - RNA, 19 nt, Homo sapiens
  misc_RNA (1)...(19): siRNA sense strand
cagcacagaucaacaugga

SEQ ID NO: 740305 - RNA, 19 nt, Homo sapiens
  misc_RNA (1)...(19): siRNA sense strand
ggaugaaacgucaggaauu

SEQ ID NO: 740306 - RNA, 19 nt, Homo sapiens
  misc_RNA (1)...(19): siRNA sense strand
ugaaagacaagaaagauga

SEQ ID NO: 740307 - RNA, 19 nt, Homo sapiens
  misc_RNA (1)...(19): siRNA sense strand
gcaagugaaagacaagaaa

SEQ ID NO: 740308 - RNA, 19 nt, Homo sapiens
  misc_RNA (1)...(19): siRNA sense strand
gcaauuagagccuuuaggu

SEQ ID NO: 740309 - RNA, 19 nt, Homo sapiens
  misc_RNA (1)...(19): siRNA sense strand
gcuguggccucacgucuga

SEQ ID NO: 740310 - RNA, 19 nt, Homo sapiens
  misc_RNA (1)...(19): siRNA sense strand
agagagagauggagaacau

SEQ ID NO: 740311 - RNA, 19 nt, Homo sapiens
  misc_RNA (1)...(19): siRNA sense strand
ggaucaggcugcaagugaa

SEQ ID NO: 740312 - RNA, 19 nt, Homo sapiens
  misc_RNA (1)...(19): siRNA sense strand
gcaggaaggaauauuucua

SEQ ID NO: 740313 - RNA, 19 nt, Homo sapiens
  misc_RNA (1)...(19): siRNA sense strand
ugacaucgguggagguugu

SEQ ID NO: 740314 - RNA, 19 nt, Homo sapiens
  misc_RNA (1)...(19): siRNA sense strand
cgaguucacuucccuguag

SEQ ID NO: 740315 - RNA, 19 nt, Homo sapiens
  misc_RNA (1)...(19): siRNA sense strand
ggagagguaaacauucuaa

SEQ ID NO: 740316 - RNA, 19 nt, Homo sapiens
  misc_RNA (1)...(19): siRNA sense strand
aggaggagcugaaggaguu

SEQ ID NO: 740317 - RNA, 19 nt, Homo sapiens
  misc_RNA (1)...(19): siRNA sense strand
ccucugugguguugcuuua

SEQ ID NO: 740318 - RNA, 19 nt, Homo sapiens
  misc_RNA (1)...(19): siRNA sense strand
gcagcaauguccuaugucu

SEQ ID NO: 740319 - RNA, 19 nt, Homo sapiens
  misc_RNA (1)...(19): siRNA sense strand
gaacaaccuggaugacguu

SEQ ID NO: 740320 - RNA, 19 nt, Homo sapiens
  misc_RNA (1)...(19): siRNA sense strand
gagcuggaccuaaguggaa

SEQ ID NO: 740321 - RNA, 19 nt, Homo sapiens
  misc_RNA (1)...(19): siRNA sense strand
ccaauggccucuggaugaa

SEQ ID NO: 740322 - RNA, 19 nt, Homo sapiens
  misc_RNA (1)...(19): siRNA sense strand
gcugauagcccgagugaca

SEQ ID NO: 740323 - RNA, 19 nt, Homo sapiens
  misc_RNA (1)...(19): siRNA sense strand
gaaaccaggagaucucaug

SEQ ID NO: 740324 - RNA, 19 nt, Homo sapiens
  misc_RNA (1)...(19): siRNA sense strand
gagcaagaucuucccaauu

SEQ ID NO: 740325 - RNA, 19 nt, Homo sapiens
  misc_RNA (1)...(19): siRNA sense strand
ugagaucagagacuuauuu

SEQ ID NO: 740326 - RNA, 19 nt, Homo sapiens
  misc_RNA (1)...(19): siRNA sense strand
aaaagacgcuagaagcaua

SEQ ID NO: 740327 - RNA, 19 nt, Homo sapiens
  misc_RNA (1)...(19): siRNA sense strand
ggacacaucccuguuccaa

SEQ ID NO: 740328 - RNA, 19 nt, Homo sapiens
  misc_RNA (1)...(19): siRNA sense strand
ggagagaugaguaauagca

SEQ ID NO: 740329 - RNA, 19 nt, Homo sapiens
  misc_RNA (1)...(19): siRNA sense strand
aaccacacguuuccuauug

SEQ ID NO: 740330 - RNA, 19 nt, Homo sapiens
  misc_RNA (1)...(19): siRNA sense strand
gcauguguguagaaacaga

SEQ ID NO: 740331 - RNA, 19 nt, Homo sapiens
  misc_RNA (1)...(19): siRNA sense strand
agaaagagagagagagaaa

SEQ ID NO: 740332 - RNA, 19 nt, Homo sapiens
  misc_RNA (1)...(19): siRNA sense strand
guucuacguuggccacuug

SEQ ID NO: 740333 - RNA, 19 nt, Homo sapiens
  misc_RNA (1)...(19): siRNA sense strand
ggaaagcuccccagaggua

SEQ ID NO: 740334 - RNA, 19 nt, Homo sapiens
  misc_RNA (1)...(19): siRNA sense strand
cgggagagaugaguaauag

SEQ ID NO: 740335 - RNA, 19 nt, Homo sapiens
  misc_RNA (1)...(19): siRNA sense strand
ggaccuggccucugugcuu

SEQ ID NO: 740336 - RNA, 19 nt, Homo sapiens
  misc_RNA (1)...(19): siRNA sense strand
gggcaucaaccacacguuu

SEQ ID NO: 740337 - RNA, 19 nt, Homo sapiens
  misc_RNA (1)...(19): siRNA sense strand
gguaaacauucuaauugca

SEQ ID NO: 740338 - RNA, 19 nt, Homo sapiens
  misc_RNA (1)...(19): siRNA sense strand
uaauugagaucagagacuu

SEQ ID NO: 740339 - RNA, 19 nt, Homo sapiens
  misc_RNA (1)...(19): siRNA sense strand
cgaggacauuuaauugaga

SEQ ID NO: 740340 - RNA, 19 nt, Homo sapiens
  misc_RNA (1)...(19): siRNA sense strand
gcugcuacuucuacaaaga

SEQ ID NO: 740341 - RNA, 19 nt, Homo sapiens
  misc_RNA (1)...(19): siRNA sense strand
gagagagaaaucagagaaa

SEQ ID NO: 740342 - RNA, 19 nt, Homo sapiens
  misc_RNA (1)...(19): siRNA sense strand
gagaucagagacuuauuug

SEQ ID NO: 740343 - RNA, 19 nt, Homo sapiens
  misc_RNA (1)...(19): siRNA sense strand
ggagaucucaugccugcaa

SEQ ID NO: 740344 - RNA, 19 nt, Homo sapiens
  misc_RNA (1)...(19): siRNA sense strand
gggaucaggcugcaaguga

SEQ ID NO: 740345 - RNA, 19 nt, Homo sapiens
  misc_RNA (1)...(19): siRNA sense strand
caaauggcccacuuuaaag

SEQ ID NO: 740346 - RNA, 19 nt, Homo sapiens
  misc_RNA (1)...(19): siRNA sense strand
ggucucugcuuugugauga

SEQ ID NO: 740347 - RNA, 19 nt, Homo sapiens
  misc_RNA (1)...(19): siRNA sense strand
ggccugcacuugccugaug

SEQ ID NO: 740348 - RNA, 19 nt, Homo sapiens
  misc_RNA (1)...(19): siRNA sense strand
gaaaggcaagcaauuagag

SEQ ID NO: 740349 - RNA, 19 nt, Homo sapiens
  misc_RNA (1)...(19): siRNA sense strand
gagaagcuggccugauuau

SEQ ID NO: 740350 - RNA, 19 nt, Homo sapiens
  misc_RNA (1)...(19): siRNA sense strand
gcacuuucugcauuaaauu

SEQ ID NO: 740351 - RNA, 19 nt, Homo sapiens
  misc_RNA (1)...(19): siRNA sense strand
acacagaaaucagagaaag

SEQ ID NO: 740352 - RNA, 19 nt, Homo sapiens
  misc_RNA (1)...(19): siRNA sense strand
gacccauccucaccucauu

SEQ ID NO: 740353 - RNA, 19 nt, Homo sapiens
  misc_RNA (1)...(19): siRNA sense strand
ccgcauagccguaccuuca

SEQ ID NO: 740354 - RNA, 19 nt, Homo sapiens
  misc_RNA (1)...(19): siRNA sense strand
gaacuggagcucugcuauc

SEQ ID NO: 740355 - RNA, 19 nt, Homo sapiens
  misc_RNA (1)...(19): siRNA sense strand
ugagcaagaucuucccaau

SEQ ID NO: 740356 - RNA, 19 nt, Homo sapiens
  misc_RNA (1)...(19): siRNA sense strand
cauccugccugcaaacuca

SEQ ID NO: 740357 - RNA, 19 nt, Homo sapiens
  misc_RNA (1)...(19): siRNA sense strand
aaacguuccugacacaagu

SEQ ID NO: 740358 - RNA, 19 nt, Homo sapiens
  misc_RNA (1)...(19): siRNA sense strand
uauugggccuguuaaguga

SEQ ID NO: 740359 - RNA, 19 nt, Homo sapiens
  misc_RNA (1)...(19): siRNA sense strand
caucaucuccaccuucuug

SEQ ID NO: 740360 - RNA, 19 nt, Homo sapiens
  misc_RNA (1)...(19): siRNA sense strand
acaacccucugucuacauu

SEQ ID NO: 740361 - RNA, 19 nt, Homo sapiens
  misc_RNA (1)...(19): siRNA sense strand
ccacaacccucugucuaca

SEQ ID NO: 740362 - RNA, 19 nt, Homo sapiens
  misc_RNA (1)...(19): siRNA sense strand
uuagguuggucaaaucaaa

SEQ ID NO: 740363 - RNA, 19 nt, Homo sapiens
  misc_RNA (1)...(19): siRNA sense strand
ccacagcucugcagaaccu

SEQ ID NO: 740364 - RNA, 19 nt, Homo sapiens
  misc_RNA (1)...(19): siRNA sense strand
ggaggagaaucgaggacau

SEQ ID NO: 740365 - RNA, 19 nt, Homo sapiens
  misc_RNA (1)...(19): siRNA sense strand
ggguggagcugcaucacau

SEQ ID NO: 740366 - RNA, 19 nt, Homo sapiens
  misc_RNA (1)...(19): siRNA sense strand
gaaggaauauuucuacaga

SEQ ID NO: 740367 - RNA, 19 nt, Homo sapiens
  misc_RNA (1)...(19): siRNA sense strand
gaugaaacgucaggaauuu

SEQ ID NO: 740368 - RNA, 19 nt, Homo sapiens
  misc_RNA (1)...(19): siRNA sense strand
ggacgccgcuggagagaaa

SEQ ID NO: 740369 - RNA, 19 nt, Homo sapiens
  misc_RNA (1)...(19): siRNA sense strand
gcuagaagcauauggaaua

SEQ ID NO: 740370 - RNA, 19 nt, Homo sapiens
  misc_RNA (1)...(19): siRNA sense strand
ggaauuuacuacacagaaa

SEQ ID NO: 740371 - RNA, 19 nt, Homo sapiens
  misc_RNA (1)...(19): siRNA sense strand
caacacgggucucugcuuu

SEQ ID NO: 740372 - RNA, 19 nt, Homo sapiens
  misc_RNA (1)...(19): siRNA sense strand
ccaaauggcccacuuuaaa

SEQ ID NO: 740373 - RNA, 19 nt, Homo sapiens
  misc_RNA (1)...(19): siRNA sense strand
gaugaaaggcaagcaauua

SEQ ID NO: 740374 - RNA, 19 nt, Homo sapiens
  misc_RNA (1)...(19): siRNA sense strand
gagaaucgaggacauuuaa

SEQ ID NO: 740375 - RNA, 19 nt, Homo sapiens
  misc_RNA (1)...(19): siRNA sense strand
aagagaagcuggccugauu

SEQ ID NO: 740376 - RNA, 19 nt, Homo sapiens
  misc_RNA (1)...(19): siRNA sense strand
gagguaaacauucuaauug

SEQ ID NO: 740377 - RNA, 19 nt, Homo sapiens
  misc_RNA (1)...(19): siRNA sense strand
gaaaugggcauguguguag

SEQ ID NO: 740378 - RNA, 19 nt, Homo sapiens
  misc_RNA (1)...(19): siRNA sense strand
ccaagaaccucgcauaguc

SEQ ID NO: 740379 - RNA, 19 nt, Homo sapiens
  misc_RNA (1)...(19): siRNA sense strand
gaagcuggccugauuaugu

SEQ ID NO: 740380 - RNA, 19 nt, Homo sapiens
  misc_RNA (1)...(19): siRNA sense strand
uggaauacauggccuguuu

SEQ ID NO: 740381 - RNA, 19 nt, Homo sapiens
  misc_RNA (1)...(19): siRNA sense strand
ugagguaguugacaaagaa

SEQ ID NO: 740382 - RNA, 19 nt, Homo sapiens
  misc_RNA (1)...(19): siRNA sense strand
ccaagugacugcuccauuc

SEQ ID NO: 740383 - RNA, 19 nt, Homo sapiens
  misc_RNA (1)...(19): siRNA sense strand
gagauugaauucugugugu

SEQ ID NO: 740384 - RNA, 19 nt, Homo sapiens
  misc_RNA (1)...(19): siRNA sense strand
gaaucgaggacauuuaauu

SEQ ID NO: 740385 - RNA, 19 nt, Homo sapiens
  misc_RNA (1)...(19): siRNA sense strand
gaaccucauuccuucuuug

SEQ ID NO: 740386 - RNA, 19 nt, Homo sapiens
  misc_RNA (1)...(19): siRNA sense strand
cuacagauauuucacagau

SEQ ID NO: 740387 - RNA, 19 nt, Homo sapiens
  misc_RNA (1)...(19): siRNA sense strand
gcaagcaauuagagccuuu

SEQ ID NO: 740388 - RNA, 19 nt, Homo sapiens
  misc_RNA (1)...(19): siRNA sense strand
acagauauuucacagauga

SEQ ID NO: 740389 - RNA, 19 nt, Homo sapiens
  misc_RNA (1)...(19): siRNA sense strand
acacaucccuguuccaaau

SEQ ID NO: 740390 - RNA, 19 nt, Homo sapiens
  misc_RNA (1)...(19): siRNA sense strand
cagcaugucuucuacuuca

SEQ ID NO: 740391 - RNA, 19 nt, Homo sapiens
  misc_RNA (1)...(19): siRNA sense strand
agcaagaucuucccaauug

SEQ ID NO: 740392 - RNA, 19 nt, Homo sapiens
  misc_RNA (1)...(19): siRNA sense strand
gaccuggccucugugcuua

SEQ ID NO: 740393 - RNA, 19 nt, Homo sapiens
  misc_RNA (1)...(19): siRNA sense strand
ucgcugagcucaucggaaa

SEQ ID NO: 740394 - RNA, 19 nt, Homo sapiens
  misc_RNA (1)...(19): siRNA sense strand
gugcaaagauggacucuac

SEQ ID NO: 740395 - RNA, 19 nt, Homo sapiens
  misc_RNA (1)...(19): siRNA sense strand
ggagcugcaucacauaguu

SEQ ID NO: 740396 - RNA, 19 nt, Homo sapiens
  misc_RNA (1)...(19): siRNA sense strand
gcaccucccucacuuugug

SEQ ID NO: 740397 - RNA, 19 nt, Homo sapiens
  misc_RNA (1)...(19): siRNA sense strand
ugaaggagcuggaccuaag

SEQ ID NO: 740398 - RNA, 19 nt, Homo sapiens
  misc_RNA (1)...(19): siRNA sense strand
gggcauguguguagaaaca

SEQ ID NO: 740399 - RNA, 19 nt, Homo sapiens
  misc_RNA (1)...(19): siRNA sense strand
gaaaucagagaaagagaga

SEQ ID NO: 740400 - RNA, 19 nt, Homo sapiens
  misc_RNA (1)...(19): siRNA sense strand
gaccggaagugcaaagaug

SEQ ID NO: 740401 - RNA, 19 nt, Homo sapiens
  misc_RNA (1)...(19): siRNA sense strand
aaacagacauggagcucuu

SEQ ID NO: 740402 - RNA, 19 nt, Homo sapiens
  misc_RNA (1)...(19): siRNA sense strand
ucacacagcugcuacuucu

SEQ ID NO: 740403 - RNA, 19 nt, Homo sapiens
  misc_RNA (1)...(19): siRNA sense strand
ggagaaucgaggacauuua

SEQ ID NO: 740404 - RNA, 19 nt, Homo sapiens
  misc_RNA (1)...(19): siRNA sense strand
cagcacagaucaacaugga

SEQ ID NO: 740405 - RNA, 19 nt, Homo sapiens
  misc_RNA (1)...(19): siRNA sense strand
ggaugaaacgucaggaauu

SEQ ID NO: 740406 - RNA, 19 nt, Homo sapiens
  misc_RNA (1)...(19): siRNA sense strand
ugaaagacaagaaagauga

SEQ ID NO: 740407 - RNA, 19 nt, Homo sapiens
  misc_RNA (1)...(19): siRNA sense strand
gcaagugaaagacaagaaa

SEQ ID NO: 740408 - RNA, 19 nt, Homo sapiens
  misc_RNA (1)...(19): siRNA sense strand
gcaauuagagccuuuaggu

SEQ ID NO: 740409 - RNA, 19 nt, Homo sapiens
  misc_RNA (1)...(19): siRNA sense strand
gcuguggccucacgucuga

SEQ ID NO: 740410 - RNA, 19 nt, Homo sapiens
  misc_RNA (1)...(19): siRNA sense strand
agagagagauggagaacau

SEQ ID NO: 740411 - RNA, 19 nt, Homo sapiens
  misc_RNA (1)...(19): siRNA sense strand
ggaucaggcugcaagugaa

SEQ ID NO: 740412 - RNA, 19 nt, Homo sapiens
  misc_RNA (1)...(19): siRNA sense strand
gcaggaaggaauauuucua

SEQ ID NO: 740413 - RNA, 19 nt, Homo sapiens
  misc_RNA (1)...(19): siRNA sense strand
ugacaucgguggagguugu

SEQ ID NO: 740414 - RNA, 19 nt, Homo sapiens
  misc_RNA (1)...(19): siRNA sense strand
cgaguucacuucccuguag

SEQ ID NO: 740415 - RNA, 19 nt, Homo sapiens
  misc_RNA (1)...(19): siRNA sense strand
ggagagguaaacauucuaa

SEQ ID NO: 740416 - RNA, 19 nt, Homo sapiens
  misc_RNA (1)...(19): siRNA sense strand
aggaggagcugaaggaguu

SEQ ID NO: 740417 - RNA, 19 nt, Homo sapiens
  misc_RNA (1)...(19): siRNA sense strand
ccucugugguguugcuuua

SEQ ID NO: 740418 - RNA, 19 nt, Homo sapiens
  misc_RNA (1)...(19): siRNA sense strand
gcagcaauguccuaugucu

SEQ ID NO: 740419 - RNA, 19 nt, Homo sapiens
  misc_RNA (1)...(19): siRNA sense strand
gaacaaccuggaugacguu

SEQ ID NO: 740420 - RNA, 19 nt, Homo sapiens
  misc_RNA (1)...(19): siRNA sense strand
gagcuggaccuaaguggaa

SEQ ID NO: 740421 - RNA, 19 nt, Homo sapiens
  misc_RNA (1)...(19): siRNA sense strand
ccaauggccucuggaugaa

SEQ ID NO: 740422 - RNA, 19 nt, Homo sapiens
  misc_RNA (1)...(19): siRNA sense strand
gcugauagcccgagugaca

SEQ ID NO: 740423 - RNA, 19 nt, Homo sapiens
  misc_RNA (1)...(19): siRNA sense strand
gaaaccaggagaucucaug

SEQ ID NO: 740424 - RNA, 19 nt, Homo sapiens
  misc_RNA (1)...(19): siRNA sense strand
gagcaagaucuucccaauu

SEQ ID NO: 740425 - RNA, 19 nt, Homo sapiens
  misc_RNA (1)...(19): siRNA sense strand
ugagaucagagacuuauuu

SEQ ID NO: 740426 - RNA, 19 nt, Homo sapiens
  misc_RNA (1)...(19): siRNA sense strand
aaaagacgcuagaagcaua

SEQ ID NO: 740427 - RNA, 19 nt, Homo sapiens
  misc_RNA (1)...(19): siRNA sense strand
ggacacaucccuguuccaa

SEQ ID NO: 740428 - RNA, 19 nt, Homo sapiens
  misc_RNA (1)...(19): siRNA sense strand
ggagagaugaguaauagca

SEQ ID NO: 740429 - RNA, 19 nt, Homo sapiens
  misc_RNA (1)...(19): siRNA sense strand
aaccacacguuuccuauug

SEQ ID NO: 740430 - RNA, 19 nt, Homo sapiens
  misc_RNA (1)...(19): siRNA sense strand
gcauguguguagaaacaga

SEQ ID NO: 740431 - RNA, 19 nt, Homo sapiens
  misc_RNA (1)...(19): siRNA sense strand
agaaagagagagagagaaa

SEQ ID NO: 740432 - RNA, 19 nt, Homo sapiens
  misc_RNA (1)...(19): siRNA sense strand
guucuacguuggccacuug

SEQ ID NO: 740433 - RNA, 19 nt, Homo sapiens
  misc_RNA (1)...(19): siRNA sense strand
ggaaagcuccccagaggua

SEQ ID NO: 740434 - RNA, 19 nt, Homo sapiens
  misc_RNA (1)...(19): siRNA sense strand
cgggagagaugaguaauag

SEQ ID NO: 740435 - RNA, 19 nt, Homo sapiens
  misc_RNA (1)...(19): siRNA sense strand
ggaccuggccucugugcuu

SEQ ID NO: 740436 - RNA, 19 nt, Homo sapiens
  misc_RNA (1)...(19): siRNA sense strand
gggcaucaaccacacguuu

SEQ ID NO: 740437 - RNA, 19 nt, Homo sapiens
  misc_RNA (1)...(19): siRNA sense strand
gguaaacauucuaauugca

SEQ ID NO: 740438 - RNA, 19 nt, Homo sapiens
  misc_RNA (1)...(19): siRNA sense strand
uaauugagaucagagacuu

SEQ ID NO: 740439 - RNA, 19 nt, Homo sapiens
  misc_RNA (1)...(19): siRNA sense strand
cgaggacauuuaauugaga

SEQ ID NO: 740440 - RNA, 19 nt, Homo sapiens
  misc_RNA (1)...(19): siRNA sense strand
gcugcuacuucuacaaaga

SEQ ID NO: 740441 - RNA, 19 nt, Homo sapiens
  misc_RNA (1)...(19): siRNA sense strand
gagagagaaaucagagaaa

SEQ ID NO: 740442 - RNA, 19 nt, Homo sapiens
  misc_RNA (1)...(19): siRNA sense strand
gagaucagagacuuauuug

SEQ ID NO: 740443 - RNA, 19 nt, Homo sapiens
  misc_RNA (1)...(19): siRNA sense strand
ggagaucucaugccugcaa

SEQ ID NO: 740444 - RNA, 19 nt, Homo sapiens
  misc_RNA (1)...(19): siRNA sense strand
gggaucaggcugcaaguga

SEQ ID NO: 740445 - RNA, 19 nt, Homo sapiens
  misc_RNA (1)...(19): siRNA sense strand
caaauggcccacuuuaaag

SEQ ID NO: 740446 - RNA, 19 nt, Homo sapiens
  misc_RNA (1)...(19): siRNA sense strand
ggucucugcuuugugauga

SEQ ID NO: 740447 - RNA, 19 nt, Homo sapiens
  misc_RNA (1)...(19): siRNA sense strand
ggccugcacuugccugaug

SEQ ID NO: 740448 - RNA, 19 nt, Homo sapiens
  misc_RNA (1)...(19): siRNA sense strand
gaaaggcaagcaauuagag

SEQ ID NO: 740449 - RNA, 19 nt, Homo sapiens
  misc_RNA (1)...(19): siRNA sense strand
gagaagcuggccugauuau

SEQ ID NO: 740450 - RNA, 19 nt, Homo sapiens
  misc_RNA (1)...(19): siRNA sense strand
gcacuuucugcauuaaauu

SEQ ID NO: 740451 - RNA, 19 nt, Homo sapiens
  misc_RNA (1)...(19): siRNA sense strand
acacagaaaucagagaaag

SEQ ID NO: 740452 - RNA, 19 nt, Homo sapiens
  misc_RNA (1)...(19): siRNA sense strand
gacccauccucaccucauu

SEQ ID NO: 740453 - RNA, 19 nt, Homo sapiens
  misc_RNA (1)...(19): siRNA sense strand
ccgcauagccguaccuuca

SEQ ID NO: 740454 - RNA, 19 nt, Homo sapiens
  misc_RNA (1)...(19): siRNA sense strand
gaacuggagcucugcuauc

SEQ ID NO: 740455 - RNA, 19 nt, Homo sapiens
  misc_RNA (1)...(19): siRNA sense strand
ugagcaagaucuucccaau

SEQ ID NO: 740456 - RNA, 19 nt, Homo sapiens
  misc_RNA (1)...(19): siRNA sense strand
cauccugccugcaaacuca

SEQ ID NO: 740457 - RNA, 19 nt, Homo sapiens
  misc_RNA (1)...(19): siRNA sense strand
aaacguuccugacacaagu

SEQ ID NO: 740458 - RNA, 19 nt, Homo sapiens
  misc_RNA (1)...(19): siRNA sense strand
uauugggccuguuaaguga

SEQ ID NO: 740459 - RNA, 19 nt, Homo sapiens
  misc_RNA (1)...(19): siRNA sense strand
caucaucuccaccuucuug

SEQ ID NO: 740460 - RNA, 19 nt, Homo sapiens
  misc_RNA (1)...(19): siRNA sense strand
acaacccucugucuacauu

SEQ ID NO: 740461 - RNA, 19 nt, Homo sapiens
  misc_RNA (1)...(19): siRNA sense strand
ccacaacccucugucuaca

SEQ ID NO: 740462 - RNA, 19 nt, Homo sapiens
  misc_RNA (1)...(19): siRNA sense strand
uuagguuggucaaaucaaa

SEQ ID NO: 740463 - RNA, 19 nt, Homo sapiens
  misc_RNA (1)...(19): siRNA sense strand
ccacagcucugcagaaccu

SEQ ID NO: 740464 - RNA, 19 nt, Homo sapiens
  misc_RNA (1)...(19): siRNA sense strand
ggaggagaaucgaggacau

SEQ ID NO: 740465 - RNA, 19 nt, Homo sapiens
  misc_RNA (1)...(19): siRNA sense strand
ggguggagcugcaucacau

SEQ ID NO: 740466 - RNA, 19 nt, Homo sapiens
  misc_RNA (1)...(19): siRNA sense strand
gaaggaauauuucuacaga

SEQ ID NO: 740467 - RNA, 19 nt, Homo sapiens
  misc_RNA (1)...(19): siRNA sense strand
gaugaaacgucaggaauuu

SEQ ID NO: 740468 - RNA, 19 nt, Homo sapiens
  misc_RNA (1)...(19): siRNA sense strand
ggacgccgcuggagagaaa

SEQ ID NO: 740469 - RNA, 19 nt, Homo sapiens
  misc_RNA (1)...(19): siRNA sense strand
gcuagaagcauauggaaua

SEQ ID NO: 740470 - RNA, 19 nt, Homo sapiens
  misc_RNA (1)...(19): siRNA sense strand
ggaauuuacuacacagaaa

SEQ ID NO: 740471 - RNA, 19 nt, Homo sapiens
  misc_RNA (1)...(19): siRNA sense strand
caacacgggucucugcuuu

SEQ ID NO: 740472 - RNA, 19 nt, Homo sapiens
  misc_RNA (1)...(19): siRNA sense strand
ccaaauggcccacuuuaaa

SEQ ID NO: 740473 - RNA, 19 nt, Homo sapiens
  misc_RNA (1)...(19): siRNA sense strand
gaugaaaggcaagcaauua

SEQ ID NO: 740474 - RNA, 19 nt, Homo sapiens
  misc_RNA (1)...(19): siRNA sense strand
gagaaucgaggacauuuaa

SEQ ID NO: 740475 - RNA, 19 nt, Homo sapiens
  misc_RNA (1)...(19): siRNA sense strand
aagagaagcuggccugauu

SEQ ID NO: 740476 - RNA, 19 nt, Homo sapiens
  misc_RNA (1)...(19): siRNA sense strand
gagguaaacauucuaauug

SEQ ID NO: 740477 - RNA, 19 nt, Homo sapiens
  misc_RNA (1)...(19): siRNA sense strand
gaaaugggcauguguguag

SEQ ID NO: 740478 - RNA, 19 nt, Homo sapiens
  misc_RNA (1)...(19): siRNA sense strand
ccaagaaccucgcauaguc

SEQ ID NO: 740479 - RNA, 19 nt, Homo sapiens
  misc_RNA (1)...(19): siRNA sense strand
gaagcuggccugauuaugu

SEQ ID NO: 740480 - RNA, 19 nt, Homo sapiens
  misc_RNA (1)...(19): siRNA sense strand
uggaauacauggccuguuu

SEQ ID NO: 740481 - RNA, 19 nt, Homo sapiens
  misc_RNA (1)...(19): siRNA sense strand
ugagguaguugacaaagaa

SEQ ID NO: 740482 - RNA, 19 nt, Homo sapiens
  misc_RNA (1)...(19): siRNA sense strand
ccaagugacugcuccauuc

SEQ ID NO: 740483 - RNA, 19 nt, Homo sapiens
  misc_RNA (1)...(19): siRNA sense strand
gagauugaauucugugugu

SEQ ID NO: 740484 - RNA, 19 nt, Homo sapiens
  misc_RNA (1)...(19): siRNA sense strand
gaaucgaggacauuuaauu

SEQ ID NO: 740485 - RNA, 19 nt, Homo sapiens
  misc_RNA (1)...(19): siRNA sense strand
gaaccucauuccuucuuug

SEQ ID NO: 740486 - RNA, 19 nt, Homo sapiens
  misc_RNA (1)...(19): siRNA sense strand
cuacagauauuucacagau

SEQ ID NO: 740487 - RNA, 19 nt, Homo sapiens
  misc_RNA (1)...(19): siRNA sense strand
gcaagcaauuagagccuuu

SEQ ID NO: 740488 - RNA, 19 nt, Homo sapiens
  misc_RNA (1)...(19): siRNA sense strand
acagauauuucacagauga

SEQ ID NO: 740489 - RNA, 19 nt, Homo sapiens
  misc_RNA (1)...(19): siRNA sense strand
acacaucccuguuccaaau

SEQ ID NO: 740490 - RNA, 19 nt, Homo sapiens
  misc_RNA (1)...(19): siRNA sense strand
cagcaugucuucuacuuca

SEQ ID NO: 740491 - RNA, 19 nt, Homo sapiens
  misc_RNA (1)...(19): siRNA sense strand
agcaagaucuucccaauug

SEQ ID NO: 740492 - RNA, 19 nt, Homo sapiens
  misc_RNA (1)...(19): siRNA sense strand
gaccuggccucugugcuua

SEQ ID NO: 740493 - RNA, 19 nt, Homo sapiens
  misc_RNA (1)...(19): siRNA sense strand
ucgcugagcucaucggaaa

SEQ ID NO: 740494 - RNA, 19 nt, Homo sapiens
  misc_RNA (1)...(19): siRNA sense strand
gugcaaagauggacucuac

SEQ ID NO: 740495 - RNA, 19 nt, Homo sapiens
  misc_RNA (1)...(19): siRNA sense strand
ggagcugcaucacauaguu

SEQ ID NO: 740496 - RNA, 19 nt, Homo sapiens
  misc_RNA (1)...(19): siRNA sense strand
gcaccucccucacuuugug

SEQ ID NO: 740497 - RNA, 19 nt, Homo sapiens
  misc_RNA (1)...(19): siRNA sense strand
ugaaggagcuggaccuaag

SEQ ID NO: 740498 - RNA, 19 nt, Homo sapiens
  misc_RNA (1)...(19): siRNA sense strand
gggcauguguguagaaaca

SEQ ID NO: 740499 - RNA, 19 nt, Homo sapiens
  misc_RNA (1)...(19): siRNA sense strand
gaaaucagagaaagagaga

SEQ ID NO: 740500 - RNA, 19 nt, Homo sapiens
  misc_RNA (1)...(19): siRNA sense strand
gaccggaagugcaaagaug

SEQ ID NO: 740501 - RNA, 19 nt, Homo sapiens
  misc_RNA (1)...(19): siRNA sense strand
aaacagacauggagcucuu

SEQ ID NO: 740502 - RNA, 19 nt, Homo sapiens
  misc_RNA (1)...(19): siRNA sense strand
ucacacagcugcuacuucu

SEQ ID NO: 740503 - RNA, 19 nt, Homo sapiens
  misc_RNA (1)...(19): siRNA sense strand
ggagaaucgaggacauuua

SEQ ID NO: 740504 - RNA, 19 nt, Homo sapiens
  misc_RNA (1)...(19): siRNA sense strand
cagcacagaucaacaugga

SEQ ID NO: 740505 - RNA, 19 nt, Homo sapiens
  misc_RNA (1)...(19): siRNA sense strand
ggaugaaacgucaggaauu

SEQ ID NO: 740506 - RNA, 19 nt, Homo sapiens
  misc_RNA (1)...(19): siRNA sense strand
ugaaagacaagaaagauga

SEQ ID NO: 740507 - RNA, 19 nt, Homo sapiens
  misc_RNA (1)...(19): siRNA sense strand
gcaagugaaagacaagaaa

SEQ ID NO: 740508 - RNA, 19 nt, Homo sapiens
  misc_RNA (1)...(19): siRNA sense strand
gcaauuagagccuuuaggu

SEQ ID NO: 740509 - RNA, 19 nt, Homo sapiens
  misc_RNA (1)...(19): siRNA sense strand
gcuguggccucacgucuga

SEQ ID NO: 740510 - RNA, 19 nt, Homo sapiens
  misc_RNA (1)...(19): siRNA sense strand
agagagagauggagaacau

SEQ ID NO: 740511 - RNA, 19 nt, Homo sapiens
  misc_RNA (1)...(19): siRNA sense strand
ggaucaggcugcaagugaa

SEQ ID NO: 740512 - RNA, 19 nt, Homo sapiens
  misc_RNA (1)...(19): siRNA sense strand
gcaggaaggaauauuucua

SEQ ID NO: 740513 - RNA, 19 nt, Homo sapiens
  misc_RNA (1)...(19): siRNA sense strand
ugacaucgguggagguugu

SEQ ID NO: 740514 - RNA, 19 nt, Homo sapiens
  misc_RNA (1)...(19): siRNA sense strand
cgaguucacuucccuguag

SEQ ID NO: 740515 - RNA, 19 nt, Homo sapiens
  misc_RNA (1)...(19): siRNA sense strand
ggagagguaaacauucuaa

SEQ ID NO: 740516 - RNA, 19 nt, Homo sapiens
  misc_RNA (1)...(19): siRNA sense strand
aggaggagcugaaggaguu

SEQ ID NO: 740517 - RNA, 19 nt, Homo sapiens
  misc_RNA (1)...(19): siRNA sense strand
ccucugugguguugcuuua

SEQ ID NO: 740518 - RNA, 19 nt, Homo sapiens
  misc_RNA (1)...(19): siRNA sense strand
gcagcaauguccuaugucu

SEQ ID NO: 740519 - RNA, 19 nt, Homo sapiens
  misc_RNA (1)...(19): siRNA sense strand
gaacaaccuggaugacguu

SEQ ID NO: 740520 - RNA, 19 nt, Homo sapiens
  misc_RNA (1)...(19): siRNA sense strand
gagcuggaccuaaguggaa

SEQ ID NO: 740521 - RNA, 19 nt, Homo sapiens
  misc_RNA (1)...(19): siRNA sense strand
ccaauggccucuggaugaa

SEQ ID NO: 740522 - RNA, 19 nt, Homo sapiens
  misc_RNA (1)...(19): siRNA sense strand
gcugauagcccgagugaca

SEQ ID NO: 740523 - RNA, 19 nt, Homo sapiens
  misc_RNA (1)...(19): siRNA sense strand
gaaaccaggagaucucaug

SEQ ID NO: 740524 - RNA, 19 nt, Homo sapiens
  misc_RNA (1)...(19): siRNA sense strand
gagcaagaucuucccaauu

SEQ ID NO: 740525 - RNA, 19 nt, Homo sapiens
  misc_RNA (1)...(19): siRNA sense strand
ugagaucagagacuuauuu

SEQ ID NO: 740526 - RNA, 19 nt, Homo sapiens
  misc_RNA (1)...(19): siRNA sense strand
aaaagacgcuagaagcaua

SEQ ID NO: 740527 - RNA, 19 nt, Homo sapiens
  misc_RNA (1)...(19): siRNA sense strand
ggacacaucccuguuccaa

SEQ ID NO: 740528 - RNA, 19 nt, Homo sapiens
  misc_RNA (1)...(19): siRNA sense strand
ggagagaugaguaauagca

SEQ ID NO: 740529 - RNA, 19 nt, Homo sapiens
  misc_RNA (1)...(19): siRNA sense strand
aaccacacguuuccuauug

SEQ ID NO: 740530 - RNA, 19 nt, Homo sapiens
  misc_RNA (1)...(19): siRNA sense strand
gcauguguguagaaacaga

SEQ ID NO: 740531 - RNA, 19 nt, Homo sapiens
  misc_RNA (1)...(19): siRNA sense strand
agaaagagagagagagaaa

SEQ ID NO: 740532 - RNA, 19 nt, Homo sapiens
  misc_RNA (1)...(19): siRNA sense strand
guucuacguuggccacuug

SEQ ID NO: 740533 - RNA, 19 nt, Homo sapiens
  misc_RNA (1)...(19): siRNA sense strand
ggaaagcuccccagaggua

SEQ ID NO: 740534 - RNA, 19 nt, Homo sapiens
  misc_RNA (1)...(19): siRNA sense strand
cgggagagaugaguaauag

SEQ ID NO: 740535 - RNA, 19 nt, Homo sapiens
  misc_RNA (1)...(19): siRNA sense strand
ggaccuggccucugugcuu

SEQ ID NO: 740536 - RNA, 19 nt, Homo sapiens
  misc_RNA (1)...(19): siRNA sense strand
gggcaucaaccacacguuu

SEQ ID NO: 740537 - RNA, 19 nt, Homo sapiens
  misc_RNA (1)...(19): siRNA sense strand
gguaaacauucuaauugca

SEQ ID NO: 740538 - RNA, 19 nt, Homo sapiens
  misc_RNA (1)...(19): siRNA sense strand
uaauugagaucagagacuu

SEQ ID NO: 740539 - RNA, 19 nt, Homo sapiens
  misc_RNA (1)...(19): siRNA sense strand
cgaggacauuuaauugaga

SEQ ID NO: 740540 - RNA, 19 nt, Homo sapiens
  misc_RNA (1)...(19): siRNA sense strand
gcugcuacuucuacaaaga

SEQ ID NO: 740541 - RNA, 19 nt, Homo sapiens
  misc_RNA (1)...(19): siRNA sense strand
gagagagaaaucagagaaa

SEQ ID NO: 740542 - RNA, 19 nt, Homo sapiens
  misc_RNA (1)...(19): siRNA sense strand
gagaucagagacuuauuug

SEQ ID NO: 740543 - RNA, 19 nt, Homo sapiens
  misc_RNA (1)...(19): siRNA sense strand
ggagaucucaugccugcaa

SEQ ID NO: 740544 - RNA, 19 nt, Homo sapiens
  misc_RNA (1)...(19): siRNA sense strand
gggaucaggcugcaaguga

SEQ ID NO: 740545 - RNA, 19 nt, Homo sapiens
  misc_RNA (1)...(19): siRNA sense strand
caaauggcccacuuuaaag

SEQ ID NO: 740546 - RNA, 19 nt, Homo sapiens
  misc_RNA (1)...(19): siRNA sense strand
ggucucugcuuugugauga

SEQ ID NO: 740547 - RNA, 19 nt, Homo sapiens
  misc_RNA (1)...(19): siRNA sense strand
ggccugcacuugccugaug

SEQ ID NO: 740548 - RNA, 19 nt, Homo sapiens
  misc_RNA (1)...(19): siRNA sense strand
gaaaggcaagcaauuagag

SEQ ID NO: 740549 - RNA, 19 nt, Homo sapiens
  misc_RNA (1)...(19): siRNA sense strand
gagaagcuggccugauuau

SEQ ID NO: 740550 - RNA, 19 nt, Homo sapiens
  misc_RNA (1)...(19): siRNA sense strand
gcacuuucugcauuaaauu

SEQ ID NO: 740551 - RNA, 19 nt, Homo sapiens
  misc_RNA (1)...(19): siRNA sense strand
acacagaaaucagagaaag

SEQ ID NO: 740552 - RNA, 19 nt, Homo sapiens
  misc_RNA (1)...(19): siRNA sense strand
gacccauccucaccucauu

SEQ ID NO: 740553 - RNA, 19 nt, Homo sapiens
  misc_RNA (1)...(19): siRNA sense strand
ccgcauagccguaccuuca

SEQ ID NO: 740554 - RNA, 19 nt, Homo sapiens
  misc_RNA (1)...(19): siRNA sense strand
gaacuggagcucugcuauc

SEQ ID NO: 740555 - RNA, 19 nt, Homo sapiens
  misc_RNA (1)...(19): siRNA sense strand
ugagcaagaucuucccaau

SEQ ID NO: 740556 - RNA, 19 nt, Homo sapiens
  misc_RNA (1)...(19): siRNA sense strand
cauccugccugcaaacuca

SEQ ID NO: 740557 - RNA, 19 nt, Homo sapiens
  misc_RNA (1)...(19): siRNA sense strand
aaacguuccugacacaagu

SEQ ID NO: 740558 - RNA, 19 nt, Homo sapiens
  misc_RNA (1)...(19): siRNA sense strand
uauugggccuguuaaguga

SEQ ID NO: 740559 - RNA, 19 nt, Homo sapiens
  misc_RNA (1)...(19): siRNA sense strand
caucaucuccaccuucuug

SEQ ID NO: 740560 - RNA, 19 nt, Homo sapiens
  misc_RNA (1)...(19): siRNA sense strand
acaacccucugucuacauu

SEQ ID NO: 740561 - RNA, 19 nt, Homo sapiens
  misc_RNA (1)...(19): siRNA sense strand
ccacaacccucugucuaca

SEQ ID NO: 740562 - RNA, 19 nt, Homo sapiens
  misc_RNA (1)...(19): siRNA sense strand
uuagguuggucaaaucaaa

SEQ ID NO: 740563 - RNA, 19 nt, Homo sapiens
  misc_RNA (1)...(19): siRNA sense strand
ccacagcucugcagaaccu

SEQ ID NO: 740564 - RNA, 19 nt, Homo sapiens
  misc_RNA (1)...(19): siRNA sense strand
ggaggagaaucgaggacau

SEQ ID NO: 740565 - RNA, 19 nt, Homo sapiens
  misc_RNA (1)...(19): siRNA sense strand
ggguggagcugcaucacau

SEQ ID NO: 740566 - RNA, 19 nt, Homo sapiens
  misc_RNA (1)...(19): siRNA sense strand
gaaggaauauuucuacaga

SEQ ID NO: 740567 - RNA, 19 nt, Homo sapiens
  misc_RNA (1)...(19): siRNA sense strand
gaugaaacgucaggaauuu

SEQ ID NO: 740568 - RNA, 19 nt, Homo sapiens
  misc_RNA (1)...(19): siRNA sense strand
ggacgccgcuggagagaaa

SEQ ID NO: 740569 - RNA, 19 nt, Homo sapiens
  misc_RNA (1)...(19): siRNA sense strand
gcuagaagcauauggaaua

SEQ ID NO: 740570 - RNA, 19 nt, Homo sapiens
  misc_RNA (1)...(19): siRNA sense strand
ggaauuuacuacacagaaa

SEQ ID NO: 740571 - RNA, 19 nt, Homo sapiens
  misc_RNA (1)...(19): siRNA sense strand
caacacgggucucugcuuu

SEQ ID NO: 740572 - RNA, 19 nt, Homo sapiens
  misc_RNA (1)...(19): siRNA sense strand
ccaaauggcccacuuuaaa

SEQ ID NO: 740573 - RNA, 19 nt, Homo sapiens
  misc_RNA (1)...(19): siRNA sense strand
gaugaaaggcaagcaauua

SEQ ID NO: 740574 - RNA, 19 nt, Homo sapiens
  misc_RNA (1)...(19): siRNA sense strand
gagaaucgaggacauuuaa

SEQ ID NO: 740575 - RNA, 19 nt, Homo sapiens
  misc_RNA (1)...(19): siRNA sense strand
aagagaagcuggccugauu

SEQ ID NO: 740576 - RNA, 19 nt, Homo sapiens
  misc_RNA (1)...(19): siRNA sense strand
gagguaaacauucuaauug

SEQ ID NO: 740577 - RNA, 19 nt, Homo sapiens
  misc_RNA (1)...(19): siRNA sense strand
gaaaugggcauguguguag

SEQ ID NO: 740578 - RNA, 19 nt, Homo sapiens
  misc_RNA (1)...(19): siRNA sense strand
ccaagaaccucgcauaguc

SEQ ID NO: 740579 - RNA, 19 nt, Homo sapiens
  misc_RNA (1)...(19): siRNA sense strand
gaagcuggccugauuaugu

SEQ ID NO: 740580 - RNA, 19 nt, Homo sapiens
  misc_RNA (1)...(19): siRNA sense strand
uggaauacauggccuguuu

SEQ ID NO: 740581 - RNA, 19 nt, Homo sapiens
  misc_RNA (1)...(19): siRNA sense strand
ugagguaguugacaaagaa

SEQ ID NO: 740582 - RNA, 19 nt, Homo sapiens
  misc_RNA (1)...(19): siRNA sense strand
ccaagugacugcuccauuc

SEQ ID NO: 740583 - RNA, 19 nt, Homo sapiens
  misc_RNA (1)...(19): siRNA sense strand
gagauugaauucugugugu

SEQ ID NO: 740584 - RNA, 19 nt, Homo sapiens
  misc_RNA (1)...(19): siRNA sense strand
gaaucgaggacauuuaauu

SEQ ID NO: 740585 - RNA, 19 nt, Homo sapiens
  misc_RNA (1)...(19): siRNA sense strand
gaaccucauuccuucuuug

SEQ ID NO: 740586 - RNA, 19 nt, Homo sapiens
  misc_RNA (1)...(19): siRNA sense strand
cuacagauauuucacagau

SEQ ID NO: 740587 - RNA, 19 nt, Homo sapiens
  misc_RNA (1)...(19): siRNA sense strand
gcaagcaauuagagccuuu

SEQ ID NO: 740588 - RNA, 19 nt, Homo sapiens
  misc_RNA (1)...(19): siRNA sense strand
acagauauuucacagauga

SEQ ID NO: 740589 - RNA, 19 nt, Homo sapiens
  misc_RNA (1)...(19): siRNA sense strand
acacaucccuguuccaaau

SEQ ID NO: 740590 - RNA, 19 nt, Homo sapiens
  misc_RNA (1)...(19): siRNA sense strand
cagcaugucuucuacuuca

SEQ ID NO: 740591 - RNA, 19 nt, Homo sapiens
  misc_RNA (1)...(19): siRNA sense strand
agcaagaucuucccaauug

SEQ ID NO: 740592 - RNA, 19 nt, Homo sapiens
  misc_RNA (1)...(19): siRNA sense strand
gaccuggccucugugcuua

SEQ ID NO: 740593 - RNA, 19 nt, Homo sapiens
  misc_RNA (1)...(19): siRNA sense strand
ucgcugagcucaucggaaa

SEQ ID NO: 740594 - RNA, 19 nt, Homo sapiens
  misc_RNA (1)...(19): siRNA sense strand
gugcaaagauggacucuac

SEQ ID NO: 740595 - RNA, 19 nt, Homo sapiens
  misc_RNA (1)...(19): siRNA sense strand
ggagcugcaucacauaguu

SEQ ID NO: 740596 - RNA, 19 nt, Homo sapiens
  misc_RNA (1)...(19): siRNA sense strand
gcaccucccucacuuugug

SEQ ID NO: 740597 - RNA, 19 nt, Homo sapiens
  misc_RNA (1)...(19): siRNA sense strand
ugaaggagcuggaccuaag

SEQ ID NO: 740598 - RNA, 19 nt, Homo sapiens
  misc_RNA (1)...(19): siRNA sense strand
gggcauguguguagaaaca

SEQ ID NO: 740599 - RNA, 19 nt, Homo sapiens
  misc_RNA (1)...(19): siRNA sense strand
gaaaucagagaaagagaga

SEQ ID NO: 740600 - RNA, 19 nt, Homo sapiens
  misc_RNA (1)...(19): siRNA sense strand
gaccggaagugcaaagaug

SEQ ID NO: 740601 - RNA, 19 nt, Homo sapiens
  misc_RNA (1)...(19): siRNA sense strand
aaacagacauggagcucuu

SEQ ID NO: 740602 - RNA, 19 nt, Homo sapiens
  misc_RNA (1)...(19): siRNA sense strand
ucacacagcugcuacuucu

SEQ ID NO: 740603 - RNA, 19 nt, Homo sapiens
  misc_RNA (1)...(19): siRNA sense strand
ggagaaucgaggacauuua

SEQ ID NO: 740604 - RNA, 19 nt, Homo sapiens
  misc_RNA (1)...(19): siRNA sense strand
cagcacagaucaacaugga

SEQ ID NO: 740605 - RNA, 19 nt, Homo sapiens
  misc_RNA (1)...(19): siRNA sense strand
ggaugaaacgucaggaauu

SEQ ID NO: 740606 - RNA, 19 nt, Homo sapiens
  misc_RNA (1)...(19): siRNA sense strand
ugaaagacaagaaagauga

SEQ ID NO: 740607 - RNA, 19 nt, Homo sapiens
  misc_RNA (1)...(19): siRNA sense strand
gcaagugaaagacaagaaa

SEQ ID NO: 740608 - RNA, 19 nt, Homo sapiens
  misc_RNA (1)...(19): siRNA sense strand
gcaauuagagccuuuaggu

SEQ ID NO: 740609 - RNA, 19 nt, Homo sapiens
  misc_RNA (1)...(19): siRNA sense strand
gcuguggccucacgucuga

SEQ ID NO: 740610 - RNA, 19 nt, Homo sapiens
  misc_RNA (1)...(19): siRNA sense strand
agagagagauggagaacau

SEQ ID NO: 740611 - RNA, 19 nt, Homo sapiens
  misc_RNA (1)...(19): siRNA sense strand
ggaucaggcugcaagugaa

SEQ ID NO: 740612 - RNA, 19 nt, Homo sapiens
  misc_RNA (1)...(19): siRNA sense strand
gcaggaaggaauauuucua

SEQ ID NO: 740613 - RNA, 19 nt, Homo sapiens
  misc_RNA (1)...(19): siRNA sense strand
ugacaucgguggagguugu

SEQ ID NO: 740614 - RNA, 19 nt, Homo sapiens
  misc_RNA (1)...(19): siRNA sense strand
cgaguucacuucccuguag

SEQ ID NO: 740615 - RNA, 19 nt, Homo sapiens
  misc_RNA (1)...(19): siRNA sense strand
ggagagguaaacauucuaa

SEQ ID NO: 740616 - RNA, 19 nt, Homo sapiens
  misc_RNA (1)...(19): siRNA sense strand
aggaggagcugaaggaguu

SEQ ID NO: 740617 - RNA, 19 nt, Homo sapiens
  misc_RNA (1)...(19): siRNA sense strand
ccucugugguguugcuuua

SEQ ID NO: 740618 - RNA, 19 nt, Homo sapiens
  misc_RNA (1)...(19): siRNA sense strand
gcagcaauguccuaugucu

SEQ ID NO: 740619 - RNA, 19 nt, Homo sapiens
  misc_RNA (1)...(19): siRNA sense strand
gaacaaccuggaugacguu

SEQ ID NO: 740620 - RNA, 19 nt, Homo sapiens
  misc_RNA (1)...(19): siRNA sense strand
gagcuggaccuaaguggaa

SEQ ID NO: 740621 - RNA, 19 nt, Homo sapiens
  misc_RNA (1)...(19): siRNA sense strand
ccaauggccucuggaugaa

SEQ ID NO: 740622 - RNA, 19 nt, Homo sapiens
  misc_RNA (1)...(19): siRNA sense strand
gcugauagcccgagugaca

SEQ ID NO: 740623 - RNA, 19 nt, Homo sapiens
  misc_RNA (1)...(19): siRNA sense strand
gaaaccaggagaucucaug

SEQ ID NO: 740624 - RNA, 19 nt, Homo sapiens
  misc_RNA (1)...(19): siRNA sense strand
gagcaagaucuucccaauu

SEQ ID NO: 740625 - RNA, 19 nt, Homo sapiens
  misc_RNA (1)...(19): siRNA sense strand
ugagaucagagacuuauuu

SEQ ID NO: 740626 - RNA, 19 nt, Homo sapiens
  misc_RNA (1)...(19): siRNA sense strand
aaaagacgcuagaagcaua

SEQ ID NO: 740627 - RNA, 19 nt, Homo sapiens
  misc_RNA (1)...(19): siRNA sense strand
ggacacaucccuguuccaa

SEQ ID NO: 740628 - RNA, 19 nt, Homo sapiens
  misc_RNA (1)...(19): siRNA sense strand
ggagagaugaguaauagca

SEQ ID NO: 740629 - RNA, 19 nt, Homo sapiens
  misc_RNA (1)...(19): siRNA sense strand
aaccacacguuuccuauug

SEQ ID NO: 740630 - RNA, 19 nt, Homo sapiens
  misc_RNA (1)...(19): siRNA sense strand
gcauguguguagaaacaga

SEQ ID NO: 740631 - RNA, 19 nt, Homo sapiens
  misc_RNA (1)...(19): siRNA sense strand
agaaagagagagagagaaa

SEQ ID NO: 740632 - RNA, 19 nt, Homo sapiens
  misc_RNA (1)...(19): siRNA sense strand
guucuacguuggccacuug

SEQ ID NO: 740633 - RNA, 19 nt, Homo sapiens
  misc_RNA (1)...(19): siRNA sense strand
ggaaagcuccccagaggua

SEQ ID NO: 740634 - RNA, 19 nt, Homo sapiens
  misc_RNA (1)...(19): siRNA sense strand
cgggagagaugaguaauag

SEQ ID NO: 740635 - RNA, 19 nt, Homo sapiens
  misc_RNA (1)...(19): siRNA sense strand
ggaccuggccucugugcuu

SEQ ID NO: 740636 - RNA, 19 nt, Homo sapiens
  misc_RNA (1)...(19): siRNA sense strand
gggcaucaaccacacguuu

SEQ ID NO: 740637 - RNA, 19 nt, Homo sapiens
  misc_RNA (1)...(19): siRNA sense strand
gguaaacauucuaauugca

SEQ ID NO: 740638 - RNA, 19 nt, Homo sapiens
  misc_RNA (1)...(19): siRNA sense strand
uaauugagaucagagacuu

SEQ ID NO: 740639 - RNA, 19 nt, Homo sapiens
  misc_RNA (1)...(19): siRNA sense strand
cgaggacauuuaauugaga

SEQ ID NO: 740640 - RNA, 19 nt, Homo sapiens
  misc_RNA (1)...(19): siRNA sense strand
gcugcuacuucuacaaaga

SEQ ID NO: 740641 - RNA, 19 nt, Homo sapiens
  misc_RNA (1)...(19): siRNA sense strand
gagagagaaaucagagaaa

SEQ ID NO: 740642 - RNA, 19 nt, Homo sapiens
  misc_RNA (1)...(19): siRNA sense strand
gagaucagagacuuauuug

SEQ ID NO: 740643 - RNA, 19 nt, Homo sapiens
  misc_RNA (1)...(19): siRNA sense strand
ggagaucucaugccugcaa

SEQ ID NO: 740644 - RNA, 19 nt, Homo sapiens
  misc_RNA (1)...(19): siRNA sense strand
gggaucaggcugcaaguga

SEQ ID NO: 740645 - RNA, 19 nt, Homo sapiens
  misc_RNA (1)...(19): siRNA sense strand
caaauggcccacuuuaaag

SEQ ID NO: 740646 - RNA, 19 nt, Homo sapiens
  misc_RNA (1)...(19): siRNA sense strand
ggucucugcuuugugauga

SEQ ID NO: 740647 - RNA, 19 nt, Homo sapiens
  misc_RNA (1)...(19): siRNA sense strand
ggccugcacuugccugaug

SEQ ID NO: 740648 - RNA, 19 nt, Homo sapiens
  misc_RNA (1)...(19): siRNA sense strand
gaaaggcaagcaauuagag

SEQ ID NO: 740649 - RNA, 19 nt, Homo sapiens
  misc_RNA (1)...(19): siRNA sense strand
gagaagcuggccugauuau

SEQ ID NO: 740650 - RNA, 19 nt, Homo sapiens
  misc_RNA (1)...(19): siRNA sense strand
gcacuuucugcauuaaauu

SEQ ID NO: 740651 - RNA, 19 nt, Homo sapiens
  misc_RNA (1)...(19): siRNA sense strand
acacagaaaucagagaaag

SEQ ID NO: 740652 - RNA, 19 nt, Homo sapiens
  misc_RNA (1)...(19): siRNA sense strand
gacccauccucaccucauu

SEQ ID NO: 740653 - RNA, 19 nt, Homo sapiens
  misc_RNA (1)...(19): siRNA sense strand
ccgcauagccguaccuuca

SEQ ID NO: 740654 - RNA, 19 nt, Homo sapiens
  misc_RNA (1)...(19): siRNA sense strand
gaacuggagcucugcuauc

SEQ ID NO: 740655 - RNA, 19 nt, Homo sapiens
  misc_RNA (1)...(19): siRNA sense strand
ugagcaagaucuucccaau

SEQ ID NO: 740656 - RNA, 19 nt, Homo sapiens
  misc_RNA (1)...(19): siRNA sense strand
cauccugccugcaaacuca

SEQ ID NO: 740657 - RNA, 19 nt, Homo sapiens
  misc_RNA (1)...(19): siRNA sense strand
aaacguuccugacacaagu

SEQ ID NO: 740658 - RNA, 19 nt, Homo sapiens
  misc_RNA (1)...(19): siRNA sense strand
uauugggccuguuaaguga

SEQ ID NO: 740659 - RNA, 19 nt, Homo sapiens
  misc_RNA (1)...(19): siRNA sense strand
caucaucuccaccuucuug

SEQ ID NO: 740660 - RNA, 19 nt, Homo sapiens
  misc_RNA (1)...(19): siRNA sense strand
acaacccucugucuacauu

SEQ ID NO: 740661 - RNA, 19 nt, Homo sapiens
  misc_RNA (1)...(19): siRNA sense strand
ccacaacccucugucuaca

SEQ ID NO: 740662 - RNA, 19 nt, Homo sapiens
  misc_RNA (1)...(19): siRNA sense strand
uuagguuggucaaaucaaa

SEQ ID NO: 740663 - RNA, 19 nt, Homo sapiens
  misc_RNA (1)...(19): siRNA sense strand
ccacagcucugcagaaccu

SEQ ID NO: 740664 - RNA, 19 nt, Homo sapiens
  misc_RNA (1)...(19): siRNA sense strand
ggaggagaaucgaggacau

SEQ ID NO: 740665 - RNA, 19 nt, Homo sapiens
  misc_RNA (1)...(19): siRNA sense strand
ggguggagcugcaucacau

SEQ ID NO: 740666 - RNA, 19 nt, Homo sapiens
  misc_RNA (1)...(19): siRNA sense strand
gaaggaauauuucuacaga

SEQ ID NO: 740667 - RNA, 19 nt, Homo sapiens
  misc_RNA (1)...(19): siRNA sense strand
gaugaaacgucaggaauuu

SEQ ID NO: 740668 - RNA, 19 nt, Homo sapiens
  misc_RNA (1)...(19): siRNA sense strand
ggacgccgcuggagagaaa

SEQ ID NO: 740669 - RNA, 19 nt, Homo sapiens
  misc_RNA (1)...(19): siRNA sense strand
gcuagaagcauauggaaua

SEQ ID NO: 740670 - RNA, 19 nt, Homo sapiens
  misc_RNA (1)...(19): siRNA sense strand
ggaauuuacuacacagaaa

SEQ ID NO: 740671 - RNA, 19 nt, Homo sapiens
  misc_RNA (1)...(19): siRNA sense strand
caacacgggucucugcuuu

SEQ ID NO: 740672 - RNA, 19 nt, Homo sapiens
  misc_RNA (1)...(19): siRNA sense strand
ccaaauggcccacuuuaaa

SEQ ID NO: 740673 - RNA, 19 nt, Homo sapiens
  misc_RNA (1)...(19): siRNA sense strand
gaugaaaggcaagcaauua

SEQ ID NO: 740674 - RNA, 19 nt, Homo sapiens
  misc_RNA (1)...(19): siRNA sense strand
gagaaucgaggacauuuaa

SEQ ID NO: 740675 - RNA, 19 nt, Homo sapiens
  misc_RNA (1)...(19): siRNA sense strand
aagagaagcuggccugauu

SEQ ID NO: 740676 - RNA, 19 nt, Homo sapiens
  misc_RNA (1)...(19): siRNA sense strand
gagguaaacauucuaauug

SEQ ID NO: 740677 - RNA, 19 nt, Homo sapiens
  misc_RNA (1)...(19): siRNA sense strand
gaaaugggcauguguguag

SEQ ID NO: 740678 - RNA, 19 nt, Homo sapiens
  misc_RNA (1)...(19): siRNA sense strand
ccaagaaccucgcauaguc

SEQ ID NO: 740679 - RNA, 19 nt, Homo sapiens
  misc_RNA (1)...(19): siRNA sense strand
gaagcuggccugauuaugu

SEQ ID NO: 740680 - RNA, 19 nt, Homo sapiens
  misc_RNA (1)...(19): siRNA sense strand
uggaauacauggccuguuu

SEQ ID NO: 740681 - RNA, 19 nt, Homo sapiens
  misc_RNA (1)...(19): siRNA sense strand
ugagguaguugacaaagaa

SEQ ID NO: 740682 - RNA, 19 nt, Homo sapiens
  misc_RNA (1)...(19): siRNA sense strand
ccaagugacugcuccauuc

SEQ ID NO: 740683 - RNA, 19 nt, Homo sapiens
  misc_RNA (1)...(19): siRNA sense strand
gagauugaauucugugugu

SEQ ID NO: 740684 - RNA, 19 nt, Homo sapiens
  misc_RNA (1)...(19): siRNA sense strand
gaaucgaggacauuuaauu

SEQ ID NO: 740685 - RNA, 19 nt, Homo sapiens
  misc_RNA (1)...(19): siRNA sense strand
gaaccucauuccuucuuug

SEQ ID NO: 740686 - RNA, 19 nt, Homo sapiens
  misc_RNA (1)...(19): siRNA sense strand
cuacagauauuucacagau

SEQ ID NO: 740687 - RNA, 19 nt, Homo sapiens
  misc_RNA (1)...(19): siRNA sense strand
gcaagcaauuagagccuuu

SEQ ID NO: 740688 - RNA, 19 nt, Homo sapiens
  misc_RNA (1)...(19): siRNA sense strand
acagauauuucacagauga

SEQ ID NO: 740689 - RNA, 19 nt, Homo sapiens
  misc_RNA (1)...(19): siRNA sense strand
acacaucccuguuccaaau

SEQ ID NO: 740690 - RNA, 19 nt, Homo sapiens
  misc_RNA (1)...(19): siRNA sense strand
cagcaugucuucuacuuca

SEQ ID NO: 740691 - RNA, 19 nt, Homo sapiens
  misc_RNA (1)...(19): siRNA sense strand
agcaagaucuucccaauug

SEQ ID NO: 740692 - RNA, 19 nt, Homo sapiens
  misc_RNA (1)...(19): siRNA sense strand
gaccuggccucugugcuua

SEQ ID NO: 740693 - RNA, 19 nt, Homo sapiens
  misc_RNA (1)...(19): siRNA sense strand
ucgcugagcucaucggaaa

SEQ ID NO: 740694 - RNA, 19 nt, Homo sapiens
  misc_RNA (1)...(19): siRNA sense strand
gugcaaagauggacucuac

SEQ ID NO: 740695 - RNA, 19 nt, Homo sapiens
  misc_RNA (1)...(19): siRNA sense strand
ggagcugcaucacauaguu

SEQ ID NO: 740696 - RNA, 19 nt, Homo sapiens
  misc_RNA (1)...(19): siRNA sense strand
gcaccucccucacuuugug

SEQ ID NO: 740697 - RNA, 19 nt, Homo sapiens
  misc_RNA (1)...(19): siRNA sense strand
ugaaggagcuggaccuaag

SEQ ID NO: 740698 - RNA, 19 nt, Homo sapiens
  misc_RNA (1)...(19): siRNA sense strand
gggcauguguguagaaaca

SEQ ID NO: 740699 - RNA, 19 nt, Homo sapiens
  misc_RNA (1)...(19): siRNA sense strand
gaaaucagagaaagagaga

SEQ ID NO: 740700 - RNA, 19 nt, Homo sapiens
  misc_RNA (1)...(19): siRNA sense strand
gaccggaagugcaaagaug

SEQ ID NO: 740701 - RNA, 19 nt, Homo sapiens
  misc_RNA (1)...(19): siRNA sense strand
aaacagacauggagcucuu

SEQ ID NO: 740702 - RNA, 19 nt, Homo sapiens
  misc_RNA (1)...(19): siRNA sense strand
ucacacagcugcuacuucu

SEQ ID NO: 740703 - RNA, 19 nt, Homo sapiens
  misc_RNA (1)...(19): siRNA sense strand
ggagaaucgaggacauuua

SEQ ID NO: 740704 - RNA, 19 nt, Homo sapiens
  misc_RNA (1)...(19): siRNA sense strand
cagcacagaucaacaugga

SEQ ID NO: 740705 - RNA, 19 nt, Homo sapiens
  misc_RNA (1)...(19): siRNA sense strand
ggaugaaacgucaggaauu

SEQ ID NO: 740706 - RNA, 19 nt, Homo sapiens
  misc_RNA (1)...(19): siRNA sense strand
ugaaagacaagaaagauga

SEQ ID NO: 740707 - RNA, 19 nt, Homo sapiens
  misc_RNA (1)...(19): siRNA sense strand
gcaagugaaagacaagaaa

SEQ ID NO: 740708 - RNA, 19 nt, Homo sapiens
  misc_RNA (1)...(19): siRNA sense strand
gcaauuagagccuuuaggu

SEQ ID NO: 740709 - RNA, 19 nt, Homo sapiens
  misc_RNA (1)...(19): siRNA sense strand
gcuguggccucacgucuga

SEQ ID NO: 740710 - RNA, 19 nt, Homo sapiens
  misc_RNA (1)...(19): siRNA sense strand
agagagagauggagaacau

SEQ ID NO: 740711 - RNA, 19 nt, Homo sapiens
  misc_RNA (1)...(19): siRNA sense strand
ggaucaggcugcaagugaa

SEQ ID NO: 740712 - RNA, 19 nt, Homo sapiens
  misc_RNA (1)...(19): siRNA sense strand
gcaggaaggaauauuucua

SEQ ID NO: 740713 - RNA, 19 nt, Homo sapiens
  misc_RNA (1)...(19): siRNA sense strand
ugacaucgguggagguugu

SEQ ID NO: 740714 - RNA, 19 nt, Homo sapiens
  misc_RNA (1)...(19): siRNA sense strand
cgaguucacuucccuguag

SEQ ID NO: 740715 - RNA, 19 nt, Homo sapiens
  misc_RNA (1)...(19): siRNA sense strand
ggagagguaaacauucuaa

SEQ ID NO: 740716 - RNA, 19 nt, Homo sapiens
  misc_RNA (1)...(19): siRNA sense strand
aggaggagcugaaggaguu

SEQ ID NO: 740717 - RNA, 19 nt, Homo sapiens
  misc_RNA (1)...(19): siRNA sense strand
ccucugugguguugcuuua

SEQ ID NO: 740718 - RNA, 19 nt, Homo sapiens
  misc_RNA (1)...(19): siRNA sense strand
gcagcaauguccuaugucu

SEQ ID NO: 740719 - RNA, 19 nt, Homo sapiens
  misc_RNA (1)...(19): siRNA sense strand
gaacaaccuggaugacguu

SEQ ID NO: 740720 - RNA, 19 nt, Homo sapiens
  misc_RNA (1)...(19): siRNA sense strand
gagcuggaccuaaguggaa

SEQ ID NO: 740721 - RNA, 19 nt, Homo sapiens
  misc_RNA (1)...(19): siRNA sense strand
ccaauggccucuggaugaa

SEQ ID NO: 740722 - RNA, 19 nt, Homo sapiens
  misc_RNA (1)...(19): siRNA sense strand
gcugauagcccgagugaca

SEQ ID NO: 740723 - RNA, 19 nt, Homo sapiens
  misc_RNA (1)...(19): siRNA sense strand
gaaaccaggagaucucaug

SEQ ID NO: 740724 - RNA, 19 nt, Homo sapiens
  misc_RNA (1)...(19): siRNA sense strand
gagcaagaucuucccaauu

SEQ ID NO: 740725 - RNA, 19 nt, Homo sapiens
  misc_RNA (1)...(19): siRNA sense strand
ugagaucagagacuuauuu

SEQ ID NO: 740726 - RNA, 19 nt, Homo sapiens
  misc_RNA (1)...(19): siRNA sense strand
aaaagacgcuagaagcaua

SEQ ID NO: 740727 - RNA, 19 nt, Homo sapiens
  misc_RNA (1)...(19): siRNA sense strand
ggacacaucccuguuccaa

SEQ ID NO: 740728 - RNA, 19 nt, Homo sapiens
  misc_RNA (1)...(19): siRNA sense strand
ggagagaugaguaauagca

SEQ ID NO: 740729 - RNA, 19 nt, Homo sapiens
  misc_RNA (1)...(19): siRNA sense strand
aaccacacguuuccuauug

SEQ ID NO: 740730 - RNA, 19 nt, Homo sapiens
  misc_RNA (1)...(19): siRNA sense strand
gcauguguguagaaacaga

SEQ ID NO: 740731 - RNA, 19 nt, Homo sapiens
  misc_RNA (1)...(19): siRNA sense strand
agaaagagagagagagaaa

SEQ ID NO: 740732 - RNA, 19 nt, Homo sapiens
  misc_RNA (1)...(19): siRNA sense strand
guucuacguuggccacuug

SEQ ID NO: 740733 - RNA, 19 nt, Homo sapiens
  misc_RNA (1)...(19): siRNA sense strand
ggaaagcuccccagaggua

SEQ ID NO: 740734 - RNA, 19 nt, Homo sapiens
  misc_RNA (1)...(19): siRNA sense strand
cgggagagaugaguaauag

SEQ ID NO: 740735 - RNA, 19 nt, Homo sapiens
  misc_RNA (1)...(19): siRNA sense strand
ggaccuggccucugugcuu

SEQ ID NO: 740736 - RNA, 19 nt, Homo sapiens
  misc_RNA (1)...(19): siRNA sense strand
gggcaucaaccacacguuu

SEQ ID NO: 740737 - RNA, 19 nt, Homo sapiens
  misc_RNA (1)...(19): siRNA sense strand
gguaaacauucuaauugca

SEQ ID NO: 740738 - RNA, 19 nt, Homo sapiens
  misc_RNA (1)...(19): siRNA sense strand
uaauugagaucagagacuu

SEQ ID NO: 740739 - RNA, 19 nt, Homo sapiens
  misc_RNA (1)...(19): siRNA sense strand
cgaggacauuuaauugaga

SEQ ID NO: 740740 - RNA, 19 nt, Homo sapiens
  misc_RNA (1)...(19): siRNA sense strand
gcugcuacuucuacaaaga

SEQ ID NO: 740741 - RNA, 19 nt, Homo sapiens
  misc_RNA (1)...(19): siRNA sense strand
gagagagaaaucagagaaa

SEQ ID NO: 740742 - RNA, 19 nt, Homo sapiens
  misc_RNA (1)...(19): siRNA sense strand
gagaucagagacuuauuug

SEQ ID NO: 740743 - RNA, 19 nt, Homo sapiens
  misc_RNA (1)...(19): siRNA sense strand
ggagaucucaugccugcaa

SEQ ID NO: 740744 - RNA, 19 nt, Homo sapiens
  misc_RNA (1)...(19): siRNA sense strand
gggaucaggcugcaaguga

SEQ ID NO: 740745 - RNA, 19 nt, Homo sapiens
  misc_RNA (1)...(19): siRNA sense strand
caaauggcccacuuuaaag

SEQ ID NO: 740746 - RNA, 19 nt, Homo sapiens
  misc_RNA (1)...(19): siRNA sense strand
ggucucugcuuugugauga

SEQ ID NO: 740747 - RNA, 19 nt, Homo sapiens
  misc_RNA (1)...(19): siRNA sense strand
ggccugcacuugccugaug

SEQ ID NO: 740748 - RNA, 19 nt, Homo sapiens
  misc_RNA (1)...(19): siRNA sense strand
gaaaggcaagcaauuagag

SEQ ID NO: 740749 - RNA, 19 nt, Homo sapiens
  misc_RNA (1)...(19): siRNA sense strand
gagaagcuggccugauuau

SEQ ID NO: 740750 - RNA, 19 nt, Homo sapiens
  misc_RNA (1)...(19): siRNA sense strand
gcacuuucugcauuaaauu

SEQ ID NO: 740751 - RNA, 19 nt, Homo sapiens
  misc_RNA (1)...(19): siRNA sense strand
acacagaaaucagagaaag

SEQ ID NO: 740752 - RNA, 19 nt, Homo sapiens
  misc_RNA (1)...(19): siRNA sense strand
gacccauccucaccucauu

SEQ ID NO: 740753 - RNA, 19 nt, Homo sapiens
  misc_RNA (1)...(19): siRNA sense strand
ccgcauagccguaccuuca

SEQ ID NO: 740754 - RNA, 19 nt, Homo sapiens
  misc_RNA (1)...(19): siRNA sense strand
gaacuggagcucugcuauc

SEQ ID NO: 740755 - RNA, 19 nt, Homo sapiens
  misc_RNA (1)...(19): siRNA sense strand
ugagcaagaucuucccaau

SEQ ID NO: 740756 - RNA, 19 nt, Homo sapiens
  misc_RNA (1)...(19): siRNA sense strand
cauccugccugcaaacuca

SEQ ID NO: 740757 - RNA, 19 nt, Homo sapiens
  misc_RNA (1)...(19): siRNA sense strand
aaacguuccugacacaagu

SEQ ID NO: 740758 - RNA, 19 nt, Homo sapiens
  misc_RNA (1)...(19): siRNA sense strand
uauugggccuguuaaguga

SEQ ID NO: 740759 - RNA, 19 nt, Homo sapiens
  misc_RNA (1)...(19): siRNA sense strand
caucaucuccaccuucuug

SEQ ID NO: 740760 - RNA, 19 nt, Homo sapiens
  misc_RNA (1)...(19): siRNA sense strand
acaacccucugucuacauu

SEQ ID NO: 740761 - RNA, 19 nt, Homo sapiens
  misc_RNA (1)...(19): siRNA sense strand
ccacaacccucugucuaca

SEQ ID NO: 740762 - RNA, 19 nt, Homo sapiens
  misc_RNA (1)...(19): siRNA sense strand
uuagguuggucaaaucaaa

SEQ ID NO: 740763 - RNA, 19 nt, Homo sapiens
  misc_RNA (1)...(19): siRNA sense strand
ccacagcucugcagaaccu

SEQ ID NO: 740764 - RNA, 19 nt, Homo sapiens
  misc_RNA (1)...(19): siRNA sense strand
ggaggagaaucgaggacau

SEQ ID NO: 740765 - RNA, 19 nt, Homo sapiens
  misc_RNA (1)...(19): siRNA sense strand
ggguggagcugcaucacau

SEQ ID NO: 740766 - RNA, 19 nt, Homo sapiens
  misc_RNA (1)...(19): siRNA sense strand
gaaggaauauuucuacaga

SEQ ID NO: 740767 - RNA, 19 nt, Homo sapiens
  misc_RNA (1)...(19): siRNA sense strand
gaugaaacgucaggaauuu

SEQ ID NO: 740768 - RNA, 19 nt, Homo sapiens
  misc_RNA (1)...(19): siRNA sense strand
ggacgccgcuggagagaaa

SEQ ID NO: 740769 - RNA, 19 nt, Homo sapiens
  misc_RNA (1)...(19): siRNA sense strand
gcuagaagcauauggaaua

SEQ ID NO: 740770 - RNA, 19 nt, Homo sapiens
  misc_RNA (1)...(19): siRNA sense strand
ggaauuuacuacacagaaa

SEQ ID NO: 740771 - RNA, 19 nt, Homo sapiens
  misc_RNA (1)...(19): siRNA sense strand
caacacgggucucugcuuu

SEQ ID NO: 740772 - RNA, 19 nt, Homo sapiens
  misc_RNA (1)...(19): siRNA sense strand
ccaaauggcccacuuuaaa

SEQ ID NO: 740773 - RNA, 19 nt, Homo sapiens
  misc_RNA (1)...(19): siRNA sense strand
gaugaaaggcaagcaauua

SEQ ID NO: 740774 - RNA, 19 nt, Homo sapiens
  misc_RNA (1)...(19): siRNA sense strand
gagaaucgaggacauuuaa

SEQ ID NO: 740775 - RNA, 19 nt, Homo sapiens
  misc_RNA (1)...(19): siRNA sense strand
aagagaagcuggccugauu

SEQ ID NO: 740776 - RNA, 19 nt, Homo sapiens
  misc_RNA (1)...(19): siRNA sense strand
gagguaaacauucuaauug

SEQ ID NO: 740777 - RNA, 19 nt, Homo sapiens
  misc_RNA (1)...(19): siRNA sense strand
gaaaugggcauguguguag

SEQ ID NO: 740778 - RNA, 19 nt, Homo sapiens
  misc_RNA (1)...(19): siRNA sense strand
ccaagaaccucgcauaguc

SEQ ID NO: 740779 - RNA, 19 nt, Homo sapiens
  misc_RNA (1)...(19): siRNA sense strand
gaagcuggccugauuaugu

SEQ ID NO: 740780 - RNA, 19 nt, Homo sapiens
  misc_RNA (1)...(19): siRNA sense strand
uggaauacauggccuguuu

SEQ ID NO: 740781 - RNA, 19 nt, Homo sapiens
  misc_RNA (1)...(19): siRNA sense strand
ugagguaguugacaaagaa

SEQ ID NO: 740782 - RNA, 19 nt, Homo sapiens
  misc_RNA (1)...(19): siRNA sense strand
ccaagugacugcuccauuc

SEQ ID NO: 740783 - RNA, 19 nt, Homo sapiens
  misc_RNA (1)...(19): siRNA sense strand
gagauugaauucugugugu

SEQ ID NO: 740784 - RNA, 19 nt, Homo sapiens
  misc_RNA (1)...(19): siRNA sense strand
gaaucgaggacauuuaauu

SEQ ID NO: 740785 - RNA, 19 nt, Homo sapiens
  misc_RNA (1)...(19): siRNA sense strand
gaaccucauuccuucuuug

SEQ ID NO: 740786 - RNA, 19 nt, Homo sapiens
  misc_RNA (1)...(19): siRNA sense strand
cuacagauauuucacagau

SEQ ID NO: 740787 - RNA, 19 nt, Homo sapiens
  misc_RNA (1)...(19): siRNA sense strand
gcaagcaauuagagccuuu

SEQ ID NO: 740788 - RNA, 19 nt, Homo sapiens
  misc_RNA (1)...(19): siRNA sense strand
acagauauuucacagauga

SEQ ID NO: 740789 - RNA, 19 nt, Homo sapiens
  misc_RNA (1)...(19): siRNA sense strand
acacaucccuguuccaaau

SEQ ID NO: 740790 - RNA, 19 nt, Homo sapiens
  misc_RNA (1)...(19): siRNA sense strand
cagcaugucuucuacuuca

SEQ ID NO: 740791 - RNA, 19 nt, Homo sapiens
  misc_RNA (1)...(19): siRNA sense strand
agcaagaucuucccaauug

SEQ ID NO: 740792 - RNA, 19 nt, Homo sapiens
  misc_RNA (1)...(19): siRNA sense strand
gaccuggccucugugcuua

SEQ ID NO: 740793 - RNA, 19 nt, Homo sapiens
  misc_RNA (1)...(19): siRNA sense strand
ucgcugagcucaucggaaa

SEQ ID NO: 740794 - RNA, 19 nt, Homo sapiens
  misc_RNA (1)...(19): siRNA sense strand
gugcaaagauggacucuac

SEQ ID NO: 740795 - RNA, 19 nt, Homo sapiens
  misc_RNA (1)...(19): siRNA sense strand
ggagcugcaucacauaguu

SEQ ID NO: 740796 - RNA, 19 nt, Homo sapiens
  misc_RNA (1)...(19): siRNA sense strand
gcaccucccucacuuugug

SEQ ID NO: 740797 - RNA, 19 nt, Homo sapiens
  misc_RNA (1)...(19): siRNA sense strand
ugaaggagcuggaccuaag

SEQ ID NO: 740798 - RNA, 19 nt, Homo sapiens
  misc_RNA (1)...(19): siRNA sense strand
gggcauguguguagaaaca

SEQ ID NO: 740799 - RNA, 19 nt, Homo sapiens
  misc_RNA (1)...(19): siRNA sense strand
gaaaucagagaaagagaga

SEQ ID NO: 740800 - RNA, 19 nt, Homo sapiens
  misc_RNA (1)...(19): siRNA sense strand
gaccggaagugcaaagaug

SEQ ID NO: 740801 - RNA, 19 nt, Homo sapiens
  misc_RNA (1)...(19): siRNA sense strand
aaacagacauggagcucuu

SEQ ID NO: 740802 - RNA, 19 nt, Homo sapiens
  misc_RNA (1)...(19): siRNA sense strand
ucacacagcugcuacuucu

SEQ ID NO: 740803 - RNA, 19 nt, Homo sapiens
  misc_RNA (1)...(19): siRNA sense strand
ggagaaucgaggacauuua

SEQ ID NO: 740804 - RNA, 19 nt, Homo sapiens
  misc_RNA (1)...(19): siRNA sense strand
cagcacagaucaacaugga

SEQ ID NO: 740805 - RNA, 19 nt, Homo sapiens
  misc_RNA (1)...(19): siRNA sense strand
ggaugaaacgucaggaauu

SEQ ID NO: 740806 - RNA, 19 nt, Homo sapiens
  misc_RNA (1)...(19): siRNA sense strand
ugaaagacaagaaagauga

SEQ ID NO: 740807 - RNA, 19 nt, Homo sapiens
  misc_RNA (1)...(19): siRNA sense strand
gcaagugaaagacaagaaa

SEQ ID NO: 740808 - RNA, 19 nt, Homo sapiens
  misc_RNA (1)...(19): siRNA sense strand
gcaauuagagccuuuaggu

SEQ ID NO: 740809 - RNA, 19 nt, Homo sapiens
  misc_RNA (1)...(19): siRNA sense strand
gcuguggccucacgucuga

SEQ ID NO: 740810 - RNA, 19 nt, Homo sapiens
  misc_RNA (1)...(19): siRNA sense strand
agagagagauggagaacau

SEQ ID NO: 740811 - RNA, 19 nt, Homo sapiens
  misc_RNA (1)...(19): siRNA sense strand
ggaucaggcugcaagugaa

SEQ ID NO: 740812 - RNA, 19 nt, Homo sapiens
  misc_RNA (1)...(19): siRNA sense strand
gcaggaaggaauauuucua

SEQ ID NO: 740813 - RNA, 19 nt, Homo sapiens
  misc_RNA (1)...(19): siRNA sense strand
ugacaucgguggagguugu

SEQ ID NO: 740814 - RNA, 19 nt, Homo sapiens
  misc_RNA (1)...(19): siRNA sense strand
cgaguucacuucccuguag

SEQ ID NO: 740815 - RNA, 19 nt, Homo sapiens
  misc_RNA (1)...(19): siRNA sense strand
ggagagguaaacauucuaa

SEQ ID NO: 740816 - RNA, 19 nt, Homo sapiens
  misc_RNA (1)...(19): siRNA sense strand
aggaggagcugaaggaguu

SEQ ID NO: 740817 - RNA, 19 nt, Homo sapiens
  misc_RNA (1)...(19): siRNA sense strand
ccucugugguguugcuuua

SEQ ID NO: 740818 - RNA, 19 nt, Homo sapiens
  misc_RNA (1)...(19): siRNA sense strand
gcagcaauguccuaugucu

SEQ ID NO: 740819 - RNA, 19 nt, Homo sapiens
  misc_RNA (1)...(19): siRNA sense strand
gaacaaccuggaugacguu

SEQ ID NO: 740820 - RNA, 19 nt, Homo sapiens
  misc_RNA (1)...(19): siRNA sense strand
gagcuggaccuaaguggaa

SEQ ID NO: 740821 - RNA, 19 nt, Homo sapiens
  misc_RNA (1)...(19): siRNA sense strand
ccaauggccucuggaugaa

SEQ ID NO: 740822 - RNA, 19 nt, Homo sapiens
  misc_RNA (1)...(19): siRNA sense strand
gcugauagcccgagugaca

SEQ ID NO: 740823 - RNA, 19 nt, Homo sapiens
  misc_RNA (1)...(19): siRNA sense strand
gaaaccaggagaucucaug

SEQ ID NO: 740824 - RNA, 19 nt, Homo sapiens
  misc_RNA (1)...(19): siRNA sense strand
gagcaagaucuucccaauu

SEQ ID NO: 740825 - RNA, 19 nt, Homo sapiens
  misc_RNA (1)...(19): siRNA sense strand
ugagaucagagacuuauuu

SEQ ID NO: 740826 - RNA, 19 nt, Homo sapiens
  misc_RNA (1)...(19): siRNA sense strand
aaaagacgcuagaagcaua

SEQ ID NO: 740827 - RNA, 19 nt, Homo sapiens
  misc_RNA (1)...(19): siRNA sense strand
ggacacaucccuguuccaa

SEQ ID NO: 740828 - RNA, 19 nt, Homo sapiens
  misc_RNA (1)...(19): siRNA sense strand
ggagagaugaguaauagca

SEQ ID NO: 740829 - RNA, 19 nt, Homo sapiens
  misc_RNA (1)...(19): siRNA sense strand
aaccacacguuuccuauug

SEQ ID NO: 740830 - RNA, 19 nt, Homo sapiens
  misc_RNA (1)...(19): siRNA sense strand
gcauguguguagaaacaga

SEQ ID NO: 740831 - RNA, 19 nt, Homo sapiens
  misc_RNA (1)...(19): siRNA sense strand
agaaagagagagagagaaa

SEQ ID NO: 740832 - RNA, 19 nt, Homo sapiens
  misc_RNA (1)...(19): siRNA sense strand
guucuacguuggccacuug

SEQ ID NO: 740833 - RNA, 19 nt, Homo sapiens
  misc_RNA (1)...(19): siRNA sense strand
ggaaagcuccccagaggua

SEQ ID NO: 740834 - RNA, 19 nt, Homo sapiens
  misc_RNA (1)...(19): siRNA sense strand
cgggagagaugaguaauag

SEQ ID NO: 740835 - RNA, 19 nt, Homo sapiens
  misc_RNA (1)...(19): siRNA sense strand
ggaccuggccucugugcuu

SEQ ID NO: 740836 - RNA, 19 nt, Homo sapiens
  misc_RNA (1)...(19): siRNA sense strand
gggcaucaaccacacguuu

SEQ ID NO: 740837 - RNA, 19 nt, Homo sapiens
  misc_RNA (1)...(19): siRNA sense strand
gguaaacauucuaauugca

SEQ ID NO: 740838 - RNA, 19 nt, Homo sapiens
  misc_RNA (1)...(19): siRNA sense strand
uaauugagaucagagacuu

SEQ ID NO: 740839 - RNA, 19 nt, Homo sapiens
  misc_RNA (1)...(19): siRNA sense strand
cgaggacauuuaauugaga

SEQ ID NO: 740840 - RNA, 19 nt, Homo sapiens
  misc_RNA (1)...(19): siRNA sense strand
gcugcuacuucuacaaaga

SEQ ID NO: 740841 - RNA, 19 nt, Homo sapiens
  misc_RNA (1)...(19): siRNA sense strand
gagagagaaaucagagaaa

SEQ ID NO: 740842 - RNA, 19 nt, Homo sapiens
  misc_RNA (1)...(19): siRNA sense strand
gagaucagagacuuauuug

SEQ ID NO: 740843 - RNA, 19 nt, Homo sapiens
  misc_RNA (1)...(19): siRNA sense strand
ggagaucucaugccugcaa

SEQ ID NO: 740844 - RNA, 19 nt, Homo sapiens
  misc_RNA (1)...(19): siRNA sense strand
gggaucaggcugcaaguga

SEQ ID NO: 740845 - RNA, 19 nt, Homo sapiens
  misc_RNA (1)...(19): siRNA sense strand
caaauggcccacuuuaaag

SEQ ID NO: 740846 - RNA, 19 nt, Homo sapiens
  misc_RNA (1)...(19): siRNA sense strand
ggucucugcuuugugauga

SEQ ID NO: 740847 - RNA, 19 nt, Homo sapiens
  misc_RNA (1)...(19): siRNA sense strand
ggccugcacuugccugaug

SEQ ID NO: 740848 - RNA, 19 nt, Homo sapiens
  misc_RNA (1)...(19): siRNA sense strand
gaaaggcaagcaauuagag

SEQ ID NO: 740849 - RNA, 19 nt, Homo sapiens
  misc_RNA (1)...(19): siRNA sense strand
gagaagcuggccugauuau

SEQ ID NO: 740850 - RNA, 19 nt, Homo sapiens
  misc_RNA (1)...(19): siRNA sense strand
gcacuuucugcauuaaauu

SEQ ID NO: 740851 - RNA, 19 nt, Homo sapiens
  misc_RNA (1)...(19): siRNA sense strand
acacagaaaucagagaaag

SEQ ID NO: 740852 - RNA, 19 nt, Homo sapiens
  misc_RNA (1)...(19): siRNA sense strand
gacccauccucaccucauu

SEQ ID NO: 740853 - RNA, 19 nt, Homo sapiens
  misc_RNA (1)...(19): siRNA sense strand
ccgcauagccguaccuuca

SEQ ID NO: 740854 - RNA, 19 nt, Homo sapiens
  misc_RNA (1)...(19): siRNA sense strand
gaacuggagcucugcuauc

SEQ ID NO: 740855 - RNA, 19 nt, Homo sapiens
  misc_RNA (1)...(19): siRNA sense strand
ugagcaagaucuucccaau

SEQ ID NO: 740856 - RNA, 19 nt, Homo sapiens
  misc_RNA (1)...(19): siRNA sense strand
cauccugccugcaaacuca

SEQ ID NO: 740857 - RNA, 19 nt, Homo sapiens
  misc_RNA (1)...(19): siRNA sense strand
aaacguuccugacacaagu

SEQ ID NO: 740858 - RNA, 19 nt, Homo sapiens
  misc_RNA (1)...(19): siRNA sense strand
uauugggccuguuaaguga

SEQ ID NO: 740859 - RNA, 19 nt, Homo sapiens
  misc_RNA (1)...(19): siRNA sense strand
caucaucuccaccuucuug

SEQ ID NO: 740860 - RNA, 19 nt, Homo sapiens
  misc_RNA (1)...(19): siRNA sense strand
acaacccucugucuacauu

SEQ ID NO: 740861 - RNA, 19 nt, Homo sapiens
  misc_RNA (1)...(19): siRNA sense strand
ccacaacccucugucuaca

SEQ ID NO: 740862 - RNA, 19 nt, Homo sapiens
  misc_RNA (1)...(19): siRNA sense strand
uuagguuggucaaaucaaa

SEQ ID NO: 740863 - RNA, 19 nt, Homo sapiens
  misc_RNA (1)...(19): siRNA sense strand
ccacagcucugcagaaccu

SEQ ID NO: 740864 - RNA, 19 nt, Homo sapiens
  misc_RNA (1)...(19): siRNA sense strand
ggaggagaaucgaggacau

SEQ ID NO: 740865 - RNA, 19 nt, Homo sapiens
  misc_RNA (1)...(19): siRNA sense strand
ggguggagcugcaucacau

SEQ ID NO: 740866 - RNA, 19 nt, Homo sapiens
  misc_RNA (1)...(19): siRNA sense strand
gcaccaagaucaaggagau

SEQ ID NO: 740867 - RNA, 19 nt, Homo sapiens
  misc_RNA (1)...(19): siRNA sense strand
cgccagaucugcgcuguua

SEQ ID NO: 740868 - RNA, 19 nt, Homo sapiens
  misc_RNA (1)...(19): siRNA sense strand
gaacgcaucaccaccauca

SEQ ID NO: 740869 - RNA, 19 nt, Homo sapiens
  misc_RNA (1)...(19): siRNA sense strand
caugauugcuuucaaacug

SEQ ID NO: 740870 - RNA, 19 nt, Homo sapiens
  misc_RNA (1)...(19): siRNA sense strand
ccucaucacugccugucua

SEQ ID NO: 740871 - RNA, 19 nt, Homo sapiens
  misc_RNA (1)...(19): siRNA sense strand
ggccuacacugccaagaug

SEQ ID NO: 740872 - RNA, 19 nt, Homo sapiens
  misc_RNA (1)...(19): siRNA sense strand
gcagcaagaucagcgagau

SEQ ID NO: 740873 - RNA, 19 nt, Homo sapiens
  misc_RNA (1)...(19): siRNA sense strand
caagauggcagcagcuaau

SEQ ID NO: 740874 - RNA, 19 nt, Homo sapiens
  misc_RNA (1)...(19): siRNA sense strand
gcaaaugguggaaaugucu

SEQ ID NO: 740875 - RNA, 19 nt, Homo sapiens
  misc_RNA (1)...(19): siRNA sense strand
caaacuggaugaggaccuu

SEQ ID NO: 740876 - RNA, 19 nt, Homo sapiens
  misc_RNA (1)...(19): siRNA sense strand
gacuacgggugcccaggua

SEQ ID NO: 740877 - RNA, 19 nt, Homo sapiens
  misc_RNA (1)...(19): siRNA sense strand
ccgagccucucccuaggua

SEQ ID NO: 740878 - RNA, 19 nt, Homo sapiens
  misc_RNA (1)...(19): siRNA sense strand
gcacacagaccagcucaca

SEQ ID NO: 740879 - RNA, 19 nt, Homo sapiens
  misc_RNA (1)...(19): siRNA sense strand
aggcugagcggcagaaauu

SEQ ID NO: 740880 - RNA, 19 nt, Homo sapiens
  misc_RNA (1)...(19): siRNA sense strand
ccaucucccucuccaacuu

SEQ ID NO: 740881 - RNA, 19 nt, Homo sapiens
  misc_RNA (1)...(19): siRNA sense strand
ggaaggcuggcaccaagau

SEQ ID NO: 740882 - RNA, 19 nt, Homo sapiens
  misc_RNA (1)...(19): siRNA sense strand
cuccaugauugcuuucaaa

SEQ ID NO: 740883 - RNA, 19 nt, Homo sapiens
  misc_RNA (1)...(19): siRNA sense strand
ccaagauggcagcagcuaa

SEQ ID NO: 740884 - RNA, 19 nt, Homo sapiens
  misc_RNA (1)...(19): siRNA sense strand
cagucuccaugauugcuuu

SEQ ID NO: 740885 - RNA, 19 nt, Homo sapiens
  misc_RNA (1)...(19): siRNA sense strand
ucaagcccaugcccuucuu

SEQ ID NO: 740886 - RNA, 19 nt, Homo sapiens
  misc_RNA (1)...(19): siRNA sense strand
gauuugauuggcuguguga

SEQ ID NO: 740887 - RNA, 19 nt, Homo sapiens
  misc_RNA (1)...(19): siRNA sense strand
ccagaucugcgcuguuauc

SEQ ID NO: 740888 - RNA, 19 nt, Homo sapiens
  misc_RNA (1)...(19): siRNA sense strand
gugcugcuccugcaaaugg

SEQ ID NO: 740889 - RNA, 19 nt, Homo sapiens
  misc_RNA (1)...(19): siRNA sense strand
gcagcuaaugggagcaaga

SEQ ID NO: 740890 - RNA, 19 nt, Homo sapiens
  misc_RNA (1)...(19): siRNA sense strand
caagaucgggaaccaagca

SEQ ID NO: 740891 - RNA, 19 nt, Homo sapiens
  misc_RNA (1)...(19): siRNA sense strand
caacuucaucggccucaag

SEQ ID NO: 740892 - RNA, 19 nt, Homo sapiens
  misc_RNA (1)...(19): siRNA sense strand
ccaugcccuucuuggcuuu

SEQ ID NO: 740893 - RNA, 19 nt, Homo sapiens
  misc_RNA (1)...(19): siRNA sense strand
gaccagcucacaggaguuc

SEQ ID NO: 740894 - RNA, 19 nt, Homo sapiens
  misc_RNA (1)...(19): siRNA sense strand
cagcuaaugggagcaagaa

SEQ ID NO: 740895 - RNA, 19 nt, Homo sapiens
  misc_RNA (1)...(19): siRNA sense strand
gcucacaggaguucuuggu

SEQ ID NO: 740896 - RNA, 19 nt, Homo sapiens
  misc_RNA (1)...(19): siRNA sense strand
gcagugcccggaucaccau

SEQ ID NO: 740897 - RNA, 19 nt, Homo sapiens
  misc_RNA (1)...(19): siRNA sense strand
ucagcgagauccggcagau

SEQ ID NO: 740898 - RNA, 19 nt, Homo sapiens
  misc_RNA (1)...(19): siRNA sense strand
caucacugccugucuagag

SEQ ID NO: 740899 - RNA, 19 nt, Homo sapiens
  misc_RNA (1)...(19): siRNA sense strand
gcaccaagaucaaggagau

SEQ ID NO: 740900 - RNA, 19 nt, Homo sapiens
  misc_RNA (1)...(19): siRNA sense strand
cgccagaucugcgcuguua

SEQ ID NO: 740901 - RNA, 19 nt, Homo sapiens
  misc_RNA (1)...(19): siRNA sense strand
gaacgcaucaccaccauca

SEQ ID NO: 740902 - RNA, 19 nt, Homo sapiens
  misc_RNA (1)...(19): siRNA sense strand
gaagaagggcgagacugua

SEQ ID NO: 740903 - RNA, 19 nt, Homo sapiens
  misc_RNA (1)...(19): siRNA sense strand
ggaagaagggcgagacugu

SEQ ID NO: 740904 - RNA, 19 nt, Homo sapiens
  misc_RNA (1)...(19): siRNA sense strand
caugauugcuuucaaacug

SEQ ID NO: 740905 - RNA, 19 nt, Homo sapiens
  misc_RNA (1)...(19): siRNA sense strand
ccucaucacugccugucua

SEQ ID NO: 740906 - RNA, 19 nt, Homo sapiens
  misc_RNA (1)...(19): siRNA sense strand
ggccuacacugccaagaug

SEQ ID NO: 740907 - RNA, 19 nt, Homo sapiens
  misc_RNA (1)...(19): siRNA sense strand
gcagcaagaucagcgagau

SEQ ID NO: 740908 - RNA, 19 nt, Homo sapiens
  misc_RNA (1)...(19): siRNA sense strand
caagauggcagcagcuaau

SEQ ID NO: 740909 - RNA, 19 nt, Homo sapiens
  misc_RNA (1)...(19): siRNA sense strand
ggaaggaagugggcagcau

SEQ ID NO: 740910 - RNA, 19 nt, Homo sapiens
  misc_RNA (1)...(19): siRNA sense strand
gcaaaugguggaaaugucu

SEQ ID NO: 740911 - RNA, 19 nt, Homo sapiens
  misc_RNA (1)...(19): siRNA sense strand
caaacuggaugaggaccuu

SEQ ID NO: 740912 - RNA, 19 nt, Homo sapiens
  misc_RNA (1)...(19): siRNA sense strand
gacuacgggugcccaggua

SEQ ID NO: 740913 - RNA, 19 nt, Homo sapiens
  misc_RNA (1)...(19): siRNA sense strand
ccgagccucucccuaggua

SEQ ID NO: 740914 - RNA, 19 nt, Homo sapiens
  misc_RNA (1)...(19): siRNA sense strand
gcacacagaccagcucaca

SEQ ID NO: 740915 - RNA, 19 nt, Homo sapiens
  misc_RNA (1)...(19): siRNA sense strand
aagaagggcgagacuguaa

SEQ ID NO: 740916 - RNA, 19 nt, Homo sapiens
  misc_RNA (1)...(19): siRNA sense strand
ggaagugggcagcaucauc

SEQ ID NO: 740917 - RNA, 19 nt, Homo sapiens
  misc_RNA (1)...(19): siRNA sense strand
aggcugagcggcagaaauu

SEQ ID NO: 740918 - RNA, 19 nt, Homo sapiens
  misc_RNA (1)...(19): siRNA sense strand
gaagggcgagacuguaaag

SEQ ID NO: 740919 - RNA, 19 nt, Homo sapiens
  misc_RNA (1)...(19): siRNA sense strand
ccaucucccucuccaacuu

SEQ ID NO: 740920 - RNA, 19 nt, Homo sapiens
  misc_RNA (1)...(19): siRNA sense strand
ggaaggcuggcaccaagau

SEQ ID NO: 740921 - RNA, 19 nt, Homo sapiens
  misc_RNA (1)...(19): siRNA sense strand
gcgagacuguaaagcgaau

SEQ ID NO: 740922 - RNA, 19 nt, Homo sapiens
  misc_RNA (1)...(19): siRNA sense strand
gcagcaucaucgggaagaa

SEQ ID NO: 740923 - RNA, 19 nt, Homo sapiens
  misc_RNA (1)...(19): siRNA sense strand
cuccaugauugcuuucaaa

SEQ ID NO: 740924 - RNA, 19 nt, Homo sapiens
  misc_RNA (1)...(19): siRNA sense strand
ccaagauggcagcagcuaa

SEQ ID NO: 740925 - RNA, 19 nt, Homo sapiens
  misc_RNA (1)...(19): siRNA sense strand
cagucuccaugauugcuuu

SEQ ID NO: 740926 - RNA, 19 nt, Homo sapiens
  misc_RNA (1)...(19): siRNA sense strand
ucaagcccaugcccuucuu

SEQ ID NO: 740927 - RNA, 19 nt, Homo sapiens
  misc_RNA (1)...(19): siRNA sense strand
gauuugauuggcuguguga

SEQ ID NO: 740928 - RNA, 19 nt, Homo sapiens
  misc_RNA (1)...(19): siRNA sense strand
ccagaucugcgcuguuauc

SEQ ID NO: 740929 - RNA, 19 nt, Homo sapiens
  misc_RNA (1)...(19): siRNA sense strand
gugcugcuccugcaaaugg

SEQ ID NO: 740930 - RNA, 19 nt, Homo sapiens
  misc_RNA (1)...(19): siRNA sense strand
gcagcuaaugggagcaaga

SEQ ID NO: 740931 - RNA, 19 nt, Homo sapiens
  misc_RNA (1)...(19): siRNA sense strand
caagaucgggaaccaagca

SEQ ID NO: 740932 - RNA, 19 nt, Homo sapiens
  misc_RNA (1)...(19): siRNA sense strand
caacuucaucggccucaag

SEQ ID NO: 740933 - RNA, 19 nt, Homo sapiens
  misc_RNA (1)...(19): siRNA sense strand
ccaugcccuucuuggcuuu

SEQ ID NO: 740934 - RNA, 19 nt, Homo sapiens
  misc_RNA (1)...(19): siRNA sense strand
gaccagcucacaggaguuc

SEQ ID NO: 740935 - RNA, 19 nt, Homo sapiens
  misc_RNA (1)...(19): siRNA sense strand
cagcuaaugggagcaagaa

SEQ ID NO: 740936 - RNA, 19 nt, Homo sapiens
  misc_RNA (1)...(19): siRNA sense strand
gcucacaggaguucuuggu

SEQ ID NO: 740937 - RNA, 19 nt, Homo sapiens
  misc_RNA (1)...(19): siRNA sense strand
gcagugcccggaucaccau

SEQ ID NO: 740938 - RNA, 19 nt, Homo sapiens
  misc_RNA (1)...(19): siRNA sense strand
ucagcgagauccggcagau

SEQ ID NO: 740939 - RNA, 19 nt, Homo sapiens
  misc_RNA (1)...(19): siRNA sense strand
caucacugccugucuagag

SEQ ID NO: 740940 - RNA, 19 nt, Homo sapiens
  misc_RNA (1)...(19): siRNA sense strand
gcaccaagaucaaggagau

SEQ ID NO: 740941 - RNA, 19 nt, Homo sapiens
  misc_RNA (1)...(19): siRNA sense strand
cgccagaucugcgcuguua

SEQ ID NO: 740942 - RNA, 19 nt, Homo sapiens
  misc_RNA (1)...(19): siRNA sense strand
gaacgcaucaccaccauca

SEQ ID NO: 740943 - RNA, 19 nt, Homo sapiens
  misc_RNA (1)...(19): siRNA sense strand
caugauugcuuucaaacug

SEQ ID NO: 740944 - RNA, 19 nt, Homo sapiens
  misc_RNA (1)...(19): siRNA sense strand
ccucaucacugccugucua

SEQ ID NO: 740945 - RNA, 19 nt, Homo sapiens
  misc_RNA (1)...(19): siRNA sense strand
ggccuacacugccaagaug

SEQ ID NO: 740946 - RNA, 19 nt, Homo sapiens
  misc_RNA (1)...(19): siRNA sense strand
gcagcaagaucagcgagau

SEQ ID NO: 740947 - RNA, 19 nt, Homo sapiens
  misc_RNA (1)...(19): siRNA sense strand
caagauggcagcagcuaau

SEQ ID NO: 740948 - RNA, 19 nt, Homo sapiens
  misc_RNA (1)...(19): siRNA sense strand
gcaaaugguggaaaugucu

SEQ ID NO: 740949 - RNA, 19 nt, Homo sapiens
  misc_RNA (1)...(19): siRNA sense strand
caaacuggaugaggaccuu

SEQ ID NO: 740950 - RNA, 19 nt, Homo sapiens
  misc_RNA (1)...(19): siRNA sense strand
gacuacgggugcccaggua

SEQ ID NO: 740951 - RNA, 19 nt, Homo sapiens
  misc_RNA (1)...(19): siRNA sense strand
ccgagccucucccuaggua

SEQ ID NO: 740952 - RNA, 19 nt, Homo sapiens
  misc_RNA (1)...(19): siRNA sense strand
gcacacagaccagcucaca

SEQ ID NO: 740953 - RNA, 19 nt, Homo sapiens
  misc_RNA (1)...(19): siRNA sense strand
aggcugagcggcagaaauu

SEQ ID NO: 740954 - RNA, 19 nt, Homo sapiens
  misc_RNA (1)...(19): siRNA sense strand
ccaucucccucuccaacuu

SEQ ID NO: 740955 - RNA, 19 nt, Homo sapiens
  misc_RNA (1)...(19): siRNA sense strand
ggaaggcuggcaccaagau

SEQ ID NO: 740956 - RNA, 19 nt, Homo sapiens
  misc_RNA (1)...(19): siRNA sense strand
cuccaugauugcuuucaaa

SEQ ID NO: 740957 - RNA, 19 nt, Homo sapiens
  misc_RNA (1)...(19): siRNA sense strand
ccaagauggcagcagcuaa

SEQ ID NO: 740958 - RNA, 19 nt, Homo sapiens
  misc_RNA (1)...(19): siRNA sense strand
cagucuccaugauugcuuu

SEQ ID NO: 740959 - RNA, 19 nt, Homo sapiens
  misc_RNA (1)...(19): siRNA sense strand
ucaagcccaugcccuucuu

SEQ ID NO: 740960 - RNA, 19 nt, Homo sapiens
  misc_RNA (1)...(19): siRNA sense strand
gauuugauuggcuguguga

SEQ ID NO: 740961 - RNA, 19 nt, Homo sapiens
  misc_RNA (1)...(19): siRNA sense strand
ccagaucugcgcuguuauc

SEQ ID NO: 740962 - RNA, 19 nt, Homo sapiens
  misc_RNA (1)...(19): siRNA sense strand
gugcugcuccugcaaaugg

SEQ ID NO: 740963 - RNA, 19 nt, Homo sapiens
  misc_RNA (1)...(19): siRNA sense strand
gcagcuaaugggagcaaga

SEQ ID NO: 740964 - RNA, 19 nt, Homo sapiens
  misc_RNA (1)...(19): siRNA sense strand
caagaucgggaaccaagca

SEQ ID NO: 740965 - RNA, 19 nt, Homo sapiens
  misc_RNA (1)...(19): siRNA sense strand
caacuucaucggccucaag

SEQ ID NO: 740966 - RNA, 19 nt, Homo sapiens
  misc_RNA (1)...(19): siRNA sense strand
ccaugcccuucuuggcuuu

SEQ ID NO: 740967 - RNA, 19 nt, Homo sapiens
  misc_RNA (1)...(19): siRNA sense strand
gaccagcucacaggaguuc

SEQ ID NO: 740968 - RNA, 19 nt, Homo sapiens
  misc_RNA (1)...(19): siRNA sense strand
cagcuaaugggagcaagaa

SEQ ID NO: 740969 - RNA, 19 nt, Homo sapiens
  misc_RNA (1)...(19): siRNA sense strand
gcucacaggaguucuuggu

SEQ ID NO: 740970 - RNA, 19 nt, Homo sapiens
  misc_RNA (1)...(19): siRNA sense strand
gcagugcccggaucaccau

SEQ ID NO: 740971 - RNA, 19 nt, Homo sapiens
  misc_RNA (1)...(19): siRNA sense strand
ucagcgagauccggcagau

SEQ ID NO: 740972 - RNA, 19 nt, Homo sapiens
  misc_RNA (1)...(19): siRNA sense strand
caucacugccugucuagag

SEQ ID NO: 740973 - RNA, 19 nt, Homo sapiens
  misc_RNA (1)...(19): siRNA sense strand
gcaccaagaucaaggagau

SEQ ID NO: 740974 - RNA, 19 nt, Homo sapiens
  misc_RNA (1)...(19): siRNA sense strand
cgccagaucugcgcuguua

SEQ ID NO: 740975 - RNA, 19 nt, Homo sapiens
  misc_RNA (1)...(19): siRNA sense strand
gaacgcaucaccaccauca

SEQ ID NO: 740976 - RNA, 19 nt, Homo sapiens
  misc_RNA (1)...(19): siRNA sense strand
gaagaagggcgagacugua

SEQ ID NO: 740977 - RNA, 19 nt, Homo sapiens
  misc_RNA (1)...(19): siRNA sense strand
ggaagaagggcgagacugu

SEQ ID NO: 740978 - RNA, 19 nt, Homo sapiens
  misc_RNA (1)...(19): siRNA sense strand
caugauugcuuucaaacug

SEQ ID NO: 740979 - RNA, 19 nt, Homo sapiens
  misc_RNA (1)...(19): siRNA sense strand
ccucaucacugccugucua

SEQ ID NO: 740980 - RNA, 19 nt, Homo sapiens
  misc_RNA (1)...(19): siRNA sense strand
ggccuacacugccaagaug

SEQ ID NO: 740981 - RNA, 19 nt, Homo sapiens
  misc_RNA (1)...(19): siRNA sense strand
gcagcaagaucagcgagau

SEQ ID NO: 740982 - RNA, 19 nt, Homo sapiens
  misc_RNA (1)...(19): siRNA sense strand
caagauggcagcagcuaau

SEQ ID NO: 740983 - RNA, 19 nt, Homo sapiens
  misc_RNA (1)...(19): siRNA sense strand
ggaaggaagugggcagcau

SEQ ID NO: 740984 - RNA, 19 nt, Homo sapiens
  misc_RNA (1)...(19): siRNA sense strand
gcaaaugguggaaaugucu

SEQ ID NO: 740985 - RNA, 19 nt, Homo sapiens
  misc_RNA (1)...(19): siRNA sense strand
caaacuggaugaggaccuu

SEQ ID NO: 740986 - RNA, 19 nt, Homo sapiens
  misc_RNA (1)...(19): siRNA sense strand
gacuacgggugcccaggua

SEQ ID NO: 740987 - RNA, 19 nt, Homo sapiens
  misc_RNA (1)...(19): siRNA sense strand
ccgagccucucccuaggua

SEQ ID NO: 740988 - RNA, 19 nt, Homo sapiens
  misc_RNA (1)...(19): siRNA sense strand
gcacacagaccagcucaca

SEQ ID NO: 740989 - RNA, 19 nt, Homo sapiens
  misc_RNA (1)...(19): siRNA sense strand
aagaagggcgagacuguaa

SEQ ID NO: 740990 - RNA, 19 nt, Homo sapiens
  misc_RNA (1)...(19): siRNA sense strand
ggaagugggcagcaucauc

SEQ ID NO: 740991 - RNA, 19 nt, Homo sapiens
  misc_RNA (1)...(19): siRNA sense strand
aggcugagcggcagaaauu

SEQ ID NO: 740992 - RNA, 19 nt, Homo sapiens
  misc_RNA (1)...(19): siRNA sense strand
gaagggcgagacuguaaag

SEQ ID NO: 740993 - RNA, 19 nt, Homo sapiens
  misc_RNA (1)...(19): siRNA sense strand
ccaucucccucuccaacuu

SEQ ID NO: 740994 - RNA, 19 nt, Homo sapiens
  misc_RNA (1)...(19): siRNA sense strand
ggaaggcuggcaccaagau

SEQ ID NO: 740995 - RNA, 19 nt, Homo sapiens
  misc_RNA (1)...(19): siRNA sense strand
gcgagacuguaaagcgaau

SEQ ID NO: 740996 - RNA, 19 nt, Homo sapiens
  misc_RNA (1)...(19): siRNA sense strand
gcagcaucaucgggaagaa

SEQ ID NO: 740997 - RNA, 19 nt, Homo sapiens
  misc_RNA (1)...(19): siRNA sense strand
cuccaugauugcuuucaaa

SEQ ID NO: 740998 - RNA, 19 nt, Homo sapiens
  misc_RNA (1)...(19): siRNA sense strand
ccaagauggcagcagcuaa

SEQ ID NO: 740999 - RNA, 19 nt, Homo sapiens
  misc_RNA (1)...(19): siRNA sense strand
cagucuccaugauugcuuu

SEQ ID NO: 741000 - RNA, 19 nt, Homo sapiens
  misc_RNA (1)...(19): siRNA sense strand
ucaagcccaugcccuucuu

SEQ ID NO: 741001 - RNA, 19 nt, Homo sapiens
  misc_RNA (1)...(19): siRNA sense strand
gauuugauuggcuguguga

SEQ ID NO: 741002 - RNA, 19 nt, Homo sapiens
  misc_RNA (1)...(19): siRNA sense strand
ccagaucugcgcuguuauc

SEQ ID NO: 741003 - RNA, 19 nt, Homo sapiens
  misc_RNA (1)...(19): siRNA sense strand
gugcugcuccugcaaaugg

SEQ ID NO: 741004 - RNA, 19 nt, Homo sapiens
  misc_RNA (1)...(19): siRNA sense strand
gcagcuaaugggagcaaga

SEQ ID NO: 741005 - RNA, 19 nt, Homo sapiens
  misc_RNA (1)...(19): siRNA sense strand
caagaucgggaaccaagca

SEQ ID NO: 741006 - RNA, 19 nt, Homo sapiens
  misc_RNA (1)...(19): siRNA sense strand
caacuucaucggccucaag

SEQ ID NO: 741007 - RNA, 19 nt, Homo sapiens
  misc_RNA (1)...(19): siRNA sense strand
ccaugcccuucuuggcuuu

SEQ ID NO: 741008 - RNA, 19 nt, Homo sapiens
  misc_RNA (1)...(19): siRNA sense strand
gaccagcucacaggaguuc

SEQ ID NO: 741009 - RNA, 19 nt, Homo sapiens
  misc_RNA (1)...(19): siRNA sense strand
cagcuaaugggagcaagaa

SEQ ID NO: 741010 - RNA, 19 nt, Homo sapiens
  misc_RNA (1)...(19): siRNA sense strand
gcucacaggaguucuuggu

SEQ ID NO: 741011 - RNA, 19 nt, Homo sapiens
  misc_RNA (1)...(19): siRNA sense strand
gcagugcccggaucaccau

SEQ ID NO: 741012 - RNA, 19 nt, Homo sapiens
  misc_RNA (1)...(19): siRNA sense strand
ucagcgagauccggcagau

SEQ ID NO: 741013 - RNA, 19 nt, Homo sapiens
  misc_RNA (1)...(19): siRNA sense strand
caucacugccugucuagag

SEQ ID NO: 741014 - RNA, 19 nt, Homo sapiens
  misc_RNA (1)...(19): siRNA sense strand
gcaccaagaucaaggagau

SEQ ID NO: 741015 - RNA, 19 nt, Homo sapiens
  misc_RNA (1)...(19): siRNA sense strand
cgccagaucugcgcuguua

SEQ ID NO: 741016 - RNA, 19 nt, Homo sapiens
  misc_RNA (1)...(19): siRNA sense strand
gaacgcaucaccaccauca

SEQ ID NO: 741017 - RNA, 19 nt, Homo sapiens
  misc_RNA (1)...(19): siRNA sense strand
caugauugcuuucaaacug

SEQ ID NO: 741018 - RNA, 19 nt, Homo sapiens
  misc_RNA (1)...(19): siRNA sense strand
ccucaucacugccugucua

SEQ ID NO: 741019 - RNA, 19 nt, Homo sapiens
  misc_RNA (1)...(19): siRNA sense strand
ggccuacacugccaagaug

SEQ ID NO: 741020 - RNA, 19 nt, Homo sapiens
  misc_RNA (1)...(19): siRNA sense strand
gcagcaagaucagcgagau

SEQ ID NO: 741021 - RNA, 19 nt, Homo sapiens
  misc_RNA (1)...(19): siRNA sense strand
caagauggcagcagcuaau

SEQ ID NO: 741022 - RNA, 19 nt, Homo sapiens
  misc_RNA (1)...(19): siRNA sense strand
gcaaaugguggaaaugucu

SEQ ID NO: 741023 - RNA, 19 nt, Homo sapiens
  misc_RNA (1)...(19): siRNA sense strand
caaacuggaugaggaccuu

SEQ ID NO: 741024 - RNA, 19 nt, Homo sapiens
  misc_RNA (1)...(19): siRNA sense strand
gacuacgggugcccaggua

SEQ ID NO: 741025 - RNA, 19 nt, Homo sapiens
  misc_RNA (1)...(19): siRNA sense strand
ccgagccucucccuaggua

SEQ ID NO: 741026 - RNA, 19 nt, Homo sapiens
  misc_RNA (1)...(19): siRNA sense strand
gcacacagaccagcucaca

SEQ ID NO: 741027 - RNA, 19 nt, Homo sapiens
  misc_RNA (1)...(19): siRNA sense strand
aggcugagcggcagaaauu

SEQ ID NO: 741028 - RNA, 19 nt, Homo sapiens
  misc_RNA (1)...(19): siRNA sense strand
ccaucucccucuccaacuu

SEQ ID NO: 741029 - RNA, 19 nt, Homo sapiens
  misc_RNA (1)...(19): siRNA sense strand
ggaaggcuggcaccaagau

SEQ ID NO: 741030 - RNA, 19 nt, Homo sapiens
  misc_RNA (1)...(19): siRNA sense strand
cuccaugauugcuuucaaa

SEQ ID NO: 741031 - RNA, 19 nt, Homo sapiens
  misc_RNA (1)...(19): siRNA sense strand
ccaagauggcagcagcuaa

SEQ ID NO: 741032 - RNA, 19 nt, Homo sapiens
  misc_RNA (1)...(19): siRNA sense strand
cagucuccaugauugcuuu

SEQ ID NO: 741033 - RNA, 19 nt, Homo sapiens
  misc_RNA (1)...(19): siRNA sense strand
ucaagcccaugcccuucuu

SEQ ID NO: 741034 - RNA, 19 nt, Homo sapiens
  misc_RNA (1)...(19): siRNA sense strand
gauuugauuggcuguguga

SEQ ID NO: 741035 - RNA, 19 nt, Homo sapiens
  misc_RNA (1)...(19): siRNA sense strand
ccagaucugcgcuguuauc

SEQ ID NO: 741036 - RNA, 19 nt, Homo sapiens
  misc_RNA (1)...(19): siRNA sense strand
gugcugcuccugcaaaugg

SEQ ID NO: 741037 - RNA, 19 nt, Homo sapiens
  misc_RNA (1)...(19): siRNA sense strand
gcagcuaaugggagcaaga

SEQ ID NO: 741038 - RNA, 19 nt, Homo sapiens
  misc_RNA (1)...(19): siRNA sense strand
caagaucgggaaccaagca

SEQ ID NO: 741039 - RNA, 19 nt, Homo sapiens
  misc_RNA (1)...(19): siRNA sense strand
caacuucaucggccucaag

SEQ ID NO: 741040 - RNA, 19 nt, Homo sapiens
  misc_RNA (1)...(19): siRNA sense strand
ccaugcccuucuuggcuuu

SEQ ID NO: 741041 - RNA, 19 nt, Homo sapiens
  misc_RNA (1)...(19): siRNA sense strand
gaccagcucacaggaguuc

SEQ ID NO: 741042 - RNA, 19 nt, Homo sapiens
  misc_RNA (1)...(19): siRNA sense strand
cagcuaaugggagcaagaa

SEQ ID NO: 741043 - RNA, 19 nt, Homo sapiens
  misc_RNA (1)...(19): siRNA sense strand
gcucacaggaguucuuggu

SEQ ID NO: 741044 - RNA, 19 nt, Homo sapiens
  misc_RNA (1)...(19): siRNA sense strand
gcagugcccggaucaccau

SEQ ID NO: 741045 - RNA, 19 nt, Homo sapiens
  misc_RNA (1)...(19): siRNA sense strand
ucagcgagauccggcagau

SEQ ID NO: 741046 - RNA, 19 nt, Homo sapiens
  misc_RNA (1)...(19): siRNA sense strand
caucacugccugucuagag

SEQ ID NO: 741047 - RNA, 19 nt, Homo sapiens
  misc_RNA (1)...(19): siRNA sense strand
gcaccaagaucaaggagau

SEQ ID NO: 741048 - RNA, 19 nt, Homo sapiens
  misc_RNA (1)...(19): siRNA sense strand
cgccagaucugcgcuguua

SEQ ID NO: 741049 - RNA, 19 nt, Homo sapiens
  misc_RNA (1)...(19): siRNA sense strand
gaacgcaucaccaccauca

SEQ ID NO: 741050 - RNA, 19 nt, Homo sapiens
  misc_RNA (1)...(19): siRNA sense strand
gaagaagggcgagacugua

SEQ ID NO: 741051 - RNA, 19 nt, Homo sapiens
  misc_RNA (1)...(19): siRNA sense strand
ggaagaagggcgagacugu

SEQ ID NO: 741052 - RNA, 19 nt, Homo sapiens
  misc_RNA (1)...(19): siRNA sense strand
caugauugcuuucaaacug

SEQ ID NO: 741053 - RNA, 19 nt, Homo sapiens
  misc_RNA (1)...(19): siRNA sense strand
ccucaucacugccugucua

SEQ ID NO: 741054 - RNA, 19 nt, Homo sapiens
  misc_RNA (1)...(19): siRNA sense strand
ggccuacacugccaagaug

SEQ ID NO: 741055 - RNA, 19 nt, Homo sapiens
  misc_RNA (1)...(19): siRNA sense strand
gcagcaagaucagcgagau

SEQ ID NO: 741056 - RNA, 19 nt, Homo sapiens
  misc_RNA (1)...(19): siRNA sense strand
caagauggcagcagcuaau

SEQ ID NO: 741057 - RNA, 19 nt, Homo sapiens
  misc_RNA (1)...(19): siRNA sense strand
ggaaggaagugggcagcau

SEQ ID NO: 741058 - RNA, 19 nt, Homo sapiens
  misc_RNA (1)...(19): siRNA sense strand
gcaaaugguggaaaugucu

SEQ ID NO: 741059 - RNA, 19 nt, Homo sapiens
  misc_RNA (1)...(19): siRNA sense strand
caaacuggaugaggaccuu

SEQ ID NO: 741060 - RNA, 19 nt, Homo sapiens
  misc_RNA (1)...(19): siRNA sense strand
gacuacgggugcccaggua

SEQ ID NO: 741061 - RNA, 19 nt, Homo sapiens
  misc_RNA (1)...(19): siRNA sense strand
ccgagccucucccuaggua

SEQ ID NO: 741062 - RNA, 19 nt, Homo sapiens
  misc_RNA (1)...(19): siRNA sense strand
gcacacagaccagcucaca

SEQ ID NO: 741063 - RNA, 19 nt, Homo sapiens
  misc_RNA (1)...(19): siRNA sense strand
aagaagggcgagacuguaa

SEQ ID NO: 741064 - RNA, 19 nt, Homo sapiens
  misc_RNA (1)...(19): siRNA sense strand
ggaagugggcagcaucauc

SEQ ID NO: 741065 - RNA, 19 nt, Homo sapiens
  misc_RNA (1)...(19): siRNA sense strand
aggcugagcggcagaaauu

SEQ ID NO: 741066 - RNA, 19 nt, Homo sapiens
  misc_RNA (1)...(19): siRNA sense strand
gaagggcgagacuguaaag

SEQ ID NO: 741067 - RNA, 19 nt, Homo sapiens
  misc_RNA (1)...(19): siRNA sense strand
ccaucucccucuccaacuu

SEQ ID NO: 741068 - RNA, 19 nt, Homo sapiens
  misc_RNA (1)...(19): siRNA sense strand
ggaaggcuggcaccaagau

SEQ ID NO: 741069 - RNA, 19 nt, Homo sapiens
  misc_RNA (1)...(19): siRNA sense strand
gcgagacuguaaagcgaau

SEQ ID NO: 741070 - RNA, 19 nt, Homo sapiens
  misc_RNA (1)...(19): siRNA sense strand
gcagcaucaucgggaagaa

SEQ ID NO: 741071 - RNA, 19 nt, Homo sapiens
  misc_RNA (1)...(19): siRNA sense strand
cuccaugauugcuuucaaa

SEQ ID NO: 741072 - RNA, 19 nt, Homo sapiens
  misc_RNA (1)...(19): siRNA sense strand
ccaagauggcagcagcuaa

SEQ ID NO: 741073 - RNA, 19 nt, Homo sapiens
  misc_RNA (1)...(19): siRNA sense strand
cagucuccaugauugcuuu

SEQ ID NO: 741074 - RNA, 19 nt, Homo sapiens
  misc_RNA (1)...(19): siRNA sense strand
ucaagcccaugcccuucuu

SEQ ID NO: 741075 - RNA, 19 nt, Homo sapiens
  misc_RNA (1)...(19): siRNA sense strand
gauuugauuggcuguguga

SEQ ID NO: 741076 - RNA, 19 nt, Homo sapiens
  misc_RNA (1)...(19): siRNA sense strand
ccagaucugcgcuguuauc

SEQ ID NO: 741077 - RNA, 19 nt, Homo sapiens
  misc_RNA (1)...(19): siRNA sense strand
gugcugcuccugcaaaugg

SEQ ID NO: 741078 - RNA, 19 nt, Homo sapiens
  misc_RNA (1)...(19): siRNA sense strand
gcagcuaaugggagcaaga

SEQ ID NO: 741079 - RNA, 19 nt, Homo sapiens
  misc_RNA (1)...(19): siRNA sense strand
caagaucgggaaccaagca

SEQ ID NO: 741080 - RNA, 19 nt, Homo sapiens
  misc_RNA (1)...(19): siRNA sense strand
caacuucaucggccucaag

SEQ ID NO: 741081 - RNA, 19 nt, Homo sapiens
  misc_RNA (1)...(19): siRNA sense strand
ccaugcccuucuuggcuuu

SEQ ID NO: 741082 - RNA, 19 nt, Homo sapiens
  misc_RNA (1)...(19): siRNA sense strand
gaccagcucacaggaguuc

SEQ ID NO: 741083 - RNA, 19 nt, Homo sapiens
  misc_RNA (1)...(19): siRNA sense strand
cagcuaaugggagcaagaa

SEQ ID NO: 741084 - RNA, 19 nt, Homo sapiens
  misc_RNA (1)...(19): siRNA sense strand
gcucacaggaguucuuggu

SEQ ID NO: 741085 - RNA, 19 nt, Homo sapiens
  misc_RNA (1)...(19): siRNA sense strand
gcagugcccggaucaccau

SEQ ID NO: 741086 - RNA, 19 nt, Homo sapiens
  misc_RNA (1)...(19): siRNA sense strand
ucagcgagauccggcagau

SEQ ID NO: 741087 - RNA, 19 nt, Homo sapiens
  misc_RNA (1)...(19): siRNA sense strand
caucacugccugucuagag

SEQ ID NO: 741088 - RNA, 19 nt, Homo sapiens
  misc_RNA (1)...(19): siRNA sense strand
gcaccaagaucaaggagau

SEQ ID NO: 741089 - RNA, 19 nt, Homo sapiens
  misc_RNA (1)...(19): siRNA sense strand
cgccagaucugcgcuguua

SEQ ID NO: 741090 - RNA, 19 nt, Homo sapiens
  misc_RNA (1)...(19): siRNA sense strand
gaacgcaucaccaccauca

SEQ ID NO: 741091 - RNA, 19 nt, Homo sapiens
  misc_RNA (1)...(19): siRNA sense strand
caugauugcuuucaaacug

SEQ ID NO: 741092 - RNA, 19 nt, Homo sapiens
  misc_RNA (1)...(19): siRNA sense strand
ccucaucacugccugucua

SEQ ID NO: 741093 - RNA, 19 nt, Homo sapiens
  misc_RNA (1)...(19): siRNA sense strand
ggccuacacugccaagaug

SEQ ID NO: 741094 - RNA, 19 nt, Homo sapiens
  misc_RNA (1)...(19): siRNA sense strand
gcagcaagaucagcgagau

SEQ ID NO: 741095 - RNA, 19 nt, Homo sapiens
  misc_RNA (1)...(19): siRNA sense strand
caagauggcagcagcuaau

SEQ ID NO: 741096 - RNA, 19 nt, Homo sapiens
  misc_RNA (1)...(19): siRNA sense strand
gcaaaugguggaaaugucu

SEQ ID NO: 741097 - RNA, 19 nt, Homo sapiens
  misc_RNA (1)...(19): siRNA sense strand
caaacuggaugaggaccuu

SEQ ID NO: 741098 - RNA, 19 nt, Homo sapiens
  misc_RNA (1)...(19): siRNA sense strand
gacuacgggugcccaggua

SEQ ID NO: 741099 - RNA, 19 nt, Homo sapiens
  misc_RNA (1)...(19): siRNA sense strand
ccgagccucucccuaggua

SEQ ID NO: 741100 - RNA, 19 nt, Homo sapiens
  misc_RNA (1)...(19): siRNA sense strand
gcacacagaccagcucaca

SEQ ID NO: 741101 - RNA, 19 nt, Homo sapiens
  misc_RNA (1)...(19): siRNA sense strand
aggcugagcggcagaaauu

SEQ ID NO: 741102 - RNA, 19 nt, Homo sapiens
  misc_RNA (1)...(19): siRNA sense strand
ccaucucccucuccaacuu

SEQ ID NO: 741103 - RNA, 19 nt, Homo sapiens
  misc_RNA (1)...(19): siRNA sense strand
ggaaggcuggcaccaagau

SEQ ID NO: 741104 - RNA, 19 nt, Homo sapiens
  misc_RNA (1)...(19): siRNA sense strand
cuccaugauugcuuucaaa

SEQ ID NO: 741105 - RNA, 19 nt, Homo sapiens
  misc_RNA (1)...(19): siRNA sense strand
ccaagauggcagcagcuaa

SEQ ID NO: 741106 - RNA, 19 nt, Homo sapiens
  misc_RNA (1)...(19): siRNA sense strand
cagucuccaugauugcuuu

SEQ ID NO: 741107 - RNA, 19 nt, Homo sapiens
  misc_RNA (1)...(19): siRNA sense strand
ucaagcccaugcccuucuu

SEQ ID NO: 741108 - RNA, 19 nt, Homo sapiens
  misc_RNA (1)...(19): siRNA sense strand
gauuugauuggcuguguga

SEQ ID NO: 741109 - RNA, 19 nt, Homo sapiens
  misc_RNA (1)...(19): siRNA sense strand
ccagaucugcgcuguuauc

SEQ ID NO: 741110 - RNA, 19 nt, Homo sapiens
  misc_RNA (1)...(19): siRNA sense strand
gugcugcuccugcaaaugg

SEQ ID NO: 741111 - RNA, 19 nt, Homo sapiens
  misc_RNA (1)...(19): siRNA sense strand
gcagcuaaugggagcaaga

SEQ ID NO: 741112 - RNA, 19 nt, Homo sapiens
  misc_RNA (1)...(19): siRNA sense strand
caagaucgggaaccaagca

SEQ ID NO: 741113 - RNA, 19 nt, Homo sapiens
  misc_RNA (1)...(19): siRNA sense strand
caacuucaucggccucaag

SEQ ID NO: 741114 - RNA, 19 nt, Homo sapiens
  misc_RNA (1)...(19): siRNA sense strand
ccaugcccuucuuggcuuu

SEQ ID NO: 741115 - RNA, 19 nt, Homo sapiens
  misc_RNA (1)...(19): siRNA sense strand
gaccagcucacaggaguuc

SEQ ID NO: 741116 - RNA, 19 nt, Homo sapiens
  misc_RNA (1)...(19): siRNA sense strand
cagcuaaugggagcaagaa

SEQ ID NO: 741117 - RNA, 19 nt, Homo sapiens
  misc_RNA (1)...(19): siRNA sense strand
gcucacaggaguucuuggu

SEQ ID NO: 741118 - RNA, 19 nt, Homo sapiens
  misc_RNA (1)...(19): siRNA sense strand
gcagugcccggaucaccau

SEQ ID NO: 741119 - RNA, 19 nt, Homo sapiens
  misc_RNA (1)...(19): siRNA sense strand
ucagcgagauccggcagau

SEQ ID NO: 741120 - RNA, 19 nt, Homo sapiens
  misc_RNA (1)...(19): siRNA sense strand
caucacugccugucuagag

SEQ ID NO: 741121 - RNA, 19 nt, Homo sapiens
  misc_RNA (1)...(19): siRNA sense strand
gcaccaagaucaaggagau

SEQ ID NO: 741122 - RNA, 19 nt, Homo sapiens
  misc_RNA (1)...(19): siRNA sense strand
cgccagaucugcgcuguua

SEQ ID NO: 741123 - RNA, 19 nt, Homo sapiens
  misc_RNA (1)...(19): siRNA sense strand
gaacgcaucaccaccauca

SEQ ID NO: 741124 - RNA, 19 nt, Homo sapiens
  misc_RNA (1)...(19): siRNA sense strand
gaagaagggcgagacugua

SEQ ID NO: 741125 - RNA, 19 nt, Homo sapiens
  misc_RNA (1)...(19): siRNA sense strand
ggaagaagggcgagacugu

SEQ ID NO: 741126 - RNA, 19 nt, Homo sapiens
  misc_RNA (1)...(19): siRNA sense strand
caugauugcuuucaaacug

SEQ ID NO: 741127 - RNA, 19 nt, Homo sapiens
  misc_RNA (1)...(19): siRNA sense strand
ccucaucacugccugucua

SEQ ID NO: 741128 - RNA, 19 nt, Homo sapiens
  misc_RNA (1)...(19): siRNA sense strand
ggccuacacugccaagaug

SEQ ID NO: 741129 - RNA, 19 nt, Homo sapiens
  misc_RNA (1)...(19): siRNA sense strand
gcagcaagaucagcgagau

SEQ ID NO: 741130 - RNA, 19 nt, Homo sapiens
  misc_RNA (1)...(19): siRNA sense strand
caagauggcagcagcuaau

SEQ ID NO: 741131 - RNA, 19 nt, Homo sapiens
  misc_RNA (1)...(19): siRNA sense strand
ggaaggaagugggcagcau

SEQ ID NO: 741132 - RNA, 19 nt, Homo sapiens
  misc_RNA (1)...(19): siRNA sense strand
gcaaaugguggaaaugucu

SEQ ID NO: 741133 - RNA, 19 nt, Homo sapiens
  misc_RNA (1)...(19): siRNA sense strand
caaacuggaugaggaccuu

SEQ ID NO: 741134 - RNA, 19 nt, Homo sapiens
  misc_RNA (1)...(19): siRNA sense strand
gacuacgggugcccaggua

SEQ ID NO: 741135 - RNA, 19 nt, Homo sapiens
  misc_RNA (1)...(19): siRNA sense strand
ccgagccucucccuaggua

SEQ ID NO: 741136 - RNA, 19 nt, Homo sapiens
  misc_RNA (1)...(19): siRNA sense strand
gcacacagaccagcucaca

SEQ ID NO: 741137 - RNA, 19 nt, Homo sapiens
  misc_RNA (1)...(19): siRNA sense strand
aagaagggcgagacuguaa

SEQ ID NO: 741138 - RNA, 19 nt, Homo sapiens
  misc_RNA (1)...(19): siRNA sense strand
ggaagugggcagcaucauc

SEQ ID NO: 741139 - RNA, 19 nt, Homo sapiens
  misc_RNA (1)...(19): siRNA sense strand
aggcugagcggcagaaauu

SEQ ID NO: 741140 - RNA, 19 nt, Homo sapiens
  misc_RNA (1)...(19): siRNA sense strand
gaagggcgagacuguaaag

SEQ ID NO: 741141 - RNA, 19 nt, Homo sapiens
  misc_RNA (1)...(19): siRNA sense strand
ccaucucccucuccaacuu

SEQ ID NO: 741142 - RNA, 19 nt, Homo sapiens
  misc_RNA (1)...(19): siRNA sense strand
ggaaggcuggcaccaagau

SEQ ID NO: 741143 - RNA, 19 nt, Homo sapiens
  misc_RNA (1)...(19): siRNA sense strand
gcgagacuguaaagcgaau

SEQ ID NO: 741144 - RNA, 19 nt, Homo sapiens
  misc_RNA (1)...(19): siRNA sense strand
gcagcaucaucgggaagaa

SEQ ID NO: 741145 - RNA, 19 nt, Homo sapiens
  misc_RNA (1)...(19): siRNA sense strand
cuccaugauugcuuucaaa

SEQ ID NO: 741146 - RNA, 19 nt, Homo sapiens
  misc_RNA (1)...(19): siRNA sense strand
ccaagauggcagcagcuaa

SEQ ID NO: 741147 - RNA, 19 nt, Homo sapiens
  misc_RNA (1)...(19): siRNA sense strand
cagucuccaugauugcuuu

SEQ ID NO: 741148 - RNA, 19 nt, Homo sapiens
  misc_RNA (1)...(19): siRNA sense strand
ucaagcccaugcccuucuu

SEQ ID NO: 741149 - RNA, 19 nt, Homo sapiens
  misc_RNA (1)...(19): siRNA sense strand
gauuugauuggcuguguga

SEQ ID NO: 741150 - RNA, 19 nt, Homo sapiens
  misc_RNA (1)...(19): siRNA sense strand
ccagaucugcgcuguuauc

SEQ ID NO: 741151 - RNA, 19 nt, Homo sapiens
  misc_RNA (1)...(19): siRNA sense strand
gugcugcuccugcaaaugg

SEQ ID NO: 741152 - RNA, 19 nt, Homo sapiens
  misc_RNA (1)...(19): siRNA sense strand
gcagcuaaugggagcaaga

SEQ ID NO: 741153 - RNA, 19 nt, Homo sapiens
  misc_RNA (1)...(19): siRNA sense strand
caagaucgggaaccaagca

SEQ ID NO: 741154 - RNA, 19 nt, Homo sapiens
  misc_RNA (1)...(19): siRNA sense strand
caacuucaucggccucaag

SEQ ID NO: 741155 - RNA, 19 nt, Homo sapiens
  misc_RNA (1)...(19): siRNA sense strand
ccaugcccuucuuggcuuu

SEQ ID NO: 741156 - RNA, 19 nt, Homo sapiens
  misc_RNA (1)...(19): siRNA sense strand
gaccagcucacaggaguuc

SEQ ID NO: 741157 - RNA, 19 nt, Homo sapiens
  misc_RNA (1)...(19): siRNA sense strand
cagcuaaugggagcaagaa

SEQ ID NO: 741158 - RNA, 19 nt, Homo sapiens
  misc_RNA (1)...(19): siRNA sense strand
gcucacaggaguucuuggu

SEQ ID NO: 741159 - RNA, 19 nt, Homo sapiens
  misc_RNA (1)...(19): siRNA sense strand
gcagugcccggaucaccau

SEQ ID NO: 741160 - RNA, 19 nt, Homo sapiens
  misc_RNA (1)...(19): siRNA sense strand
ucagcgagauccggcagau

SEQ ID NO: 741161 - RNA, 19 nt, Homo sapiens
  misc_RNA (1)...(19): siRNA sense strand
caucacugccugucuagag

SEQ ID NO: 741162 - RNA, 19 nt, Homo sapiens
  misc_RNA (1)...(19): siRNA sense strand
gcaccaagaucaaggagau

SEQ ID NO: 741163 - RNA, 19 nt, Homo sapiens
  misc_RNA (1)...(19): siRNA sense strand
cgccagaucugcgcuguua

SEQ ID NO: 741164 - RNA, 19 nt, Homo sapiens
  misc_RNA (1)...(19): siRNA sense strand
gaacgcaucaccaccauca

SEQ ID NO: 741165 - RNA, 19 nt, Homo sapiens
  misc_RNA (1)...(19): siRNA sense strand
caugauugcuuucaaacug

SEQ ID NO: 741166 - RNA, 19 nt, Homo sapiens
  misc_RNA (1)...(19): siRNA sense strand
ccucaucacugccugucua

SEQ ID NO: 741167 - RNA, 19 nt, Homo sapiens
  misc_RNA (1)...(19): siRNA sense strand
ggccuacacugccaagaug

SEQ ID NO: 741168 - RNA, 19 nt, Homo sapiens
  misc_RNA (1)...(19): siRNA sense strand
gcagcaagaucagcgagau

SEQ ID NO: 741169 - RNA, 19 nt, Homo sapiens
  misc_RNA (1)...(19): siRNA sense strand
caagauggcagcagcuaau

SEQ ID NO: 741170 - RNA, 19 nt, Homo sapiens
  misc_RNA (1)...(19): siRNA sense strand
gcaaaugguggaaaugucu

SEQ ID NO: 741171 - RNA, 19 nt, Homo sapiens
  misc_RNA (1)...(19): siRNA sense strand
caaacuggaugaggaccuu

SEQ ID NO: 741172 - RNA, 19 nt, Homo sapiens
  misc_RNA (1)...(19): siRNA sense strand
gacuacgggugcccaggua

SEQ ID NO: 741173 - RNA, 19 nt, Homo sapiens
  misc_RNA (1)...(19): siRNA sense strand
ccgagccucucccuaggua

SEQ ID NO: 741174 - RNA, 19 nt, Homo sapiens
  misc_RNA (1)...(19): siRNA sense strand
gcacacagaccagcucaca

SEQ ID NO: 741175 - RNA, 19 nt, Homo sapiens
  misc_RNA (1)...(19): siRNA sense strand
aggcugagcggcagaaauu

SEQ ID NO: 741176 - RNA, 19 nt, Homo sapiens
  misc_RNA (1)...(19): siRNA sense strand
ccaucucccucuccaacuu

SEQ ID NO: 741177 - RNA, 19 nt, Homo sapiens
  misc_RNA (1)...(19): siRNA sense strand
ggaaggcuggcaccaagau

SEQ ID NO: 741178 - RNA, 19 nt, Homo sapiens
  misc_RNA (1)...(19): siRNA sense strand
cuccaugauugcuuucaaa

SEQ ID NO: 741179 - RNA, 19 nt, Homo sapiens
  misc_RNA (1)...(19): siRNA sense strand
ccaagauggcagcagcuaa

SEQ ID NO: 741180 - RNA, 19 nt, Homo sapiens
  misc_RNA (1)...(19): siRNA sense strand
cagucuccaugauugcuuu

SEQ ID NO: 741181 - RNA, 19 nt, Homo sapiens
  misc_RNA (1)...(19): siRNA sense strand
ucaagcccaugcccuucuu

SEQ ID NO: 741182 - RNA, 19 nt, Homo sapiens
  misc_RNA (1)...(19): siRNA sense strand
gauuugauuggcuguguga

SEQ ID NO: 741183 - RNA, 19 nt, Homo sapiens
  misc_RNA (1)...(19): siRNA sense strand
ccagaucugcgcuguuauc

SEQ ID NO: 741184 - RNA, 19 nt, Homo sapiens
  misc_RNA (1)...(19): siRNA sense strand
gugcugcuccugcaaaugg

SEQ ID NO: 741185 - RNA, 19 nt, Homo sapiens
  misc_RNA (1)...(19): siRNA sense strand
gcagcuaaugggagcaaga

SEQ ID NO: 741186 - RNA, 19 nt, Homo sapiens
  misc_RNA (1)...(19): siRNA sense strand
caagaucgggaaccaagca

SEQ ID NO: 741187 - RNA, 19 nt, Homo sapiens
  misc_RNA (1)...(19): siRNA sense strand
caacuucaucggccucaag

SEQ ID NO: 741188 - RNA, 19 nt, Homo sapiens
  misc_RNA (1)...(19): siRNA sense strand
ccaugcccuucuuggcuuu

SEQ ID NO: 741189 - RNA, 19 nt, Homo sapiens
  misc_RNA (1)...(19): siRNA sense strand
gaccagcucacaggaguuc

SEQ ID NO: 741190 - RNA, 19 nt, Homo sapiens
  misc_RNA (1)...(19): siRNA sense strand
cagcuaaugggagcaagaa

SEQ ID NO: 741191 - RNA, 19 nt, Homo sapiens
  misc_RNA (1)...(19): siRNA sense strand
gcucacaggaguucuuggu

SEQ ID NO: 741192 - RNA, 19 nt, Homo sapiens
  misc_RNA (1)...(19): siRNA sense strand
gcagugcccggaucaccau

SEQ ID NO: 741193 - RNA, 19 nt, Homo sapiens
  misc_RNA (1)...(19): siRNA sense strand
ucagcgagauccggcagau

SEQ ID NO: 741194 - RNA, 19 nt, Homo sapiens
  misc_RNA (1)...(19): siRNA sense strand
caucacugccugucuagag

SEQ ID NO: 741195 - RNA, 19 nt, Homo sapiens
  misc_RNA (1)...(19): siRNA sense strand
gcaccaagaucaaggagau

SEQ ID NO: 741196 - RNA, 19 nt, Homo sapiens
  misc_RNA (1)...(19): siRNA sense strand
cgccagaucugcgcuguua

SEQ ID NO: 741197 - RNA, 19 nt, Homo sapiens
  misc_RNA (1)...(19): siRNA sense strand
gaacgcaucaccaccauca

SEQ ID NO: 741198 - RNA, 19 nt, Homo sapiens
  misc_RNA (1)...(19): siRNA sense strand
gaagaagggcgagacugua

SEQ ID NO: 741199 - RNA, 19 nt, Homo sapiens
  misc_RNA (1)...(19): siRNA sense strand
ggaagaagggcgagacugu

SEQ ID NO: 741200 - RNA, 19 nt, Homo sapiens
  misc_RNA (1)...(19): siRNA sense strand
caugauugcuuucaaacug

SEQ ID NO: 741201 - RNA, 19 nt, Homo sapiens
  misc_RNA (1)...(19): siRNA sense strand
ccucaucacugccugucua

SEQ ID NO: 741202 - RNA, 19 nt, Homo sapiens
  misc_RNA (1)...(19): siRNA sense strand
ggccuacacugccaagaug

SEQ ID NO: 741203 - RNA, 19 nt, Homo sapiens
  misc_RNA (1)...(19): siRNA sense strand
gcagcaagaucagcgagau

SEQ ID NO: 741204 - RNA, 19 nt, Homo sapiens
  misc_RNA (1)...(19): siRNA sense strand
caagauggcagcagcuaau

SEQ ID NO: 741205 - RNA, 19 nt, Homo sapiens
  misc_RNA (1)...(19): siRNA sense strand
ggaaggaagugggcagcau

SEQ ID NO: 741206 - RNA, 19 nt, Homo sapiens
  misc_RNA (1)...(19): siRNA sense strand
gcaaaugguggaaaugucu

SEQ ID NO: 741207 - RNA, 19 nt, Homo sapiens
  misc_RNA (1)...(19): siRNA sense strand
caaacuggaugaggaccuu

SEQ ID NO: 741208 - RNA, 19 nt, Homo sapiens
  misc_RNA (1)...(19): siRNA sense strand
gacuacgggugcccaggua

SEQ ID NO: 741209 - RNA, 19 nt, Homo sapiens
  misc_RNA (1)...(19): siRNA sense strand
ccgagccucucccuaggua

SEQ ID NO: 741210 - RNA, 19 nt, Homo sapiens
  misc_RNA (1)...(19): siRNA sense strand
gcacacagaccagcucaca

SEQ ID NO: 741211 - RNA, 19 nt, Homo sapiens
  misc_RNA (1)...(19): siRNA sense strand
aagaagggcgagacuguaa

SEQ ID NO: 741212 - RNA, 19 nt, Homo sapiens
  misc_RNA (1)...(19): siRNA sense strand
ggaagugggcagcaucauc

SEQ ID NO: 741213 - RNA, 19 nt, Homo sapiens
  misc_RNA (1)...(19): siRNA sense strand
aggcugagcggcagaaauu

SEQ ID NO: 741214 - RNA, 19 nt, Homo sapiens
  misc_RNA (1)...(19): siRNA sense strand
gaagggcgagacuguaaag

SEQ ID NO: 741215 - RNA, 19 nt, Homo sapiens
  misc_RNA (1)...(19): siRNA sense strand
ccaucucccucuccaacuu

SEQ ID NO: 741216 - RNA, 19 nt, Homo sapiens
  misc_RNA (1)...(19): siRNA sense strand
ggaaggcuggcaccaagau

SEQ ID NO: 741217 - RNA, 19 nt, Homo sapiens
  misc_RNA (1)...(19): siRNA sense strand
gcgagacuguaaagcgaau

SEQ ID NO: 741218 - RNA, 19 nt, Homo sapiens
  misc_RNA (1)...(19): siRNA sense strand
gcagcaucaucgggaagaa

SEQ ID NO: 741219 - RNA, 19 nt, Homo sapiens
  misc_RNA (1)...(19): siRNA sense strand
cuccaugauugcuuucaaa

SEQ ID NO: 741220 - RNA, 19 nt, Homo sapiens
  misc_RNA (1)...(19): siRNA sense strand
ccaagauggcagcagcuaa

SEQ ID NO: 741221 - RNA, 19 nt, Homo sapiens
  misc_RNA (1)...(19): siRNA sense strand
cagucuccaugauugcuuu

SEQ ID NO: 741222 - RNA, 19 nt, Homo sapiens
  misc_RNA (1)...(19): siRNA sense strand
ucaagcccaugcccuucuu

SEQ ID NO: 741223 - RNA, 19 nt, Homo sapiens
  misc_RNA (1)...(19): siRNA sense strand
gauuugauuggcuguguga

SEQ ID NO: 741224 - RNA, 19 nt, Homo sapiens
  misc_RNA (1)...(19): siRNA sense strand
ccagaucugcgcuguuauc

SEQ ID NO: 741225 - RNA, 19 nt, Homo sapiens
  misc_RNA (1)...(19): siRNA sense strand
gugcugcuccugcaaaugg

SEQ ID NO: 741226 - RNA, 19 nt, Homo sapiens
  misc_RNA (1)...(19): siRNA sense strand
gcagcuaaugggagcaaga

SEQ ID NO: 741227 - RNA, 19 nt, Homo sapiens
  misc_RNA (1)...(19): siRNA sense strand
caagaucgggaaccaagca

SEQ ID NO: 741228 - RNA, 19 nt, Homo sapiens
  misc_RNA (1)...(19): siRNA sense strand
caacuucaucggccucaag

SEQ ID NO: 741229 - RNA, 19 nt, Homo sapiens
  misc_RNA (1)...(19): siRNA sense strand
ccaugcccuucuuggcuuu

SEQ ID NO: 741230 - RNA, 19 nt, Homo sapiens
  misc_RNA (1)...(19): siRNA sense strand
gaccagcucacaggaguuc

SEQ ID NO: 741231 - RNA, 19 nt, Homo sapiens
  misc_RNA (1)...(19): siRNA sense strand
cagcuaaugggagcaagaa

SEQ ID NO: 741232 - RNA, 19 nt, Homo sapiens
  misc_RNA (1)...(19): siRNA sense strand
gcucacaggaguucuuggu

SEQ ID NO: 741233 - RNA, 19 nt, Homo sapiens
  misc_RNA (1)...(19): siRNA sense strand
gcagugcccggaucaccau

SEQ ID NO: 741234 - RNA, 19 nt, Homo sapiens
  misc_RNA (1)...(19): siRNA sense strand
ucagcgagauccggcagau

SEQ ID NO: 741235 - RNA, 19 nt, Homo sapiens
  misc_RNA (1)...(19): siRNA sense strand
caucacugccugucuagag

SEQ ID NO: 741236 - RNA, 19 nt, Homo sapiens
  misc_RNA (1)...(19): siRNA sense strand
gcaccaagaucaaggagau

SEQ ID NO: 741237 - RNA, 19 nt, Homo sapiens
  misc_RNA (1)...(19): siRNA sense strand
cgccagaucugcgcuguua

SEQ ID NO: 741238 - RNA, 19 nt, Homo sapiens
  misc_RNA (1)...(19): siRNA sense strand
gaacgcaucaccaccauca

SEQ ID NO: 741239 - RNA, 19 nt, Homo sapiens
  misc_RNA (1)...(19): siRNA sense strand
caugauugcuuucaaacug

SEQ ID NO: 741240 - RNA, 19 nt, Homo sapiens
  misc_RNA (1)...(19): siRNA sense strand
ccucaucacugccugucua

SEQ ID NO: 741241 - RNA, 19 nt, Homo sapiens
  misc_RNA (1)...(19): siRNA sense strand
ggccuacacugccaagaug

SEQ ID NO: 741242 - RNA, 19 nt, Homo sapiens
  misc_RNA (1)...(19): siRNA sense strand
gcagcaagaucagcgagau

SEQ ID NO: 741243 - RNA, 19 nt, Homo sapiens
  misc_RNA (1)...(19): siRNA sense strand
caagauggcagcagcuaau

SEQ ID NO: 741244 - RNA, 19 nt, Homo sapiens
  misc_RNA (1)...(19): siRNA sense strand
gcaaaugguggaaaugucu

SEQ ID NO: 741245 - RNA, 19 nt, Homo sapiens
  misc_RNA (1)...(19): siRNA sense strand
caaacuggaugaggaccuu

SEQ ID NO: 741246 - RNA, 19 nt, Homo sapiens
  misc_RNA (1)...(19): siRNA sense strand
gacuacgggugcccaggua

SEQ ID NO: 741247 - RNA, 19 nt, Homo sapiens
  misc_RNA (1)...(19): siRNA sense strand
ccgagccucucccuaggua

SEQ ID NO: 741248 - RNA, 19 nt, Homo sapiens
  misc_RNA (1)...(19): siRNA sense strand
gcacacagaccagcucaca

SEQ ID NO: 741249 - RNA, 19 nt, Homo sapiens
  misc_RNA (1)...(19): siRNA sense strand
aggcugagcggcagaaauu

SEQ ID NO: 741250 - RNA, 19 nt, Homo sapiens
  misc_RNA (1)...(19): siRNA sense strand
ccaucucccucuccaacuu

SEQ ID NO: 741251 - RNA, 19 nt, Homo sapiens
  misc_RNA (1)...(19): siRNA sense strand
ggaaggcuggcaccaagau

SEQ ID NO: 741252 - RNA, 19 nt, Homo sapiens
  misc_RNA (1)...(19): siRNA sense strand
cuccaugauugcuuucaaa

SEQ ID NO: 741253 - RNA, 19 nt, Homo sapiens
  misc_RNA (1)...(19): siRNA sense strand
ccaagauggcagcagcuaa

SEQ ID NO: 741254 - RNA, 19 nt, Homo sapiens
  misc_RNA (1)...(19): siRNA sense strand
cagucuccaugauugcuuu

SEQ ID NO: 741255 - RNA, 19 nt, Homo sapiens
  misc_RNA (1)...(19): siRNA sense strand
ucaagcccaugcccuucuu

SEQ ID NO: 741256 - RNA, 19 nt, Homo sapiens
  misc_RNA (1)...(19): siRNA sense strand
gauuugauuggcuguguga

SEQ ID NO: 741257 - RNA, 19 nt, Homo sapiens
  misc_RNA (1)...(19): siRNA sense strand
ccagaucugcgcuguuauc

SEQ ID NO: 741258 - RNA, 19 nt, Homo sapiens
  misc_RNA (1)...(19): siRNA sense strand
gugcugcuccugcaaaugg

SEQ ID NO: 741259 - RNA, 19 nt, Homo sapiens
  misc_RNA (1)...(19): siRNA sense strand
gcagcuaaugggagcaaga

SEQ ID NO: 741260 - RNA, 19 nt, Homo sapiens
  misc_RNA (1)...(19): siRNA sense strand
caagaucgggaaccaagca

SEQ ID NO: 741261 - RNA, 19 nt, Homo sapiens
  misc_RNA (1)...(19): siRNA sense strand
caacuucaucggccucaag

SEQ ID NO: 741262 - RNA, 19 nt, Homo sapiens
  misc_RNA (1)...(19): siRNA sense strand
ccaugcccuucuuggcuuu

SEQ ID NO: 741263 - RNA, 19 nt, Homo sapiens
  misc_RNA (1)...(19): siRNA sense strand
gaccagcucacaggaguuc

SEQ ID NO: 741264 - RNA, 19 nt, Homo sapiens
  misc_RNA (1)...(19): siRNA sense strand
cagcuaaugggagcaagaa

SEQ ID NO: 741265 - RNA, 19 nt, Homo sapiens
  misc_RNA (1)...(19): siRNA sense strand
gcucacaggaguucuuggu

SEQ ID NO: 741266 - RNA, 19 nt, Homo sapiens
  misc_RNA (1)...(19): siRNA sense strand
gcagugcccggaucaccau

SEQ ID NO: 741267 - RNA, 19 nt, Homo sapiens
  misc_RNA (1)...(19): siRNA sense strand
ucagcgagauccggcagau

SEQ ID NO: 741268 - RNA, 19 nt, Homo sapiens
  misc_RNA (1)...(19): siRNA sense strand
caucacugccugucuagag

SEQ ID NO: 741269 - RNA, 19 nt, Homo sapiens
  misc_RNA (1)...(19): siRNA sense strand
gcaccaagaucaaggagau

SEQ ID NO: 741270 - RNA, 19 nt, Homo sapiens
  misc_RNA (1)...(19): siRNA sense strand
cgccagaucugcgcuguua

SEQ ID NO: 741271 - RNA, 19 nt, Homo sapiens
  misc_RNA (1)...(19): siRNA sense strand
gaacgcaucaccaccauca

SEQ ID NO: 741272 - RNA, 19 nt, Homo sapiens
  misc_RNA (1)...(19): siRNA sense strand
gaagaagggcgagacugua

SEQ ID NO: 741273 - RNA, 19 nt, Homo sapiens
  misc_RNA (1)...(19): siRNA sense strand
ggaagaagggcgagacugu

SEQ ID NO: 741274 - RNA, 19 nt, Homo sapiens
  misc_RNA (1)...(19): siRNA sense strand
caugauugcuuucaaacug

SEQ ID NO: 741275 - RNA, 19 nt, Homo sapiens
  misc_RNA (1)...(19): siRNA sense strand
ccucaucacugccugucua

SEQ ID NO: 741276 - RNA, 19 nt, Homo sapiens
  misc_RNA (1)...(19): siRNA sense strand
ggccuacacugccaagaug

SEQ ID NO: 741277 - RNA, 19 nt, Homo sapiens
  misc_RNA (1)...(19): siRNA sense strand
gcagcaagaucagcgagau

SEQ ID NO: 741278 - RNA, 19 nt, Homo sapiens
  misc_RNA (1)...(19): siRNA sense strand
caagauggcagcagcuaau

SEQ ID NO: 741279 - RNA, 19 nt, Homo sapiens
  misc_RNA (1)...(19): siRNA sense strand
ggaaggaagugggcagcau

SEQ ID NO: 741280 - RNA, 19 nt, Homo sapiens
  misc_RNA (1)...(19): siRNA sense strand
gcaaaugguggaaaugucu

SEQ ID NO: 741281 - RNA, 19 nt, Homo sapiens
  misc_RNA (1)...(19): siRNA sense strand
caaacuggaugaggaccuu

SEQ ID NO: 741282 - RNA, 19 nt, Homo sapiens
  misc_RNA (1)...(19): siRNA sense strand
gacuacgggugcccaggua

SEQ ID NO: 741283 - RNA, 19 nt, Homo sapiens
  misc_RNA (1)...(19): siRNA sense strand
ccgagccucucccuaggua

SEQ ID NO: 741284 - RNA, 19 nt, Homo sapiens
  misc_RNA (1)...(19): siRNA sense strand
gcacacagaccagcucaca

SEQ ID NO: 741285 - RNA, 19 nt, Homo sapiens
  misc_RNA (1)...(19): siRNA sense strand
aagaagggcgagacuguaa

SEQ ID NO: 741286 - RNA, 19 nt, Homo sapiens
  misc_RNA (1)...(19): siRNA sense strand
ggaagugggcagcaucauc

SEQ ID NO: 741287 - RNA, 19 nt, Homo sapiens
  misc_RNA (1)...(19): siRNA sense strand
aggcugagcggcagaaauu

SEQ ID NO: 741288 - RNA, 19 nt, Homo sapiens
  misc_RNA (1)...(19): siRNA sense strand
gaagggcgagacuguaaag

SEQ ID NO: 741289 - RNA, 19 nt, Homo sapiens
  misc_RNA (1)...(19): siRNA sense strand
ccaucucccucuccaacuu

SEQ ID NO: 741290 - RNA, 19 nt, Homo sapiens
  misc_RNA (1)...(19): siRNA sense strand
ggaaggcuggcaccaagau

SEQ ID NO: 741291 - RNA, 19 nt, Homo sapiens
  misc_RNA (1)...(19): siRNA sense strand
gcgagacuguaaagcgaau

SEQ ID NO: 741292 - RNA, 19 nt, Homo sapiens
  misc_RNA (1)...(19): siRNA sense strand
gcagcaucaucgggaagaa

SEQ ID NO: 741293 - RNA, 19 nt, Homo sapiens
  misc_RNA (1)...(19): siRNA sense strand
cuccaugauugcuuucaaa

SEQ ID NO: 741294 - RNA, 19 nt, Homo sapiens
  misc_RNA (1)...(19): siRNA sense strand
ccaagauggcagcagcuaa

SEQ ID NO: 741295 - RNA, 19 nt, Homo sapiens
  misc_RNA (1)...(19): siRNA sense strand
cagucuccaugauugcuuu

SEQ ID NO: 741296 - RNA, 19 nt, Homo sapiens
  misc_RNA (1)...(19): siRNA sense strand
ucaagcccaugcccuucuu

SEQ ID NO: 741297 - RNA, 19 nt, Homo sapiens
  misc_RNA (1)...(19): siRNA sense strand
gauuugauuggcuguguga

SEQ ID NO: 741298 - RNA, 19 nt, Homo sapiens
  misc_RNA (1)...(19): siRNA sense strand
ccagaucugcgcuguuauc

SEQ ID NO: 741299 - RNA, 19 nt, Homo sapiens
  misc_RNA (1)...(19): siRNA sense strand
gugcugcuccugcaaaugg

SEQ ID NO: 741300 - RNA, 19 nt, Homo sapiens
  misc_RNA (1)...(19): siRNA sense strand
gcagcuaaugggagcaaga

SEQ ID NO: 741301 - RNA, 19 nt, Homo sapiens
  misc_RNA (1)...(19): siRNA sense strand
caagaucgggaaccaagca

SEQ ID NO: 741302 - RNA, 19 nt, Homo sapiens
  misc_RNA (1)...(19): siRNA sense strand
caacuucaucggccucaag

SEQ ID NO: 741303 - RNA, 19 nt, Homo sapiens
  misc_RNA (1)...(19): siRNA sense strand
ccaugcccuucuuggcuuu

SEQ ID NO: 741304 - RNA, 19 nt, Homo sapiens
  misc_RNA (1)...(19): siRNA sense strand
gaccagcucacaggaguuc

SEQ ID NO: 741305 - RNA, 19 nt, Homo sapiens
  misc_RNA (1)...(19): siRNA sense strand
cagcuaaugggagcaagaa

SEQ ID NO: 741306 - RNA, 19 nt, Homo sapiens
  misc_RNA (1)...(19): siRNA sense strand
gcucacaggaguucuuggu

SEQ ID NO: 741307 - RNA, 19 nt, Homo sapiens
  misc_RNA (1)...(19): siRNA sense strand
gcagugcccggaucaccau

SEQ ID NO: 741308 - RNA, 19 nt, Homo sapiens
  misc_RNA (1)...(19): siRNA sense strand
ucagcgagauccggcagau

SEQ ID NO: 741309 - RNA, 19 nt, Homo sapiens
  misc_RNA (1)...(19): siRNA sense strand
caucacugccugucuagag

SEQ ID NO: 741310 - RNA, 19 nt, Homo sapiens
  misc_RNA (1)...(19): siRNA sense strand
gaaggaggcucaugucaga

SEQ ID NO: 741311 - RNA, 19 nt, Homo sapiens
  misc_RNA (1)...(19): siRNA sense strand
gaagugcugugaaauagau

SEQ ID NO: 741312 - RNA, 19 nt, Homo sapiens
  misc_RNA (1)...(19): siRNA sense strand
acaccaagguuaccaacua

SEQ ID NO: 741313 - RNA, 19 nt, Homo sapiens
  misc_RNA (1)...(19): siRNA sense strand
gcugggaagugcugugaaa

SEQ ID NO: 741314 - RNA, 19 nt, Homo sapiens
  misc_RNA (1)...(19): siRNA sense strand
gggaagugcugugaaauag

SEQ ID NO: 741315 - RNA, 19 nt, Homo sapiens
  misc_RNA (1)...(19): siRNA sense strand
ggaauuccaugauccugau

SEQ ID NO: 741316 - RNA, 19 nt, Homo sapiens
  misc_RNA (1)...(19): siRNA sense strand
ggaaguacagcucagaguu

SEQ ID NO: 741317 - RNA, 19 nt, Homo sapiens
  misc_RNA (1)...(19): siRNA sense strand
gaaguacagcucagaguuc

SEQ ID NO: 741318 - RNA, 19 nt, Homo sapiens
  misc_RNA (1)...(19): siRNA sense strand
aaacccagaucgagacuca

SEQ ID NO: 741319 - RNA, 19 nt, Homo sapiens
  misc_RNA (1)...(19): siRNA sense strand
gcccuguacuucucagauu

SEQ ID NO: 741320 - RNA, 19 nt, Homo sapiens
  misc_RNA (1)...(19): siRNA sense strand
gcagcgagccaagguguuu

SEQ ID NO: 741321 - RNA, 19 nt, Homo sapiens
  misc_RNA (1)...(19): siRNA sense strand
ccaacuaccuagacuggau

SEQ ID NO: 741322 - RNA, 19 nt, Homo sapiens
  misc_RNA (1)...(19): siRNA sense strand
cugcacaucacaacauuua

SEQ ID NO: 741323 - RNA, 19 nt, Homo sapiens
  misc_RNA (1)...(19): siRNA sense strand
gaacagucaccgacaacau

SEQ ID NO: 741324 - RNA, 19 nt, Homo sapiens
  misc_RNA (1)...(19): siRNA sense strand
gcucugagggaaacaguga

SEQ ID NO: 741325 - RNA, 19 nt, Homo sapiens
  misc_RNA (1)...(19): siRNA sense strand
uuacuuaacagaacaguca

SEQ ID NO: 741326 - RNA, 19 nt, Homo sapiens
  misc_RNA (1)...(19): siRNA sense strand
ugggaagugcugugaaaua

SEQ ID NO: 741327 - RNA, 19 nt, Homo sapiens
  misc_RNA (1)...(19): siRNA sense strand
gcacaucacaacauuuacu

SEQ ID NO: 741328 - RNA, 19 nt, Homo sapiens
  misc_RNA (1)...(19): siRNA sense strand
ggaagugcugugaaauaga

SEQ ID NO: 741329 - RNA, 19 nt, Homo sapiens
  misc_RNA (1)...(19): siRNA sense strand
ggccugggcaaacauaauu

SEQ ID NO: 741330 - RNA, 19 nt, Homo sapiens
  misc_RNA (1)...(19): siRNA sense strand
acagaacagucaccgacaa

SEQ ID NO: 741331 - RNA, 19 nt, Homo sapiens
  misc_RNA (1)...(19): siRNA sense strand
aaccacaacuacugcagaa

SEQ ID NO: 741332 - RNA, 19 nt, Homo sapiens
  misc_RNA (1)...(19): siRNA sense strand
guggagcagucuucguuuc

SEQ ID NO: 741333 - RNA, 19 nt, Homo sapiens
  misc_RNA (1)...(19): siRNA sense strand
gaacgauggccgcaugacu

SEQ ID NO: 741334 - RNA, 19 nt, Homo sapiens
  misc_RNA (1)...(19): siRNA sense strand
acucaaagcccuggugcua

SEQ ID NO: 741335 - RNA, 19 nt, Homo sapiens
  misc_RNA (1)...(19): siRNA sense strand
gcccuggugcuacgucuuu

SEQ ID NO: 741336 - RNA, 19 nt, Homo sapiens
  misc_RNA (1)...(19): siRNA sense strand
cagaagaggagccagaucu

SEQ ID NO: 741337 - RNA, 19 nt, Homo sapiens
  misc_RNA (1)...(19): siRNA sense strand
caacuaccuagacuggauu

SEQ ID NO: 741338 - RNA, 19 nt, Homo sapiens
  misc_RNA (1)...(19): siRNA sense strand
gaccagggcaucagcuaca

SEQ ID NO: 741339 - RNA, 19 nt, Homo sapiens
  misc_RNA (1)...(19): siRNA sense strand
gauaggcaagguuuacaca

SEQ ID NO: 741340 - RNA, 19 nt, Homo sapiens
  misc_RNA (1)...(19): siRNA sense strand
ccacaacuacugcagaaac

SEQ ID NO: 741341 - RNA, 19 nt, Homo sapiens
  misc_RNA (1)...(19): siRNA sense strand
gaauuccaugauccugaua

SEQ ID NO: 741342 - RNA, 19 nt, Homo sapiens
  misc_RNA (1)...(19): siRNA sense strand
cccuguacuucucagauuu

SEQ ID NO: 741343 - RNA, 19 nt, Homo sapiens
  misc_RNA (1)...(19): siRNA sense strand
caccaagguuaccaacuac

SEQ ID NO: 741344 - RNA, 19 nt, Homo sapiens
  misc_RNA (1)...(19): siRNA sense strand
guguggagcagucuucguu

SEQ ID NO: 741345 - RNA, 19 nt, Homo sapiens
  misc_RNA (1)...(19): siRNA sense strand
ugacugcuacuuugggaau

SEQ ID NO: 741346 - RNA, 19 nt, Homo sapiens
  misc_RNA (1)...(19): siRNA sense strand
uagacuggauucgugacaa

SEQ ID NO: 741347 - RNA, 19 nt, Homo sapiens
  misc_RNA (1)...(19): siRNA sense strand
gccugggcaaacauaauua

SEQ ID NO: 741348 - RNA, 19 nt, Homo sapiens
  misc_RNA (1)...(19): siRNA sense strand
gaagugcugugaaauagau

SEQ ID NO: 741349 - RNA, 19 nt, Homo sapiens
  misc_RNA (1)...(19): siRNA sense strand
gcugggaagugcugugaaa

SEQ ID NO: 741350 - RNA, 19 nt, Homo sapiens
  misc_RNA (1)...(19): siRNA sense strand
gggaagugcugugaaauag

SEQ ID NO: 741351 - RNA, 19 nt, Homo sapiens
  misc_RNA (1)...(19): siRNA sense strand
ggaauuccaugauccugau

SEQ ID NO: 741352 - RNA, 19 nt, Homo sapiens
  misc_RNA (1)...(19): siRNA sense strand
ggccuugucuccuuucuau

SEQ ID NO: 741353 - RNA, 19 nt, Homo sapiens
  misc_RNA (1)...(19): siRNA sense strand
ggaaguacagcucagaguu

SEQ ID NO: 741354 - RNA, 19 nt, Homo sapiens
  misc_RNA (1)...(19): siRNA sense strand
gaaguacagcucagaguuc

SEQ ID NO: 741355 - RNA, 19 nt, Homo sapiens
  misc_RNA (1)...(19): siRNA sense strand
aaacccagaucgagacuca

SEQ ID NO: 741356 - RNA, 19 nt, Homo sapiens
  misc_RNA (1)...(19): siRNA sense strand
gcccuguacuucucagauu

SEQ ID NO: 741357 - RNA, 19 nt, Homo sapiens
  misc_RNA (1)...(19): siRNA sense strand
gcagcgagccaagguguuu

SEQ ID NO: 741358 - RNA, 19 nt, Homo sapiens
  misc_RNA (1)...(19): siRNA sense strand
caugaggccuugucuccuu

SEQ ID NO: 741359 - RNA, 19 nt, Homo sapiens
  misc_RNA (1)...(19): siRNA sense strand
gcucugagggaaacaguga

SEQ ID NO: 741360 - RNA, 19 nt, Homo sapiens
  misc_RNA (1)...(19): siRNA sense strand
ugggaagugcugugaaaua

SEQ ID NO: 741361 - RNA, 19 nt, Homo sapiens
  misc_RNA (1)...(19): siRNA sense strand
ggaagugcugugaaauaga

SEQ ID NO: 741362 - RNA, 19 nt, Homo sapiens
  misc_RNA (1)...(19): siRNA sense strand
ggccugggcaaacauaauu

SEQ ID NO: 741363 - RNA, 19 nt, Homo sapiens
  misc_RNA (1)...(19): siRNA sense strand
aaccacaacuacugcagaa

SEQ ID NO: 741364 - RNA, 19 nt, Homo sapiens
  misc_RNA (1)...(19): siRNA sense strand
guggagcagucuucguuuc

SEQ ID NO: 741365 - RNA, 19 nt, Homo sapiens
  misc_RNA (1)...(19): siRNA sense strand
acucaaagcccuggugcua

SEQ ID NO: 741366 - RNA, 19 nt, Homo sapiens
  misc_RNA (1)...(19): siRNA sense strand
gcccuggugcuacgucuuu

SEQ ID NO: 741367 - RNA, 19 nt, Homo sapiens
  misc_RNA (1)...(19): siRNA sense strand
gaccagggcaucagcuaca

SEQ ID NO: 741368 - RNA, 19 nt, Homo sapiens
  misc_RNA (1)...(19): siRNA sense strand
cagaagaggagccagaucu

SEQ ID NO: 741369 - RNA, 19 nt, Homo sapiens
  misc_RNA (1)...(19): siRNA sense strand
gauaggcaagguuuacaca

SEQ ID NO: 741370 - RNA, 19 nt, Homo sapiens
  misc_RNA (1)...(19): siRNA sense strand
ccacaacuacugcagaaac

SEQ ID NO: 741371 - RNA, 19 nt, Homo sapiens
  misc_RNA (1)...(19): siRNA sense strand
gaauuccaugauccugaua

SEQ ID NO: 741372 - RNA, 19 nt, Homo sapiens
  misc_RNA (1)...(19): siRNA sense strand
cccuguacuucucagauuu

SEQ ID NO: 741373 - RNA, 19 nt, Homo sapiens
  misc_RNA (1)...(19): siRNA sense strand
ugacugcuacuuugggaau

SEQ ID NO: 741374 - RNA, 19 nt, Homo sapiens
  misc_RNA (1)...(19): siRNA sense strand
guguggagcagucuucguu

SEQ ID NO: 741375 - RNA, 19 nt, Homo sapiens
  misc_RNA (1)...(19): siRNA sense strand
ccuugucuccuuucuauuc

SEQ ID NO: 741376 - RNA, 19 nt, Homo sapiens
  misc_RNA (1)...(19): siRNA sense strand
gccugggcaaacauaauua

SEQ ID NO: 741377 - RNA, 19 nt, Homo sapiens
  misc_RNA (1)...(19): siRNA sense strand
gaaggaggcucaugucaga

SEQ ID NO: 741378 - RNA, 19 nt, Homo sapiens
  misc_RNA (1)...(19): siRNA sense strand
gaagugcugugaaauagau

SEQ ID NO: 741379 - RNA, 19 nt, Homo sapiens
  misc_RNA (1)...(19): siRNA sense strand
acaccaagguuaccaacua

SEQ ID NO: 741380 - RNA, 19 nt, Homo sapiens
  misc_RNA (1)...(19): siRNA sense strand
gcugggaagugcugugaaa

SEQ ID NO: 741381 - RNA, 19 nt, Homo sapiens
  misc_RNA (1)...(19): siRNA sense strand
gggaagugcugugaaauag

SEQ ID NO: 741382 - RNA, 19 nt, Homo sapiens
  misc_RNA (1)...(19): siRNA sense strand
ggaauuccaugauccugau

SEQ ID NO: 741383 - RNA, 19 nt, Homo sapiens
  misc_RNA (1)...(19): siRNA sense strand
ggaaguacagcucagaguu

SEQ ID NO: 741384 - RNA, 19 nt, Homo sapiens
  misc_RNA (1)...(19): siRNA sense strand
gaaguacagcucagaguuc

SEQ ID NO: 741385 - RNA, 19 nt, Homo sapiens
  misc_RNA (1)...(19): siRNA sense strand
aaacccagaucgagacuca

SEQ ID NO: 741386 - RNA, 19 nt, Homo sapiens
  misc_RNA (1)...(19): siRNA sense strand
gcccuguacuucucagauu

SEQ ID NO: 741387 - RNA, 19 nt, Homo sapiens
  misc_RNA (1)...(19): siRNA sense strand
gcagcgagccaagguguuu

SEQ ID NO: 741388 - RNA, 19 nt, Homo sapiens
  misc_RNA (1)...(19): siRNA sense strand
ccaacuaccuagacuggau

SEQ ID NO: 741389 - RNA, 19 nt, Homo sapiens
  misc_RNA (1)...(19): siRNA sense strand
cugcacaucacaacauuua

SEQ ID NO: 741390 - RNA, 19 nt, Homo sapiens
  misc_RNA (1)...(19): siRNA sense strand
gaacagucaccgacaacau

SEQ ID NO: 741391 - RNA, 19 nt, Homo sapiens
  misc_RNA (1)...(19): siRNA sense strand
gcucugagggaaacaguga

SEQ ID NO: 741392 - RNA, 19 nt, Homo sapiens
  misc_RNA (1)...(19): siRNA sense strand
uuacuuaacagaacaguca

SEQ ID NO: 741393 - RNA, 19 nt, Homo sapiens
  misc_RNA (1)...(19): siRNA sense strand
ugggaagugcugugaaaua

SEQ ID NO: 741394 - RNA, 19 nt, Homo sapiens
  misc_RNA (1)...(19): siRNA sense strand
gcacaucacaacauuuacu

SEQ ID NO: 741395 - RNA, 19 nt, Homo sapiens
  misc_RNA (1)...(19): siRNA sense strand
ggaagugcugugaaauaga

SEQ ID NO: 741396 - RNA, 19 nt, Homo sapiens
  misc_RNA (1)...(19): siRNA sense strand
ggccugggcaaacauaauu

SEQ ID NO: 741397 - RNA, 19 nt, Homo sapiens
  misc_RNA (1)...(19): siRNA sense strand
acagaacagucaccgacaa

SEQ ID NO: 741398 - RNA, 19 nt, Homo sapiens
  misc_RNA (1)...(19): siRNA sense strand
aaccacaacuacugcagaa

SEQ ID NO: 741399 - RNA, 19 nt, Homo sapiens
  misc_RNA (1)...(19): siRNA sense strand
guggagcagucuucguuuc

SEQ ID NO: 741400 - RNA, 19 nt, Homo sapiens
  misc_RNA (1)...(19): siRNA sense strand
gaacgauggccgcaugacu

SEQ ID NO: 741401 - RNA, 19 nt, Homo sapiens
  misc_RNA (1)...(19): siRNA sense strand
acucaaagcccuggugcua

SEQ ID NO: 741402 - RNA, 19 nt, Homo sapiens
  misc_RNA (1)...(19): siRNA sense strand
gcccuggugcuacgucuuu

SEQ ID NO: 741403 - RNA, 19 nt, Homo sapiens
  misc_RNA (1)...(19): siRNA sense strand
cagaagaggagccagaucu

SEQ ID NO: 741404 - RNA, 19 nt, Homo sapiens
  misc_RNA (1)...(19): siRNA sense strand
caacuaccuagacuggauu

SEQ ID NO: 741405 - RNA, 19 nt, Homo sapiens
  misc_RNA (1)...(19): siRNA sense strand
gaccagggcaucagcuaca

SEQ ID NO: 741406 - RNA, 19 nt, Homo sapiens
  misc_RNA (1)...(19): siRNA sense strand
gauaggcaagguuuacaca

SEQ ID NO: 741407 - RNA, 19 nt, Homo sapiens
  misc_RNA (1)...(19): siRNA sense strand
ccacaacuacugcagaaac

SEQ ID NO: 741408 - RNA, 19 nt, Homo sapiens
  misc_RNA (1)...(19): siRNA sense strand
gaauuccaugauccugaua

SEQ ID NO: 741409 - RNA, 19 nt, Homo sapiens
  misc_RNA (1)...(19): siRNA sense strand
cccuguacuucucagauuu

SEQ ID NO: 741410 - RNA, 19 nt, Homo sapiens
  misc_RNA (1)...(19): siRNA sense strand
caccaagguuaccaacuac

SEQ ID NO: 741411 - RNA, 19 nt, Homo sapiens
  misc_RNA (1)...(19): siRNA sense strand
guguggagcagucuucguu

SEQ ID NO: 741412 - RNA, 19 nt, Homo sapiens
  misc_RNA (1)...(19): siRNA sense strand
ugacugcuacuuugggaau

SEQ ID NO: 741413 - RNA, 19 nt, Homo sapiens
  misc_RNA (1)...(19): siRNA sense strand
uagacuggauucgugacaa

SEQ ID NO: 741414 - RNA, 19 nt, Homo sapiens
  misc_RNA (1)...(19): siRNA sense strand
gccugggcaaacauaauua

SEQ ID NO: 741415 - RNA, 19 nt, Homo sapiens
  misc_RNA (1)...(19): siRNA sense strand
ggacuggcaugauagguua

SEQ ID NO: 741416 - RNA, 19 nt, Homo sapiens
  misc_RNA (1)...(19): siRNA sense strand
gaugugggcucuaauaaau

SEQ ID NO: 741417 - RNA, 19 nt, Homo sapiens
  misc_RNA (1)...(19): siRNA sense strand
gaagguaagugaggugaga

SEQ ID NO: 741418 - RNA, 19 nt, Homo sapiens
  misc_RNA (1)...(19): siRNA sense strand
gagaauggauggcagaaag

SEQ ID NO: 741419 - RNA, 19 nt, Homo sapiens
  misc_RNA (1)...(19): siRNA sense strand
gaaauauuaccuagaccua

SEQ ID NO: 741420 - RNA, 19 nt, Homo sapiens
  misc_RNA (1)...(19): siRNA sense strand
gacaacaucagaaagagua

SEQ ID NO: 741421 - RNA, 19 nt, Homo sapiens
  misc_RNA (1)...(19): siRNA sense strand
gaagagaugaggaaaauuu

SEQ ID NO: 741422 - RNA, 19 nt, Homo sapiens
  misc_RNA (1)...(19): siRNA sense strand
cgaaggagacauagaagaa

SEQ ID NO: 741423 - RNA, 19 nt, Homo sapiens
  misc_RNA (1)...(19): siRNA sense strand
gcacaaggaaugauugagu

SEQ ID NO: 741424 - RNA, 19 nt, Homo sapiens
  misc_RNA (1)...(19): siRNA sense strand
cacaaggaaugauugaguu

SEQ ID NO: 741425 - RNA, 19 nt, Homo sapiens
  misc_RNA (1)...(19): siRNA sense strand
gggagaauuuuaucaagua

SEQ ID NO: 741426 - RNA, 19 nt, Homo sapiens
  misc_RNA (1)...(19): siRNA sense strand
ugaagacuauggcgaagga

SEQ ID NO: 741427 - RNA, 19 nt, Homo sapiens
  misc_RNA (1)...(19): siRNA sense strand
agacauagaagaacgaaga

SEQ ID NO: 741428 - RNA, 19 nt, Homo sapiens
  misc_RNA (1)...(19): siRNA sense strand
gaagagguggagacgauga

SEQ ID NO: 741429 - RNA, 19 nt, Homo sapiens
  misc_RNA (1)...(19): siRNA sense strand
uaucaaguaugaagaagag

SEQ ID NO: 741430 - RNA, 19 nt, Homo sapiens
  misc_RNA (1)...(19): siRNA sense strand
ggccaguggugaagaacaa

SEQ ID NO: 741431 - RNA, 19 nt, Homo sapiens
  misc_RNA (1)...(19): siRNA sense strand
gagcauggccacagcaaag

SEQ ID NO: 741432 - RNA, 19 nt, Homo sapiens
  misc_RNA (1)...(19): siRNA sense strand
ggucgcuuccuacggauua

SEQ ID NO: 741433 - RNA, 19 nt, Homo sapiens
  misc_RNA (1)...(19): siRNA sense strand
gagggacaauaggaaauau

SEQ ID NO: 741434 - RNA, 19 nt, Homo sapiens
  misc_RNA (1)...(19): siRNA sense strand
gauagccgaagucuggaua

SEQ ID NO: 741435 - RNA, 19 nt, Homo sapiens
  misc_RNA (1)...(19): siRNA sense strand
gccaagaacagacuauugu

SEQ ID NO: 741436 - RNA, 19 nt, Homo sapiens
  misc_RNA (1)...(19): siRNA sense strand
cgaagagcauccucacagu

SEQ ID NO: 741437 - RNA, 19 nt, Homo sapiens
  misc_RNA (1)...(19): siRNA sense strand
ugugggcucuaauaaauau

SEQ ID NO: 741438 - RNA, 19 nt, Homo sapiens
  misc_RNA (1)...(19): siRNA sense strand
aaaggccaguggugaagaa

SEQ ID NO: 741439 - RNA, 19 nt, Homo sapiens
  misc_RNA (1)...(19): siRNA sense strand
caggacaacaucagaaaga

SEQ ID NO: 741440 - RNA, 19 nt, Homo sapiens
  misc_RNA (1)...(19): siRNA sense strand
acgaagagguggagacgau

SEQ ID NO: 741441 - RNA, 19 nt, Homo sapiens
  misc_RNA (1)...(19): siRNA sense strand
cggauuagacaaaccauga

SEQ ID NO: 741442 - RNA, 19 nt, Homo sapiens
  misc_RNA (1)...(19): siRNA sense strand
cgagagggacaauaggaaa

SEQ ID NO: 741443 - RNA, 19 nt, Homo sapiens
  misc_RNA (1)...(19): siRNA sense strand
cagaaaggccaguggugaa

SEQ ID NO: 741444 - RNA, 19 nt, Homo sapiens
  misc_RNA (1)...(19): siRNA sense strand
gaaaggccaguggugaaga

SEQ ID NO: 741445 - RNA, 19 nt, Homo sapiens
  misc_RNA (1)...(19): siRNA sense strand
uuaccuagaccuaaaggaa

SEQ ID NO: 741446 - RNA, 19 nt, Homo sapiens
  misc_RNA (1)...(19): siRNA sense strand
ggccaagaacagacuauug

SEQ ID NO: 741447 - RNA, 19 nt, Homo sapiens
  misc_RNA (1)...(19): siRNA sense strand
ggacaacaucagaaagagu

SEQ ID NO: 741448 - RNA, 19 nt, Homo sapiens
  misc_RNA (1)...(19): siRNA sense strand
caacagccauaaagaaaag

SEQ ID NO: 741449 - RNA, 19 nt, Homo sapiens
  misc_RNA (1)...(19): siRNA sense strand
gaagaagagaugaggaaaa

SEQ ID NO: 741450 - RNA, 19 nt, Homo sapiens
  misc_RNA (1)...(19): siRNA sense strand
gcgaaggagacauagaaga

SEQ ID NO: 741451 - RNA, 19 nt, Homo sapiens
  misc_RNA (1)...(19): siRNA sense strand
gagagggacaauaggaaau

SEQ ID NO: 741452 - RNA, 19 nt, Homo sapiens
  misc_RNA (1)...(19): siRNA sense strand
ugcaacagccauaaagaaa

SEQ ID NO: 741453 - RNA, 19 nt, Homo sapiens
  misc_RNA (1)...(19): siRNA sense strand
ggacaagguuuggggagaa

SEQ ID NO: 741454 - RNA, 19 nt, Homo sapiens
  misc_RNA (1)...(19): siRNA sense strand
ugaugugggcucuaauaaa

SEQ ID NO: 741455 - RNA, 19 nt, Homo sapiens
  misc_RNA (1)...(19): siRNA sense strand
gggacuucaucgagcacua

SEQ ID NO: 741456 - RNA, 19 nt, Homo sapiens
  misc_RNA (1)...(19): siRNA sense strand
ggcaggacaacaucagaaa

SEQ ID NO: 741457 - RNA, 19 nt, Homo sapiens
  misc_RNA (1)...(19): siRNA sense strand
gggacuggcaugauagguu

SEQ ID NO: 741458 - RNA, 19 nt, Homo sapiens
  misc_RNA (1)...(19): siRNA sense strand
agagggacaauaggaaaua

SEQ ID NO: 741459 - RNA, 19 nt, Homo sapiens
  misc_RNA (1)...(19): siRNA sense strand
ggacuucaucgagcacuau

SEQ ID NO: 741460 - RNA, 19 nt, Homo sapiens
  misc_RNA (1)...(19): siRNA sense strand
ucagcugauugaagacuau

SEQ ID NO: 741461 - RNA, 19 nt, Homo sapiens
  misc_RNA (1)...(19): siRNA sense strand
acaagaaugccucgacuag

SEQ ID NO: 741462 - RNA, 19 nt, Homo sapiens
  misc_RNA (1)...(19): siRNA sense strand
caaguaugaagaagagaug

SEQ ID NO: 741463 - RNA, 19 nt, Homo sapiens
  misc_RNA (1)...(19): siRNA sense strand
gauuagacaaaccaugaug

SEQ ID NO: 741464 - RNA, 19 nt, Homo sapiens
  misc_RNA (1)...(19): siRNA sense strand
cuauuacuguuccauucaa

SEQ ID NO: 741465 - RNA, 19 nt, Homo sapiens
  misc_RNA (1)...(19): siRNA sense strand
uggcgaaggagacauagaa

SEQ ID NO: 741466 - RNA, 19 nt, Homo sapiens
  misc_RNA (1)...(19): siRNA sense strand
acaaggaaugauugaguuu

SEQ ID NO: 741467 - RNA, 19 nt, Homo sapiens
  misc_RNA (1)...(19): siRNA sense strand
caacaucagaaagaguaaa

SEQ ID NO: 741468 - RNA, 19 nt, Homo sapiens
  misc_RNA (1)...(19): siRNA sense strand
uaccuagaccuaaaggaaa

SEQ ID NO: 741469 - RNA, 19 nt, Homo sapiens
  misc_RNA (1)...(19): siRNA sense strand
gagacgaugacccgcuuga

SEQ ID NO: 741470 - RNA, 19 nt, Homo sapiens
  misc_RNA (1)...(19): siRNA sense strand
gagcugaaggacugucuag

SEQ ID NO: 741471 - RNA, 19 nt, Homo sapiens
  misc_RNA (1)...(19): siRNA sense strand
gaaaggccaccggcaagag

SEQ ID NO: 741472 - RNA, 19 nt, Homo sapiens
  misc_RNA (1)...(19): siRNA sense strand
gcaacagccauaaagaaaa

SEQ ID NO: 741473 - RNA, 19 nt, Homo sapiens
  misc_RNA (1)...(19): siRNA sense strand
aagaagagaugaggaaaau

SEQ ID NO: 741474 - RNA, 19 nt, Homo sapiens
  misc_RNA (1)...(19): siRNA sense strand
uacuauuacuguuccauuc

SEQ ID NO: 741475 - RNA, 19 nt, Homo sapiens
  misc_RNA (1)...(19): siRNA sense strand
cagcacaaggaaugauuga

SEQ ID NO: 741476 - RNA, 19 nt, Homo sapiens
  misc_RNA (1)...(19): siRNA sense strand
gaaggagacauagaagaac

SEQ ID NO: 741477 - RNA, 19 nt, Homo sapiens
  misc_RNA (1)...(19): siRNA sense strand
caucagaaagaguaaacug

SEQ ID NO: 741478 - RNA, 19 nt, Homo sapiens
  misc_RNA (1)...(19): siRNA sense strand
uuucagaguggacaauaaa

SEQ ID NO: 741479 - RNA, 19 nt, Homo sapiens
  misc_RNA (1)...(19): siRNA sense strand
cuuucagaguggacaauaa

SEQ ID NO: 741480 - RNA, 19 nt, Homo sapiens
  misc_RNA (1)...(19): siRNA sense strand
ccagaaggaggcagaagca

SEQ ID NO: 741481 - RNA, 19 nt, Homo sapiens
  misc_RNA (1)...(19): siRNA sense strand
ugaagaagagaugaggaaa

SEQ ID NO: 741482 - RNA, 19 nt, Homo sapiens
  misc_RNA (1)...(19): siRNA sense strand
gcaggacaacaucagaaag

SEQ ID NO: 741483 - RNA, 19 nt, Homo sapiens
  misc_RNA (1)...(19): siRNA sense strand
ggagacauagaagaacgaa

SEQ ID NO: 741484 - RNA, 19 nt, Homo sapiens
  misc_RNA (1)...(19): siRNA sense strand
caaggaaugauugaguuuc

SEQ ID NO: 741485 - RNA, 19 nt, Homo sapiens
  misc_RNA (1)...(19): siRNA sense strand
aagagcauccucacagugu

SEQ ID NO: 741486 - RNA, 19 nt, Homo sapiens
  misc_RNA (1)...(19): siRNA sense strand
uugcaacagccauaaagaa

SEQ ID NO: 741487 - RNA, 19 nt, Homo sapiens
  misc_RNA (1)...(19): siRNA sense strand
uuugaugugggcucuaaua

SEQ ID NO: 741488 - RNA, 19 nt, Homo sapiens
  misc_RNA (1)...(19): siRNA sense strand
ggauuagacaaaccaugau

SEQ ID NO: 741489 - RNA, 19 nt, Homo sapiens
  misc_RNA (1)...(19): siRNA sense strand
ugaaaggccaccggcaaga

SEQ ID NO: 741490 - RNA, 19 nt, Homo sapiens
  misc_RNA (1)...(19): siRNA sense strand
gggcucuaauaaauaugga

SEQ ID NO: 741491 - RNA, 19 nt, Homo sapiens
  misc_RNA (1)...(19): siRNA sense strand
augauugaguuucgugaug

SEQ ID NO: 741492 - RNA, 19 nt, Homo sapiens
  misc_RNA (1)...(19): siRNA sense strand
ucaaguaugaagaagagau

SEQ ID NO: 741493 - RNA, 19 nt, Homo sapiens
  misc_RNA (1)...(19): siRNA sense strand
ggggagaauuuuaucaagu

SEQ ID NO: 741494 - RNA, 19 nt, Homo sapiens
  misc_RNA (1)...(19): siRNA sense strand
acuuugaugugggcucuaa

SEQ ID NO: 741495 - RNA, 19 nt, Homo sapiens
  misc_RNA (1)...(19): siRNA sense strand
gacgaugacccgcuugaac

SEQ ID NO: 741496 - RNA, 19 nt, Homo sapiens
  misc_RNA (1)...(19): siRNA sense strand
ggagcugaaggacugucua

SEQ ID NO: 741497 - RNA, 19 nt, Homo sapiens
  misc_RNA (1)...(19): siRNA sense strand
ggaggaagcucuggauuua

SEQ ID NO: 741498 - RNA, 19 nt, Homo sapiens
  misc_RNA (1)...(19): siRNA sense strand
ggacauagaugaugaaugg

SEQ ID NO: 741499 - RNA, 19 nt, Homo sapiens
  misc_RNA (1)...(19): siRNA sense strand
gaagaagcaucuacaguug

SEQ ID NO: 741500 - RNA, 19 nt, Homo sapiens
  misc_RNA (1)...(19): siRNA sense strand
caacacagcuggcgagguu

SEQ ID NO: 741501 - RNA, 19 nt, Homo sapiens
  misc_RNA (1)...(19): siRNA sense strand
gaaaggaggugacgugucu

SEQ ID NO: 741502 - RNA, 19 nt, Homo sapiens
  misc_RNA (1)...(19): siRNA sense strand
ccagaaaguuuacucauau

SEQ ID NO: 741503 - RNA, 19 nt, Homo sapiens
  misc_RNA (1)...(19): siRNA sense strand
ugaauaagaugacucagaa

SEQ ID NO: 741504 - RNA, 19 nt, Homo sapiens
  misc_RNA (1)...(19): siRNA sense strand
guacuugucuugcauuaug

SEQ ID NO: 741505 - RNA, 19 nt, Homo sapiens
  misc_RNA (1)...(19): siRNA sense strand
gccagaaaguuuacucaua

SEQ ID NO: 741506 - RNA, 19 nt, Homo sapiens
  misc_RNA (1)...(19): siRNA sense strand
gcaguguucucacaucauu

SEQ ID NO: 741507 - RNA, 19 nt, Homo sapiens
  misc_RNA (1)...(19): siRNA sense strand
caaaucuucucuuaccuaa

SEQ ID NO: 741508 - RNA, 19 nt, Homo sapiens
  misc_RNA (1)...(19): siRNA sense strand
gagaagcacuggagauuac

SEQ ID NO: 741509 - RNA, 19 nt, Homo sapiens
  misc_RNA (1)...(19): siRNA sense strand
gaugaacaguguagugcua

SEQ ID NO: 741510 - RNA, 19 nt, Homo sapiens
  misc_RNA (1)...(19): siRNA sense strand
gcucaaaucuucgucaugu

SEQ ID NO: 741511 - RNA, 19 nt, Homo sapiens
  misc_RNA (1)...(19): siRNA sense strand
gaggaugaaucaaaucuuc

SEQ ID NO: 741512 - RNA, 19 nt, Homo sapiens
  misc_RNA (1)...(19): siRNA sense strand
guaauggacuaauugcuau

SEQ ID NO: 741513 - RNA, 19 nt, Homo sapiens
  misc_RNA (1)...(19): siRNA sense strand
acacguagauuguucaaau

SEQ ID NO: 741514 - RNA, 19 nt, Homo sapiens
  misc_RNA (1)...(19): siRNA sense strand
aaacuaaucuguuguacuc

SEQ ID NO: 741515 - RNA, 19 nt, Homo sapiens
  misc_RNA (1)...(19): siRNA sense strand
ggagacgucaggcuuaaua

SEQ ID NO: 741516 - RNA, 19 nt, Homo sapiens
  misc_RNA (1)...(19): siRNA sense strand
gcucggagucuuuauuaua

SEQ ID NO: 741517 - RNA, 19 nt, Homo sapiens
  misc_RNA (1)...(19): siRNA sense strand
caaaauagcagccaccuua

SEQ ID NO: 741518 - RNA, 19 nt, Homo sapiens
  misc_RNA (1)...(19): siRNA sense strand
ucacagaagucucuaccaa

SEQ ID NO: 741519 - RNA, 19 nt, Homo sapiens
  misc_RNA (1)...(19): siRNA sense strand
uaacucggauggccagaaa

SEQ ID NO: 741520 - RNA, 19 nt, Homo sapiens
  misc_RNA (1)...(19): siRNA sense strand
ggucaguacuugaaagaug

SEQ ID NO: 741521 - RNA, 19 nt, Homo sapiens
  misc_RNA (1)...(19): siRNA sense strand
uaaugcagauggauucuug

SEQ ID NO: 741522 - RNA, 19 nt, Homo sapiens
  misc_RNA (1)...(19): siRNA sense strand
ggacgugaaggaagagaua

SEQ ID NO: 741523 - RNA, 19 nt, Homo sapiens
  misc_RNA (1)...(19): siRNA sense strand
cagcagauguaauuggaaa

SEQ ID NO: 741524 - RNA, 19 nt, Homo sapiens
  misc_RNA (1)...(19): siRNA sense strand
guccuuugcuguuuccuua

SEQ ID NO: 741525 - RNA, 19 nt, Homo sapiens
  misc_RNA (1)...(19): siRNA sense strand
ggucauaagucauuuacag

SEQ ID NO: 741526 - RNA, 19 nt, Homo sapiens
  misc_RNA (1)...(19): siRNA sense strand
guguuaagcucaaaucuuc

SEQ ID NO: 741527 - RNA, 19 nt, Homo sapiens
  misc_RNA (1)...(19): siRNA sense strand
ugaaagaguuggucaguac

SEQ ID NO: 741528 - RNA, 19 nt, Homo sapiens
  misc_RNA (1)...(19): siRNA sense strand
ucacauuuguugcugaauu

SEQ ID NO: 741529 - RNA, 19 nt, Homo sapiens
  misc_RNA (1)...(19): siRNA sense strand
gagaccagauggcaaacuu

SEQ ID NO: 741530 - RNA, 19 nt, Homo sapiens
  misc_RNA (1)...(19): siRNA sense strand
uaagaugacucagaaagau

SEQ ID NO: 741531 - RNA, 19 nt, Homo sapiens
  misc_RNA (1)...(19): siRNA sense strand
uaacugcuguggguucuuu

SEQ ID NO: 741532 - RNA, 19 nt, Homo sapiens
  misc_RNA (1)...(19): siRNA sense strand
gcuugaaacuaaucuguug

SEQ ID NO: 741533 - RNA, 19 nt, Homo sapiens
  misc_RNA (1)...(19): siRNA sense strand
cuacaaggcuagaugaaca

SEQ ID NO: 741534 - RNA, 19 nt, Homo sapiens
  misc_RNA (1)...(19): siRNA sense strand
ggauggaagugacaguaga

SEQ ID NO: 741535 - RNA, 19 nt, Homo sapiens
  misc_RNA (1)...(19): siRNA sense strand
cgcuuuagcuccagagaua

SEQ ID NO: 741536 - RNA, 19 nt, Homo sapiens
  misc_RNA (1)...(19): siRNA sense strand
ggagacauacugauauuuc

SEQ ID NO: 741537 - RNA, 19 nt, Homo sapiens
  misc_RNA (1)...(19): siRNA sense strand
acagaagucucuaccaaug

SEQ ID NO: 741538 - RNA, 19 nt, Homo sapiens
  misc_RNA (1)...(19): siRNA sense strand
caaugaggcuccagaccuu

SEQ ID NO: 741539 - RNA, 19 nt, Homo sapiens
  misc_RNA (1)...(19): siRNA sense strand
caagcaaucuguauuccau

SEQ ID NO: 741540 - RNA, 19 nt, Homo sapiens
  misc_RNA (1)...(19): siRNA sense strand
aggaagcucuggauuuauu

SEQ ID NO: 741541 - RNA, 19 nt, Homo sapiens
  misc_RNA (1)...(19): siRNA sense strand
gaacuucagacucucuuga

SEQ ID NO: 741542 - RNA, 19 nt, Homo sapiens
  misc_RNA (1)...(19): siRNA sense strand
ccauuugagugaauugaaa

SEQ ID NO: 741543 - RNA, 19 nt, Homo sapiens
  misc_RNA (1)...(19): siRNA sense strand
gaggaggaggccaguaaua

SEQ ID NO: 741544 - RNA, 19 nt, Homo sapiens
  misc_RNA (1)...(19): siRNA sense strand
gaaauggacauagaugaug

SEQ ID NO: 741545 - RNA, 19 nt, Homo sapiens
  misc_RNA (1)...(19): siRNA sense strand
gccuuugucuuuaguauau

SEQ ID NO: 741546 - RNA, 19 nt, Homo sapiens
  misc_RNA (1)...(19): siRNA sense strand
uuaaggagacauacugaua

SEQ ID NO: 741547 - RNA, 19 nt, Homo sapiens
  misc_RNA (1)...(19): siRNA sense strand
aaaggcggauggagaauau

SEQ ID NO: 741548 - RNA, 19 nt, Homo sapiens
  misc_RNA (1)...(19): siRNA sense strand
gcagccaccuuaaagaaag

SEQ ID NO: 741549 - RNA, 19 nt, Homo sapiens
  misc_RNA (1)...(19): siRNA sense strand
caaggcaaaugaacuucuu

SEQ ID NO: 741550 - RNA, 19 nt, Homo sapiens
  misc_RNA (1)...(19): siRNA sense strand
gaaaggacacaaccacauc

SEQ ID NO: 741551 - RNA, 19 nt, Homo sapiens
  misc_RNA (1)...(19): siRNA sense strand
cuccagagauagucauuaa

SEQ ID NO: 741552 - RNA, 19 nt, Homo sapiens
  misc_RNA (1)...(19): siRNA sense strand
guucaugcacuugcuauua

SEQ ID NO: 741553 - RNA, 19 nt, Homo sapiens
  misc_RNA (1)...(19): siRNA sense strand
gggaagaaauacuaaugca

SEQ ID NO: 741554 - RNA, 19 nt, Homo sapiens
  misc_RNA (1)...(19): siRNA sense strand
gauagucauuaaaguggaa

SEQ ID NO: 741555 - RNA, 19 nt, Homo sapiens
  misc_RNA (1)...(19): siRNA sense strand
ccagcugccuuugucuuua

SEQ ID NO: 741556 - RNA, 19 nt, Homo sapiens
  misc_RNA (1)...(19): siRNA sense strand
cacauuuguugcugaauuu

SEQ ID NO: 741557 - RNA, 19 nt, Homo sapiens
  misc_RNA (1)...(19): siRNA sense strand
ugaagcaugggaagaaaua

SEQ ID NO: 741558 - RNA, 19 nt, Homo sapiens
  misc_RNA (1)...(19): siRNA sense strand
agaagaagcaucuacaguu

SEQ ID NO: 741559 - RNA, 19 nt, Homo sapiens
  misc_RNA (1)...(19): siRNA sense strand
gaaucaagcaaucuguauu

SEQ ID NO: 741560 - RNA, 19 nt, Homo sapiens
  misc_RNA (1)...(19): siRNA sense strand
guggcaauguugagaauga

SEQ ID NO: 741561 - RNA, 19 nt, Homo sapiens
  misc_RNA (1)...(19): siRNA sense strand
ccaguuuccuguaugcauu

SEQ ID NO: 741562 - RNA, 19 nt, Homo sapiens
  misc_RNA (1)...(19): siRNA sense strand
aaauggacauagaugauga

SEQ ID NO: 741563 - RNA, 19 nt, Homo sapiens
  misc_RNA (1)...(19): siRNA sense strand
gcauuauguuuaucaagug

SEQ ID NO: 741564 - RNA, 19 nt, Homo sapiens
  misc_RNA (1)...(19): siRNA sense strand
gcuuuaugcuuauggaaug

SEQ ID NO: 741565 - RNA, 19 nt, Homo sapiens
  misc_RNA (1)...(19): siRNA sense strand
agaagcaucuacaguuguu

SEQ ID NO: 741566 - RNA, 19 nt, Homo sapiens
  misc_RNA (1)...(19): siRNA sense strand
ugguaugacuuucuucaaa

SEQ ID NO: 741567 - RNA, 19 nt, Homo sapiens
  misc_RNA (1)...(19): siRNA sense strand
gucaguacuugaaagauga

SEQ ID NO: 741568 - RNA, 19 nt, Homo sapiens
  misc_RNA (1)...(19): siRNA sense strand
uuugggagcuuuacauaug

SEQ ID NO: 741569 - RNA, 19 nt, Homo sapiens
  misc_RNA (1)...(19): siRNA sense strand
aaggagacauacugauauu

SEQ ID NO: 741570 - RNA, 19 nt, Homo sapiens
  misc_RNA (1)...(19): siRNA sense strand
ugaaagaugaagaugauga

SEQ ID NO: 741571 - RNA, 19 nt, Homo sapiens
  misc_RNA (1)...(19): siRNA sense strand
caugugagaguauuugaaa

SEQ ID NO: 741572 - RNA, 19 nt, Homo sapiens
  misc_RNA (1)...(19): siRNA sense strand
gagacauacugauauuucu

SEQ ID NO: 741573 - RNA, 19 nt, Homo sapiens
  misc_RNA (1)...(19): siRNA sense strand
gccagcagauguaauugga

SEQ ID NO: 741574 - RNA, 19 nt, Homo sapiens
  misc_RNA (1)...(19): siRNA sense strand
gaaagaugaagaugaugau

SEQ ID NO: 741575 - RNA, 19 nt, Homo sapiens
  misc_RNA (1)...(19): siRNA sense strand
cuaaucuguuguacucuuu

SEQ ID NO: 741576 - RNA, 19 nt, Homo sapiens
  misc_RNA (1)...(19): siRNA sense strand
auaugaaccucuuggacua

SEQ ID NO: 741577 - RNA, 19 nt, Homo sapiens
  misc_RNA (1)...(19): siRNA sense strand
ggaaaggacacaaccacau

SEQ ID NO: 741578 - RNA, 19 nt, Homo sapiens
  misc_RNA (1)...(19): siRNA sense strand
ccaaguuugugcagggaaa

SEQ ID NO: 741579 - RNA, 19 nt, Homo sapiens
  misc_RNA (1)...(19): siRNA sense strand
gacagaagaccaugugcuu

SEQ ID NO: 741580 - RNA, 19 nt, Homo sapiens
  misc_RNA (1)...(19): siRNA sense strand
gcacuggagauuacuggaa

SEQ ID NO: 741581 - RNA, 19 nt, Homo sapiens
  misc_RNA (1)...(19): siRNA sense strand
uuacauaugccacaacaga

SEQ ID NO: 741582 - RNA, 19 nt, Homo sapiens
  misc_RNA (1)...(19): siRNA sense strand
uaaggagacauacugauau

SEQ ID NO: 741583 - RNA, 19 nt, Homo sapiens
  misc_RNA (1)...(19): siRNA sense strand
cuugaaagaugaagaugau

SEQ ID NO: 741584 - RNA, 19 nt, Homo sapiens
  misc_RNA (1)...(19): siRNA sense strand
ucauauuucagcucuguua

SEQ ID NO: 741585 - RNA, 19 nt, Homo sapiens
  misc_RNA (1)...(19): siRNA sense strand
ucaaaucuucgucauguga

SEQ ID NO: 741586 - RNA, 19 nt, Homo sapiens
  misc_RNA (1)...(19): siRNA sense strand
aaaaguguccuguguguua

SEQ ID NO: 741587 - RNA, 19 nt, Homo sapiens
  misc_RNA (1)...(19): siRNA sense strand
uuguuuagaugcacaguuu

SEQ ID NO: 741588 - RNA, 19 nt, Homo sapiens
  misc_RNA (1)...(19): siRNA sense strand
aaagccagcagauguaauu

SEQ ID NO: 741589 - RNA, 19 nt, Homo sapiens
  misc_RNA (1)...(19): siRNA sense strand
ccagugguaugacuuucuu

SEQ ID NO: 741590 - RNA, 19 nt, Homo sapiens
  misc_RNA (1)...(19): siRNA sense strand
cagacucucuugaugaauc

SEQ ID NO: 741591 - RNA, 19 nt, Homo sapiens
  misc_RNA (1)...(19): siRNA sense strand
aaucuucucuuaccuaaac

SEQ ID NO: 741592 - RNA, 19 nt, Homo sapiens
  misc_RNA (1)...(19): siRNA sense strand
gaacaguguagugcuauuc

SEQ ID NO: 741593 - RNA, 19 nt, Homo sapiens
  misc_RNA (1)...(19): siRNA sense strand
uguaggacgugaaggaaga

SEQ ID NO: 741594 - RNA, 19 nt, Homo sapiens
  misc_RNA (1)...(19): siRNA sense strand
gcaaaagccagcagaugua

SEQ ID NO: 741595 - RNA, 19 nt, Homo sapiens
  misc_RNA (1)...(19): siRNA sense strand
gaugaaucaguuaacagua

SEQ ID NO: 741596 - RNA, 19 nt, Homo sapiens
  misc_RNA (1)...(19): siRNA sense strand
gacgucaggcuuaauauuc

SEQ ID NO: 741597 - RNA, 19 nt, Homo sapiens
  misc_RNA (1)...(19): siRNA sense strand
gaaggaggcucaugucaga

SEQ ID NO: 741598 - RNA, 19 nt, Homo sapiens
  misc_RNA (1)...(19): siRNA sense strand
gaagugcugugaaauagau

SEQ ID NO: 741599 - RNA, 19 nt, Homo sapiens
  misc_RNA (1)...(19): siRNA sense strand
acaccaagguuaccaacua

SEQ ID NO: 741600 - RNA, 19 nt, Homo sapiens
  misc_RNA (1)...(19): siRNA sense strand
gcugggaagugcugugaaa

SEQ ID NO: 741601 - RNA, 19 nt, Homo sapiens
  misc_RNA (1)...(19): siRNA sense strand
gggaagugcugugaaauag

SEQ ID NO: 741602 - RNA, 19 nt, Homo sapiens
  misc_RNA (1)...(19): siRNA sense strand
ggaauuccaugauccugau

SEQ ID NO: 741603 - RNA, 19 nt, Homo sapiens
  misc_RNA (1)...(19): siRNA sense strand
ggaaguacagcucagaguu

SEQ ID NO: 741604 - RNA, 19 nt, Homo sapiens
  misc_RNA (1)...(19): siRNA sense strand
gaaguacagcucagaguuc

SEQ ID NO: 741605 - RNA, 19 nt, Homo sapiens
  misc_RNA (1)...(19): siRNA sense strand
aaacccagaucgagacuca

SEQ ID NO: 741606 - RNA, 19 nt, Homo sapiens
  misc_RNA (1)...(19): siRNA sense strand
gcccuguacuucucagauu

SEQ ID NO: 741607 - RNA, 19 nt, Homo sapiens
  misc_RNA (1)...(19): siRNA sense strand
gcagcgagccaagguguuu

SEQ ID NO: 741608 - RNA, 19 nt, Homo sapiens
  misc_RNA (1)...(19): siRNA sense strand
ccaacuaccuagacuggau

SEQ ID NO: 741609 - RNA, 19 nt, Homo sapiens
  misc_RNA (1)...(19): siRNA sense strand
cugcacaucacaacauuua

SEQ ID NO: 741610 - RNA, 19 nt, Homo sapiens
  misc_RNA (1)...(19): siRNA sense strand
gaacagucaccgacaacau

SEQ ID NO: 741611 - RNA, 19 nt, Homo sapiens
  misc_RNA (1)...(19): siRNA sense strand
gcucugagggaaacaguga

SEQ ID NO: 741612 - RNA, 19 nt, Homo sapiens
  misc_RNA (1)...(19): siRNA sense strand
uuacuuaacagaacaguca

SEQ ID NO: 741613 - RNA, 19 nt, Homo sapiens
  misc_RNA (1)...(19): siRNA sense strand
ugggaagugcugugaaaua

SEQ ID NO: 741614 - RNA, 19 nt, Homo sapiens
  misc_RNA (1)...(19): siRNA sense strand
gcacaucacaacauuuacu

SEQ ID NO: 741615 - RNA, 19 nt, Homo sapiens
  misc_RNA (1)...(19): siRNA sense strand
ggaagugcugugaaauaga

SEQ ID NO: 741616 - RNA, 19 nt, Homo sapiens
  misc_RNA (1)...(19): siRNA sense strand
ggccugggcaaacauaauu

SEQ ID NO: 741617 - RNA, 19 nt, Homo sapiens
  misc_RNA (1)...(19): siRNA sense strand
acagaacagucaccgacaa

SEQ ID NO: 741618 - RNA, 19 nt, Homo sapiens
  misc_RNA (1)...(19): siRNA sense strand
aaccacaacuacugcagaa

SEQ ID NO: 741619 - RNA, 19 nt, Homo sapiens
  misc_RNA (1)...(19): siRNA sense strand
guggagcagucuucguuuc

SEQ ID NO: 741620 - RNA, 19 nt, Homo sapiens
  misc_RNA (1)...(19): siRNA sense strand
gaacgauggccgcaugacu

SEQ ID NO: 741621 - RNA, 19 nt, Homo sapiens
  misc_RNA (1)...(19): siRNA sense strand
acucaaagcccuggugcua

SEQ ID NO: 741622 - RNA, 19 nt, Homo sapiens
  misc_RNA (1)...(19): siRNA sense strand
gcccuggugcuacgucuuu

SEQ ID NO: 741623 - RNA, 19 nt, Homo sapiens
  misc_RNA (1)...(19): siRNA sense strand
cagaagaggagccagaucu

SEQ ID NO: 741624 - RNA, 19 nt, Homo sapiens
  misc_RNA (1)...(19): siRNA sense strand
caacuaccuagacuggauu

SEQ ID NO: 741625 - RNA, 19 nt, Homo sapiens
  misc_RNA (1)...(19): siRNA sense strand
gaccagggcaucagcuaca

SEQ ID NO: 741626 - RNA, 19 nt, Homo sapiens
  misc_RNA (1)...(19): siRNA sense strand
gauaggcaagguuuacaca

SEQ ID NO: 741627 - RNA, 19 nt, Homo sapiens
  misc_RNA (1)...(19): siRNA sense strand
ccacaacuacugcagaaac

SEQ ID NO: 741628 - RNA, 19 nt, Homo sapiens
  misc_RNA (1)...(19): siRNA sense strand
gaauuccaugauccugaua

SEQ ID NO: 741629 - RNA, 19 nt, Homo sapiens
  misc_RNA (1)...(19): siRNA sense strand
cccuguacuucucagauuu

SEQ ID NO: 741630 - RNA, 19 nt, Homo sapiens
  misc_RNA (1)...(19): siRNA sense strand
caccaagguuaccaacuac

SEQ ID NO: 741631 - RNA, 19 nt, Homo sapiens
  misc_RNA (1)...(19): siRNA sense strand
guguggagcagucuucguu

SEQ ID NO: 741632 - RNA, 19 nt, Homo sapiens
  misc_RNA (1)...(19): siRNA sense strand
ugacugcuacuuugggaau

SEQ ID NO: 741633 - RNA, 19 nt, Homo sapiens
  misc_RNA (1)...(19): siRNA sense strand
uagacuggauucgugacaa

SEQ ID NO: 741634 - RNA, 19 nt, Homo sapiens
  misc_RNA (1)...(19): siRNA sense strand
gccugggcaaacauaauua

SEQ ID NO: 741635 - RNA, 19 nt, Homo sapiens
  misc_RNA (1)...(19): siRNA sense strand
gaagugcugugaaauagau

SEQ ID NO: 741636 - RNA, 19 nt, Homo sapiens
  misc_RNA (1)...(19): siRNA sense strand
gcugggaagugcugugaaa

SEQ ID NO: 741637 - RNA, 19 nt, Homo sapiens
  misc_RNA (1)...(19): siRNA sense strand
gggaagugcugugaaauag

SEQ ID NO: 741638 - RNA, 19 nt, Homo sapiens
  misc_RNA (1)...(19): siRNA sense strand
ggaauuccaugauccugau

SEQ ID NO: 741639 - RNA, 19 nt, Homo sapiens
  misc_RNA (1)...(19): siRNA sense strand
ggccuugucuccuuucuau

SEQ ID NO: 741640 - RNA, 19 nt, Homo sapiens
  misc_RNA (1)...(19): siRNA sense strand
ggaaguacagcucagaguu

SEQ ID NO: 741641 - RNA, 19 nt, Homo sapiens
  misc_RNA (1)...(19): siRNA sense strand
gaaguacagcucagaguuc

SEQ ID NO: 741642 - RNA, 19 nt, Homo sapiens
  misc_RNA (1)...(19): siRNA sense strand
aaacccagaucgagacuca

SEQ ID NO: 741643 - RNA, 19 nt, Homo sapiens
  misc_RNA (1)...(19): siRNA sense strand
gcccuguacuucucagauu

SEQ ID NO: 741644 - RNA, 19 nt, Homo sapiens
  misc_RNA (1)...(19): siRNA sense strand
gcagcgagccaagguguuu

SEQ ID NO: 741645 - RNA, 19 nt, Homo sapiens
  misc_RNA (1)...(19): siRNA sense strand
caugaggccuugucuccuu

SEQ ID NO: 741646 - RNA, 19 nt, Homo sapiens
  misc_RNA (1)...(19): siRNA sense strand
gcucugagggaaacaguga

SEQ ID NO: 741647 - RNA, 19 nt, Homo sapiens
  misc_RNA (1)...(19): siRNA sense strand
ugggaagugcugugaaaua

SEQ ID NO: 741648 - RNA, 19 nt, Homo sapiens
  misc_RNA (1)...(19): siRNA sense strand
ggaagugcugugaaauaga

SEQ ID NO: 741649 - RNA, 19 nt, Homo sapiens
  misc_RNA (1)...(19): siRNA sense strand
ggccugggcaaacauaauu

SEQ ID NO: 741650 - RNA, 19 nt, Homo sapiens
  misc_RNA (1)...(19): siRNA sense strand
aaccacaacuacugcagaa

SEQ ID NO: 741651 - RNA, 19 nt, Homo sapiens
  misc_RNA (1)...(19): siRNA sense strand
guggagcagucuucguuuc

SEQ ID NO: 741652 - RNA, 19 nt, Homo sapiens
  misc_RNA (1)...(19): siRNA sense strand
acucaaagcccuggugcua

SEQ ID NO: 741653 - RNA, 19 nt, Homo sapiens
  misc_RNA (1)...(19): siRNA sense strand
gcccuggugcuacgucuuu

SEQ ID NO: 741654 - RNA, 19 nt, Homo sapiens
  misc_RNA (1)...(19): siRNA sense strand
gaccagggcaucagcuaca

SEQ ID NO: 741655 - RNA, 19 nt, Homo sapiens
  misc_RNA (1)...(19): siRNA sense strand
cagaagaggagccagaucu

SEQ ID NO: 741656 - RNA, 19 nt, Homo sapiens
  misc_RNA (1)...(19): siRNA sense strand
gauaggcaagguuuacaca

SEQ ID NO: 741657 - RNA, 19 nt, Homo sapiens
  misc_RNA (1)...(19): siRNA sense strand
ccacaacuacugcagaaac

SEQ ID NO: 741658 - RNA, 19 nt, Homo sapiens
  misc_RNA (1)...(19): siRNA sense strand
gaauuccaugauccugaua

SEQ ID NO: 741659 - RNA, 19 nt, Homo sapiens
  misc_RNA (1)...(19): siRNA sense strand
cccuguacuucucagauuu

SEQ ID NO: 741660 - RNA, 19 nt, Homo sapiens
  misc_RNA (1)...(19): siRNA sense strand
ugacugcuacuuugggaau

SEQ ID NO: 741661 - RNA, 19 nt, Homo sapiens
  misc_RNA (1)...(19): siRNA sense strand
guguggagcagucuucguu

SEQ ID NO: 741662 - RNA, 19 nt, Homo sapiens
  misc_RNA (1)...(19): siRNA sense strand
ccuugucuccuuucuauuc

SEQ ID NO: 741663 - RNA, 19 nt, Homo sapiens
  misc_RNA (1)...(19): siRNA sense strand
gccugggcaaacauaauua

SEQ ID NO: 741664 - RNA, 19 nt, Homo sapiens
  misc_RNA (1)...(19): siRNA sense strand
gaaggaggcucaugucaga

SEQ ID NO: 741665 - RNA, 19 nt, Homo sapiens
  misc_RNA (1)...(19): siRNA sense strand
gaagugcugugaaauagau

SEQ ID NO: 741666 - RNA, 19 nt, Homo sapiens
  misc_RNA (1)...(19): siRNA sense strand
acaccaagguuaccaacua

SEQ ID NO: 741667 - RNA, 19 nt, Homo sapiens
  misc_RNA (1)...(19): siRNA sense strand
gcugggaagugcugugaaa

SEQ ID NO: 741668 - RNA, 19 nt, Homo sapiens
  misc_RNA (1)...(19): siRNA sense strand
gggaagugcugugaaauag

SEQ ID NO: 741669 - RNA, 19 nt, Homo sapiens
  misc_RNA (1)...(19): siRNA sense strand
ggaauuccaugauccugau

SEQ ID NO: 741670 - RNA, 19 nt, Homo sapiens
  misc_RNA (1)...(19): siRNA sense strand
ggaaguacagcucagaguu

SEQ ID NO: 741671 - RNA, 19 nt, Homo sapiens
  misc_RNA (1)...(19): siRNA sense strand
gaaguacagcucagaguuc

SEQ ID NO: 741672 - RNA, 19 nt, Homo sapiens
  misc_RNA (1)...(19): siRNA sense strand
aaacccagaucgagacuca

SEQ ID NO: 741673 - RNA, 19 nt, Homo sapiens
  misc_RNA (1)...(19): siRNA sense strand
gcccuguacuucucagauu

SEQ ID NO: 741674 - RNA, 19 nt, Homo sapiens
  misc_RNA (1)...(19): siRNA sense strand
gcagcgagccaagguguuu

SEQ ID NO: 741675 - RNA, 19 nt, Homo sapiens
  misc_RNA (1)...(19): siRNA sense strand
ccaacuaccuagacuggau

SEQ ID NO: 741676 - RNA, 19 nt, Homo sapiens
  misc_RNA (1)...(19): siRNA sense strand
cugcacaucacaacauuua

SEQ ID NO: 741677 - RNA, 19 nt, Homo sapiens
  misc_RNA (1)...(19): siRNA sense strand
gaacagucaccgacaacau

SEQ ID NO: 741678 - RNA, 19 nt, Homo sapiens
  misc_RNA (1)...(19): siRNA sense strand
gcucugagggaaacaguga

SEQ ID NO: 741679 - RNA, 19 nt, Homo sapiens
  misc_RNA (1)...(19): siRNA sense strand
uuacuuaacagaacaguca

SEQ ID NO: 741680 - RNA, 19 nt, Homo sapiens
  misc_RNA (1)...(19): siRNA sense strand
ugggaagugcugugaaaua

SEQ ID NO: 741681 - RNA, 19 nt, Homo sapiens
  misc_RNA (1)...(19): siRNA sense strand
gcacaucacaacauuuacu

SEQ ID NO: 741682 - RNA, 19 nt, Homo sapiens
  misc_RNA (1)...(19): siRNA sense strand
ggaagugcugugaaauaga

SEQ ID NO: 741683 - RNA, 19 nt, Homo sapiens
  misc_RNA (1)...(19): siRNA sense strand
ggccugggcaaacauaauu

SEQ ID NO: 741684 - RNA, 19 nt, Homo sapiens
  misc_RNA (1)...(19): siRNA sense strand
acagaacagucaccgacaa

SEQ ID NO: 741685 - RNA, 19 nt, Homo sapiens
  misc_RNA (1)...(19): siRNA sense strand
aaccacaacuacugcagaa

SEQ ID NO: 741686 - RNA, 19 nt, Homo sapiens
  misc_RNA (1)...(19): siRNA sense strand
guggagcagucuucguuuc

SEQ ID NO: 741687 - RNA, 19 nt, Homo sapiens
  misc_RNA (1)...(19): siRNA sense strand
gaacgauggccgcaugacu

SEQ ID NO: 741688 - RNA, 19 nt, Homo sapiens
  misc_RNA (1)...(19): siRNA sense strand
acucaaagcccuggugcua

SEQ ID NO: 741689 - RNA, 19 nt, Homo sapiens
  misc_RNA (1)...(19): siRNA sense strand
gcccuggugcuacgucuuu

SEQ ID NO: 741690 - RNA, 19 nt, Homo sapiens
  misc_RNA (1)...(19): siRNA sense strand
cagaagaggagccagaucu

SEQ ID NO: 741691 - RNA, 19 nt, Homo sapiens
  misc_RNA (1)...(19): siRNA sense strand
caacuaccuagacuggauu

SEQ ID NO: 741692 - RNA, 19 nt, Homo sapiens
  misc_RNA (1)...(19): siRNA sense strand
gaccagggcaucagcuaca

SEQ ID NO: 741693 - RNA, 19 nt, Homo sapiens
  misc_RNA (1)...(19): siRNA sense strand
gauaggcaagguuuacaca

SEQ ID NO: 741694 - RNA, 19 nt, Homo sapiens
  misc_RNA (1)...(19): siRNA sense strand
ccacaacuacugcagaaac

SEQ ID NO: 741695 - RNA, 19 nt, Homo sapiens
  misc_RNA (1)...(19): siRNA sense strand
gaauuccaugauccugaua

SEQ ID NO: 741696 - RNA, 19 nt, Homo sapiens
  misc_RNA (1)...(19): siRNA sense strand
cccuguacuucucagauuu

SEQ ID NO: 741697 - RNA, 19 nt, Homo sapiens
  misc_RNA (1)...(19): siRNA sense strand
caccaagguuaccaacuac

SEQ ID NO: 741698 - RNA, 19 nt, Homo sapiens
  misc_RNA (1)...(19): siRNA sense strand
guguggagcagucuucguu

SEQ ID NO: 741699 - RNA, 19 nt, Homo sapiens
  misc_RNA (1)...(19): siRNA sense strand
ugacugcuacuuugggaau

SEQ ID NO: 741700 - RNA, 19 nt, Homo sapiens
  misc_RNA (1)...(19): siRNA sense strand
uagacuggauucgugacaa

SEQ ID NO: 741701 - RNA, 19 nt, Homo sapiens
  misc_RNA (1)...(19): siRNA sense strand
gccugggcaaacauaauua

SEQ ID NO: 741702 - RNA, 19 nt, Homo sapiens
  misc_RNA (1)...(19): siRNA sense strand
gcagauggauccuaauaga

SEQ ID NO: 741703 - RNA, 19 nt, Homo sapiens
  misc_RNA (1)...(19): siRNA sense strand
gccaagaucuccaacauga

SEQ ID NO: 741704 - RNA, 19 nt, Homo sapiens
  misc_RNA (1)...(19): siRNA sense strand
cauaaacguugguggauuu

SEQ ID NO: 741705 - RNA, 19 nt, Homo sapiens
  misc_RNA (1)...(19): siRNA sense strand
gauggauccuaauagaaua

SEQ ID NO: 741706 - RNA, 19 nt, Homo sapiens
  misc_RNA (1)...(19): siRNA sense strand
cagaguaucuucaacuaau

SEQ ID NO: 741707 - RNA, 19 nt, Homo sapiens
  misc_RNA (1)...(19): siRNA sense strand
ggaggaagcaccaaguauu

SEQ ID NO: 741708 - RNA, 19 nt, Homo sapiens
  misc_RNA (1)...(19): siRNA sense strand
ggcacucacugcauuuaua

SEQ ID NO: 741709 - RNA, 19 nt, Homo sapiens
  misc_RNA (1)...(19): siRNA sense strand
ggaauuacaacauaucguu

SEQ ID NO: 741710 - RNA, 19 nt, Homo sapiens
  misc_RNA (1)...(19): siRNA sense strand
agaccuagcuacagaguau

SEQ ID NO: 741711 - RNA, 19 nt, Homo sapiens
  misc_RNA (1)...(19): siRNA sense strand
gaauuaaacaggccuuuca

SEQ ID NO: 741712 - RNA, 19 nt, Homo sapiens
  misc_RNA (1)...(19): siRNA sense strand
gcacaucagagcagagaaa

SEQ ID NO: 741713 - RNA, 19 nt, Homo sapiens
  misc_RNA (1)...(19): siRNA sense strand
gcucaucucacuauuaaug

SEQ ID NO: 741714 - RNA, 19 nt, Homo sapiens
  misc_RNA (1)...(19): siRNA sense strand
caggagaccuagcuacaga

SEQ ID NO: 741715 - RNA, 19 nt, Homo sapiens
  misc_RNA (1)...(19): siRNA sense strand
gaggaagcaccaaguauug

SEQ ID NO: 741716 - RNA, 19 nt, Homo sapiens
  misc_RNA (1)...(19): siRNA sense strand
uugcucaucucacuauuaa

SEQ ID NO: 741717 - RNA, 19 nt, Homo sapiens
  misc_RNA (1)...(19): siRNA sense strand
caacaugacuuuuagcaau

SEQ ID NO: 741718 - RNA, 19 nt, Homo sapiens
  misc_RNA (1)...(19): siRNA sense strand
gguuagaucuggccaagag

SEQ ID NO: 741719 - RNA, 19 nt, Homo sapiens
  misc_RNA (1)...(19): siRNA sense strand
guggauggcucaugguuag

SEQ ID NO: 741720 - RNA, 19 nt, Homo sapiens
  misc_RNA (1)...(19): siRNA sense strand
gggccaagaucuccaacau

SEQ ID NO: 741721 - RNA, 19 nt, Homo sapiens
  misc_RNA (1)...(19): siRNA sense strand
uacagaguaucuucaacua

SEQ ID NO: 741722 - RNA, 19 nt, Homo sapiens
  misc_RNA (1)...(19): siRNA sense strand
ccauaaacguugguggauu

SEQ ID NO: 741723 - RNA, 19 nt, Homo sapiens
  misc_RNA (1)...(19): siRNA sense strand
gagaggaaaucagcaucga

SEQ ID NO: 741724 - RNA, 19 nt, Homo sapiens
  misc_RNA (1)...(19): siRNA sense strand
ggaucaggaugcaacauac

SEQ ID NO: 741725 - RNA, 19 nt, Homo sapiens
  misc_RNA (1)...(19): siRNA sense strand
gcacucacugcauuuauag

SEQ ID NO: 741726 - RNA, 19 nt, Homo sapiens
  misc_RNA (1)...(19): siRNA sense strand
guuacggucuggagaggaa

SEQ ID NO: 741727 - RNA, 19 nt, Homo sapiens
  misc_RNA (1)...(19): siRNA sense strand
uuaccuguaugccaacauu

SEQ ID NO: 741728 - RNA, 19 nt, Homo sapiens
  misc_RNA (1)...(19): siRNA sense strand
caacauacuuuggggcuuu

SEQ ID NO: 741729 - RNA, 19 nt, Homo sapiens
  misc_RNA (1)...(19): siRNA sense strand
gguggauggcucaugguua

SEQ ID NO: 741730 - RNA, 19 nt, Homo sapiens
  misc_RNA (1)...(19): siRNA sense strand
ccuaauagaauaucagaag

SEQ ID NO: 741731 - RNA, 19 nt, Homo sapiens
  misc_RNA (1)...(19): siRNA sense strand
cggaucaggaugcaacaua

SEQ ID NO: 741732 - RNA, 19 nt, Homo sapiens
  misc_RNA (1)...(19): siRNA sense strand
agauggcacucacugcauu

SEQ ID NO: 741733 - RNA, 19 nt, Homo sapiens
  misc_RNA (1)...(19): siRNA sense strand
aagugagucuguccucuug

SEQ ID NO: 741734 - RNA, 19 nt, Homo sapiens
  misc_RNA (1)...(19): siRNA sense strand
agauggauccuaauagaau

SEQ ID NO: 741735 - RNA, 19 nt, Homo sapiens
  misc_RNA (1)...(19): siRNA sense strand
ucaaggagcugugcaaaag

SEQ ID NO: 741736 - RNA, 19 nt, Homo sapiens
  misc_RNA (1)...(19): siRNA sense strand
cagauggauccuaauagaa

SEQ ID NO: 741737 - RNA, 19 nt, Homo sapiens
  misc_RNA (1)...(19): siRNA sense strand
ccugauucauguaggagaa

SEQ ID NO: 741738 - RNA, 19 nt, Homo sapiens
  misc_RNA (1)...(19): siRNA sense strand
ucaggaugcaacauacuuu

SEQ ID NO: 741739 - RNA, 19 nt, Homo sapiens
  misc_RNA (1)...(19): siRNA sense strand
aacauuugcuuucgacauc

SEQ ID NO: 741740 - RNA, 19 nt, Homo sapiens
  misc_RNA (1)...(19): siRNA sense strand
caacauuugcuuucgacau

SEQ ID NO: 741741 - RNA, 19 nt, Homo sapiens
  misc_RNA (1)...(19): siRNA sense strand
caagaucuccaacaugacu

SEQ ID NO: 741742 - RNA, 19 nt, Homo sapiens
  misc_RNA (1)...(19): siRNA sense strand
gagcagagaaagcgauggu

SEQ ID NO: 741743 - RNA, 19 nt, Homo sapiens
  misc_RNA (1)...(19): siRNA sense strand
agaguaucuucaacuaaug

SEQ ID NO: 741744 - RNA, 19 nt, Homo sapiens
  misc_RNA (1)...(19): siRNA sense strand
gagaauuaaacaggccuuu

SEQ ID NO: 741745 - RNA, 19 nt, Homo sapiens
  misc_RNA (1)...(19): siRNA sense strand
gauggcacucacugcauuu

SEQ ID NO: 741746 - RNA, 19 nt, Homo sapiens
  misc_RNA (1)...(19): siRNA sense strand
cuaaugguguacgucacua

SEQ ID NO: 741747 - RNA, 19 nt, Homo sapiens
  misc_RNA (1)...(19): siRNA sense strand
gcaaaaggaauuacaacau

SEQ ID NO: 741748 - RNA, 19 nt, Homo sapiens
  misc_RNA (1)...(19): siRNA sense strand
acagaguaucuucaacuaa

SEQ ID NO: 741749 - RNA, 19 nt, Homo sapiens
  misc_RNA (1)...(19): siRNA sense strand
gcaucaaaaucccaaguuc

SEQ ID NO: 741750 - RNA, 19 nt, Homo sapiens
  misc_RNA (1)...(19): siRNA sense strand
caaguucucauacccugau

SEQ ID NO: 741751 - RNA, 19 nt, Homo sapiens
  misc_RNA (1)...(19): siRNA sense strand
ggauccuaauagaauauca

SEQ ID NO: 741752 - RNA, 19 nt, Homo sapiens
  misc_RNA (1)...(19): siRNA sense strand
gauggcucaugguuagauc

SEQ ID NO: 741753 - RNA, 19 nt, Homo sapiens
  misc_RNA (1)...(19): siRNA sense strand
ccaucugguucccauaaag

SEQ ID NO: 741754 - RNA, 19 nt, Homo sapiens
  misc_RNA (1)...(19): siRNA sense strand
aaagugagucuguccucuu

SEQ ID NO: 741755 - RNA, 19 nt, Homo sapiens
  misc_RNA (1)...(19): siRNA sense strand
aaggaggaagcaccaagua

SEQ ID NO: 741756 - RNA, 19 nt, Homo sapiens
  misc_RNA (1)...(19): siRNA sense strand
gugagucuguccucuuggu

SEQ ID NO: 741757 - RNA, 19 nt, Homo sapiens
  misc_RNA (1)...(19): siRNA sense strand
aguucgagauauagauuga

SEQ ID NO: 741758 - RNA, 19 nt, Homo sapiens
  misc_RNA (1)...(19): siRNA sense strand
cuacagaguaucuucaacu

SEQ ID NO: 741759 - RNA, 19 nt, Homo sapiens
  misc_RNA (1)...(19): siRNA sense strand
cagcacaucagagcagaga

SEQ ID NO: 741760 - RNA, 19 nt, Homo sapiens
  misc_RNA (1)...(19): siRNA sense strand
caggaugcaacauacuuug

SEQ ID NO: 741761 - RNA, 19 nt, Homo sapiens
  misc_RNA (1)...(19): siRNA sense strand
gagaccuagcuacagagua

SEQ ID NO: 741762 - RNA, 19 nt, Homo sapiens
  misc_RNA (1)...(19): siRNA sense strand
ggagaccuagcuacagagu

SEQ ID NO: 741763 - RNA, 19 nt, Homo sapiens
  misc_RNA (1)...(19): siRNA sense strand
cccaucugguucccauaaa

SEQ ID NO: 741764 - RNA, 19 nt, Homo sapiens
  misc_RNA (1)...(19): siRNA sense strand
ggccaagaucuccaacaug

SEQ ID NO: 741765 - RNA, 19 nt, Homo sapiens
  misc_RNA (1)...(19): siRNA sense strand
ucauguaggagaauuaaac

SEQ ID NO: 741766 - RNA, 19 nt, Homo sapiens
  misc_RNA (1)...(19): siRNA sense strand
auaccugauucauguagga

SEQ ID NO: 741767 - RNA, 19 nt, Homo sapiens
  misc_RNA (1)...(19): siRNA sense strand
gccaagaucuccaacauga

SEQ ID NO: 741768 - RNA, 19 nt, Homo sapiens
  misc_RNA (1)...(19): siRNA sense strand
cauaaacguugguggauuu

SEQ ID NO: 741769 - RNA, 19 nt, Homo sapiens
  misc_RNA (1)...(19): siRNA sense strand
cagaguaucuucaacuaau

SEQ ID NO: 741770 - RNA, 19 nt, Homo sapiens
  misc_RNA (1)...(19): siRNA sense strand
ggaggaagcaccaaguauu

SEQ ID NO: 741771 - RNA, 19 nt, Homo sapiens
  misc_RNA (1)...(19): siRNA sense strand
ggcacucacugcauuuaua

SEQ ID NO: 741772 - RNA, 19 nt, Homo sapiens
  misc_RNA (1)...(19): siRNA sense strand
ggaauuacaacauaucguu

SEQ ID NO: 741773 - RNA, 19 nt, Homo sapiens
  misc_RNA (1)...(19): siRNA sense strand
agaccuagcuacagaguau

SEQ ID NO: 741774 - RNA, 19 nt, Homo sapiens
  misc_RNA (1)...(19): siRNA sense strand
gaauuaaacaggccuuuca

SEQ ID NO: 741775 - RNA, 19 nt, Homo sapiens
  misc_RNA (1)...(19): siRNA sense strand
gcacaucagagcagagaaa

SEQ ID NO: 741776 - RNA, 19 nt, Homo sapiens
  misc_RNA (1)...(19): siRNA sense strand
gcucaucucacuauuaaug

SEQ ID NO: 741777 - RNA, 19 nt, Homo sapiens
  misc_RNA (1)...(19): siRNA sense strand
caggagaccuagcuacaga

SEQ ID NO: 741778 - RNA, 19 nt, Homo sapiens
  misc_RNA (1)...(19): siRNA sense strand
gaggaagcaccaaguauug

SEQ ID NO: 741779 - RNA, 19 nt, Homo sapiens
  misc_RNA (1)...(19): siRNA sense strand
uugcucaucucacuauuaa

SEQ ID NO: 741780 - RNA, 19 nt, Homo sapiens
  misc_RNA (1)...(19): siRNA sense strand
caacaugacuuuuagcaau

SEQ ID NO: 741781 - RNA, 19 nt, Homo sapiens
  misc_RNA (1)...(19): siRNA sense strand
gguuagaucuggccaagag

SEQ ID NO: 741782 - RNA, 19 nt, Homo sapiens
  misc_RNA (1)...(19): siRNA sense strand
guggauggcucaugguuag

SEQ ID NO: 741783 - RNA, 19 nt, Homo sapiens
  misc_RNA (1)...(19): siRNA sense strand
gggccaagaucuccaacau

SEQ ID NO: 741784 - RNA, 19 nt, Homo sapiens
  misc_RNA (1)...(19): siRNA sense strand
uacagaguaucuucaacua

SEQ ID NO: 741785 - RNA, 19 nt, Homo sapiens
  misc_RNA (1)...(19): siRNA sense strand
ccauaaacguugguggauu

SEQ ID NO: 741786 - RNA, 19 nt, Homo sapiens
  misc_RNA (1)...(19): siRNA sense strand
gagaggaaaucagcaucga

SEQ ID NO: 741787 - RNA, 19 nt, Homo sapiens
  misc_RNA (1)...(19): siRNA sense strand
ggaucaggaugcaacauac

SEQ ID NO: 741788 - RNA, 19 nt, Homo sapiens
  misc_RNA (1)...(19): siRNA sense strand
gcacucacugcauuuauag

SEQ ID NO: 741789 - RNA, 19 nt, Homo sapiens
  misc_RNA (1)...(19): siRNA sense strand
guuacggucuggagaggaa

SEQ ID NO: 741790 - RNA, 19 nt, Homo sapiens
  misc_RNA (1)...(19): siRNA sense strand
uuaccuguaugccaacauu

SEQ ID NO: 741791 - RNA, 19 nt, Homo sapiens
  misc_RNA (1)...(19): siRNA sense strand
caacauacuuuggggcuuu

SEQ ID NO: 741792 - RNA, 19 nt, Homo sapiens
  misc_RNA (1)...(19): siRNA sense strand
gguggauggcucaugguua

SEQ ID NO: 741793 - RNA, 19 nt, Homo sapiens
  misc_RNA (1)...(19): siRNA sense strand
agauggcacucacugcauu

SEQ ID NO: 741794 - RNA, 19 nt, Homo sapiens
  misc_RNA (1)...(19): siRNA sense strand
cggaucaggaugcaacaua

SEQ ID NO: 741795 - RNA, 19 nt, Homo sapiens
  misc_RNA (1)...(19): siRNA sense strand
ccuaauagaauaucagaag

SEQ ID NO: 741796 - RNA, 19 nt, Homo sapiens
  misc_RNA (1)...(19): siRNA sense strand
aagugagucuguccucuug

SEQ ID NO: 741797 - RNA, 19 nt, Homo sapiens
  misc_RNA (1)...(19): siRNA sense strand
ucaaggagcugugcaaaag

SEQ ID NO: 741798 - RNA, 19 nt, Homo sapiens
  misc_RNA (1)...(19): siRNA sense strand
ccugauucauguaggagaa

SEQ ID NO: 741799 - RNA, 19 nt, Homo sapiens
  misc_RNA (1)...(19): siRNA sense strand
ucaggaugcaacauacuuu

SEQ ID NO: 741800 - RNA, 19 nt, Homo sapiens
  misc_RNA (1)...(19): siRNA sense strand
aacauuugcuuucgacauc

SEQ ID NO: 741801 - RNA, 19 nt, Homo sapiens
  misc_RNA (1)...(19): siRNA sense strand
caacauuugcuuucgacau

SEQ ID NO: 741802 - RNA, 19 nt, Homo sapiens
  misc_RNA (1)...(19): siRNA sense strand
caagaucuccaacaugacu

SEQ ID NO: 741803 - RNA, 19 nt, Homo sapiens
  misc_RNA (1)...(19): siRNA sense strand
gagcagagaaagcgauggu

SEQ ID NO: 741804 - RNA, 19 nt, Homo sapiens
  misc_RNA (1)...(19): siRNA sense strand
agaguaucuucaacuaaug

SEQ ID NO: 741805 - RNA, 19 nt, Homo sapiens
  misc_RNA (1)...(19): siRNA sense strand
gagaauuaaacaggccuuu

SEQ ID NO: 741806 - RNA, 19 nt, Homo sapiens
  misc_RNA (1)...(19): siRNA sense strand
cuaaugguguacgucacua

SEQ ID NO: 741807 - RNA, 19 nt, Homo sapiens
  misc_RNA (1)...(19): siRNA sense strand
gauggcacucacugcauuu

SEQ ID NO: 741808 - RNA, 19 nt, Homo sapiens
  misc_RNA (1)...(19): siRNA sense strand
gcaaaaggaauuacaacau

SEQ ID NO: 741809 - RNA, 19 nt, Homo sapiens
  misc_RNA (1)...(19): siRNA sense strand
acagaguaucuucaacuaa

SEQ ID NO: 741810 - RNA, 19 nt, Homo sapiens
  misc_RNA (1)...(19): siRNA sense strand
gcaucaaaaucccaaguuc

SEQ ID NO: 741811 - RNA, 19 nt, Homo sapiens
  misc_RNA (1)...(19): siRNA sense strand
ggauccuaauagaauauca

SEQ ID NO: 741812 - RNA, 19 nt, Homo sapiens
  misc_RNA (1)...(19): siRNA sense strand
caaguucucauacccugau

SEQ ID NO: 741813 - RNA, 19 nt, Homo sapiens
  misc_RNA (1)...(19): siRNA sense strand
gauggcucaugguuagauc

SEQ ID NO: 741814 - RNA, 19 nt, Homo sapiens
  misc_RNA (1)...(19): siRNA sense strand
ccaucugguucccauaaag

SEQ ID NO: 741815 - RNA, 19 nt, Homo sapiens
  misc_RNA (1)...(19): siRNA sense strand
aaagugagucuguccucuu

SEQ ID NO: 741816 - RNA, 19 nt, Homo sapiens
  misc_RNA (1)...(19): siRNA sense strand
aaggaggaagcaccaagua

SEQ ID NO: 741817 - RNA, 19 nt, Homo sapiens
  misc_RNA (1)...(19): siRNA sense strand
gugagucuguccucuuggu

SEQ ID NO: 741818 - RNA, 19 nt, Homo sapiens
  misc_RNA (1)...(19): siRNA sense strand
aguucgagauauagauuga

SEQ ID NO: 741819 - RNA, 19 nt, Homo sapiens
  misc_RNA (1)...(19): siRNA sense strand
cuacagaguaucuucaacu

SEQ ID NO: 741820 - RNA, 19 nt, Homo sapiens
  misc_RNA (1)...(19): siRNA sense strand
cagcacaucagagcagaga

SEQ ID NO: 741821 - RNA, 19 nt, Homo sapiens
  misc_RNA (1)...(19): siRNA sense strand
caggaugcaacauacuuug

SEQ ID NO: 741822 - RNA, 19 nt, Homo sapiens
  misc_RNA (1)...(19): siRNA sense strand
gagaccuagcuacagagua

SEQ ID NO: 741823 - RNA, 19 nt, Homo sapiens
  misc_RNA (1)...(19): siRNA sense strand
ggagaccuagcuacagagu

SEQ ID NO: 741824 - RNA, 19 nt, Homo sapiens
  misc_RNA (1)...(19): siRNA sense strand
cccaucugguucccauaaa

SEQ ID NO: 741825 - RNA, 19 nt, Homo sapiens
  misc_RNA (1)...(19): siRNA sense strand
ucauguaggagaauuaaac

SEQ ID NO: 741826 - RNA, 19 nt, Homo sapiens
  misc_RNA (1)...(19): siRNA sense strand
auaccugauucauguagga

SEQ ID NO: 741827 - RNA, 19 nt, Homo sapiens
  misc_RNA (1)...(19): siRNA sense strand
ggccaagaucuccaacaug

SEQ ID NO: 741828 - RNA, 19 nt, Homo sapiens
  misc_RNA (1)...(19): siRNA sense strand
gcgaauaucugaauuagaa

SEQ ID NO: 741829 - RNA, 19 nt, Homo sapiens
  misc_RNA (1)...(19): siRNA sense strand
ggaaauuaaugcauccuua

SEQ ID NO: 741830 - RNA, 19 nt, Homo sapiens
  misc_RNA (1)...(19): siRNA sense strand
gaacauacuucagaaacua

SEQ ID NO: 741831 - RNA, 19 nt, Homo sapiens
  misc_RNA (1)...(19): siRNA sense strand
gaagaaggaugaagaaauc

SEQ ID NO: 741832 - RNA, 19 nt, Homo sapiens
  misc_RNA (1)...(19): siRNA sense strand
gagcgaggcuggugguuua

SEQ ID NO: 741833 - RNA, 19 nt, Homo sapiens
  misc_RNA (1)...(19): siRNA sense strand
caagucaucuuucaucuaa

SEQ ID NO: 741834 - RNA, 19 nt, Homo sapiens
  misc_RNA (1)...(19): siRNA sense strand
gaaaugaaagcgaagaaua

SEQ ID NO: 741835 - RNA, 19 nt, Homo sapiens
  misc_RNA (1)...(19): siRNA sense strand
gagauuacuucaugugaua

SEQ ID NO: 741836 - RNA, 19 nt, Homo sapiens
  misc_RNA (1)...(19): siRNA sense strand
gaucagcacugucagauga

SEQ ID NO: 741837 - RNA, 19 nt, Homo sapiens
  misc_RNA (1)...(19): siRNA sense strand
gaagauuucucaugaacuu

SEQ ID NO: 741838 - RNA, 19 nt, Homo sapiens
  misc_RNA (1)...(19): siRNA sense strand
aagaagagcucaauaauuc

SEQ ID NO: 741839 - RNA, 19 nt, Homo sapiens
  misc_RNA (1)...(19): siRNA sense strand
gagaagcuauguuuagaaa

SEQ ID NO: 741840 - RNA, 19 nt, Homo sapiens
  misc_RNA (1)...(19): siRNA sense strand
gaagcuaugcuaagaaaua

SEQ ID NO: 741841 - RNA, 19 nt, Homo sapiens
  misc_RNA (1)...(19): siRNA sense strand
gagaggaaauagcugaaua

SEQ ID NO: 741842 - RNA, 19 nt, Homo sapiens
  misc_RNA (1)...(19): siRNA sense strand
gcaaaucaaaggagaaaua

SEQ ID NO: 741843 - RNA, 19 nt, Homo sapiens
  misc_RNA (1)...(19): siRNA sense strand
ccugacagcucuagucuua

SEQ ID NO: 741844 - RNA, 19 nt, Homo sapiens
  misc_RNA (1)...(19): siRNA sense strand
gaacagaugcaucaaaguu

SEQ ID NO: 741845 - RNA, 19 nt, Homo sapiens
  misc_RNA (1)...(19): siRNA sense strand
gaacaaauguagggaugaa

SEQ ID NO: 741846 - RNA, 19 nt, Homo sapiens
  misc_RNA (1)...(19): siRNA sense strand
ggaggcagaugaauacuug

SEQ ID NO: 741847 - RNA, 19 nt, Homo sapiens
  misc_RNA (1)...(19): siRNA sense strand
guaaagaagagcucaauaa

SEQ ID NO: 741848 - RNA, 19 nt, Homo sapiens
  misc_RNA (1)...(19): siRNA sense strand
ggaauuagauguuguuacu

SEQ ID NO: 741849 - RNA, 19 nt, Homo sapiens
  misc_RNA (1)...(19): siRNA sense strand
gaaagggaauugcagaugu

SEQ ID NO: 741850 - RNA, 19 nt, Homo sapiens
  misc_RNA (1)...(19): siRNA sense strand
gcagaugaauacuuggaua

SEQ ID NO: 741851 - RNA, 19 nt, Homo sapiens
  misc_RNA (1)...(19): siRNA sense strand
gaaacaagucagcgcauua

SEQ ID NO: 741852 - RNA, 19 nt, Homo sapiens
  misc_RNA (1)...(19): siRNA sense strand
acaagaaucuagagaauga

SEQ ID NO: 741853 - RNA, 19 nt, Homo sapiens
  misc_RNA (1)...(19): siRNA sense strand
caacagcguucuuuccaaa

SEQ ID NO: 741854 - RNA, 19 nt, Homo sapiens
  misc_RNA (1)...(19): siRNA sense strand
gagcaucagcugagaaaua

SEQ ID NO: 741855 - RNA, 19 nt, Homo sapiens
  misc_RNA (1)...(19): siRNA sense strand
caacgaaucugagaaacuu

SEQ ID NO: 741856 - RNA, 19 nt, Homo sapiens
  misc_RNA (1)...(19): siRNA sense strand
gaaugggacucuuaaggaa

SEQ ID NO: 741857 - RNA, 19 nt, Homo sapiens
  misc_RNA (1)...(19): siRNA sense strand
gagcuaagaaacaagauua

SEQ ID NO: 741858 - RNA, 19 nt, Homo sapiens
  misc_RNA (1)...(19): siRNA sense strand
caguguagaugaaguauuu

SEQ ID NO: 741859 - RNA, 19 nt, Homo sapiens
  misc_RNA (1)...(19): siRNA sense strand
ugaaauagaugcggaagaa

SEQ ID NO: 741860 - RNA, 19 nt, Homo sapiens
  misc_RNA (1)...(19): siRNA sense strand
gauaaacucacaucaguaa

SEQ ID NO: 741861 - RNA, 19 nt, Homo sapiens
  misc_RNA (1)...(19): siRNA sense strand
cuacaaagaugugaagaaa

SEQ ID NO: 741862 - RNA, 19 nt, Homo sapiens
  misc_RNA (1)...(19): siRNA sense strand
gagaaagaauugcuuguca

SEQ ID NO: 741863 - RNA, 19 nt, Homo sapiens
  misc_RNA (1)...(19): siRNA sense strand
ggagaaagcuagcauugag

SEQ ID NO: 741864 - RNA, 19 nt, Homo sapiens
  misc_RNA (1)...(19): siRNA sense strand
gaaaugaaaggccaaguga

SEQ ID NO: 741865 - RNA, 19 nt, Homo sapiens
  misc_RNA (1)...(19): siRNA sense strand
ugaaggagcucacacuaga

SEQ ID NO: 741866 - RNA, 19 nt, Homo sapiens
  misc_RNA (1)...(19): siRNA sense strand
uaacucagauggaaucaga

SEQ ID NO: 741867 - RNA, 19 nt, Homo sapiens
  misc_RNA (1)...(19): siRNA sense strand
gagcaaccaucuacuugaa

SEQ ID NO: 741868 - RNA, 19 nt, Homo sapiens
  misc_RNA (1)...(19): siRNA sense strand
gcacagaaguuagcgcuau

SEQ ID NO: 741869 - RNA, 19 nt, Homo sapiens
  misc_RNA (1)...(19): siRNA sense strand
ugaaagagagcuagagaua

SEQ ID NO: 741870 - RNA, 19 nt, Homo sapiens
  misc_RNA (1)...(19): siRNA sense strand
gcuacaaggucuggacuua

SEQ ID NO: 741871 - RNA, 19 nt, Homo sapiens
  misc_RNA (1)...(19): siRNA sense strand
gaaagucaagggauuauga

SEQ ID NO: 741872 - RNA, 19 nt, Homo sapiens
  misc_RNA (1)...(19): siRNA sense strand
gcaauuagaagcuaugcua

SEQ ID NO: 741873 - RNA, 19 nt, Homo sapiens
  misc_RNA (1)...(19): siRNA sense strand
uaagaacgcuggagaugga

SEQ ID NO: 741874 - RNA, 19 nt, Homo sapiens
  misc_RNA (1)...(19): siRNA sense strand
ggaaagacuagcccauaua

SEQ ID NO: 741875 - RNA, 19 nt, Homo sapiens
  misc_RNA (1)...(19): siRNA sense strand
gagcugggcuuuggaagaa

SEQ ID NO: 741876 - RNA, 19 nt, Homo sapiens
  misc_RNA (1)...(19): siRNA sense strand
aaagagacaucaaaugaga

SEQ ID NO: 741877 - RNA, 19 nt, Homo sapiens
  misc_RNA (1)...(19): siRNA sense strand
caucauuccuuugcaaaua

SEQ ID NO: 741878 - RNA, 19 nt, Homo sapiens
  misc_RNA (1)...(19): siRNA sense strand
gaacagcugaugaagguaa

SEQ ID NO: 741879 - RNA, 19 nt, Homo sapiens
  misc_RNA (1)...(19): siRNA sense strand
ucaaagaacugaaagaaac

SEQ ID NO: 741880 - RNA, 19 nt, Homo sapiens
  misc_RNA (1)...(19): siRNA sense strand
caacugagaucaaagaacu

SEQ ID NO: 741881 - RNA, 19 nt, Homo sapiens
  misc_RNA (1)...(19): siRNA sense strand
gaaagcuacuacucagauu

SEQ ID NO: 741882 - RNA, 19 nt, Homo sapiens
  misc_RNA (1)...(19): siRNA sense strand
caaacaguaugaaguagaa

SEQ ID NO: 741883 - RNA, 19 nt, Homo sapiens
  misc_RNA (1)...(19): siRNA sense strand
ggaccucaaucuagacauu

SEQ ID NO: 741884 - RNA, 19 nt, Homo sapiens
  misc_RNA (1)...(19): siRNA sense strand
gagcuugacugccuuagga

SEQ ID NO: 741885 - RNA, 19 nt, Homo sapiens
  misc_RNA (1)...(19): siRNA sense strand
ugucagagcugcagaccua

SEQ ID NO: 741886 - RNA, 19 nt, Homo sapiens
  misc_RNA (1)...(19): siRNA sense strand
ucucaaagaacuccaauua

SEQ ID NO: 741887 - RNA, 19 nt, Homo sapiens
  misc_RNA (1)...(19): siRNA sense strand
agagaaagcuaaagagaug

SEQ ID NO: 741888 - RNA, 19 nt, Homo sapiens
  misc_RNA (1)...(19): siRNA sense strand
caaggucgaugaauuaaca

SEQ ID NO: 741889 - RNA, 19 nt, Homo sapiens
  misc_RNA (1)...(19): siRNA sense strand
gcaaagaucaauugaagga

SEQ ID NO: 741890 - RNA, 19 nt, Homo sapiens
  misc_RNA (1)...(19): siRNA sense strand
cagcaaagaucaauugaag

SEQ ID NO: 741891 - RNA, 19 nt, Homo sapiens
  misc_RNA (1)...(19): siRNA sense strand
ucugagaggucuggaauua

SEQ ID NO: 741892 - RNA, 19 nt, Homo sapiens
  misc_RNA (1)...(19): siRNA sense strand
gugaagauauuggagauaa

SEQ ID NO: 741893 - RNA, 19 nt, Homo sapiens
  misc_RNA (1)...(19): siRNA sense strand
gaccuauguugacucauua

SEQ ID NO: 741894 - RNA, 19 nt, Homo sapiens
  misc_RNA (1)...(19): siRNA sense strand
caaaggaacaccaagaauu

SEQ ID NO: 741895 - RNA, 19 nt, Homo sapiens
  misc_RNA (1)...(19): siRNA sense strand
aagaauaccucucaggaaa

SEQ ID NO: 741896 - RNA, 19 nt, Homo sapiens
  misc_RNA (1)...(19): siRNA sense strand
gaaaccauguuaagagauc

SEQ ID NO: 741897 - RNA, 19 nt, Homo sapiens
  misc_RNA (1)...(19): siRNA sense strand
gaaaagagguuaucaucug

SEQ ID NO: 741898 - RNA, 19 nt, Homo sapiens
  misc_RNA (1)...(19): siRNA sense strand
aaagaacucucucaacuuc

SEQ ID NO: 741899 - RNA, 19 nt, Homo sapiens
  misc_RNA (1)...(19): siRNA sense strand
ggagagauuucuugaugug

SEQ ID NO: 741900 - RNA, 19 nt, Homo sapiens
  misc_RNA (1)...(19): siRNA sense strand
ucaaagaacuccaauuagg

SEQ ID NO: 741901 - RNA, 19 nt, Homo sapiens
  misc_RNA (1)...(19): siRNA sense strand
gaaagacuagcccauauau

SEQ ID NO: 741902 - RNA, 19 nt, Homo sapiens
  misc_RNA (1)...(19): siRNA sense strand
uaaaucaguugaagaagga

SEQ ID NO: 741903 - RNA, 19 nt, Homo sapiens
  misc_RNA (1)...(19): siRNA sense strand
gccagaagccugaaaguuu

SEQ ID NO: 741904 - RNA, 19 nt, Homo sapiens
  misc_RNA (1)...(19): siRNA sense strand
caaagugagugucuccauu

SEQ ID NO: 741905 - RNA, 19 nt, Homo sapiens
  misc_RNA (1)...(19): siRNA sense strand
guugaaaguuugcuaaaug

SEQ ID NO: 741906 - RNA, 19 nt, Homo sapiens
  misc_RNA (1)...(19): siRNA sense strand
ggagaagcauggaggaaau

SEQ ID NO: 741907 - RNA, 19 nt, Homo sapiens
  misc_RNA (1)...(19): siRNA sense strand
gagugaaugucguuuagaa

SEQ ID NO: 741908 - RNA, 19 nt, Homo sapiens
  misc_RNA (1)...(19): siRNA sense strand
gaaagaacucucucaacuu

SEQ ID NO: 741909 - RNA, 19 nt, Homo sapiens
  misc_RNA (1)...(19): siRNA sense strand
cacagaagcuggagauaga

SEQ ID NO: 741910 - RNA, 19 nt, Homo sapiens
  misc_RNA (1)...(19): siRNA sense strand
gaaagugagagaggaaaua

SEQ ID NO: 741911 - RNA, 19 nt, Homo sapiens
  misc_RNA (1)...(19): siRNA sense strand
gaagaggcaucgagaaacu

SEQ ID NO: 741912 - RNA, 19 nt, Homo sapiens
  misc_RNA (1)...(19): siRNA sense strand
gagaagaggcaucgagaaa

SEQ ID NO: 741913 - RNA, 19 nt, Homo sapiens
  misc_RNA (1)...(19): siRNA sense strand
agaaaugcaugcagauaaa

SEQ ID NO: 741914 - RNA, 19 nt, Homo sapiens
  misc_RNA (1)...(19): siRNA sense strand
gcucuagucuuagcaguuu

SEQ ID NO: 741915 - RNA, 19 nt, Homo sapiens
  misc_RNA (1)...(19): siRNA sense strand
ggaagcauuugcaaaggaa

SEQ ID NO: 741916 - RNA, 19 nt, Homo sapiens
  misc_RNA (1)...(19): siRNA sense strand
gcaaccaucuacuugaaga

SEQ ID NO: 741917 - RNA, 19 nt, Homo sapiens
  misc_RNA (1)...(19): siRNA sense strand
caagucagcgcauuaguaa

SEQ ID NO: 741918 - RNA, 19 nt, Homo sapiens
  misc_RNA (1)...(19): siRNA sense strand
uagggaaacuacuaaauga

SEQ ID NO: 741919 - RNA, 19 nt, Homo sapiens
  misc_RNA (1)...(19): siRNA sense strand
gaaaauaagcagaagguua

SEQ ID NO: 741920 - RNA, 19 nt, Homo sapiens
  misc_RNA (1)...(19): siRNA sense strand
gaaauuaguggccuuaaag

SEQ ID NO: 741921 - RNA, 19 nt, Homo sapiens
  misc_RNA (1)...(19): siRNA sense strand
uagaagcuaugcuaagaaa

SEQ ID NO: 741922 - RNA, 19 nt, Homo sapiens
  misc_RNA (1)...(19): siRNA sense strand
gaaaggguuugcugacauc

SEQ ID NO: 741923 - RNA, 19 nt, Homo sapiens
  misc_RNA (1)...(19): siRNA sense strand
ccaaggaggcagaugaaua

SEQ ID NO: 741924 - RNA, 19 nt, Homo sapiens
  misc_RNA (1)...(19): siRNA sense strand
gcacaaagaccagguggaa

SEQ ID NO: 741925 - RNA, 19 nt, Homo sapiens
  misc_RNA (1)...(19): siRNA sense strand
ugagaggucuggaauuaga

SEQ ID NO: 741926 - RNA, 19 nt, Homo sapiens
  misc_RNA (1)...(19): siRNA sense strand
gcaaaccagugcaguguag

SEQ ID NO: 741927 - RNA, 19 nt, Homo sapiens
  misc_RNA (1)...(19): siRNA sense strand
gaaaauggcagaagaggua

SEQ ID NO: 741928 - RNA, 19 nt, Homo sapiens
  misc_RNA (1)...(19): siRNA sense strand
gaacgcagcaucagcuuua

SEQ ID NO: 741929 - RNA, 19 nt, Homo sapiens
  misc_RNA (1)...(19): siRNA sense strand
uauaugagcugcuggauga

SEQ ID NO: 741930 - RNA, 19 nt, Homo sapiens
  misc_RNA (1)...(19): siRNA sense strand
gaagagcagucacagauca

SEQ ID NO: 741931 - RNA, 19 nt, Homo sapiens
  misc_RNA (1)...(19): siRNA sense strand
guuaagcgguccaacauuu

SEQ ID NO: 741932 - RNA, 19 nt, Homo sapiens
  misc_RNA (1)...(19): siRNA sense strand
cgugauggcugccuacuuu

SEQ ID NO: 741933 - RNA, 19 nt, Homo sapiens
  misc_RNA (1)...(19): siRNA sense strand
gcaccaaacuggaggucaa

SEQ ID NO: 741934 - RNA, 19 nt, Homo sapiens
  misc_RNA (1)...(19): siRNA sense strand
ggaugagauucuagacuuu

SEQ ID NO: 741935 - RNA, 19 nt, Homo sapiens
  misc_RNA (1)...(19): siRNA sense strand
uaagaugugugacgugaug

SEQ ID NO: 741936 - RNA, 19 nt, Homo sapiens
  misc_RNA (1)...(19): siRNA sense strand
gauggagaguuugagcuua

SEQ ID NO: 741937 - RNA, 19 nt, Homo sapiens
  misc_RNA (1)...(19): siRNA sense strand
gaauuccucuauaagaugu

SEQ ID NO: 741938 - RNA, 19 nt, Homo sapiens
  misc_RNA (1)...(19): siRNA sense strand
gaaugcaaguuugggauga

SEQ ID NO: 741939 - RNA, 19 nt, Homo sapiens
  misc_RNA (1)...(19): siRNA sense strand
ggaggcuuauucaucuaua

SEQ ID NO: 741940 - RNA, 19 nt, Homo sapiens
  misc_RNA (1)...(19): siRNA sense strand
gaacgcaguggaugccuuu

SEQ ID NO: 741941 - RNA, 19 nt, Homo sapiens
  misc_RNA (1)...(19): siRNA sense strand
gcgagaggguaucaaguau

SEQ ID NO: 741942 - RNA, 19 nt, Homo sapiens
  misc_RNA (1)...(19): siRNA sense strand
gcaaaggcacagcugauga

SEQ ID NO: 741943 - RNA, 19 nt, Homo sapiens
  misc_RNA (1)...(19): siRNA sense strand
aguuugagcuuaugaggua

SEQ ID NO: 741944 - RNA, 19 nt, Homo sapiens
  misc_RNA (1)...(19): siRNA sense strand
guacaaggccagcgagaau

SEQ ID NO: 741945 - RNA, 19 nt, Homo sapiens
  misc_RNA (1)...(19): siRNA sense strand
aggcacagcugaugaaaca

SEQ ID NO: 741946 - RNA, 19 nt, Homo sapiens
  misc_RNA (1)...(19): siRNA sense strand
ccauuuccaugaacuuuga

SEQ ID NO: 741947 - RNA, 19 nt, Homo sapiens
  misc_RNA (1)...(19): siRNA sense strand
uggaugagauucuagacuu

SEQ ID NO: 741948 - RNA, 19 nt, Homo sapiens
  misc_RNA (1)...(19): siRNA sense strand
gaacuacagcgaccaugau

SEQ ID NO: 741949 - RNA, 19 nt, Homo sapiens
  misc_RNA (1)...(19): siRNA sense strand
gcaaguuugggaugaauga

SEQ ID NO: 741950 - RNA, 19 nt, Homo sapiens
  misc_RNA (1)...(19): siRNA sense strand
gagaggguaucaaguaucg

SEQ ID NO: 741951 - RNA, 19 nt, Homo sapiens
  misc_RNA (1)...(19): siRNA sense strand
ggcgagaggguaucaagua

SEQ ID NO: 741952 - RNA, 19 nt, Homo sapiens
  misc_RNA (1)...(19): siRNA sense strand
caaaggcacagcugaugaa

SEQ ID NO: 741953 - RNA, 19 nt, Homo sapiens
  misc_RNA (1)...(19): siRNA sense strand
ucaaguaucgucggaauga

SEQ ID NO: 741954 - RNA, 19 nt, Homo sapiens
  misc_RNA (1)...(19): siRNA sense strand
gaaccgaagcugaacuaca

SEQ ID NO: 741955 - RNA, 19 nt, Homo sapiens
  misc_RNA (1)...(19): siRNA sense strand
agaaugccaucguguggaa

SEQ ID NO: 741956 - RNA, 19 nt, Homo sapiens
  misc_RNA (1)...(19): siRNA sense strand
ucgaauuccucuauaagau

SEQ ID NO: 741957 - RNA, 19 nt, Homo sapiens
  misc_RNA (1)...(19): siRNA sense strand
ugggaugaaugacaagauu

SEQ ID NO: 741958 - RNA, 19 nt, Homo sapiens
  misc_RNA (1)...(19): siRNA sense strand
uaucaaguaucgucggaau

SEQ ID NO: 741959 - RNA, 19 nt, Homo sapiens
  misc_RNA (1)...(19): siRNA sense strand
cagcaaguuugacucugaa

SEQ ID NO: 741960 - RNA, 19 nt, Homo sapiens
  misc_RNA (1)...(19): siRNA sense strand
gacuuuggcuacccacaga

SEQ ID NO: 741961 - RNA, 19 nt, Homo sapiens
  misc_RNA (1)...(19): siRNA sense strand
ucaaaugggugcgcuacau

SEQ ID NO: 741962 - RNA, 19 nt, Homo sapiens
  misc_RNA (1)...(19): siRNA sense strand
gcacagcugaugaaacaag

SEQ ID NO: 741963 - RNA, 19 nt, Homo sapiens
  misc_RNA (1)...(19): siRNA sense strand
ggucuucgaauuccucuau

SEQ ID NO: 741964 - RNA, 19 nt, Homo sapiens
  misc_RNA (1)...(19): siRNA sense strand
gagcgggaagcaaucaauu

SEQ ID NO: 741965 - RNA, 19 nt, Homo sapiens
  misc_RNA (1)...(19): siRNA sense strand
gauuggaggcuuauucauc

SEQ ID NO: 741966 - RNA, 19 nt, Homo sapiens
  misc_RNA (1)...(19): siRNA sense strand
ccucacugcuggcucagaa

SEQ ID NO: 741967 - RNA, 19 nt, Homo sapiens
  misc_RNA (1)...(19): siRNA sense strand
ucaagguggucaucaaguc

SEQ ID NO: 741968 - RNA, 19 nt, Homo sapiens
  misc_RNA (1)...(19): siRNA sense strand
ugaguggcaugccugaaug

SEQ ID NO: 741969 - RNA, 19 nt, Homo sapiens
  misc_RNA (1)...(19): siRNA sense strand
gaagugggacgcaccaaac

SEQ ID NO: 741970 - RNA, 19 nt, Homo sapiens
  misc_RNA (1)...(19): siRNA sense strand
agagucagcaucagacaaa

SEQ ID NO: 741971 - RNA, 19 nt, Homo sapiens
  misc_RNA (1)...(19): siRNA sense strand
ccaacgacaagaagaaaug

SEQ ID NO: 741972 - RNA, 19 nt, Homo sapiens
  misc_RNA (1)...(19): siRNA sense strand
gcucaucucccgagucuac

SEQ ID NO: 741973 - RNA, 19 nt, Homo sapiens
  misc_RNA (1)...(19): siRNA sense strand
aagaagagcagucacagau

SEQ ID NO: 741974 - RNA, 19 nt, Homo sapiens
  misc_RNA (1)...(19): siRNA sense strand
aaccgaagcugaacuacag

SEQ ID NO: 741975 - RNA, 19 nt, Homo sapiens
  misc_RNA (1)...(19): siRNA sense strand
gaugagauucuagacuuug

SEQ ID NO: 741976 - RNA, 19 nt, Homo sapiens
  misc_RNA (1)...(19): siRNA sense strand
gaacuuugaggugccauuc

SEQ ID NO: 741977 - RNA, 19 nt, Homo sapiens
  misc_RNA (1)...(19): siRNA sense strand
gugcucaucucccgagucu

SEQ ID NO: 741978 - RNA, 19 nt, Homo sapiens
  misc_RNA (1)...(19): siRNA sense strand
cgaauuccucuauaagaug

SEQ ID NO: 741979 - RNA, 19 nt, Homo sapiens
  misc_RNA (1)...(19): siRNA sense strand
cagaucaccagccagguaa

SEQ ID NO: 741980 - RNA, 19 nt, Homo sapiens
  misc_RNA (1)...(19): siRNA sense strand
gcaucaagagucagcauca

SEQ ID NO: 741981 - RNA, 19 nt, Homo sapiens
  misc_RNA (1)...(19): siRNA sense strand
ucuucgaauuccucuauaa

SEQ ID NO: 741982 - RNA, 19 nt, Homo sapiens
  misc_RNA (1)...(19): siRNA sense strand
gcacaaccaaggacaucau

SEQ ID NO: 741983 - RNA, 19 nt, Homo sapiens
  misc_RNA (1)...(19): siRNA sense strand
cuuaugagguaucgcacaa

SEQ ID NO: 741984 - RNA, 19 nt, Homo sapiens
  misc_RNA (1)...(19): siRNA sense strand
ggguggugaugaagagcua

SEQ ID NO: 741985 - RNA, 19 nt, Homo sapiens
  misc_RNA (1)...(19): siRNA sense strand
uggaugugcuggagagugu

SEQ ID NO: 741986 - RNA, 19 nt, Homo sapiens
  misc_RNA (1)...(19): siRNA sense strand
acagaucaccagccaggua

SEQ ID NO: 741987 - RNA, 19 nt, Homo sapiens
  misc_RNA (1)...(19): siRNA sense strand
gcugcuggaugagauucua

SEQ ID NO: 741988 - RNA, 19 nt, Homo sapiens
  misc_RNA (1)...(19): siRNA sense strand
gcagucaccaagcagaaug

SEQ ID NO: 741989 - RNA, 19 nt, Homo sapiens
  misc_RNA (1)...(19): siRNA sense strand
gaugaagagcuaccugagu

SEQ ID NO: 741990 - RNA, 19 nt, Homo sapiens
  misc_RNA (1)...(19): siRNA sense strand
gccuuucgggucaauguua

SEQ ID NO: 741991 - RNA, 19 nt, Homo sapiens
  misc_RNA (1)...(19): siRNA sense strand
gcaagagcgggaagcaauc

SEQ ID NO: 741992 - RNA, 19 nt, Homo sapiens
  misc_RNA (1)...(19): siRNA sense strand
ucaccaagcagaaugucaa

SEQ ID NO: 741993 - RNA, 19 nt, Homo sapiens
  misc_RNA (1)...(19): siRNA sense strand
ggagaguuugagcuuauga

SEQ ID NO: 741994 - RNA, 19 nt, Homo sapiens
  misc_RNA (1)...(19): siRNA sense strand
ugaacuacagcgaccauga

SEQ ID NO: 741995 - RNA, 19 nt, Homo sapiens
  misc_RNA (1)...(19): siRNA sense strand
gcugaugaaacaagcaaga

SEQ ID NO: 741996 - RNA, 19 nt, Homo sapiens
  misc_RNA (1)...(19): siRNA sense strand
uggcaggcaugaaggaauc

SEQ ID NO: 741997 - RNA, 19 nt, Homo sapiens
  misc_RNA (1)...(19): siRNA sense strand
gccaucguguggaagauca

SEQ ID NO: 741998 - RNA, 19 nt, Homo sapiens
  misc_RNA (1)...(19): siRNA sense strand
ugagguaucgcacaaccaa

SEQ ID NO: 741999 - RNA, 19 nt, Homo sapiens
  misc_RNA (1)...(19): siRNA sense strand
ggcaagaucagcgaggaaa

SEQ ID NO: 742000 - RNA, 19 nt, Homo sapiens
  misc_RNA (1)...(19): siRNA sense strand
gggcaaaggcacagcugau

SEQ ID NO: 742001 - RNA, 19 nt, Homo sapiens
  misc_RNA (1)...(19): siRNA sense strand
gugugaaccugcucauguc

SEQ ID NO: 742002 - RNA, 19 nt, Homo sapiens
  misc_RNA (1)...(19): siRNA sense strand
gggaugaaugacaagauug

SEQ ID NO: 742003 - RNA, 19 nt, Homo sapiens
  misc_RNA (1)...(19): siRNA sense strand
cuaccaacgacaagaagaa

SEQ ID NO: 742004 - RNA, 19 nt, Homo sapiens
  misc_RNA (1)...(19): siRNA sense strand
aaagaagagcagucacaga

SEQ ID NO: 742005 - RNA, 19 nt, Homo sapiens
  misc_RNA (1)...(19): siRNA sense strand
cuacagcgaccaugauguc

SEQ ID NO: 742006 - RNA, 19 nt, Homo sapiens
  misc_RNA (1)...(19): siRNA sense strand
auggagaguuugagcuuau

SEQ ID NO: 742007 - RNA, 19 nt, Homo sapiens
  misc_RNA (1)...(19): siRNA sense strand
cccgccagauggagaguuu

SEQ ID NO: 742008 - RNA, 19 nt, Homo sapiens
  misc_RNA (1)...(19): siRNA sense strand
uggcagcagucaccaagca

SEQ ID NO: 742009 - RNA, 19 nt, Homo sapiens
  misc_RNA (1)...(19): siRNA sense strand
ccagcuucuuccacguuaa

SEQ ID NO: 742010 - RNA, 19 nt, Homo sapiens
  misc_RNA (1)...(19): siRNA sense strand
augaaggaaucgcagauca

SEQ ID NO: 742011 - RNA, 19 nt, Homo sapiens
  misc_RNA (1)...(19): siRNA sense strand
gcaugaaggaaucgcagau

SEQ ID NO: 742012 - RNA, 19 nt, Homo sapiens
  misc_RNA (1)...(19): siRNA sense strand
caagagcgggaagcaauca

SEQ ID NO: 742013 - RNA, 19 nt, Homo sapiens
  misc_RNA (1)...(19): siRNA sense strand
gaaugagcucuuccuggau

SEQ ID NO: 742014 - RNA, 19 nt, Homo sapiens
  misc_RNA (1)...(19): siRNA sense strand
gcaccuuccaccagugugu

SEQ ID NO: 742015 - RNA, 19 nt, Homo sapiens
  misc_RNA (1)...(19): siRNA sense strand
ggcaaaggcacagcugaug

SEQ ID NO: 742016 - RNA, 19 nt, Homo sapiens
  misc_RNA (1)...(19): siRNA sense strand
gaggaaaacaucaagaaca

SEQ ID NO: 742017 - RNA, 19 nt, Homo sapiens
  misc_RNA (1)...(19): siRNA sense strand
gcuacuugaagguguuuga

SEQ ID NO: 742018 - RNA, 19 nt, Homo sapiens
  misc_RNA (1)...(19): siRNA sense strand
accagcuucuuccacguua

SEQ ID NO: 742019 - RNA, 19 nt, Homo sapiens
  misc_RNA (1)...(19): siRNA sense strand
agaagugggacgcaccaaa

SEQ ID NO: 742020 - RNA, 19 nt, Homo sapiens
  misc_RNA (1)...(19): siRNA sense strand
gugcgacucagcaaguuug

SEQ ID NO: 742021 - RNA, 19 nt, Homo sapiens
  misc_RNA (1)...(19): siRNA sense strand
aggaaaacaucaagaacaa

SEQ ID NO: 742022 - RNA, 19 nt, Homo sapiens
  misc_RNA (1)...(19): siRNA sense strand
cagcagucaccaagcagaa

SEQ ID NO: 742023 - RNA, 19 nt, Homo sapiens
  misc_RNA (1)...(19): siRNA sense strand
ggucaagguggucaucaag

SEQ ID NO: 742024 - RNA, 19 nt, Homo sapiens
  misc_RNA (1)...(19): siRNA sense strand
gaugugcuggagaguguga

SEQ ID NO: 742025 - RNA, 19 nt, Homo sapiens
  misc_RNA (1)...(19): siRNA sense strand
cugccauggucuucgaauu

SEQ ID NO: 742026 - RNA, 19 nt, Homo sapiens
  misc_RNA (1)...(19): siRNA sense strand
ucacugcuggcucagaaga

SEQ ID NO: 742027 - RNA, 19 nt, Homo sapiens
  misc_RNA (1)...(19): siRNA sense strand
gucuucgaauuccucuaua

SEQ ID NO: 742028 - RNA, 19 nt, Homo sapiens
  misc_RNA (1)...(19): siRNA sense strand
gcgcuaacguugucaagga

SEQ ID NO: 742029 - RNA, 19 nt, Homo sapiens
  misc_RNA (1)...(19): siRNA sense strand
gaccagcgcuaacguuguc

SEQ ID NO: 742030 - RNA, 19 nt, Homo sapiens
  misc_RNA (1)...(19): siRNA sense strand
cgcggcagcugcaggauuu

SEQ ID NO: 742031 - RNA, 19 nt, Homo sapiens
  misc_RNA (1)...(19): siRNA sense strand
ccagaucucucgccguuac

SEQ ID NO: 742032 - RNA, 19 nt, Homo sapiens
  misc_RNA (1)...(19): siRNA sense strand
ccaaguacgugcucuacac

SEQ ID NO: 742033 - RNA, 19 nt, Homo sapiens
  misc_RNA (1)...(19): siRNA sense strand
uggaagaagucccggaaca

SEQ ID NO: 742034 - RNA, 19 nt, Homo sapiens
  misc_RNA (1)...(19): siRNA sense strand
cggcugcucuucgaaguga

SEQ ID NO: 742035 - RNA, 19 nt, Homo sapiens
  misc_RNA (1)...(19): siRNA sense strand
gaugggacgucaggagaag

SEQ ID NO: 742036 - RNA, 19 nt, Homo sapiens
  misc_RNA (1)...(19): siRNA sense strand
ggaugggacgucaggagaa

SEQ ID NO: 742037 - RNA, 19 nt, Homo sapiens
  misc_RNA (1)...(19): siRNA sense strand
guccagaggccgagcaguu

SEQ ID NO: 742038 - RNA, 19 nt, Homo sapiens
  misc_RNA (1)...(19): siRNA sense strand
cugcaggauuucuggaaga

SEQ ID NO: 742039 - RNA, 19 nt, Homo sapiens
  misc_RNA (1)...(19): siRNA sense strand
gaagugaccagcgcuaacg

SEQ ID NO: 742040 - RNA, 19 nt, Homo sapiens
  misc_RNA (1)...(19): siRNA sense strand
uugagcggcugcaccgaaa

SEQ ID NO: 742041 - RNA, 19 nt, Homo sapiens
  misc_RNA (1)...(19): siRNA sense strand
gccguuacucggacuuuga

SEQ ID NO: 742042 - RNA, 19 nt, Homo sapiens
  misc_RNA (1)...(19): siRNA sense strand
gucaggagaagacgcagaa

SEQ ID NO: 742043 - RNA, 19 nt, Homo sapiens
  misc_RNA (1)...(19): siRNA sense strand
gcgcuaacguugucaagga

SEQ ID NO: 742044 - RNA, 19 nt, Homo sapiens
  misc_RNA (1)...(19): siRNA sense strand
gaccagcgcuaacguuguc

SEQ ID NO: 742045 - RNA, 19 nt, Homo sapiens
  misc_RNA (1)...(19): siRNA sense strand
cgcggcagcugcaggauuu

SEQ ID NO: 742046 - RNA, 19 nt, Homo sapiens
  misc_RNA (1)...(19): siRNA sense strand
ccagaucucucgccguuac

SEQ ID NO: 742047 - RNA, 19 nt, Homo sapiens
  misc_RNA (1)...(19): siRNA sense strand
ccaaguacgugcucuacac

SEQ ID NO: 742048 - RNA, 19 nt, Homo sapiens
  misc_RNA (1)...(19): siRNA sense strand
uggaagaagucccggaaca

SEQ ID NO: 742049 - RNA, 19 nt, Homo sapiens
  misc_RNA (1)...(19): siRNA sense strand
cggcugcucuucgaaguga

SEQ ID NO: 742050 - RNA, 19 nt, Homo sapiens
  misc_RNA (1)...(19): siRNA sense strand
gaugggacgucaggagaag

SEQ ID NO: 742051 - RNA, 19 nt, Homo sapiens
  misc_RNA (1)...(19): siRNA sense strand
ggaugggacgucaggagaa

SEQ ID NO: 742052 - RNA, 19 nt, Homo sapiens
  misc_RNA (1)...(19): siRNA sense strand
guccagaggccgagcaguu

SEQ ID NO: 742053 - RNA, 19 nt, Homo sapiens
  misc_RNA (1)...(19): siRNA sense strand
cugcaggauuucuggaaga

SEQ ID NO: 742054 - RNA, 19 nt, Homo sapiens
  misc_RNA (1)...(19): siRNA sense strand
gaagugaccagcgcuaacg

SEQ ID NO: 742055 - RNA, 19 nt, Homo sapiens
  misc_RNA (1)...(19): siRNA sense strand
uugagcggcugcaccgaaa

SEQ ID NO: 742056 - RNA, 19 nt, Homo sapiens
  misc_RNA (1)...(19): siRNA sense strand
gccguuacucggacuuuga

SEQ ID NO: 742057 - RNA, 19 nt, Homo sapiens
  misc_RNA (1)...(19): siRNA sense strand
gucaggagaagacgcagaa

SEQ ID NO: 742058 - RNA, 19 nt, Homo sapiens
  misc_RNA (1)...(19): siRNA sense strand
ucacacaggccaucgagua

SEQ ID NO: 742059 - RNA, 19 nt, Homo sapiens
  misc_RNA (1)...(19): siRNA sense strand
cacgcacgcucuucaaauu

SEQ ID NO: 742060 - RNA, 19 nt, Homo sapiens
  misc_RNA (1)...(19): siRNA sense strand
gcaacgugcucgucaucau

SEQ ID NO: 742061 - RNA, 19 nt, Homo sapiens
  misc_RNA (1)...(19): siRNA sense strand
ucaaauucuucuucugguu

SEQ ID NO: 742062 - RNA, 19 nt, Homo sapiens
  misc_RNA (1)...(19): siRNA sense strand
caucaaggccaucaucauc

SEQ ID NO: 742063 - RNA, 19 nt, Homo sapiens
  misc_RNA (1)...(19): siRNA sense strand
ccacgcucgucaucccuuu

SEQ ID NO: 742064 - RNA, 19 nt, Homo sapiens
  misc_RNA (1)...(19): siRNA sense strand
gcacgcucuucaaauucuu

SEQ ID NO: 742065 - RNA, 19 nt, Homo sapiens
  misc_RNA (1)...(19): siRNA sense strand
gugcaucggcuccuucuuc

SEQ ID NO: 742066 - RNA, 19 nt, Homo sapiens
  misc_RNA (1)...(19): siRNA sense strand
cacaggccaucgaguacaa

SEQ ID NO: 742067 - RNA, 19 nt, Homo sapiens
  misc_RNA (1)...(19): siRNA sense strand
ggucaucuacaccaucuuc

SEQ ID NO: 742068 - RNA, 19 nt, Homo sapiens
  misc_RNA (1)...(19): siRNA sense strand
gcucuucaaauucuucuuc

SEQ ID NO: 742069 - RNA, 19 nt, Homo sapiens
  misc_RNA (1)...(19): siRNA sense strand
ccacgcacgcucuucaaau

SEQ ID NO: 742070 - RNA, 19 nt, Homo sapiens
  misc_RNA (1)...(19): siRNA sense strand
ggucaucucggccgucauc

SEQ ID NO: 742071 - RNA, 19 nt, Homo sapiens
  misc_RNA (1)...(19): siRNA sense strand
caucuucaaccacgauuuc

SEQ ID NO: 742072 - RNA, 19 nt, Homo sapiens
  misc_RNA (1)...(19): siRNA sense strand
caacgugcucgucaucauc

SEQ ID NO: 742073 - RNA, 19 nt, Homo sapiens
  misc_RNA (1)...(19): siRNA sense strand
gcaucaaggccaucaucau

SEQ ID NO: 742074 - RNA, 19 nt, Homo sapiens
  misc_RNA (1)...(19): siRNA sense strand
gagaucaacgaccagaagu

SEQ ID NO: 742075 - RNA, 19 nt, Homo sapiens
  misc_RNA (1)...(19): siRNA sense strand
cgagaucaacgaccagaag

SEQ ID NO: 742076 - RNA, 19 nt, Homo sapiens
  misc_RNA (1)...(19): siRNA sense strand
cguugaacccggucaucua

SEQ ID NO: 742077 - RNA, 19 nt, Homo sapiens
  misc_RNA (1)...(19): siRNA sense strand
caagaaacccaguucauug

SEQ ID NO: 742078 - RNA, 19 nt, Homo sapiens
  misc_RNA (1)...(19): siRNA sense strand
acacgcauaucuuuacuuu

SEQ ID NO: 742079 - RNA, 19 nt, Homo sapiens
  misc_RNA (1)...(19): siRNA sense strand
ucacuacucuccucuccua

SEQ ID NO: 742080 - RNA, 19 nt, Homo sapiens
  misc_RNA (1)...(19): siRNA sense strand
caugaagccugcauucuug

SEQ ID NO: 742081 - RNA, 19 nt, Homo sapiens
  misc_RNA (1)...(19): siRNA sense strand
gcaugaagccugcauucuu

SEQ ID NO: 742082 - RNA, 19 nt, Homo sapiens
  misc_RNA (1)...(19): siRNA sense strand
ccaagaaacccaguucauu

SEQ ID NO: 742083 - RNA, 19 nt, Homo sapiens
  misc_RNA (1)...(19): siRNA sense strand
ccaguacccucccaagaug

SEQ ID NO: 742084 - RNA, 19 nt, Homo sapiens
  misc_RNA (1)...(19): siRNA sense strand
aacuaaagcucacaaacaa

SEQ ID NO: 742085 - RNA, 19 nt, Homo sapiens
  misc_RNA (1)...(19): siRNA sense strand
cgagauuacucagcugaaa

SEQ ID NO: 742086 - RNA, 19 nt, Homo sapiens
  misc_RNA (1)...(19): siRNA sense strand
aaacuaaagcucacaaaca

SEQ ID NO: 742087 - RNA, 19 nt, Homo sapiens
  misc_RNA (1)...(19): siRNA sense strand
uccagucccuccauaagua

SEQ ID NO: 742088 - RNA, 19 nt, Homo sapiens
  misc_RNA (1)...(19): siRNA sense strand
ccaacaaugugacccagau

SEQ ID NO: 742089 - RNA, 19 nt, Homo sapiens
  misc_RNA (1)...(19): siRNA sense strand
gcauaucuuuacuuuccaa

SEQ ID NO: 742090 - RNA, 19 nt, Homo sapiens
  misc_RNA (1)...(19): siRNA sense strand
uuacucagcugaaaauuga

SEQ ID NO: 742091 - RNA, 19 nt, Homo sapiens
  misc_RNA (1)...(19): siRNA sense strand
gccaggaaguuucauuugg

SEQ ID NO: 742092 - RNA, 19 nt, Homo sapiens
  misc_RNA (1)...(19): siRNA sense strand
ggaagcugaaggacaguuu

SEQ ID NO: 742093 - RNA, 19 nt, Homo sapiens
  misc_RNA (1)...(19): siRNA sense strand
ggacccaacugucaauucc

SEQ ID NO: 742094 - RNA, 19 nt, Homo sapiens
  misc_RNA (1)...(19): siRNA sense strand
ggaaacuaaagcucacaaa

SEQ ID NO: 742095 - RNA, 19 nt, Homo sapiens
  misc_RNA (1)...(19): siRNA sense strand
gaacuuugaguccauguac

SEQ ID NO: 742096 - RNA, 19 nt, Homo sapiens
  misc_RNA (1)...(19): siRNA sense strand
gaaacuaaagcucacaaac

SEQ ID NO: 742097 - RNA, 19 nt, Homo sapiens
  misc_RNA (1)...(19): siRNA sense strand
cuaccagaaugccgagauu

SEQ ID NO: 742098 - RNA, 19 nt, Homo sapiens
  misc_RNA (1)...(19): siRNA sense strand
ccaaaggauuccgggagaa

SEQ ID NO: 742099 - RNA, 19 nt, Homo sapiens
  misc_RNA (1)...(19): siRNA sense strand
caacacgcauaucuuuacu

SEQ ID NO: 742100 - RNA, 19 nt, Homo sapiens
  misc_RNA (1)...(19): siRNA sense strand
gcgccaggaaguuucauuu

SEQ ID NO: 742101 - RNA, 19 nt, Homo sapiens
  misc_RNA (1)...(19): siRNA sense strand
ggcccaccauguccuacua

SEQ ID NO: 742102 - RNA, 19 nt, Homo sapiens
  misc_RNA (1)...(19): siRNA sense strand
gggagaacuuugaguccau

SEQ ID NO: 742103 - RNA, 19 nt, Homo sapiens
  misc_RNA (1)...(19): siRNA sense strand
gugcuccagucccuccaua

SEQ ID NO: 742104 - RNA, 19 nt, Homo sapiens
  misc_RNA (1)...(19): siRNA sense strand
gacggcggauguucccauu

SEQ ID NO: 742105 - RNA, 19 nt, Homo sapiens
  misc_RNA (1)...(19): siRNA sense strand
gauguucccauuccuguca

SEQ ID NO: 742106 - RNA, 19 nt, Homo sapiens
  misc_RNA (1)...(19): siRNA sense strand
cuaaagcucacaaacaaca

SEQ ID NO: 742107 - RNA, 19 nt, Homo sapiens
  misc_RNA (1)...(19): siRNA sense strand
uuaaucagcaccagacaga

SEQ ID NO: 742108 - RNA, 19 nt, Homo sapiens
  misc_RNA (1)...(19): siRNA sense strand
acgcauaucuuuacuuucc

SEQ ID NO: 742109 - RNA, 19 nt, Homo sapiens
  misc_RNA (1)...(19): siRNA sense strand
caaugugacccagaugauu

SEQ ID NO: 742110 - RNA, 19 nt, Homo sapiens
  misc_RNA (1)...(19): siRNA sense strand
gcuaugaggcugaguuucg

SEQ ID NO: 742111 - RNA, 19 nt, Homo sapiens
  misc_RNA (1)...(19): siRNA sense strand
gcauaucguugaggugaac

SEQ ID NO: 742112 - RNA, 19 nt, Homo sapiens
  misc_RNA (1)...(19): siRNA sense strand
gugacugccuaccagaaug

SEQ ID NO: 742113 - RNA, 19 nt, Homo sapiens
  misc_RNA (1)...(19): siRNA sense strand
ccaacacgcauaucuuuac

SEQ ID NO: 742114 - RNA, 19 nt, Homo sapiens
  misc_RNA (1)...(19): siRNA sense strand
aaugugacccagaugauug

SEQ ID NO: 742115 - RNA, 19 nt, Homo sapiens
  misc_RNA (1)...(19): siRNA sense strand
cuguugugguccaaguuua

SEQ ID NO: 742116 - RNA, 19 nt, Homo sapiens
  misc_RNA (1)...(19): siRNA sense strand
gcugaaggacaguuuuaua

SEQ ID NO: 742117 - RNA, 19 nt, Homo sapiens
  misc_RNA (1)...(19): siRNA sense strand
ccauuccugucauuuacug

SEQ ID NO: 742118 - RNA, 19 nt, Homo sapiens
  misc_RNA (1)...(19): siRNA sense strand
ugauaaggaagcugaagga

SEQ ID NO: 742119 - RNA, 19 nt, Homo sapiens
  misc_RNA (1)...(19): siRNA sense strand
cagcaugaagccugcauuc

SEQ ID NO: 742120 - RNA, 19 nt, Homo sapiens
  misc_RNA (1)...(19): siRNA sense strand
aaucagcaccagacagaga

SEQ ID NO: 742121 - RNA, 19 nt, Homo sapiens
  misc_RNA (1)...(19): siRNA sense strand
uaccagaaugccgagauua

SEQ ID NO: 742122 - RNA, 19 nt, Homo sapiens
  misc_RNA (1)...(19): siRNA sense strand
caacaaugugacccagaug

SEQ ID NO: 742123 - RNA, 19 nt, Homo sapiens
  misc_RNA (1)...(19): siRNA sense strand
uaacuauuuucccaacuga

SEQ ID NO: 742124 - RNA, 19 nt, Homo sapiens
  misc_RNA (1)...(19): siRNA sense strand
uccaacacgcauaucuuua

SEQ ID NO: 742125 - RNA, 19 nt, Homo sapiens
  misc_RNA (1)...(19): siRNA sense strand
uuccaacacgcauaucuuu

SEQ ID NO: 742126 - RNA, 19 nt, Homo sapiens
  misc_RNA (1)...(19): siRNA sense strand
gggcgaaggagacucuaag

SEQ ID NO: 742127 - RNA, 19 nt, Homo sapiens
  misc_RNA (1)...(19): siRNA sense strand
gggucgcgcucaacaacca

SEQ ID NO: 742128 - RNA, 19 nt, Homo sapiens
  misc_RNA (1)...(19): siRNA sense strand
gggaaacuaaagcucacaa

SEQ ID NO: 742129 - RNA, 19 nt, Homo sapiens
  misc_RNA (1)...(19): siRNA sense strand
cccaguacccucccaagau

SEQ ID NO: 742130 - RNA, 19 nt, Homo sapiens
  misc_RNA (1)...(19): siRNA sense strand
gcaccagacagagaugauc

SEQ ID NO: 742131 - RNA, 19 nt, Homo sapiens
  misc_RNA (1)...(19): siRNA sense strand
cuaugaggcugaguuucga

SEQ ID NO: 742132 - RNA, 19 nt, Homo sapiens
  misc_RNA (1)...(19): siRNA sense strand
ucccauuccugucauuuac

SEQ ID NO: 742133 - RNA, 19 nt, Homo sapiens
  misc_RNA (1)...(19): siRNA sense strand
gagggucgcgcucaacaac

SEQ ID NO: 742134 - RNA, 19 nt, Homo sapiens
  misc_RNA (1)...(19): siRNA sense strand
gaacagaacuugcagcauu

SEQ ID NO: 742135 - RNA, 19 nt, Homo sapiens
  misc_RNA (1)...(19): siRNA sense strand
gcagcgagcuucuuccaua

SEQ ID NO: 742136 - RNA, 19 nt, Homo sapiens
  misc_RNA (1)...(19): siRNA sense strand
caaugcaacugacuuauuu

SEQ ID NO: 742137 - RNA, 19 nt, Homo sapiens
  misc_RNA (1)...(19): siRNA sense strand
gaacacagcuagcuuuagg

SEQ ID NO: 742138 - RNA, 19 nt, Homo sapiens
  misc_RNA (1)...(19): siRNA sense strand
cuagaucacucuuccaaua

SEQ ID NO: 742139 - RNA, 19 nt, Homo sapiens
  misc_RNA (1)...(19): siRNA sense strand
gaauuucucugguaugaug

SEQ ID NO: 742140 - RNA, 19 nt, Homo sapiens
  misc_RNA (1)...(19): siRNA sense strand
gcaacuggauguguucaua

SEQ ID NO: 742141 - RNA, 19 nt, Homo sapiens
  misc_RNA (1)...(19): siRNA sense strand
gaaggacuaugcugcuauu

SEQ ID NO: 742142 - RNA, 19 nt, Homo sapiens
  misc_RNA (1)...(19): siRNA sense strand
caauuaguguuccuugaua

SEQ ID NO: 742143 - RNA, 19 nt, Homo sapiens
  misc_RNA (1)...(19): siRNA sense strand
ggacuaugcugcuauugug

SEQ ID NO: 742144 - RNA, 19 nt, Homo sapiens
  misc_RNA (1)...(19): siRNA sense strand
gagaaggugugggagcuua

SEQ ID NO: 742145 - RNA, 19 nt, Homo sapiens
  misc_RNA (1)...(19): siRNA sense strand
agaaagaacuacccauaga

SEQ ID NO: 742146 - RNA, 19 nt, Homo sapiens
  misc_RNA (1)...(19): siRNA sense strand
gaaguuucuugaagugauu

SEQ ID NO: 742147 - RNA, 19 nt, Homo sapiens
  misc_RNA (1)...(19): siRNA sense strand
gagccuacauggccaaaga

SEQ ID NO: 742148 - RNA, 19 nt, Homo sapiens
  misc_RNA (1)...(19): siRNA sense strand
gcaaagcaagucaaagaaa

SEQ ID NO: 742149 - RNA, 19 nt, Homo sapiens
  misc_RNA (1)...(19): siRNA sense strand
gacgagaacccagaaguua

SEQ ID NO: 742150 - RNA, 19 nt, Homo sapiens
  misc_RNA (1)...(19): siRNA sense strand
gcaaugcaacugacuuauu

SEQ ID NO: 742151 - RNA, 19 nt, Homo sapiens
  misc_RNA (1)...(19): siRNA sense strand
gaacccagaaguuaugauu

SEQ ID NO: 742152 - RNA, 19 nt, Homo sapiens
  misc_RNA (1)...(19): siRNA sense strand
caagaagccuacuuaugga

SEQ ID NO: 742153 - RNA, 19 nt, Homo sapiens
  misc_RNA (1)...(19): siRNA sense strand
ccacagaaacaaauacaaa

SEQ ID NO: 742154 - RNA, 19 nt, Homo sapiens
  misc_RNA (1)...(19): siRNA sense strand
gcacggauggugacaacua

SEQ ID NO: 742155 - RNA, 19 nt, Homo sapiens
  misc_RNA (1)...(19): siRNA sense strand
ggacaaacuaugugaaugu

SEQ ID NO: 742156 - RNA, 19 nt, Homo sapiens
  misc_RNA (1)...(19): siRNA sense strand
ucaagaagccuacuuaugg

SEQ ID NO: 742157 - RNA, 19 nt, Homo sapiens
  misc_RNA (1)...(19): siRNA sense strand
gaucuuuccuuuccuucaa

SEQ ID NO: 742158 - RNA, 19 nt, Homo sapiens
  misc_RNA (1)...(19): siRNA sense strand
agaugaagaugaagaaaug

SEQ ID NO: 742159 - RNA, 19 nt, Homo sapiens
  misc_RNA (1)...(19): siRNA sense strand
acagcuagcuuuaggaaga

SEQ ID NO: 742160 - RNA, 19 nt, Homo sapiens
  misc_RNA (1)...(19): siRNA sense strand
gcaugaacauccugaucaa

SEQ ID NO: 742161 - RNA, 19 nt, Homo sapiens
  misc_RNA (1)...(19): siRNA sense strand
gcaguucuucucauagaua

SEQ ID NO: 742162 - RNA, 19 nt, Homo sapiens
  misc_RNA (1)...(19): siRNA sense strand
ccagaaagccaauuagugu

SEQ ID NO: 742163 - RNA, 19 nt, Homo sapiens
  misc_RNA (1)...(19): siRNA sense strand
cagaggcacuucaacauca

SEQ ID NO: 742164 - RNA, 19 nt, Homo sapiens
  misc_RNA (1)...(19): siRNA sense strand
ucucauagauagcuguauu

SEQ ID NO: 742165 - RNA, 19 nt, Homo sapiens
  misc_RNA (1)...(19): siRNA sense strand
cagcaaagcaagucaaaga

SEQ ID NO: 742166 - RNA, 19 nt, Homo sapiens
  misc_RNA (1)...(19): siRNA sense strand
ucaaaggacuguggcuauu

SEQ ID NO: 742167 - RNA, 19 nt, Homo sapiens
  misc_RNA (1)...(19): siRNA sense strand
gccaaugccucaggguaua

SEQ ID NO: 742168 - RNA, 19 nt, Homo sapiens
  misc_RNA (1)...(19): siRNA sense strand
gaagacugcucaucaaaau

SEQ ID NO: 742169 - RNA, 19 nt, Homo sapiens
  misc_RNA (1)...(19): siRNA sense strand
caauagaucuuuccuuucc

SEQ ID NO: 742170 - RNA, 19 nt, Homo sapiens
  misc_RNA (1)...(19): siRNA sense strand
gcagaaaucaauagaucuu

SEQ ID NO: 742171 - RNA, 19 nt, Homo sapiens
  misc_RNA (1)...(19): siRNA sense strand
caaaguacaccuucuucaa

SEQ ID NO: 742172 - RNA, 19 nt, Homo sapiens
  misc_RNA (1)...(19): siRNA sense strand
gaaagaacuacccauagau

SEQ ID NO: 742173 - RNA, 19 nt, Homo sapiens
  misc_RNA (1)...(19): siRNA sense strand
agacagaaagcucagauuu

SEQ ID NO: 742174 - RNA, 19 nt, Homo sapiens
  misc_RNA (1)...(19): siRNA sense strand
cagggcagcuuaccucuuc

SEQ ID NO: 742175 - RNA, 19 nt, Homo sapiens
  misc_RNA (1)...(19): siRNA sense strand
aggcaaacgcuauaaauuu

SEQ ID NO: 742176 - RNA, 19 nt, Homo sapiens
  misc_RNA (1)...(19): siRNA sense strand
guucauagccaccagcaaa

SEQ ID NO: 742177 - RNA, 19 nt, Homo sapiens
  misc_RNA (1)...(19): siRNA sense strand
cagcgagcuucuuccauaa

SEQ ID NO: 742178 - RNA, 19 nt, Homo sapiens
  misc_RNA (1)...(19): siRNA sense strand
acagaaagaacuacccaua

SEQ ID NO: 742179 - RNA, 19 nt, Homo sapiens
  misc_RNA (1)...(19): siRNA sense strand
uucaauaccugcacaauca

SEQ ID NO: 742180 - RNA, 19 nt, Homo sapiens
  misc_RNA (1)...(19): siRNA sense strand
caaagcaagucaaagaaaa

SEQ ID NO: 742181 - RNA, 19 nt, Homo sapiens
  misc_RNA (1)...(19): siRNA sense strand
cagcuuaccucuucauagg

SEQ ID NO: 742182 - RNA, 19 nt, Homo sapiens
  misc_RNA (1)...(19): siRNA sense strand
acagaagacugcucaucaa

SEQ ID NO: 742183 - RNA, 19 nt, Homo sapiens
  misc_RNA (1)...(19): siRNA sense strand
ccaaacaaguucugaccau

SEQ ID NO: 742184 - RNA, 19 nt, Homo sapiens
  misc_RNA (1)...(19): siRNA sense strand
gaagaauguucagaggaau

SEQ ID NO: 742185 - RNA, 19 nt, Homo sapiens
  misc_RNA (1)...(19): siRNA sense strand
gcaggcaaacgcuauaaau

SEQ ID NO: 742186 - RNA, 19 nt, Homo sapiens
  misc_RNA (1)...(19): siRNA sense strand
gaucaaaggauggagaaau

SEQ ID NO: 742187 - RNA, 19 nt, Homo sapiens
  misc_RNA (1)...(19): siRNA sense strand
acccauagaugaagaugaa

SEQ ID NO: 742188 - RNA, 19 nt, Homo sapiens
  misc_RNA (1)...(19): siRNA sense strand
gcgagcuucuuccauaaug

SEQ ID NO: 742189 - RNA, 19 nt, Homo sapiens
  misc_RNA (1)...(19): siRNA sense strand
cuaguugguuggugaaaga

SEQ ID NO: 742190 - RNA, 19 nt, Homo sapiens
  misc_RNA (1)...(19): siRNA sense strand
gcauuuauguauagaacca

SEQ ID NO: 742191 - RNA, 19 nt, Homo sapiens
  misc_RNA (1)...(19): siRNA sense strand
gaaggugugggagcuuaua

SEQ ID NO: 742192 - RNA, 19 nt, Homo sapiens
  misc_RNA (1)...(19): siRNA sense strand
gcuuaugacuucuuguaca

SEQ ID NO: 742193 - RNA, 19 nt, Homo sapiens
  misc_RNA (1)...(19): siRNA sense strand
uauggcagcuacaccacua

SEQ ID NO: 742194 - RNA, 19 nt, Homo sapiens
  misc_RNA (1)...(19): siRNA sense strand
gcaagacacaacaggagaa

SEQ ID NO: 742195 - RNA, 19 nt, Homo sapiens
  misc_RNA (1)...(19): siRNA sense strand
gaaucaaggauaucuucaa

SEQ ID NO: 742196 - RNA, 19 nt, Homo sapiens
  misc_RNA (1)...(19): siRNA sense strand
cuauagauguucagagcuu

SEQ ID NO: 742197 - RNA, 19 nt, Homo sapiens
  misc_RNA (1)...(19): siRNA sense strand
cugcagaaaucaauagauc

SEQ ID NO: 742198 - RNA, 19 nt, Homo sapiens
  misc_RNA (1)...(19): siRNA sense strand
cuauugcggacucaaauua

SEQ ID NO: 742199 - RNA, 19 nt, Homo sapiens
  misc_RNA (1)...(19): siRNA sense strand
agacacaacaggagaaguu

SEQ ID NO: 742200 - RNA, 19 nt, Homo sapiens
  misc_RNA (1)...(19): siRNA sense strand
gaugcugucccugauauuu

SEQ ID NO: 742201 - RNA, 19 nt, Homo sapiens
  misc_RNA (1)...(19): siRNA sense strand
aacagaacuugcagcauuu

SEQ ID NO: 742202 - RNA, 19 nt, Homo sapiens
  misc_RNA (1)...(19): siRNA sense strand
gggacaaacuaugugaaug

SEQ ID NO: 742203 - RNA, 19 nt, Homo sapiens
  misc_RNA (1)...(19): siRNA sense strand
gccaauuaguguuccuuga

SEQ ID NO: 742204 - RNA, 19 nt, Homo sapiens
  misc_RNA (1)...(19): siRNA sense strand
ggauggcucccucuaugaa

SEQ ID NO: 742205 - RNA, 19 nt, Homo sapiens
  misc_RNA (1)...(19): siRNA sense strand
ggaauucagccaucaagag

SEQ ID NO: 742206 - RNA, 19 nt, Homo sapiens
  misc_RNA (1)...(19): siRNA sense strand
aucaaaggauggagaaauu

SEQ ID NO: 742207 - RNA, 19 nt, Homo sapiens
  misc_RNA (1)...(19): siRNA sense strand
gagaggagagucccuugga

SEQ ID NO: 742208 - RNA, 19 nt, Homo sapiens
  misc_RNA (1)...(19): siRNA sense strand
gaagaugaagaaaugaaag

SEQ ID NO: 742209 - RNA, 19 nt, Homo sapiens
  misc_RNA (1)...(19): siRNA sense strand
gaacuacccauagaugaag

SEQ ID NO: 742210 - RNA, 19 nt, Homo sapiens
  misc_RNA (1)...(19): siRNA sense strand
acagaaagcucagauuuug

SEQ ID NO: 742211 - RNA, 19 nt, Homo sapiens
  misc_RNA (1)...(19): siRNA sense strand
ggaggccauugacaggauu

SEQ ID NO: 742212 - RNA, 19 nt, Homo sapiens
  misc_RNA (1)...(19): siRNA sense strand
gugaaggacuaugcugcua

SEQ ID NO: 742213 - RNA, 19 nt, Homo sapiens
  misc_RNA (1)...(19): siRNA sense strand
ucccugaggugaaggacua

SEQ ID NO: 742214 - RNA, 19 nt, Homo sapiens
  misc_RNA (1)...(19): siRNA sense strand
cgacgagaacccagaaguu

SEQ ID NO: 742215 - RNA, 19 nt, Homo sapiens
  misc_RNA (1)...(19): siRNA sense strand
caggcaaacgcuauaaauu

SEQ ID NO: 742216 - RNA, 19 nt, Homo sapiens
  misc_RNA (1)...(19): siRNA sense strand
ggucuaaauacaagcauga

SEQ ID NO: 742217 - RNA, 19 nt, Homo sapiens
  misc_RNA (1)...(19): siRNA sense strand
ggaagccuaguccugauga

SEQ ID NO: 742218 - RNA, 19 nt, Homo sapiens
  misc_RNA (1)...(19): siRNA sense strand
cccgagacauggccaaaga

SEQ ID NO: 742219 - RNA, 19 nt, Homo sapiens
  misc_RNA (1)...(19): siRNA sense strand
cagauaagagacagacuga

SEQ ID NO: 742220 - RNA, 19 nt, Homo sapiens
  misc_RNA (1)...(19): siRNA sense strand
cugaacgccugcugagauu

SEQ ID NO: 742221 - RNA, 19 nt, Homo sapiens
  misc_RNA (1)...(19): siRNA sense strand
agaaaucucuggucuugcu

SEQ ID NO: 742222 - RNA, 19 nt, Homo sapiens
  misc_RNA (1)...(19): siRNA sense strand
aaucaaggauaucuucaag

SEQ ID NO: 742223 - RNA, 19 nt, Homo sapiens
  misc_RNA (1)...(19): siRNA sense strand
gcuguauccugagaacauu

SEQ ID NO: 742224 - RNA, 19 nt, Homo sapiens
  misc_RNA (1)...(19): siRNA sense strand
gaagccuaguccugaugaa

SEQ ID NO: 742225 - RNA, 19 nt, Homo sapiens
  misc_RNA (1)...(19): siRNA sense strand
ccaauggugugccuuucau

SEQ ID NO: 742226 - RNA, 19 nt, Homo sapiens
  misc_RNA (1)...(19): siRNA sense strand
uauuaugguuguacucuuc

SEQ ID NO: 742227 - RNA, 19 nt, Homo sapiens
  misc_RNA (1)...(19): siRNA sense strand
guaacauacgagaaacaua

SEQ ID NO: 742228 - RNA, 19 nt, Homo sapiens
  misc_RNA (1)...(19): siRNA sense strand
aaagaacuacccauagaug

SEQ ID NO: 742229 - RNA, 19 nt, Homo sapiens
  misc_RNA (1)...(19): siRNA sense strand
agacugaggaggccauuga

SEQ ID NO: 742230 - RNA, 19 nt, Homo sapiens
  misc_RNA (1)...(19): siRNA sense strand
gcugaacgccugcugagau

SEQ ID NO: 742231 - RNA, 19 nt, Homo sapiens
  misc_RNA (1)...(19): siRNA sense strand
gcacaggucauugcugauc

SEQ ID NO: 742232 - RNA, 19 nt, Homo sapiens
  misc_RNA (1)...(19): siRNA sense strand
cagcucaaccugaagaaug

SEQ ID NO: 742233 - RNA, 19 nt, Homo sapiens
  misc_RNA (1)...(19): siRNA sense strand
cagaagacugcucaucaaa

SEQ ID NO: 742234 - RNA, 19 nt, Homo sapiens
  misc_RNA (1)...(19): siRNA sense strand
gauggacgcucagaugaaa

SEQ ID NO: 742235 - RNA, 19 nt, Homo sapiens
  misc_RNA (1)...(19): siRNA sense strand
gacacuaccuucucccauu

SEQ ID NO: 742236 - RNA, 19 nt, Homo sapiens
  misc_RNA (1)...(19): siRNA sense strand
gaggugagacccaaagaaa

SEQ ID NO: 742237 - RNA, 19 nt, Homo sapiens
  misc_RNA (1)...(19): siRNA sense strand
caaccuacauguucaaagg

SEQ ID NO: 742238 - RNA, 19 nt, Homo sapiens
  misc_RNA (1)...(19): siRNA sense strand
caggagcaauucgccauua

SEQ ID NO: 742239 - RNA, 19 nt, Homo sapiens
  misc_RNA (1)...(19): siRNA sense strand
ccauuacucugaaguccua

SEQ ID NO: 742240 - RNA, 19 nt, Homo sapiens
  misc_RNA (1)...(19): siRNA sense strand
ucaaaggcaucaucagcuu

SEQ ID NO: 742241 - RNA, 19 nt, Homo sapiens
  misc_RNA (1)...(19): siRNA sense strand
acacuaccuucucccauuu

SEQ ID NO: 742242 - RNA, 19 nt, Homo sapiens
  misc_RNA (1)...(19): siRNA sense strand
caacgcagaugaggaaguc

SEQ ID NO: 742243 - RNA, 19 nt, Homo sapiens
  misc_RNA (1)...(19): siRNA sense strand
ccaaaucugccguguaugu

SEQ ID NO: 742244 - RNA, 19 nt, Homo sapiens
  misc_RNA (1)...(19): siRNA sense strand
ggcuaucacuucaauguca

SEQ ID NO: 742245 - RNA, 19 nt, Homo sapiens
  misc_RNA (1)...(19): siRNA sense strand
ggaggaguaugugcugaug

SEQ ID NO: 742246 - RNA, 19 nt, Homo sapiens
  misc_RNA (1)...(19): siRNA sense strand
acucugaaguccuacauug

SEQ ID NO: 742247 - RNA, 19 nt, Homo sapiens
  misc_RNA (1)...(19): siRNA sense strand
gaggagcagcggaugauga

SEQ ID NO: 742248 - RNA, 19 nt, Homo sapiens
  misc_RNA (1)...(19): siRNA sense strand
ucucccauuucaagaauuu

SEQ ID NO: 742249 - RNA, 19 nt, Homo sapiens
  misc_RNA (1)...(19): siRNA sense strand
ggaggugagacccaaagaa

SEQ ID NO: 742250 - RNA, 19 nt, Homo sapiens
  misc_RNA (1)...(19): siRNA sense strand
gacaguggcgggaaagaga

SEQ ID NO: 742251 - RNA, 19 nt, Homo sapiens
  misc_RNA (1)...(19): siRNA sense strand
gagcuccgcagcaucaaug

SEQ ID NO: 742252 - RNA, 19 nt, Homo sapiens
  misc_RNA (1)...(19): siRNA sense strand
ggcagugucuggaacuaca

SEQ ID NO: 742253 - RNA, 19 nt, Homo sapiens
  misc_RNA (1)...(19): siRNA sense strand
cgagcugugucaacugaga

SEQ ID NO: 742254 - RNA, 19 nt, Homo sapiens
  misc_RNA (1)...(19): siRNA sense strand
uggagcccaugcugaaauu

SEQ ID NO: 742255 - RNA, 19 nt, Homo sapiens
  misc_RNA (1)...(19): siRNA sense strand
ugucaacgcagaugaggaa

SEQ ID NO: 742256 - RNA, 19 nt, Homo sapiens
  misc_RNA (1)...(19): siRNA sense strand
gcaggagcaauucgccauu

SEQ ID NO: 742257 - RNA, 19 nt, Homo sapiens
  misc_RNA (1)...(19): siRNA sense strand
caauucgccauuacucuga

SEQ ID NO: 742258 - RNA, 19 nt, Homo sapiens
  misc_RNA (1)...(19): siRNA sense strand
ucugaaguccuacauugaa

SEQ ID NO: 742259 - RNA, 19 nt, Homo sapiens
  misc_RNA (1)...(19): siRNA sense strand
ucaccgagcuccgcagcau

SEQ ID NO: 742260 - RNA, 19 nt, Homo sapiens
  misc_RNA (1)...(19): siRNA sense strand
caaagaaagcuggaaccau

SEQ ID NO: 742261 - RNA, 19 nt, Homo sapiens
  misc_RNA (1)...(19): siRNA sense strand
ccccaaaucugccguguau

SEQ ID NO: 742262 - RNA, 19 nt, Homo sapiens
  misc_RNA (1)...(19): siRNA sense strand
gagcaauucgccauuacuc

SEQ ID NO: 742263 - RNA, 19 nt, Homo sapiens
  misc_RNA (1)...(19): siRNA sense strand
uugccaaagucaucuccua

SEQ ID NO: 742264 - RNA, 19 nt, Homo sapiens
  misc_RNA (1)...(19): siRNA sense strand
gcuaucacuucaaugucau

SEQ ID NO: 742265 - RNA, 19 nt, Homo sapiens
  misc_RNA (1)...(19): siRNA sense strand
cugaaguccuacauugaau

SEQ ID NO: 742266 - RNA, 19 nt, Homo sapiens
  misc_RNA (1)...(19): siRNA sense strand
cuggagagcggcaugaaga

SEQ ID NO: 742267 - RNA, 19 nt, Homo sapiens
  misc_RNA (1)...(19): siRNA sense strand
ggugagacccaaagaaagc

SEQ ID NO: 742268 - RNA, 19 nt, Homo sapiens
  misc_RNA (1)...(19): siRNA sense strand
ggaguuguucggcaucaca

SEQ ID NO: 742269 - RNA, 19 nt, Homo sapiens
  misc_RNA (1)...(19): siRNA sense strand
ugaaggaugcaagggcuuu

SEQ ID NO: 742270 - RNA, 19 nt, Homo sapiens
  misc_RNA (1)...(19): siRNA sense strand
ugauggacgcucagaugaa

SEQ ID NO: 742271 - RNA, 19 nt, Homo sapiens
  misc_RNA (1)...(19): siRNA sense strand
uccugaagaucauggcuau

SEQ ID NO: 742272 - RNA, 19 nt, Homo sapiens
  misc_RNA (1)...(19): siRNA sense strand
caaaucugccguguaugug

SEQ ID NO: 742273 - RNA, 19 nt, Homo sapiens
  misc_RNA (1)...(19): siRNA sense strand
gaugaaaaccuuugacacu

SEQ ID NO: 742274 - RNA, 19 nt, Homo sapiens
  misc_RNA (1)...(19): siRNA sense strand
aggaguaugugcugaugca

SEQ ID NO: 742275 - RNA, 19 nt, Homo sapiens
  misc_RNA (1)...(19): siRNA sense strand
gauggacgcucagaugaaa

SEQ ID NO: 742276 - RNA, 19 nt, Homo sapiens
  misc_RNA (1)...(19): siRNA sense strand
gacacuaccuucucccauu

SEQ ID NO: 742277 - RNA, 19 nt, Homo sapiens
  misc_RNA (1)...(19): siRNA sense strand
gaggugagacccaaagaaa

SEQ ID NO: 742278 - RNA, 19 nt, Homo sapiens
  misc_RNA (1)...(19): siRNA sense strand
caaccuacauguucaaagg

SEQ ID NO: 742279 - RNA, 19 nt, Homo sapiens
  misc_RNA (1)...(19): siRNA sense strand
caggagcaauucgccauua

SEQ ID NO: 742280 - RNA, 19 nt, Homo sapiens
  misc_RNA (1)...(19): siRNA sense strand
ccauuacucugaaguccua

SEQ ID NO: 742281 - RNA, 19 nt, Homo sapiens
  misc_RNA (1)...(19): siRNA sense strand
ucaaaggcaucaucagcuu

SEQ ID NO: 742282 - RNA, 19 nt, Homo sapiens
  misc_RNA (1)...(19): siRNA sense strand
acacuaccuucucccauuu

SEQ ID NO: 742283 - RNA, 19 nt, Homo sapiens
  misc_RNA (1)...(19): siRNA sense strand
caacgcagaugaggaaguc

SEQ ID NO: 742284 - RNA, 19 nt, Homo sapiens
  misc_RNA (1)...(19): siRNA sense strand
ccaaaucugccguguaugu

SEQ ID NO: 742285 - RNA, 19 nt, Homo sapiens
  misc_RNA (1)...(19): siRNA sense strand
ggcuaucacuucaauguca

SEQ ID NO: 742286 - RNA, 19 nt, Homo sapiens
  misc_RNA (1)...(19): siRNA sense strand
ggaggaguaugugcugaug

SEQ ID NO: 742287 - RNA, 19 nt, Homo sapiens
  misc_RNA (1)...(19): siRNA sense strand
acucugaaguccuacauug

SEQ ID NO: 742288 - RNA, 19 nt, Homo sapiens
  misc_RNA (1)...(19): siRNA sense strand
gaggagcagcggaugauga

SEQ ID NO: 742289 - RNA, 19 nt, Homo sapiens
  misc_RNA (1)...(19): siRNA sense strand
caagaggcccagaagcaaa

SEQ ID NO: 742290 - RNA, 19 nt, Homo sapiens
  misc_RNA (1)...(19): siRNA sense strand
ucucccauuucaagaauuu

SEQ ID NO: 742291 - RNA, 19 nt, Homo sapiens
  misc_RNA (1)...(19): siRNA sense strand
ggaggugagacccaaagaa

SEQ ID NO: 742292 - RNA, 19 nt, Homo sapiens
  misc_RNA (1)...(19): siRNA sense strand
gacaguggcgggaaagaga

SEQ ID NO: 742293 - RNA, 19 nt, Homo sapiens
  misc_RNA (1)...(19): siRNA sense strand
gagcuccgcagcaucaaug

SEQ ID NO: 742294 - RNA, 19 nt, Homo sapiens
  misc_RNA (1)...(19): siRNA sense strand
ggcagugucuggaacuaca

SEQ ID NO: 742295 - RNA, 19 nt, Homo sapiens
  misc_RNA (1)...(19): siRNA sense strand
cgagcugugucaacugaga

SEQ ID NO: 742296 - RNA, 19 nt, Homo sapiens
  misc_RNA (1)...(19): siRNA sense strand
uggagcccaugcugaaauu

SEQ ID NO: 742297 - RNA, 19 nt, Homo sapiens
  misc_RNA (1)...(19): siRNA sense strand
ugucaacgcagaugaggaa

SEQ ID NO: 742298 - RNA, 19 nt, Homo sapiens
  misc_RNA (1)...(19): siRNA sense strand
gcaggagcaauucgccauu

SEQ ID NO: 742299 - RNA, 19 nt, Homo sapiens
  misc_RNA (1)...(19): siRNA sense strand
ccaagaggcccagaagcaa

SEQ ID NO: 742300 - RNA, 19 nt, Homo sapiens
  misc_RNA (1)...(19): siRNA sense strand
caauucgccauuacucuga

SEQ ID NO: 742301 - RNA, 19 nt, Homo sapiens
  misc_RNA (1)...(19): siRNA sense strand
ucugaaguccuacauugaa

SEQ ID NO: 742302 - RNA, 19 nt, Homo sapiens
  misc_RNA (1)...(19): siRNA sense strand
ucaccgagcuccgcagcau

SEQ ID NO: 742303 - RNA, 19 nt, Homo sapiens
  misc_RNA (1)...(19): siRNA sense strand
ccccaaaucugccguguau

SEQ ID NO: 742304 - RNA, 19 nt, Homo sapiens
  misc_RNA (1)...(19): siRNA sense strand
gagcaauucgccauuacuc

SEQ ID NO: 742305 - RNA, 19 nt, Homo sapiens
  misc_RNA (1)...(19): siRNA sense strand
uugccaaagucaucuccua

SEQ ID NO: 742306 - RNA, 19 nt, Homo sapiens
  misc_RNA (1)...(19): siRNA sense strand
caaagaaagcuggaaccau

SEQ ID NO: 742307 - RNA, 19 nt, Homo sapiens
  misc_RNA (1)...(19): siRNA sense strand
gcuaucacuucaaugucau

SEQ ID NO: 742308 - RNA, 19 nt, Homo sapiens
  misc_RNA (1)...(19): siRNA sense strand
cugaaguccuacauugaau

SEQ ID NO: 742309 - RNA, 19 nt, Homo sapiens
  misc_RNA (1)...(19): siRNA sense strand
cuggagagcggcaugaaga

SEQ ID NO: 742310 - RNA, 19 nt, Homo sapiens
  misc_RNA (1)...(19): siRNA sense strand
ggugagacccaaagaaagc

SEQ ID NO: 742311 - RNA, 19 nt, Homo sapiens
  misc_RNA (1)...(19): siRNA sense strand
ggaguuguucggcaucaca

SEQ ID NO: 742312 - RNA, 19 nt, Homo sapiens
  misc_RNA (1)...(19): siRNA sense strand
ugaaggaugcaagggcuuu

SEQ ID NO: 742313 - RNA, 19 nt, Homo sapiens
  misc_RNA (1)...(19): siRNA sense strand
caaaucugccguguaugug

SEQ ID NO: 742314 - RNA, 19 nt, Homo sapiens
  misc_RNA (1)...(19): siRNA sense strand
uccugaagaucauggcuau

SEQ ID NO: 742315 - RNA, 19 nt, Homo sapiens
  misc_RNA (1)...(19): siRNA sense strand
ugauggacgcucagaugaa

SEQ ID NO: 742316 - RNA, 19 nt, Homo sapiens
  misc_RNA (1)...(19): siRNA sense strand
gaugaaaaccuuugacacu

SEQ ID NO: 742317 - RNA, 19 nt, Homo sapiens
  misc_RNA (1)...(19): siRNA sense strand
aggaguaugugcugaugca

SEQ ID NO: 742318 - RNA, 19 nt, Homo sapiens
  misc_RNA (1)...(19): siRNA sense strand
gauggacgcucagaugaaa

SEQ ID NO: 742319 - RNA, 19 nt, Homo sapiens
  misc_RNA (1)...(19): siRNA sense strand
gacacuaccuucucccauu

SEQ ID NO: 742320 - RNA, 19 nt, Homo sapiens
  misc_RNA (1)...(19): siRNA sense strand
gaggugagacccaaagaaa

SEQ ID NO: 742321 - RNA, 19 nt, Homo sapiens
  misc_RNA (1)...(19): siRNA sense strand
caaccuacauguucaaagg

SEQ ID NO: 742322 - RNA, 19 nt, Homo sapiens
  misc_RNA (1)...(19): siRNA sense strand
caggagcaauucgccauua

SEQ ID NO: 742323 - RNA, 19 nt, Homo sapiens
  misc_RNA (1)...(19): siRNA sense strand
ccauuacucugaaguccua

SEQ ID NO: 742324 - RNA, 19 nt, Homo sapiens
  misc_RNA (1)...(19): siRNA sense strand
ucaaaggcaucaucagcuu

SEQ ID NO: 742325 - RNA, 19 nt, Homo sapiens
  misc_RNA (1)...(19): siRNA sense strand
acacuaccuucucccauuu

SEQ ID NO: 742326 - RNA, 19 nt, Homo sapiens
  misc_RNA (1)...(19): siRNA sense strand
caacgcagaugaggaaguc

SEQ ID NO: 742327 - RNA, 19 nt, Homo sapiens
  misc_RNA (1)...(19): siRNA sense strand
ccaaaucugccguguaugu

SEQ ID NO: 742328 - RNA, 19 nt, Homo sapiens
  misc_RNA (1)...(19): siRNA sense strand
ggcuaucacuucaauguca

SEQ ID NO: 742329 - RNA, 19 nt, Homo sapiens
  misc_RNA (1)...(19): siRNA sense strand
ggaggaguaugugcugaug

SEQ ID NO: 742330 - RNA, 19 nt, Homo sapiens
  misc_RNA (1)...(19): siRNA sense strand
acucugaaguccuacauug

SEQ ID NO: 742331 - RNA, 19 nt, Homo sapiens
  misc_RNA (1)...(19): siRNA sense strand
gaggagcagcggaugauga

SEQ ID NO: 742332 - RNA, 19 nt, Homo sapiens
  misc_RNA (1)...(19): siRNA sense strand
ucucccauuucaagaauuu

SEQ ID NO: 742333 - RNA, 19 nt, Homo sapiens
  misc_RNA (1)...(19): siRNA sense strand
ggaggugagacccaaagaa

SEQ ID NO: 742334 - RNA, 19 nt, Homo sapiens
  misc_RNA (1)...(19): siRNA sense strand
gacaguggcgggaaagaga

SEQ ID NO: 742335 - RNA, 19 nt, Homo sapiens
  misc_RNA (1)...(19): siRNA sense strand
gagcuccgcagcaucaaug

SEQ ID NO: 742336 - RNA, 19 nt, Homo sapiens
  misc_RNA (1)...(19): siRNA sense strand
ggcagugucuggaacuaca

SEQ ID NO: 742337 - RNA, 19 nt, Homo sapiens
  misc_RNA (1)...(19): siRNA sense strand
cgagcugugucaacugaga

SEQ ID NO: 742338 - RNA, 19 nt, Homo sapiens
  misc_RNA (1)...(19): siRNA sense strand
uggagcccaugcugaaauu

SEQ ID NO: 742339 - RNA, 19 nt, Homo sapiens
  misc_RNA (1)...(19): siRNA sense strand
ugucaacgcagaugaggaa

SEQ ID NO: 742340 - RNA, 19 nt, Homo sapiens
  misc_RNA (1)...(19): siRNA sense strand
gcaggagcaauucgccauu

SEQ ID NO: 742341 - RNA, 19 nt, Homo sapiens
  misc_RNA (1)...(19): siRNA sense strand
caauucgccauuacucuga

SEQ ID NO: 742342 - RNA, 19 nt, Homo sapiens
  misc_RNA (1)...(19): siRNA sense strand
ucugaaguccuacauugaa

SEQ ID NO: 742343 - RNA, 19 nt, Homo sapiens
  misc_RNA (1)...(19): siRNA sense strand
ucaccgagcuccgcagcau

SEQ ID NO: 742344 - RNA, 19 nt, Homo sapiens
  misc_RNA (1)...(19): siRNA sense strand
caaagaaagcuggaaccau

SEQ ID NO: 742345 - RNA, 19 nt, Homo sapiens
  misc_RNA (1)...(19): siRNA sense strand
ccccaaaucugccguguau

SEQ ID NO: 742346 - RNA, 19 nt, Homo sapiens
  misc_RNA (1)...(19): siRNA sense strand
gagcaauucgccauuacuc

SEQ ID NO: 742347 - RNA, 19 nt, Homo sapiens
  misc_RNA (1)...(19): siRNA sense strand
uugccaaagucaucuccua

SEQ ID NO: 742348 - RNA, 19 nt, Homo sapiens
  misc_RNA (1)...(19): siRNA sense strand
gcuaucacuucaaugucau

SEQ ID NO: 742349 - RNA, 19 nt, Homo sapiens
  misc_RNA (1)...(19): siRNA sense strand
cugaaguccuacauugaau

SEQ ID NO: 742350 - RNA, 19 nt, Homo sapiens
  misc_RNA (1)...(19): siRNA sense strand
cuggagagcggcaugaaga

SEQ ID NO: 742351 - RNA, 19 nt, Homo sapiens
  misc_RNA (1)...(19): siRNA sense strand
ggugagacccaaagaaagc

SEQ ID NO: 742352 - RNA, 19 nt, Homo sapiens
  misc_RNA (1)...(19): siRNA sense strand
ggaguuguucggcaucaca

SEQ ID NO: 742353 - RNA, 19 nt, Homo sapiens
  misc_RNA (1)...(19): siRNA sense strand
ugaaggaugcaagggcuuu

SEQ ID NO: 742354 - RNA, 19 nt, Homo sapiens
  misc_RNA (1)...(19): siRNA sense strand
ugauggacgcucagaugaa

SEQ ID NO: 742355 - RNA, 19 nt, Homo sapiens
  misc_RNA (1)...(19): siRNA sense strand
uccugaagaucauggcuau

SEQ ID NO: 742356 - RNA, 19 nt, Homo sapiens
  misc_RNA (1)...(19): siRNA sense strand
caaaucugccguguaugug

SEQ ID NO: 742357 - RNA, 19 nt, Homo sapiens
  misc_RNA (1)...(19): siRNA sense strand
gaugaaaaccuuugacacu

SEQ ID NO: 742358 - RNA, 19 nt, Homo sapiens
  misc_RNA (1)...(19): siRNA sense strand
aggaguaugugcugaugca

SEQ ID NO: 742359 - RNA, 19 nt, Homo sapiens
  misc_RNA (1)...(19): siRNA sense strand
gauaagcucuucuuuguau

SEQ ID NO: 742360 - RNA, 19 nt, Homo sapiens
  misc_RNA (1)...(19): siRNA sense strand
gaagaaauguuagacaaug

SEQ ID NO: 742361 - RNA, 19 nt, Homo sapiens
  misc_RNA (1)...(19): siRNA sense strand
gggauaagcucuucuuugu

SEQ ID NO: 742362 - RNA, 19 nt, Homo sapiens
  misc_RNA (1)...(19): siRNA sense strand
gaaagcugcugauguugaa

SEQ ID NO: 742363 - RNA, 19 nt, Homo sapiens
  misc_RNA (1)...(19): siRNA sense strand
gaagaaauagacgcaauua

SEQ ID NO: 742364 - RNA, 19 nt, Homo sapiens
  misc_RNA (1)...(19): siRNA sense strand
agagaaagcugcugauguu

SEQ ID NO: 742365 - RNA, 19 nt, Homo sapiens
  misc_RNA (1)...(19): siRNA sense strand
caaggcagcuauacauuug

SEQ ID NO: 742366 - RNA, 19 nt, Homo sapiens
  misc_RNA (1)...(19): siRNA sense strand
gaaauagacgcaauuauag

SEQ ID NO: 742367 - RNA, 19 nt, Homo sapiens
  misc_RNA (1)...(19): siRNA sense strand
guucagaggcugcaauuaa

SEQ ID NO: 742368 - RNA, 19 nt, Homo sapiens
  misc_RNA (1)...(19): siRNA sense strand
cacgaaagcuggaaaguuc

SEQ ID NO: 742369 - RNA, 19 nt, Homo sapiens
  misc_RNA (1)...(19): siRNA sense strand
gcauuaaacuaucuggaau

SEQ ID NO: 742370 - RNA, 19 nt, Homo sapiens
  misc_RNA (1)...(19): siRNA sense strand
gaaacauaguaucagcuuu

SEQ ID NO: 742371 - RNA, 19 nt, Homo sapiens
  misc_RNA (1)...(19): siRNA sense strand
caaaagcucccaagucuua

SEQ ID NO: 742372 - RNA, 19 nt, Homo sapiens
  misc_RNA (1)...(19): siRNA sense strand
ggugacauauuucuagaga

SEQ ID NO: 742373 - RNA, 19 nt, Homo sapiens
  misc_RNA (1)...(19): siRNA sense strand
ccaccucucuuuguaauug

SEQ ID NO: 742374 - RNA, 19 nt, Homo sapiens
  misc_RNA (1)...(19): siRNA sense strand
gaauuacagugacaguuca

SEQ ID NO: 742375 - RNA, 19 nt, Homo sapiens
  misc_RNA (1)...(19): siRNA sense strand
cacagucuauuucucauaa

SEQ ID NO: 742376 - RNA, 19 nt, Homo sapiens
  misc_RNA (1)...(19): siRNA sense strand
gauuaaaccaccaacaauu

SEQ ID NO: 742377 - RNA, 19 nt, Homo sapiens
  misc_RNA (1)...(19): siRNA sense strand
ggacuacuuuggugagugu

SEQ ID NO: 742378 - RNA, 19 nt, Homo sapiens
  misc_RNA (1)...(19): siRNA sense strand
guaauugaguuccuacauc

SEQ ID NO: 742379 - RNA, 19 nt, Homo sapiens
  misc_RNA (1)...(19): siRNA sense strand
ggaauuacagugacaguuc

SEQ ID NO: 742380 - RNA, 19 nt, Homo sapiens
  misc_RNA (1)...(19): siRNA sense strand
caacauacaguuuaagauc

SEQ ID NO: 742381 - RNA, 19 nt, Homo sapiens
  misc_RNA (1)...(19): siRNA sense strand
gauaauguggucauaguau

SEQ ID NO: 742382 - RNA, 19 nt, Homo sapiens
  misc_RNA (1)...(19): siRNA sense strand
caaacaaugaagccuauuu

SEQ ID NO: 742383 - RNA, 19 nt, Homo sapiens
  misc_RNA (1)...(19): siRNA sense strand
gccagucugucugugauua

SEQ ID NO: 742384 - RNA, 19 nt, Homo sapiens
  misc_RNA (1)...(19): siRNA sense strand
ucaaauacgucacgaaagc

SEQ ID NO: 742385 - RNA, 19 nt, Homo sapiens
  misc_RNA (1)...(19): siRNA sense strand
gcuaccgaaucuaacauuu

SEQ ID NO: 742386 - RNA, 19 nt, Homo sapiens
  misc_RNA (1)...(19): siRNA sense strand
aaacuguuccggugacaua

SEQ ID NO: 742387 - RNA, 19 nt, Homo sapiens
  misc_RNA (1)...(19): siRNA sense strand
ucaccaagguacuaacaug

SEQ ID NO: 742388 - RNA, 19 nt, Homo sapiens
  misc_RNA (1)...(19): siRNA sense strand
cggcagauuugauauaaca

SEQ ID NO: 742389 - RNA, 19 nt, Homo sapiens
  misc_RNA (1)...(19): siRNA sense strand
ggauaagcucuucuuugua

SEQ ID NO: 742390 - RNA, 19 nt, Homo sapiens
  misc_RNA (1)...(19): siRNA sense strand
uaaggauaauguggucaua

SEQ ID NO: 742391 - RNA, 19 nt, Homo sapiens
  misc_RNA (1)...(19): siRNA sense strand
gaagugccaccucucuuug

SEQ ID NO: 742392 - RNA, 19 nt, Homo sapiens
  misc_RNA (1)...(19): siRNA sense strand
cgaagugccaccucucuuu

SEQ ID NO: 742393 - RNA, 19 nt, Homo sapiens
  misc_RNA (1)...(19): siRNA sense strand
guaaaguacacaaacaaug

SEQ ID NO: 742394 - RNA, 19 nt, Homo sapiens
  misc_RNA (1)...(19): siRNA sense strand
ggaaaacuauugaaggaau

SEQ ID NO: 742395 - RNA, 19 nt, Homo sapiens
  misc_RNA (1)...(19): siRNA sense strand
caacaauucuacgcucugu

SEQ ID NO: 742396 - RNA, 19 nt, Homo sapiens
  misc_RNA (1)...(19): siRNA sense strand
cacaaacaaugaagccuau

SEQ ID NO: 742397 - RNA, 19 nt, Homo sapiens
  misc_RNA (1)...(19): siRNA sense strand
aggcugcaauuaaggauaa

SEQ ID NO: 742398 - RNA, 19 nt, Homo sapiens
  misc_RNA (1)...(19): siRNA sense strand
gggcagcuguccaacauac

SEQ ID NO: 742399 - RNA, 19 nt, Homo sapiens
  misc_RNA (1)...(19): siRNA sense strand
ggauaauguggucauagua

SEQ ID NO: 742400 - RNA, 19 nt, Homo sapiens
  misc_RNA (1)...(19): siRNA sense strand
gcucccaagucuuaaagga

SEQ ID NO: 742401 - RNA, 19 nt, Homo sapiens
  misc_RNA (1)...(19): siRNA sense strand
gaaccugacacccacacaa

SEQ ID NO: 742402 - RNA, 19 nt, Homo sapiens
  misc_RNA (1)...(19): siRNA sense strand
acaaggcagcuauacauuu

SEQ ID NO: 742403 - RNA, 19 nt, Homo sapiens
  misc_RNA (1)...(19): siRNA sense strand
gagccagucugucugugau

SEQ ID NO: 742404 - RNA, 19 nt, Homo sapiens
  misc_RNA (1)...(19): siRNA sense strand
ggacauguauggggagaaa

SEQ ID NO: 742405 - RNA, 19 nt, Homo sapiens
  misc_RNA (1)...(19): siRNA sense strand
uacagucuuugcagaaauu

SEQ ID NO: 742406 - RNA, 19 nt, Homo sapiens
  misc_RNA (1)...(19): siRNA sense strand
ccugaucucucccuuucuu

SEQ ID NO: 742407 - RNA, 19 nt, Homo sapiens
  misc_RNA (1)...(19): siRNA sense strand
gaaaauguaccaccuguca

SEQ ID NO: 742408 - RNA, 19 nt, Homo sapiens
  misc_RNA (1)...(19): siRNA sense strand
acccuaggcuucuggauga

SEQ ID NO: 742409 - RNA, 19 nt, Homo sapiens
  misc_RNA (1)...(19): siRNA sense strand
uugggaaucugaaagaguu

SEQ ID NO: 742410 - RNA, 19 nt, Homo sapiens
  misc_RNA (1)...(19): siRNA sense strand
gaauccgagccucaacaua

SEQ ID NO: 742411 - RNA, 19 nt, Homo sapiens
  misc_RNA (1)...(19): siRNA sense strand
ggaccaaagcagaauaugg

SEQ ID NO: 742412 - RNA, 19 nt, Homo sapiens
  misc_RNA (1)...(19): siRNA sense strand
gaaauuuccgacucauauc

SEQ ID NO: 742413 - RNA, 19 nt, Homo sapiens
  misc_RNA (1)...(19): siRNA sense strand
ccacagucuauuucucaua

SEQ ID NO: 742414 - RNA, 19 nt, Homo sapiens
  misc_RNA (1)...(19): siRNA sense strand
uuaaaggagucaaauacgu

SEQ ID NO: 742415 - RNA, 19 nt, Homo sapiens
  misc_RNA (1)...(19): siRNA sense strand
gagccucaacauacaguuu

SEQ ID NO: 742416 - RNA, 19 nt, Homo sapiens
  misc_RNA (1)...(19): siRNA sense strand
aaaguugugcugaacauga

SEQ ID NO: 742417 - RNA, 19 nt, Homo sapiens
  misc_RNA (1)...(19): siRNA sense strand
ugaaggaauuacagugaca

SEQ ID NO: 742418 - RNA, 19 nt, Homo sapiens
  misc_RNA (1)...(19): siRNA sense strand
ggggaaaacuauugaagga

SEQ ID NO: 742419 - RNA, 19 nt, Homo sapiens
  misc_RNA (1)...(19): siRNA sense strand
ucuauuacaggcaguagua

SEQ ID NO: 742420 - RNA, 19 nt, Homo sapiens
  misc_RNA (1)...(19): siRNA sense strand
ugaagaaauagacgcaauu

SEQ ID NO: 742421 - RNA, 19 nt, Homo sapiens
  misc_RNA (1)...(19): siRNA sense strand
gguaaaguacacaaacaau

SEQ ID NO: 742422 - RNA, 19 nt, Homo sapiens
  misc_RNA (1)...(19): siRNA sense strand
agaaagcugcugauguuga

SEQ ID NO: 742423 - RNA, 19 nt, Homo sapiens
  misc_RNA (1)...(19): siRNA sense strand
cauaguaucagcuuuaagg

SEQ ID NO: 742424 - RNA, 19 nt, Homo sapiens
  misc_RNA (1)...(19): siRNA sense strand
ucacgaaagcuggaaaguu

SEQ ID NO: 742425 - RNA, 19 nt, Homo sapiens
  misc_RNA (1)...(19): siRNA sense strand
acacaaggcagcuauacau

SEQ ID NO: 742426 - RNA, 19 nt, Homo sapiens
  misc_RNA (1)...(19): siRNA sense strand
acaauucuacgcucuguug

SEQ ID NO: 742427 - RNA, 19 nt, Homo sapiens
  misc_RNA (1)...(19): siRNA sense strand
gccucaacauacaguuuaa

SEQ ID NO: 742428 - RNA, 19 nt, Homo sapiens
  misc_RNA (1)...(19): siRNA sense strand
ugcggcagauuugauauaa

SEQ ID NO: 742429 - RNA, 19 nt, Homo sapiens
  misc_RNA (1)...(19): siRNA sense strand
cuacagucuuugcagaaau

SEQ ID NO: 742430 - RNA, 19 nt, Homo sapiens
  misc_RNA (1)...(19): siRNA sense strand
aucaggaucuacagucuuu

SEQ ID NO: 742431 - RNA, 19 nt, Homo sapiens
  misc_RNA (1)...(19): siRNA sense strand
gauccacagucuauuucuc

SEQ ID NO: 742432 - RNA, 19 nt, Homo sapiens
  misc_RNA (1)...(19): siRNA sense strand
caagagaaagcugcugaug

SEQ ID NO: 742433 - RNA, 19 nt, Homo sapiens
  misc_RNA (1)...(19): siRNA sense strand
uguaccaccugucauuuca

SEQ ID NO: 742434 - RNA, 19 nt, Homo sapiens
  misc_RNA (1)...(19): siRNA sense strand
ccucaccacuaccucauca

SEQ ID NO: 742435 - RNA, 19 nt, Homo sapiens
  misc_RNA (1)...(19): siRNA sense strand
uaaaccaccaacaauucua

SEQ ID NO: 742436 - RNA, 19 nt, Homo sapiens
  misc_RNA (1)...(19): siRNA sense strand
gggagaaauauaagccauu

SEQ ID NO: 742437 - RNA, 19 nt, Homo sapiens
  misc_RNA (1)...(19): siRNA sense strand
cuuaaaggacugguaaauu

SEQ ID NO: 742438 - RNA, 19 nt, Homo sapiens
  misc_RNA (1)...(19): siRNA sense strand
accacuaccucaucaguau

SEQ ID NO: 742439 - RNA, 19 nt, Homo sapiens
  misc_RNA (1)...(19): siRNA sense strand
cacaaaagcucccaagucu

SEQ ID NO: 742440 - RNA, 19 nt, Homo sapiens
  misc_RNA (1)...(19): siRNA sense strand
ugacaguucacaugccaaa

SEQ ID NO: 742441 - RNA, 19 nt, Homo sapiens
  misc_RNA (1)...(19): siRNA sense strand
ugaaacauaguaucagcuu

SEQ ID NO: 742442 - RNA, 19 nt, Homo sapiens
  misc_RNA (1)...(19): siRNA sense strand
gaucucucccuuucuuuca

SEQ ID NO: 742443 - RNA, 19 nt, Homo sapiens
  misc_RNA (1)...(19): siRNA sense strand
ugccugaucucucccuuuc

SEQ ID NO: 742444 - RNA, 19 nt, Homo sapiens
  misc_RNA (1)...(19): siRNA sense strand
ggguaaaguacacaaacaa

SEQ ID NO: 742445 - RNA, 19 nt, Homo sapiens
  misc_RNA (1)...(19): siRNA sense strand
agucaaauacgucacgaaa

SEQ ID NO: 742446 - RNA, 19 nt, Homo sapiens
  misc_RNA (1)...(19): siRNA sense strand
ucuacagucuuugcagaaa

SEQ ID NO: 742447 - RNA, 19 nt, Homo sapiens
  misc_RNA (1)...(19): siRNA sense strand
aggauaauguggucauagu

SEQ ID NO: 742448 - RNA, 19 nt, Homo sapiens
  misc_RNA (1)...(19): siRNA sense strand
gagaauccgagccucaaca

SEQ ID NO: 742449 - RNA, 19 nt, Homo sapiens
  misc_RNA (1)...(19): siRNA sense strand
cuguuccggugacauauuu

SEQ ID NO: 742450 - RNA, 19 nt, Homo sapiens
  misc_RNA (1)...(19): siRNA sense strand
guaucagcuuuaaggagaa

SEQ ID NO: 742451 - RNA, 19 nt, Homo sapiens
  misc_RNA (1)...(19): siRNA sense strand
guucaagcguugggaaucu

SEQ ID NO: 742452 - RNA, 19 nt, Homo sapiens
  misc_RNA (1)...(19): siRNA sense strand
ucuggaugaugucagcuuu

SEQ ID NO: 742453 - RNA, 19 nt, Homo sapiens
  misc_RNA (1)...(19): siRNA sense strand
uaucuggaaugccugaucu

SEQ ID NO: 742454 - RNA, 19 nt, Homo sapiens
  misc_RNA (1)...(19): siRNA sense strand
ccgggcagcuguccaacau

SEQ ID NO: 742455 - RNA, 19 nt, Homo sapiens
  misc_RNA (1)...(19): siRNA sense strand
guauaugaacucuuagaag

SEQ ID NO: 742456 - RNA, 19 nt, Homo sapiens
  misc_RNA (1)...(19): siRNA sense strand
gaaauguuagacaauggau

SEQ ID NO: 742457 - RNA, 19 nt, Homo sapiens
  misc_RNA (1)...(19): siRNA sense strand
aaguugugcugaacaugaa

SEQ ID NO: 742458 - RNA, 19 nt, Homo sapiens
  misc_RNA (1)...(19): siRNA sense strand
cgggauaagcucuucuuug

SEQ ID NO: 742459 - RNA, 19 nt, Homo sapiens
  misc_RNA (1)...(19): siRNA sense strand
caacauagcuucaauuaca

SEQ ID NO: 742460 - RNA, 19 nt, Homo sapiens
  misc_RNA (1)...(19): siRNA sense strand
cagcaggacucacgcauua

SEQ ID NO: 742461 - RNA, 19 nt, Homo sapiens
  misc_RNA (1)...(19): siRNA sense strand
caaagcaaaugcauucaaa

SEQ ID NO: 742462 - RNA, 19 nt, Homo sapiens
  misc_RNA (1)...(19): siRNA sense strand
agacauaccuaacuuaaga

SEQ ID NO: 742463 - RNA, 19 nt, Homo sapiens
  misc_RNA (1)...(19): siRNA sense strand
gauaauacccaaugagaaa

SEQ ID NO: 742464 - RNA, 19 nt, Homo sapiens
  misc_RNA (1)...(19): siRNA sense strand
gugaagaaguugacauuga

SEQ ID NO: 742465 - RNA, 19 nt, Homo sapiens
  misc_RNA (1)...(19): siRNA sense strand
auaaauaccuggauggaaa

SEQ ID NO: 742466 - RNA, 19 nt, Homo sapiens
  misc_RNA (1)...(19): siRNA sense strand
ggaccgcauugaagagaua

SEQ ID NO: 742467 - RNA, 19 nt, Homo sapiens
  misc_RNA (1)...(19): siRNA sense strand
gcagacauaccuaacuuaa

SEQ ID NO: 742468 - RNA, 19 nt, Homo sapiens
  misc_RNA (1)...(19): siRNA sense strand
ggaaucagccuaucuuuac

SEQ ID NO: 742469 - RNA, 19 nt, Homo sapiens
  misc_RNA (1)...(19): siRNA sense strand
ccagaaagucuacguguaa

SEQ ID NO: 742470 - RNA, 19 nt, Homo sapiens
  misc_RNA (1)...(19): siRNA sense strand
ccacgugucugcugugugu

SEQ ID NO: 742471 - RNA, 19 nt, Homo sapiens
  misc_RNA (1)...(19): siRNA sense strand
gaaagucuacguguaauuc

SEQ ID NO: 742472 - RNA, 19 nt, Homo sapiens
  misc_RNA (1)...(19): siRNA sense strand
gaagauauagaagauggua

SEQ ID NO: 742473 - RNA, 19 nt, Homo sapiens
  misc_RNA (1)...(19): siRNA sense strand
ugaagaaguugacauugau

SEQ ID NO: 742474 - RNA, 19 nt, Homo sapiens
  misc_RNA (1)...(19): siRNA sense strand
uagcuucaauuacagauga

SEQ ID NO: 742475 - RNA, 19 nt, Homo sapiens
  misc_RNA (1)...(19): siRNA sense strand
ccucuuaauuuaccagaaa

SEQ ID NO: 742476 - RNA, 19 nt, Homo sapiens
  misc_RNA (1)...(19): siRNA sense strand
ggaaagcauccaaacaguu

SEQ ID NO: 742477 - RNA, 19 nt, Homo sapiens
  misc_RNA (1)...(19): siRNA sense strand
gggaaagcauccaaacagu

SEQ ID NO: 742478 - RNA, 19 nt, Homo sapiens
  misc_RNA (1)...(19): siRNA sense strand
caacaacauagcuucaauu

SEQ ID NO: 742479 - RNA, 19 nt, Homo sapiens
  misc_RNA (1)...(19): siRNA sense strand
ggacucacgcauuaucuau

SEQ ID NO: 742480 - RNA, 19 nt, Homo sapiens
  misc_RNA (1)...(19): siRNA sense strand
cccaagcucacuuuauuua

SEQ ID NO: 742481 - RNA, 19 nt, Homo sapiens
  misc_RNA (1)...(19): siRNA sense strand
ggaccauaaugcccuggaa

SEQ ID NO: 742482 - RNA, 19 nt, Homo sapiens
  misc_RNA (1)...(19): siRNA sense strand
accauuaccucccaagaaa

SEQ ID NO: 742483 - RNA, 19 nt, Homo sapiens
  misc_RNA (1)...(19): siRNA sense strand
gauuaccgauagggucaua

SEQ ID NO: 742484 - RNA, 19 nt, Homo sapiens
  misc_RNA (1)...(19): siRNA sense strand
uggaauccgugccucuuaa

SEQ ID NO: 742485 - RNA, 19 nt, Homo sapiens
  misc_RNA (1)...(19): siRNA sense strand
uguauacugugaagaaguu

SEQ ID NO: 742486 - RNA, 19 nt, Homo sapiens
  misc_RNA (1)...(19): siRNA sense strand
cucccaagcucacuuuauu

SEQ ID NO: 742487 - RNA, 19 nt, Homo sapiens
  misc_RNA (1)...(19): siRNA sense strand
uagccaagauuaugaggau

SEQ ID NO: 742488 - RNA, 19 nt, Homo sapiens
  misc_RNA (1)...(19): siRNA sense strand
ucaacaacauagcuucaau

SEQ ID NO: 742489 - RNA, 19 nt, Homo sapiens
  misc_RNA (1)...(19): siRNA sense strand
caucuucaguucaacaaca

SEQ ID NO: 742490 - RNA, 19 nt, Homo sapiens
  misc_RNA (1)...(19): siRNA sense strand
auccgugccucuuaauuua

SEQ ID NO: 742491 - RNA, 19 nt, Homo sapiens
  misc_RNA (1)...(19): siRNA sense strand
aaagcugacugccaaagau

SEQ ID NO: 742492 - RNA, 19 nt, Homo sapiens
  misc_RNA (1)...(19): siRNA sense strand
acucacgcauuaucuauga

SEQ ID NO: 742493 - RNA, 19 nt, Homo sapiens
  misc_RNA (1)...(19): siRNA sense strand
gauaaauaccuggauggaa

SEQ ID NO: 742494 - RNA, 19 nt, Homo sapiens
  misc_RNA (1)...(19): siRNA sense strand
aaucaaagcaaaugcauuc

SEQ ID NO: 742495 - RNA, 19 nt, Homo sapiens
  misc_RNA (1)...(19): siRNA sense strand
ugacauugaugcuguacca

SEQ ID NO: 742496 - RNA, 19 nt, Homo sapiens
  misc_RNA (1)...(19): siRNA sense strand
gcacgauucaacaaaauua

SEQ ID NO: 742497 - RNA, 19 nt, Homo sapiens
  misc_RNA (1)...(19): siRNA sense strand
aauuacagaugacacauuc

SEQ ID NO: 742498 - RNA, 19 nt, Homo sapiens
  misc_RNA (1)...(19): siRNA sense strand
gaaucaaagcaaaugcauu

SEQ ID NO: 742499 - RNA, 19 nt, Homo sapiens
  misc_RNA (1)...(19): siRNA sense strand
ccauauuuagccaagauua

SEQ ID NO: 742500 - RNA, 19 nt, Homo sapiens
  misc_RNA (1)...(19): siRNA sense strand
ugaauaaccucaccuuccu

SEQ ID NO: 742501 - RNA, 19 nt, Homo sapiens
  misc_RNA (1)...(19): siRNA sense strand
gucuacacuucuccuguua

SEQ ID NO: 742502 - RNA, 19 nt, Homo sapiens
  misc_RNA (1)...(19): siRNA sense strand
gugauaauacccaaugaga

SEQ ID NO: 742503 - RNA, 19 nt, Homo sapiens
  misc_RNA (1)...(19): siRNA sense strand
cacgcauuaucuaugauua

SEQ ID NO: 742504 - RNA, 19 nt, Homo sapiens
  misc_RNA (1)...(19): siRNA sense strand
gaagaaguugacauugaug

SEQ ID NO: 742505 - RNA, 19 nt, Homo sapiens
  misc_RNA (1)...(19): siRNA sense strand
gcuaaugacaccaguuaca

SEQ ID NO: 742506 - RNA, 19 nt, Homo sapiens
  misc_RNA (1)...(19): siRNA sense strand
aggaaucagccuaucuuua

SEQ ID NO: 742507 - RNA, 19 nt, Homo sapiens
  misc_RNA (1)...(19): siRNA sense strand
aauccgugccucuuaauuu

SEQ ID NO: 742508 - RNA, 19 nt, Homo sapiens
  misc_RNA (1)...(19): siRNA sense strand
gaauccgugccucuuaauu

SEQ ID NO: 742509 - RNA, 19 nt, Homo sapiens
  misc_RNA (1)...(19): siRNA sense strand
ccaagcucacuuuauuuaa

SEQ ID NO: 742510 - RNA, 19 nt, Homo sapiens
  misc_RNA (1)...(19): siRNA sense strand
ucugcuguguguuuguuua

SEQ ID NO: 742511 - RNA, 19 nt, Homo sapiens
  misc_RNA (1)...(19): siRNA sense strand
gauagggucauacuuuuaa

SEQ ID NO: 742512 - RNA, 19 nt, Homo sapiens
  misc_RNA (1)...(19): siRNA sense strand
uguaauucaucuucaguuc

SEQ ID NO: 742513 - RNA, 19 nt, Homo sapiens
  misc_RNA (1)...(19): siRNA sense strand
cagaaagucuacguguaau

SEQ ID NO: 742514 - RNA, 19 nt, Homo sapiens
  misc_RNA (1)...(19): siRNA sense strand
uaagaagacucgauuuuac

SEQ ID NO: 742515 - RNA, 19 nt, Homo sapiens
  misc_RNA (1)...(19): siRNA sense strand
ccaaaggaaucagccuauc

SEQ ID NO: 742516 - RNA, 19 nt, Homo sapiens
  misc_RNA (1)...(19): siRNA sense strand
gcuguguguuuguuuaagu

SEQ ID NO: 742517 - RNA, 19 nt, Homo sapiens
  misc_RNA (1)...(19): siRNA sense strand
gcaggacucacgcauuauc

SEQ ID NO: 742518 - RNA, 19 nt, Homo sapiens
  misc_RNA (1)...(19): siRNA sense strand
ggauaaauaccuggaugga

SEQ ID NO: 742519 - RNA, 19 nt, Homo sapiens
  misc_RNA (1)...(19): siRNA sense strand
uuagaagaacuuucacuug

SEQ ID NO: 742520 - RNA, 19 nt, Homo sapiens
  misc_RNA (1)...(19): siRNA sense strand
guuagaagaacuuucacuu

SEQ ID NO: 742521 - RNA, 19 nt, Homo sapiens
  misc_RNA (1)...(19): siRNA sense strand
auaccuaacuuaagaagac

SEQ ID NO: 742522 - RNA, 19 nt, Homo sapiens
  misc_RNA (1)...(19): siRNA sense strand
aaaggaaucagccuaucuu

SEQ ID NO: 742523 - RNA, 19 nt, Homo sapiens
  misc_RNA (1)...(19): siRNA sense strand
aggcuaaugacaccaguua

SEQ ID NO: 742524 - RNA, 19 nt, Homo sapiens
  misc_RNA (1)...(19): siRNA sense strand
caaaggaaucagccuaucu

SEQ ID NO: 742525 - RNA, 19 nt, Homo sapiens
  misc_RNA (1)...(19): siRNA sense strand
caauuacagaugacacauu

SEQ ID NO: 742526 - RNA, 19 nt, Homo sapiens
  misc_RNA (1)...(19): siRNA sense strand
cgcauuaucuaugauuaug

SEQ ID NO: 742527 - RNA, 19 nt, Homo sapiens
  misc_RNA (1)...(19): siRNA sense strand
guaauucaucuucaguuca

SEQ ID NO: 742528 - RNA, 19 nt, Homo sapiens
  misc_RNA (1)...(19): siRNA sense strand
ggaaucaaagcaaaugcau

SEQ ID NO: 742529 - RNA, 19 nt, Homo sapiens
  misc_RNA (1)...(19): siRNA sense strand
uugcagacauaccuaacuu

SEQ ID NO: 742530 - RNA, 19 nt, Homo sapiens
  misc_RNA (1)...(19): siRNA sense strand
agucuacacuucuccuguu

SEQ ID NO: 742531 - RNA, 19 nt, Homo sapiens
  misc_RNA (1)...(19): siRNA sense strand
accagaaagucuacgugua

SEQ ID NO: 742532 - RNA, 19 nt, Homo sapiens
  misc_RNA (1)...(19): siRNA sense strand
ucaccuuccucuacuugga

SEQ ID NO: 742533 - RNA, 19 nt, Homo sapiens
  misc_RNA (1)...(19): siRNA sense strand
caccauuaccucccaagaa

SEQ ID NO: 742534 - RNA, 19 nt, Homo sapiens
  misc_RNA (1)...(19): siRNA sense strand
ucaaagcaaaugcauucaa

SEQ ID NO: 742535 - RNA, 19 nt, Homo sapiens
  misc_RNA (1)...(19): siRNA sense strand
uuaaguggcucuguauacu

SEQ ID NO: 742536 - RNA, 19 nt, Homo sapiens
  misc_RNA (1)...(19): siRNA sense strand
gaaucagccuaucuuuacg

SEQ ID NO: 742537 - RNA, 19 nt, Homo sapiens
  misc_RNA (1)...(19): siRNA sense strand
ugauaauacccaaugagaa

SEQ ID NO: 742538 - RNA, 19 nt, Homo sapiens
  misc_RNA (1)...(19): siRNA sense strand
ggaauccgugccucuuaau

SEQ ID NO: 742539 - RNA, 19 nt, Homo sapiens
  misc_RNA (1)...(19): siRNA sense strand
uaaccucaccuuccucuac

SEQ ID NO: 742540 - RNA, 19 nt, Homo sapiens
  misc_RNA (1)...(19): siRNA sense strand
cauuaccucccaagaaaga

SEQ ID NO: 742541 - RNA, 19 nt, Homo sapiens
  misc_RNA (1)...(19): siRNA sense strand
gagaaaagucuucaauuac

SEQ ID NO: 742542 - RNA, 19 nt, Homo sapiens
  misc_RNA (1)...(19): siRNA sense strand
gcuugugccucugauaaag

SEQ ID NO: 742543 - RNA, 19 nt, Homo sapiens
  misc_RNA (1)...(19): siRNA sense strand
uaacuuaagaagacucgau

SEQ ID NO: 742544 - RNA, 19 nt, Homo sapiens
  misc_RNA (1)...(19): siRNA sense strand
ucacgcauuaucuaugauu

SEQ ID NO: 742545 - RNA, 19 nt, Homo sapiens
  misc_RNA (1)...(19): siRNA sense strand
aaguggcucuguauacugu

SEQ ID NO: 742546 - RNA, 19 nt, Homo sapiens
  misc_RNA (1)...(19): siRNA sense strand
ccgauagggucauacuuuu

SEQ ID NO: 742547 - RNA, 19 nt, Homo sapiens
  misc_RNA (1)...(19): siRNA sense strand
ugaagaauccauauuuagc

SEQ ID NO: 742548 - RNA, 19 nt, Homo sapiens
  misc_RNA (1)...(19): siRNA sense strand
guaggggaaucaaagcaaa

SEQ ID NO: 742549 - RNA, 19 nt, Homo sapiens
  misc_RNA (1)...(19): siRNA sense strand
cuacacuucuccuguuacu

SEQ ID NO: 742550 - RNA, 19 nt, Homo sapiens
  misc_RNA (1)...(19): siRNA sense strand
acucugcagucuacacuuc

SEQ ID NO: 742551 - RNA, 19 nt, Homo sapiens
  misc_RNA (1)...(19): siRNA sense strand
agaagaacuuucacuugcu

SEQ ID NO: 742552 - RNA, 19 nt, Homo sapiens
  misc_RNA (1)...(19): siRNA sense strand
ugaggcaauaacaccauua

SEQ ID NO: 742553 - RNA, 19 nt, Homo sapiens
  misc_RNA (1)...(19): siRNA sense strand
uuacgcacgauucaacaaa

SEQ ID NO: 742554 - RNA, 19 nt, Homo sapiens
  misc_RNA (1)...(19): siRNA sense strand
accgauagggucauacuuu

SEQ ID NO: 742555 - RNA, 19 nt, Homo sapiens
  misc_RNA (1)...(19): siRNA sense strand
cuacguguaauucaucuuc

SEQ ID NO: 742556 - RNA, 19 nt, Homo sapiens
  misc_RNA (1)...(19): siRNA sense strand
agaaagucuacguguaauu

SEQ ID NO: 742557 - RNA, 19 nt, Homo sapiens
  misc_RNA (1)...(19): siRNA sense strand
gaccauaaugcccuggaau

SEQ ID NO: 742558 - RNA, 19 nt, Homo sapiens
  misc_RNA (1)...(19): siRNA sense strand
ccagcaggacucacgcauu

SEQ ID NO: 742559 - RNA, 19 nt, Homo sapiens
  misc_RNA (1)...(19): siRNA sense strand
caacauagcuucaauuaca

SEQ ID NO: 742560 - RNA, 19 nt, Homo sapiens
  misc_RNA (1)...(19): siRNA sense strand
cagcaggacucacgcauua

SEQ ID NO: 742561 - RNA, 19 nt, Homo sapiens
  misc_RNA (1)...(19): siRNA sense strand
caaagcaaaugcauucaaa

SEQ ID NO: 742562 - RNA, 19 nt, Homo sapiens
  misc_RNA (1)...(19): siRNA sense strand
agacauaccuaacuuaaga

SEQ ID NO: 742563 - RNA, 19 nt, Homo sapiens
  misc_RNA (1)...(19): siRNA sense strand
gauaauacccaaugagaaa

SEQ ID NO: 742564 - RNA, 19 nt, Homo sapiens
  misc_RNA (1)...(19): siRNA sense strand
gugaagaaguugacauuga

SEQ ID NO: 742565 - RNA, 19 nt, Homo sapiens
  misc_RNA (1)...(19): siRNA sense strand
auaaauaccuggauggaaa

SEQ ID NO: 742566 - RNA, 19 nt, Homo sapiens
  misc_RNA (1)...(19): siRNA sense strand
ggaccgcauugaagagaua

SEQ ID NO: 742567 - RNA, 19 nt, Homo sapiens
  misc_RNA (1)...(19): siRNA sense strand
gcagacauaccuaacuuaa

SEQ ID NO: 742568 - RNA, 19 nt, Homo sapiens
  misc_RNA (1)...(19): siRNA sense strand
ggaaucagccuaucuuuac

SEQ ID NO: 742569 - RNA, 19 nt, Homo sapiens
  misc_RNA (1)...(19): siRNA sense strand
ccagaaagucuacguguaa

SEQ ID NO: 742570 - RNA, 19 nt, Homo sapiens
  misc_RNA (1)...(19): siRNA sense strand
ccacgugucugcugugugu

SEQ ID NO: 742571 - RNA, 19 nt, Homo sapiens
  misc_RNA (1)...(19): siRNA sense strand
gaaagucuacguguaauuc

SEQ ID NO: 742572 - RNA, 19 nt, Homo sapiens
  misc_RNA (1)...(19): siRNA sense strand
gaagauauagaagauggua

SEQ ID NO: 742573 - RNA, 19 nt, Homo sapiens
  misc_RNA (1)...(19): siRNA sense strand
ugaagaaguugacauugau

SEQ ID NO: 742574 - RNA, 19 nt, Homo sapiens
  misc_RNA (1)...(19): siRNA sense strand
uagcuucaauuacagauga

SEQ ID NO: 742575 - RNA, 19 nt, Homo sapiens
  misc_RNA (1)...(19): siRNA sense strand
ccucuuaauuuaccagaaa

SEQ ID NO: 742576 - RNA, 19 nt, Homo sapiens
  misc_RNA (1)...(19): siRNA sense strand
ggaaagcauccaaacaguu

SEQ ID NO: 742577 - RNA, 19 nt, Homo sapiens
  misc_RNA (1)...(19): siRNA sense strand
gggaaagcauccaaacagu

SEQ ID NO: 742578 - RNA, 19 nt, Homo sapiens
  misc_RNA (1)...(19): siRNA sense strand
caacaacauagcuucaauu

SEQ ID NO: 742579 - RNA, 19 nt, Homo sapiens
  misc_RNA (1)...(19): siRNA sense strand
ggacucacgcauuaucuau

SEQ ID NO: 742580 - RNA, 19 nt, Homo sapiens
  misc_RNA (1)...(19): siRNA sense strand
cccaagcucacuuuauuua

SEQ ID NO: 742581 - RNA, 19 nt, Homo sapiens
  misc_RNA (1)...(19): siRNA sense strand
ggaccauaaugcccuggaa

SEQ ID NO: 742582 - RNA, 19 nt, Homo sapiens
  misc_RNA (1)...(19): siRNA sense strand
accauuaccucccaagaaa

SEQ ID NO: 742583 - RNA, 19 nt, Homo sapiens
  misc_RNA (1)...(19): siRNA sense strand
gauuaccgauagggucaua

SEQ ID NO: 742584 - RNA, 19 nt, Homo sapiens
  misc_RNA (1)...(19): siRNA sense strand
uggaauccgugccucuuaa

SEQ ID NO: 742585 - RNA, 19 nt, Homo sapiens
  misc_RNA (1)...(19): siRNA sense strand
uguauacugugaagaaguu

SEQ ID NO: 742586 - RNA, 19 nt, Homo sapiens
  misc_RNA (1)...(19): siRNA sense strand
cucccaagcucacuuuauu

SEQ ID NO: 742587 - RNA, 19 nt, Homo sapiens
  misc_RNA (1)...(19): siRNA sense strand
uagccaagauuaugaggau

SEQ ID NO: 742588 - RNA, 19 nt, Homo sapiens
  misc_RNA (1)...(19): siRNA sense strand
ucaacaacauagcuucaau

SEQ ID NO: 742589 - RNA, 19 nt, Homo sapiens
  misc_RNA (1)...(19): siRNA sense strand
caucuucaguucaacaaca

SEQ ID NO: 742590 - RNA, 19 nt, Homo sapiens
  misc_RNA (1)...(19): siRNA sense strand
auccgugccucuuaauuua

SEQ ID NO: 742591 - RNA, 19 nt, Homo sapiens
  misc_RNA (1)...(19): siRNA sense strand
aaagcugacugccaaagau

SEQ ID NO: 742592 - RNA, 19 nt, Homo sapiens
  misc_RNA (1)...(19): siRNA sense strand
acucacgcauuaucuauga

SEQ ID NO: 742593 - RNA, 19 nt, Homo sapiens
  misc_RNA (1)...(19): siRNA sense strand
gauaaauaccuggauggaa

SEQ ID NO: 742594 - RNA, 19 nt, Homo sapiens
  misc_RNA (1)...(19): siRNA sense strand
aaucaaagcaaaugcauuc

SEQ ID NO: 742595 - RNA, 19 nt, Homo sapiens
  misc_RNA (1)...(19): siRNA sense strand
ugacauugaugcuguacca

SEQ ID NO: 742596 - RNA, 19 nt, Homo sapiens
  misc_RNA (1)...(19): siRNA sense strand
gcacgauucaacaaaauua

SEQ ID NO: 742597 - RNA, 19 nt, Homo sapiens
  misc_RNA (1)...(19): siRNA sense strand
aauuacagaugacacauuc

SEQ ID NO: 742598 - RNA, 19 nt, Homo sapiens
  misc_RNA (1)...(19): siRNA sense strand
gaaucaaagcaaaugcauu

SEQ ID NO: 742599 - RNA, 19 nt, Homo sapiens
  misc_RNA (1)...(19): siRNA sense strand
ccauauuuagccaagauua

SEQ ID NO: 742600 - RNA, 19 nt, Homo sapiens
  misc_RNA (1)...(19): siRNA sense strand
ugaauaaccucaccuuccu

SEQ ID NO: 742601 - RNA, 19 nt, Homo sapiens
  misc_RNA (1)...(19): siRNA sense strand
gucuacacuucuccuguua

SEQ ID NO: 742602 - RNA, 19 nt, Homo sapiens
  misc_RNA (1)...(19): siRNA sense strand
gugauaauacccaaugaga

SEQ ID NO: 742603 - RNA, 19 nt, Homo sapiens
  misc_RNA (1)...(19): siRNA sense strand
cacgcauuaucuaugauua

SEQ ID NO: 742604 - RNA, 19 nt, Homo sapiens
  misc_RNA (1)...(19): siRNA sense strand
gaagaaguugacauugaug

SEQ ID NO: 742605 - RNA, 19 nt, Homo sapiens
  misc_RNA (1)...(19): siRNA sense strand
gcuaaugacaccaguuaca

SEQ ID NO: 742606 - RNA, 19 nt, Homo sapiens
  misc_RNA (1)...(19): siRNA sense strand
aggaaucagccuaucuuua

SEQ ID NO: 742607 - RNA, 19 nt, Homo sapiens
  misc_RNA (1)...(19): siRNA sense strand
aauccgugccucuuaauuu

SEQ ID NO: 742608 - RNA, 19 nt, Homo sapiens
  misc_RNA (1)...(19): siRNA sense strand
gaauccgugccucuuaauu

SEQ ID NO: 742609 - RNA, 19 nt, Homo sapiens
  misc_RNA (1)...(19): siRNA sense strand
ccaagcucacuuuauuuaa

SEQ ID NO: 742610 - RNA, 19 nt, Homo sapiens
  misc_RNA (1)...(19): siRNA sense strand
ucugcuguguguuuguuua

SEQ ID NO: 742611 - RNA, 19 nt, Homo sapiens
  misc_RNA (1)...(19): siRNA sense strand
gauagggucauacuuuuaa

SEQ ID NO: 742612 - RNA, 19 nt, Homo sapiens
  misc_RNA (1)...(19): siRNA sense strand
uguaauucaucuucaguuc

SEQ ID NO: 742613 - RNA, 19 nt, Homo sapiens
  misc_RNA (1)...(19): siRNA sense strand
cagaaagucuacguguaau

SEQ ID NO: 742614 - RNA, 19 nt, Homo sapiens
  misc_RNA (1)...(19): siRNA sense strand
uaagaagacucgauuuuac

SEQ ID NO: 742615 - RNA, 19 nt, Homo sapiens
  misc_RNA (1)...(19): siRNA sense strand
ccaaaggaaucagccuauc

SEQ ID NO: 742616 - RNA, 19 nt, Homo sapiens
  misc_RNA (1)...(19): siRNA sense strand
gcuguguguuuguuuaagu

SEQ ID NO: 742617 - RNA, 19 nt, Homo sapiens
  misc_RNA (1)...(19): siRNA sense strand
gcaggacucacgcauuauc

SEQ ID NO: 742618 - RNA, 19 nt, Homo sapiens
  misc_RNA (1)...(19): siRNA sense strand
ggauaaauaccuggaugga

SEQ ID NO: 742619 - RNA, 19 nt, Homo sapiens
  misc_RNA (1)...(19): siRNA sense strand
uuagaagaacuuucacuug

SEQ ID NO: 742620 - RNA, 19 nt, Homo sapiens
  misc_RNA (1)...(19): siRNA sense strand
guuagaagaacuuucacuu

SEQ ID NO: 742621 - RNA, 19 nt, Homo sapiens
  misc_RNA (1)...(19): siRNA sense strand
auaccuaacuuaagaagac

SEQ ID NO: 742622 - RNA, 19 nt, Homo sapiens
  misc_RNA (1)...(19): siRNA sense strand
aaaggaaucagccuaucuu

SEQ ID NO: 742623 - RNA, 19 nt, Homo sapiens
  misc_RNA (1)...(19): siRNA sense strand
aggcuaaugacaccaguua

SEQ ID NO: 742624 - RNA, 19 nt, Homo sapiens
  misc_RNA (1)...(19): siRNA sense strand
caaaggaaucagccuaucu

SEQ ID NO: 742625 - RNA, 19 nt, Homo sapiens
  misc_RNA (1)...(19): siRNA sense strand
caauuacagaugacacauu

SEQ ID NO: 742626 - RNA, 19 nt, Homo sapiens
  misc_RNA (1)...(19): siRNA sense strand
cgcauuaucuaugauuaug

SEQ ID NO: 742627 - RNA, 19 nt, Homo sapiens
  misc_RNA (1)...(19): siRNA sense strand
guaauucaucuucaguuca

SEQ ID NO: 742628 - RNA, 19 nt, Homo sapiens
  misc_RNA (1)...(19): siRNA sense strand
ggaaucaaagcaaaugcau

SEQ ID NO: 742629 - RNA, 19 nt, Homo sapiens
  misc_RNA (1)...(19): siRNA sense strand
uugcagacauaccuaacuu

SEQ ID NO: 742630 - RNA, 19 nt, Homo sapiens
  misc_RNA (1)...(19): siRNA sense strand
agucuacacuucuccuguu

SEQ ID NO: 742631 - RNA, 19 nt, Homo sapiens
  misc_RNA (1)...(19): siRNA sense strand
accagaaagucuacgugua

SEQ ID NO: 742632 - RNA, 19 nt, Homo sapiens
  misc_RNA (1)...(19): siRNA sense strand
ucaccuuccucuacuugga

SEQ ID NO: 742633 - RNA, 19 nt, Homo sapiens
  misc_RNA (1)...(19): siRNA sense strand
caccauuaccucccaagaa

SEQ ID NO: 742634 - RNA, 19 nt, Homo sapiens
  misc_RNA (1)...(19): siRNA sense strand
ucaaagcaaaugcauucaa

SEQ ID NO: 742635 - RNA, 19 nt, Homo sapiens
  misc_RNA (1)...(19): siRNA sense strand
uuaaguggcucuguauacu

SEQ ID NO: 742636 - RNA, 19 nt, Homo sapiens
  misc_RNA (1)...(19): siRNA sense strand
gaaucagccuaucuuuacg

SEQ ID NO: 742637 - RNA, 19 nt, Homo sapiens
  misc_RNA (1)...(19): siRNA sense strand
ugauaauacccaaugagaa

SEQ ID NO: 742638 - RNA, 19 nt, Homo sapiens
  misc_RNA (1)...(19): siRNA sense strand
ggaauccgugccucuuaau

SEQ ID NO: 742639 - RNA, 19 nt, Homo sapiens
  misc_RNA (1)...(19): siRNA sense strand
uaaccucaccuuccucuac

SEQ ID NO: 742640 - RNA, 19 nt, Homo sapiens
  misc_RNA (1)...(19): siRNA sense strand
cauuaccucccaagaaaga

SEQ ID NO: 742641 - RNA, 19 nt, Homo sapiens
  misc_RNA (1)...(19): siRNA sense strand
gagaaaagucuucaauuac

SEQ ID NO: 742642 - RNA, 19 nt, Homo sapiens
  misc_RNA (1)...(19): siRNA sense strand
gcuugugccucugauaaag

SEQ ID NO: 742643 - RNA, 19 nt, Homo sapiens
  misc_RNA (1)...(19): siRNA sense strand
uaacuuaagaagacucgau

SEQ ID NO: 742644 - RNA, 19 nt, Homo sapiens
  misc_RNA (1)...(19): siRNA sense strand
ucacgcauuaucuaugauu

SEQ ID NO: 742645 - RNA, 19 nt, Homo sapiens
  misc_RNA (1)...(19): siRNA sense strand
aaguggcucuguauacugu

SEQ ID NO: 742646 - RNA, 19 nt, Homo sapiens
  misc_RNA (1)...(19): siRNA sense strand
ccgauagggucauacuuuu

SEQ ID NO: 742647 - RNA, 19 nt, Homo sapiens
  misc_RNA (1)...(19): siRNA sense strand
ugaagaauccauauuuagc

SEQ ID NO: 742648 - RNA, 19 nt, Homo sapiens
  misc_RNA (1)...(19): siRNA sense strand
guaggggaaucaaagcaaa

SEQ ID NO: 742649 - RNA, 19 nt, Homo sapiens
  misc_RNA (1)...(19): siRNA sense strand
cuacacuucuccuguuacu

SEQ ID NO: 742650 - RNA, 19 nt, Homo sapiens
  misc_RNA (1)...(19): siRNA sense strand
acucugcagucuacacuuc

SEQ ID NO: 742651 - RNA, 19 nt, Homo sapiens
  misc_RNA (1)...(19): siRNA sense strand
agaagaacuuucacuugcu

SEQ ID NO: 742652 - RNA, 19 nt, Homo sapiens
  misc_RNA (1)...(19): siRNA sense strand
ugaggcaauaacaccauua

SEQ ID NO: 742653 - RNA, 19 nt, Homo sapiens
  misc_RNA (1)...(19): siRNA sense strand
uuacgcacgauucaacaaa

SEQ ID NO: 742654 - RNA, 19 nt, Homo sapiens
  misc_RNA (1)...(19): siRNA sense strand
accgauagggucauacuuu

SEQ ID NO: 742655 - RNA, 19 nt, Homo sapiens
  misc_RNA (1)...(19): siRNA sense strand
cuacguguaauucaucuuc

SEQ ID NO: 742656 - RNA, 19 nt, Homo sapiens
  misc_RNA (1)...(19): siRNA sense strand
agaaagucuacguguaauu

SEQ ID NO: 742657 - RNA, 19 nt, Homo sapiens
  misc_RNA (1)...(19): siRNA sense strand
gaccauaaugcccuggaau

SEQ ID NO: 742658 - RNA, 19 nt, Homo sapiens
  misc_RNA (1)...(19): siRNA sense strand
ccagcaggacucacgcauu

SEQ ID NO: 742659 - RNA, 19 nt, Homo sapiens
  misc_RNA (1)...(19): siRNA sense strand
caacauagcuucaauuaca

SEQ ID NO: 742660 - RNA, 19 nt, Homo sapiens
  misc_RNA (1)...(19): siRNA sense strand
cagcaggacucacgcauua

SEQ ID NO: 742661 - RNA, 19 nt, Homo sapiens
  misc_RNA (1)...(19): siRNA sense strand
caaagcaaaugcauucaaa

SEQ ID NO: 742662 - RNA, 19 nt, Homo sapiens
  misc_RNA (1)...(19): siRNA sense strand
agacauaccuaacuuaaga

SEQ ID NO: 742663 - RNA, 19 nt, Homo sapiens
  misc_RNA (1)...(19): siRNA sense strand
gauaauacccaaugagaaa

SEQ ID NO: 742664 - RNA, 19 nt, Homo sapiens
  misc_RNA (1)...(19): siRNA sense strand
gugaagaaguugacauuga

SEQ ID NO: 742665 - RNA, 19 nt, Homo sapiens
  misc_RNA (1)...(19): siRNA sense strand
auaaauaccuggauggaaa

SEQ ID NO: 742666 - RNA, 19 nt, Homo sapiens
  misc_RNA (1)...(19): siRNA sense strand
ggaccgcauugaagagaua

SEQ ID NO: 742667 - RNA, 19 nt, Homo sapiens
  misc_RNA (1)...(19): siRNA sense strand
gcagacauaccuaacuuaa

SEQ ID NO: 742668 - RNA, 19 nt, Homo sapiens
  misc_RNA (1)...(19): siRNA sense strand
ggaaucagccuaucuuuac

SEQ ID NO: 742669 - RNA, 19 nt, Homo sapiens
  misc_RNA (1)...(19): siRNA sense strand
ccagaaagucuacguguaa

SEQ ID NO: 742670 - RNA, 19 nt, Homo sapiens
  misc_RNA (1)...(19): siRNA sense strand
ccacgugucugcugugugu

SEQ ID NO: 742671 - RNA, 19 nt, Homo sapiens
  misc_RNA (1)...(19): siRNA sense strand
gaaagucuacguguaauuc

SEQ ID NO: 742672 - RNA, 19 nt, Homo sapiens
  misc_RNA (1)...(19): siRNA sense strand
gaagauauagaagauggua

SEQ ID NO: 742673 - RNA, 19 nt, Homo sapiens
  misc_RNA (1)...(19): siRNA sense strand
ugaagaaguugacauugau

SEQ ID NO: 742674 - RNA, 19 nt, Homo sapiens
  misc_RNA (1)...(19): siRNA sense strand
uagcuucaauuacagauga

SEQ ID NO: 742675 - RNA, 19 nt, Homo sapiens
  misc_RNA (1)...(19): siRNA sense strand
ccucuuaauuuaccagaaa

SEQ ID NO: 742676 - RNA, 19 nt, Homo sapiens
  misc_RNA (1)...(19): siRNA sense strand
ggaaagcauccaaacaguu

SEQ ID NO: 742677 - RNA, 19 nt, Homo sapiens
  misc_RNA (1)...(19): siRNA sense strand
gggaaagcauccaaacagu

SEQ ID NO: 742678 - RNA, 19 nt, Homo sapiens
  misc_RNA (1)...(19): siRNA sense strand
caacaacauagcuucaauu

SEQ ID NO: 742679 - RNA, 19 nt, Homo sapiens
  misc_RNA (1)...(19): siRNA sense strand
ggacucacgcauuaucuau

SEQ ID NO: 742680 - RNA, 19 nt, Homo sapiens
  misc_RNA (1)...(19): siRNA sense strand
cccaagcucacuuuauuua

SEQ ID NO: 742681 - RNA, 19 nt, Homo sapiens
  misc_RNA (1)...(19): siRNA sense strand
ggaccauaaugcccuggaa

SEQ ID NO: 742682 - RNA, 19 nt, Homo sapiens
  misc_RNA (1)...(19): siRNA sense strand
accauuaccucccaagaaa

SEQ ID NO: 742683 - RNA, 19 nt, Homo sapiens
  misc_RNA (1)...(19): siRNA sense strand
gauuaccgauagggucaua

SEQ ID NO: 742684 - RNA, 19 nt, Homo sapiens
  misc_RNA (1)...(19): siRNA sense strand
uggaauccgugccucuuaa

SEQ ID NO: 742685 - RNA, 19 nt, Homo sapiens
  misc_RNA (1)...(19): siRNA sense strand
uguauacugugaagaaguu

SEQ ID NO: 742686 - RNA, 19 nt, Homo sapiens
  misc_RNA (1)...(19): siRNA sense strand
cucccaagcucacuuuauu

SEQ ID NO: 742687 - RNA, 19 nt, Homo sapiens
  misc_RNA (1)...(19): siRNA sense strand
uagccaagauuaugaggau

SEQ ID NO: 742688 - RNA, 19 nt, Homo sapiens
  misc_RNA (1)...(19): siRNA sense strand
ucaacaacauagcuucaau

SEQ ID NO: 742689 - RNA, 19 nt, Homo sapiens
  misc_RNA (1)...(19): siRNA sense strand
caucuucaguucaacaaca

SEQ ID NO: 742690 - RNA, 19 nt, Homo sapiens
  misc_RNA (1)...(19): siRNA sense strand
auccgugccucuuaauuua

SEQ ID NO: 742691 - RNA, 19 nt, Homo sapiens
  misc_RNA (1)...(19): siRNA sense strand
aaagcugacugccaaagau

SEQ ID NO: 742692 - RNA, 19 nt, Homo sapiens
  misc_RNA (1)...(19): siRNA sense strand
acucacgcauuaucuauga

SEQ ID NO: 742693 - RNA, 19 nt, Homo sapiens
  misc_RNA (1)...(19): siRNA sense strand
gauaaauaccuggauggaa

SEQ ID NO: 742694 - RNA, 19 nt, Homo sapiens
  misc_RNA (1)...(19): siRNA sense strand
aaucaaagcaaaugcauuc

SEQ ID NO: 742695 - RNA, 19 nt, Homo sapiens
  misc_RNA (1)...(19): siRNA sense strand
ugacauugaugcuguacca

SEQ ID NO: 742696 - RNA, 19 nt, Homo sapiens
  misc_RNA (1)...(19): siRNA sense strand
gcacgauucaacaaaauua

SEQ ID NO: 742697 - RNA, 19 nt, Homo sapiens
  misc_RNA (1)...(19): siRNA sense strand
aauuacagaugacacauuc

SEQ ID NO: 742698 - RNA, 19 nt, Homo sapiens
  misc_RNA (1)...(19): siRNA sense strand
gaaucaaagcaaaugcauu

SEQ ID NO: 742699 - RNA, 19 nt, Homo sapiens
  misc_RNA (1)...(19): siRNA sense strand
ccauauuuagccaagauua

SEQ ID NO: 742700 - RNA, 19 nt, Homo sapiens
  misc_RNA (1)...(19): siRNA sense strand
ugaauaaccucaccuuccu

SEQ ID NO: 742701 - RNA, 19 nt, Homo sapiens
  misc_RNA (1)...(19): siRNA sense strand
gucuacacuucuccuguua

SEQ ID NO: 742702 - RNA, 19 nt, Homo sapiens
  misc_RNA (1)...(19): siRNA sense strand
gugauaauacccaaugaga

SEQ ID NO: 742703 - RNA, 19 nt, Homo sapiens
  misc_RNA (1)...(19): siRNA sense strand
cacgcauuaucuaugauua

SEQ ID NO: 742704 - RNA, 19 nt, Homo sapiens
  misc_RNA (1)...(19): siRNA sense strand
gaagaaguugacauugaug

SEQ ID NO: 742705 - RNA, 19 nt, Homo sapiens
  misc_RNA (1)...(19): siRNA sense strand
gcuaaugacaccaguuaca

SEQ ID NO: 742706 - RNA, 19 nt, Homo sapiens
  misc_RNA (1)...(19): siRNA sense strand
aggaaucagccuaucuuua

SEQ ID NO: 742707 - RNA, 19 nt, Homo sapiens
  misc_RNA (1)...(19): siRNA sense strand
aauccgugccucuuaauuu

SEQ ID NO: 742708 - RNA, 19 nt, Homo sapiens
  misc_RNA (1)...(19): siRNA sense strand
gaauccgugccucuuaauu

SEQ ID NO: 742709 - RNA, 19 nt, Homo sapiens
  misc_RNA (1)...(19): siRNA sense strand
ccaagcucacuuuauuuaa

SEQ ID NO: 742710 - RNA, 19 nt, Homo sapiens
  misc_RNA (1)...(19): siRNA sense strand
ucugcuguguguuuguuua

SEQ ID NO: 742711 - RNA, 19 nt, Homo sapiens
  misc_RNA (1)...(19): siRNA sense strand
gauagggucauacuuuuaa

SEQ ID NO: 742712 - RNA, 19 nt, Homo sapiens
  misc_RNA (1)...(19): siRNA sense strand
uguaauucaucuucaguuc

SEQ ID NO: 742713 - RNA, 19 nt, Homo sapiens
  misc_RNA (1)...(19): siRNA sense strand
cagaaagucuacguguaau

SEQ ID NO: 742714 - RNA, 19 nt, Homo sapiens
  misc_RNA (1)...(19): siRNA sense strand
uaagaagacucgauuuuac

SEQ ID NO: 742715 - RNA, 19 nt, Homo sapiens
  misc_RNA (1)...(19): siRNA sense strand
ccaaaggaaucagccuauc

SEQ ID NO: 742716 - RNA, 19 nt, Homo sapiens
  misc_RNA (1)...(19): siRNA sense strand
gcuguguguuuguuuaagu

SEQ ID NO: 742717 - RNA, 19 nt, Homo sapiens
  misc_RNA (1)...(19): siRNA sense strand
gcaggacucacgcauuauc

SEQ ID NO: 742718 - RNA, 19 nt, Homo sapiens
  misc_RNA (1)...(19): siRNA sense strand
ggauaaauaccuggaugga

SEQ ID NO: 742719 - RNA, 19 nt, Homo sapiens
  misc_RNA (1)...(19): siRNA sense strand
uuagaagaacuuucacuug

SEQ ID NO: 742720 - RNA, 19 nt, Homo sapiens
  misc_RNA (1)...(19): siRNA sense strand
guuagaagaacuuucacuu

SEQ ID NO: 742721 - RNA, 19 nt, Homo sapiens
  misc_RNA (1)...(19): siRNA sense strand
auaccuaacuuaagaagac

SEQ ID NO: 742722 - RNA, 19 nt, Homo sapiens
  misc_RNA (1)...(19): siRNA sense strand
aaaggaaucagccuaucuu

SEQ ID NO: 742723 - RNA, 19 nt, Homo sapiens
  misc_RNA (1)...(19): siRNA sense strand
aggcuaaugacaccaguua

SEQ ID NO: 742724 - RNA, 19 nt, Homo sapiens
  misc_RNA (1)...(19): siRNA sense strand
caaaggaaucagccuaucu

SEQ ID NO: 742725 - RNA, 19 nt, Homo sapiens
  misc_RNA (1)...(19): siRNA sense strand
caauuacagaugacacauu

SEQ ID NO: 742726 - RNA, 19 nt, Homo sapiens
  misc_RNA (1)...(19): siRNA sense strand
cgcauuaucuaugauuaug

SEQ ID NO: 742727 - RNA, 19 nt, Homo sapiens
  misc_RNA (1)...(19): siRNA sense strand
guaauucaucuucaguuca

SEQ ID NO: 742728 - RNA, 19 nt, Homo sapiens
  misc_RNA (1)...(19): siRNA sense strand
ggaaucaaagcaaaugcau

SEQ ID NO: 742729 - RNA, 19 nt, Homo sapiens
  misc_RNA (1)...(19): siRNA sense strand
uugcagacauaccuaacuu

SEQ ID NO: 742730 - RNA, 19 nt, Homo sapiens
  misc_RNA (1)...(19): siRNA sense strand
agucuacacuucuccuguu

SEQ ID NO: 742731 - RNA, 19 nt, Homo sapiens
  misc_RNA (1)...(19): siRNA sense strand
accagaaagucuacgugua

SEQ ID NO: 742732 - RNA, 19 nt, Homo sapiens
  misc_RNA (1)...(19): siRNA sense strand
ucaccuuccucuacuugga

SEQ ID NO: 742733 - RNA, 19 nt, Homo sapiens
  misc_RNA (1)...(19): siRNA sense strand
caccauuaccucccaagaa

SEQ ID NO: 742734 - RNA, 19 nt, Homo sapiens
  misc_RNA (1)...(19): siRNA sense strand
ucaaagcaaaugcauucaa

SEQ ID NO: 742735 - RNA, 19 nt, Homo sapiens
  misc_RNA (1)...(19): siRNA sense strand
uuaaguggcucuguauacu

SEQ ID NO: 742736 - RNA, 19 nt, Homo sapiens
  misc_RNA (1)...(19): siRNA sense strand
gaaucagccuaucuuuacg

SEQ ID NO: 742737 - RNA, 19 nt, Homo sapiens
  misc_RNA (1)...(19): siRNA sense strand
ugauaauacccaaugagaa

SEQ ID NO: 742738 - RNA, 19 nt, Homo sapiens
  misc_RNA (1)...(19): siRNA sense strand
ggaauccgugccucuuaau

SEQ ID NO: 742739 - RNA, 19 nt, Homo sapiens
  misc_RNA (1)...(19): siRNA sense strand
uaaccucaccuuccucuac

SEQ ID NO: 742740 - RNA, 19 nt, Homo sapiens
  misc_RNA (1)...(19): siRNA sense strand
cauuaccucccaagaaaga

SEQ ID NO: 742741 - RNA, 19 nt, Homo sapiens
  misc_RNA (1)...(19): siRNA sense strand
gagaaaagucuucaauuac

SEQ ID NO: 742742 - RNA, 19 nt, Homo sapiens
  misc_RNA (1)...(19): siRNA sense strand
gcuugugccucugauaaag

SEQ ID NO: 742743 - RNA, 19 nt, Homo sapiens
  misc_RNA (1)...(19): siRNA sense strand
uaacuuaagaagacucgau

SEQ ID NO: 742744 - RNA, 19 nt, Homo sapiens
  misc_RNA (1)...(19): siRNA sense strand
ucacgcauuaucuaugauu

SEQ ID NO: 742745 - RNA, 19 nt, Homo sapiens
  misc_RNA (1)...(19): siRNA sense strand
aaguggcucuguauacugu

SEQ ID NO: 742746 - RNA, 19 nt, Homo sapiens
  misc_RNA (1)...(19): siRNA sense strand
ccgauagggucauacuuuu

SEQ ID NO: 742747 - RNA, 19 nt, Homo sapiens
  misc_RNA (1)...(19): siRNA sense strand
ugaagaauccauauuuagc

SEQ ID NO: 742748 - RNA, 19 nt, Homo sapiens
  misc_RNA (1)...(19): siRNA sense strand
guaggggaaucaaagcaaa

SEQ ID NO: 742749 - RNA, 19 nt, Homo sapiens
  misc_RNA (1)...(19): siRNA sense strand
cuacacuucuccuguuacu

SEQ ID NO: 742750 - RNA, 19 nt, Homo sapiens
  misc_RNA (1)...(19): siRNA sense strand
acucugcagucuacacuuc

SEQ ID NO: 742751 - RNA, 19 nt, Homo sapiens
  misc_RNA (1)...(19): siRNA sense strand
agaagaacuuucacuugcu

SEQ ID NO: 742752 - RNA, 19 nt, Homo sapiens
  misc_RNA (1)...(19): siRNA sense strand
ugaggcaauaacaccauua

SEQ ID NO: 742753 - RNA, 19 nt, Homo sapiens
  misc_RNA (1)...(19): siRNA sense strand
uuacgcacgauucaacaaa

SEQ ID NO: 742754 - RNA, 19 nt, Homo sapiens
  misc_RNA (1)...(19): siRNA sense strand
accgauagggucauacuuu

SEQ ID NO: 742755 - RNA, 19 nt, Homo sapiens
  misc_RNA (1)...(19): siRNA sense strand
cuacguguaauucaucuuc

SEQ ID NO: 742756 - RNA, 19 nt, Homo sapiens
  misc_RNA (1)...(19): siRNA sense strand
agaaagucuacguguaauu

SEQ ID NO: 742757 - RNA, 19 nt, Homo sapiens
  misc_RNA (1)...(19): siRNA sense strand
gaccauaaugcccuggaau

SEQ ID NO: 742758 - RNA, 19 nt, Homo sapiens
  misc_RNA (1)...(19): siRNA sense strand
ccagcaggacucacgcauu

SEQ ID NO: 742759 - RNA, 19 nt, Homo sapiens
  misc_RNA (1)...(19): siRNA sense strand
gaagaaaggcaaagaguuu

SEQ ID NO: 742760 - RNA, 19 nt, Homo sapiens
  misc_RNA (1)...(19): siRNA sense strand
uaacaggccuuuauagaga

SEQ ID NO: 742761 - RNA, 19 nt, Homo sapiens
  misc_RNA (1)...(19): siRNA sense strand
gaaagaacucaacaccuua

SEQ ID NO: 742762 - RNA, 19 nt, Homo sapiens
  misc_RNA (1)...(19): siRNA sense strand
ucagagagcuguucuucuu

SEQ ID NO: 742763 - RNA, 19 nt, Homo sapiens
  misc_RNA (1)...(19): siRNA sense strand
gcaauagucugaccuugau

SEQ ID NO: 742764 - RNA, 19 nt, Homo sapiens
  misc_RNA (1)...(19): siRNA sense strand
agaaagaacucaacaccuu

SEQ ID NO: 742765 - RNA, 19 nt, Homo sapiens
  misc_RNA (1)...(19): siRNA sense strand
ugaaagauguggcugaguu

SEQ ID NO: 742766 - RNA, 19 nt, Homo sapiens
  misc_RNA (1)...(19): siRNA sense strand
cucaacaccuuacgaguua

SEQ ID NO: 742767 - RNA, 19 nt, Homo sapiens
  misc_RNA (1)...(19): siRNA sense strand
guauacagagucaacaaua

SEQ ID NO: 742768 - RNA, 19 nt, Homo sapiens
  misc_RNA (1)...(19): siRNA sense strand
ggaagaaaggcaaagaguu

SEQ ID NO: 742769 - RNA, 19 nt, Homo sapiens
  misc_RNA (1)...(19): siRNA sense strand
gaaagauguggcugaguuu

SEQ ID NO: 742770 - RNA, 19 nt, Homo sapiens
  misc_RNA (1)...(19): siRNA sense strand
cagcaaaguuaauucaaca

SEQ ID NO: 742771 - RNA, 19 nt, Homo sapiens
  misc_RNA (1)...(19): siRNA sense strand
uggcugaguuucuguauca

SEQ ID NO: 742772 - RNA, 19 nt, Homo sapiens
  misc_RNA (1)...(19): siRNA sense strand
agaaauggcuggcuaaaau

SEQ ID NO: 742773 - RNA, 19 nt, Homo sapiens
  misc_RNA (1)...(19): siRNA sense strand
ggaaaacguugcucuuugu

SEQ ID NO: 742774 - RNA, 19 nt, Homo sapiens
  misc_RNA (1)...(19): siRNA sense strand
guuaacaggccuuuauaga

SEQ ID NO: 742775 - RNA, 19 nt, Homo sapiens
  misc_RNA (1)...(19): siRNA sense strand
ugaagaauacaccaucauu

SEQ ID NO: 742776 - RNA, 19 nt, Homo sapiens
  misc_RNA (1)...(19): siRNA sense strand
ggcaaaaucagcaaaguua

SEQ ID NO: 742777 - RNA, 19 nt, Homo sapiens
  misc_RNA (1)...(19): siRNA sense strand
ggcaauagucugaccuuga

SEQ ID NO: 742778 - RNA, 19 nt, Homo sapiens
  misc_RNA (1)...(19): siRNA sense strand
gagagcuguucuucuuguu

SEQ ID NO: 742779 - RNA, 19 nt, Homo sapiens
  misc_RNA (1)...(19): siRNA sense strand
gggaaaacguugcucuuug

SEQ ID NO: 742780 - RNA, 19 nt, Homo sapiens
  misc_RNA (1)...(19): siRNA sense strand
ggagaaauggcuggcuaaa

SEQ ID NO: 742781 - RNA, 19 nt, Homo sapiens
  misc_RNA (1)...(19): siRNA sense strand
guuugaggcuucaguucuu

SEQ ID NO: 742782 - RNA, 19 nt, Homo sapiens
  misc_RNA (1)...(19): siRNA sense strand
gaguuugaauucucacagu

SEQ ID NO: 742783 - RNA, 19 nt, Homo sapiens
  misc_RNA (1)...(19): siRNA sense strand
uuagagcgguuuaagucuu

SEQ ID NO: 742784 - RNA, 19 nt, Homo sapiens
  misc_RNA (1)...(19): siRNA sense strand
uuaauagccugcaauaagc

SEQ ID NO: 742785 - RNA, 19 nt, Homo sapiens
  misc_RNA (1)...(19): siRNA sense strand
gacacucagacguccauua

SEQ ID NO: 742786 - RNA, 19 nt, Homo sapiens
  misc_RNA (1)...(19): siRNA sense strand
agagagcuguucuucuugu

SEQ ID NO: 742787 - RNA, 19 nt, Homo sapiens
  misc_RNA (1)...(19): siRNA sense strand
acucagacguccauuacug

SEQ ID NO: 742788 - RNA, 19 nt, Homo sapiens
  misc_RNA (1)...(19): siRNA sense strand
guuguuaacaggccuuuau

SEQ ID NO: 742789 - RNA, 19 nt, Homo sapiens
  misc_RNA (1)...(19): siRNA sense strand
gacaguaugggucugaaga

SEQ ID NO: 742790 - RNA, 19 nt, Homo sapiens
  misc_RNA (1)...(19): siRNA sense strand
gggcuauuguguuuguugu

SEQ ID NO: 742791 - RNA, 19 nt, Homo sapiens
  misc_RNA (1)...(19): siRNA sense strand
gggaagaaaggcaaagagu

SEQ ID NO: 742792 - RNA, 19 nt, Homo sapiens
  misc_RNA (1)...(19): siRNA sense strand
acaccaucauucuuaauag

SEQ ID NO: 742793 - RNA, 19 nt, Homo sapiens
  misc_RNA (1)...(19): siRNA sense strand
ucagcaaaguuaauucaac

SEQ ID NO: 742794 - RNA, 19 nt, Homo sapiens
  misc_RNA (1)...(19): siRNA sense strand
uagagcgguuuaagucuuc

SEQ ID NO: 742795 - RNA, 19 nt, Homo sapiens
  misc_RNA (1)...(19): siRNA sense strand
gacgugggcucugcugaca

SEQ ID NO: 742796 - RNA, 19 nt, Homo sapiens
  misc_RNA (1)...(19): siRNA sense strand
agcgagaggugaaagaugu

SEQ ID NO: 742797 - RNA, 19 nt, Homo sapiens
  misc_RNA (1)...(19): siRNA sense strand
gaaauggcuggcuaaaauu

SEQ ID NO: 742798 - RNA, 19 nt, Homo sapiens
  misc_RNA (1)...(19): siRNA sense strand
caguaugggucugaagaau

SEQ ID NO: 742799 - RNA, 19 nt, Homo sapiens
  misc_RNA (1)...(19): siRNA sense strand
cuuguuggccuuugugauu

SEQ ID NO: 742800 - RNA, 19 nt, Homo sapiens
  misc_RNA (1)...(19): siRNA sense strand
aguaugggucugaagaaua

SEQ ID NO: 742801 - RNA, 19 nt, Homo sapiens
  misc_RNA (1)...(19): siRNA sense strand
caaguccucauugacagua

SEQ ID NO: 742802 - RNA, 19 nt, Homo sapiens
  misc_RNA (1)...(19): siRNA sense strand
ugacgcuagucuucuggaa

SEQ ID NO: 742803 - RNA, 19 nt, Homo sapiens
  misc_RNA (1)...(19): siRNA sense strand
uuugaggcuucaguucuua

SEQ ID NO: 742804 - RNA, 19 nt, Homo sapiens
  misc_RNA (1)...(19): siRNA sense strand
cugcugacauccaggacuu

SEQ ID NO: 742805 - RNA, 19 nt, Homo sapiens
  misc_RNA (1)...(19): siRNA sense strand
ucugaagaauacaccauca

SEQ ID NO: 742806 - RNA, 19 nt, Homo sapiens
  misc_RNA (1)...(19): siRNA sense strand
gcaaaaucagcaaaguuaa

SEQ ID NO: 742807 - RNA, 19 nt, Homo sapiens
  misc_RNA (1)...(19): siRNA sense strand
gcucuuugucagguuguua

SEQ ID NO: 742808 - RNA, 19 nt, Homo sapiens
  misc_RNA (1)...(19): siRNA sense strand
cgugggcucugcugacauc

SEQ ID NO: 742809 - RNA, 19 nt, Homo sapiens
  misc_RNA (1)...(19): siRNA sense strand
uuaacaggccuuuauagag

SEQ ID NO: 742810 - RNA, 19 nt, Homo sapiens
  misc_RNA (1)...(19): siRNA sense strand
cagaaggagcagucagaga

SEQ ID NO: 742811 - RNA, 19 nt, Homo sapiens
  misc_RNA (1)...(19): siRNA sense strand
acacucagacguccauuac

SEQ ID NO: 742812 - RNA, 19 nt, Homo sapiens
  misc_RNA (1)...(19): siRNA sense strand
cugaguuucuguaucaagu

SEQ ID NO: 742813 - RNA, 19 nt, Homo sapiens
  misc_RNA (1)...(19): siRNA sense strand
agacggacccaacgcuguu

SEQ ID NO: 742814 - RNA, 19 nt, Homo sapiens
  misc_RNA (1)...(19): siRNA sense strand
aaguuaauccggagcagaa

SEQ ID NO: 742815 - RNA, 19 nt, Homo sapiens
  misc_RNA (1)...(19): siRNA sense strand
ggaagacucugaacaauuc

SEQ ID NO: 742816 - RNA, 19 nt, Homo sapiens
  misc_RNA (1)...(19): siRNA sense strand
ggaaagaguguauauggua

SEQ ID NO: 742817 - RNA, 19 nt, Homo sapiens
  misc_RNA (1)...(19): siRNA sense strand
ggaacgaguuuaguauauu

SEQ ID NO: 742818 - RNA, 19 nt, Homo sapiens
  misc_RNA (1)...(19): siRNA sense strand
ggacuauccuugaggcaaa

SEQ ID NO: 742819 - RNA, 19 nt, Homo sapiens
  misc_RNA (1)...(19): siRNA sense strand
ggaaugcagugguagaguu

SEQ ID NO: 742820 - RNA, 19 nt, Homo sapiens
  misc_RNA (1)...(19): siRNA sense strand
gaugacauguacagucuuu

SEQ ID NO: 742821 - RNA, 19 nt, Homo sapiens
  misc_RNA (1)...(19): siRNA sense strand
gggaacgaguuuaguauau

SEQ ID NO: 742822 - RNA, 19 nt, Homo sapiens
  misc_RNA (1)...(19): siRNA sense strand
guaaucgccuguuucaaga

SEQ ID NO: 742823 - RNA, 19 nt, Homo sapiens
  misc_RNA (1)...(19): siRNA sense strand
caaauuccauucacuccuu

SEQ ID NO: 742824 - RNA, 19 nt, Homo sapiens
  misc_RNA (1)...(19): siRNA sense strand
gaaugcagugguagaguua

SEQ ID NO: 742825 - RNA, 19 nt, Homo sapiens
  misc_RNA (1)...(19): siRNA sense strand
caacaugguacuuuggaua

SEQ ID NO: 742826 - RNA, 19 nt, Homo sapiens
  misc_RNA (1)...(19): siRNA sense strand
uuugacaccucccucauua

SEQ ID NO: 742827 - RNA, 19 nt, Homo sapiens
  misc_RNA (1)...(19): siRNA sense strand
gaaguugaccugcucuuuc

SEQ ID NO: 742828 - RNA, 19 nt, Homo sapiens
  misc_RNA (1)...(19): siRNA sense strand
guuagucacugucaaguca

SEQ ID NO: 742829 - RNA, 19 nt, Homo sapiens
  misc_RNA (1)...(19): siRNA sense strand
gauagcaucauuuauagga

SEQ ID NO: 742830 - RNA, 19 nt, Homo sapiens
  misc_RNA (1)...(19): siRNA sense strand
gaggaaagaguguauaugg

SEQ ID NO: 742831 - RNA, 19 nt, Homo sapiens
  misc_RNA (1)...(19): siRNA sense strand
cuucuaagauccuuguuga

SEQ ID NO: 742832 - RNA, 19 nt, Homo sapiens
  misc_RNA (1)...(19): siRNA sense strand
ucaauucucugaguaggaa

SEQ ID NO: 742833 - RNA, 19 nt, Homo sapiens
  misc_RNA (1)...(19): siRNA sense strand
gaacugcaagugcuacaug

SEQ ID NO: 742834 - RNA, 19 nt, Homo sapiens
  misc_RNA (1)...(19): siRNA sense strand
gggaagacucugaacaauu

SEQ ID NO: 742835 - RNA, 19 nt, Homo sapiens
  misc_RNA (1)...(19): siRNA sense strand
gaaauugggaagcguuaug

SEQ ID NO: 742836 - RNA, 19 nt, Homo sapiens
  misc_RNA (1)...(19): siRNA sense strand
cagagaugcuucuaagauc

SEQ ID NO: 742837 - RNA, 19 nt, Homo sapiens
  misc_RNA (1)...(19): siRNA sense strand
cacuggagcuggcagguuu

SEQ ID NO: 742838 - RNA, 19 nt, Homo sapiens
  misc_RNA (1)...(19): siRNA sense strand
aaauggaaauuggccuaua

SEQ ID NO: 742839 - RNA, 19 nt, Homo sapiens
  misc_RNA (1)...(19): siRNA sense strand
gauuaucaccucuuacaau

SEQ ID NO: 742840 - RNA, 19 nt, Homo sapiens
  misc_RNA (1)...(19): siRNA sense strand
gaccugcucuuucuuucug

SEQ ID NO: 742841 - RNA, 19 nt, Homo sapiens
  misc_RNA (1)...(19): siRNA sense strand
ucaccagggucuguuguuu

SEQ ID NO: 742842 - RNA, 19 nt, Homo sapiens
  misc_RNA (1)...(19): siRNA sense strand
cagaugacauguacagucu

SEQ ID NO: 742843 - RNA, 19 nt, Homo sapiens
  misc_RNA (1)...(19): siRNA sense strand
uccaugggcuucucuguga

SEQ ID NO: 742844 - RNA, 19 nt, Homo sapiens
  misc_RNA (1)...(19): siRNA sense strand
gcaagugcuacaugauauu

SEQ ID NO: 742845 - RNA, 19 nt, Homo sapiens
  misc_RNA (1)...(19): siRNA sense strand
gaacccagcaagucccuau

SEQ ID NO: 742846 - RNA, 19 nt, Homo sapiens
  misc_RNA (1)...(19): siRNA sense strand
acaccucccucauuaggaa

SEQ ID NO: 742847 - RNA, 19 nt, Homo sapiens
  misc_RNA (1)...(19): siRNA sense strand
gaacaauucagagaugcuu

SEQ ID NO: 742848 - RNA, 19 nt, Homo sapiens
  misc_RNA (1)...(19): siRNA sense strand
ucagagaugcuucuaagau

SEQ ID NO: 742849 - RNA, 19 nt, Homo sapiens
  misc_RNA (1)...(19): siRNA sense strand
cagaagauucgaauggauu

SEQ ID NO: 742850 - RNA, 19 nt, Homo sapiens
  misc_RNA (1)...(19): siRNA sense strand
gagaaugcaguuccuuuua

SEQ ID NO: 742851 - RNA, 19 nt, Homo sapiens
  misc_RNA (1)...(19): siRNA sense strand
caagugcuacaugauauuu

SEQ ID NO: 742852 - RNA, 19 nt, Homo sapiens
  misc_RNA (1)...(19): siRNA sense strand
guaggaacaaugaaguuga

SEQ ID NO: 742853 - RNA, 19 nt, Homo sapiens
  misc_RNA (1)...(19): siRNA sense strand
gcuccguaaucgccuguuu

SEQ ID NO: 742854 - RNA, 19 nt, Homo sapiens
  misc_RNA (1)...(19): siRNA sense strand
aaauuccauucacuccuua

SEQ ID NO: 742855 - RNA, 19 nt, Homo sapiens
  misc_RNA (1)...(19): siRNA sense strand
gaaauggaaauuggccuau

SEQ ID NO: 742856 - RNA, 19 nt, Homo sapiens
  misc_RNA (1)...(19): siRNA sense strand
ccagaagauucgaauggau

SEQ ID NO: 742857 - RNA, 19 nt, Homo sapiens
  misc_RNA (1)...(19): siRNA sense strand
gaugacaaaccagaagauu

SEQ ID NO: 742858 - RNA, 19 nt, Homo sapiens
  misc_RNA (1)...(19): siRNA sense strand
ugaagggagugaacaaacu

SEQ ID NO: 742859 - RNA, 19 nt, Homo sapiens
  misc_RNA (1)...(19): siRNA sense strand
caggcagugucauuucgua

SEQ ID NO: 742860 - RNA, 19 nt, Homo sapiens
  misc_RNA (1)...(19): siRNA sense strand
ggccuuggcugugauuauc

SEQ ID NO: 742861 - RNA, 19 nt, Homo sapiens
  misc_RNA (1)...(19): siRNA sense strand
cgcaguggguaaccuguuu

SEQ ID NO: 742862 - RNA, 19 nt, Homo sapiens
  misc_RNA (1)...(19): siRNA sense strand
caugguacuuuggauaaug

SEQ ID NO: 742863 - RNA, 19 nt, Homo sapiens
  misc_RNA (1)...(19): siRNA sense strand
gcuggcagguuuggaugaa

SEQ ID NO: 742864 - RNA, 19 nt, Homo sapiens
  misc_RNA (1)...(19): siRNA sense strand
auaagcaucuagccaagga

SEQ ID NO: 742865 - RNA, 19 nt, Homo sapiens
  misc_RNA (1)...(19): siRNA sense strand
cguaaucgccuguuucaag

SEQ ID NO: 742866 - RNA, 19 nt, Homo sapiens
  misc_RNA (1)...(19): siRNA sense strand
gaagggagugaacaaacug

SEQ ID NO: 742867 - RNA, 19 nt, Homo sapiens
  misc_RNA (1)...(19): siRNA sense strand
ggaaggcaaacucaguguu

SEQ ID NO: 742868 - RNA, 19 nt, Homo sapiens
  misc_RNA (1)...(19): siRNA sense strand
gcgaagaacccagcaaguc

SEQ ID NO: 742869 - RNA, 19 nt, Homo sapiens
  misc_RNA (1)...(19): siRNA sense strand
ugcaagugcuacaugauau

SEQ ID NO: 742870 - RNA, 19 nt, Homo sapiens
  misc_RNA (1)...(19): siRNA sense strand
cugcaagugcuacaugaua

SEQ ID NO: 742871 - RNA, 19 nt, Homo sapiens
  misc_RNA (1)...(19): siRNA sense strand
gcaguuccuuuuagucuug

SEQ ID NO: 742872 - RNA, 19 nt, Homo sapiens
  misc_RNA (1)...(19): siRNA sense strand
ugacaaaccagaagauucg

SEQ ID NO: 742873 - RNA, 19 nt, Homo sapiens
  misc_RNA (1)...(19): siRNA sense strand
gaguaggaacaaugaaguu

SEQ ID NO: 742874 - RNA, 19 nt, Homo sapiens
  misc_RNA (1)...(19): siRNA sense strand
ucccagacguggcugcauu

SEQ ID NO: 742875 - RNA, 19 nt, Homo sapiens
  misc_RNA (1)...(19): siRNA sense strand
caaaccagaagauucgaau

SEQ ID NO: 742876 - RNA, 19 nt, Homo sapiens
  misc_RNA (1)...(19): siRNA sense strand
ggagaaugcaguuccuuuu

SEQ ID NO: 742877 - RNA, 19 nt, Homo sapiens
  misc_RNA (1)...(19): siRNA sense strand
gggcuaccgucauggugau

SEQ ID NO: 742878 - RNA, 19 nt, Homo sapiens
  misc_RNA (1)...(19): siRNA sense strand
ccucuuacaauauuuggaa

SEQ ID NO: 742879 - RNA, 19 nt, Homo sapiens
  misc_RNA (1)...(19): siRNA sense strand
auucagagaugcuucuaag

SEQ ID NO: 742880 - RNA, 19 nt, Homo sapiens
  misc_RNA (1)...(19): siRNA sense strand
gugaggaaagaguguauau

SEQ ID NO: 742881 - RNA, 19 nt, Homo sapiens
  misc_RNA (1)...(19): siRNA sense strand
guggguaaccuguuucauc

SEQ ID NO: 742882 - RNA, 19 nt, Homo sapiens
  misc_RNA (1)...(19): siRNA sense strand
aaaguuugcagaugacaug

SEQ ID NO: 742883 - RNA, 19 nt, Homo sapiens
  misc_RNA (1)...(19): siRNA sense strand
uggcagguuuggaugaaau

SEQ ID NO: 742884 - RNA, 19 nt, Homo sapiens
  misc_RNA (1)...(19): siRNA sense strand
ggagcuggcagguuuggau

SEQ ID NO: 742885 - RNA, 19 nt, Homo sapiens
  misc_RNA (1)...(19): siRNA sense strand
guugaccugcucuuucuuu

SEQ ID NO: 742886 - RNA, 19 nt, Homo sapiens
  misc_RNA (1)...(19): siRNA sense strand
ugaaguugaccugcucuuu

SEQ ID NO: 742887 - RNA, 19 nt, Homo sapiens
  misc_RNA (1)...(19): siRNA sense strand
gcucuuucuuucugaacug

SEQ ID NO: 742888 - RNA, 19 nt, Homo sapiens
  misc_RNA (1)...(19): siRNA sense strand
gaagauucgaauggauuga

SEQ ID NO: 742889 - RNA, 19 nt, Homo sapiens
  misc_RNA (1)...(19): siRNA sense strand
aauggaaauuggccuauac

SEQ ID NO: 742890 - RNA, 19 nt, Homo sapiens
  misc_RNA (1)...(19): siRNA sense strand
ggugaagggagugaacaaa

SEQ ID NO: 742891 - RNA, 19 nt, Homo sapiens
  misc_RNA (1)...(19): siRNA sense strand
aacaugguacuuuggauaa

SEQ ID NO: 742892 - RNA, 19 nt, Homo sapiens
  misc_RNA (1)...(19): siRNA sense strand
uuucguacccuuuggagaa

SEQ ID NO: 742893 - RNA, 19 nt, Homo sapiens
  misc_RNA (1)...(19): siRNA sense strand
guuugcagaugacauguac

SEQ ID NO: 742894 - RNA, 19 nt, Homo sapiens
  misc_RNA (1)...(19): siRNA sense strand
aaguugaccugcucuuucu

SEQ ID NO: 742895 - RNA, 19 nt, Homo sapiens
  misc_RNA (1)...(19): siRNA sense strand
gaaugcaguuccuuuuagu

SEQ ID NO: 742896 - RNA, 19 nt, Homo sapiens
  misc_RNA (1)...(19): siRNA sense strand
gcagugguagaguuaguca

SEQ ID NO: 742897 - RNA, 19 nt, Homo sapiens
  misc_RNA (1)...(19): siRNA sense strand
agugcuacaugauauuuca

SEQ ID NO: 742898 - RNA, 19 nt, Homo sapiens
  misc_RNA (1)...(19): siRNA sense strand
ggaugacaaaccagaagau

SEQ ID NO: 742899 - RNA, 19 nt, Homo sapiens
  misc_RNA (1)...(19): siRNA sense strand
uccauucacuccuuauuuu

SEQ ID NO: 742900 - RNA, 19 nt, Homo sapiens
  misc_RNA (1)...(19): siRNA sense strand
uuuauaggaugacaaacca

SEQ ID NO: 742901 - RNA, 19 nt, Homo sapiens
  misc_RNA (1)...(19): siRNA sense strand
uagucacugucaagucauu

SEQ ID NO: 742902 - RNA, 19 nt, Homo sapiens
  misc_RNA (1)...(19): siRNA sense strand
guagaguuagucacuguca

SEQ ID NO: 742903 - RNA, 19 nt, Homo sapiens
  misc_RNA (1)...(19): siRNA sense strand
uugacaguguugcaaauuc

SEQ ID NO: 742904 - RNA, 19 nt, Homo sapiens
  misc_RNA (1)...(19): siRNA sense strand
ucaacaugguacuuuggau

SEQ ID NO: 742905 - RNA, 19 nt, Homo sapiens
  misc_RNA (1)...(19): siRNA sense strand
gguagggaaggcaaacuca

SEQ ID NO: 742906 - RNA, 19 nt, Homo sapiens
  misc_RNA (1)...(19): siRNA sense strand
aggaaagaguguauauggu

SEQ ID NO: 742907 - RNA, 19 nt, Homo sapiens
  misc_RNA (1)...(19): siRNA sense strand
uggagaaugcaguuccuuu

SEQ ID NO: 742908 - RNA, 19 nt, Homo sapiens
  misc_RNA (1)...(19): siRNA sense strand
ugacaguguugcaaauucc

SEQ ID NO: 742909 - RNA, 19 nt, Homo sapiens
  misc_RNA (1)...(19): siRNA sense strand
uaggaacaaugaaguugac

SEQ ID NO: 742910 - RNA, 19 nt, Homo sapiens
  misc_RNA (1)...(19): siRNA sense strand
gccuuggccuuggcuguga

SEQ ID NO: 742911 - RNA, 19 nt, Homo sapiens
  misc_RNA (1)...(19): siRNA sense strand
ugguagaguuagucacugu

SEQ ID NO: 742912 - RNA, 19 nt, Homo sapiens
  misc_RNA (1)...(19): siRNA sense strand
cagcaagucccuauaaccu

SEQ ID NO: 742913 - RNA, 19 nt, Homo sapiens
  misc_RNA (1)...(19): siRNA sense strand
ccaugggcuucucugugaa

SEQ ID NO: 742914 - RNA, 19 nt, Homo sapiens
  misc_RNA (1)...(19): siRNA sense strand
augguacuuuggauaauga

SEQ ID NO: 742915 - RNA, 19 nt, Homo sapiens
  misc_RNA (1)...(19): siRNA sense strand
ggagagagauagcaagauu

SEQ ID NO: 742916 - RNA, 19 nt, Homo sapiens
  misc_RNA (1)...(19): siRNA sense strand
ggacaaaccuaccuaucuu

SEQ ID NO: 742917 - RNA, 19 nt, Homo sapiens
  misc_RNA (1)...(19): siRNA sense strand
cuaccuaucuucaagcuaa

SEQ ID NO: 742918 - RNA, 19 nt, Homo sapiens
  misc_RNA (1)...(19): siRNA sense strand
ugaggagucuuucaucgaa

SEQ ID NO: 742919 - RNA, 19 nt, Homo sapiens
  misc_RNA (1)...(19): siRNA sense strand
aaaaugagcuggagagaga

SEQ ID NO: 742920 - RNA, 19 nt, Homo sapiens
  misc_RNA (1)...(19): siRNA sense strand
gaacgcugccuacacaugu

SEQ ID NO: 742921 - RNA, 19 nt, Homo sapiens
  misc_RNA (1)...(19): siRNA sense strand
aaaccuaccuaucuucaag

SEQ ID NO: 742922 - RNA, 19 nt, Homo sapiens
  misc_RNA (1)...(19): siRNA sense strand
aaugaacgcugccuacaca

SEQ ID NO: 742923 - RNA, 19 nt, Homo sapiens
  misc_RNA (1)...(19): siRNA sense strand
ucgagcaguuuauuaacaa

SEQ ID NO: 742924 - RNA, 19 nt, Homo sapiens
  misc_RNA (1)...(19): siRNA sense strand
ggacacggcaguagcugau

SEQ ID NO: 742925 - RNA, 19 nt, Homo sapiens
  misc_RNA (1)...(19): siRNA sense strand
agagauagcaagauuguag

SEQ ID NO: 742926 - RNA, 19 nt, Homo sapiens
  misc_RNA (1)...(19): siRNA sense strand
guaacuuccuggagaucga

SEQ ID NO: 742927 - RNA, 19 nt, Homo sapiens
  misc_RNA (1)...(19): siRNA sense strand
cgagcaguuuauuaacaaa

SEQ ID NO: 742928 - RNA, 19 nt, Homo sapiens
  misc_RNA (1)...(19): siRNA sense strand
gagagagauagcaagauug

SEQ ID NO: 742929 - RNA, 19 nt, Homo sapiens
  misc_RNA (1)...(19): siRNA sense strand
ggccucgagcaguuuauua

SEQ ID NO: 742930 - RNA, 19 nt, Homo sapiens
  misc_RNA (1)...(19): siRNA sense strand
gagguucgcaugcggacaa

SEQ ID NO: 742931 - RNA, 19 nt, Homo sapiens
  misc_RNA (1)...(19): siRNA sense strand
gccucgagcaguuuauuaa

SEQ ID NO: 742932 - RNA, 19 nt, Homo sapiens
  misc_RNA (1)...(19): siRNA sense strand
gcgcuacagugacuuugag

SEQ ID NO: 742933 - RNA, 19 nt, Homo sapiens
  misc_RNA (1)...(19): siRNA sense strand
ugaagcggcagcucccuuu

SEQ ID NO: 742934 - RNA, 19 nt, Homo sapiens
  misc_RNA (1)...(19): siRNA sense strand
uagcaagauuguaguacca

SEQ ID NO: 742935 - RNA, 19 nt, Homo sapiens
  misc_RNA (1)...(19): siRNA sense strand
caagaggaggcaauugaca

SEQ ID NO: 742936 - RNA, 19 nt, Homo sapiens
  misc_RNA (1)...(19): siRNA sense strand
agagagauagcaagauugu

SEQ ID NO: 742937 - RNA, 19 nt, Homo sapiens
  misc_RNA (1)...(19): siRNA sense strand
ggaccugaccgacgcuuac

SEQ ID NO: 742938 - RNA, 19 nt, Homo sapiens
  misc_RNA (1)...(19): siRNA sense strand
ugcaagaggaggcaauuga

SEQ ID NO: 742939 - RNA, 19 nt, Homo sapiens
  misc_RNA (1)...(19): siRNA sense strand
ggcacccacuggcucagaa

SEQ ID NO: 742940 - RNA, 19 nt, Homo sapiens
  misc_RNA (1)...(19): siRNA sense strand
aggaggcaauugacaggaa

SEQ ID NO: 742941 - RNA, 19 nt, Homo sapiens
  misc_RNA (1)...(19): siRNA sense strand
gcaagaggaggcaauugac

SEQ ID NO: 742942 - RNA, 19 nt, Homo sapiens
  misc_RNA (1)...(19): siRNA sense strand
gacaaaccuaccuaucuuc

SEQ ID NO: 742943 - RNA, 19 nt, Homo sapiens
  misc_RNA (1)...(19): siRNA sense strand
gaaugaacgcugccuacac

SEQ ID NO: 742944 - RNA, 19 nt, Homo sapiens
  misc_RNA (1)...(19): siRNA sense strand
gcagggccucgagcaguuu

SEQ ID NO: 742945 - RNA, 19 nt, Homo sapiens
  misc_RNA (1)...(19): siRNA sense strand
cggacaaaccuaccuaucu

SEQ ID NO: 742946 - RNA, 19 nt, Homo sapiens
  misc_RNA (1)...(19): siRNA sense strand
caaaccuaccuaucuucaa

SEQ ID NO: 742947 - RNA, 19 nt, Homo sapiens
  misc_RNA (1)...(19): siRNA sense strand
gagagauagcaagauugua

SEQ ID NO: 742948 - RNA, 19 nt, Homo sapiens
  misc_RNA (1)...(19): siRNA sense strand
agauagcaagauuguagua

SEQ ID NO: 742949 - RNA, 19 nt, Homo sapiens
  misc_RNA (1)...(19): siRNA sense strand
gagauagcaagauuguagu

SEQ ID NO: 742950 - RNA, 19 nt, Homo sapiens
  misc_RNA (1)...(19): siRNA sense strand
cucgagcaguuuauuaaca

SEQ ID NO: 742951 - RNA, 19 nt, Homo sapiens
  misc_RNA (1)...(19): siRNA sense strand
cccacuggcucagaaugaa

SEQ ID NO: 742952 - RNA, 19 nt, Homo sapiens
  misc_RNA (1)...(19): siRNA sense strand
acacggcaguagcugauac

SEQ ID NO: 742953 - RNA, 19 nt, Homo sapiens
  misc_RNA (1)...(19): siRNA sense strand
acaaaccuaccuaucuuca

SEQ ID NO: 742954 - RNA, 19 nt, Homo sapiens
  misc_RNA (1)...(19): siRNA sense strand
ggaggaagaugaggacgau

SEQ ID NO: 742955 - RNA, 19 nt, Homo sapiens
  misc_RNA (1)...(19): siRNA sense strand
ggauguggaugugggcuuu

SEQ ID NO: 742956 - RNA, 19 nt, Homo sapiens
  misc_RNA (1)...(19): siRNA sense strand
ccacuuccaucgcacuuau

SEQ ID NO: 742957 - RNA, 19 nt, Homo sapiens
  misc_RNA (1)...(19): siRNA sense strand
ccacagccaugaccacaca

SEQ ID NO: 742958 - RNA, 19 nt, Homo sapiens
  misc_RNA (1)...(19): siRNA sense strand
cagcguggcucccaguaug

SEQ ID NO: 742959 - RNA, 19 nt, Homo sapiens
  misc_RNA (1)...(19): siRNA sense strand
ggaaugggguggaaacaga

SEQ ID NO: 742960 - RNA, 19 nt, Homo sapiens
  misc_RNA (1)...(19): siRNA sense strand
ggucgacuaucgccacuuc

SEQ ID NO: 742961 - RNA, 19 nt, Homo sapiens
  misc_RNA (1)...(19): siRNA sense strand
gagaaugaacuugcucuga

SEQ ID NO: 742962 - RNA, 19 nt, Homo sapiens
  misc_RNA (1)...(19): siRNA sense strand
ggccagggcugacuuugag

SEQ ID NO: 742963 - RNA, 19 nt, Homo sapiens
  misc_RNA (1)...(19): siRNA sense strand
acaccggucugcagugcua

SEQ ID NO: 742964 - RNA, 19 nt, Homo sapiens
  misc_RNA (1)...(19): siRNA sense strand
cgucgugggugcugucaug

SEQ ID NO: 742965 - RNA, 19 nt, Homo sapiens
  misc_RNA (1)...(19): siRNA sense strand
gugcuaaggagcuggauga

SEQ ID NO: 742966 - RNA, 19 nt, Homo sapiens
  misc_RNA (1)...(19): siRNA sense strand
ggaugugccugcucuucuc

SEQ ID NO: 742967 - RNA, 19 nt, Homo sapiens
  misc_RNA (1)...(19): siRNA sense strand
gauggaggcaccgaucgua

SEQ ID NO: 742968 - RNA, 19 nt, Homo sapiens
  misc_RNA (1)...(19): siRNA sense strand
ggaugugggcuuugaugga

SEQ ID NO: 742969 - RNA, 19 nt, Homo sapiens
  misc_RNA (1)...(19): siRNA sense strand
ccaucaccaucguccauga

SEQ ID NO: 742970 - RNA, 19 nt, Homo sapiens
  misc_RNA (1)...(19): siRNA sense strand
cuaccucccuggugaacug

SEQ ID NO: 742971 - RNA, 19 nt, Homo sapiens
  misc_RNA (1)...(19): siRNA sense strand
aguaugaggucgacuaucg

SEQ ID NO: 742972 - RNA, 19 nt, Homo sapiens
  misc_RNA (1)...(19): siRNA sense strand
aggcaccgaucguaucuuc

SEQ ID NO: 742973 - RNA, 19 nt, Homo sapiens
  misc_RNA (1)...(19): siRNA sense strand
ggacgaugagacugaggaa

SEQ ID NO: 742974 - RNA, 19 nt, Homo sapiens
  misc_RNA (1)...(19): siRNA sense strand
gaagaugaggacgaugaga

SEQ ID NO: 742975 - RNA, 19 nt, Homo sapiens
  misc_RNA (1)...(19): siRNA sense strand
gcggucgcuucgucaagaa

SEQ ID NO: 742976 - RNA, 19 nt, Homo sapiens
  misc_RNA (1)...(19): siRNA sense strand
ucucacacguggccagcuu

SEQ ID NO: 742977 - RNA, 19 nt, Homo sapiens
  misc_RNA (1)...(19): siRNA sense strand
caccgccucugccucaugu

SEQ ID NO: 742978 - RNA, 19 nt, Homo sapiens
  misc_RNA (1)...(19): siRNA sense strand
ccggcucucugacugcauu

SEQ ID NO: 742979 - RNA, 19 nt, Homo sapiens
  misc_RNA (1)...(19): siRNA sense strand
agaaagacgggcacugcaa

SEQ ID NO: 742980 - RNA, 19 nt, Homo sapiens
  misc_RNA (1)...(19): siRNA sense strand
ggaggcaccgaucguaucu

SEQ ID NO: 742981 - RNA, 19 nt, Homo sapiens
  misc_RNA (1)...(19): siRNA sense strand
ucccacagccucaagucua

SEQ ID NO: 742982 - RNA, 19 nt, Homo sapiens
  misc_RNA (1)...(19): siRNA sense strand
gugcugucauggccaagau

SEQ ID NO: 742983 - RNA, 19 nt, Homo sapiens
  misc_RNA (1)...(19): siRNA sense strand
aggaagaugaggacgauga

SEQ ID NO: 742984 - RNA, 19 nt, Homo sapiens
  misc_RNA (1)...(19): siRNA sense strand
ggaagggaaugggguggaa

SEQ ID NO: 742985 - RNA, 19 nt, Homo sapiens
  misc_RNA (1)...(19): siRNA sense strand
ccaguaugaggucgacuau

SEQ ID NO: 742986 - RNA, 19 nt, Homo sapiens
  misc_RNA (1)...(19): siRNA sense strand
ggaagaugaggacgaugag

SEQ ID NO: 742987 - RNA, 19 nt, Homo sapiens
  misc_RNA (1)...(19): siRNA sense strand
cugccaguccucuguauga

SEQ ID NO: 742988 - RNA, 19 nt, Homo sapiens
  misc_RNA (1)...(19): siRNA sense strand
gagcugcugccaggaggaa

SEQ ID NO: 742989 - RNA, 19 nt, Homo sapiens
  misc_RNA (1)...(19): siRNA sense strand
cccacagccucaagucuag

SEQ ID NO: 742990 - RNA, 19 nt, Homo sapiens
  misc_RNA (1)...(19): siRNA sense strand
ggaggaagaugaggacgau

SEQ ID NO: 742991 - RNA, 19 nt, Homo sapiens
  misc_RNA (1)...(19): siRNA sense strand
ggauguggaugugggcuuu

SEQ ID NO: 742992 - RNA, 19 nt, Homo sapiens
  misc_RNA (1)...(19): siRNA sense strand
ccacuuccaucgcacuuau

SEQ ID NO: 742993 - RNA, 19 nt, Homo sapiens
  misc_RNA (1)...(19): siRNA sense strand
ccacagccaugaccacaca

SEQ ID NO: 742994 - RNA, 19 nt, Homo sapiens
  misc_RNA (1)...(19): siRNA sense strand
cagcguggcucccaguaug

SEQ ID NO: 742995 - RNA, 19 nt, Homo sapiens
  misc_RNA (1)...(19): siRNA sense strand
ggaaugggguggaaacaga

SEQ ID NO: 742996 - RNA, 19 nt, Homo sapiens
  misc_RNA (1)...(19): siRNA sense strand
ggucgacuaucgccacuuc

SEQ ID NO: 742997 - RNA, 19 nt, Homo sapiens
  misc_RNA (1)...(19): siRNA sense strand
gagaaugaacuugcucuga

SEQ ID NO: 742998 - RNA, 19 nt, Homo sapiens
  misc_RNA (1)...(19): siRNA sense strand
ggccagggcugacuuugag

SEQ ID NO: 742999 - RNA, 19 nt, Homo sapiens
  misc_RNA (1)...(19): siRNA sense strand
acaccggucugcagugcua

SEQ ID NO: 743000 - RNA, 19 nt, Homo sapiens
  misc_RNA (1)...(19): siRNA sense strand
cgucgugggugcugucaug

SEQ ID NO: 743001 - RNA, 19 nt, Homo sapiens
  misc_RNA (1)...(19): siRNA sense strand
gugcuaaggagcuggauga

SEQ ID NO: 743002 - RNA, 19 nt, Homo sapiens
  misc_RNA (1)...(19): siRNA sense strand
ggaugugccugcucuucuc

SEQ ID NO: 743003 - RNA, 19 nt, Homo sapiens
  misc_RNA (1)...(19): siRNA sense strand
gauggaggcaccgaucgua

SEQ ID NO: 743004 - RNA, 19 nt, Homo sapiens
  misc_RNA (1)...(19): siRNA sense strand
ggaugugggcuuugaugga

SEQ ID NO: 743005 - RNA, 19 nt, Homo sapiens
  misc_RNA (1)...(19): siRNA sense strand
ccaucaccaucguccauga

SEQ ID NO: 743006 - RNA, 19 nt, Homo sapiens
  misc_RNA (1)...(19): siRNA sense strand
cuaccucccuggugaacug

SEQ ID NO: 743007 - RNA, 19 nt, Homo sapiens
  misc_RNA (1)...(19): siRNA sense strand
aguaugaggucgacuaucg

SEQ ID NO: 743008 - RNA, 19 nt, Homo sapiens
  misc_RNA (1)...(19): siRNA sense strand
aggcaccgaucguaucuuc

SEQ ID NO: 743009 - RNA, 19 nt, Homo sapiens
  misc_RNA (1)...(19): siRNA sense strand
ggacgaugagacugaggaa

SEQ ID NO: 743010 - RNA, 19 nt, Homo sapiens
  misc_RNA (1)...(19): siRNA sense strand
gaagaugaggacgaugaga

SEQ ID NO: 743011 - RNA, 19 nt, Homo sapiens
  misc_RNA (1)...(19): siRNA sense strand
gcggucgcuucgucaagaa

SEQ ID NO: 743012 - RNA, 19 nt, Homo sapiens
  misc_RNA (1)...(19): siRNA sense strand
ucucacacguggccagcuu

SEQ ID NO: 743013 - RNA, 19 nt, Homo sapiens
  misc_RNA (1)...(19): siRNA sense strand
caccgccucugccucaugu

SEQ ID NO: 743014 - RNA, 19 nt, Homo sapiens
  misc_RNA (1)...(19): siRNA sense strand
ccggcucucugacugcauu

SEQ ID NO: 743015 - RNA, 19 nt, Homo sapiens
  misc_RNA (1)...(19): siRNA sense strand
agaaagacgggcacugcaa

SEQ ID NO: 743016 - RNA, 19 nt, Homo sapiens
  misc_RNA (1)...(19): siRNA sense strand
ggaggcaccgaucguaucu

SEQ ID NO: 743017 - RNA, 19 nt, Homo sapiens
  misc_RNA (1)...(19): siRNA sense strand
ucccacagccucaagucua

SEQ ID NO: 743018 - RNA, 19 nt, Homo sapiens
  misc_RNA (1)...(19): siRNA sense strand
gugcugucauggccaagau

SEQ ID NO: 743019 - RNA, 19 nt, Homo sapiens
  misc_RNA (1)...(19): siRNA sense strand
aggaagaugaggacgauga

SEQ ID NO: 743020 - RNA, 19 nt, Homo sapiens
  misc_RNA (1)...(19): siRNA sense strand
ggaagggaaugggguggaa

SEQ ID NO: 743021 - RNA, 19 nt, Homo sapiens
  misc_RNA (1)...(19): siRNA sense strand
ccaguaugaggucgacuau

SEQ ID NO: 743022 - RNA, 19 nt, Homo sapiens
  misc_RNA (1)...(19): siRNA sense strand
ggaagaugaggacgaugag

SEQ ID NO: 743023 - RNA, 19 nt, Homo sapiens
  misc_RNA (1)...(19): siRNA sense strand
cugccaguccucuguauga

SEQ ID NO: 743024 - RNA, 19 nt, Homo sapiens
  misc_RNA (1)...(19): siRNA sense strand
gagcugcugccaggaggaa

SEQ ID NO: 743025 - RNA, 19 nt, Homo sapiens
  misc_RNA (1)...(19): siRNA sense strand
cccacagccucaagucuag

SEQ ID NO: 743026 - RNA, 19 nt, Homo sapiens
  misc_RNA (1)...(19): siRNA sense strand
gcagcaaggugguacagaa

SEQ ID NO: 743027 - RNA, 19 nt, Homo sapiens
  misc_RNA (1)...(19): siRNA sense strand
gcaaggugguacagaaguu

SEQ ID NO: 743028 - RNA, 19 nt, Homo sapiens
  misc_RNA (1)...(19): siRNA sense strand
gcaaguacagucacaagga

SEQ ID NO: 743029 - RNA, 19 nt, Homo sapiens
  misc_RNA (1)...(19): siRNA sense strand
ucagagcccugcacuuugu

SEQ ID NO: 743030 - RNA, 19 nt, Homo sapiens
  misc_RNA (1)...(19): siRNA sense strand
gcagcaagugcccaucuuu

SEQ ID NO: 743031 - RNA, 19 nt, Homo sapiens
  misc_RNA (1)...(19): siRNA sense strand
guuggaagcugcucuaagc

SEQ ID NO: 743032 - RNA, 19 nt, Homo sapiens
  misc_RNA (1)...(19): siRNA sense strand
aaacgcaacucagcagcaa

SEQ ID NO: 743033 - RNA, 19 nt, Homo sapiens
  misc_RNA (1)...(19): siRNA sense strand
cuucagagcccugcacuuu

SEQ ID NO: 743034 - RNA, 19 nt, Homo sapiens
  misc_RNA (1)...(19): siRNA sense strand
gaaguugguccugcccuuu

SEQ ID NO: 743035 - RNA, 19 nt, Homo sapiens
  misc_RNA (1)...(19): siRNA sense strand
gauccuggcucgggaagca

SEQ ID NO: 743036 - RNA, 19 nt, Homo sapiens
  misc_RNA (1)...(19): siRNA sense strand
cgggaacgcuggcauuucu

SEQ ID NO: 743037 - RNA, 19 nt, Homo sapiens
  misc_RNA (1)...(19): siRNA sense strand
guacagucacaaggacaua

SEQ ID NO: 743038 - RNA, 19 nt, Homo sapiens
  misc_RNA (1)...(19): siRNA sense strand
uuuaugcccugccuugaga

SEQ ID NO: 743039 - RNA, 19 nt, Homo sapiens
  misc_RNA (1)...(19): siRNA sense strand
agagcuaccugaggcagaa

SEQ ID NO: 743040 - RNA, 19 nt, Homo sapiens
  misc_RNA (1)...(19): siRNA sense strand
uggaagccauugcccacuu

SEQ ID NO: 743041 - RNA, 19 nt, Homo sapiens
  misc_RNA (1)...(19): siRNA sense strand
uggcuacagucaacaucuu

SEQ ID NO: 743042 - RNA, 19 nt, Homo sapiens
  misc_RNA (1)...(19): siRNA sense strand
cagcaagugcccaucuuuc

SEQ ID NO: 743043 - RNA, 19 nt, Homo sapiens
  misc_RNA (1)...(19): siRNA sense strand
gcaaggccagaggaacuga

SEQ ID NO: 743044 - RNA, 19 nt, Homo sapiens
  misc_RNA (1)...(19): siRNA sense strand
ccuggugugugcccuggaa

SEQ ID NO: 743045 - RNA, 19 nt, Homo sapiens
  misc_RNA (1)...(19): siRNA sense strand
guucaggaaacgcaacuca

SEQ ID NO: 743046 - RNA, 19 nt, Homo sapiens
  misc_RNA (1)...(19): siRNA sense strand
ucacaaggacauaguagcu

SEQ ID NO: 743047 - RNA, 19 nt, Homo sapiens
  misc_RNA (1)...(19): siRNA sense strand
caaggugguacagaaguug

SEQ ID NO: 743048 - RNA, 19 nt, Homo sapiens
  misc_RNA (1)...(19): siRNA sense strand
ccacggcagcaucugauca

SEQ ID NO: 743049 - RNA, 19 nt, Homo sapiens
  misc_RNA (1)...(19): siRNA sense strand
gcagcaaggugguacagaa

SEQ ID NO: 743050 - RNA, 19 nt, Homo sapiens
  misc_RNA (1)...(19): siRNA sense strand
gcaaggugguacagaaguu

SEQ ID NO: 743051 - RNA, 19 nt, Homo sapiens
  misc_RNA (1)...(19): siRNA sense strand
gcaaguacagucacaagga

SEQ ID NO: 743052 - RNA, 19 nt, Homo sapiens
  misc_RNA (1)...(19): siRNA sense strand
ucagagcccugcacuuugu

SEQ ID NO: 743053 - RNA, 19 nt, Homo sapiens
  misc_RNA (1)...(19): siRNA sense strand
gcagcaagugcccaucuuu

SEQ ID NO: 743054 - RNA, 19 nt, Homo sapiens
  misc_RNA (1)...(19): siRNA sense strand
guuggaagcugcucuaagc

SEQ ID NO: 743055 - RNA, 19 nt, Homo sapiens
  misc_RNA (1)...(19): siRNA sense strand
aaacgcaacucagcagcaa

SEQ ID NO: 743056 - RNA, 19 nt, Homo sapiens
  misc_RNA (1)...(19): siRNA sense strand
cuucagagcccugcacuuu

SEQ ID NO: 743057 - RNA, 19 nt, Homo sapiens
  misc_RNA (1)...(19): siRNA sense strand
gaaguugguccugcccuuu

SEQ ID NO: 743058 - RNA, 19 nt, Homo sapiens
  misc_RNA (1)...(19): siRNA sense strand
gauccuggcucgggaagca

SEQ ID NO: 743059 - RNA, 19 nt, Homo sapiens
  misc_RNA (1)...(19): siRNA sense strand
cgggaacgcuggcauuucu

SEQ ID NO: 743060 - RNA, 19 nt, Homo sapiens
  misc_RNA (1)...(19): siRNA sense strand
guacagucacaaggacaua

SEQ ID NO: 743061 - RNA, 19 nt, Homo sapiens
  misc_RNA (1)...(19): siRNA sense strand
uuuaugcccugccuugaga

SEQ ID NO: 743062 - RNA, 19 nt, Homo sapiens
  misc_RNA (1)...(19): siRNA sense strand
agagcuaccugaggcagaa

SEQ ID NO: 743063 - RNA, 19 nt, Homo sapiens
  misc_RNA (1)...(19): siRNA sense strand
uggaagccauugcccacuu

SEQ ID NO: 743064 - RNA, 19 nt, Homo sapiens
  misc_RNA (1)...(19): siRNA sense strand
uggcuacagucaacaucuu

SEQ ID NO: 743065 - RNA, 19 nt, Homo sapiens
  misc_RNA (1)...(19): siRNA sense strand
cagcaagugcccaucuuuc

SEQ ID NO: 743066 - RNA, 19 nt, Homo sapiens
  misc_RNA (1)...(19): siRNA sense strand
gcaaggccagaggaacuga

SEQ ID NO: 743067 - RNA, 19 nt, Homo sapiens
  misc_RNA (1)...(19): siRNA sense strand
ccuggugugugcccuggaa

SEQ ID NO: 743068 - RNA, 19 nt, Homo sapiens
  misc_RNA (1)...(19): siRNA sense strand
guucaggaaacgcaacuca

SEQ ID NO: 743069 - RNA, 19 nt, Homo sapiens
  misc_RNA (1)...(19): siRNA sense strand
ucacaaggacauaguagcu

SEQ ID NO: 743070 - RNA, 19 nt, Homo sapiens
  misc_RNA (1)...(19): siRNA sense strand
caaggugguacagaaguug

SEQ ID NO: 743071 - RNA, 19 nt, Homo sapiens
  misc_RNA (1)...(19): siRNA sense strand
ccacggcagcaucugauca

SEQ ID NO: 743072 - RNA, 19 nt, Homo sapiens
  misc_RNA (1)...(19): siRNA sense strand
ugagaaagaucgagauugu

SEQ ID NO: 743073 - RNA, 19 nt, Homo sapiens
  misc_RNA (1)...(19): siRNA sense strand
ccgaggagcuuuaugagau

SEQ ID NO: 743074 - RNA, 19 nt, Homo sapiens
  misc_RNA (1)...(19): siRNA sense strand
uuuaugagaugcugaguga

SEQ ID NO: 743075 - RNA, 19 nt, Homo sapiens
  misc_RNA (1)...(19): siRNA sense strand
gcaagcaccggaaauucaa

SEQ ID NO: 743076 - RNA, 19 nt, Homo sapiens
  misc_RNA (1)...(19): siRNA sense strand
gaguuggaccugaacauga

SEQ ID NO: 743077 - RNA, 19 nt, Homo sapiens
  misc_RNA (1)...(19): siRNA sense strand
cgaggagcuuuaugagaug

SEQ ID NO: 743078 - RNA, 19 nt, Homo sapiens
  misc_RNA (1)...(19): siRNA sense strand
ucgauccgcuccuuugaug

SEQ ID NO: 743079 - RNA, 19 nt, Homo sapiens
  misc_RNA (1)...(19): siRNA sense strand
ggcaagcaccggaaauuca

SEQ ID NO: 743080 - RNA, 19 nt, Homo sapiens
  misc_RNA (1)...(19): siRNA sense strand
gggccgaguuggaccugaa

SEQ ID NO: 743081 - RNA, 19 nt, Homo sapiens
  misc_RNA (1)...(19): siRNA sense strand
ggugagaaagaucgagauu

SEQ ID NO: 743082 - RNA, 19 nt, Homo sapiens
  misc_RNA (1)...(19): siRNA sense strand
caaacucgggugaccauuc

SEQ ID NO: 743083 - RNA, 19 nt, Homo sapiens
  misc_RNA (1)...(19): siRNA sense strand
gauccgcuccuuugaugau

SEQ ID NO: 743084 - RNA, 19 nt, Homo sapiens
  misc_RNA (1)...(19): siRNA sense strand
ccaccuggcaugcaagugu

SEQ ID NO: 743085 - RNA, 19 nt, Homo sapiens
  misc_RNA (1)...(19): siRNA sense strand
aaacucgggugaccauucg

SEQ ID NO: 743086 - RNA, 19 nt, Homo sapiens
  misc_RNA (1)...(19): siRNA sense strand
ugacaagacggcacugaag

SEQ ID NO: 743087 - RNA, 19 nt, Homo sapiens
  misc_RNA (1)...(19): siRNA sense strand
gggcaagcaccggaaauuc

SEQ ID NO: 743088 - RNA, 19 nt, Homo sapiens
  misc_RNA (1)...(19): siRNA sense strand
ccacggugacgcuggaaga

SEQ ID NO: 743089 - RNA, 19 nt, Homo sapiens
  misc_RNA (1)...(19): siRNA sense strand
gaagaccaccuggcaugca

SEQ ID NO: 743090 - RNA, 19 nt, Homo sapiens
  misc_RNA (1)...(19): siRNA sense strand
aagaccaccuggcaugcaa

SEQ ID NO: 743091 - RNA, 19 nt, Homo sapiens
  misc_RNA (1)...(19): siRNA sense strand
caagggcaagcaccggaaa

SEQ ID NO: 743092 - RNA, 19 nt, Homo sapiens
  misc_RNA (1)...(19): siRNA sense strand
ucaagcacacgcaugacaa

SEQ ID NO: 743093 - RNA, 19 nt, Homo sapiens
  misc_RNA (1)...(19): siRNA sense strand
gagaaagaucgagauugug

SEQ ID NO: 743094 - RNA, 19 nt, Homo sapiens
  misc_RNA (1)...(19): siRNA sense strand
cgaguuggaccugaacaug

SEQ ID NO: 743095 - RNA, 19 nt, Homo sapiens
  misc_RNA (1)...(19): siRNA sense strand
acaagacggcacugaagga

SEQ ID NO: 743096 - RNA, 19 nt, Homo sapiens
  misc_RNA (1)...(19): siRNA sense strand
gugagaaagaucgagauug

SEQ ID NO: 743097 - RNA, 19 nt, Homo sapiens
  misc_RNA (1)...(19): siRNA sense strand
ugagaaagaucgagauugu

SEQ ID NO: 743098 - RNA, 19 nt, Homo sapiens
  misc_RNA (1)...(19): siRNA sense strand
ccgaggagcuuuaugagau

SEQ ID NO: 743099 - RNA, 19 nt, Homo sapiens
  misc_RNA (1)...(19): siRNA sense strand
uuuaugagaugcugaguga

SEQ ID NO: 743100 - RNA, 19 nt, Homo sapiens
  misc_RNA (1)...(19): siRNA sense strand
gcaagcaccggaaauucaa

SEQ ID NO: 743101 - RNA, 19 nt, Homo sapiens
  misc_RNA (1)...(19): siRNA sense strand
gaguuggaccugaacauga

SEQ ID NO: 743102 - RNA, 19 nt, Homo sapiens
  misc_RNA (1)...(19): siRNA sense strand
cgaggagcuuuaugagaug

SEQ ID NO: 743103 - RNA, 19 nt, Homo sapiens
  misc_RNA (1)...(19): siRNA sense strand
ucgauccgcuccuuugaug

SEQ ID NO: 743104 - RNA, 19 nt, Homo sapiens
  misc_RNA (1)...(19): siRNA sense strand
ggcaagcaccggaaauuca

SEQ ID NO: 743105 - RNA, 19 nt, Homo sapiens
  misc_RNA (1)...(19): siRNA sense strand
gggccgaguuggaccugaa

SEQ ID NO: 743106 - RNA, 19 nt, Homo sapiens
  misc_RNA (1)...(19): siRNA sense strand
ggugagaaagaucgagauu

SEQ ID NO: 743107 - RNA, 19 nt, Homo sapiens
  misc_RNA (1)...(19): siRNA sense strand
caaacucgggugaccauuc

SEQ ID NO: 743108 - RNA, 19 nt, Homo sapiens
  misc_RNA (1)...(19): siRNA sense strand
gauccgcuccuuugaugau

SEQ ID NO: 743109 - RNA, 19 nt, Homo sapiens
  misc_RNA (1)...(19): siRNA sense strand
ccaccuggcaugcaagugu

SEQ ID NO: 743110 - RNA, 19 nt, Homo sapiens
  misc_RNA (1)...(19): siRNA sense strand
aaacucgggugaccauucg

SEQ ID NO: 743111 - RNA, 19 nt, Homo sapiens
  misc_RNA (1)...(19): siRNA sense strand
ugacaagacggcacugaag

SEQ ID NO: 743112 - RNA, 19 nt, Homo sapiens
  misc_RNA (1)...(19): siRNA sense strand
gggcaagcaccggaaauuc

SEQ ID NO: 743113 - RNA, 19 nt, Homo sapiens
  misc_RNA (1)...(19): siRNA sense strand
ccacggugacgcuggaaga

SEQ ID NO: 743114 - RNA, 19 nt, Homo sapiens
  misc_RNA (1)...(19): siRNA sense strand
gaagaccaccuggcaugca

SEQ ID NO: 743115 - RNA, 19 nt, Homo sapiens
  misc_RNA (1)...(19): siRNA sense strand
aagaccaccuggcaugcaa

SEQ ID NO: 743116 - RNA, 19 nt, Homo sapiens
  misc_RNA (1)...(19): siRNA sense strand
caagggcaagcaccggaaa

SEQ ID NO: 743117 - RNA, 19 nt, Homo sapiens
  misc_RNA (1)...(19): siRNA sense strand
ucaagcacacgcaugacaa

SEQ ID NO: 743118 - RNA, 19 nt, Homo sapiens
  misc_RNA (1)...(19): siRNA sense strand
gagaaagaucgagauugug

SEQ ID NO: 743119 - RNA, 19 nt, Homo sapiens
  misc_RNA (1)...(19): siRNA sense strand
cgaguuggaccugaacaug

SEQ ID NO: 743120 - RNA, 19 nt, Homo sapiens
  misc_RNA (1)...(19): siRNA sense strand
acaagacggcacugaagga

SEQ ID NO: 743121 - RNA, 19 nt, Homo sapiens
  misc_RNA (1)...(19): siRNA sense strand
gugagaaagaucgagauug

SEQ ID NO: 743122 - RNA, 19 nt, Homo sapiens
  misc_RNA (1)...(19): siRNA sense strand
ugaagaaagucaugcauuu

SEQ ID NO: 743123 - RNA, 19 nt, Homo sapiens
  misc_RNA (1)...(19): siRNA sense strand
agaagaagcugaaugagaa

SEQ ID NO: 743124 - RNA, 19 nt, Homo sapiens
  misc_RNA (1)...(19): siRNA sense strand
ccaaguggcuguaaaccua

SEQ ID NO: 743125 - RNA, 19 nt, Homo sapiens
  misc_RNA (1)...(19): siRNA sense strand
gaagaaagucaugcauuua

SEQ ID NO: 743126 - RNA, 19 nt, Homo sapiens
  misc_RNA (1)...(19): siRNA sense strand
gaacaaagaagaagaagag

SEQ ID NO: 743127 - RNA, 19 nt, Homo sapiens
  misc_RNA (1)...(19): siRNA sense strand
agacacagcucaucccaaa

SEQ ID NO: 743128 - RNA, 19 nt, Homo sapiens
  misc_RNA (1)...(19): siRNA sense strand
gaagacagugugccagaua

SEQ ID NO: 743129 - RNA, 19 nt, Homo sapiens
  misc_RNA (1)...(19): siRNA sense strand
aaaccuagcugaagacaca

SEQ ID NO: 743130 - RNA, 19 nt, Homo sapiens
  misc_RNA (1)...(19): siRNA sense strand
gaaguugagaguagagaua

SEQ ID NO: 743131 - RNA, 19 nt, Homo sapiens
  misc_RNA (1)...(19): siRNA sense strand
cgaagaagaagcugaauga

SEQ ID NO: 743132 - RNA, 19 nt, Homo sapiens
  misc_RNA (1)...(19): siRNA sense strand
uuucaaagcugcacaacuu

SEQ ID NO: 743133 - RNA, 19 nt, Homo sapiens
  misc_RNA (1)...(19): siRNA sense strand
caaacuaucgcuucauuga

SEQ ID NO: 743134 - RNA, 19 nt, Homo sapiens
  misc_RNA (1)...(19): siRNA sense strand
agagagauuucagcacuua

SEQ ID NO: 743135 - RNA, 19 nt, Homo sapiens
  misc_RNA (1)...(19): siRNA sense strand
gauaaagagucagcgaaug

SEQ ID NO: 743136 - RNA, 19 nt, Homo sapiens
  misc_RNA (1)...(19): siRNA sense strand
ccaucugccuggacuauuu

SEQ ID NO: 743137 - RNA, 19 nt, Homo sapiens
  misc_RNA (1)...(19): siRNA sense strand
ugaagaagaggaccuguuu

SEQ ID NO: 743138 - RNA, 19 nt, Homo sapiens
  misc_RNA (1)...(19): siRNA sense strand
gggaaugucuccuucuaca

SEQ ID NO: 743139 - RNA, 19 nt, Homo sapiens
  misc_RNA (1)...(19): siRNA sense strand
aaacauuacugggaaguug

SEQ ID NO: 743140 - RNA, 19 nt, Homo sapiens
  misc_RNA (1)...(19): siRNA sense strand
gcacuuacccuguguucug

SEQ ID NO: 743141 - RNA, 19 nt, Homo sapiens
  misc_RNA (1)...(19): siRNA sense strand
gaagaagagacgaagaaga

SEQ ID NO: 743142 - RNA, 19 nt, Homo sapiens
  misc_RNA (1)...(19): siRNA sense strand
gggaauuacugaucguuca

SEQ ID NO: 743143 - RNA, 19 nt, Homo sapiens
  misc_RNA (1)...(19): siRNA sense strand
ugaaugagaacacguuaaa

SEQ ID NO: 743144 - RNA, 19 nt, Homo sapiens
  misc_RNA (1)...(19): siRNA sense strand
aagaagagacgaagaagaa

SEQ ID NO: 743145 - RNA, 19 nt, Homo sapiens
  misc_RNA (1)...(19): siRNA sense strand
ggaccuguuucuucagaga

SEQ ID NO: 743146 - RNA, 19 nt, Homo sapiens
  misc_RNA (1)...(19): siRNA sense strand
gaggaccuguuucuucaga

SEQ ID NO: 743147 - RNA, 19 nt, Homo sapiens
  misc_RNA (1)...(19): siRNA sense strand
ggaagggagauacgugaaa

SEQ ID NO: 743148 - RNA, 19 nt, Homo sapiens
  misc_RNA (1)...(19): siRNA sense strand
gaggacgucaugggaauua

SEQ ID NO: 743149 - RNA, 19 nt, Homo sapiens
  misc_RNA (1)...(19): siRNA sense strand
ggaaggauaagauaaagag

SEQ ID NO: 743150 - RNA, 19 nt, Homo sapiens
  misc_RNA (1)...(19): siRNA sense strand
gagauugaacaaagaagaa

SEQ ID NO: 743151 - RNA, 19 nt, Homo sapiens
  misc_RNA (1)...(19): siRNA sense strand
gggaggacgucaugggaau

SEQ ID NO: 743152 - RNA, 19 nt, Homo sapiens
  misc_RNA (1)...(19): siRNA sense strand
gaagaagaagagacgaaga

SEQ ID NO: 743153 - RNA, 19 nt, Homo sapiens
  misc_RNA (1)...(19): siRNA sense strand
gcaucugggcgauuuauug

SEQ ID NO: 743154 - RNA, 19 nt, Homo sapiens
  misc_RNA (1)...(19): siRNA sense strand
ucagaagacugcuuuugua

SEQ ID NO: 743155 - RNA, 19 nt, Homo sapiens
  misc_RNA (1)...(19): siRNA sense strand
gaagggagauacgugaaaa

SEQ ID NO: 743156 - RNA, 19 nt, Homo sapiens
  misc_RNA (1)...(19): siRNA sense strand
caaucaaacuaucgcuuca

SEQ ID NO: 743157 - RNA, 19 nt, Homo sapiens
  misc_RNA (1)...(19): siRNA sense strand
gaacucccacccagcaaga

SEQ ID NO: 743158 - RNA, 19 nt, Homo sapiens
  misc_RNA (1)...(19): siRNA sense strand
gagaacacguuaaaacuca

SEQ ID NO: 743159 - RNA, 19 nt, Homo sapiens
  misc_RNA (1)...(19): siRNA sense strand
gaacuauucccuugaagcu

SEQ ID NO: 743160 - RNA, 19 nt, Homo sapiens
  misc_RNA (1)...(19): siRNA sense strand
ccauuagcaucuuuaguca

SEQ ID NO: 743161 - RNA, 19 nt, Homo sapiens
  misc_RNA (1)...(19): siRNA sense strand
aggauaagauaaagaguca

SEQ ID NO: 743162 - RNA, 19 nt, Homo sapiens
  misc_RNA (1)...(19): siRNA sense strand
ggacugggaaugucuccuu

SEQ ID NO: 743163 - RNA, 19 nt, Homo sapiens
  misc_RNA (1)...(19): siRNA sense strand
auaaagagucagcgaauga

SEQ ID NO: 743164 - RNA, 19 nt, Homo sapiens
  misc_RNA (1)...(19): siRNA sense strand
uccaggaugugaacuauuc

SEQ ID NO: 743165 - RNA, 19 nt, Homo sapiens
  misc_RNA (1)...(19): siRNA sense strand
gaagacugcuuuuguagag

SEQ ID NO: 743166 - RNA, 19 nt, Homo sapiens
  misc_RNA (1)...(19): siRNA sense strand
uggccaagaugaagaaagu

SEQ ID NO: 743167 - RNA, 19 nt, Homo sapiens
  misc_RNA (1)...(19): siRNA sense strand
ucaccucagggaaacauua

SEQ ID NO: 743168 - RNA, 19 nt, Homo sapiens
  misc_RNA (1)...(19): siRNA sense strand
ggacauccaggaggaguug

SEQ ID NO: 743169 - RNA, 19 nt, Homo sapiens
  misc_RNA (1)...(19): siRNA sense strand
uaccauugaugaaggaaau

SEQ ID NO: 743170 - RNA, 19 nt, Homo sapiens
  misc_RNA (1)...(19): siRNA sense strand
agaaagucaugcauuuaca

SEQ ID NO: 743171 - RNA, 19 nt, Homo sapiens
  misc_RNA (1)...(19): siRNA sense strand
aagaagaagcugaaugaga

SEQ ID NO: 743172 - RNA, 19 nt, Homo sapiens
  misc_RNA (1)...(19): siRNA sense strand
gagaaucagcacggaguuu

SEQ ID NO: 743173 - RNA, 19 nt, Homo sapiens
  misc_RNA (1)...(19): siRNA sense strand
gugggcaucugggcgauuu

SEQ ID NO: 743174 - RNA, 19 nt, Homo sapiens
  misc_RNA (1)...(19): siRNA sense strand
ugugaacuauucccuugaa

SEQ ID NO: 743175 - RNA, 19 nt, Homo sapiens
  misc_RNA (1)...(19): siRNA sense strand
ggagugcugcuggcuauug

SEQ ID NO: 743176 - RNA, 19 nt, Homo sapiens
  misc_RNA (1)...(19): siRNA sense strand
aggaaaugcuaaagcgauu

SEQ ID NO: 743177 - RNA, 19 nt, Homo sapiens
  misc_RNA (1)...(19): siRNA sense strand
aagaagaagagacgaagaa

SEQ ID NO: 743178 - RNA, 19 nt, Homo sapiens
  misc_RNA (1)...(19): siRNA sense strand
gaaacauuacugggaaguu

SEQ ID NO: 743179 - RNA, 19 nt, Homo sapiens
  misc_RNA (1)...(19): siRNA sense strand
gauuccaaguggcuguaaa

SEQ ID NO: 743180 - RNA, 19 nt, Homo sapiens
  misc_RNA (1)...(19): siRNA sense strand
uggccaggcugacugagaa

SEQ ID NO: 743181 - RNA, 19 nt, Homo sapiens
  misc_RNA (1)...(19): siRNA sense strand
gaagaagaggaccuguuuc

SEQ ID NO: 743182 - RNA, 19 nt, Homo sapiens
  misc_RNA (1)...(19): siRNA sense strand
gaauuacugaucguucaaa

SEQ ID NO: 743183 - RNA, 19 nt, Homo sapiens
  misc_RNA (1)...(19): siRNA sense strand
cccuggagcugcuucagaa

SEQ ID NO: 743184 - RNA, 19 nt, Homo sapiens
  misc_RNA (1)...(19): siRNA sense strand
gcugaaugagaacacguua

SEQ ID NO: 743185 - RNA, 19 nt, Homo sapiens
  misc_RNA (1)...(19): siRNA sense strand
ggaauuacugaucguucaa

SEQ ID NO: 743186 - RNA, 19 nt, Homo sapiens
  misc_RNA (1)...(19): siRNA sense strand
gcuaaagcgauuccaagug

SEQ ID NO: 743187 - RNA, 19 nt, Homo sapiens
  misc_RNA (1)...(19): siRNA sense strand
gcacggaguuuucaaagcu

SEQ ID NO: 743188 - RNA, 19 nt, Homo sapiens
  misc_RNA (1)...(19): siRNA sense strand
cugggaaugucuccuucua

SEQ ID NO: 743189 - RNA, 19 nt, Homo sapiens
  misc_RNA (1)...(19): siRNA sense strand
cuguaaaccuagcugaaga

SEQ ID NO: 743190 - RNA, 19 nt, Homo sapiens
  misc_RNA (1)...(19): siRNA sense strand
gaaagucaugcauuuacag

SEQ ID NO: 743191 - RNA, 19 nt, Homo sapiens
  misc_RNA (1)...(19): siRNA sense strand
agacgaagaagaagcugaa

SEQ ID NO: 743192 - RNA, 19 nt, Homo sapiens
  misc_RNA (1)...(19): siRNA sense strand
ugaguccauuagcaucuuu

SEQ ID NO: 743193 - RNA, 19 nt, Homo sapiens
  misc_RNA (1)...(19): siRNA sense strand
acaguggaaggauaagaua

SEQ ID NO: 743194 - RNA, 19 nt, Homo sapiens
  misc_RNA (1)...(19): siRNA sense strand
gugaagaacgccacacagu

SEQ ID NO: 743195 - RNA, 19 nt, Homo sapiens
  misc_RNA (1)...(19): siRNA sense strand
ugccagauaccauugauga

SEQ ID NO: 743196 - RNA, 19 nt, Homo sapiens
  misc_RNA (1)...(19): siRNA sense strand
ucagagauugaacaaagaa

SEQ ID NO: 743197 - RNA, 19 nt, Homo sapiens
  misc_RNA (1)...(19): siRNA sense strand
guggaaggauaagauaaag

SEQ ID NO: 743198 - RNA, 19 nt, Homo sapiens
  misc_RNA (1)...(19): siRNA sense strand
cgagugcggccacaacuuc

SEQ ID NO: 743199 - RNA, 19 nt, Homo sapiens
  misc_RNA (1)...(19): siRNA sense strand
uagagagauuucagcacuu

SEQ ID NO: 743200 - RNA, 19 nt, Homo sapiens
  misc_RNA (1)...(19): siRNA sense strand
agucaugcauuuacaggau

SEQ ID NO: 743201 - RNA, 19 nt, Homo sapiens
  misc_RNA (1)...(19): siRNA sense strand
ccagauaccauugaugaag

SEQ ID NO: 743202 - RNA, 19 nt, Homo sapiens
  misc_RNA (1)...(19): siRNA sense strand
aucaaacuaucgcuucauu

SEQ ID NO: 743203 - RNA, 19 nt, Homo sapiens
  misc_RNA (1)...(19): siRNA sense strand
gauugaacaaagaagaaga

SEQ ID NO: 743204 - RNA, 19 nt, Homo sapiens
  misc_RNA (1)...(19): siRNA sense strand
gagugcugcuggcuauugg

SEQ ID NO: 743205 - RNA, 19 nt, Homo sapiens
  misc_RNA (1)...(19): siRNA sense strand
gccaagaugaagaaaguca

SEQ ID NO: 743206 - RNA, 19 nt, Homo sapiens
  misc_RNA (1)...(19): siRNA sense strand
cagcaucagccaguucuug

SEQ ID NO: 743207 - RNA, 19 nt, Homo sapiens
  misc_RNA (1)...(19): siRNA sense strand
ugaagacagugugccagau

SEQ ID NO: 743208 - RNA, 19 nt, Homo sapiens
  misc_RNA (1)...(19): siRNA sense strand
uugaagcugugaaggugaa

SEQ ID NO: 743209 - RNA, 19 nt, Homo sapiens
  misc_RNA (1)...(19): siRNA sense strand
gaagaagaagcugaaugag

SEQ ID NO: 743210 - RNA, 19 nt, Homo sapiens
  misc_RNA (1)...(19): siRNA sense strand
ggaaguugagaguagagau

SEQ ID NO: 743211 - RNA, 19 nt, Homo sapiens
  misc_RNA (1)...(19): siRNA sense strand
acugggaaguugagaguag

SEQ ID NO: 743212 - RNA, 19 nt, Homo sapiens
  misc_RNA (1)...(19): siRNA sense strand
aguggaaggauaagauaaa

SEQ ID NO: 743213 - RNA, 19 nt, Homo sapiens
  misc_RNA (1)...(19): siRNA sense strand
ggaggacgucaugggaauu

SEQ ID NO: 743214 - RNA, 19 nt, Homo sapiens
  misc_RNA (1)...(19): siRNA sense strand
gcuguaaaccuagcugaag

SEQ ID NO: 743215 - RNA, 19 nt, Homo sapiens
  misc_RNA (1)...(19): siRNA sense strand
agagauugaacaaagaaga

SEQ ID NO: 743216 - RNA, 19 nt, Homo sapiens
  misc_RNA (1)...(19): siRNA sense strand
uccauuagcaucuuuaguc

SEQ ID NO: 743217 - RNA, 19 nt, Homo sapiens
  misc_RNA (1)...(19): siRNA sense strand
gaucgugggacugggaaug

SEQ ID NO: 743218 - RNA, 19 nt, Homo sapiens
  misc_RNA (1)...(19): siRNA sense strand
uuggagugcugcuggcuau

SEQ ID NO: 743219 - RNA, 19 nt, Homo sapiens
  misc_RNA (1)...(19): siRNA sense strand
agucagcgaaugagaauca

SEQ ID NO: 743220 - RNA, 19 nt, Homo sapiens
  misc_RNA (1)...(19): siRNA sense strand
aagaaagucaugcauuuac

SEQ ID NO: 743221 - RNA, 19 nt, Homo sapiens
  misc_RNA (1)...(19): siRNA sense strand
gaaggauaagauaaagagu

SEQ ID NO: 743222 - RNA, 19 nt, Homo sapiens
  misc_RNA (1)...(19): siRNA sense strand
ugaagaaagucaugcauuu

SEQ ID NO: 743223 - RNA, 19 nt, Homo sapiens
  misc_RNA (1)...(19): siRNA sense strand
agaagaagcugaaugagaa

SEQ ID NO: 743224 - RNA, 19 nt, Homo sapiens
  misc_RNA (1)...(19): siRNA sense strand
ccaaguggcuguaaaccua

SEQ ID NO: 743225 - RNA, 19 nt, Homo sapiens
  misc_RNA (1)...(19): siRNA sense strand
gaagaaagucaugcauuua

SEQ ID NO: 743226 - RNA, 19 nt, Homo sapiens
  misc_RNA (1)...(19): siRNA sense strand
gaacaaagaagaagaagag

SEQ ID NO: 743227 - RNA, 19 nt, Homo sapiens
  misc_RNA (1)...(19): siRNA sense strand
agacacagcucaucccaaa

SEQ ID NO: 743228 - RNA, 19 nt, Homo sapiens
  misc_RNA (1)...(19): siRNA sense strand
gaagacagugugccagaua

SEQ ID NO: 743229 - RNA, 19 nt, Homo sapiens
  misc_RNA (1)...(19): siRNA sense strand
aaaccuagcugaagacaca

SEQ ID NO: 743230 - RNA, 19 nt, Homo sapiens
  misc_RNA (1)...(19): siRNA sense strand
gaaguugagaguagagaua

SEQ ID NO: 743231 - RNA, 19 nt, Homo sapiens
  misc_RNA (1)...(19): siRNA sense strand
cgaagaagaagcugaauga

SEQ ID NO: 743232 - RNA, 19 nt, Homo sapiens
  misc_RNA (1)...(19): siRNA sense strand
uuucaaagcugcacaacuu

SEQ ID NO: 743233 - RNA, 19 nt, Homo sapiens
  misc_RNA (1)...(19): siRNA sense strand
caaacuaucgcuucauuga

SEQ ID NO: 743234 - RNA, 19 nt, Homo sapiens
  misc_RNA (1)...(19): siRNA sense strand
agagagauuucagcacuua

SEQ ID NO: 743235 - RNA, 19 nt, Homo sapiens
  misc_RNA (1)...(19): siRNA sense strand
gauaaagagucagcgaaug

SEQ ID NO: 743236 - RNA, 19 nt, Homo sapiens
  misc_RNA (1)...(19): siRNA sense strand
ccaucugccuggacuauuu

SEQ ID NO: 743237 - RNA, 19 nt, Homo sapiens
  misc_RNA (1)...(19): siRNA sense strand
ugaagaagaggaccuguuu

SEQ ID NO: 743238 - RNA, 19 nt, Homo sapiens
  misc_RNA (1)...(19): siRNA sense strand
gggaaugucuccuucuaca

SEQ ID NO: 743239 - RNA, 19 nt, Homo sapiens
  misc_RNA (1)...(19): siRNA sense strand
aaacauuacugggaaguug

SEQ ID NO: 743240 - RNA, 19 nt, Homo sapiens
  misc_RNA (1)...(19): siRNA sense strand
gcacuuacccuguguucug

SEQ ID NO: 743241 - RNA, 19 nt, Homo sapiens
  misc_RNA (1)...(19): siRNA sense strand
gaagaagagacgaagaaga

SEQ ID NO: 743242 - RNA, 19 nt, Homo sapiens
  misc_RNA (1)...(19): siRNA sense strand
gggaauuacugaucguuca

SEQ ID NO: 743243 - RNA, 19 nt, Homo sapiens
  misc_RNA (1)...(19): siRNA sense strand
ugaaugagaacacguuaaa

SEQ ID NO: 743244 - RNA, 19 nt, Homo sapiens
  misc_RNA (1)...(19): siRNA sense strand
aagaagagacgaagaagaa

SEQ ID NO: 743245 - RNA, 19 nt, Homo sapiens
  misc_RNA (1)...(19): siRNA sense strand
ggaccuguuucuucagaga

SEQ ID NO: 743246 - RNA, 19 nt, Homo sapiens
  misc_RNA (1)...(19): siRNA sense strand
gaggaccuguuucuucaga

SEQ ID NO: 743247 - RNA, 19 nt, Homo sapiens
  misc_RNA (1)...(19): siRNA sense strand
ggaagggagauacgugaaa

SEQ ID NO: 743248 - RNA, 19 nt, Homo sapiens
  misc_RNA (1)...(19): siRNA sense strand
gaggacgucaugggaauua

SEQ ID NO: 743249 - RNA, 19 nt, Homo sapiens
  misc_RNA (1)...(19): siRNA sense strand
ggaaggauaagauaaagag

SEQ ID NO: 743250 - RNA, 19 nt, Homo sapiens
  misc_RNA (1)...(19): siRNA sense strand
gagauugaacaaagaagaa

SEQ ID NO: 743251 - RNA, 19 nt, Homo sapiens
  misc_RNA (1)...(19): siRNA sense strand
gggaggacgucaugggaau

SEQ ID NO: 743252 - RNA, 19 nt, Homo sapiens
  misc_RNA (1)...(19): siRNA sense strand
gaagaagaagagacgaaga

SEQ ID NO: 743253 - RNA, 19 nt, Homo sapiens
  misc_RNA (1)...(19): siRNA sense strand
gcaucugggcgauuuauug

SEQ ID NO: 743254 - RNA, 19 nt, Homo sapiens
  misc_RNA (1)...(19): siRNA sense strand
ucagaagacugcuuuugua

SEQ ID NO: 743255 - RNA, 19 nt, Homo sapiens
  misc_RNA (1)...(19): siRNA sense strand
gaagggagauacgugaaaa

SEQ ID NO: 743256 - RNA, 19 nt, Homo sapiens
  misc_RNA (1)...(19): siRNA sense strand
caaucaaacuaucgcuuca

SEQ ID NO: 743257 - RNA, 19 nt, Homo sapiens
  misc_RNA (1)...(19): siRNA sense strand
gaacucccacccagcaaga

SEQ ID NO: 743258 - RNA, 19 nt, Homo sapiens
  misc_RNA (1)...(19): siRNA sense strand
gagaacacguuaaaacuca

SEQ ID NO: 743259 - RNA, 19 nt, Homo sapiens
  misc_RNA (1)...(19): siRNA sense strand
gaacuauucccuugaagcu

SEQ ID NO: 743260 - RNA, 19 nt, Homo sapiens
  misc_RNA (1)...(19): siRNA sense strand
ccauuagcaucuuuaguca

SEQ ID NO: 743261 - RNA, 19 nt, Homo sapiens
  misc_RNA (1)...(19): siRNA sense strand
aggauaagauaaagaguca

SEQ ID NO: 743262 - RNA, 19 nt, Homo sapiens
  misc_RNA (1)...(19): siRNA sense strand
ggacugggaaugucuccuu

SEQ ID NO: 743263 - RNA, 19 nt, Homo sapiens
  misc_RNA (1)...(19): siRNA sense strand
auaaagagucagcgaauga

SEQ ID NO: 743264 - RNA, 19 nt, Homo sapiens
  misc_RNA (1)...(19): siRNA sense strand
uccaggaugugaacuauuc

SEQ ID NO: 743265 - RNA, 19 nt, Homo sapiens
  misc_RNA (1)...(19): siRNA sense strand
gaagacugcuuuuguagag

SEQ ID NO: 743266 - RNA, 19 nt, Homo sapiens
  misc_RNA (1)...(19): siRNA sense strand
uggccaagaugaagaaagu

SEQ ID NO: 743267 - RNA, 19 nt, Homo sapiens
  misc_RNA (1)...(19): siRNA sense strand
ucaccucagggaaacauua

SEQ ID NO: 743268 - RNA, 19 nt, Homo sapiens
  misc_RNA (1)...(19): siRNA sense strand
ggacauccaggaggaguug

SEQ ID NO: 743269 - RNA, 19 nt, Homo sapiens
  misc_RNA (1)...(19): siRNA sense strand
uaccauugaugaaggaaau

SEQ ID NO: 743270 - RNA, 19 nt, Homo sapiens
  misc_RNA (1)...(19): siRNA sense strand
agaaagucaugcauuuaca

SEQ ID NO: 743271 - RNA, 19 nt, Homo sapiens
  misc_RNA (1)...(19): siRNA sense strand
aagaagaagcugaaugaga

SEQ ID NO: 743272 - RNA, 19 nt, Homo sapiens
  misc_RNA (1)...(19): siRNA sense strand
gagaaucagcacggaguuu

SEQ ID NO: 743273 - RNA, 19 nt, Homo sapiens
  misc_RNA (1)...(19): siRNA sense strand
gugggcaucugggcgauuu

SEQ ID NO: 743274 - RNA, 19 nt, Homo sapiens
  misc_RNA (1)...(19): siRNA sense strand
ugugaacuauucccuugaa

SEQ ID NO: 743275 - RNA, 19 nt, Homo sapiens
  misc_RNA (1)...(19): siRNA sense strand
ggagugcugcuggcuauug

SEQ ID NO: 743276 - RNA, 19 nt, Homo sapiens
  misc_RNA (1)...(19): siRNA sense strand
aggaaaugcuaaagcgauu

SEQ ID NO: 743277 - RNA, 19 nt, Homo sapiens
  misc_RNA (1)...(19): siRNA sense strand
aagaagaagagacgaagaa

SEQ ID NO: 743278 - RNA, 19 nt, Homo sapiens
  misc_RNA (1)...(19): siRNA sense strand
gaaacauuacugggaaguu

SEQ ID NO: 743279 - RNA, 19 nt, Homo sapiens
  misc_RNA (1)...(19): siRNA sense strand
gauuccaaguggcuguaaa

SEQ ID NO: 743280 - RNA, 19 nt, Homo sapiens
  misc_RNA (1)...(19): siRNA sense strand
uggccaggcugacugagaa

SEQ ID NO: 743281 - RNA, 19 nt, Homo sapiens
  misc_RNA (1)...(19): siRNA sense strand
gaagaagaggaccuguuuc

SEQ ID NO: 743282 - RNA, 19 nt, Homo sapiens
  misc_RNA (1)...(19): siRNA sense strand
gaauuacugaucguucaaa

SEQ ID NO: 743283 - RNA, 19 nt, Homo sapiens
  misc_RNA (1)...(19): siRNA sense strand
cccuggagcugcuucagaa

SEQ ID NO: 743284 - RNA, 19 nt, Homo sapiens
  misc_RNA (1)...(19): siRNA sense strand
gcugaaugagaacacguua

SEQ ID NO: 743285 - RNA, 19 nt, Homo sapiens
  misc_RNA (1)...(19): siRNA sense strand
ggaauuacugaucguucaa

SEQ ID NO: 743286 - RNA, 19 nt, Homo sapiens
  misc_RNA (1)...(19): siRNA sense strand
gcuaaagcgauuccaagug

SEQ ID NO: 743287 - RNA, 19 nt, Homo sapiens
  misc_RNA (1)...(19): siRNA sense strand
gcacggaguuuucaaagcu

SEQ ID NO: 743288 - RNA, 19 nt, Homo sapiens
  misc_RNA (1)...(19): siRNA sense strand
cugggaaugucuccuucua

SEQ ID NO: 743289 - RNA, 19 nt, Homo sapiens
  misc_RNA (1)...(19): siRNA sense strand
cuguaaaccuagcugaaga

SEQ ID NO: 743290 - RNA, 19 nt, Homo sapiens
  misc_RNA (1)...(19): siRNA sense strand
gaaagucaugcauuuacag

SEQ ID NO: 743291 - RNA, 19 nt, Homo sapiens
  misc_RNA (1)...(19): siRNA sense strand
agacgaagaagaagcugaa

SEQ ID NO: 743292 - RNA, 19 nt, Homo sapiens
  misc_RNA (1)...(19): siRNA sense strand
ugaguccauuagcaucuuu

SEQ ID NO: 743293 - RNA, 19 nt, Homo sapiens
  misc_RNA (1)...(19): siRNA sense strand
acaguggaaggauaagaua

SEQ ID NO: 743294 - RNA, 19 nt, Homo sapiens
  misc_RNA (1)...(19): siRNA sense strand
gugaagaacgccacacagu

SEQ ID NO: 743295 - RNA, 19 nt, Homo sapiens
  misc_RNA (1)...(19): siRNA sense strand
ugccagauaccauugauga

SEQ ID NO: 743296 - RNA, 19 nt, Homo sapiens
  misc_RNA (1)...(19): siRNA sense strand
ucagagauugaacaaagaa

SEQ ID NO: 743297 - RNA, 19 nt, Homo sapiens
  misc_RNA (1)...(19): siRNA sense strand
guggaaggauaagauaaag

SEQ ID NO: 743298 - RNA, 19 nt, Homo sapiens
  misc_RNA (1)...(19): siRNA sense strand
cgagugcggccacaacuuc

SEQ ID NO: 743299 - RNA, 19 nt, Homo sapiens
  misc_RNA (1)...(19): siRNA sense strand
uagagagauuucagcacuu

SEQ ID NO: 743300 - RNA, 19 nt, Homo sapiens
  misc_RNA (1)...(19): siRNA sense strand
agucaugcauuuacaggau

SEQ ID NO: 743301 - RNA, 19 nt, Homo sapiens
  misc_RNA (1)...(19): siRNA sense strand
ccagauaccauugaugaag

SEQ ID NO: 743302 - RNA, 19 nt, Homo sapiens
  misc_RNA (1)...(19): siRNA sense strand
aucaaacuaucgcuucauu

SEQ ID NO: 743303 - RNA, 19 nt, Homo sapiens
  misc_RNA (1)...(19): siRNA sense strand
gauugaacaaagaagaaga

SEQ ID NO: 743304 - RNA, 19 nt, Homo sapiens
  misc_RNA (1)...(19): siRNA sense strand
gagugcugcuggcuauugg

SEQ ID NO: 743305 - RNA, 19 nt, Homo sapiens
  misc_RNA (1)...(19): siRNA sense strand
gccaagaugaagaaaguca

SEQ ID NO: 743306 - RNA, 19 nt, Homo sapiens
  misc_RNA (1)...(19): siRNA sense strand
cagcaucagccaguucuug

SEQ ID NO: 743307 - RNA, 19 nt, Homo sapiens
  misc_RNA (1)...(19): siRNA sense strand
ugaagacagugugccagau

SEQ ID NO: 743308 - RNA, 19 nt, Homo sapiens
  misc_RNA (1)...(19): siRNA sense strand
uugaagcugugaaggugaa

SEQ ID NO: 743309 - RNA, 19 nt, Homo sapiens
  misc_RNA (1)...(19): siRNA sense strand
gaagaagaagcugaaugag

SEQ ID NO: 743310 - RNA, 19 nt, Homo sapiens
  misc_RNA (1)...(19): siRNA sense strand
ggaaguugagaguagagau

SEQ ID NO: 743311 - RNA, 19 nt, Homo sapiens
  misc_RNA (1)...(19): siRNA sense strand
acugggaaguugagaguag

SEQ ID NO: 743312 - RNA, 19 nt, Homo sapiens
  misc_RNA (1)...(19): siRNA sense strand
aguggaaggauaagauaaa

SEQ ID NO: 743313 - RNA, 19 nt, Homo sapiens
  misc_RNA (1)...(19): siRNA sense strand
ggaggacgucaugggaauu

SEQ ID NO: 743314 - RNA, 19 nt, Homo sapiens
  misc_RNA (1)...(19): siRNA sense strand
gcuguaaaccuagcugaag

SEQ ID NO: 743315 - RNA, 19 nt, Homo sapiens
  misc_RNA (1)...(19): siRNA sense strand
agagauugaacaaagaaga

SEQ ID NO: 743316 - RNA, 19 nt, Homo sapiens
  misc_RNA (1)...(19): siRNA sense strand
uccauuagcaucuuuaguc

SEQ ID NO: 743317 - RNA, 19 nt, Homo sapiens
  misc_RNA (1)...(19): siRNA sense strand
gaucgugggacugggaaug

SEQ ID NO: 743318 - RNA, 19 nt, Homo sapiens
  misc_RNA (1)...(19): siRNA sense strand
uuggagugcugcuggcuau

SEQ ID NO: 743319 - RNA, 19 nt, Homo sapiens
  misc_RNA (1)...(19): siRNA sense strand
agucagcgaaugagaauca

SEQ ID NO: 743320 - RNA, 19 nt, Homo sapiens
  misc_RNA (1)...(19): siRNA sense strand
aagaaagucaugcauuuac

SEQ ID NO: 743321 - RNA, 19 nt, Homo sapiens
  misc_RNA (1)...(19): siRNA sense strand
gaaggauaagauaaagagu

SEQ ID NO: 743322 - RNA, 19 nt, Homo sapiens
  misc_RNA (1)...(19): siRNA sense strand
gcaaugcacugacuuauga

SEQ ID NO: 743323 - RNA, 19 nt, Homo sapiens
  misc_RNA (1)...(19): siRNA sense strand
gacaauagcucucuggaau

SEQ ID NO: 743324 - RNA, 19 nt, Homo sapiens
  misc_RNA (1)...(19): siRNA sense strand
gcaaggcuguuaucaaaga

SEQ ID NO: 743325 - RNA, 19 nt, Homo sapiens
  misc_RNA (1)...(19): siRNA sense strand
ggagauggcucagaaguug

SEQ ID NO: 743326 - RNA, 19 nt, Homo sapiens
  misc_RNA (1)...(19): siRNA sense strand
gaaacgagccaacuacuug

SEQ ID NO: 743327 - RNA, 19 nt, Homo sapiens
  misc_RNA (1)...(19): siRNA sense strand
caauagcucucuggaauuu

SEQ ID NO: 743328 - RNA, 19 nt, Homo sapiens
  misc_RNA (1)...(19): siRNA sense strand
ggauaaguguaacccuuua

SEQ ID NO: 743329 - RNA, 19 nt, Homo sapiens
  misc_RNA (1)...(19): siRNA sense strand
caagagagccuacgcagaa

SEQ ID NO: 743330 - RNA, 19 nt, Homo sapiens
  misc_RNA (1)...(19): siRNA sense strand
cagcuaaacucaaccagaa

SEQ ID NO: 743331 - RNA, 19 nt, Homo sapiens
  misc_RNA (1)...(19): siRNA sense strand
ggccagaucuuuauuucuu

SEQ ID NO: 743332 - RNA, 19 nt, Homo sapiens
  misc_RNA (1)...(19): siRNA sense strand
acauaaagcugccauugaa

SEQ ID NO: 743333 - RNA, 19 nt, Homo sapiens
  misc_RNA (1)...(19): siRNA sense strand
gcagguggccagaucuuua

SEQ ID NO: 743334 - RNA, 19 nt, Homo sapiens
  misc_RNA (1)...(19): siRNA sense strand
ggaaucaaguccaacugaa

SEQ ID NO: 743335 - RNA, 19 nt, Homo sapiens
  misc_RNA (1)...(19): siRNA sense strand
ccuaggaguuugcuacaua

SEQ ID NO: 743336 - RNA, 19 nt, Homo sapiens
  misc_RNA (1)...(19): siRNA sense strand
acaaugcccugaaucuuaa

SEQ ID NO: 743337 - RNA, 19 nt, Homo sapiens
  misc_RNA (1)...(19): siRNA sense strand
ggcacgaucugacuuauau

SEQ ID NO: 743338 - RNA, 19 nt, Homo sapiens
  misc_RNA (1)...(19): siRNA sense strand
gcuccagaguuuccuauuu

SEQ ID NO: 743339 - RNA, 19 nt, Homo sapiens
  misc_RNA (1)...(19): siRNA sense strand
cugcaaggcuguuaucaaa

SEQ ID NO: 743340 - RNA, 19 nt, Homo sapiens
  misc_RNA (1)...(19): siRNA sense strand
aagcagaacugguugauuc

SEQ ID NO: 743341 - RNA, 19 nt, Homo sapiens
  misc_RNA (1)...(19): siRNA sense strand
cacaaugcccugaaucuua

SEQ ID NO: 743342 - RNA, 19 nt, Homo sapiens
  misc_RNA (1)...(19): siRNA sense strand
ggaccaaaccaguuaaaga

SEQ ID NO: 743343 - RNA, 19 nt, Homo sapiens
  misc_RNA (1)...(19): siRNA sense strand
gaaaauacagagcuucuua

SEQ ID NO: 743344 - RNA, 19 nt, Homo sapiens
  misc_RNA (1)...(19): siRNA sense strand
gaacucaauuuccuguauc

SEQ ID NO: 743345 - RNA, 19 nt, Homo sapiens
  misc_RNA (1)...(19): siRNA sense strand
ccauugaagucuacaagaa

SEQ ID NO: 743346 - RNA, 19 nt, Homo sapiens
  misc_RNA (1)...(19): siRNA sense strand
gaucagccauaaccuagga

SEQ ID NO: 743347 - RNA, 19 nt, Homo sapiens
  misc_RNA (1)...(19): siRNA sense strand
gaaggcauuugaacaucuu

SEQ ID NO: 743348 - RNA, 19 nt, Homo sapiens
  misc_RNA (1)...(19): siRNA sense strand
ggacaaggccauugaaguc

SEQ ID NO: 743349 - RNA, 19 nt, Homo sapiens
  misc_RNA (1)...(19): siRNA sense strand
acauauaccugaagcaguu

SEQ ID NO: 743350 - RNA, 19 nt, Homo sapiens
  misc_RNA (1)...(19): siRNA sense strand
agaaggaaauauccaagaa

SEQ ID NO: 743351 - RNA, 19 nt, Homo sapiens
  misc_RNA (1)...(19): siRNA sense strand
auacagagcuucuuacaac

SEQ ID NO: 743352 - RNA, 19 nt, Homo sapiens
  misc_RNA (1)...(19): siRNA sense strand
ucaaagaacagcuucaaga

SEQ ID NO: 743353 - RNA, 19 nt, Homo sapiens
  misc_RNA (1)...(19): siRNA sense strand
ggagaucagccauaaccua

SEQ ID NO: 743354 - RNA, 19 nt, Homo sapiens
  misc_RNA (1)...(19): siRNA sense strand
agaacgcccuggcccaaua

SEQ ID NO: 743355 - RNA, 19 nt, Homo sapiens
  misc_RNA (1)...(19): siRNA sense strand
gaaucaaguccaacugaaa

SEQ ID NO: 743356 - RNA, 19 nt, Homo sapiens
  misc_RNA (1)...(19): siRNA sense strand
ccagaaagauugggagauc

SEQ ID NO: 743357 - RNA, 19 nt, Homo sapiens
  misc_RNA (1)...(19): siRNA sense strand
gaccaaaccaguuaaagau

SEQ ID NO: 743358 - RNA, 19 nt, Homo sapiens
  misc_RNA (1)...(19): siRNA sense strand
cagagcuucuuacaacuuu

SEQ ID NO: 743359 - RNA, 19 nt, Homo sapiens
  misc_RNA (1)...(19): siRNA sense strand
cgaucugacuuauauaaug

SEQ ID NO: 743360 - RNA, 19 nt, Homo sapiens
  misc_RNA (1)...(19): siRNA sense strand
caagaccaguugcacaaug

SEQ ID NO: 743361 - RNA, 19 nt, Homo sapiens
  misc_RNA (1)...(19): siRNA sense strand
cauuauauccggaaagauu

SEQ ID NO: 743362 - RNA, 19 nt, Homo sapiens
  misc_RNA (1)...(19): siRNA sense strand
gugaauaugcuaucuaugu

SEQ ID NO: 743363 - RNA, 19 nt, Homo sapiens
  misc_RNA (1)...(19): siRNA sense strand
ucaagagacucagggauug

SEQ ID NO: 743364 - RNA, 19 nt, Homo sapiens
  misc_RNA (1)...(19): siRNA sense strand
caagaaagcaguggaguuc

SEQ ID NO: 743365 - RNA, 19 nt, Homo sapiens
  misc_RNA (1)...(19): siRNA sense strand
ggaauuugacucugagaug

SEQ ID NO: 743366 - RNA, 19 nt, Homo sapiens
  misc_RNA (1)...(19): siRNA sense strand
gaucugacuuauauaaugc

SEQ ID NO: 743367 - RNA, 19 nt, Homo sapiens
  misc_RNA (1)...(19): siRNA sense strand
gaaagucagccuacucaag

SEQ ID NO: 743368 - RNA, 19 nt, Homo sapiens
  misc_RNA (1)...(19): siRNA sense strand
gaaggaaauauccaagaau

SEQ ID NO: 743369 - RNA, 19 nt, Homo sapiens
  misc_RNA (1)...(19): siRNA sense strand
ggacaauagcucucuggaa

SEQ ID NO: 743370 - RNA, 19 nt, Homo sapiens
  misc_RNA (1)...(19): siRNA sense strand
gcauuuaccagaaggcauu

SEQ ID NO: 743371 - RNA, 19 nt, Homo sapiens
  misc_RNA (1)...(19): siRNA sense strand
aagcugccauugaaguaua

SEQ ID NO: 743372 - RNA, 19 nt, Homo sapiens
  misc_RNA (1)...(19): siRNA sense strand
uaaagcugccauugaagua

SEQ ID NO: 743373 - RNA, 19 nt, Homo sapiens
  misc_RNA (1)...(19): siRNA sense strand
ccagacaugugcaguucuu

SEQ ID NO: 743374 - RNA, 19 nt, Homo sapiens
  misc_RNA (1)...(19): siRNA sense strand
aguuaaagaucccaaauca

SEQ ID NO: 743375 - RNA, 19 nt, Homo sapiens
  misc_RNA (1)...(19): siRNA sense strand
aaacucaaccagaaagauu

SEQ ID NO: 743376 - RNA, 19 nt, Homo sapiens
  misc_RNA (1)...(19): siRNA sense strand
acuuacagcucggcauuua

SEQ ID NO: 743377 - RNA, 19 nt, Homo sapiens
  misc_RNA (1)...(19): siRNA sense strand
caucagaacaaauaagaga

SEQ ID NO: 743378 - RNA, 19 nt, Homo sapiens
  misc_RNA (1)...(19): siRNA sense strand
gugugaauaugcuaucuau

SEQ ID NO: 743379 - RNA, 19 nt, Homo sapiens
  misc_RNA (1)...(19): siRNA sense strand
gaagaaagucagccuacuc

SEQ ID NO: 743380 - RNA, 19 nt, Homo sapiens
  misc_RNA (1)...(19): siRNA sense strand
gcacaaugcccugaaucuu

SEQ ID NO: 743381 - RNA, 19 nt, Homo sapiens
  misc_RNA (1)...(19): siRNA sense strand
guccaagcauugauauuuc

SEQ ID NO: 743382 - RNA, 19 nt, Homo sapiens
  misc_RNA (1)...(19): siRNA sense strand
agaacucaauuuccuguau

SEQ ID NO: 743383 - RNA, 19 nt, Homo sapiens
  misc_RNA (1)...(19): siRNA sense strand
ccucugggcucuaaucaag

SEQ ID NO: 743384 - RNA, 19 nt, Homo sapiens
  misc_RNA (1)...(19): siRNA sense strand
ugaagcagcuaaacucaac

SEQ ID NO: 743385 - RNA, 19 nt, Homo sapiens
  misc_RNA (1)...(19): siRNA sense strand
ucaagcagguggccagauc

SEQ ID NO: 743386 - RNA, 19 nt, Homo sapiens
  misc_RNA (1)...(19): siRNA sense strand
aaggaaauauccaagaauc

SEQ ID NO: 743387 - RNA, 19 nt, Homo sapiens
  misc_RNA (1)...(19): siRNA sense strand
ccaagaaucccuagaacuc

SEQ ID NO: 743388 - RNA, 19 nt, Homo sapiens
  misc_RNA (1)...(19): siRNA sense strand
caaagcaccagaccacuuc

SEQ ID NO: 743389 - RNA, 19 nt, Homo sapiens
  misc_RNA (1)...(19): siRNA sense strand
uaaguguaacccuuuagua

SEQ ID NO: 743390 - RNA, 19 nt, Homo sapiens
  misc_RNA (1)...(19): siRNA sense strand
gauuggaagauucuguaua

SEQ ID NO: 743391 - RNA, 19 nt, Homo sapiens
  misc_RNA (1)...(19): siRNA sense strand
gccagaucuuuauuucuuu

SEQ ID NO: 743392 - RNA, 19 nt, Homo sapiens
  misc_RNA (1)...(19): siRNA sense strand
acaaggccauugaagucua

SEQ ID NO: 743393 - RNA, 19 nt, Homo sapiens
  misc_RNA (1)...(19): siRNA sense strand
ugaauaugcuaucuauguc

SEQ ID NO: 743394 - RNA, 19 nt, Homo sapiens
  misc_RNA (1)...(19): siRNA sense strand
cuuaugacccuaccaacua

SEQ ID NO: 743395 - RNA, 19 nt, Homo sapiens
  misc_RNA (1)...(19): siRNA sense strand
gacgagaacucaauuuccu

SEQ ID NO: 743396 - RNA, 19 nt, Homo sapiens
  misc_RNA (1)...(19): siRNA sense strand
cuagaacucuuccagacau

SEQ ID NO: 743397 - RNA, 19 nt, Homo sapiens
  misc_RNA (1)...(19): siRNA sense strand
acucagggauugugugaau

SEQ ID NO: 743398 - RNA, 19 nt, Homo sapiens
  misc_RNA (1)...(19): siRNA sense strand
gauguugcccucaccaaau

SEQ ID NO: 743399 - RNA, 19 nt, Homo sapiens
  misc_RNA (1)...(19): siRNA sense strand
aaacauaaagcugccauug

SEQ ID NO: 743400 - RNA, 19 nt, Homo sapiens
  misc_RNA (1)...(19): siRNA sense strand
caaagaacagcuucaagag

SEQ ID NO: 743401 - RNA, 19 nt, Homo sapiens
  misc_RNA (1)...(19): siRNA sense strand
cagaacaaauaagagagaa

SEQ ID NO: 743402 - RNA, 19 nt, Homo sapiens
  misc_RNA (1)...(19): siRNA sense strand
aaguguaacccuuuaguaa

SEQ ID NO: 743403 - RNA, 19 nt, Homo sapiens
  misc_RNA (1)...(19): siRNA sense strand
gagagagucgcgacgagaa

SEQ ID NO: 743404 - RNA, 19 nt, Homo sapiens
  misc_RNA (1)...(19): siRNA sense strand
ccagaaggcauuugaacau

SEQ ID NO: 743405 - RNA, 19 nt, Homo sapiens
  misc_RNA (1)...(19): siRNA sense strand
gccauaaccuaggaguuug

SEQ ID NO: 743406 - RNA, 19 nt, Homo sapiens
  misc_RNA (1)...(19): siRNA sense strand
aaagaacagcuucaagaga

SEQ ID NO: 743407 - RNA, 19 nt, Homo sapiens
  misc_RNA (1)...(19): siRNA sense strand
gguugauucaucuucauua

SEQ ID NO: 743408 - RNA, 19 nt, Homo sapiens
  misc_RNA (1)...(19): siRNA sense strand
uaggauuacucuacuuaca

SEQ ID NO: 743409 - RNA, 19 nt, Homo sapiens
  misc_RNA (1)...(19): siRNA sense strand
auagcucucuggaauuuga

SEQ ID NO: 743410 - RNA, 19 nt, Homo sapiens
  misc_RNA (1)...(19): siRNA sense strand
uguccaagcauugauauuu

SEQ ID NO: 743411 - RNA, 19 nt, Homo sapiens
  misc_RNA (1)...(19): siRNA sense strand
caaggcuguuaucaaagaa

SEQ ID NO: 743412 - RNA, 19 nt, Homo sapiens
  misc_RNA (1)...(19): siRNA sense strand
caacuuccagccaaagaug

SEQ ID NO: 743413 - RNA, 19 nt, Homo sapiens
  misc_RNA (1)...(19): siRNA sense strand
gaaagcaguggaguucuca

SEQ ID NO: 743414 - RNA, 19 nt, Homo sapiens
  misc_RNA (1)...(19): siRNA sense strand
cagaacugguugauucauc

SEQ ID NO: 743415 - RNA, 19 nt, Homo sapiens
  misc_RNA (1)...(19): siRNA sense strand
cacgaucugacuuauauaa

SEQ ID NO: 743416 - RNA, 19 nt, Homo sapiens
  misc_RNA (1)...(19): siRNA sense strand
cuaggaguuugcuacauau

SEQ ID NO: 743417 - RNA, 19 nt, Homo sapiens
  misc_RNA (1)...(19): siRNA sense strand
gaagcagaacugguugauu

SEQ ID NO: 743418 - RNA, 19 nt, Homo sapiens
  misc_RNA (1)...(19): siRNA sense strand
cagaaggcauuugaacauc

SEQ ID NO: 743419 - RNA, 19 nt, Homo sapiens
  misc_RNA (1)...(19): siRNA sense strand
gaacgcccuggcccaauau

SEQ ID NO: 743420 - RNA, 19 nt, Homo sapiens
  misc_RNA (1)...(19): siRNA sense strand
gcacgaucugacuuauaua

SEQ ID NO: 743421 - RNA, 19 nt, Homo sapiens
  misc_RNA (1)...(19): siRNA sense strand
cauugaagucuacaagaaa

SEQ ID NO: 743422 - RNA, 19 nt, Homo sapiens
  misc_RNA (1)...(19): siRNA sense strand
ggacacagccuuccugaug

SEQ ID NO: 743423 - RNA, 19 nt, Homo sapiens
  misc_RNA (1)...(19): siRNA sense strand
ggaaaugaauaaacugauc

SEQ ID NO: 743424 - RNA, 19 nt, Homo sapiens
  misc_RNA (1)...(19): siRNA sense strand
gcccagcgcugcaaacuug

SEQ ID NO: 743425 - RNA, 19 nt, Homo sapiens
  misc_RNA (1)...(19): siRNA sense strand
ggagaucgacuuccugaaa

SEQ ID NO: 743426 - RNA, 19 nt, Homo sapiens
  misc_RNA (1)...(19): siRNA sense strand
gggcggaaauccagcauga

SEQ ID NO: 743427 - RNA, 19 nt, Homo sapiens
  misc_RNA (1)...(19): siRNA sense strand
caacaaccguuucgcaucu

SEQ ID NO: 743428 - RNA, 19 nt, Homo sapiens
  misc_RNA (1)...(19): siRNA sense strand
gacacagccuuccugauga

SEQ ID NO: 743429 - RNA, 19 nt, Homo sapiens
  misc_RNA (1)...(19): siRNA sense strand
caacaucgagcccaucuuc

SEQ ID NO: 743430 - RNA, 19 nt, Homo sapiens
  misc_RNA (1)...(19): siRNA sense strand
agaacgagauccuggaaau

SEQ ID NO: 743431 - RNA, 19 nt, Homo sapiens
  misc_RNA (1)...(19): siRNA sense strand
caucaucgcugagaucaag

SEQ ID NO: 743432 - RNA, 19 nt, Homo sapiens
  misc_RNA (1)...(19): siRNA sense strand
ggaggaggcucugcagaag

SEQ ID NO: 743433 - RNA, 19 nt, Homo sapiens
  misc_RNA (1)...(19): siRNA sense strand
caagaaaccgagaauguca

SEQ ID NO: 743434 - RNA, 19 nt, Homo sapiens
  misc_RNA (1)...(19): siRNA sense strand
gcgaggcggcucucaauga

SEQ ID NO: 743435 - RNA, 19 nt, Homo sapiens
  misc_RNA (1)...(19): siRNA sense strand
gggcacuggugaacucuau

SEQ ID NO: 743436 - RNA, 19 nt, Homo sapiens
  misc_RNA (1)...(19): siRNA sense strand
agaaggagcagaucaagug

SEQ ID NO: 743437 - RNA, 19 nt, Homo sapiens
  misc_RNA (1)...(19): siRNA sense strand
gcaagaaaccgagaauguc

SEQ ID NO: 743438 - RNA, 19 nt, Homo sapiens
  misc_RNA (1)...(19): siRNA sense strand
ggacguggacggcaucauc

SEQ ID NO: 743439 - RNA, 19 nt, Homo sapiens
  misc_RNA (1)...(19): siRNA sense strand
gaagaaggacguggacaca

SEQ ID NO: 743440 - RNA, 19 nt, Homo sapiens
  misc_RNA (1)...(19): siRNA sense strand
gaacgagauccuggaaaug

SEQ ID NO: 743441 - RNA, 19 nt, Homo sapiens
  misc_RNA (1)...(19): siRNA sense strand
uaaagagggaugagaagga

SEQ ID NO: 743442 - RNA, 19 nt, Homo sapiens
  misc_RNA (1)...(19): siRNA sense strand
gagaucgacuuccugaaaa

SEQ ID NO: 743443 - RNA, 19 nt, Homo sapiens
  misc_RNA (1)...(19): siRNA sense strand
acacagccuuccugaugaa

SEQ ID NO: 743444 - RNA, 19 nt, Homo sapiens
  misc_RNA (1)...(19): siRNA sense strand
cgaggcggcucucaaugau

SEQ ID NO: 743445 - RNA, 19 nt, Homo sapiens
  misc_RNA (1)...(19): siRNA sense strand
gcgugaggcuagagucaga

SEQ ID NO: 743446 - RNA, 19 nt, Homo sapiens
  misc_RNA (1)...(19): siRNA sense strand
gcacuggagggcuacaaga

SEQ ID NO: 743447 - RNA, 19 nt, Homo sapiens
  misc_RNA (1)...(19): siRNA sense strand
cagaucaagugccucaaca

SEQ ID NO: 743448 - RNA, 19 nt, Homo sapiens
  misc_RNA (1)...(19): siRNA sense strand
gagauccuggaaaugaaua

SEQ ID NO: 743449 - RNA, 19 nt, Homo sapiens
  misc_RNA (1)...(19): siRNA sense strand
ucaaugaugccaagugcaa

SEQ ID NO: 743450 - RNA, 19 nt, Homo sapiens
  misc_RNA (1)...(19): siRNA sense strand
ggguaaagagggaugagaa

SEQ ID NO: 743451 - RNA, 19 nt, Homo sapiens
  misc_RNA (1)...(19): siRNA sense strand
gcacuggugaacucuaugu

SEQ ID NO: 743452 - RNA, 19 nt, Homo sapiens
  misc_RNA (1)...(19): siRNA sense strand
gucccuguguugagaauga

SEQ ID NO: 743453 - RNA, 19 nt, Homo sapiens
  misc_RNA (1)...(19): siRNA sense strand
ucgcaucuuucaucaacaa

SEQ ID NO: 743454 - RNA, 19 nt, Homo sapiens
  misc_RNA (1)...(19): siRNA sense strand
caaacuugagggugccaua

SEQ ID NO: 743455 - RNA, 19 nt, Homo sapiens
  misc_RNA (1)...(19): siRNA sense strand
acaucgagaucgccaccua

SEQ ID NO: 743456 - RNA, 19 nt, Homo sapiens
  misc_RNA (1)...(19): siRNA sense strand
aggcugaccuggagaccaa

SEQ ID NO: 743457 - RNA, 19 nt, Homo sapiens
  misc_RNA (1)...(19): siRNA sense strand
gaugagaaggagcagauca

SEQ ID NO: 743458 - RNA, 19 nt, Homo sapiens
  misc_RNA (1)...(19): siRNA sense strand
uaagaacgagauccuggaa

SEQ ID NO: 743459 - RNA, 19 nt, Homo sapiens
  misc_RNA (1)...(19): siRNA sense strand
gaucaagugccucaacaac

SEQ ID NO: 743460 - RNA, 19 nt, Homo sapiens
  misc_RNA (1)...(19): siRNA sense strand
acaagcugcuggagaccaa

SEQ ID NO: 743461 - RNA, 19 nt, Homo sapiens
  misc_RNA (1)...(19): siRNA sense strand
ccugccugcucaaggaaua

SEQ ID NO: 743462 - RNA, 19 nt, Homo sapiens
  misc_RNA (1)...(19): siRNA sense strand
gggaugagaaggagcagau

SEQ ID NO: 743463 - RNA, 19 nt, Homo sapiens
  misc_RNA (1)...(19): siRNA sense strand
gguaugaggagcugagagu

SEQ ID NO: 743464 - RNA, 19 nt, Homo sapiens
  misc_RNA (1)...(19): siRNA sense strand
gagaaggagcagaucaagu

SEQ ID NO: 743465 - RNA, 19 nt, Homo sapiens
  misc_RNA (1)...(19): siRNA sense strand
gcagcaagaaaccgagaau

SEQ ID NO: 743466 - RNA, 19 nt, Homo sapiens
  misc_RNA (1)...(19): siRNA sense strand
caucuuucaucaacaaggu

SEQ ID NO: 743467 - RNA, 19 nt, Homo sapiens
  misc_RNA (1)...(19): siRNA sense strand
acaaccguuucgcaucuuu

SEQ ID NO: 743468 - RNA, 19 nt, Homo sapiens
  misc_RNA (1)...(19): siRNA sense strand
agaucaaggcgcaguauga

SEQ ID NO: 743469 - RNA, 19 nt, Homo sapiens
  misc_RNA (1)...(19): siRNA sense strand
gucagaguuucagcucaua

SEQ ID NO: 743470 - RNA, 19 nt, Homo sapiens
  misc_RNA (1)...(19): siRNA sense strand
cagcugggaaccacuguga

SEQ ID NO: 743471 - RNA, 19 nt, Homo sapiens
  misc_RNA (1)...(19): siRNA sense strand
aacgagauccuggaaauga

SEQ ID NO: 743472 - RNA, 19 nt, Homo sapiens
  misc_RNA (1)...(19): siRNA sense strand
gguguggcagucagaguuu

SEQ ID NO: 743473 - RNA, 19 nt, Homo sapiens
  misc_RNA (1)...(19): siRNA sense strand
gauggucacccacuaugca

SEQ ID NO: 743474 - RNA, 19 nt, Homo sapiens
  misc_RNA (1)...(19): siRNA sense strand
acgagauccuggaaaugaa

SEQ ID NO: 743475 - RNA, 19 nt, Homo sapiens
  misc_RNA (1)...(19): siRNA sense strand
cacuggcacuggagauaga

SEQ ID NO: 743476 - RNA, 19 nt, Homo sapiens
  misc_RNA (1)...(19): siRNA sense strand
uggaggaggcucugcagaa

SEQ ID NO: 743477 - RNA, 19 nt, Homo sapiens
  misc_RNA (1)...(19): siRNA sense strand
agaaaccgagaaugucaaa

SEQ ID NO: 743478 - RNA, 19 nt, Homo sapiens
  misc_RNA (1)...(19): siRNA sense strand
gcuccagucucagaucucu

SEQ ID NO: 743479 - RNA, 19 nt, Homo sapiens
  misc_RNA (1)...(19): siRNA sense strand
gcagaucaagugccucaac

SEQ ID NO: 743480 - RNA, 19 nt, Homo sapiens
  misc_RNA (1)...(19): siRNA sense strand
uggccugccugcucaagga

SEQ ID NO: 743481 - RNA, 19 nt, Homo sapiens
  misc_RNA (1)...(19): siRNA sense strand
gguaaagagggaugagaag

SEQ ID NO: 743482 - RNA, 19 nt, Homo sapiens
  misc_RNA (1)...(19): siRNA sense strand
gagaucaaggcgcaguaug

SEQ ID NO: 743483 - RNA, 19 nt, Homo sapiens
  misc_RNA (1)...(19): siRNA sense strand
gcugggaaccacugugaca

SEQ ID NO: 743484 - RNA, 19 nt, Homo sapiens
  misc_RNA (1)...(19): siRNA sense strand
gauccuggaaaugaauaaa

SEQ ID NO: 743485 - RNA, 19 nt, Homo sapiens
  misc_RNA (1)...(19): siRNA sense strand
agucagaguuucagcucau

SEQ ID NO: 743486 - RNA, 19 nt, Homo sapiens
  misc_RNA (1)...(19): siRNA sense strand
caaagcccagcgcugcaaa

SEQ ID NO: 743487 - RNA, 19 nt, Homo sapiens
  misc_RNA (1)...(19): siRNA sense strand
ccucggucauugugaagau

SEQ ID NO: 743488 - RNA, 19 nt, Homo sapiens
  misc_RNA (1)...(19): siRNA sense strand
ugaguuuguugccuugaag

SEQ ID NO: 743489 - RNA, 19 nt, Homo sapiens
  misc_RNA (1)...(19): siRNA sense strand
gaucaaggcgcaguaugac

SEQ ID NO: 743490 - RNA, 19 nt, Homo sapiens
  misc_RNA (1)...(19): siRNA sense strand
uuucgcaucuuucaucaac

SEQ ID NO: 743491 - RNA, 19 nt, Homo sapiens
  misc_RNA (1)...(19): siRNA sense strand
agcaagaaaccgagaaugu

SEQ ID NO: 743492 - RNA, 19 nt, Homo sapiens
  misc_RNA (1)...(19): siRNA sense strand
ccgaagcagaggccuggua

SEQ ID NO: 743493 - RNA, 19 nt, Homo sapiens
  misc_RNA (1)...(19): siRNA sense strand
caucuucgagggcuauauc

SEQ ID NO: 743494 - RNA, 19 nt, Homo sapiens
  misc_RNA (1)...(19): siRNA sense strand
caucaacaagguccguuuc

SEQ ID NO: 743495 - RNA, 19 nt, Homo sapiens
  misc_RNA (1)...(19): siRNA sense strand
gaagaaguaugaagaggaa

SEQ ID NO: 743496 - RNA, 19 nt, Homo sapiens
  misc_RNA (1)...(19): siRNA sense strand
ucaagacccucaacaacaa

SEQ ID NO: 743497 - RNA, 19 nt, Homo sapiens
  misc_RNA (1)...(19): siRNA sense strand
ggaaccaccugcaggaugu

SEQ ID NO: 743498 - RNA, 19 nt, Homo sapiens
  misc_RNA (1)...(19): siRNA sense strand
gaccaaguaugaagagaug

SEQ ID NO: 743499 - RNA, 19 nt, Homo sapiens
  misc_RNA (1)...(19): siRNA sense strand
ggaacgagaucaacgaacu

SEQ ID NO: 743500 - RNA, 19 nt, Homo sapiens
  misc_RNA (1)...(19): siRNA sense strand
gaagaaggauguggaugca

SEQ ID NO: 743501 - RNA, 19 nt, Homo sapiens
  misc_RNA (1)...(19): siRNA sense strand
ggaugcagcuuucaugaac

SEQ ID NO: 743502 - RNA, 19 nt, Homo sapiens
  misc_RNA (1)...(19): siRNA sense strand
caaguuugccuccuucauu

SEQ ID NO: 743503 - RNA, 19 nt, Homo sapiens
  misc_RNA (1)...(19): siRNA sense strand
gaucauugcugaggucaag

SEQ ID NO: 743504 - RNA, 19 nt, Homo sapiens
  misc_RNA (1)...(19): siRNA sense strand
ggauguggaugcagcuuuc

SEQ ID NO: 743505 - RNA, 19 nt, Homo sapiens
  misc_RNA (1)...(19): siRNA sense strand
gccgugaccugaaccuuga

SEQ ID NO: 743506 - RNA, 19 nt, Homo sapiens
  misc_RNA (1)...(19): siRNA sense strand
ucaagaagaaguaugaaga

SEQ ID NO: 743507 - RNA, 19 nt, Homo sapiens
  misc_RNA (1)...(19): siRNA sense strand
caacguggauacccuaacu

SEQ ID NO: 743508 - RNA, 19 nt, Homo sapiens
  misc_RNA (1)...(19): siRNA sense strand
cagaauaagcuccuagaga

SEQ ID NO: 743509 - RNA, 19 nt, Homo sapiens
  misc_RNA (1)...(19): siRNA sense strand
gaagguguuggaccaguaa

SEQ ID NO: 743510 - RNA, 19 nt, Homo sapiens
  misc_RNA (1)...(19): siRNA sense strand
caacagccgugaccugaac

SEQ ID NO: 743511 - RNA, 19 nt, Homo sapiens
  misc_RNA (1)...(19): siRNA sense strand
ucagagacgucggucauug

SEQ ID NO: 743512 - RNA, 19 nt, Homo sapiens
  misc_RNA (1)...(19): siRNA sense strand
guaugaagaggaaguggua

SEQ ID NO: 743513 - RNA, 19 nt, Homo sapiens
  misc_RNA (1)...(19): siRNA sense strand
ugaagguguuggaccagua

SEQ ID NO: 743514 - RNA, 19 nt, Homo sapiens
  misc_RNA (1)...(19): siRNA sense strand
ugacaagguucgguuccua

SEQ ID NO: 743515 - RNA, 19 nt, Homo sapiens
  misc_RNA (1)...(19): siRNA sense strand
gguaccagaccaaguauga

SEQ ID NO: 743516 - RNA, 19 nt, Homo sapiens
  misc_RNA (1)...(19): siRNA sense strand
agacgucggucauugugaa

SEQ ID NO: 743517 - RNA, 19 nt, Homo sapiens
  misc_RNA (1)...(19): siRNA sense strand
gggccaaugcugagaauga

SEQ ID NO: 743518 - RNA, 19 nt, Homo sapiens
  misc_RNA (1)...(19): siRNA sense strand
ugaagaaggaugagaagga

SEQ ID NO: 743519 - RNA, 19 nt, Homo sapiens
  misc_RNA (1)...(19): siRNA sense strand
uacccuaacucaggaaauu

SEQ ID NO: 743520 - RNA, 19 nt, Homo sapiens
  misc_RNA (1)...(19): siRNA sense strand
gagaaggagcaaaucaaga

SEQ ID NO: 743521 - RNA, 19 nt, Homo sapiens
  misc_RNA (1)...(19): siRNA sense strand
gaugagaaggagcaaauca

SEQ ID NO: 743522 - RNA, 19 nt, Homo sapiens
  misc_RNA (1)...(19): siRNA sense strand
uggaggugcuggucaguga

SEQ ID NO: 743523 - RNA, 19 nt, Homo sapiens
  misc_RNA (1)...(19): siRNA sense strand
gcaguggcauuggcuaugg

SEQ ID NO: 743524 - RNA, 19 nt, Homo sapiens
  misc_RNA (1)...(19): siRNA sense strand
ggugacagcuggccaacac

SEQ ID NO: 743525 - RNA, 19 nt, Homo sapiens
  misc_RNA (1)...(19): siRNA sense strand
uccaagagcagaaauguau

SEQ ID NO: 743526 - RNA, 19 nt, Homo sapiens
  misc_RNA (1)...(19): siRNA sense strand
caacuucagcucuuguuca

SEQ ID NO: 743527 - RNA, 19 nt, Homo sapiens
  misc_RNA (1)...(19): siRNA sense strand
ggccuuggcagcuuuggua

SEQ ID NO: 743528 - RNA, 19 nt, Homo sapiens
  misc_RNA (1)...(19): siRNA sense strand
acaacaaguuugccuccuu

SEQ ID NO: 743529 - RNA, 19 nt, Homo sapiens
  misc_RNA (1)...(19): siRNA sense strand
gacccucagugaugccaaa

SEQ ID NO: 743530 - RNA, 19 nt, Homo sapiens
  misc_RNA (1)...(19): siRNA sense strand
ggagugucaucaccuuugg

SEQ ID NO: 743531 - RNA, 19 nt, Homo sapiens
  misc_RNA (1)...(19): siRNA sense strand
caacauacggaacgagauc

SEQ ID NO: 743532 - RNA, 19 nt, Homo sapiens
  misc_RNA (1)...(19): siRNA sense strand
ugacaaccugcgcaacaua

SEQ ID NO: 743533 - RNA, 19 nt, Homo sapiens
  misc_RNA (1)...(19): siRNA sense strand
caagagcagaaauguauca

SEQ ID NO: 743534 - RNA, 19 nt, Homo sapiens
  misc_RNA (1)...(19): siRNA sense strand
agaaauguaucaggagcaa

SEQ ID NO: 743535 - RNA, 19 nt, Homo sapiens
  misc_RNA (1)...(19): siRNA sense strand
ggcauuggcuauggcuuug

SEQ ID NO: 743536 - RNA, 19 nt, Homo sapiens
  misc_RNA (1)...(19): siRNA sense strand
uccuagagcagcagaauaa

SEQ ID NO: 743537 - RNA, 19 nt, Homo sapiens
  misc_RNA (1)...(19): siRNA sense strand
aaguuugccuccuucauug

SEQ ID NO: 743538 - RNA, 19 nt, Homo sapiens
  misc_RNA (1)...(19): siRNA sense strand
acaucgagaucgccaccua

SEQ ID NO: 743539 - RNA, 19 nt, Homo sapiens
  misc_RNA (1)...(19): siRNA sense strand
gaacgagaucaacgaacug

SEQ ID NO: 743540 - RNA, 19 nt, Homo sapiens
  misc_RNA (1)...(19): siRNA sense strand
gcagcagaauaagcuccua

SEQ ID NO: 743541 - RNA, 19 nt, Homo sapiens
  misc_RNA (1)...(19): siRNA sense strand
aaugcaagcuggcagaucu

SEQ ID NO: 743542 - RNA, 19 nt, Homo sapiens
  misc_RNA (1)...(19): siRNA sense strand
caagaagaaguaugaagag

SEQ ID NO: 743543 - RNA, 19 nt, Homo sapiens
  misc_RNA (1)...(19): siRNA sense strand
cccagagggugaagaagga

SEQ ID NO: 743544 - RNA, 19 nt, Homo sapiens
  misc_RNA (1)...(19): siRNA sense strand
accaggagcugaugaaugc

SEQ ID NO: 743545 - RNA, 19 nt, Homo sapiens
  misc_RNA (1)...(19): siRNA sense strand
uggcuuugguuacagaguu

SEQ ID NO: 743546 - RNA, 19 nt, Homo sapiens
  misc_RNA (1)...(19): siRNA sense strand
gcuggcagaucuggagugu

SEQ ID NO: 743547 - RNA, 19 nt, Homo sapiens
  misc_RNA (1)...(19): siRNA sense strand
ccaaugcugagaaugaguu

SEQ ID NO: 743548 - RNA, 19 nt, Homo sapiens
  misc_RNA (1)...(19): siRNA sense strand
caaaucaagacccucaaca

SEQ ID NO: 743549 - RNA, 19 nt, Homo sapiens
  misc_RNA (1)...(19): siRNA sense strand
gugaacaagagccuacuga

SEQ ID NO: 743550 - RNA, 19 nt, Homo sapiens
  misc_RNA (1)...(19): siRNA sense strand
ccucagugaugccaaaugc

SEQ ID NO: 743551 - RNA, 19 nt, Homo sapiens
  misc_RNA (1)...(19): siRNA sense strand
uaacucaggaaauugacuu

SEQ ID NO: 743552 - RNA, 19 nt, Homo sapiens
  misc_RNA (1)...(19): siRNA sense strand
cagcuuucaugaacaaguc

SEQ ID NO: 743553 - RNA, 19 nt, Homo sapiens
  misc_RNA (1)...(19): siRNA sense strand
ggagcuggcaguggcauug

SEQ ID NO: 743554 - RNA, 19 nt, Homo sapiens
  misc_RNA (1)...(19): siRNA sense strand
ucagugaugccaaaugcaa

SEQ ID NO: 743555 - RNA, 19 nt, Homo sapiens
  misc_RNA (1)...(19): siRNA sense strand
gaugcagcuuucaugaaca

SEQ ID NO: 743556 - RNA, 19 nt, Homo sapiens
  misc_RNA (1)...(19): siRNA sense strand
gaaguaugaagaggaagug

SEQ ID NO: 743557 - RNA, 19 nt, Homo sapiens
  misc_RNA (1)...(19): siRNA sense strand
aaaucaagacccucaacaa

SEQ ID NO: 743558 - RNA, 19 nt, Homo sapiens
  misc_RNA (1)...(19): siRNA sense strand
gugggcaacuucagcucuu

SEQ ID NO: 743559 - RNA, 19 nt, Homo sapiens
  misc_RNA (1)...(19): siRNA sense strand
gacccucaacaacaaguuu

SEQ ID NO: 743560 - RNA, 19 nt, Homo sapiens
  misc_RNA (1)...(19): siRNA sense strand
gggugaagaaggaugagaa

SEQ ID NO: 743561 - RNA, 19 nt, Homo sapiens
  misc_RNA (1)...(19): siRNA sense strand
gcaaaucaagacccucaac

SEQ ID NO: 743562 - RNA, 19 nt, Homo sapiens
  misc_RNA (1)...(19): siRNA sense strand
gugacaaccugcgcaacau

SEQ ID NO: 743563 - RNA, 19 nt, Homo sapiens
  misc_RNA (1)...(19): siRNA sense strand
ggucaaggcccaguaugag

SEQ ID NO: 743564 - RNA, 19 nt, Homo sapiens
  misc_RNA (1)...(19): siRNA sense strand
ggccaaugcugagaaugag

SEQ ID NO: 743565 - RNA, 19 nt, Homo sapiens
  misc_RNA (1)...(19): siRNA sense strand
aaauguaucaggagcaauc

SEQ ID NO: 743566 - RNA, 19 nt, Homo sapiens
  misc_RNA (1)...(19): siRNA sense strand
uggcauuggcuauggcuuu

SEQ ID NO: 743567 - RNA, 19 nt, Homo sapiens
  misc_RNA (1)...(19): siRNA sense strand
ugacaccacagaaccugaa

SEQ ID NO: 743568 - RNA, 19 nt, Homo sapiens
  misc_RNA (1)...(19): siRNA sense strand
cagcucuuguucagcaaug

SEQ ID NO: 743569 - RNA, 19 nt, Homo sapiens
  misc_RNA (1)...(19): siRNA sense strand
gaagaggaagugguauguc

SEQ ID NO: 743570 - RNA, 19 nt, Homo sapiens
  misc_RNA (1)...(19): siRNA sense strand
ugagaaggagcaaaucaag

SEQ ID NO: 743571 - RNA, 19 nt, Homo sapiens
  misc_RNA (1)...(19): siRNA sense strand
ggcccuggcuuugguuaca

SEQ ID NO: 743572 - RNA, 19 nt, Homo sapiens
  misc_RNA (1)...(19): siRNA sense strand
cagcaaugacaccacagaa

SEQ ID NO: 743573 - RNA, 19 nt, Homo sapiens
  misc_RNA (1)...(19): siRNA sense strand
gcgaguaccaggagcugau

SEQ ID NO: 743574 - RNA, 19 nt, Homo sapiens
  misc_RNA (1)...(19): siRNA sense strand
gcaacauacggaacgagau

SEQ ID NO: 743575 - RNA, 19 nt, Homo sapiens
  misc_RNA (1)...(19): siRNA sense strand
guggaugcagcuuucauga

SEQ ID NO: 743576 - RNA, 19 nt, Homo sapiens
  misc_RNA (1)...(19): siRNA sense strand
ggcuuugguuacagaguug

SEQ ID NO: 743577 - RNA, 19 nt, Homo sapiens
  misc_RNA (1)...(19): siRNA sense strand
ggcuuaaggcagagauuga

SEQ ID NO: 743578 - RNA, 19 nt, Homo sapiens
  misc_RNA (1)...(19): siRNA sense strand
cgaacugacccgccugauc

SEQ ID NO: 743579 - RNA, 19 nt, Homo sapiens
  misc_RNA (1)...(19): siRNA sense strand
cgucggucauugugaagau

SEQ ID NO: 743580 - RNA, 19 nt, Homo sapiens
  misc_RNA (1)...(19): siRNA sense strand
gcaacuucagcucuuguuc

SEQ ID NO: 743581 - RNA, 19 nt, Homo sapiens
  misc_RNA (1)...(19): siRNA sense strand
ugaagaggaagugguaugu

SEQ ID NO: 743582 - RNA, 19 nt, Homo sapiens
  misc_RNA (1)...(19): siRNA sense strand
gcagaauaagcuccuagag

SEQ ID NO: 743583 - RNA, 19 nt, Homo sapiens
  misc_RNA (1)...(19): siRNA sense strand
agaaggagcaaaucaagac

SEQ ID NO: 743584 - RNA, 19 nt, Homo sapiens
  misc_RNA (1)...(19): siRNA sense strand
cagcuggccaacacuguga

SEQ ID NO: 743585 - RNA, 19 nt, Homo sapiens
  misc_RNA (1)...(19): siRNA sense strand
guaccagaccaaguaugaa

SEQ ID NO: 743586 - RNA, 19 nt, Homo sapiens
  misc_RNA (1)...(19): siRNA sense strand
ggugaugggagagguguug

SEQ ID NO: 743587 - RNA, 19 nt, Homo sapiens
  misc_RNA (1)...(19): siRNA sense strand
guuuguggcucugaagaag

SEQ ID NO: 743588 - RNA, 19 nt, Homo sapiens
  misc_RNA (1)...(19): siRNA sense strand
ccuccugccggaccaagua

SEQ ID NO: 743589 - RNA, 19 nt, Homo sapiens
  misc_RNA (1)...(19): siRNA sense strand
cagagacgucggucauugu

SEQ ID NO: 743590 - RNA, 19 nt, Homo sapiens
  misc_RNA (1)...(19): siRNA sense strand
gcacagcucugaugauuuu

SEQ ID NO: 743591 - RNA, 19 nt, Homo sapiens
  misc_RNA (1)...(19): siRNA sense strand
gcaggaacuucgugcagua

SEQ ID NO: 743592 - RNA, 19 nt, Homo sapiens
  misc_RNA (1)...(19): siRNA sense strand
gggcacagcucugaugauu

SEQ ID NO: 743593 - RNA, 19 nt, Homo sapiens
  misc_RNA (1)...(19): siRNA sense strand
ggacuucgccgaccaguuc

SEQ ID NO: 743594 - RNA, 19 nt, Homo sapiens
  misc_RNA (1)...(19): siRNA sense strand
gaagggaagagcauguuug

SEQ ID NO: 743595 - RNA, 19 nt, Homo sapiens
  misc_RNA (1)...(19): siRNA sense strand
ugcaugacuuccugaaaua

SEQ ID NO: 743596 - RNA, 19 nt, Homo sapiens
  misc_RNA (1)...(19): siRNA sense strand
gaagaagaaggagugguaa

SEQ ID NO: 743597 - RNA, 19 nt, Homo sapiens
  misc_RNA (1)...(19): siRNA sense strand
agaagaagaaggaguggua

SEQ ID NO: 743598 - RNA, 19 nt, Homo sapiens
  misc_RNA (1)...(19): siRNA sense strand
gcucuuugccaucaacgua

SEQ ID NO: 743599 - RNA, 19 nt, Homo sapiens
  misc_RNA (1)...(19): siRNA sense strand
acgauugccuacagcauuu

SEQ ID NO: 743600 - RNA, 19 nt, Homo sapiens
  misc_RNA (1)...(19): siRNA sense strand
ucauagcucugcagacgau

SEQ ID NO: 743601 - RNA, 19 nt, Homo sapiens
  misc_RNA (1)...(19): siRNA sense strand
ucuacaagcccaugcauga

SEQ ID NO: 743602 - RNA, 19 nt, Homo sapiens
  misc_RNA (1)...(19): siRNA sense strand
gacgauugccuacagcauu

SEQ ID NO: 743603 - RNA, 19 nt, Homo sapiens
  misc_RNA (1)...(19): siRNA sense strand
ucaugacccuccuucacuu

SEQ ID NO: 743604 - RNA, 19 nt, Homo sapiens
  misc_RNA (1)...(19): siRNA sense strand
augcaugacuuccugaaau

SEQ ID NO: 743605 - RNA, 19 nt, Homo sapiens
  misc_RNA (1)...(19): siRNA sense strand
ugacccuccuucacuuuga

SEQ ID NO: 743606 - RNA, 19 nt, Homo sapiens
  misc_RNA (1)...(19): siRNA sense strand
gcuucgggcucuuuggaau

SEQ ID NO: 743607 - RNA, 19 nt, Homo sapiens
  misc_RNA (1)...(19): siRNA sense strand
ccugaaauacgacuucuuc

SEQ ID NO: 743608 - RNA, 19 nt, Homo sapiens
  misc_RNA (1)...(19): siRNA sense strand
gaccaguuccuccguguca

SEQ ID NO: 743609 - RNA, 19 nt, Homo sapiens
  misc_RNA (1)...(19): siRNA sense strand
gccaucaacguauauuuca

SEQ ID NO: 743610 - RNA, 19 nt, Homo sapiens
  misc_RNA (1)...(19): siRNA sense strand
ggaccauuccagucuacaa

SEQ ID NO: 743611 - RNA, 19 nt, Homo sapiens
  misc_RNA (1)...(19): siRNA sense strand
ccaucaacguauauuucaa

SEQ ID NO: 743612 - RNA, 19 nt, Homo sapiens
  misc_RNA (1)...(19): siRNA sense strand
ccauggaugagaagaagaa

SEQ ID NO: 743613 - RNA, 19 nt, Homo sapiens
  misc_RNA (1)...(19): siRNA sense strand
ucuuugccaucaacguaua

SEQ ID NO: 743614 - RNA, 19 nt, Homo sapiens
  misc_RNA (1)...(19): siRNA sense strand
cgggcucuuuggaaucaua

SEQ ID NO: 743615 - RNA, 19 nt, Homo sapiens
  misc_RNA (1)...(19): siRNA sense strand
ugaagggaagagcauguuu

SEQ ID NO: 743616 - RNA, 19 nt, Homo sapiens
  misc_RNA (1)...(19): siRNA sense strand
gacgccagcuucuuuucua

SEQ ID NO: 743617 - RNA, 19 nt, Homo sapiens
  misc_RNA (1)...(19): siRNA sense strand
uggaugagaagaagaagga

SEQ ID NO: 743618 - RNA, 19 nt, Homo sapiens
  misc_RNA (1)...(19): siRNA sense strand
cagaccaugucggugauug

SEQ ID NO: 743619 - RNA, 19 nt, Homo sapiens
  misc_RNA (1)...(19): siRNA sense strand
acaagcccaugcaugacuu

SEQ ID NO: 743620 - RNA, 19 nt, Homo sapiens
  misc_RNA (1)...(19): siRNA sense strand
gcgagcagcgcgacuacau

SEQ ID NO: 743621 - RNA, 19 nt, Homo sapiens
  misc_RNA (1)...(19): siRNA sense strand
ugaaauacgacuucuucca

SEQ ID NO: 743622 - RNA, 19 nt, Homo sapiens
  misc_RNA (1)...(19): siRNA sense strand
caugacccuccuucacuuu

SEQ ID NO: 743623 - RNA, 19 nt, Homo sapiens
  misc_RNA (1)...(19): siRNA sense strand
gaccauuccagucuacaag

SEQ ID NO: 743624 - RNA, 19 nt, Homo sapiens
  misc_RNA (1)...(19): siRNA sense strand
gcacgcaucuugaguuuca

SEQ ID NO: 743625 - RNA, 19 nt, Homo sapiens
  misc_RNA (1)...(19): siRNA sense strand
gaucucagcuugucuucuu

SEQ ID NO: 743626 - RNA, 19 nt, Homo sapiens
  misc_RNA (1)...(19): siRNA sense strand
gaugccagcugcuuccuaa

SEQ ID NO: 743627 - RNA, 19 nt, Homo sapiens
  misc_RNA (1)...(19): siRNA sense strand
gcugacaucuuugguacua

SEQ ID NO: 743628 - RNA, 19 nt, Homo sapiens
  misc_RNA (1)...(19): siRNA sense strand
ccauccagcugacaucuuu

SEQ ID NO: 743629 - RNA, 19 nt, Homo sapiens
  misc_RNA (1)...(19): siRNA sense strand
gcagcgacaugacugauuc

SEQ ID NO: 743630 - RNA, 19 nt, Homo sapiens
  misc_RNA (1)...(19): siRNA sense strand
cuagaucccuuuauugaca

SEQ ID NO: 743631 - RNA, 19 nt, Homo sapiens
  misc_RNA (1)...(19): siRNA sense strand
acaaugagcugggagacaa

SEQ ID NO: 743632 - RNA, 19 nt, Homo sapiens
  misc_RNA (1)...(19): siRNA sense strand
ggaauuuaaucaggcaaga

SEQ ID NO: 743633 - RNA, 19 nt, Homo sapiens
  misc_RNA (1)...(19): siRNA sense strand
caagaguucagacccauuu

SEQ ID NO: 743634 - RNA, 19 nt, Homo sapiens
  misc_RNA (1)...(19): siRNA sense strand
ugaaagaggagaaguugga

SEQ ID NO: 743635 - RNA, 19 nt, Homo sapiens
  misc_RNA (1)...(19): siRNA sense strand
acaggaggcugagagcuuu

SEQ ID NO: 743636 - RNA, 19 nt, Homo sapiens
  misc_RNA (1)...(19): siRNA sense strand
gccagcugcuuccuaaaug

SEQ ID NO: 743637 - RNA, 19 nt, Homo sapiens
  misc_RNA (1)...(19): siRNA sense strand
ccuaaaugguggccuugaa

SEQ ID NO: 743638 - RNA, 19 nt, Homo sapiens
  misc_RNA (1)...(19): siRNA sense strand
ggaucaccgucuucuacuu

SEQ ID NO: 743639 - RNA, 19 nt, Homo sapiens
  misc_RNA (1)...(19): siRNA sense strand
uggcacgcaucuugaguuu

SEQ ID NO: 743640 - RNA, 19 nt, Homo sapiens
  misc_RNA (1)...(19): siRNA sense strand
gaucaccgucuucuacuuc

SEQ ID NO: 743641 - RNA, 19 nt, Homo sapiens
  misc_RNA (1)...(19): siRNA sense strand
caugggccguguggaauuu

SEQ ID NO: 743642 - RNA, 19 nt, Homo sapiens
  misc_RNA (1)...(19): siRNA sense strand
cagcaucgggcacuaguga

SEQ ID NO: 743643 - RNA, 19 nt, Homo sapiens
  misc_RNA (1)...(19): siRNA sense strand
uggagaugcugcaguggaa

SEQ ID NO: 743644 - RNA, 19 nt, Homo sapiens
  misc_RNA (1)...(19): siRNA sense strand
ugacaucuuugguacuagu

SEQ ID NO: 743645 - RNA, 19 nt, Homo sapiens
  misc_RNA (1)...(19): siRNA sense strand
gaaauuugaccagcuggau

SEQ ID NO: 743646 - RNA, 19 nt, Homo sapiens
  misc_RNA (1)...(19): siRNA sense strand
gcagggagggcugugagaa

SEQ ID NO: 743647 - RNA, 19 nt, Homo sapiens
  misc_RNA (1)...(19): siRNA sense strand
gcaagaguucagacccauu

SEQ ID NO: 743648 - RNA, 19 nt, Homo sapiens
  misc_RNA (1)...(19): siRNA sense strand
ggaucgaucgggaggagaa

SEQ ID NO: 743649 - RNA, 19 nt, Homo sapiens
  misc_RNA (1)...(19): siRNA sense strand
agcccuagaucccuuuauu

SEQ ID NO: 743650 - RNA, 19 nt, Homo sapiens
  misc_RNA (1)...(19): siRNA sense strand
ccagcugacaucuuuggua

SEQ ID NO: 743651 - RNA, 19 nt, Homo sapiens
  misc_RNA (1)...(19): siRNA sense strand
gaagcccuagaucccuuua

SEQ ID NO: 743652 - RNA, 19 nt, Homo sapiens
  misc_RNA (1)...(19): siRNA sense strand
cccuagaucccuuuauuga

SEQ ID NO: 743653 - RNA, 19 nt, Homo sapiens
  misc_RNA (1)...(19): siRNA sense strand
ggcuguagcuucacaucag

SEQ ID NO: 743654 - RNA, 19 nt, Homo sapiens
  misc_RNA (1)...(19): siRNA sense strand
gcccuagaucccuuuauug

SEQ ID NO: 743655 - RNA, 19 nt, Homo sapiens
  misc_RNA (1)...(19): siRNA sense strand
gcagcagcgacaugacuga

SEQ ID NO: 743656 - RNA, 19 nt, Homo sapiens
  misc_RNA (1)...(19): siRNA sense strand
gcuugaaagaggagaaguu

SEQ ID NO: 743657 - RNA, 19 nt, Homo sapiens
  misc_RNA (1)...(19): siRNA sense strand
uauucuggcuguagcuuca

SEQ ID NO: 743658 - RNA, 19 nt, Homo sapiens
  misc_RNA (1)...(19): siRNA sense strand
cagccuggcacgcaucuug

SEQ ID NO: 743659 - RNA, 19 nt, Homo sapiens
  misc_RNA (1)...(19): siRNA sense strand
ugccgucgcuucucuuugg

SEQ ID NO: 743660 - RNA, 19 nt, Homo sapiens
  misc_RNA (1)...(19): siRNA sense strand
ucacuacacaucacagaag

SEQ ID NO: 743661 - RNA, 19 nt, Homo sapiens
  misc_RNA (1)...(19): siRNA sense strand
ggaggaggaagaggaggaa

SEQ ID NO: 743662 - RNA, 19 nt, Homo sapiens
  misc_RNA (1)...(19): siRNA sense strand
ucacccgccugcaguugga

SEQ ID NO: 743663 - RNA, 19 nt, Homo sapiens
  misc_RNA (1)...(19): siRNA sense strand
gcaucuugaguuucaguga

SEQ ID NO: 743664 - RNA, 19 nt, Homo sapiens
  misc_RNA (1)...(19): siRNA sense strand
ccagcugcuuccuaaaugg

SEQ ID NO: 743665 - RNA, 19 nt, Homo sapiens
  misc_RNA (1)...(19): siRNA sense strand
ccaugggccguguggaauu

SEQ ID NO: 743666 - RNA, 19 nt, Homo sapiens
  misc_RNA (1)...(19): siRNA sense strand
gccagggcuucaccagugu

SEQ ID NO: 743667 - RNA, 19 nt, Homo sapiens
  misc_RNA (1)...(19): siRNA sense strand
ggaugccagcugcuuccua

SEQ ID NO: 743668 - RNA, 19 nt, Homo sapiens
  misc_RNA (1)...(19): siRNA sense strand
augcugcaguggaagcuuu

SEQ ID NO: 743669 - RNA, 19 nt, Homo sapiens
  misc_RNA (1)...(19): siRNA sense strand
uguugaagaggaaauuuga

SEQ ID NO: 743670 - RNA, 19 nt, Homo sapiens
  misc_RNA (1)...(19): siRNA sense strand
gcgacaugacugauucuuc

SEQ ID NO: 743671 - RNA, 19 nt, Homo sapiens
  misc_RNA (1)...(19): siRNA sense strand
gauggaccacacagcauuc

SEQ ID NO: 743672 - RNA, 19 nt, Homo sapiens
  misc_RNA (1)...(19): siRNA sense strand
ugugguggaugccauugau

SEQ ID NO: 743673 - RNA, 19 nt, Homo sapiens
  misc_RNA (1)...(19): siRNA sense strand
gaaggccccugggaucaga

SEQ ID NO: 743674 - RNA, 19 nt, Homo sapiens
  misc_RNA (1)...(19): siRNA sense strand
gcucaguggaucucagcuu

SEQ ID NO: 743675 - RNA, 19 nt, Homo sapiens
  misc_RNA (1)...(19): siRNA sense strand
agccuggcguugaugauga

SEQ ID NO: 743676 - RNA, 19 nt, Homo sapiens
  misc_RNA (1)...(19): siRNA sense strand
ggaagaggcucaacuauga

SEQ ID NO: 743677 - RNA, 19 nt, Homo sapiens
  misc_RNA (1)...(19): siRNA sense strand
caauggagcuacagauaua

SEQ ID NO: 743678 - RNA, 19 nt, Homo sapiens
  misc_RNA (1)...(19): siRNA sense strand
gaacagaacaguugaaauc

SEQ ID NO: 743679 - RNA, 19 nt, Homo sapiens
  misc_RNA (1)...(19): siRNA sense strand
gaagaaagucggaauggua

SEQ ID NO: 743680 - RNA, 19 nt, Homo sapiens
  misc_RNA (1)...(19): siRNA sense strand
caauuugacuucaccuuua

SEQ ID NO: 743681 - RNA, 19 nt, Homo sapiens
  misc_RNA (1)...(19): siRNA sense strand
gaagaguucuggauagaga

SEQ ID NO: 743682 - RNA, 19 nt, Homo sapiens
  misc_RNA (1)...(19): siRNA sense strand
guagaggccuuugauauuu

SEQ ID NO: 743683 - RNA, 19 nt, Homo sapiens
  misc_RNA (1)...(19): siRNA sense strand
ggacagauagaguauguua

SEQ ID NO: 743684 - RNA, 19 nt, Homo sapiens
  misc_RNA (1)...(19): siRNA sense strand
gggaagaacagcaaacuua

SEQ ID NO: 743685 - RNA, 19 nt, Homo sapiens
  misc_RNA (1)...(19): siRNA sense strand
gaaaucacaucugaacaaa

SEQ ID NO: 743686 - RNA, 19 nt, Homo sapiens
  misc_RNA (1)...(19): siRNA sense strand
ugacaaugcuccaguguuu

SEQ ID NO: 743687 - RNA, 19 nt, Homo sapiens
  misc_RNA (1)...(19): siRNA sense strand
gaauggagauccucagaga

SEQ ID NO: 743688 - RNA, 19 nt, Homo sapiens
  misc_RNA (1)...(19): siRNA sense strand
gaagaugcaagaauguuua

SEQ ID NO: 743689 - RNA, 19 nt, Homo sapiens
  misc_RNA (1)...(19): siRNA sense strand
gcagaaagcugaaaaugaa

SEQ ID NO: 743690 - RNA, 19 nt, Homo sapiens
  misc_RNA (1)...(19): siRNA sense strand
gaacagcaccggaagaguu

SEQ ID NO: 743691 - RNA, 19 nt, Homo sapiens
  misc_RNA (1)...(19): siRNA sense strand
gcacaaauguuucagaacu

SEQ ID NO: 743692 - RNA, 19 nt, Homo sapiens
  misc_RNA (1)...(19): siRNA sense strand
ggacuacuaugaacuuguu

SEQ ID NO: 743693 - RNA, 19 nt, Homo sapiens
  misc_RNA (1)...(19): siRNA sense strand
caacagggcuuaucaccau

SEQ ID NO: 743694 - RNA, 19 nt, Homo sapiens
  misc_RNA (1)...(19): siRNA sense strand
gaacucaaaucagaaccua

SEQ ID NO: 743695 - RNA, 19 nt, Homo sapiens
  misc_RNA (1)...(19): siRNA sense strand
ugaagaaccuacaacaauu

SEQ ID NO: 743696 - RNA, 19 nt, Homo sapiens
  misc_RNA (1)...(19): siRNA sense strand
gaacauacacuccauugug

SEQ ID NO: 743697 - RNA, 19 nt, Homo sapiens
  misc_RNA (1)...(19): siRNA sense strand
ccuaugauguguauguuua

SEQ ID NO: 743698 - RNA, 19 nt, Homo sapiens
  misc_RNA (1)...(19): siRNA sense strand
gcacuauuaucuaccauga

SEQ ID NO: 743699 - RNA, 19 nt, Homo sapiens
  misc_RNA (1)...(19): siRNA sense strand
caacagagccaucgauaga

SEQ ID NO: 743700 - RNA, 19 nt, Homo sapiens
  misc_RNA (1)...(19): siRNA sense strand
gaauggaccucuggauuau

SEQ ID NO: 743701 - RNA, 19 nt, Homo sapiens
  misc_RNA (1)...(19): siRNA sense strand
ggaaauauaguguuaagga

SEQ ID NO: 743702 - RNA, 19 nt, Homo sapiens
  misc_RNA (1)...(19): siRNA sense strand
caucacagguguuaucuau

SEQ ID NO: 743703 - RNA, 19 nt, Homo sapiens
  misc_RNA (1)...(19): siRNA sense strand
ggacauugaugauaacagu

SEQ ID NO: 743704 - RNA, 19 nt, Homo sapiens
  misc_RNA (1)...(19): siRNA sense strand
gaucacauaugaaauccuu

SEQ ID NO: 743705 - RNA, 19 nt, Homo sapiens
  misc_RNA (1)...(19): siRNA sense strand
caacugaagaggcaaauuu

SEQ ID NO: 743706 - RNA, 19 nt, Homo sapiens
  misc_RNA (1)...(19): siRNA sense strand
uaacacgagucaaucuuaa

SEQ ID NO: 743707 - RNA, 19 nt, Homo sapiens
  misc_RNA (1)...(19): siRNA sense strand
gacuucaccuuuaagaaua

SEQ ID NO: 743708 - RNA, 19 nt, Homo sapiens
  misc_RNA (1)...(19): siRNA sense strand
gaagaaccuacaacaauuu

SEQ ID NO: 743709 - RNA, 19 nt, Homo sapiens
  misc_RNA (1)...(19): siRNA sense strand
ggacuaccauccuucaaau

SEQ ID NO: 743710 - RNA, 19 nt, Homo sapiens
  misc_RNA (1)...(19): siRNA sense strand
guagacggaucacuuaaga

SEQ ID NO: 743711 - RNA, 19 nt, Homo sapiens
  misc_RNA (1)...(19): siRNA sense strand
caacaacgacaguguguaa

SEQ ID NO: 743712 - RNA, 19 nt, Homo sapiens
  misc_RNA (1)...(19): siRNA sense strand
gagacuucaucaucaauaa

SEQ ID NO: 743713 - RNA, 19 nt, Homo sapiens
  misc_RNA (1)...(19): siRNA sense strand
ggaaaucacaucugaacaa

SEQ ID NO: 743714 - RNA, 19 nt, Homo sapiens
  misc_RNA (1)...(19): siRNA sense strand
gaaauaaggcaaggugaaa

SEQ ID NO: 743715 - RNA, 19 nt, Homo sapiens
  misc_RNA (1)...(19): siRNA sense strand
caggaaacaucaacaaguu

SEQ ID NO: 743716 - RNA, 19 nt, Homo sapiens
  misc_RNA (1)...(19): siRNA sense strand
ugaauggaccucuggauua

SEQ ID NO: 743717 - RNA, 19 nt, Homo sapiens
  misc_RNA (1)...(19): siRNA sense strand
ggcaacagauggagcagua

SEQ ID NO: 743718 - RNA, 19 nt, Homo sapiens
  misc_RNA (1)...(19): siRNA sense strand
gaacugaaccccauuauug

SEQ ID NO: 743719 - RNA, 19 nt, Homo sapiens
  misc_RNA (1)...(19): siRNA sense strand
ggagagagacaccuauuug

SEQ ID NO: 743720 - RNA, 19 nt, Homo sapiens
  misc_RNA (1)...(19): siRNA sense strand
gugaaacacugaugauaga

SEQ ID NO: 743721 - RNA, 19 nt, Homo sapiens
  misc_RNA (1)...(19): siRNA sense strand
gaucaggaccggaauauuc

SEQ ID NO: 743722 - RNA, 19 nt, Homo sapiens
  misc_RNA (1)...(19): siRNA sense strand
gacuggaaauauaguguua

SEQ ID NO: 743723 - RNA, 19 nt, Homo sapiens
  misc_RNA (1)...(19): siRNA sense strand
ucacagguguuaucuaugu

SEQ ID NO: 743724 - RNA, 19 nt, Homo sapiens
  misc_RNA (1)...(19): siRNA sense strand
uaacauaugccauugagaa

SEQ ID NO: 743725 - RNA, 19 nt, Homo sapiens
  misc_RNA (1)...(19): siRNA sense strand
guacaauucugguggacaa

SEQ ID NO: 743726 - RNA, 19 nt, Homo sapiens
  misc_RNA (1)...(19): siRNA sense strand
gcuaacauguacagucaaa

SEQ ID NO: 743727 - RNA, 19 nt, Homo sapiens
  misc_RNA (1)...(19): siRNA sense strand
ccuagaagauuacaccaaa

SEQ ID NO: 743728 - RNA, 19 nt, Homo sapiens
  misc_RNA (1)...(19): siRNA sense strand
caaauggacagauagagua

SEQ ID NO: 743729 - RNA, 19 nt, Homo sapiens
  misc_RNA (1)...(19): siRNA sense strand
agauaagacucgcuacuuu

SEQ ID NO: 743730 - RNA, 19 nt, Homo sapiens
  misc_RNA (1)...(19): siRNA sense strand
ccaggaggcugaugaggaa

SEQ ID NO: 743731 - RNA, 19 nt, Homo sapiens
  misc_RNA (1)...(19): siRNA sense strand
ucacauuucuaucugauga

SEQ ID NO: 743732 - RNA, 19 nt, Homo sapiens
  misc_RNA (1)...(19): siRNA sense strand
gaacaaugccaccugguau

SEQ ID NO: 743733 - RNA, 19 nt, Homo sapiens
  misc_RNA (1)...(19): siRNA sense strand
cagugaagcuuaacagaga

SEQ ID NO: 743734 - RNA, 19 nt, Homo sapiens
  misc_RNA (1)...(19): siRNA sense strand
aaacuuagcagaacuugaa

SEQ ID NO: 743735 - RNA, 19 nt, Homo sapiens
  misc_RNA (1)...(19): siRNA sense strand
aaacagacccucagagaga

SEQ ID NO: 743736 - RNA, 19 nt, Homo sapiens
  misc_RNA (1)...(19): siRNA sense strand
gagagacaccuauuuguau

SEQ ID NO: 743737 - RNA, 19 nt, Homo sapiens
  misc_RNA (1)...(19): siRNA sense strand
cuacagacaguuuaaagua

SEQ ID NO: 743738 - RNA, 19 nt, Homo sapiens
  misc_RNA (1)...(19): siRNA sense strand
gaaggcuacugauaaagau

SEQ ID NO: 743739 - RNA, 19 nt, Homo sapiens
  misc_RNA (1)...(19): siRNA sense strand
cagcuaaaguauacauuga

SEQ ID NO: 743740 - RNA, 19 nt, Homo sapiens
  misc_RNA (1)...(19): siRNA sense strand
uagaggccuuugauauuua

SEQ ID NO: 743741 - RNA, 19 nt, Homo sapiens
  misc_RNA (1)...(19): siRNA sense strand
gguagaggccuuugauauu

SEQ ID NO: 743742 - RNA, 19 nt, Homo sapiens
  misc_RNA (1)...(19): siRNA sense strand
gacaauggagcuacagaua

SEQ ID NO: 743743 - RNA, 19 nt, Homo sapiens
  misc_RNA (1)...(19): siRNA sense strand
ucaaucuacuucacuguaa

SEQ ID NO: 743744 - RNA, 19 nt, Homo sapiens
  misc_RNA (1)...(19): siRNA sense strand
ccaaacaucucuccuucug

SEQ ID NO: 743745 - RNA, 19 nt, Homo sapiens
  misc_RNA (1)...(19): siRNA sense strand
guacaaagacugcacgaau

SEQ ID NO: 743746 - RNA, 19 nt, Homo sapiens
  misc_RNA (1)...(19): siRNA sense strand
gcuaaaguauacauugaga

SEQ ID NO: 743747 - RNA, 19 nt, Homo sapiens
  misc_RNA (1)...(19): siRNA sense strand
ugaagaagauacauuugga

SEQ ID NO: 743748 - RNA, 19 nt, Homo sapiens
  misc_RNA (1)...(19): siRNA sense strand
aaaugugucuuaccggaua

SEQ ID NO: 743749 - RNA, 19 nt, Homo sapiens
  misc_RNA (1)...(19): siRNA sense strand
acacagcagugaagcuuaa

SEQ ID NO: 743750 - RNA, 19 nt, Homo sapiens
  misc_RNA (1)...(19): siRNA sense strand
ugaaauauccuaugaugug

SEQ ID NO: 743751 - RNA, 19 nt, Homo sapiens
  misc_RNA (1)...(19): siRNA sense strand
gaaauauccuaugaugugu

SEQ ID NO: 743752 - RNA, 19 nt, Homo sapiens
  misc_RNA (1)...(19): siRNA sense strand
ugacuuaagugcccauaau

SEQ ID NO: 743753 - RNA, 19 nt, Homo sapiens
  misc_RNA (1)...(19): siRNA sense strand
aaacugaagucugcaagaa

SEQ ID NO: 743754 - RNA, 19 nt, Homo sapiens
  misc_RNA (1)...(19): siRNA sense strand
uacaaagacugcacgaauu

SEQ ID NO: 743755 - RNA, 19 nt, Homo sapiens
  misc_RNA (1)...(19): siRNA sense strand
gcucuggccuucaucauca

SEQ ID NO: 743756 - RNA, 19 nt, Homo sapiens
  misc_RNA (1)...(19): siRNA sense strand
gagugaaggcuacugauaa

SEQ ID NO: 743757 - RNA, 19 nt, Homo sapiens
  misc_RNA (1)...(19): siRNA sense strand
ggaacaaugccaccuggua

SEQ ID NO: 743758 - RNA, 19 nt, Homo sapiens
  misc_RNA (1)...(19): siRNA sense strand
ggagaacuaucgcuuuuaa

SEQ ID NO: 743759 - RNA, 19 nt, Homo sapiens
  misc_RNA (1)...(19): siRNA sense strand
gauaagaagcccagaagug

SEQ ID NO: 743760 - RNA, 19 nt, Homo sapiens
  misc_RNA (1)...(19): siRNA sense strand
ggccaaagaugucgaccuu

SEQ ID NO: 743761 - RNA, 19 nt, Homo sapiens
  misc_RNA (1)...(19): siRNA sense strand
caaugacaccuuugaaauu

SEQ ID NO: 743762 - RNA, 19 nt, Homo sapiens
  misc_RNA (1)...(19): siRNA sense strand
gaugauagaaggaacagaa

SEQ ID NO: 743763 - RNA, 19 nt, Homo sapiens
  misc_RNA (1)...(19): siRNA sense strand
ggaaauaaggcaaggugaa

SEQ ID NO: 743764 - RNA, 19 nt, Homo sapiens
  misc_RNA (1)...(19): siRNA sense strand
caagucagcucauguagac

SEQ ID NO: 743765 - RNA, 19 nt, Homo sapiens
  misc_RNA (1)...(19): siRNA sense strand
caucggagguguaucugaa

SEQ ID NO: 743766 - RNA, 19 nt, Homo sapiens
  misc_RNA (1)...(19): siRNA sense strand
ggagaucacauaugaaauc

SEQ ID NO: 743767 - RNA, 19 nt, Homo sapiens
  misc_RNA (1)...(19): siRNA sense strand
acagcaaacuuacaccuuu

SEQ ID NO: 743768 - RNA, 19 nt, Homo sapiens
  misc_RNA (1)...(19): siRNA sense strand
ggacaaggacauagaagau

SEQ ID NO: 743769 - RNA, 19 nt, Homo sapiens
  misc_RNA (1)...(19): siRNA sense strand
gaaauaacucagucucaga

SEQ ID NO: 743770 - RNA, 19 nt, Homo sapiens
  misc_RNA (1)...(19): siRNA sense strand
gaggagaaagucuaggaua

SEQ ID NO: 743771 - RNA, 19 nt, Homo sapiens
  misc_RNA (1)...(19): siRNA sense strand
acauugagauucaggauga

SEQ ID NO: 743772 - RNA, 19 nt, Homo sapiens
  misc_RNA (1)...(19): siRNA sense strand
gcaguacacccucgucauu

SEQ ID NO: 743773 - RNA, 19 nt, Homo sapiens
  misc_RNA (1)...(19): siRNA sense strand
gauuuguaguggaaacaua

SEQ ID NO: 743774 - RNA, 19 nt, Homo sapiens
  misc_RNA (1)...(19): siRNA sense strand
gauggcaaacuacuugaua

SEQ ID NO: 743775 - RNA, 19 nt, Homo sapiens
  misc_RNA (1)...(19): siRNA sense strand
ucaaucagcuggauaugca

SEQ ID NO: 743776 - RNA, 19 nt, Homo sapiens
  misc_RNA (1)...(19): siRNA sense strand
ccaaggcuguggccaagac

SEQ ID NO: 743777 - RNA, 19 nt, Homo sapiens
  misc_RNA (1)...(19): siRNA sense strand
gaccagggcugugaucaag

SEQ ID NO: 743778 - RNA, 19 nt, Homo sapiens
  misc_RNA (1)...(19): siRNA sense strand
gcucugaccagggcuguga

SEQ ID NO: 743779 - RNA, 19 nt, Homo sapiens
  misc_RNA (1)...(19): siRNA sense strand
ccauccugcucucagacua

SEQ ID NO: 743780 - RNA, 19 nt, Homo sapiens
  misc_RNA (1)...(19): siRNA sense strand
gcugccagaccaccuguug

SEQ ID NO: 743781 - RNA, 19 nt, Homo sapiens
  misc_RNA (1)...(19): siRNA sense strand
gcuguggauccucuuguug

SEQ ID NO: 743782 - RNA, 19 nt, Homo sapiens
  misc_RNA (1)...(19): siRNA sense strand
gcugucagaccaccuguug

SEQ ID NO: 743783 - RNA, 19 nt, Homo sapiens
  misc_RNA (1)...(19): siRNA sense strand
gcggccaaguccucuguca

SEQ ID NO: 743784 - RNA, 19 nt, Homo sapiens
  misc_RNA (1)...(19): siRNA sense strand
ggagaaauccauacauuaa

SEQ ID NO: 743785 - RNA, 19 nt, Homo sapiens
  misc_RNA (1)...(19): siRNA sense strand
ugacaauccuccaauauuu

SEQ ID NO: 743786 - RNA, 19 nt, Homo sapiens
  misc_RNA (1)...(19): siRNA sense strand
guaaauccauccacuaaau

SEQ ID NO: 743787 - RNA, 19 nt, Homo sapiens
  misc_RNA (1)...(19): siRNA sense strand
ccagguaucugaugacuau

SEQ ID NO: 743788 - RNA, 19 nt, Homo sapiens
  misc_RNA (1)...(19): siRNA sense strand
caacguagcuaaggaccua

SEQ ID NO: 743789 - RNA, 19 nt, Homo sapiens
  misc_RNA (1)...(19): siRNA sense strand
ggucagaauucuuggcuuu

SEQ ID NO: 743790 - RNA, 19 nt, Homo sapiens
  misc_RNA (1)...(19): siRNA sense strand
ugagaaccauggauuauga

SEQ ID NO: 743791 - RNA, 19 nt, Homo sapiens
  misc_RNA (1)...(19): siRNA sense strand
caaccaagcauucuagaaa

SEQ ID NO: 743792 - RNA, 19 nt, Homo sapiens
  misc_RNA (1)...(19): siRNA sense strand
gcaaaguccugguagaagu

SEQ ID NO: 743793 - RNA, 19 nt, Homo sapiens
  misc_RNA (1)...(19): siRNA sense strand
ccacugaccuuggguuauu

SEQ ID NO: 743794 - RNA, 19 nt, Homo sapiens
  misc_RNA (1)...(19): siRNA sense strand
gcuauaauaucaccauugu

SEQ ID NO: 743795 - RNA, 19 nt, Homo sapiens
  misc_RNA (1)...(19): siRNA sense strand
guacagagcccagguauca

SEQ ID NO: 743796 - RNA, 19 nt, Homo sapiens
  misc_RNA (1)...(19): siRNA sense strand
ccaacaaagcgauaacuua

SEQ ID NO: 743797 - RNA, 19 nt, Homo sapiens
  misc_RNA (1)...(19): siRNA sense strand
gaggaggucucaggcuaua

SEQ ID NO: 743798 - RNA, 19 nt, Homo sapiens
  misc_RNA (1)...(19): siRNA sense strand
uaaugacaauccuccaaua

SEQ ID NO: 743799 - RNA, 19 nt, Homo sapiens
  misc_RNA (1)...(19): siRNA sense strand
gcuaauauccgacguuaau

SEQ ID NO: 743800 - RNA, 19 nt, Homo sapiens
  misc_RNA (1)...(19): siRNA sense strand
agcgauaacuuacucuuua

SEQ ID NO: 743801 - RNA, 19 nt, Homo sapiens
  misc_RNA (1)...(19): siRNA sense strand
caagagcauuucuaugaug

SEQ ID NO: 743802 - RNA, 19 nt, Homo sapiens
  misc_RNA (1)...(19): siRNA sense strand
gaaacuggaucgggaguca

SEQ ID NO: 743803 - RNA, 19 nt, Homo sapiens
  misc_RNA (1)...(19): siRNA sense strand
gugcuaauauccgacguua

SEQ ID NO: 743804 - RNA, 19 nt, Homo sapiens
  misc_RNA (1)...(19): siRNA sense strand
gggugagaaugcccaaaua

SEQ ID NO: 743805 - RNA, 19 nt, Homo sapiens
  misc_RNA (1)...(19): siRNA sense strand
ucacugaguagccaaguua

SEQ ID NO: 743806 - RNA, 19 nt, Homo sapiens
  misc_RNA (1)...(19): siRNA sense strand
uaucuugacuguucgagaa

SEQ ID NO: 743807 - RNA, 19 nt, Homo sapiens
  misc_RNA (1)...(19): siRNA sense strand
gagauuuguuugugaagga

SEQ ID NO: 743808 - RNA, 19 nt, Homo sapiens
  misc_RNA (1)...(19): siRNA sense strand
gcauuucuaugaugacugu

SEQ ID NO: 743809 - RNA, 19 nt, Homo sapiens
  misc_RNA (1)...(19): siRNA sense strand
gagaaaaguucacaauuca

SEQ ID NO: 743810 - RNA, 19 nt, Homo sapiens
  misc_RNA (1)...(19): siRNA sense strand
cgacaacuauccgcuauuc

SEQ ID NO: 743811 - RNA, 19 nt, Homo sapiens
  misc_RNA (1)...(19): siRNA sense strand
gaggucaggguauuugaua

SEQ ID NO: 743812 - RNA, 19 nt, Homo sapiens
  misc_RNA (1)...(19): siRNA sense strand
gaggcaggcuaccuaguga

SEQ ID NO: 743813 - RNA, 19 nt, Homo sapiens
  misc_RNA (1)...(19): siRNA sense strand
caacaaagcgauaacuuac

SEQ ID NO: 743814 - RNA, 19 nt, Homo sapiens
  misc_RNA (1)...(19): siRNA sense strand
caaaguccaugcugaggau

SEQ ID NO: 743815 - RNA, 19 nt, Homo sapiens
  misc_RNA (1)...(19): siRNA sense strand
uugaagccauugaaacaua

SEQ ID NO: 743816 - RNA, 19 nt, Homo sapiens
  misc_RNA (1)...(19): siRNA sense strand
ugacaauccucccgaagug

SEQ ID NO: 743817 - RNA, 19 nt, Homo sapiens
  misc_RNA (1)...(19): siRNA sense strand
uuaacggucuccagaacua

SEQ ID NO: 743818 - RNA, 19 nt, Homo sapiens
  misc_RNA (1)...(19): siRNA sense strand
caagcauucuagaaaggua

SEQ ID NO: 743819 - RNA, 19 nt, Homo sapiens
  misc_RNA (1)...(19): siRNA sense strand
aaaccuacauuugggaauu

SEQ ID NO: 743820 - RNA, 19 nt, Homo sapiens
  misc_RNA (1)...(19): siRNA sense strand
caagacgggagauuuguuu

SEQ ID NO: 743821 - RNA, 19 nt, Homo sapiens
  misc_RNA (1)...(19): siRNA sense strand
caacuucccuuucccucau

SEQ ID NO: 743822 - RNA, 19 nt, Homo sapiens
  misc_RNA (1)...(19): siRNA sense strand
ggagaucuuucagucuuug

SEQ ID NO: 743823 - RNA, 19 nt, Homo sapiens
  misc_RNA (1)...(19): siRNA sense strand
uggagaaguucgacuaaga

SEQ ID NO: 743824 - RNA, 19 nt, Homo sapiens
  misc_RNA (1)...(19): siRNA sense strand
gaucgggagucacuuugug

SEQ ID NO: 743825 - RNA, 19 nt, Homo sapiens
  misc_RNA (1)...(19): siRNA sense strand
cauacgacauugacauuca

SEQ ID NO: 743826 - RNA, 19 nt, Homo sapiens
  misc_RNA (1)...(19): siRNA sense strand
ggugagaaugcccaaauaa

SEQ ID NO: 743827 - RNA, 19 nt, Homo sapiens
  misc_RNA (1)...(19): siRNA sense strand
uaugauagaggugcuaaua

SEQ ID NO: 743828 - RNA, 19 nt, Homo sapiens
  misc_RNA (1)...(19): siRNA sense strand
cauuauacaugucuaccaa

SEQ ID NO: 743829 - RNA, 19 nt, Homo sapiens
  misc_RNA (1)...(19): siRNA sense strand
caaugacaaucguccaaug

SEQ ID NO: 743830 - RNA, 19 nt, Homo sapiens
  misc_RNA (1)...(19): siRNA sense strand
gagcccagguaucagagaa

SEQ ID NO: 743831 - RNA, 19 nt, Homo sapiens
  misc_RNA (1)...(19): siRNA sense strand
auucuuggcuuucauauca

SEQ ID NO: 743832 - RNA, 19 nt, Homo sapiens
  misc_RNA (1)...(19): siRNA sense strand
gagaggagcagccugaagu

SEQ ID NO: 743833 - RNA, 19 nt, Homo sapiens
  misc_RNA (1)...(19): siRNA sense strand
ucaagagcauuucuaugau

SEQ ID NO: 743834 - RNA, 19 nt, Homo sapiens
  misc_RNA (1)...(19): siRNA sense strand
cuacauuugggaauucuua

SEQ ID NO: 743835 - RNA, 19 nt, Homo sapiens
  misc_RNA (1)...(19): siRNA sense strand
gugauggucuccucugugu

SEQ ID NO: 743836 - RNA, 19 nt, Homo sapiens
  misc_RNA (1)...(19): siRNA sense strand
gcgauaacuuacucuuuag

SEQ ID NO: 743837 - RNA, 19 nt, Homo sapiens
  misc_RNA (1)...(19): siRNA sense strand
gagaaugcccaaauaacau

SEQ ID NO: 743838 - RNA, 19 nt, Homo sapiens
  misc_RNA (1)...(19): siRNA sense strand
aagcaauucucaagacguu

SEQ ID NO: 743839 - RNA, 19 nt, Homo sapiens
  misc_RNA (1)...(19): siRNA sense strand
cucaagacguuucagauug

SEQ ID NO: 743840 - RNA, 19 nt, Homo sapiens
  misc_RNA (1)...(19): siRNA sense strand
gguaucugaugacuauaug

SEQ ID NO: 743841 - RNA, 19 nt, Homo sapiens
  misc_RNA (1)...(19): siRNA sense strand
ccacagcaaaguccuggua

SEQ ID NO: 743842 - RNA, 19 nt, Homo sapiens
  misc_RNA (1)...(19): siRNA sense strand
gaucauucuuguucaggau

SEQ ID NO: 743843 - RNA, 19 nt, Homo sapiens
  misc_RNA (1)...(19): siRNA sense strand
gaucuggacgugggccuua

SEQ ID NO: 743844 - RNA, 19 nt, Homo sapiens
  misc_RNA (1)...(19): siRNA sense strand
uucaagagcauuucuauga

SEQ ID NO: 743845 - RNA, 19 nt, Homo sapiens
  misc_RNA (1)...(19): siRNA sense strand
ccacuacugucucacucaa

SEQ ID NO: 743846 - RNA, 19 nt, Homo sapiens
  misc_RNA (1)...(19): siRNA sense strand
gcuuucauaucaucuacuu

SEQ ID NO: 743847 - RNA, 19 nt, Homo sapiens
  misc_RNA (1)...(19): siRNA sense strand
gcagccacgggccuaaaua

SEQ ID NO: 743848 - RNA, 19 nt, Homo sapiens
  misc_RNA (1)...(19): siRNA sense strand
gcaaagccgacccuugugu

SEQ ID NO: 743849 - RNA, 19 nt, Homo sapiens
  misc_RNA (1)...(19): siRNA sense strand
cagagugguuguccuagau

SEQ ID NO: 743850 - RNA, 19 nt, Homo sapiens
  misc_RNA (1)...(19): siRNA sense strand
agaaugcccaaauaacaua

SEQ ID NO: 743851 - RNA, 19 nt, Homo sapiens
  misc_RNA (1)...(19): siRNA sense strand
ugagaaugcccaaauaaca

SEQ ID NO: 743852 - RNA, 19 nt, Homo sapiens
  misc_RNA (1)...(19): siRNA sense strand
gaucuugauuugggugaga

SEQ ID NO: 743853 - RNA, 19 nt, Homo sapiens
  misc_RNA (1)...(19): siRNA sense strand
uaauauccgacguuaauga

SEQ ID NO: 743854 - RNA, 19 nt, Homo sapiens
  misc_RNA (1)...(19): siRNA sense strand
acaaagcgauaacuuacuc

SEQ ID NO: 743855 - RNA, 19 nt, Homo sapiens
  misc_RNA (1)...(19): siRNA sense strand
gcaagacgggagauuuguu

SEQ ID NO: 743856 - RNA, 19 nt, Homo sapiens
  misc_RNA (1)...(19): siRNA sense strand
ggagcagccugaagucaac

SEQ ID NO: 743857 - RNA, 19 nt, Homo sapiens
  misc_RNA (1)...(19): siRNA sense strand
gacgggagauuuguuugug

SEQ ID NO: 743858 - RNA, 19 nt, Homo sapiens
  misc_RNA (1)...(19): siRNA sense strand
gccaugaccagguaucuga

SEQ ID NO: 743859 - RNA, 19 nt, Homo sapiens
  misc_RNA (1)...(19): siRNA sense strand
gacuguaauuucucuaaca

SEQ ID NO: 743860 - RNA, 19 nt, Homo sapiens
  misc_RNA (1)...(19): siRNA sense strand
aagagcauuucuaugauga

SEQ ID NO: 743861 - RNA, 19 nt, Homo sapiens
  misc_RNA (1)...(19): siRNA sense strand
augcagaaauugaucauuc

SEQ ID NO: 743862 - RNA, 19 nt, Homo sapiens
  misc_RNA (1)...(19): siRNA sense strand
ugacaaucguccaaugauc

SEQ ID NO: 743863 - RNA, 19 nt, Homo sapiens
  misc_RNA (1)...(19): siRNA sense strand
gcgcugagaaccauggauu

SEQ ID NO: 743864 - RNA, 19 nt, Homo sapiens
  misc_RNA (1)...(19): siRNA sense strand
ggaggucucaggcuauaau

SEQ ID NO: 743865 - RNA, 19 nt, Homo sapiens
  misc_RNA (1)...(19): siRNA sense strand
uagaagugguggaugugaa

SEQ ID NO: 743866 - RNA, 19 nt, Homo sapiens
  misc_RNA (1)...(19): siRNA sense strand
gcaauucucaagacguuuc

SEQ ID NO: 743867 - RNA, 19 nt, Homo sapiens
  misc_RNA (1)...(19): siRNA sense strand
agagggccaugaccaggua

SEQ ID NO: 743868 - RNA, 19 nt, Homo sapiens
  misc_RNA (1)...(19): siRNA sense strand
ucacaauucaagagcauuu

SEQ ID NO: 743869 - RNA, 19 nt, Homo sapiens
  misc_RNA (1)...(19): siRNA sense strand
gauccaaccaagcauucua

SEQ ID NO: 743870 - RNA, 19 nt, Homo sapiens
  misc_RNA (1)...(19): siRNA sense strand
agaaauccauacauuaagg

SEQ ID NO: 743871 - RNA, 19 nt, Homo sapiens
  misc_RNA (1)...(19): siRNA sense strand
ucagagugguuguccuaga

SEQ ID NO: 743872 - RNA, 19 nt, Homo sapiens
  misc_RNA (1)...(19): siRNA sense strand
gaaaaucuuugcaaaacag

SEQ ID NO: 743873 - RNA, 19 nt, Homo sapiens
  misc_RNA (1)...(19): siRNA sense strand
gcagaaaaucuuugcaaaa

SEQ ID NO: 743874 - RNA, 19 nt, Homo sapiens
  misc_RNA (1)...(19): siRNA sense strand
ggcaauggauccuuaucuc

SEQ ID NO: 743875 - RNA, 19 nt, Homo sapiens
  misc_RNA (1)...(19): siRNA sense strand
ggucauuucucuggucauc

SEQ ID NO: 743876 - RNA, 19 nt, Homo sapiens
  misc_RNA (1)...(19): siRNA sense strand
gagugguuguccuagauga

SEQ ID NO: 743877 - RNA, 19 nt, Homo sapiens
  misc_RNA (1)...(19): siRNA sense strand
uauccgacguuaaugacaa

SEQ ID NO: 743878 - RNA, 19 nt, Homo sapiens
  misc_RNA (1)...(19): siRNA sense strand
uaucagagaccgggacauu

SEQ ID NO: 743879 - RNA, 19 nt, Homo sapiens
  misc_RNA (1)...(19): siRNA sense strand
ucagaauucuuggcuuuca

SEQ ID NO: 743880 - RNA, 19 nt, Homo sapiens
  misc_RNA (1)...(19): siRNA sense strand
agagaaaaguucacaauuc

SEQ ID NO: 743881 - RNA, 19 nt, Homo sapiens
  misc_RNA (1)...(19): siRNA sense strand
gguaaauccauccacuaaa

SEQ ID NO: 743882 - RNA, 19 nt, Homo sapiens
  misc_RNA (1)...(19): siRNA sense strand
gggccgaggucaggguauu

SEQ ID NO: 743883 - RNA, 19 nt, Homo sapiens
  misc_RNA (1)...(19): siRNA sense strand
gagaaauccauacauuaag

SEQ ID NO: 743884 - RNA, 19 nt, Homo sapiens
  misc_RNA (1)...(19): siRNA sense strand
ggaaagagugguccaugaa

SEQ ID NO: 743885 - RNA, 19 nt, Homo sapiens
  misc_RNA (1)...(19): siRNA sense strand
gcaacgugcuggccgucua

SEQ ID NO: 743886 - RNA, 19 nt, Homo sapiens
  misc_RNA (1)...(19): siRNA sense strand
gccaagaaguguccagaau

SEQ ID NO: 743887 - RNA, 19 nt, Homo sapiens
  misc_RNA (1)...(19): siRNA sense strand
gaaguguccagaauccaua

SEQ ID NO: 743888 - RNA, 19 nt, Homo sapiens
  misc_RNA (1)...(19): siRNA sense strand
gcaacaacguguccuucga

SEQ ID NO: 743889 - RNA, 19 nt, Homo sapiens
  misc_RNA (1)...(19): siRNA sense strand
aaagagugguccaugaaga

SEQ ID NO: 743890 - RNA, 19 nt, Homo sapiens
  misc_RNA (1)...(19): siRNA sense strand
gcagauggacagcaggauu

SEQ ID NO: 743891 - RNA, 19 nt, Homo sapiens
  misc_RNA (1)...(19): siRNA sense strand
caacaacguguccuucgaa

SEQ ID NO: 743892 - RNA, 19 nt, Homo sapiens
  misc_RNA (1)...(19): siRNA sense strand
aaggagaccugcuuugaca

SEQ ID NO: 743893 - RNA, 19 nt, Homo sapiens
  misc_RNA (1)...(19): siRNA sense strand
caagaaguguccagaaucc

SEQ ID NO: 743894 - RNA, 19 nt, Homo sapiens
  misc_RNA (1)...(19): siRNA sense strand
caacguguccuucgaagag

SEQ ID NO: 743895 - RNA, 19 nt, Homo sapiens
  misc_RNA (1)...(19): siRNA sense strand
ggaccauucccgccaagaa

SEQ ID NO: 743896 - RNA, 19 nt, Homo sapiens
  misc_RNA (1)...(19): siRNA sense strand
gaaagagugguccaugaag

SEQ ID NO: 743897 - RNA, 19 nt, Homo sapiens
  misc_RNA (1)...(19): siRNA sense strand
gcagaccacuacaccuucu

SEQ ID NO: 743898 - RNA, 19 nt, Homo sapiens
  misc_RNA (1)...(19): siRNA sense strand
ggagaccugcuuugacaug

SEQ ID NO: 743899 - RNA, 19 nt, Homo sapiens
  misc_RNA (1)...(19): siRNA sense strand
cuuaagcgcugcccagaag

SEQ ID NO: 743900 - RNA, 19 nt, Homo sapiens
  misc_RNA (1)...(19): siRNA sense strand
ggugaccgccuacaucuuc

SEQ ID NO: 743901 - RNA, 19 nt, Homo sapiens
  misc_RNA (1)...(19): siRNA sense strand
acaaggagaccugcuuuga

SEQ ID NO: 743902 - RNA, 19 nt, Homo sapiens
  misc_RNA (1)...(19): siRNA sense strand
guugucaucuuccuagucu

SEQ ID NO: 743903 - RNA, 19 nt, Homo sapiens
  misc_RNA (1)...(19): siRNA sense strand
caaggugaccgccuacauc

SEQ ID NO: 743904 - RNA, 19 nt, Homo sapiens
  misc_RNA (1)...(19): siRNA sense strand
gcuuugacaugcugcagau

SEQ ID NO: 743905 - RNA, 19 nt, Homo sapiens
  misc_RNA (1)...(19): siRNA sense strand
cagguucaccguuggcuuu

SEQ ID NO: 743906 - RNA, 19 nt, Homo sapiens
  misc_RNA (1)...(19): siRNA sense strand
cugcaaagaggcugauuga

SEQ ID NO: 743907 - RNA, 19 nt, Homo sapiens
  misc_RNA (1)...(19): siRNA sense strand
cagauggacagcaggauug

SEQ ID NO: 743908 - RNA, 19 nt, Homo sapiens
  misc_RNA (1)...(19): siRNA sense strand
ggauugccggguacuacua

SEQ ID NO: 743909 - RNA, 19 nt, Homo sapiens
  misc_RNA (1)...(19): siRNA sense strand
gcaaggugaccgccuacau

SEQ ID NO: 743910 - RNA, 19 nt, Homo sapiens
  misc_RNA (1)...(19): siRNA sense strand
ccaagaaguguccagaauc

SEQ ID NO: 743911 - RNA, 19 nt, Homo sapiens
  misc_RNA (1)...(19): siRNA sense strand
ggaccgccauccucaucuc

SEQ ID NO: 743912 - RNA, 19 nt, Homo sapiens
  misc_RNA (1)...(19): siRNA sense strand
caucuccgccugcaucuuc

SEQ ID NO: 743913 - RNA, 19 nt, Homo sapiens
  misc_RNA (1)...(19): siRNA sense strand
agacaaggagaccugcuuu

SEQ ID NO: 743914 - RNA, 19 nt, Homo sapiens
  misc_RNA (1)...(19): siRNA sense strand
cacucugggucaucuauau

SEQ ID NO: 743915 - RNA, 19 nt, Homo sapiens
  misc_RNA (1)...(19): siRNA sense strand
gacaaggagaccugcuuug

SEQ ID NO: 743916 - RNA, 19 nt, Homo sapiens
  misc_RNA (1)...(19): siRNA sense strand
ccacucugggucaucuaua

SEQ ID NO: 743917 - RNA, 19 nt, Homo sapiens
  misc_RNA (1)...(19): siRNA sense strand
gaccauucccgccaagaag

SEQ ID NO: 743918 - RNA, 19 nt, Homo sapiens
  misc_RNA (1)...(19): siRNA sense strand
cauaagggguggaaagagu

SEQ ID NO: 743919 - RNA, 19 nt, Homo sapiens
  misc_RNA (1)...(19): siRNA sense strand
gcaggauugccggguacua

SEQ ID NO: 743920 - RNA, 19 nt, Homo sapiens
  misc_RNA (1)...(19): siRNA sense strand
ccgccuacaucuucuucug

SEQ ID NO: 743921 - RNA, 19 nt, Homo sapiens
  misc_RNA (1)...(19): siRNA sense strand
ggaaacgccaccccaguga

SEQ ID NO: 743922 - RNA, 19 nt, Homo sapiens
  misc_RNA (1)...(19): siRNA sense strand
ggaggaaaggcuguacaca

SEQ ID NO: 743923 - RNA, 19 nt, Homo sapiens
  misc_RNA (1)...(19): siRNA sense strand
caaggagaccugcuuugac

SEQ ID NO: 743924 - RNA, 19 nt, Homo sapiens
  misc_RNA (1)...(19): siRNA sense strand
cuucgaagagagcaggaua

SEQ ID NO: 743925 - RNA, 19 nt, Homo sapiens
  misc_RNA (1)...(19): siRNA sense strand
caccaugcccugcaaagag

SEQ ID NO: 743926 - RNA, 19 nt, Homo sapiens
  misc_RNA (1)...(19): siRNA sense strand
cagccucugugguguuucu

SEQ ID NO: 743927 - RNA, 19 nt, Homo sapiens
  misc_RNA (1)...(19): siRNA sense strand
gcuguggccuggagaacug

SEQ ID NO: 743928 - RNA, 19 nt, Homo sapiens
  misc_RNA (1)...(19): siRNA sense strand
cacccuagcugcugcaucu

SEQ ID NO: 743929 - RNA, 19 nt, Homo sapiens
  misc_RNA (1)...(19): siRNA sense strand
ugccuccucuugcugcuaa

SEQ ID NO: 743930 - RNA, 19 nt, Homo sapiens
  misc_RNA (1)...(19): siRNA sense strand
gcuguggccuagagaacug

SEQ ID NO: 743931 - RNA, 19 nt, Homo sapiens
  misc_RNA (1)...(19): siRNA sense strand
cgcccaaccugcucuagug

SEQ ID NO: 743932 - RNA, 19 nt, Homo sapiens
  misc_RNA (1)...(19): siRNA sense strand
gauacgggcuccugguugu

SEQ ID NO: 743933 - RNA, 19 nt, Homo sapiens
  misc_RNA (1)...(19): siRNA sense strand
gaaaggccuucugcauggu

SEQ ID NO: 743934 - RNA, 19 nt, Homo sapiens
  misc_RNA (1)...(19): siRNA sense strand
ccauuggccuggaggacuu

SEQ ID NO: 743935 - RNA, 19 nt, Homo sapiens
  misc_RNA (1)...(19): siRNA sense strand
ggccagcucgcacuucuug

SEQ ID NO: 743936 - RNA, 19 nt, Homo sapiens
  misc_RNA (1)...(19): siRNA sense strand
gcggaaaggccuucugcau

SEQ ID NO: 743937 - RNA, 19 nt, Homo sapiens
  misc_RNA (1)...(19): siRNA sense strand
cacagguuauggccacaug

SEQ ID NO: 743938 - RNA, 19 nt, Homo sapiens
  misc_RNA (1)...(19): siRNA sense strand
ggaccaagguggcauccua

SEQ ID NO: 743939 - RNA, 19 nt, Homo sapiens
  misc_RNA (1)...(19): siRNA sense strand
gauacgggcuccugguugu

SEQ ID NO: 743940 - RNA, 19 nt, Homo sapiens
  misc_RNA (1)...(19): siRNA sense strand
gaaaggccuucugcauggu

SEQ ID NO: 743941 - RNA, 19 nt, Homo sapiens
  misc_RNA (1)...(19): siRNA sense strand
ccauuggccuggaggacuu

SEQ ID NO: 743942 - RNA, 19 nt, Homo sapiens
  misc_RNA (1)...(19): siRNA sense strand
ggccagcucgcacuucuug

SEQ ID NO: 743943 - RNA, 19 nt, Homo sapiens
  misc_RNA (1)...(19): siRNA sense strand
gcggaaaggccuucugcau

SEQ ID NO: 743944 - RNA, 19 nt, Homo sapiens
  misc_RNA (1)...(19): siRNA sense strand
cacagguuauggccacaug

SEQ ID NO: 743945 - RNA, 19 nt, Homo sapiens
  misc_RNA (1)...(19): siRNA sense strand
gauacgggcuccugguugu

SEQ ID NO: 743946 - RNA, 19 nt, Homo sapiens
  misc_RNA (1)...(19): siRNA sense strand
gaaaggccuucugcauggu

SEQ ID NO: 743947 - RNA, 19 nt, Homo sapiens
  misc_RNA (1)...(19): siRNA sense strand
ccauuggccuggaggacuu

SEQ ID NO: 743948 - RNA, 19 nt, Homo sapiens
  misc_RNA (1)...(19): siRNA sense strand
ggccagcucgcacuucuug

SEQ ID NO: 743949 - RNA, 19 nt, Homo sapiens
  misc_RNA (1)...(19): siRNA sense strand
gcggaaaggccuucugcau

SEQ ID NO: 743950 - RNA, 19 nt, Homo sapiens
  misc_RNA (1)...(19): siRNA sense strand
cacagguuauggccacaug

SEQ ID NO: 743951 - RNA, 19 nt, Homo sapiens
  misc_RNA (1)...(19): siRNA sense strand
gauacgggcuccugguugu

SEQ ID NO: 743952 - RNA, 19 nt, Homo sapiens
  misc_RNA (1)...(19): siRNA sense strand
gaaaggccuucugcauggu

SEQ ID NO: 743953 - RNA, 19 nt, Homo sapiens
  misc_RNA (1)...(19): siRNA sense strand
ccauuggccuggaggacuu

SEQ ID NO: 743954 - RNA, 19 nt, Homo sapiens
  misc_RNA (1)...(19): siRNA sense strand
ggccagcucgcacuucuug

SEQ ID NO: 743955 - RNA, 19 nt, Homo sapiens
  misc_RNA (1)...(19): siRNA sense strand
gcggaaaggccuucugcau

SEQ ID NO: 743956 - RNA, 19 nt, Homo sapiens
  misc_RNA (1)...(19): siRNA sense strand
cacagguuauggccacaug

SEQ ID NO: 743957 - RNA, 19 nt, Homo sapiens
  misc_RNA (1)...(19): siRNA sense strand
gauacgggcuccugguugu

SEQ ID NO: 743958 - RNA, 19 nt, Homo sapiens
  misc_RNA (1)...(19): siRNA sense strand
gaaaggccuucugcauggu

SEQ ID NO: 743959 - RNA, 19 nt, Homo sapiens
  misc_RNA (1)...(19): siRNA sense strand
ccauuggccuggaggacuu

SEQ ID NO: 743960 - RNA, 19 nt, Homo sapiens
  misc_RNA (1)...(19): siRNA sense strand
ggccagcucgcacuucuug

SEQ ID NO: 743961 - RNA, 19 nt, Homo sapiens
  misc_RNA (1)...(19): siRNA sense strand
gcggaaaggccuucugcau

SEQ ID NO: 743962 - RNA, 19 nt, Homo sapiens
  misc_RNA (1)...(19): siRNA sense strand
cacagguuauggccacaug

SEQ ID NO: 743963 - RNA, 19 nt, Homo sapiens
  misc_RNA (1)...(19): siRNA sense strand
cuacaucccucuucucuua

SEQ ID NO: 743964 - RNA, 19 nt, Homo sapiens
  misc_RNA (1)...(19): siRNA sense strand
gaacagagagucaagcaaa

SEQ ID NO: 743965 - RNA, 19 nt, Homo sapiens
  misc_RNA (1)...(19): siRNA sense strand
cguaaugccucuaauguaa

SEQ ID NO: 743966 - RNA, 19 nt, Homo sapiens
  misc_RNA (1)...(19): siRNA sense strand
ugaggaagcuggagaauuc

SEQ ID NO: 743967 - RNA, 19 nt, Homo sapiens
  misc_RNA (1)...(19): siRNA sense strand
uuacauaccuuuaguggaa

SEQ ID NO: 743968 - RNA, 19 nt, Homo sapiens
  misc_RNA (1)...(19): siRNA sense strand
gaagcaagauggaacuguu

SEQ ID NO: 743969 - RNA, 19 nt, Homo sapiens
  misc_RNA (1)...(19): siRNA sense strand
gacaaaggcauuuccaaua

SEQ ID NO: 743970 - RNA, 19 nt, Homo sapiens
  misc_RNA (1)...(19): siRNA sense strand
ggagucagcuguacuagca

SEQ ID NO: 743971 - RNA, 19 nt, Homo sapiens
  misc_RNA (1)...(19): siRNA sense strand
ggaguuugccaaugaauuu

SEQ ID NO: 743972 - RNA, 19 nt, Homo sapiens
  misc_RNA (1)...(19): siRNA sense strand
ggaggaugauuugggaaua

SEQ ID NO: 743973 - RNA, 19 nt, Homo sapiens
  misc_RNA (1)...(19): siRNA sense strand
gaauauaguguccuuauca

SEQ ID NO: 743974 - RNA, 19 nt, Homo sapiens
  misc_RNA (1)...(19): siRNA sense strand
ggaugacaguguucccaua

SEQ ID NO: 743975 - RNA, 19 nt, Homo sapiens
  misc_RNA (1)...(19): siRNA sense strand
ggacacagaggccuucauu

SEQ ID NO: 743976 - RNA, 19 nt, Homo sapiens
  misc_RNA (1)...(19): siRNA sense strand
acagaggccuucauuaguu

SEQ ID NO: 743977 - RNA, 19 nt, Homo sapiens
  misc_RNA (1)...(19): siRNA sense strand
ccaaggagguggacagcaa

SEQ ID NO: 743978 - RNA, 19 nt, Homo sapiens
  misc_RNA (1)...(19): siRNA sense strand
aauaugaacuggucuacaa

SEQ ID NO: 743979 - RNA, 19 nt, Homo sapiens
  misc_RNA (1)...(19): siRNA sense strand
gaacaucugaaccaaagaa

SEQ ID NO: 743980 - RNA, 19 nt, Homo sapiens
  misc_RNA (1)...(19): siRNA sense strand
aagaggaguuugccaauga

SEQ ID NO: 743981 - RNA, 19 nt, Homo sapiens
  misc_RNA (1)...(19): siRNA sense strand
aaggauagaugaugaaauc

SEQ ID NO: 743982 - RNA, 19 nt, Homo sapiens
  misc_RNA (1)...(19): siRNA sense strand
acaaaggcauuuccaauag

SEQ ID NO: 743983 - RNA, 19 nt, Homo sapiens
  misc_RNA (1)...(19): siRNA sense strand
cuuuaggacuucugaaaua

SEQ ID NO: 743984 - RNA, 19 nt, Homo sapiens
  misc_RNA (1)...(19): siRNA sense strand
gauaauuccugagaacuuc

SEQ ID NO: 743985 - RNA, 19 nt, Homo sapiens
  misc_RNA (1)...(19): siRNA sense strand
ggauguacguuguuaccaa

SEQ ID NO: 743986 - RNA, 19 nt, Homo sapiens
  misc_RNA (1)...(19): siRNA sense strand
acagauggauguuaucaga

SEQ ID NO: 743987 - RNA, 19 nt, Homo sapiens
  misc_RNA (1)...(19): siRNA sense strand
caucugaaccaaagaaauu

SEQ ID NO: 743988 - RNA, 19 nt, Homo sapiens
  misc_RNA (1)...(19): siRNA sense strand
ccaagaggaugacaguguu

SEQ ID NO: 743989 - RNA, 19 nt, Homo sapiens
  misc_RNA (1)...(19): siRNA sense strand
uggaaggacugguguuauu

SEQ ID NO: 743990 - RNA, 19 nt, Homo sapiens
  misc_RNA (1)...(19): siRNA sense strand
ggaauauaguguccuuauc

SEQ ID NO: 743991 - RNA, 19 nt, Homo sapiens
  misc_RNA (1)...(19): siRNA sense strand
gcuaaaagaugggauaauu

SEQ ID NO: 743992 - RNA, 19 nt, Homo sapiens
  misc_RNA (1)...(19): siRNA sense strand
cuacaucaaugccaacuuc

SEQ ID NO: 743993 - RNA, 19 nt, Homo sapiens
  misc_RNA (1)...(19): siRNA sense strand
caccaaauguucccaaauc

SEQ ID NO: 743994 - RNA, 19 nt, Homo sapiens
  misc_RNA (1)...(19): siRNA sense strand
acaccugaaucauuuauug

SEQ ID NO: 743995 - RNA, 19 nt, Homo sapiens
  misc_RNA (1)...(19): siRNA sense strand
cuacaacuguggcugagaa

SEQ ID NO: 743996 - RNA, 19 nt, Homo sapiens
  misc_RNA (1)...(19): siRNA sense strand
ccucuucucuuauuacaau

SEQ ID NO: 743997 - RNA, 19 nt, Homo sapiens
  misc_RNA (1)...(19): siRNA sense strand
agagacagauggauguuau

SEQ ID NO: 743998 - RNA, 19 nt, Homo sapiens
  misc_RNA (1)...(19): siRNA sense strand
cuacaacccuccuggacuu

SEQ ID NO: 743999 - RNA, 19 nt, Homo sapiens
  misc_RNA (1)...(19): siRNA sense strand
gaggaugauuugggaauau

SEQ ID NO: 744000 - RNA, 19 nt, Homo sapiens
  misc_RNA (1)...(19): siRNA sense strand
gaaggacugguguuauuug

SEQ ID NO: 744001 - RNA, 19 nt, Homo sapiens
  misc_RNA (1)...(19): siRNA sense strand
ggaaggacugguguuauuu

SEQ ID NO: 744002 - RNA, 19 nt, Homo sapiens
  misc_RNA (1)...(19): siRNA sense strand
uggcaugcauggaguauga

SEQ ID NO: 744003 - RNA, 19 nt, Homo sapiens
  misc_RNA (1)...(19): siRNA sense strand
gaaccaggagucagcugua

SEQ ID NO: 744004 - RNA, 19 nt, Homo sapiens
  misc_RNA (1)...(19): siRNA sense strand
gguguuauuugugcuauug

SEQ ID NO: 744005 - RNA, 19 nt, Homo sapiens
  misc_RNA (1)...(19): siRNA sense strand
caaccaauauuuccucacu

SEQ ID NO: 744006 - RNA, 19 nt, Homo sapiens
  misc_RNA (1)...(19): siRNA sense strand
gggauguucuaauucuaaa

SEQ ID NO: 744007 - RNA, 19 nt, Homo sapiens
  misc_RNA (1)...(19): siRNA sense strand
caaaggcauuuccaauagu

SEQ ID NO: 744008 - RNA, 19 nt, Homo sapiens
  misc_RNA (1)...(19): siRNA sense strand
gagggauguucuaauucua

SEQ ID NO: 744009 - RNA, 19 nt, Homo sapiens
  misc_RNA (1)...(19): siRNA sense strand
uuugagggauguucuaauu

SEQ ID NO: 744010 - RNA, 19 nt, Homo sapiens
  misc_RNA (1)...(19): siRNA sense strand
gcccaaagcaagaaaauua

SEQ ID NO: 744011 - RNA, 19 nt, Homo sapiens
  misc_RNA (1)...(19): siRNA sense strand
ugaauucuccaaccaauau

SEQ ID NO: 744012 - RNA, 19 nt, Homo sapiens
  misc_RNA (1)...(19): siRNA sense strand
aaaggcauuuccaauaguu

SEQ ID NO: 744013 - RNA, 19 nt, Homo sapiens
  misc_RNA (1)...(19): siRNA sense strand
cuaaaucaagcacuucuuu

SEQ ID NO: 744014 - RNA, 19 nt, Homo sapiens
  misc_RNA (1)...(19): siRNA sense strand
auuauucacugccauauga

SEQ ID NO: 744015 - RNA, 19 nt, Homo sapiens
  misc_RNA (1)...(19): siRNA sense strand
ggagcuaaauuacaguuuu

SEQ ID NO: 744016 - RNA, 19 nt, Homo sapiens
  misc_RNA (1)...(19): siRNA sense strand
ggacccaaggcuuauauug

SEQ ID NO: 744017 - RNA, 19 nt, Homo sapiens
  misc_RNA (1)...(19): siRNA sense strand
cuagugcucuugguguaua

SEQ ID NO: 744018 - RNA, 19 nt, Homo sapiens
  misc_RNA (1)...(19): siRNA sense strand
acacagaggccuucauuag

SEQ ID NO: 744019 - RNA, 19 nt, Homo sapiens
  misc_RNA (1)...(19): siRNA sense strand
uauaguguccuuaucauug

SEQ ID NO: 744020 - RNA, 19 nt, Homo sapiens
  misc_RNA (1)...(19): siRNA sense strand
aaaccuauccuacaacugu

SEQ ID NO: 744021 - RNA, 19 nt, Homo sapiens
  misc_RNA (1)...(19): siRNA sense strand
ccucagcugugaagguaaa

SEQ ID NO: 744022 - RNA, 19 nt, Homo sapiens
  misc_RNA (1)...(19): siRNA sense strand
ccaauaacacggaccaaau

SEQ ID NO: 744023 - RNA, 19 nt, Homo sapiens
  misc_RNA (1)...(19): siRNA sense strand
ggauaauuccugagaacuu

SEQ ID NO: 744024 - RNA, 19 nt, Homo sapiens
  misc_RNA (1)...(19): siRNA sense strand
gggaauauaguguccuuau

SEQ ID NO: 744025 - RNA, 19 nt, Homo sapiens
  misc_RNA (1)...(19): siRNA sense strand
gauuccagcuacaucaaug

SEQ ID NO: 744026 - RNA, 19 nt, Homo sapiens
  misc_RNA (1)...(19): siRNA sense strand
gacaaaaccuauccuacaa

SEQ ID NO: 744027 - RNA, 19 nt, Homo sapiens
  misc_RNA (1)...(19): siRNA sense strand
gaacuucaguguuuucagu

SEQ ID NO: 744028 - RNA, 19 nt, Homo sapiens
  misc_RNA (1)...(19): siRNA sense strand
gcauuguauuccugagaaa

SEQ ID NO: 744029 - RNA, 19 nt, Homo sapiens
  misc_RNA (1)...(19): siRNA sense strand
agauaaacauucuggaaca

SEQ ID NO: 744030 - RNA, 19 nt, Homo sapiens
  misc_RNA (1)...(19): siRNA sense strand
ccaaugaauuucugaagcu

SEQ ID NO: 744031 - RNA, 19 nt, Homo sapiens
  misc_RNA (1)...(19): siRNA sense strand
ugagggauguucuaauucu

SEQ ID NO: 744032 - RNA, 19 nt, Homo sapiens
  misc_RNA (1)...(19): siRNA sense strand
cuaucuaccaguuucauua

SEQ ID NO: 744033 - RNA, 19 nt, Homo sapiens
  misc_RNA (1)...(19): siRNA sense strand
uggaacaucugaaccaaag

SEQ ID NO: 744034 - RNA, 19 nt, Homo sapiens
  misc_RNA (1)...(19): siRNA sense strand
caaauguucccaaauccuu

SEQ ID NO: 744035 - RNA, 19 nt, Homo sapiens
  misc_RNA (1)...(19): siRNA sense strand
gguaccaguucuaagaugu

SEQ ID NO: 744036 - RNA, 19 nt, Homo sapiens
  misc_RNA (1)...(19): siRNA sense strand
cuaaacaccaaauacguaa

SEQ ID NO: 744037 - RNA, 19 nt, Homo sapiens
  misc_RNA (1)...(19): siRNA sense strand
ggaccaaaucaacuccuuu

SEQ ID NO: 744038 - RNA, 19 nt, Homo sapiens
  misc_RNA (1)...(19): siRNA sense strand
agaauuggccagaccauga

SEQ ID NO: 744039 - RNA, 19 nt, Homo sapiens
  misc_RNA (1)...(19): siRNA sense strand
agaccaagcaagaguguaa

SEQ ID NO: 744040 - RNA, 19 nt, Homo sapiens
  misc_RNA (1)...(19): siRNA sense strand
agauggauguuaucagaga

SEQ ID NO: 744041 - RNA, 19 nt, Homo sapiens
  misc_RNA (1)...(19): siRNA sense strand
aaacgcaggaacaauauga

SEQ ID NO: 744042 - RNA, 19 nt, Homo sapiens
  misc_RNA (1)...(19): siRNA sense strand
ccaguuucauuacaagaau

SEQ ID NO: 744043 - RNA, 19 nt, Homo sapiens
  misc_RNA (1)...(19): siRNA sense strand
caucccucuucucuuauua

SEQ ID NO: 744044 - RNA, 19 nt, Homo sapiens
  misc_RNA (1)...(19): siRNA sense strand
guaaugccucuaauguaaa

SEQ ID NO: 744045 - RNA, 19 nt, Homo sapiens
  misc_RNA (1)...(19): siRNA sense strand
ucuaaacaccaaauacgua

SEQ ID NO: 744046 - RNA, 19 nt, Homo sapiens
  misc_RNA (1)...(19): siRNA sense strand
gcaggaacaauaugaacug

SEQ ID NO: 744047 - RNA, 19 nt, Homo sapiens
  misc_RNA (1)...(19): siRNA sense strand
gaugaggcccaaagcaaga

SEQ ID NO: 744048 - RNA, 19 nt, Homo sapiens
  misc_RNA (1)...(19): siRNA sense strand
gaugacaguguucccauau

SEQ ID NO: 744049 - RNA, 19 nt, Homo sapiens
  misc_RNA (1)...(19): siRNA sense strand
caagugguaccaguucuaa

SEQ ID NO: 744050 - RNA, 19 nt, Homo sapiens
  misc_RNA (1)...(19): siRNA sense strand
uaaagcaccaugacucuag

SEQ ID NO: 744051 - RNA, 19 nt, Homo sapiens
  misc_RNA (1)...(19): siRNA sense strand
caauaacacggaccaaauc

SEQ ID NO: 744052 - RNA, 19 nt, Homo sapiens
  misc_RNA (1)...(19): siRNA sense strand
aaagaggaguuugccaaug

SEQ ID NO: 744053 - RNA, 19 nt, Homo sapiens
  misc_RNA (1)...(19): siRNA sense strand
gaugggauaauuccugaga

SEQ ID NO: 744054 - RNA, 19 nt, Homo sapiens
  misc_RNA (1)...(19): siRNA sense strand
auacuuagaccaagcaaga

SEQ ID NO: 744055 - RNA, 19 nt, Homo sapiens
  misc_RNA (1)...(19): siRNA sense strand
ggacaccugaaucauuuau

SEQ ID NO: 744056 - RNA, 19 nt, Homo sapiens
  misc_RNA (1)...(19): siRNA sense strand
caagcagacucuuauucuc

SEQ ID NO: 744057 - RNA, 19 nt, Homo sapiens
  misc_RNA (1)...(19): siRNA sense strand
caagcaaagcauuguauuc

SEQ ID NO: 744058 - RNA, 19 nt, Homo sapiens
  misc_RNA (1)...(19): siRNA sense strand
ugcagaaguuccuggauga

SEQ ID NO: 744059 - RNA, 19 nt, Homo sapiens
  misc_RNA (1)...(19): siRNA sense strand
caaguacaaggcagacaaa

SEQ ID NO: 744060 - RNA, 19 nt, Homo sapiens
  misc_RNA (1)...(19): siRNA sense strand
ugauuuaccugagaagcaa

SEQ ID NO: 744061 - RNA, 19 nt, Homo sapiens
  misc_RNA (1)...(19): siRNA sense strand
ccaggagucagcuguacua

SEQ ID NO: 744062 - RNA, 19 nt, Homo sapiens
  misc_RNA (1)...(19): siRNA sense strand
ucacugaauucuccaacca

SEQ ID NO: 744063 - RNA, 19 nt, Homo sapiens
  misc_RNA (1)...(19): siRNA sense strand
cuacaucccucuucucuua

SEQ ID NO: 744064 - RNA, 19 nt, Homo sapiens
  misc_RNA (1)...(19): siRNA sense strand
gaacagagagucaagcaaa

SEQ ID NO: 744065 - RNA, 19 nt, Homo sapiens
  misc_RNA (1)...(19): siRNA sense strand
cguaaugccucuaauguaa

SEQ ID NO: 744066 - RNA, 19 nt, Homo sapiens
  misc_RNA (1)...(19): siRNA sense strand
ugaggaagcuggagaauuc

SEQ ID NO: 744067 - RNA, 19 nt, Homo sapiens
  misc_RNA (1)...(19): siRNA sense strand
uuacauaccuuuaguggaa

SEQ ID NO: 744068 - RNA, 19 nt, Homo sapiens
  misc_RNA (1)...(19): siRNA sense strand
gaagcaagauggaacuguu

SEQ ID NO: 744069 - RNA, 19 nt, Homo sapiens
  misc_RNA (1)...(19): siRNA sense strand
gacaaaggcauuuccaaua

SEQ ID NO: 744070 - RNA, 19 nt, Homo sapiens
  misc_RNA (1)...(19): siRNA sense strand
ggagucagcuguacuagca

SEQ ID NO: 744071 - RNA, 19 nt, Homo sapiens
  misc_RNA (1)...(19): siRNA sense strand
ggaguuugccaaugaauuu

SEQ ID NO: 744072 - RNA, 19 nt, Homo sapiens
  misc_RNA (1)...(19): siRNA sense strand
ggaggaugauuugggaaua

SEQ ID NO: 744073 - RNA, 19 nt, Homo sapiens
  misc_RNA (1)...(19): siRNA sense strand
gaauauaguguccuuauca

SEQ ID NO: 744074 - RNA, 19 nt, Homo sapiens
  misc_RNA (1)...(19): siRNA sense strand
ggaugacaguguucccaua

SEQ ID NO: 744075 - RNA, 19 nt, Homo sapiens
  misc_RNA (1)...(19): siRNA sense strand
ggacacagaggccuucauu

SEQ ID NO: 744076 - RNA, 19 nt, Homo sapiens
  misc_RNA (1)...(19): siRNA sense strand
acagaggccuucauuaguu

SEQ ID NO: 744077 - RNA, 19 nt, Homo sapiens
  misc_RNA (1)...(19): siRNA sense strand
ccaaggagguggacagcaa

SEQ ID NO: 744078 - RNA, 19 nt, Homo sapiens
  misc_RNA (1)...(19): siRNA sense strand
aauaugaacuggucuacaa

SEQ ID NO: 744079 - RNA, 19 nt, Homo sapiens
  misc_RNA (1)...(19): siRNA sense strand
gaacaucugaaccaaagaa

SEQ ID NO: 744080 - RNA, 19 nt, Homo sapiens
  misc_RNA (1)...(19): siRNA sense strand
aagaggaguuugccaauga

SEQ ID NO: 744081 - RNA, 19 nt, Homo sapiens
  misc_RNA (1)...(19): siRNA sense strand
aaggauagaugaugaaauc

SEQ ID NO: 744082 - RNA, 19 nt, Homo sapiens
  misc_RNA (1)...(19): siRNA sense strand
acaaaggcauuuccaauag

SEQ ID NO: 744083 - RNA, 19 nt, Homo sapiens
  misc_RNA (1)...(19): siRNA sense strand
cuuuaggacuucugaaaua

SEQ ID NO: 744084 - RNA, 19 nt, Homo sapiens
  misc_RNA (1)...(19): siRNA sense strand
gauaauuccugagaacuuc

SEQ ID NO: 744085 - RNA, 19 nt, Homo sapiens
  misc_RNA (1)...(19): siRNA sense strand
ggauguacguuguuaccaa

SEQ ID NO: 744086 - RNA, 19 nt, Homo sapiens
  misc_RNA (1)...(19): siRNA sense strand
acagauggauguuaucaga

SEQ ID NO: 744087 - RNA, 19 nt, Homo sapiens
  misc_RNA (1)...(19): siRNA sense strand
caucugaaccaaagaaauu

SEQ ID NO: 744088 - RNA, 19 nt, Homo sapiens
  misc_RNA (1)...(19): siRNA sense strand
ccaagaggaugacaguguu

SEQ ID NO: 744089 - RNA, 19 nt, Homo sapiens
  misc_RNA (1)...(19): siRNA sense strand
uggaaggacugguguuauu

SEQ ID NO: 744090 - RNA, 19 nt, Homo sapiens
  misc_RNA (1)...(19): siRNA sense strand
ggaauauaguguccuuauc

SEQ ID NO: 744091 - RNA, 19 nt, Homo sapiens
  misc_RNA (1)...(19): siRNA sense strand
gcuaaaagaugggauaauu

SEQ ID NO: 744092 - RNA, 19 nt, Homo sapiens
  misc_RNA (1)...(19): siRNA sense strand
cuacaucaaugccaacuuc

SEQ ID NO: 744093 - RNA, 19 nt, Homo sapiens
  misc_RNA (1)...(19): siRNA sense strand
caccaaauguucccaaauc

SEQ ID NO: 744094 - RNA, 19 nt, Homo sapiens
  misc_RNA (1)...(19): siRNA sense strand
acaccugaaucauuuauug

SEQ ID NO: 744095 - RNA, 19 nt, Homo sapiens
  misc_RNA (1)...(19): siRNA sense strand
cuacaacuguggcugagaa

SEQ ID NO: 744096 - RNA, 19 nt, Homo sapiens
  misc_RNA (1)...(19): siRNA sense strand
ccucuucucuuauuacaau

SEQ ID NO: 744097 - RNA, 19 nt, Homo sapiens
  misc_RNA (1)...(19): siRNA sense strand
agagacagauggauguuau

SEQ ID NO: 744098 - RNA, 19 nt, Homo sapiens
  misc_RNA (1)...(19): siRNA sense strand
cuacaacccuccuggacuu

SEQ ID NO: 744099 - RNA, 19 nt, Homo sapiens
  misc_RNA (1)...(19): siRNA sense strand
gaggaugauuugggaauau

SEQ ID NO: 744100 - RNA, 19 nt, Homo sapiens
  misc_RNA (1)...(19): siRNA sense strand
gaaggacugguguuauuug

SEQ ID NO: 744101 - RNA, 19 nt, Homo sapiens
  misc_RNA (1)...(19): siRNA sense strand
ggaaggacugguguuauuu

SEQ ID NO: 744102 - RNA, 19 nt, Homo sapiens
  misc_RNA (1)...(19): siRNA sense strand
uggcaugcauggaguauga

SEQ ID NO: 744103 - RNA, 19 nt, Homo sapiens
  misc_RNA (1)...(19): siRNA sense strand
gaaccaggagucagcugua

SEQ ID NO: 744104 - RNA, 19 nt, Homo sapiens
  misc_RNA (1)...(19): siRNA sense strand
gguguuauuugugcuauug

SEQ ID NO: 744105 - RNA, 19 nt, Homo sapiens
  misc_RNA (1)...(19): siRNA sense strand
caaccaauauuuccucacu

SEQ ID NO: 744106 - RNA, 19 nt, Homo sapiens
  misc_RNA (1)...(19): siRNA sense strand
gggauguucuaauucuaaa

SEQ ID NO: 744107 - RNA, 19 nt, Homo sapiens
  misc_RNA (1)...(19): siRNA sense strand
caaaggcauuuccaauagu

SEQ ID NO: 744108 - RNA, 19 nt, Homo sapiens
  misc_RNA (1)...(19): siRNA sense strand
gagggauguucuaauucua

SEQ ID NO: 744109 - RNA, 19 nt, Homo sapiens
  misc_RNA (1)...(19): siRNA sense strand
uuugagggauguucuaauu

SEQ ID NO: 744110 - RNA, 19 nt, Homo sapiens
  misc_RNA (1)...(19): siRNA sense strand
gcccaaagcaagaaaauua

SEQ ID NO: 744111 - RNA, 19 nt, Homo sapiens
  misc_RNA (1)...(19): siRNA sense strand
ugaauucuccaaccaauau

SEQ ID NO: 744112 - RNA, 19 nt, Homo sapiens
  misc_RNA (1)...(19): siRNA sense strand
aaaggcauuuccaauaguu

SEQ ID NO: 744113 - RNA, 19 nt, Homo sapiens
  misc_RNA (1)...(19): siRNA sense strand
cuaaaucaagcacuucuuu

SEQ ID NO: 744114 - RNA, 19 nt, Homo sapiens
  misc_RNA (1)...(19): siRNA sense strand
auuauucacugccauauga

SEQ ID NO: 744115 - RNA, 19 nt, Homo sapiens
  misc_RNA (1)...(19): siRNA sense strand
ggagcuaaauuacaguuuu

SEQ ID NO: 744116 - RNA, 19 nt, Homo sapiens
  misc_RNA (1)...(19): siRNA sense strand
ggacccaaggcuuauauug

SEQ ID NO: 744117 - RNA, 19 nt, Homo sapiens
  misc_RNA (1)...(19): siRNA sense strand
cuagugcucuugguguaua

SEQ ID NO: 744118 - RNA, 19 nt, Homo sapiens
  misc_RNA (1)...(19): siRNA sense strand
acacagaggccuucauuag

SEQ ID NO: 744119 - RNA, 19 nt, Homo sapiens
  misc_RNA (1)...(19): siRNA sense strand
uauaguguccuuaucauug

SEQ ID NO: 744120 - RNA, 19 nt, Homo sapiens
  misc_RNA (1)...(19): siRNA sense strand
aaaccuauccuacaacugu

SEQ ID NO: 744121 - RNA, 19 nt, Homo sapiens
  misc_RNA (1)...(19): siRNA sense strand
ccucagcugugaagguaaa

SEQ ID NO: 744122 - RNA, 19 nt, Homo sapiens
  misc_RNA (1)...(19): siRNA sense strand
ccaauaacacggaccaaau

SEQ ID NO: 744123 - RNA, 19 nt, Homo sapiens
  misc_RNA (1)...(19): siRNA sense strand
ggauaauuccugagaacuu

SEQ ID NO: 744124 - RNA, 19 nt, Homo sapiens
  misc_RNA (1)...(19): siRNA sense strand
gggaauauaguguccuuau

SEQ ID NO: 744125 - RNA, 19 nt, Homo sapiens
  misc_RNA (1)...(19): siRNA sense strand
gauuccagcuacaucaaug

SEQ ID NO: 744126 - RNA, 19 nt, Homo sapiens
  misc_RNA (1)...(19): siRNA sense strand
gacaaaaccuauccuacaa

SEQ ID NO: 744127 - RNA, 19 nt, Homo sapiens
  misc_RNA (1)...(19): siRNA sense strand
gaacuucaguguuuucagu

SEQ ID NO: 744128 - RNA, 19 nt, Homo sapiens
  misc_RNA (1)...(19): siRNA sense strand
gcauuguauuccugagaaa

SEQ ID NO: 744129 - RNA, 19 nt, Homo sapiens
  misc_RNA (1)...(19): siRNA sense strand
agauaaacauucuggaaca

SEQ ID NO: 744130 - RNA, 19 nt, Homo sapiens
  misc_RNA (1)...(19): siRNA sense strand
ccaaugaauuucugaagcu

SEQ ID NO: 744131 - RNA, 19 nt, Homo sapiens
  misc_RNA (1)...(19): siRNA sense strand
ugagggauguucuaauucu

SEQ ID NO: 744132 - RNA, 19 nt, Homo sapiens
  misc_RNA (1)...(19): siRNA sense strand
cuaucuaccaguuucauua

SEQ ID NO: 744133 - RNA, 19 nt, Homo sapiens
  misc_RNA (1)...(19): siRNA sense strand
uggaacaucugaaccaaag

SEQ ID NO: 744134 - RNA, 19 nt, Homo sapiens
  misc_RNA (1)...(19): siRNA sense strand
caaauguucccaaauccuu

SEQ ID NO: 744135 - RNA, 19 nt, Homo sapiens
  misc_RNA (1)...(19): siRNA sense strand
gguaccaguucuaagaugu

SEQ ID NO: 744136 - RNA, 19 nt, Homo sapiens
  misc_RNA (1)...(19): siRNA sense strand
cuaaacaccaaauacguaa

SEQ ID NO: 744137 - RNA, 19 nt, Homo sapiens
  misc_RNA (1)...(19): siRNA sense strand
ggaccaaaucaacuccuuu

SEQ ID NO: 744138 - RNA, 19 nt, Homo sapiens
  misc_RNA (1)...(19): siRNA sense strand
agaauuggccagaccauga

SEQ ID NO: 744139 - RNA, 19 nt, Homo sapiens
  misc_RNA (1)...(19): siRNA sense strand
agaccaagcaagaguguaa

SEQ ID NO: 744140 - RNA, 19 nt, Homo sapiens
  misc_RNA (1)...(19): siRNA sense strand
agauggauguuaucagaga

SEQ ID NO: 744141 - RNA, 19 nt, Homo sapiens
  misc_RNA (1)...(19): siRNA sense strand
aaacgcaggaacaauauga

SEQ ID NO: 744142 - RNA, 19 nt, Homo sapiens
  misc_RNA (1)...(19): siRNA sense strand
ccaguuucauuacaagaau

SEQ ID NO: 744143 - RNA, 19 nt, Homo sapiens
  misc_RNA (1)...(19): siRNA sense strand
caucccucuucucuuauua

SEQ ID NO: 744144 - RNA, 19 nt, Homo sapiens
  misc_RNA (1)...(19): siRNA sense strand
guaaugccucuaauguaaa

SEQ ID NO: 744145 - RNA, 19 nt, Homo sapiens
  misc_RNA (1)...(19): siRNA sense strand
ucuaaacaccaaauacgua

SEQ ID NO: 744146 - RNA, 19 nt, Homo sapiens
  misc_RNA (1)...(19): siRNA sense strand
gcaggaacaauaugaacug

SEQ ID NO: 744147 - RNA, 19 nt, Homo sapiens
  misc_RNA (1)...(19): siRNA sense strand
gaugaggcccaaagcaaga

SEQ ID NO: 744148 - RNA, 19 nt, Homo sapiens
  misc_RNA (1)...(19): siRNA sense strand
gaugacaguguucccauau

SEQ ID NO: 744149 - RNA, 19 nt, Homo sapiens
  misc_RNA (1)...(19): siRNA sense strand
caagugguaccaguucuaa

SEQ ID NO: 744150 - RNA, 19 nt, Homo sapiens
  misc_RNA (1)...(19): siRNA sense strand
uaaagcaccaugacucuag

SEQ ID NO: 744151 - RNA, 19 nt, Homo sapiens
  misc_RNA (1)...(19): siRNA sense strand
caauaacacggaccaaauc

SEQ ID NO: 744152 - RNA, 19 nt, Homo sapiens
  misc_RNA (1)...(19): siRNA sense strand
aaagaggaguuugccaaug

SEQ ID NO: 744153 - RNA, 19 nt, Homo sapiens
  misc_RNA (1)...(19): siRNA sense strand
gaugggauaauuccugaga

SEQ ID NO: 744154 - RNA, 19 nt, Homo sapiens
  misc_RNA (1)...(19): siRNA sense strand
auacuuagaccaagcaaga

SEQ ID NO: 744155 - RNA, 19 nt, Homo sapiens
  misc_RNA (1)...(19): siRNA sense strand
ggacaccugaaucauuuau

SEQ ID NO: 744156 - RNA, 19 nt, Homo sapiens
  misc_RNA (1)...(19): siRNA sense strand
caagcagacucuuauucuc

SEQ ID NO: 744157 - RNA, 19 nt, Homo sapiens
  misc_RNA (1)...(19): siRNA sense strand
caagcaaagcauuguauuc

SEQ ID NO: 744158 - RNA, 19 nt, Homo sapiens
  misc_RNA (1)...(19): siRNA sense strand
ugcagaaguuccuggauga

SEQ ID NO: 744159 - RNA, 19 nt, Homo sapiens
  misc_RNA (1)...(19): siRNA sense strand
caaguacaaggcagacaaa

SEQ ID NO: 744160 - RNA, 19 nt, Homo sapiens
  misc_RNA (1)...(19): siRNA sense strand
ugauuuaccugagaagcaa

SEQ ID NO: 744161 - RNA, 19 nt, Homo sapiens
  misc_RNA (1)...(19): siRNA sense strand
ccaggagucagcuguacua

SEQ ID NO: 744162 - RNA, 19 nt, Homo sapiens
  misc_RNA (1)...(19): siRNA sense strand
ucacugaauucuccaacca

SEQ ID NO: 744163 - RNA, 19 nt, Homo sapiens
  misc_RNA (1)...(19): siRNA sense strand
cagcagugauaacaauuua

SEQ ID NO: 744164 - RNA, 19 nt, Homo sapiens
  misc_RNA (1)...(19): siRNA sense strand
cagugucucuuaauucuua

SEQ ID NO: 744165 - RNA, 19 nt, Homo sapiens
  misc_RNA (1)...(19): siRNA sense strand
gagaaaugguacuugauga

SEQ ID NO: 744166 - RNA, 19 nt, Homo sapiens
  misc_RNA (1)...(19): siRNA sense strand
uuacauaccugcagugguu

SEQ ID NO: 744167 - RNA, 19 nt, Homo sapiens
  misc_RNA (1)...(19): siRNA sense strand
uugcugaucugcugauuua

SEQ ID NO: 744168 - RNA, 19 nt, Homo sapiens
  misc_RNA (1)...(19): siRNA sense strand
uaacagcagugauaacaau

SEQ ID NO: 744169 - RNA, 19 nt, Homo sapiens
  misc_RNA (1)...(19): siRNA sense strand
gugcauauguggcaaaguu

SEQ ID NO: 744170 - RNA, 19 nt, Homo sapiens
  misc_RNA (1)...(19): siRNA sense strand
cagagacacuggcaagaaa

SEQ ID NO: 744171 - RNA, 19 nt, Homo sapiens
  misc_RNA (1)...(19): siRNA sense strand
ggguuuguguugcuaguua

SEQ ID NO: 744172 - RNA, 19 nt, Homo sapiens
  misc_RNA (1)...(19): siRNA sense strand
cuaccagucugcuuaguuu

SEQ ID NO: 744173 - RNA, 19 nt, Homo sapiens
  misc_RNA (1)...(19): siRNA sense strand
uaugcuaccucuucuauug

SEQ ID NO: 744174 - RNA, 19 nt, Homo sapiens
  misc_RNA (1)...(19): siRNA sense strand
uauccaggccuuauucuua

SEQ ID NO: 744175 - RNA, 19 nt, Homo sapiens
  misc_RNA (1)...(19): siRNA sense strand
ggagaaaugguacuugaug

SEQ ID NO: 744176 - RNA, 19 nt, Homo sapiens
  misc_RNA (1)...(19): siRNA sense strand
cgucacauccaauuaauaa

SEQ ID NO: 744177 - RNA, 19 nt, Homo sapiens
  misc_RNA (1)...(19): siRNA sense strand
ggauaaaguagccaauauu

SEQ ID NO: 744178 - RNA, 19 nt, Homo sapiens
  misc_RNA (1)...(19): siRNA sense strand
ggauugcucuccauacauc

SEQ ID NO: 744179 - RNA, 19 nt, Homo sapiens
  misc_RNA (1)...(19): siRNA sense strand
gcauauguggcaaaguuua

SEQ ID NO: 744180 - RNA, 19 nt, Homo sapiens
  misc_RNA (1)...(19): siRNA sense strand
ccacgucacauccaauuaa

SEQ ID NO: 744181 - RNA, 19 nt, Homo sapiens
  misc_RNA (1)...(19): siRNA sense strand
gaggauaaaguagccaaua

SEQ ID NO: 744182 - RNA, 19 nt, Homo sapiens
  misc_RNA (1)...(19): siRNA sense strand
ccaaaggauucaaauuuac

SEQ ID NO: 744183 - RNA, 19 nt, Homo sapiens
  misc_RNA (1)...(19): siRNA sense strand
ggacuuguuuucuguauug

SEQ ID NO: 744184 - RNA, 19 nt, Homo sapiens
  misc_RNA (1)...(19): siRNA sense strand
uggaagaaaucagaagaaa

SEQ ID NO: 744185 - RNA, 19 nt, Homo sapiens
  misc_RNA (1)...(19): siRNA sense strand
gagacacuggcaagaaaua

SEQ ID NO: 744186 - RNA, 19 nt, Homo sapiens
  misc_RNA (1)...(19): siRNA sense strand
cuaaugcccucuguuguga

SEQ ID NO: 744187 - RNA, 19 nt, Homo sapiens
  misc_RNA (1)...(19): siRNA sense strand
ggacuaacaguacgaugga

SEQ ID NO: 744188 - RNA, 19 nt, Homo sapiens
  misc_RNA (1)...(19): siRNA sense strand
gguugaucguggauuauuu

SEQ ID NO: 744189 - RNA, 19 nt, Homo sapiens
  misc_RNA (1)...(19): siRNA sense strand
gcugugcgcuaucauucuu

SEQ ID NO: 744190 - RNA, 19 nt, Homo sapiens
  misc_RNA (1)...(19): siRNA sense strand
cauuaugcaucuugcugua

SEQ ID NO: 744191 - RNA, 19 nt, Homo sapiens
  misc_RNA (1)...(19): siRNA sense strand
gcauuuugcuuagcuauaa

SEQ ID NO: 744192 - RNA, 19 nt, Homo sapiens
  misc_RNA (1)...(19): siRNA sense strand
gcagugauaacaauuuaca

SEQ ID NO: 744193 - RNA, 19 nt, Homo sapiens
  misc_RNA (1)...(19): siRNA sense strand
ccucuuacagcuuaucaua

SEQ ID NO: 744194 - RNA, 19 nt, Homo sapiens
  misc_RNA (1)...(19): siRNA sense strand
gaaaugguacuugaugaca

SEQ ID NO: 744195 - RNA, 19 nt, Homo sapiens
  misc_RNA (1)...(19): siRNA sense strand
aggauaaaguagccaauau

SEQ ID NO: 744196 - RNA, 19 nt, Homo sapiens
  misc_RNA (1)...(19): siRNA sense strand
uaauuuaccggucaaacaa

SEQ ID NO: 744197 - RNA, 19 nt, Homo sapiens
  misc_RNA (1)...(19): siRNA sense strand
guggcaaaguuuauaaauc

SEQ ID NO: 744198 - RNA, 19 nt, Homo sapiens
  misc_RNA (1)...(19): siRNA sense strand
acccaccucuuacagcuua

SEQ ID NO: 744199 - RNA, 19 nt, Homo sapiens
  misc_RNA (1)...(19): siRNA sense strand
acaguacgauggacagugu

SEQ ID NO: 744200 - RNA, 19 nt, Homo sapiens
  misc_RNA (1)...(19): siRNA sense strand
guacuguuguugcuuaaaa

SEQ ID NO: 744201 - RNA, 19 nt, Homo sapiens
  misc_RNA (1)...(19): siRNA sense strand
ucuuacagcuuaucauagu

SEQ ID NO: 744202 - RNA, 19 nt, Homo sapiens
  misc_RNA (1)...(19): siRNA sense strand
uuuguacuguuguugcuua

SEQ ID NO: 744203 - RNA, 19 nt, Homo sapiens
  misc_RNA (1)...(19): siRNA sense strand
uggcaaaguuuauaaaucc

SEQ ID NO: 744204 - RNA, 19 nt, Homo sapiens
  misc_RNA (1)...(19): siRNA sense strand
cccgguugaucguggauua

SEQ ID NO: 744205 - RNA, 19 nt, Homo sapiens
  misc_RNA (1)...(19): siRNA sense strand
gccuuauucuuauagacua

SEQ ID NO: 744206 - RNA, 19 nt, Homo sapiens
  misc_RNA (1)...(19): siRNA sense strand
gcugguaaaccgccuaugu

SEQ ID NO: 744207 - RNA, 19 nt, Homo sapiens
  misc_RNA (1)...(19): siRNA sense strand
gguuuguguugcuaguuaa

SEQ ID NO: 744208 - RNA, 19 nt, Homo sapiens
  misc_RNA (1)...(19): siRNA sense strand
gacaguagugguuuuaaua

SEQ ID NO: 744209 - RNA, 19 nt, Homo sapiens
  misc_RNA (1)...(19): siRNA sense strand
ccauacaucacguggauau

SEQ ID NO: 744210 - RNA, 19 nt, Homo sapiens
  misc_RNA (1)...(19): siRNA sense strand
cuauggugcuucugacguu

SEQ ID NO: 744211 - RNA, 19 nt, Homo sapiens
  misc_RNA (1)...(19): siRNA sense strand
uuucuuaucucagucauca

SEQ ID NO: 744212 - RNA, 19 nt, Homo sapiens
  misc_RNA (1)...(19): siRNA sense strand
cagcuucaaugucuuucug

SEQ ID NO: 744213 - RNA, 19 nt, Homo sapiens
  misc_RNA (1)...(19): siRNA sense strand
uuauucaggugcugguaaa

SEQ ID NO: 744214 - RNA, 19 nt, Homo sapiens
  misc_RNA (1)...(19): siRNA sense strand
gucaacauuuaguaugcua

SEQ ID NO: 744215 - RNA, 19 nt, Homo sapiens
  misc_RNA (1)...(19): siRNA sense strand
ucagagacacuggcaagaa

SEQ ID NO: 744216 - RNA, 19 nt, Homo sapiens
  misc_RNA (1)...(19): siRNA sense strand
gucacuaccagucugcuua

SEQ ID NO: 744217 - RNA, 19 nt, Homo sapiens
  misc_RNA (1)...(19): siRNA sense strand
cuucagcccucuuccaaag

SEQ ID NO: 744218 - RNA, 19 nt, Homo sapiens
  misc_RNA (1)...(19): siRNA sense strand
uguuguggcuuccuucguu

SEQ ID NO: 744219 - RNA, 19 nt, Homo sapiens
  misc_RNA (1)...(19): siRNA sense strand
gccuauguuuggugauuau

SEQ ID NO: 744220 - RNA, 19 nt, Homo sapiens
  misc_RNA (1)...(19): siRNA sense strand
gagcuuuuguucuacguuu

SEQ ID NO: 744221 - RNA, 19 nt, Homo sapiens
  misc_RNA (1)...(19): siRNA sense strand
auacaucacguggauauga

SEQ ID NO: 744222 - RNA, 19 nt, Homo sapiens
  misc_RNA (1)...(19): siRNA sense strand
ucagcccucuuccaaagga

SEQ ID NO: 744223 - RNA, 19 nt, Homo sapiens
  misc_RNA (1)...(19): siRNA sense strand
agucuuggcuuugcuuugu

SEQ ID NO: 744224 - RNA, 19 nt, Homo sapiens
  misc_RNA (1)...(19): siRNA sense strand
ccgccuauguuuggugauu

SEQ ID NO: 744225 - RNA, 19 nt, Homo sapiens
  misc_RNA (1)...(19): siRNA sense strand
guacaacaguuuuaauugc

SEQ ID NO: 744226 - RNA, 19 nt, Homo sapiens
  misc_RNA (1)...(19): siRNA sense strand
cgccuauguuuggugauua

SEQ ID NO: 744227 - RNA, 19 nt, Homo sapiens
  misc_RNA (1)...(19): siRNA sense strand
ggaagaaaucagaagaaaa

SEQ ID NO: 744228 - RNA, 19 nt, Homo sapiens
  misc_RNA (1)...(19): siRNA sense strand
cacgucacauccaauuaau

SEQ ID NO: 744229 - RNA, 19 nt, Homo sapiens
  misc_RNA (1)...(19): siRNA sense strand
gaucugcugauuuacauac

SEQ ID NO: 744230 - RNA, 19 nt, Homo sapiens
  misc_RNA (1)...(19): siRNA sense strand
cuucaugcguacaacaguu

SEQ ID NO: 744231 - RNA, 19 nt, Homo sapiens
  misc_RNA (1)...(19): siRNA sense strand
guucuucuugguauacuuu

SEQ ID NO: 744232 - RNA, 19 nt, Homo sapiens
  misc_RNA (1)...(19): siRNA sense strand
ggauccuccucagaaacua

SEQ ID NO: 744233 - RNA, 19 nt, Homo sapiens
  misc_RNA (1)...(19): siRNA sense strand
uagcuuguguaacuuccuu

SEQ ID NO: 744234 - RNA, 19 nt, Homo sapiens
  misc_RNA (1)...(19): siRNA sense strand
ccuaaugcccucuguugug

SEQ ID NO: 744235 - RNA, 19 nt, Homo sapiens
  misc_RNA (1)...(19): siRNA sense strand
gugcagcuucaaugucuuu

SEQ ID NO: 744236 - RNA, 19 nt, Homo sapiens
  misc_RNA (1)...(19): siRNA sense strand
aauauuuggugcagcuuca

SEQ ID NO: 744237 - RNA, 19 nt, Homo sapiens
  misc_RNA (1)...(19): siRNA sense strand
uuaccacgccuugccauuu

SEQ ID NO: 744238 - RNA, 19 nt, Homo sapiens
  misc_RNA (1)...(19): siRNA sense strand
gcugaucugcugauuuaca

SEQ ID NO: 744239 - RNA, 19 nt, Homo sapiens
  misc_RNA (1)...(19): siRNA sense strand
uuggauuacccaccucuua

SEQ ID NO: 744240 - RNA, 19 nt, Homo sapiens
  misc_RNA (1)...(19): siRNA sense strand
uuaauaggacuaacaguac

SEQ ID NO: 744241 - RNA, 19 nt, Homo sapiens
  misc_RNA (1)...(19): siRNA sense strand
guggaagaaaucagaagaa

SEQ ID NO: 744242 - RNA, 19 nt, Homo sapiens
  misc_RNA (1)...(19): siRNA sense strand
ccugcuuccugcaugcaua

SEQ ID NO: 744243 - RNA, 19 nt, Homo sapiens
  misc_RNA (1)...(19): siRNA sense strand
guugaucguggauuauuug

SEQ ID NO: 744244 - RNA, 19 nt, Homo sapiens
  misc_RNA (1)...(19): siRNA sense strand
ggauuacccaccucuuaca

SEQ ID NO: 744245 - RNA, 19 nt, Homo sapiens
  misc_RNA (1)...(19): siRNA sense strand
guauuguuguggcuuccuu

SEQ ID NO: 744246 - RNA, 19 nt, Homo sapiens
  misc_RNA (1)...(19): siRNA sense strand
cauauguggcaaaguuuau

SEQ ID NO: 744247 - RNA, 19 nt, Homo sapiens
  misc_RNA (1)...(19): siRNA sense strand
acagcagugauaacaauuu

SEQ ID NO: 744248 - RNA, 19 nt, Homo sapiens
  misc_RNA (1)...(19): siRNA sense strand
auccaggccuuauucuuau

SEQ ID NO: 744249 - RNA, 19 nt, Homo sapiens
  misc_RNA (1)...(19): siRNA sense strand
uuaauuuaccggucaaaca

SEQ ID NO: 744250 - RNA, 19 nt, Homo sapiens
  misc_RNA (1)...(19): siRNA sense strand
uccaggccuuauucuuaua

SEQ ID NO: 744251 - RNA, 19 nt, Homo sapiens
  misc_RNA (1)...(19): siRNA sense strand
guauugguguguuuuguau

SEQ ID NO: 744252 - RNA, 19 nt, Homo sapiens
  misc_RNA (1)...(19): siRNA sense strand
uuaugcaucuugcuguauc

SEQ ID NO: 744253 - RNA, 19 nt, Homo sapiens
  misc_RNA (1)...(19): siRNA sense strand
agaaacuaccggacuuguu

SEQ ID NO: 744254 - RNA, 19 nt, Homo sapiens
  misc_RNA (1)...(19): siRNA sense strand
acuggauccuccucagaaa

SEQ ID NO: 744255 - RNA, 19 nt, Homo sapiens
  misc_RNA (1)...(19): siRNA sense strand
gaaagggguuuguguugcu

SEQ ID NO: 744256 - RNA, 19 nt, Homo sapiens
  misc_RNA (1)...(19): siRNA sense strand
guucuuggaauaucuugug

SEQ ID NO: 744257 - RNA, 19 nt, Homo sapiens
  misc_RNA (1)...(19): siRNA sense strand
aaugguacuugaugacagu

SEQ ID NO: 744258 - RNA, 19 nt, Homo sapiens
  misc_RNA (1)...(19): siRNA sense strand
gugcuucugacguugauga

SEQ ID NO: 744259 - RNA, 19 nt, Homo sapiens
  misc_RNA (1)...(19): siRNA sense strand
uuaucucagucaucacuau

SEQ ID NO: 744260 - RNA, 19 nt, Homo sapiens
  misc_RNA (1)...(19): siRNA sense strand
gccacgucacauccaauua

SEQ ID NO: 744261 - RNA, 19 nt, Homo sapiens
  misc_RNA (1)...(19): siRNA sense strand
cucagaaacuaccggacuu

SEQ ID NO: 744262 - RNA, 19 nt, Homo sapiens
  misc_RNA (1)...(19): siRNA sense strand
uuucuguauugguguguuu

SEQ ID NO: 744263 - RNA, 19 nt, Homo sapiens
  misc_RNA (1)...(19): siRNA sense strand
caucugcuccucugacaaa

SEQ ID NO: 744264 - RNA, 19 nt, Homo sapiens
  misc_RNA (1)...(19): siRNA sense strand
gagcccaccugcugugaca

SEQ ID NO: 744265 - RNA, 19 nt, Homo sapiens
  misc_RNA (1)...(19): siRNA sense strand
caccugcugugacaacugu

SEQ ID NO: 744266 - RNA, 19 nt, Homo sapiens
  misc_RNA (1)...(19): siRNA sense strand
gcaccugcccacacacagu

SEQ ID NO: 744267 - RNA, 19 nt, Homo sapiens
  misc_RNA (1)...(19): siRNA sense strand
ccacacacaguuugguuac

SEQ ID NO: 744268 - RNA, 19 nt, Homo sapiens
  misc_RNA (1)...(19): siRNA sense strand
gcaggaagcugaagaguug

SEQ ID NO: 744269 - RNA, 19 nt, Homo sapiens
  misc_RNA (1)...(19): siRNA sense strand
gcagaaaguugaucauugu

SEQ ID NO: 744270 - RNA, 19 nt, Homo sapiens
  misc_RNA (1)...(19): siRNA sense strand
gagaguagcugcccugugu

SEQ ID NO: 744271 - RNA, 19 nt, Homo sapiens
  misc_RNA (1)...(19): siRNA sense strand
ugaagaagccagaaacuuu

SEQ ID NO: 744272 - RNA, 19 nt, Homo sapiens
  misc_RNA (1)...(19): siRNA sense strand
uuagagagcugacagaugu

SEQ ID NO: 744273 - RNA, 19 nt, Homo sapiens
  misc_RNA (1)...(19): siRNA sense strand
ggcagaaaguugaucauug

SEQ ID NO: 744274 - RNA, 19 nt, Homo sapiens
  misc_RNA (1)...(19): siRNA sense strand
ggaggaagacauucugaaa

SEQ ID NO: 744275 - RNA, 19 nt, Homo sapiens
  misc_RNA (1)...(19): siRNA sense strand
ggaagacucaaauacagua

SEQ ID NO: 744276 - RNA, 19 nt, Homo sapiens
  misc_RNA (1)...(19): siRNA sense strand
gaaggaggaggaagacauu

SEQ ID NO: 744277 - RNA, 19 nt, Homo sapiens
  misc_RNA (1)...(19): siRNA sense strand
gaaaggaaugcuagaagug

SEQ ID NO: 744278 - RNA, 19 nt, Homo sapiens
  misc_RNA (1)...(19): siRNA sense strand
ggguguggauggcgucaua

SEQ ID NO: 744279 - RNA, 19 nt, Homo sapiens
  misc_RNA (1)...(19): siRNA sense strand
ggaauccugguuaauguaa

SEQ ID NO: 744280 - RNA, 19 nt, Homo sapiens
  misc_RNA (1)...(19): siRNA sense strand
aagcaugccucacugcaaa

SEQ ID NO: 744281 - RNA, 19 nt, Homo sapiens
  misc_RNA (1)...(19): siRNA sense strand
ugaaaggaaugcuagaagu

SEQ ID NO: 744282 - RNA, 19 nt, Homo sapiens
  misc_RNA (1)...(19): siRNA sense strand
gagaacauacggccuaauc

SEQ ID NO: 744283 - RNA, 19 nt, Homo sapiens
  misc_RNA (1)...(19): siRNA sense strand
ggacggagaacgugaccuu

SEQ ID NO: 744284 - RNA, 19 nt, Homo sapiens
  misc_RNA (1)...(19): siRNA sense strand
ggagagcaaugagcugcaa

SEQ ID NO: 744285 - RNA, 19 nt, Homo sapiens
  misc_RNA (1)...(19): siRNA sense strand
gaauccugguuaauguaaa

SEQ ID NO: 744286 - RNA, 19 nt, Homo sapiens
  misc_RNA (1)...(19): siRNA sense strand
gaacgugaccuugaagaag

SEQ ID NO: 744287 - RNA, 19 nt, Homo sapiens
  misc_RNA (1)...(19): siRNA sense strand
uuaccagccugagaacaua

SEQ ID NO: 744288 - RNA, 19 nt, Homo sapiens
  misc_RNA (1)...(19): siRNA sense strand
cggagaacgugaccuugaa

SEQ ID NO: 744289 - RNA, 19 nt, Homo sapiens
  misc_RNA (1)...(19): siRNA sense strand
gcaaugagcugcaaaaccu

SEQ ID NO: 744290 - RNA, 19 nt, Homo sapiens
  misc_RNA (1)...(19): siRNA sense strand
gcucagggaggucaaguug

SEQ ID NO: 744291 - RNA, 19 nt, Homo sapiens
  misc_RNA (1)...(19): siRNA sense strand
gaagaagccagaaacuuuu

SEQ ID NO: 744292 - RNA, 19 nt, Homo sapiens
  misc_RNA (1)...(19): siRNA sense strand
gcccaggaguaccaaguga

SEQ ID NO: 744293 - RNA, 19 nt, Homo sapiens
  misc_RNA (1)...(19): siRNA sense strand
ggaaugcuagaaguguuua

SEQ ID NO: 744294 - RNA, 19 nt, Homo sapiens
  misc_RNA (1)...(19): siRNA sense strand
ugacaucagagaagagaaa

SEQ ID NO: 744295 - RNA, 19 nt, Homo sapiens
  misc_RNA (1)...(19): siRNA sense strand
ccacaagaaguccaugcua

SEQ ID NO: 744296 - RNA, 19 nt, Homo sapiens
  misc_RNA (1)...(19): siRNA sense strand
agaaguccaugcuagacaa

SEQ ID NO: 744297 - RNA, 19 nt, Homo sapiens
  misc_RNA (1)...(19): siRNA sense strand
gggcagaaaguugaucauu

SEQ ID NO: 744298 - RNA, 19 nt, Homo sapiens
  misc_RNA (1)...(19): siRNA sense strand
cuucuggaauccugguuaa

SEQ ID NO: 744299 - RNA, 19 nt, Homo sapiens
  misc_RNA (1)...(19): siRNA sense strand
gaaguccaugcuagacaaa

SEQ ID NO: 744300 - RNA, 19 nt, Homo sapiens
  misc_RNA (1)...(19): siRNA sense strand
uuacgaacucugaaacuga

SEQ ID NO: 744301 - RNA, 19 nt, Homo sapiens
  misc_RNA (1)...(19): siRNA sense strand
gucauuugcuggcuuugug

SEQ ID NO: 744302 - RNA, 19 nt, Homo sapiens
  misc_RNA (1)...(19): siRNA sense strand
gccuggaacuccugacaca

SEQ ID NO: 744303 - RNA, 19 nt, Homo sapiens
  misc_RNA (1)...(19): siRNA sense strand
gagaacgugaccuugaaga

SEQ ID NO: 744304 - RNA, 19 nt, Homo sapiens
  misc_RNA (1)...(19): siRNA sense strand
cuggaauccugguuaaugu

SEQ ID NO: 744305 - RNA, 19 nt, Homo sapiens
  misc_RNA (1)...(19): siRNA sense strand
gaggaggaagacauucuga

SEQ ID NO: 744306 - RNA, 19 nt, Homo sapiens
  misc_RNA (1)...(19): siRNA sense strand
ucacugcaaaccacaagaa

SEQ ID NO: 744307 - RNA, 19 nt, Homo sapiens
  misc_RNA (1)...(19): siRNA sense strand
gaacucugaaacugagaug

SEQ ID NO: 744308 - RNA, 19 nt, Homo sapiens
  misc_RNA (1)...(19): siRNA sense strand
acaagaaguccaugcuaga

SEQ ID NO: 744309 - RNA, 19 nt, Homo sapiens
  misc_RNA (1)...(19): siRNA sense strand
aaggaaugcuagaaguguu

SEQ ID NO: 744310 - RNA, 19 nt, Homo sapiens
  misc_RNA (1)...(19): siRNA sense strand
ugacaaaaccaacgucuug

SEQ ID NO: 744311 - RNA, 19 nt, Homo sapiens
  misc_RNA (1)...(19): siRNA sense strand
ugcuagaaguguuuagaga

SEQ ID NO: 744312 - RNA, 19 nt, Homo sapiens
  misc_RNA (1)...(19): siRNA sense strand
ggaggaggaagacauucug

SEQ ID NO: 744313 - RNA, 19 nt, Homo sapiens
  misc_RNA (1)...(19): siRNA sense strand
ucgagcuccugaucugaaa

SEQ ID NO: 744314 - RNA, 19 nt, Homo sapiens
  misc_RNA (1)...(19): siRNA sense strand
guuucgagcuccugaucug

SEQ ID NO: 744315 - RNA, 19 nt, Homo sapiens
  misc_RNA (1)...(19): siRNA sense strand
ugaaaagccuuacgaacuc

SEQ ID NO: 744316 - RNA, 19 nt, Homo sapiens
  misc_RNA (1)...(19): siRNA sense strand
gaggaagacauucugaaaa

SEQ ID NO: 744317 - RNA, 19 nt, Homo sapiens
  misc_RNA (1)...(19): siRNA sense strand
aaggucauuugcuggcuuu

SEQ ID NO: 744318 - RNA, 19 nt, Homo sapiens
  misc_RNA (1)...(19): siRNA sense strand
caagcaugccucacugcaa

SEQ ID NO: 744319 - RNA, 19 nt, Homo sapiens
  misc_RNA (1)...(19): siRNA sense strand
gcagacccagucccugaga

SEQ ID NO: 744320 - RNA, 19 nt, Homo sapiens
  misc_RNA (1)...(19): siRNA sense strand
gcuucuggaauccugguua

SEQ ID NO: 744321 - RNA, 19 nt, Homo sapiens
  misc_RNA (1)...(19): siRNA sense strand
cuggaagacucaaauacag

SEQ ID NO: 744322 - RNA, 19 nt, Homo sapiens
  misc_RNA (1)...(19): siRNA sense strand
ccuggaagacucaaauaca

SEQ ID NO: 744323 - RNA, 19 nt, Homo sapiens
  misc_RNA (1)...(19): siRNA sense strand
gaaacuucuacucuucugu

SEQ ID NO: 744324 - RNA, 19 nt, Homo sapiens
  misc_RNA (1)...(19): siRNA sense strand
aaaggaaugcuagaagugu

SEQ ID NO: 744325 - RNA, 19 nt, Homo sapiens
  misc_RNA (1)...(19): siRNA sense strand
ggacugggaggagagcaau

SEQ ID NO: 744326 - RNA, 19 nt, Homo sapiens
  misc_RNA (1)...(19): siRNA sense strand
uggagaugcugaggcagaa

SEQ ID NO: 744327 - RNA, 19 nt, Homo sapiens
  misc_RNA (1)...(19): siRNA sense strand
guuaccagccugagaacau

SEQ ID NO: 744328 - RNA, 19 nt, Homo sapiens
  misc_RNA (1)...(19): siRNA sense strand
ggaggacgggaaggucauu

SEQ ID NO: 744329 - RNA, 19 nt, Homo sapiens
  misc_RNA (1)...(19): siRNA sense strand
agaacgugaccuugaagaa

SEQ ID NO: 744330 - RNA, 19 nt, Homo sapiens
  misc_RNA (1)...(19): siRNA sense strand
ggagaacgugaccuugaag

SEQ ID NO: 744331 - RNA, 19 nt, Homo sapiens
  misc_RNA (1)...(19): siRNA sense strand
ugcaaaaccuggagaagga

SEQ ID NO: 744332 - RNA, 19 nt, Homo sapiens
  misc_RNA (1)...(19): siRNA sense strand
cugcaaaccacaagaaguc

SEQ ID NO: 744333 - RNA, 19 nt, Homo sapiens
  misc_RNA (1)...(19): siRNA sense strand
ggacgggaaggucauuugc

SEQ ID NO: 744334 - RNA, 19 nt, Homo sapiens
  misc_RNA (1)...(19): siRNA sense strand
cugagaacauacggccuaa

SEQ ID NO: 744335 - RNA, 19 nt, Homo sapiens
  misc_RNA (1)...(19): siRNA sense strand
uggagaaggaggaggaaga

SEQ ID NO: 744336 - RNA, 19 nt, Homo sapiens
  misc_RNA (1)...(19): siRNA sense strand
ucuggaauccugguuaaug

SEQ ID NO: 744337 - RNA, 19 nt, Homo sapiens
  misc_RNA (1)...(19): siRNA sense strand
cuuacgaacucugaaacug

SEQ ID NO: 744338 - RNA, 19 nt, Homo sapiens
  misc_RNA (1)...(19): siRNA sense strand
gcaggaagcugaagaguug

SEQ ID NO: 744339 - RNA, 19 nt, Homo sapiens
  misc_RNA (1)...(19): siRNA sense strand
gcagaaaguugaucauugu

SEQ ID NO: 744340 - RNA, 19 nt, Homo sapiens
  misc_RNA (1)...(19): siRNA sense strand
gagaguagcugcccugugu

SEQ ID NO: 744341 - RNA, 19 nt, Homo sapiens
  misc_RNA (1)...(19): siRNA sense strand
ugaagaagccagaaacuuu

SEQ ID NO: 744342 - RNA, 19 nt, Homo sapiens
  misc_RNA (1)...(19): siRNA sense strand
uuagagagcugacagaugu

SEQ ID NO: 744343 - RNA, 19 nt, Homo sapiens
  misc_RNA (1)...(19): siRNA sense strand
ggcagaaaguugaucauug

SEQ ID NO: 744344 - RNA, 19 nt, Homo sapiens
  misc_RNA (1)...(19): siRNA sense strand
ggaggaagacauucugaaa

SEQ ID NO: 744345 - RNA, 19 nt, Homo sapiens
  misc_RNA (1)...(19): siRNA sense strand
ggaagacucaaauacagua

SEQ ID NO: 744346 - RNA, 19 nt, Homo sapiens
  misc_RNA (1)...(19): siRNA sense strand
gaaggaggaggaagacauu

SEQ ID NO: 744347 - RNA, 19 nt, Homo sapiens
  misc_RNA (1)...(19): siRNA sense strand
gaaaggaaugcuagaagug

SEQ ID NO: 744348 - RNA, 19 nt, Homo sapiens
  misc_RNA (1)...(19): siRNA sense strand
ggguguggauggcgucaua

SEQ ID NO: 744349 - RNA, 19 nt, Homo sapiens
  misc_RNA (1)...(19): siRNA sense strand
ggaauccugguuaauguaa

SEQ ID NO: 744350 - RNA, 19 nt, Homo sapiens
  misc_RNA (1)...(19): siRNA sense strand
aagcaugccucacugcaaa

SEQ ID NO: 744351 - RNA, 19 nt, Homo sapiens
  misc_RNA (1)...(19): siRNA sense strand
ugaaaggaaugcuagaagu

SEQ ID NO: 744352 - RNA, 19 nt, Homo sapiens
  misc_RNA (1)...(19): siRNA sense strand
gagaacauacggccuaauc

SEQ ID NO: 744353 - RNA, 19 nt, Homo sapiens
  misc_RNA (1)...(19): siRNA sense strand
ggacggagaacgugaccuu

SEQ ID NO: 744354 - RNA, 19 nt, Homo sapiens
  misc_RNA (1)...(19): siRNA sense strand
ggagagcaaugagcugcaa

SEQ ID NO: 744355 - RNA, 19 nt, Homo sapiens
  misc_RNA (1)...(19): siRNA sense strand
gaauccugguuaauguaaa

SEQ ID NO: 744356 - RNA, 19 nt, Homo sapiens
  misc_RNA (1)...(19): siRNA sense strand
gaacgugaccuugaagaag

SEQ ID NO: 744357 - RNA, 19 nt, Homo sapiens
  misc_RNA (1)...(19): siRNA sense strand
uuaccagccugagaacaua

SEQ ID NO: 744358 - RNA, 19 nt, Homo sapiens
  misc_RNA (1)...(19): siRNA sense strand
cggagaacgugaccuugaa

SEQ ID NO: 744359 - RNA, 19 nt, Homo sapiens
  misc_RNA (1)...(19): siRNA sense strand
gcaaugagcugcaaaaccu

SEQ ID NO: 744360 - RNA, 19 nt, Homo sapiens
  misc_RNA (1)...(19): siRNA sense strand
gcucagggaggucaaguug

SEQ ID NO: 744361 - RNA, 19 nt, Homo sapiens
  misc_RNA (1)...(19): siRNA sense strand
gaagaagccagaaacuuuu

SEQ ID NO: 744362 - RNA, 19 nt, Homo sapiens
  misc_RNA (1)...(19): siRNA sense strand
gcccaggaguaccaaguga

SEQ ID NO: 744363 - RNA, 19 nt, Homo sapiens
  misc_RNA (1)...(19): siRNA sense strand
ggaaugcuagaaguguuua

SEQ ID NO: 744364 - RNA, 19 nt, Homo sapiens
  misc_RNA (1)...(19): siRNA sense strand
ugacaucagagaagagaaa

SEQ ID NO: 744365 - RNA, 19 nt, Homo sapiens
  misc_RNA (1)...(19): siRNA sense strand
ccacaagaaguccaugcua

SEQ ID NO: 744366 - RNA, 19 nt, Homo sapiens
  misc_RNA (1)...(19): siRNA sense strand
agaaguccaugcuagacaa

SEQ ID NO: 744367 - RNA, 19 nt, Homo sapiens
  misc_RNA (1)...(19): siRNA sense strand
gggcagaaaguugaucauu

SEQ ID NO: 744368 - RNA, 19 nt, Homo sapiens
  misc_RNA (1)...(19): siRNA sense strand
cuucuggaauccugguuaa

SEQ ID NO: 744369 - RNA, 19 nt, Homo sapiens
  misc_RNA (1)...(19): siRNA sense strand
gaaguccaugcuagacaaa

SEQ ID NO: 744370 - RNA, 19 nt, Homo sapiens
  misc_RNA (1)...(19): siRNA sense strand
uuacgaacucugaaacuga

SEQ ID NO: 744371 - RNA, 19 nt, Homo sapiens
  misc_RNA (1)...(19): siRNA sense strand
gucauuugcuggcuuugug

SEQ ID NO: 744372 - RNA, 19 nt, Homo sapiens
  misc_RNA (1)...(19): siRNA sense strand
gccuggaacuccugacaca

SEQ ID NO: 744373 - RNA, 19 nt, Homo sapiens
  misc_RNA (1)...(19): siRNA sense strand
gagaacgugaccuugaaga

SEQ ID NO: 744374 - RNA, 19 nt, Homo sapiens
  misc_RNA (1)...(19): siRNA sense strand
cuggaauccugguuaaugu

SEQ ID NO: 744375 - RNA, 19 nt, Homo sapiens
  misc_RNA (1)...(19): siRNA sense strand
gaggaggaagacauucuga

SEQ ID NO: 744376 - RNA, 19 nt, Homo sapiens
  misc_RNA (1)...(19): siRNA sense strand
ucacugcaaaccacaagaa

SEQ ID NO: 744377 - RNA, 19 nt, Homo sapiens
  misc_RNA (1)...(19): siRNA sense strand
gaacucugaaacugagaug

SEQ ID NO: 744378 - RNA, 19 nt, Homo sapiens
  misc_RNA (1)...(19): siRNA sense strand
acaagaaguccaugcuaga

SEQ ID NO: 744379 - RNA, 19 nt, Homo sapiens
  misc_RNA (1)...(19): siRNA sense strand
aaggaaugcuagaaguguu

SEQ ID NO: 744380 - RNA, 19 nt, Homo sapiens
  misc_RNA (1)...(19): siRNA sense strand
ugacaaaaccaacgucuug

SEQ ID NO: 744381 - RNA, 19 nt, Homo sapiens
  misc_RNA (1)...(19): siRNA sense strand
ugcuagaaguguuuagaga

SEQ ID NO: 744382 - RNA, 19 nt, Homo sapiens
  misc_RNA (1)...(19): siRNA sense strand
ggaggaggaagacauucug

SEQ ID NO: 744383 - RNA, 19 nt, Homo sapiens
  misc_RNA (1)...(19): siRNA sense strand
ucgagcuccugaucugaaa

SEQ ID NO: 744384 - RNA, 19 nt, Homo sapiens
  misc_RNA (1)...(19): siRNA sense strand
guuucgagcuccugaucug

SEQ ID NO: 744385 - RNA, 19 nt, Homo sapiens
  misc_RNA (1)...(19): siRNA sense strand
ugaaaagccuuacgaacuc

SEQ ID NO: 744386 - RNA, 19 nt, Homo sapiens
  misc_RNA (1)...(19): siRNA sense strand
gaggaagacauucugaaaa

SEQ ID NO: 744387 - RNA, 19 nt, Homo sapiens
  misc_RNA (1)...(19): siRNA sense strand
aaggucauuugcuggcuuu

SEQ ID NO: 744388 - RNA, 19 nt, Homo sapiens
  misc_RNA (1)...(19): siRNA sense strand
caagcaugccucacugcaa

SEQ ID NO: 744389 - RNA, 19 nt, Homo sapiens
  misc_RNA (1)...(19): siRNA sense strand
gcagacccagucccugaga

SEQ ID NO: 744390 - RNA, 19 nt, Homo sapiens
  misc_RNA (1)...(19): siRNA sense strand
gcuucuggaauccugguua

SEQ ID NO: 744391 - RNA, 19 nt, Homo sapiens
  misc_RNA (1)...(19): siRNA sense strand
cuggaagacucaaauacag

SEQ ID NO: 744392 - RNA, 19 nt, Homo sapiens
  misc_RNA (1)...(19): siRNA sense strand
ccuggaagacucaaauaca

SEQ ID NO: 744393 - RNA, 19 nt, Homo sapiens
  misc_RNA (1)...(19): siRNA sense strand
gaaacuucuacucuucugu

SEQ ID NO: 744394 - RNA, 19 nt, Homo sapiens
  misc_RNA (1)...(19): siRNA sense strand
aaaggaaugcuagaagugu

SEQ ID NO: 744395 - RNA, 19 nt, Homo sapiens
  misc_RNA (1)...(19): siRNA sense strand
ggacugggaggagagcaau

SEQ ID NO: 744396 - RNA, 19 nt, Homo sapiens
  misc_RNA (1)...(19): siRNA sense strand
uggagaugcugaggcagaa

SEQ ID NO: 744397 - RNA, 19 nt, Homo sapiens
  misc_RNA (1)...(19): siRNA sense strand
guuaccagccugagaacau

SEQ ID NO: 744398 - RNA, 19 nt, Homo sapiens
  misc_RNA (1)...(19): siRNA sense strand
ggaggacgggaaggucauu

SEQ ID NO: 744399 - RNA, 19 nt, Homo sapiens
  misc_RNA (1)...(19): siRNA sense strand
agaacgugaccuugaagaa

SEQ ID NO: 744400 - RNA, 19 nt, Homo sapiens
  misc_RNA (1)...(19): siRNA sense strand
ggagaacgugaccuugaag

SEQ ID NO: 744401 - RNA, 19 nt, Homo sapiens
  misc_RNA (1)...(19): siRNA sense strand
ugcaaaaccuggagaagga

SEQ ID NO: 744402 - RNA, 19 nt, Homo sapiens
  misc_RNA (1)...(19): siRNA sense strand
cugcaaaccacaagaaguc

SEQ ID NO: 744403 - RNA, 19 nt, Homo sapiens
  misc_RNA (1)...(19): siRNA sense strand
ggacgggaaggucauuugc

SEQ ID NO: 744404 - RNA, 19 nt, Homo sapiens
  misc_RNA (1)...(19): siRNA sense strand
cugagaacauacggccuaa

SEQ ID NO: 744405 - RNA, 19 nt, Homo sapiens
  misc_RNA (1)...(19): siRNA sense strand
uggagaaggaggaggaaga

SEQ ID NO: 744406 - RNA, 19 nt, Homo sapiens
  misc_RNA (1)...(19): siRNA sense strand
ucuggaauccugguuaaug

SEQ ID NO: 744407 - RNA, 19 nt, Homo sapiens
  misc_RNA (1)...(19): siRNA sense strand
cuuacgaacucugaaacug

SEQ ID NO: 744408 - RNA, 19 nt, Homo sapiens
  misc_RNA (1)...(19): siRNA sense strand
gcaggaagcugaagaguug

SEQ ID NO: 744409 - RNA, 19 nt, Homo sapiens
  misc_RNA (1)...(19): siRNA sense strand
gcagaaaguugaucauugu

SEQ ID NO: 744410 - RNA, 19 nt, Homo sapiens
  misc_RNA (1)...(19): siRNA sense strand
gagaguagcugcccugugu

SEQ ID NO: 744411 - RNA, 19 nt, Homo sapiens
  misc_RNA (1)...(19): siRNA sense strand
ugaagaagccagaaacuuu

SEQ ID NO: 744412 - RNA, 19 nt, Homo sapiens
  misc_RNA (1)...(19): siRNA sense strand
uuagagagcugacagaugu

SEQ ID NO: 744413 - RNA, 19 nt, Homo sapiens
  misc_RNA (1)...(19): siRNA sense strand
ggcagaaaguugaucauug

SEQ ID NO: 744414 - RNA, 19 nt, Homo sapiens
  misc_RNA (1)...(19): siRNA sense strand
ggaggaagacauucugaaa

SEQ ID NO: 744415 - RNA, 19 nt, Homo sapiens
  misc_RNA (1)...(19): siRNA sense strand
ggaagacucaaauacagua

SEQ ID NO: 744416 - RNA, 19 nt, Homo sapiens
  misc_RNA (1)...(19): siRNA sense strand
gaaggaggaggaagacauu

SEQ ID NO: 744417 - RNA, 19 nt, Homo sapiens
  misc_RNA (1)...(19): siRNA sense strand
gaaaggaaugcuagaagug

SEQ ID NO: 744418 - RNA, 19 nt, Homo sapiens
  misc_RNA (1)...(19): siRNA sense strand
ggguguggauggcgucaua

SEQ ID NO: 744419 - RNA, 19 nt, Homo sapiens
  misc_RNA (1)...(19): siRNA sense strand
ggaauccugguuaauguaa

SEQ ID NO: 744420 - RNA, 19 nt, Homo sapiens
  misc_RNA (1)...(19): siRNA sense strand
aagcaugccucacugcaaa

SEQ ID NO: 744421 - RNA, 19 nt, Homo sapiens
  misc_RNA (1)...(19): siRNA sense strand
ugaaaggaaugcuagaagu

SEQ ID NO: 744422 - RNA, 19 nt, Homo sapiens
  misc_RNA (1)...(19): siRNA sense strand
gagaacauacggccuaauc

SEQ ID NO: 744423 - RNA, 19 nt, Homo sapiens
  misc_RNA (1)...(19): siRNA sense strand
ggacggagaacgugaccuu

SEQ ID NO: 744424 - RNA, 19 nt, Homo sapiens
  misc_RNA (1)...(19): siRNA sense strand
ggagagcaaugagcugcaa

SEQ ID NO: 744425 - RNA, 19 nt, Homo sapiens
  misc_RNA (1)...(19): siRNA sense strand
gaauccugguuaauguaaa

SEQ ID NO: 744426 - RNA, 19 nt, Homo sapiens
  misc_RNA (1)...(19): siRNA sense strand
gaacgugaccuugaagaag

SEQ ID NO: 744427 - RNA, 19 nt, Homo sapiens
  misc_RNA (1)...(19): siRNA sense strand
uuaccagccugagaacaua

SEQ ID NO: 744428 - RNA, 19 nt, Homo sapiens
  misc_RNA (1)...(19): siRNA sense strand
cggagaacgugaccuugaa

SEQ ID NO: 744429 - RNA, 19 nt, Homo sapiens
  misc_RNA (1)...(19): siRNA sense strand
gcaaugagcugcaaaaccu

SEQ ID NO: 744430 - RNA, 19 nt, Homo sapiens
  misc_RNA (1)...(19): siRNA sense strand
gcucagggaggucaaguug

SEQ ID NO: 744431 - RNA, 19 nt, Homo sapiens
  misc_RNA (1)...(19): siRNA sense strand
gaagaagccagaaacuuuu

SEQ ID NO: 744432 - RNA, 19 nt, Homo sapiens
  misc_RNA (1)...(19): siRNA sense strand
gcccaggaguaccaaguga

SEQ ID NO: 744433 - RNA, 19 nt, Homo sapiens
  misc_RNA (1)...(19): siRNA sense strand
ggaaugcuagaaguguuua

SEQ ID NO: 744434 - RNA, 19 nt, Homo sapiens
  misc_RNA (1)...(19): siRNA sense strand
ugacaucagagaagagaaa

SEQ ID NO: 744435 - RNA, 19 nt, Homo sapiens
  misc_RNA (1)...(19): siRNA sense strand
ccacaagaaguccaugcua

SEQ ID NO: 744436 - RNA, 19 nt, Homo sapiens
  misc_RNA (1)...(19): siRNA sense strand
agaaguccaugcuagacaa

SEQ ID NO: 744437 - RNA, 19 nt, Homo sapiens
  misc_RNA (1)...(19): siRNA sense strand
gggcagaaaguugaucauu

SEQ ID NO: 744438 - RNA, 19 nt, Homo sapiens
  misc_RNA (1)...(19): siRNA sense strand
cuucuggaauccugguuaa

SEQ ID NO: 744439 - RNA, 19 nt, Homo sapiens
  misc_RNA (1)...(19): siRNA sense strand
gaaguccaugcuagacaaa

SEQ ID NO: 744440 - RNA, 19 nt, Homo sapiens
  misc_RNA (1)...(19): siRNA sense strand
uuacgaacucugaaacuga

SEQ ID NO: 744441 - RNA, 19 nt, Homo sapiens
  misc_RNA (1)...(19): siRNA sense strand
gucauuugcuggcuuugug

SEQ ID NO: 744442 - RNA, 19 nt, Homo sapiens
  misc_RNA (1)...(19): siRNA sense strand
gccuggaacuccugacaca

SEQ ID NO: 744443 - RNA, 19 nt, Homo sapiens
  misc_RNA (1)...(19): siRNA sense strand
gagaacgugaccuugaaga

SEQ ID NO: 744444 - RNA, 19 nt, Homo sapiens
  misc_RNA (1)...(19): siRNA sense strand
cuggaauccugguuaaugu

SEQ ID NO: 744445 - RNA, 19 nt, Homo sapiens
  misc_RNA (1)...(19): siRNA sense strand
gaggaggaagacauucuga

SEQ ID NO: 744446 - RNA, 19 nt, Homo sapiens
  misc_RNA (1)...(19): siRNA sense strand
ucacugcaaaccacaagaa

SEQ ID NO: 744447 - RNA, 19 nt, Homo sapiens
  misc_RNA (1)...(19): siRNA sense strand
gaacucugaaacugagaug

SEQ ID NO: 744448 - RNA, 19 nt, Homo sapiens
  misc_RNA (1)...(19): siRNA sense strand
acaagaaguccaugcuaga

SEQ ID NO: 744449 - RNA, 19 nt, Homo sapiens
  misc_RNA (1)...(19): siRNA sense strand
aaggaaugcuagaaguguu

SEQ ID NO: 744450 - RNA, 19 nt, Homo sapiens
  misc_RNA (1)...(19): siRNA sense strand
ugacaaaaccaacgucuug

SEQ ID NO: 744451 - RNA, 19 nt, Homo sapiens
  misc_RNA (1)...(19): siRNA sense strand
ugcuagaaguguuuagaga

SEQ ID NO: 744452 - RNA, 19 nt, Homo sapiens
  misc_RNA (1)...(19): siRNA sense strand
ggaggaggaagacauucug

SEQ ID NO: 744453 - RNA, 19 nt, Homo sapiens
  misc_RNA (1)...(19): siRNA sense strand
ucgagcuccugaucugaaa

SEQ ID NO: 744454 - RNA, 19 nt, Homo sapiens
  misc_RNA (1)...(19): siRNA sense strand
guuucgagcuccugaucug

SEQ ID NO: 744455 - RNA, 19 nt, Homo sapiens
  misc_RNA (1)...(19): siRNA sense strand
ugaaaagccuuacgaacuc

SEQ ID NO: 744456 - RNA, 19 nt, Homo sapiens
  misc_RNA (1)...(19): siRNA sense strand
gaggaagacauucugaaaa

SEQ ID NO: 744457 - RNA, 19 nt, Homo sapiens
  misc_RNA (1)...(19): siRNA sense strand
aaggucauuugcuggcuuu

SEQ ID NO: 744458 - RNA, 19 nt, Homo sapiens
  misc_RNA (1)...(19): siRNA sense strand
caagcaugccucacugcaa

SEQ ID NO: 744459 - RNA, 19 nt, Homo sapiens
  misc_RNA (1)...(19): siRNA sense strand
gcagacccagucccugaga

SEQ ID NO: 744460 - RNA, 19 nt, Homo sapiens
  misc_RNA (1)...(19): siRNA sense strand
gcuucuggaauccugguua

SEQ ID NO: 744461 - RNA, 19 nt, Homo sapiens
  misc_RNA (1)...(19): siRNA sense strand
cuggaagacucaaauacag

SEQ ID NO: 744462 - RNA, 19 nt, Homo sapiens
  misc_RNA (1)...(19): siRNA sense strand
ccuggaagacucaaauaca

SEQ ID NO: 744463 - RNA, 19 nt, Homo sapiens
  misc_RNA (1)...(19): siRNA sense strand
gaaacuucuacucuucugu

SEQ ID NO: 744464 - RNA, 19 nt, Homo sapiens
  misc_RNA (1)...(19): siRNA sense strand
aaaggaaugcuagaagugu

SEQ ID NO: 744465 - RNA, 19 nt, Homo sapiens
  misc_RNA (1)...(19): siRNA sense strand
ggacugggaggagagcaau

SEQ ID NO: 744466 - RNA, 19 nt, Homo sapiens
  misc_RNA (1)...(19): siRNA sense strand
uggagaugcugaggcagaa

SEQ ID NO: 744467 - RNA, 19 nt, Homo sapiens
  misc_RNA (1)...(19): siRNA sense strand
guuaccagccugagaacau

SEQ ID NO: 744468 - RNA, 19 nt, Homo sapiens
  misc_RNA (1)...(19): siRNA sense strand
ggaggacgggaaggucauu

SEQ ID NO: 744469 - RNA, 19 nt, Homo sapiens
  misc_RNA (1)...(19): siRNA sense strand
agaacgugaccuugaagaa

SEQ ID NO: 744470 - RNA, 19 nt, Homo sapiens
  misc_RNA (1)...(19): siRNA sense strand
ggagaacgugaccuugaag

SEQ ID NO: 744471 - RNA, 19 nt, Homo sapiens
  misc_RNA (1)...(19): siRNA sense strand
ugcaaaaccuggagaagga

SEQ ID NO: 744472 - RNA, 19 nt, Homo sapiens
  misc_RNA (1)...(19): siRNA sense strand
cugcaaaccacaagaaguc

SEQ ID NO: 744473 - RNA, 19 nt, Homo sapiens
  misc_RNA (1)...(19): siRNA sense strand
ggacgggaaggucauuugc

SEQ ID NO: 744474 - RNA, 19 nt, Homo sapiens
  misc_RNA (1)...(19): siRNA sense strand
cugagaacauacggccuaa

SEQ ID NO: 744475 - RNA, 19 nt, Homo sapiens
  misc_RNA (1)...(19): siRNA sense strand
uggagaaggaggaggaaga

SEQ ID NO: 744476 - RNA, 19 nt, Homo sapiens
  misc_RNA (1)...(19): siRNA sense strand
ucuggaauccugguuaaug

SEQ ID NO: 744477 - RNA, 19 nt, Homo sapiens
  misc_RNA (1)...(19): siRNA sense strand
cuuacgaacucugaaacug

SEQ ID NO: 744478 - RNA, 19 nt, Homo sapiens
  misc_RNA (1)...(19): siRNA sense strand
ggaagaagguggacacuca

SEQ ID NO: 744479 - RNA, 19 nt, Homo sapiens
  misc_RNA (1)...(19): siRNA sense strand
gcaggaagcugaaugaagu

SEQ ID NO: 744480 - RNA, 19 nt, Homo sapiens
  misc_RNA (1)...(19): siRNA sense strand
ucaaggagcuggagaagug

SEQ ID NO: 744481 - RNA, 19 nt, Homo sapiens
  misc_RNA (1)...(19): siRNA sense strand
ugaaguaccuggaugagaa

SEQ ID NO: 744482 - RNA, 19 nt, Homo sapiens
  misc_RNA (1)...(19): siRNA sense strand
cgaccuugcuggacauuaa

SEQ ID NO: 744483 - RNA, 19 nt, Homo sapiens
  misc_RNA (1)...(19): siRNA sense strand
cagcgcaccugaccucuaa

SEQ ID NO: 744484 - RNA, 19 nt, Homo sapiens
  misc_RNA (1)...(19): siRNA sense strand
ucaaacagaucgucaaguc

SEQ ID NO: 744485 - RNA, 19 nt, Homo sapiens
  misc_RNA (1)...(19): siRNA sense strand
ugacgucucugcugauuuc

SEQ ID NO: 744486 - RNA, 19 nt, Homo sapiens
  misc_RNA (1)...(19): siRNA sense strand
gcagguacuucaaacagau

SEQ ID NO: 744487 - RNA, 19 nt, Homo sapiens
  misc_RNA (1)...(19): siRNA sense strand
cgacgaacucuucuacuuu

SEQ ID NO: 744488 - RNA, 19 nt, Homo sapiens
  misc_RNA (1)...(19): siRNA sense strand
ggaguucuuugcccacaug

SEQ ID NO: 744489 - RNA, 19 nt, Homo sapiens
  misc_RNA (1)...(19): siRNA sense strand
gcaccugaccucuaagaug

SEQ ID NO: 744490 - RNA, 19 nt, Homo sapiens
  misc_RNA (1)...(19): siRNA sense strand
gcacuuccucuucgagauu

SEQ ID NO: 744491 - RNA, 19 nt, Homo sapiens
  misc_RNA (1)...(19): siRNA sense strand
uggaggcccuggucaguuu

SEQ ID NO: 744492 - RNA, 19 nt, Homo sapiens
  misc_RNA (1)...(19): siRNA sense strand
ggaccacaccgaugacuuc

SEQ ID NO: 744493 - RNA, 19 nt, Homo sapiens
  misc_RNA (1)...(19): siRNA sense strand
gcgagugcaucgagcaguu

SEQ ID NO: 744494 - RNA, 19 nt, Homo sapiens
  misc_RNA (1)...(19): siRNA sense strand
gagcugaacauggacauug

SEQ ID NO: 744495 - RNA, 19 nt, Homo sapiens
  misc_RNA (1)...(19): siRNA sense strand
agucggagcugaacaugga

SEQ ID NO: 744496 - RNA, 19 nt, Homo sapiens
  misc_RNA (1)...(19): siRNA sense strand
ggacgcugcacccuguaua

SEQ ID NO: 744497 - RNA, 19 nt, Homo sapiens
  misc_RNA (1)...(19): siRNA sense strand
gagcugagccccaagauga

SEQ ID NO: 744498 - RNA, 19 nt, Homo sapiens
  misc_RNA (1)...(19): siRNA sense strand
gacgaacucuucuacuuuu

SEQ ID NO: 744499 - RNA, 19 nt, Homo sapiens
  misc_RNA (1)...(19): siRNA sense strand
gagcguccguugccauuac

SEQ ID NO: 744500 - RNA, 19 nt, Homo sapiens
  misc_RNA (1)...(19): siRNA sense strand
ggcagguacuucaaacaga

SEQ ID NO: 744501 - RNA, 19 nt, Homo sapiens
  misc_RNA (1)...(19): siRNA sense strand
gaggcaaccgugaguggua

SEQ ID NO: 744502 - RNA, 19 nt, Homo sapiens
  misc_RNA (1)...(19): siRNA sense strand
gagcugcggcugcacaaau

SEQ ID NO: 744503 - RNA, 19 nt, Homo sapiens
  misc_RNA (1)...(19): siRNA sense strand
agaggacccuggagcagaa

SEQ ID NO: 744504 - RNA, 19 nt, Homo sapiens
  misc_RNA (1)...(19): siRNA sense strand
ccacguaugcccugaaagu

SEQ ID NO: 744505 - RNA, 19 nt, Homo sapiens
  misc_RNA (1)...(19): siRNA sense strand
gccuggagcugcugcugaa

SEQ ID NO: 744506 - RNA, 19 nt, Homo sapiens
  misc_RNA (1)...(19): siRNA sense strand
ugaagggcaugggcaggua

SEQ ID NO: 744507 - RNA, 19 nt, Homo sapiens
  misc_RNA (1)...(19): siRNA sense strand
gggauggcguggaguucuu

SEQ ID NO: 744508 - RNA, 19 nt, Homo sapiens
  misc_RNA (1)...(19): siRNA sense strand
guacagcacaucagucucu

SEQ ID NO: 744509 - RNA, 19 nt, Homo sapiens
  misc_RNA (1)...(19): siRNA sense strand
acgacgaacucuucuacuu

SEQ ID NO: 744510 - RNA, 19 nt, Homo sapiens
  misc_RNA (1)...(19): siRNA sense strand
uacagccgcuuccauuuca

SEQ ID NO: 744511 - RNA, 19 nt, Homo sapiens
  misc_RNA (1)...(19): siRNA sense strand
gaccuucaguucugcuaca

SEQ ID NO: 744512 - RNA, 19 nt, Homo sapiens
  misc_RNA (1)...(19): siRNA sense strand
gaucaugacgacgauguau

SEQ ID NO: 744513 - RNA, 19 nt, Homo sapiens
  misc_RNA (1)...(19): siRNA sense strand
gcgugguccucaacaaugu

SEQ ID NO: 744514 - RNA, 19 nt, Homo sapiens
  misc_RNA (1)...(19): siRNA sense strand
cgauguaucccugguagaa

SEQ ID NO: 744515 - RNA, 19 nt, Homo sapiens
  misc_RNA (1)...(19): siRNA sense strand
gcuacaagaggcugaagga

SEQ ID NO: 744516 - RNA, 19 nt, Homo sapiens
  misc_RNA (1)...(19): siRNA sense strand
cagaggagguggagaugcu

SEQ ID NO: 744517 - RNA, 19 nt, Homo sapiens
  misc_RNA (1)...(19): siRNA sense strand
ggaucaugacgacgaugua

SEQ ID NO: 744518 - RNA, 19 nt, Homo sapiens
  misc_RNA (1)...(19): siRNA sense strand
gggcccaccgcaucucuuu

SEQ ID NO: 744519 - RNA, 19 nt, Homo sapiens
  misc_RNA (1)...(19): siRNA sense strand
aggaggcccugcucagcua

SEQ ID NO: 744520 - RNA, 19 nt, Homo sapiens
  misc_RNA (1)...(19): siRNA sense strand
gaagcucugguuccaagug

SEQ ID NO: 744521 - RNA, 19 nt, Homo sapiens
  misc_RNA (1)...(19): siRNA sense strand
guucucaagcugaucacua

SEQ ID NO: 744522 - RNA, 19 nt, Homo sapiens
  misc_RNA (1)...(19): siRNA sense strand
cuacagccgcuuccauuuc

SEQ ID NO: 744523 - RNA, 19 nt, Homo sapiens
  misc_RNA (1)...(19): siRNA sense strand
ccuggacgaugaucugcaa

SEQ ID NO: 744524 - RNA, 19 nt, Homo sapiens
  misc_RNA (1)...(19): siRNA sense strand
uuccaacccuccuuugaga

SEQ ID NO: 744525 - RNA, 19 nt, Homo sapiens
  misc_RNA (1)...(19): siRNA sense strand
ccugaaagucucugucaug

SEQ ID NO: 744526 - RNA, 19 nt, Homo sapiens
  misc_RNA (1)...(19): siRNA sense strand
ucagggagccguggacaug

SEQ ID NO: 744527 - RNA, 19 nt, Homo sapiens
  misc_RNA (1)...(19): siRNA sense strand
gcucuuccaacccuccuuu

SEQ ID NO: 744528 - RNA, 19 nt, Homo sapiens
  misc_RNA (1)...(19): siRNA sense strand
caaacagaucgucaaguca

SEQ ID NO: 744529 - RNA, 19 nt, Homo sapiens
  misc_RNA (1)...(19): siRNA sense strand
cgugacgucucugcugauu

SEQ ID NO: 744530 - RNA, 19 nt, Homo sapiens
  misc_RNA (1)...(19): siRNA sense strand
ucagccacauccaggaguu

SEQ ID NO: 744531 - RNA, 19 nt, Homo sapiens
  misc_RNA (1)...(19): siRNA sense strand
gaagagcagcacccugaac

SEQ ID NO: 744532 - RNA, 19 nt, Homo sapiens
  misc_RNA (1)...(19): siRNA sense strand
cgucucugcugauuucuac

SEQ ID NO: 744533 - RNA, 19 nt, Homo sapiens
  misc_RNA (1)...(19): siRNA sense strand
acgcagagggucaggguuu

SEQ ID NO: 744534 - RNA, 19 nt, Homo sapiens
  misc_RNA (1)...(19): siRNA sense strand
ggacaucugggaucaugac

SEQ ID NO: 744535 - RNA, 19 nt, Homo sapiens
  misc_RNA (1)...(19): siRNA sense strand
gaaguaccuggaugagaag

SEQ ID NO: 744536 - RNA, 19 nt, Homo sapiens
  misc_RNA (1)...(19): siRNA sense strand
ugagggaccaggccaagug

SEQ ID NO: 744537 - RNA, 19 nt, Homo sapiens
  misc_RNA (1)...(19): siRNA sense strand
cgacgauguaucccuggua

SEQ ID NO: 744538 - RNA, 19 nt, Homo sapiens
  misc_RNA (1)...(19): siRNA sense strand
uguauacgacgaacucuuc

SEQ ID NO: 744539 - RNA, 19 nt, Homo sapiens
  misc_RNA (1)...(19): siRNA sense strand
gcucaugaaguaccuggau

SEQ ID NO: 744540 - RNA, 19 nt, Homo sapiens
  misc_RNA (1)...(19): siRNA sense strand
gcgcaccugaccucuaaga

SEQ ID NO: 744541 - RNA, 19 nt, Homo sapiens
  misc_RNA (1)...(19): siRNA sense strand
augaugaccuucaguucug

SEQ ID NO: 744542 - RNA, 19 nt, Homo sapiens
  misc_RNA (1)...(19): siRNA sense strand
ugaagugucugggcaagcu

SEQ ID NO: 744543 - RNA, 19 nt, Homo sapiens
  misc_RNA (1)...(19): siRNA sense strand
aaaccugcacgcuggacua

SEQ ID NO: 744544 - RNA, 19 nt, Homo sapiens
  misc_RNA (1)...(19): siRNA sense strand
ccagagcccaggugagauc

SEQ ID NO: 744545 - RNA, 19 nt, Homo sapiens
  misc_RNA (1)...(19): siRNA sense strand
acgacuggcuguccaccaa

SEQ ID NO: 744546 - RNA, 19 nt, Homo sapiens
  misc_RNA (1)...(19): siRNA sense strand
gaagcuacaagaggcugaa

SEQ ID NO: 744547 - RNA, 19 nt, Homo sapiens
  misc_RNA (1)...(19): siRNA sense strand
uggagcugcugcugaagug

SEQ ID NO: 744548 - RNA, 19 nt, Homo sapiens
  misc_RNA (1)...(19): siRNA sense strand
ucuucgagauugaggaugu

SEQ ID NO: 744549 - RNA, 19 nt, Homo sapiens
  misc_RNA (1)...(19): siRNA sense strand
gcccugaaagucucuguca

SEQ ID NO: 744550 - RNA, 19 nt, Homo sapiens
  misc_RNA (1)...(19): siRNA sense strand
cggcuuaagugaccccuuu

SEQ ID NO: 744551 - RNA, 19 nt, Homo sapiens
  misc_RNA (1)...(19): siRNA sense strand
ggauggcguggaguucuuu

SEQ ID NO: 744552 - RNA, 19 nt, Homo sapiens
  misc_RNA (1)...(19): siRNA sense strand
gaagcuggcccugcugaac

SEQ ID NO: 744553 - RNA, 19 nt, Homo sapiens
  misc_RNA (1)...(19): siRNA sense strand
ggcgacauccgcaaguaug

SEQ ID NO: 744554 - RNA, 19 nt, Homo sapiens
  misc_RNA (1)...(19): siRNA sense strand
gggcgacauccgcaaguau

SEQ ID NO: 744555 - RNA, 19 nt, Homo sapiens
  misc_RNA (1)...(19): siRNA sense strand
cagcagaggagcccaacuc

SEQ ID NO: 744556 - RNA, 19 nt, Homo sapiens
  misc_RNA (1)...(19): siRNA sense strand
gggcagguacuucaaacag

SEQ ID NO: 744557 - RNA, 19 nt, Homo sapiens
  misc_RNA (1)...(19): siRNA sense strand
cuggacaucugggaucaug

SEQ ID NO: 744558 - RNA, 19 nt, Homo sapiens
  misc_RNA (1)...(19): siRNA sense strand
ggcaugggcagguacuuca

SEQ ID NO: 744559 - RNA, 19 nt, Homo sapiens
  misc_RNA (1)...(19): siRNA sense strand
ugggcgacauccgcaagua

SEQ ID NO: 744560 - RNA, 19 nt, Homo sapiens
  misc_RNA (1)...(19): siRNA sense strand
gaacgccucgcuggugaag

SEQ ID NO: 744561 - RNA, 19 nt, Homo sapiens
  misc_RNA (1)...(19): siRNA sense strand
gagcuggacuuaagcauga

SEQ ID NO: 744562 - RNA, 19 nt, Homo sapiens
  misc_RNA (1)...(19): siRNA sense strand
caagcagccuucuguuuga

SEQ ID NO: 744563 - RNA, 19 nt, Homo sapiens
  misc_RNA (1)...(19): siRNA sense strand
caguguagcugaagaugaa

SEQ ID NO: 744564 - RNA, 19 nt, Homo sapiens
  misc_RNA (1)...(19): siRNA sense strand
cuacgggcaucuagaaauu

SEQ ID NO: 744565 - RNA, 19 nt, Homo sapiens
  misc_RNA (1)...(19): siRNA sense strand
uggcugagcugcugcuuga

SEQ ID NO: 744566 - RNA, 19 nt, Homo sapiens
  misc_RNA (1)...(19): siRNA sense strand
ccaagcagccuucuguuug

SEQ ID NO: 744567 - RNA, 19 nt, Homo sapiens
  misc_RNA (1)...(19): siRNA sense strand
gcacgaggccugcaacuac

SEQ ID NO: 744568 - RNA, 19 nt, Homo sapiens
  misc_RNA (1)...(19): siRNA sense strand
caacuacgggcaucuagaa

SEQ ID NO: 744569 - RNA, 19 nt, Homo sapiens
  misc_RNA (1)...(19): siRNA sense strand
gcuccaagcucuucuuucg

SEQ ID NO: 744570 - RNA, 19 nt, Homo sapiens
  misc_RNA (1)...(19): siRNA sense strand
caaggaaggcugugcucua

SEQ ID NO: 744571 - RNA, 19 nt, Homo sapiens
  misc_RNA (1)...(19): siRNA sense strand
ggucaucugugagcagcua

SEQ ID NO: 744572 - RNA, 19 nt, Homo sapiens
  misc_RNA (1)...(19): siRNA sense strand
gucagaaccuccagcaugu

SEQ ID NO: 744573 - RNA, 19 nt, Homo sapiens
  misc_RNA (1)...(19): siRNA sense strand
ggguagugcuuuccaagau

SEQ ID NO: 744574 - RNA, 19 nt, Homo sapiens
  misc_RNA (1)...(19): siRNA sense strand
uggaggagcuggacuuaag

SEQ ID NO: 744575 - RNA, 19 nt, Homo sapiens
  misc_RNA (1)...(19): siRNA sense strand
caaccugggccucaccuuu

SEQ ID NO: 744576 - RNA, 19 nt, Homo sapiens
  misc_RNA (1)...(19): siRNA sense strand
uuagagaccugugcagaug

SEQ ID NO: 744577 - RNA, 19 nt, Homo sapiens
  misc_RNA (1)...(19): siRNA sense strand
gaguucaaguucaggauca

SEQ ID NO: 744578 - RNA, 19 nt, Homo sapiens
  misc_RNA (1)...(19): siRNA sense strand
cagcugaggcuuaccagaa

SEQ ID NO: 744579 - RNA, 19 nt, Homo sapiens
  misc_RNA (1)...(19): siRNA sense strand
gcacccuccugcacuuaga

SEQ ID NO: 744580 - RNA, 19 nt, Homo sapiens
  misc_RNA (1)...(19): siRNA sense strand
gguagugcuuuccaagaug

SEQ ID NO: 744581 - RNA, 19 nt, Homo sapiens
  misc_RNA (1)...(19): siRNA sense strand
ggacccgccucuaucucaa

SEQ ID NO: 744582 - RNA, 19 nt, Homo sapiens
  misc_RNA (1)...(19): siRNA sense strand
gacaaccgcaggcccagua

SEQ ID NO: 744583 - RNA, 19 nt, Homo sapiens
  misc_RNA (1)...(19): siRNA sense strand
gggacaaggcuguuagaga

SEQ ID NO: 744584 - RNA, 19 nt, Homo sapiens
  misc_RNA (1)...(19): siRNA sense strand
ccucaacuguggccacuuc

SEQ ID NO: 744585 - RNA, 19 nt, Homo sapiens
  misc_RNA (1)...(19): siRNA sense strand
ccagggcagcugaggcuua

SEQ ID NO: 744586 - RNA, 19 nt, Homo sapiens
  misc_RNA (1)...(19): siRNA sense strand
gcaacgauuacuucaggaa

SEQ ID NO: 744587 - RNA, 19 nt, Homo sapiens
  misc_RNA (1)...(19): siRNA sense strand
gagcaaugacgagguguug

SEQ ID NO: 744588 - RNA, 19 nt, Homo sapiens
  misc_RNA (1)...(19): siRNA sense strand
uccgauaccuggccaagga

SEQ ID NO: 744589 - RNA, 19 nt, Homo sapiens
  misc_RNA (1)...(19): siRNA sense strand
ccacgaugcccucaacugu

SEQ ID NO: 744590 - RNA, 19 nt, Homo sapiens
  misc_RNA (1)...(19): siRNA sense strand
ugaggaagcgguucaugga

SEQ ID NO: 744591 - RNA, 19 nt, Homo sapiens
  misc_RNA (1)...(19): siRNA sense strand
gcaacuacgggcaucuaga

SEQ ID NO: 744592 - RNA, 19 nt, Homo sapiens
  misc_RNA (1)...(19): siRNA sense strand
uagcugaagaugaagauga

SEQ ID NO: 744593 - RNA, 19 nt, Homo sapiens
  misc_RNA (1)...(19): siRNA sense strand
uugcacagguccuccaaga

SEQ ID NO: 744594 - RNA, 19 nt, Homo sapiens
  misc_RNA (1)...(19): siRNA sense strand
gugccauggucaucuguga

SEQ ID NO: 744595 - RNA, 19 nt, Homo sapiens
  misc_RNA (1)...(19): siRNA sense strand
gagcgagugcugcgugguu

SEQ ID NO: 744596 - RNA, 19 nt, Homo sapiens
  misc_RNA (1)...(19): siRNA sense strand
aaggaaggcugugcucuag

SEQ ID NO: 744597 - RNA, 19 nt, Homo sapiens
  misc_RNA (1)...(19): siRNA sense strand
cggagcagaaccaccuuua

SEQ ID NO: 744598 - RNA, 19 nt, Homo sapiens
  misc_RNA (1)...(19): siRNA sense strand
gcaaguggaaccggcgaaa

SEQ ID NO: 744599 - RNA, 19 nt, Homo sapiens
  misc_RNA (1)...(19): siRNA sense strand
agaccuggcugaacauugc

SEQ ID NO: 744600 - RNA, 19 nt, Homo sapiens
  misc_RNA (1)...(19): siRNA sense strand
gagcagaaccaccuuuacg

SEQ ID NO: 744601 - RNA, 19 nt, Homo sapiens
  misc_RNA (1)...(19): siRNA sense strand
ccucauggagccuguauuc

SEQ ID NO: 744602 - RNA, 19 nt, Homo sapiens
  misc_RNA (1)...(19): siRNA sense strand
ccaagaccugggagacuuu

SEQ ID NO: 744603 - RNA, 19 nt, Homo sapiens
  misc_RNA (1)...(19): siRNA sense strand
ggaccaggcccagcuuaca

SEQ ID NO: 744604 - RNA, 19 nt, Homo sapiens
  misc_RNA (1)...(19): siRNA sense strand
ccaagcgagcccugaagaa

SEQ ID NO: 744605 - RNA, 19 nt, Homo sapiens
  misc_RNA (1)...(19): siRNA sense strand
caagcgagcccugaagaag

SEQ ID NO: 744606 - RNA, 19 nt, Homo sapiens
  misc_RNA (1)...(19): siRNA sense strand
gggccugugggacaagaua

SEQ ID NO: 744607 - RNA, 19 nt, Homo sapiens
  misc_RNA (1)...(19): siRNA sense strand
aagccaccuugcagaguuu

SEQ ID NO: 744608 - RNA, 19 nt, Homo sapiens
  misc_RNA (1)...(19): siRNA sense strand
cccaagcagccuucuguuu

SEQ ID NO: 744609 - RNA, 19 nt, Homo sapiens
  misc_RNA (1)...(19): siRNA sense strand
gcuacaaccugggcaccau

SEQ ID NO: 744610 - RNA, 19 nt, Homo sapiens
  misc_RNA (1)...(19): siRNA sense strand
cauccggguucgaguucaa

SEQ ID NO: 744611 - RNA, 19 nt, Homo sapiens
  misc_RNA (1)...(19): siRNA sense strand
uagcuuccuuggccuguca

SEQ ID NO: 744612 - RNA, 19 nt, Homo sapiens
  misc_RNA (1)...(19): siRNA sense strand
caccugacccugucugcaa

SEQ ID NO: 744613 - RNA, 19 nt, Homo sapiens
  misc_RNA (1)...(19): siRNA sense strand
uccaagaccugggagacuu

SEQ ID NO: 744614 - RNA, 19 nt, Homo sapiens
  misc_RNA (1)...(19): siRNA sense strand
gguguuggcugaggugacu

SEQ ID NO: 744615 - RNA, 19 nt, Homo sapiens
  misc_RNA (1)...(19): siRNA sense strand
gaaccggcgaaacgacaug

SEQ ID NO: 744616 - RNA, 19 nt, Homo sapiens
  misc_RNA (1)...(19): siRNA sense strand
ggccccagcuucuuucuga

SEQ ID NO: 744617 - RNA, 19 nt, Homo sapiens
  misc_RNA (1)...(19): siRNA sense strand
agcagugggugaagcugua

SEQ ID NO: 744618 - RNA, 19 nt, Homo sapiens
  misc_RNA (1)...(19): siRNA sense strand
gccaagcgagcccugaaga

SEQ ID NO: 744619 - RNA, 19 nt, Homo sapiens
  misc_RNA (1)...(19): siRNA sense strand
gcgccacuaugaggaggaa

SEQ ID NO: 744620 - RNA, 19 nt, Homo sapiens
  misc_RNA (1)...(19): siRNA sense strand
guuagagaccugugcagau

SEQ ID NO: 744621 - RNA, 19 nt, Homo sapiens
  misc_RNA (1)...(19): siRNA sense strand
aaccgcaggcccaguagua

SEQ ID NO: 744622 - RNA, 19 nt, Homo sapiens
  misc_RNA (1)...(19): siRNA sense strand
ggaggaggacgaggagcuu

SEQ ID NO: 744623 - RNA, 19 nt, Homo sapiens
  misc_RNA (1)...(19): siRNA sense strand
gaguugcagugcgccaguu

SEQ ID NO: 744624 - RNA, 19 nt, Homo sapiens
  misc_RNA (1)...(19): siRNA sense strand
uggagccuguauuccgaua

SEQ ID NO: 744625 - RNA, 19 nt, Homo sapiens
  misc_RNA (1)...(19): siRNA sense strand
accagaagcagcugcguuu

SEQ ID NO: 744626 - RNA, 19 nt, Homo sapiens
  misc_RNA (1)...(19): siRNA sense strand
agcgagugcugcgugguua

SEQ ID NO: 744627 - RNA, 19 nt, Homo sapiens
  misc_RNA (1)...(19): siRNA sense strand
ccaccacacugggagacau

SEQ ID NO: 744628 - RNA, 19 nt, Homo sapiens
  misc_RNA (1)...(19): siRNA sense strand
ggagcagaaccaccuuuac

SEQ ID NO: 744629 - RNA, 19 nt, Homo sapiens
  misc_RNA (1)...(19): siRNA sense strand
cagcagcagcagcucagaa

SEQ ID NO: 744630 - RNA, 19 nt, Homo sapiens
  misc_RNA (1)...(19): siRNA sense strand
ucaagaagcuggccaagaa

SEQ ID NO: 744631 - RNA, 19 nt, Homo sapiens
  misc_RNA (1)...(19): siRNA sense strand
acgaugagcuuguguauaa

SEQ ID NO: 744632 - RNA, 19 nt, Homo sapiens
  misc_RNA (1)...(19): siRNA sense strand
caagaaguaugaugcguuu

SEQ ID NO: 744633 - RNA, 19 nt, Homo sapiens
  misc_RNA (1)...(19): siRNA sense strand
ugaagaagguguuaugucu

SEQ ID NO: 744634 - RNA, 19 nt, Homo sapiens
  misc_RNA (1)...(19): siRNA sense strand
gagcuuguguauaacauuc

SEQ ID NO: 744635 - RNA, 19 nt, Homo sapiens
  misc_RNA (1)...(19): siRNA sense strand
caaucaaguuccaaaugaa

SEQ ID NO: 744636 - RNA, 19 nt, Homo sapiens
  misc_RNA (1)...(19): siRNA sense strand
cagaucagcuugaagaacu

SEQ ID NO: 744637 - RNA, 19 nt, Homo sapiens
  misc_RNA (1)...(19): siRNA sense strand
caaaguggaugaggugaag

SEQ ID NO: 744638 - RNA, 19 nt, Homo sapiens
  misc_RNA (1)...(19): siRNA sense strand
uaaauaaggcaggaaaguu

SEQ ID NO: 744639 - RNA, 19 nt, Homo sapiens
  misc_RNA (1)...(19): siRNA sense strand
gguguuaugucuggcugua

SEQ ID NO: 744640 - RNA, 19 nt, Homo sapiens
  misc_RNA (1)...(19): siRNA sense strand
ccaaaugaagaagguguua

SEQ ID NO: 744641 - RNA, 19 nt, Homo sapiens
  misc_RNA (1)...(19): siRNA sense strand
gaagcuggccaagaaguau

SEQ ID NO: 744642 - RNA, 19 nt, Homo sapiens
  misc_RNA (1)...(19): siRNA sense strand
aaauaaggcaggaaaguuc

SEQ ID NO: 744643 - RNA, 19 nt, Homo sapiens
  misc_RNA (1)...(19): siRNA sense strand
gaacuaugauccccagaag

SEQ ID NO: 744644 - RNA, 19 nt, Homo sapiens
  misc_RNA (1)...(19): siRNA sense strand
gacagacgaugagcuugug

SEQ ID NO: 744645 - RNA, 19 nt, Homo sapiens
  misc_RNA (1)...(19): siRNA sense strand
gggaccagcagcacuguga

SEQ ID NO: 744646 - RNA, 19 nt, Homo sapiens
  misc_RNA (1)...(19): siRNA sense strand
aaacaugguggccaaagug

SEQ ID NO: 744647 - RNA, 19 nt, Homo sapiens
  misc_RNA (1)...(19): siRNA sense strand
aaaugaagaagguguuaug

SEQ ID NO: 744648 - RNA, 19 nt, Homo sapiens
  misc_RNA (1)...(19): siRNA sense strand
gacgaugagcuuguguaua

SEQ ID NO: 744649 - RNA, 19 nt, Homo sapiens
  misc_RNA (1)...(19): siRNA sense strand
ugacagacgaugagcuugu

SEQ ID NO: 744650 - RNA, 19 nt, Homo sapiens
  misc_RNA (1)...(19): siRNA sense strand
gaugagcuuguguauaaca

SEQ ID NO: 744651 - RNA, 19 nt, Homo sapiens
  misc_RNA (1)...(19): siRNA sense strand
agaagcuggccaagaagua

SEQ ID NO: 744652 - RNA, 19 nt, Homo sapiens
  misc_RNA (1)...(19): siRNA sense strand
aauccucggcccagguuua

SEQ ID NO: 744653 - RNA, 19 nt, Homo sapiens
  misc_RNA (1)...(19): siRNA sense strand
caaaugaagaagguguuau

SEQ ID NO: 744654 - RNA, 19 nt, Homo sapiens
  misc_RNA (1)...(19): siRNA sense strand
ccaaaguggaugaggugaa

SEQ ID NO: 744655 - RNA, 19 nt, Homo sapiens
  misc_RNA (1)...(19): siRNA sense strand
cggcccagguuuaaauaag

SEQ ID NO: 744656 - RNA, 19 nt, Homo sapiens
  misc_RNA (1)...(19): siRNA sense strand
ucaaguuccaaaugaagaa

SEQ ID NO: 744657 - RNA, 19 nt, Homo sapiens
  misc_RNA (1)...(19): siRNA sense strand
uugcagaucagcuugaaga

SEQ ID NO: 744658 - RNA, 19 nt, Homo sapiens
  misc_RNA (1)...(19): siRNA sense strand
aggcuaaggccguggauau

SEQ ID NO: 744659 - RNA, 19 nt, Homo sapiens
  misc_RNA (1)...(19): siRNA sense strand
guuuaaauaaggcaggaaa

SEQ ID NO: 744660 - RNA, 19 nt, Homo sapiens
  misc_RNA (1)...(19): siRNA sense strand
ggcccagguuuaaauaagg

SEQ ID NO: 744661 - RNA, 19 nt, Homo sapiens
  misc_RNA (1)...(19): siRNA sense strand
acauucaccuggcugucaa

SEQ ID NO: 744662 - RNA, 19 nt, Homo sapiens
  misc_RNA (1)...(19): siRNA sense strand
cgcccuaaguucucugugu

SEQ ID NO: 744663 - RNA, 19 nt, Homo sapiens
  misc_RNA (1)...(19): siRNA sense strand
agaucagcuugaagaacua

SEQ ID NO: 744664 - RNA, 19 nt, Homo sapiens
  misc_RNA (1)...(19): siRNA sense strand
cagacgaugagcuugugua

SEQ ID NO: 744665 - RNA, 19 nt, Homo sapiens
  misc_RNA (1)...(19): siRNA sense strand
cgaauccucggcccagguu

SEQ ID NO: 744666 - RNA, 19 nt, Homo sapiens
  misc_RNA (1)...(19): siRNA sense strand
gcagaucagcuugaagaac

SEQ ID NO: 744667 - RNA, 19 nt, Homo sapiens
  misc_RNA (1)...(19): siRNA sense strand
ccucggcccagguuuaaau

SEQ ID NO: 744668 - RNA, 19 nt, Homo sapiens
  misc_RNA (1)...(19): siRNA sense strand
ucagcuugaagaacuauga

SEQ ID NO: 744669 - RNA, 19 nt, Homo sapiens
  misc_RNA (1)...(19): siRNA sense strand
uuaaauaaggcaggaaagu

SEQ ID NO: 744670 - RNA, 19 nt, Homo sapiens
  misc_RNA (1)...(19): siRNA sense strand
gauacgggcuccugguugu

SEQ ID NO: 744671 - RNA, 19 nt, Homo sapiens
  misc_RNA (1)...(19): siRNA sense strand
gaaaggccuucugcauggu

SEQ ID NO: 744672 - RNA, 19 nt, Homo sapiens
  misc_RNA (1)...(19): siRNA sense strand
ccauuggccuggaggacuu

SEQ ID NO: 744673 - RNA, 19 nt, Homo sapiens
  misc_RNA (1)...(19): siRNA sense strand
ggccagcucgcacuucuug

SEQ ID NO: 744674 - RNA, 19 nt, Homo sapiens
  misc_RNA (1)...(19): siRNA sense strand
gcggaaaggccuucugcau

SEQ ID NO: 744675 - RNA, 19 nt, Homo sapiens
  misc_RNA (1)...(19): siRNA sense strand
cacagguuauggccacaug

SEQ ID NO: 744676 - RNA, 19 nt, Homo sapiens
  misc_RNA (1)...(19): siRNA sense strand
ggaccaagguggcauccua

SEQ ID NO: 744677 - RNA, 19 nt, Homo sapiens
  misc_RNA (1)...(19): siRNA sense strand
gauacgggcuccugguugu

SEQ ID NO: 744678 - RNA, 19 nt, Homo sapiens
  misc_RNA (1)...(19): siRNA sense strand
gaaaggccuucugcauggu

SEQ ID NO: 744679 - RNA, 19 nt, Homo sapiens
  misc_RNA (1)...(19): siRNA sense strand
ccauuggccuggaggacuu

SEQ ID NO: 744680 - RNA, 19 nt, Homo sapiens
  misc_RNA (1)...(19): siRNA sense strand
ggccagcucgcacuucuug

SEQ ID NO: 744681 - RNA, 19 nt, Homo sapiens
  misc_RNA (1)...(19): siRNA sense strand
gcggaaaggccuucugcau

SEQ ID NO: 744682 - RNA, 19 nt, Homo sapiens
  misc_RNA (1)...(19): siRNA sense strand
cacagguuauggccacaug

SEQ ID NO: 744683 - RNA, 19 nt, Homo sapiens
  misc_RNA (1)...(19): siRNA sense strand
gauacgggcuccugguugu

SEQ ID NO: 744684 - RNA, 19 nt, Homo sapiens
  misc_RNA (1)...(19): siRNA sense strand
gaaaggccuucugcauggu

SEQ ID NO: 744685 - RNA, 19 nt, Homo sapiens
  misc_RNA (1)...(19): siRNA sense strand
ccauuggccuggaggacuu

SEQ ID NO: 744686 - RNA, 19 nt, Homo sapiens
  misc_RNA (1)...(19): siRNA sense strand
ggccagcucgcacuucuug

SEQ ID NO: 744687 - RNA, 19 nt, Homo sapiens
  misc_RNA (1)...(19): siRNA sense strand
gcggaaaggccuucugcau

SEQ ID NO: 744688 - RNA, 19 nt, Homo sapiens
  misc_RNA (1)...(19): siRNA sense strand
cacagguuauggccacaug

SEQ ID NO: 744689 - RNA, 19 nt, Homo sapiens
  misc_RNA (1)...(19): siRNA sense strand
gauacgggcuccugguugu

SEQ ID NO: 744690 - RNA, 19 nt, Homo sapiens
  misc_RNA (1)...(19): siRNA sense strand
gaaaggccuucugcauggu

SEQ ID NO: 744691 - RNA, 19 nt, Homo sapiens
  misc_RNA (1)...(19): siRNA sense strand
ccauuggccuggaggacuu

SEQ ID NO: 744692 - RNA, 19 nt, Homo sapiens
  misc_RNA (1)...(19): siRNA sense strand
ggccagcucgcacuucuug

SEQ ID NO: 744693 - RNA, 19 nt, Homo sapiens
  misc_RNA (1)...(19): siRNA sense strand
gcggaaaggccuucugcau

SEQ ID NO: 744694 - RNA, 19 nt, Homo sapiens
  misc_RNA (1)...(19): siRNA sense strand
cacagguuauggccacaug

SEQ ID NO: 744695 - RNA, 19 nt, Homo sapiens
  misc_RNA (1)...(19): siRNA sense strand
gauacgggcuccugguugu

SEQ ID NO: 744696 - RNA, 19 nt, Homo sapiens
  misc_RNA (1)...(19): siRNA sense strand
gaaaggccuucugcauggu

SEQ ID NO: 744697 - RNA, 19 nt, Homo sapiens
  misc_RNA (1)...(19): siRNA sense strand
ccauuggccuggaggacuu

SEQ ID NO: 744698 - RNA, 19 nt, Homo sapiens
  misc_RNA (1)...(19): siRNA sense strand
ggccagcucgcacuucuug

SEQ ID NO: 744699 - RNA, 19 nt, Homo sapiens
  misc_RNA (1)...(19): siRNA sense strand
gcggaaaggccuucugcau

SEQ ID NO: 744700 - RNA, 19 nt, Homo sapiens
  misc_RNA (1)...(19): siRNA sense strand
cacagguuauggccacaug

SEQ ID NO: 744701 - RNA, 19 nt, Homo sapiens
  misc_RNA (1)...(19): siRNA sense strand
ggccagaacugcagcauug

SEQ ID NO: 744702 - RNA, 19 nt, Homo sapiens
  misc_RNA (1)...(19): siRNA sense strand
ggucgaagauggugugugu

SEQ ID NO: 744703 - RNA, 19 nt, Homo sapiens
  misc_RNA (1)...(19): siRNA sense strand
gugaggacgucauaguuaa

SEQ ID NO: 744704 - RNA, 19 nt, Homo sapiens
  misc_RNA (1)...(19): siRNA sense strand
ggugaggacgucauaguua

SEQ ID NO: 744705 - RNA, 19 nt, Homo sapiens
  misc_RNA (1)...(19): siRNA sense strand
ggagaagccacagguguuu

SEQ ID NO: 744706 - RNA, 19 nt, Homo sapiens
  misc_RNA (1)...(19): siRNA sense strand
gaucaacgcaggcauguac

SEQ ID NO: 744707 - RNA, 19 nt, Homo sapiens
  misc_RNA (1)...(19): siRNA sense strand
cugguggacuucugcaaua

SEQ ID NO: 744708 - RNA, 19 nt, Homo sapiens
  misc_RNA (1)...(19): siRNA sense strand
cuacguccauugagaagga

SEQ ID NO: 744709 - RNA, 19 nt, Homo sapiens
  misc_RNA (1)...(19): siRNA sense strand
gcuauaugccauggaguua

SEQ ID NO: 744710 - RNA, 19 nt, Homo sapiens
  misc_RNA (1)...(19): siRNA sense strand
cagccuacguccauugaga

SEQ ID NO: 744711 - RNA, 19 nt, Homo sapiens
  misc_RNA (1)...(19): siRNA sense strand
gccagagccucguaucauc

SEQ ID NO: 744712 - RNA, 19 nt, Homo sapiens
  misc_RNA (1)...(19): siRNA sense strand
ggaauccgaaucuccaugu

SEQ ID NO: 744713 - RNA, 19 nt, Homo sapiens
  misc_RNA (1)...(19): siRNA sense strand
aaggaggucuuccccauua

SEQ ID NO: 744714 - RNA, 19 nt, Homo sapiens
  misc_RNA (1)...(19): siRNA sense strand
guguuuguguccaauaaga

SEQ ID NO: 744715 - RNA, 19 nt, Homo sapiens
  misc_RNA (1)...(19): siRNA sense strand
ccucaacagugacgugauc

SEQ ID NO: 744716 - RNA, 19 nt, Homo sapiens
  misc_RNA (1)...(19): siRNA sense strand
gcccggauccguucccauu

SEQ ID NO: 744717 - RNA, 19 nt, Homo sapiens
  misc_RNA (1)...(19): siRNA sense strand
uauaugccauggaguuaca

SEQ ID NO: 744718 - RNA, 19 nt, Homo sapiens
  misc_RNA (1)...(19): siRNA sense strand
ugucgcaggugcuggagaa

SEQ ID NO: 744719 - RNA, 19 nt, Homo sapiens
  misc_RNA (1)...(19): siRNA sense strand
uggcuugaguccugcauug

SEQ ID NO: 744720 - RNA, 19 nt, Homo sapiens
  misc_RNA (1)...(19): siRNA sense strand
cccgugaccuacucucuga

SEQ ID NO: 744721 - RNA, 19 nt, Homo sapiens
  misc_RNA (1)...(19): siRNA sense strand
gaagaugguguguguaucc

SEQ ID NO: 744722 - RNA, 19 nt, Homo sapiens
  misc_RNA (1)...(19): siRNA sense strand
gcauggagaacgugacagu

SEQ ID NO: 744723 - RNA, 19 nt, Homo sapiens
  misc_RNA (1)...(19): siRNA sense strand
gaggacgucauaguuaaug

SEQ ID NO: 744724 - RNA, 19 nt, Homo sapiens
  misc_RNA (1)...(19): siRNA sense strand
cgcaggugcuggagaagga

SEQ ID NO: 744725 - RNA, 19 nt, Homo sapiens
  misc_RNA (1)...(19): siRNA sense strand
gggugaggacgucauaguu

SEQ ID NO: 744726 - RNA, 19 nt, Homo sapiens
  misc_RNA (1)...(19): siRNA sense strand
ucgaagaugguguguguau

SEQ ID NO: 744727 - RNA, 19 nt, Homo sapiens
  misc_RNA (1)...(19): siRNA sense strand
gugacgugaucugcgauuu

SEQ ID NO: 744728 - RNA, 19 nt, Homo sapiens
  misc_RNA (1)...(19): siRNA sense strand
gagcagaggcugggaaucc

SEQ ID NO: 744729 - RNA, 19 nt, Homo sapiens
  misc_RNA (1)...(19): siRNA sense strand
gaauccgaaucuccauguc

SEQ ID NO: 744730 - RNA, 19 nt, Homo sapiens
  misc_RNA (1)...(19): siRNA sense strand
uccaagccauggugcaguu

SEQ ID NO: 744731 - RNA, 19 nt, Homo sapiens
  misc_RNA (1)...(19): siRNA sense strand
gcugggugaggacgucaua

SEQ ID NO: 744732 - RNA, 19 nt, Homo sapiens
  misc_RNA (1)...(19): siRNA sense strand
cgaagaugguguguguauc

SEQ ID NO: 744733 - RNA, 19 nt, Homo sapiens
  misc_RNA (1)...(19): siRNA sense strand
caagucuauuggcgaguca

SEQ ID NO: 744734 - RNA, 19 nt, Homo sapiens
  misc_RNA (1)...(19): siRNA sense strand
ccagagccucguaucauca

SEQ ID NO: 744735 - RNA, 19 nt, Homo sapiens
  misc_RNA (1)...(19): siRNA sense strand
gagaagccacagguguuug

SEQ ID NO: 744736 - RNA, 19 nt, Homo sapiens
  misc_RNA (1)...(19): siRNA sense strand
ugguggacuucugcaauaa

SEQ ID NO: 744737 - RNA, 19 nt, Homo sapiens
  misc_RNA (1)...(19): siRNA sense strand
uggagaagccacagguguu

SEQ ID NO: 744738 - RNA, 19 nt, Homo sapiens
  misc_RNA (1)...(19): siRNA sense strand
ccaaggaggggcagcuaua

SEQ ID NO: 744739 - RNA, 19 nt, Homo sapiens
  misc_RNA (1)...(19): siRNA sense strand
gacgugaucugcgauuucc

SEQ ID NO: 744740 - RNA, 19 nt, Homo sapiens
  misc_RNA (1)...(19): siRNA sense strand
gcuucuggauggacauugg

SEQ ID NO: 744741 - RNA, 19 nt, Homo sapiens
  misc_RNA (1)...(19): siRNA sense strand
agguguuuguguccaauaa

SEQ ID NO: 744742 - RNA, 19 nt, Homo sapiens
  misc_RNA (1)...(19): siRNA sense strand
gacugcagacccuuucuuc

SEQ ID NO: 744743 - RNA, 19 nt, Homo sapiens
  misc_RNA (1)...(19): siRNA sense strand
gagccucguaucaucaugu

SEQ ID NO: 744744 - RNA, 19 nt, Homo sapiens
  misc_RNA (1)...(19): siRNA sense strand
caacgcaggcauguacauc

SEQ ID NO: 744745 - RNA, 19 nt, Homo sapiens
  misc_RNA (1)...(19): siRNA sense strand
ugacgugaucugcgauuuc

SEQ ID NO: 744746 - RNA, 19 nt, Homo sapiens
  misc_RNA (1)...(19): siRNA sense strand
ggccagaacugcagcauug

SEQ ID NO: 744747 - RNA, 19 nt, Homo sapiens
  misc_RNA (1)...(19): siRNA sense strand
ggucgaagauggugugugu

SEQ ID NO: 744748 - RNA, 19 nt, Homo sapiens
  misc_RNA (1)...(19): siRNA sense strand
gugaggacgucauaguuaa

SEQ ID NO: 744749 - RNA, 19 nt, Homo sapiens
  misc_RNA (1)...(19): siRNA sense strand
ggugaggacgucauaguua

SEQ ID NO: 744750 - RNA, 19 nt, Homo sapiens
  misc_RNA (1)...(19): siRNA sense strand
ggagaagccacagguguuu

SEQ ID NO: 744751 - RNA, 19 nt, Homo sapiens
  misc_RNA (1)...(19): siRNA sense strand
gaucaacgcaggcauguac

SEQ ID NO: 744752 - RNA, 19 nt, Homo sapiens
  misc_RNA (1)...(19): siRNA sense strand
cugguggacuucugcaaua

SEQ ID NO: 744753 - RNA, 19 nt, Homo sapiens
  misc_RNA (1)...(19): siRNA sense strand
cuacguccauugagaagga

SEQ ID NO: 744754 - RNA, 19 nt, Homo sapiens
  misc_RNA (1)...(19): siRNA sense strand
gcuauaugccauggaguua

SEQ ID NO: 744755 - RNA, 19 nt, Homo sapiens
  misc_RNA (1)...(19): siRNA sense strand
cagccuacguccauugaga

SEQ ID NO: 744756 - RNA, 19 nt, Homo sapiens
  misc_RNA (1)...(19): siRNA sense strand
gccagagccucguaucauc

SEQ ID NO: 744757 - RNA, 19 nt, Homo sapiens
  misc_RNA (1)...(19): siRNA sense strand
ggaauccgaaucuccaugu

SEQ ID NO: 744758 - RNA, 19 nt, Homo sapiens
  misc_RNA (1)...(19): siRNA sense strand
aaggaggucuuccccauua

SEQ ID NO: 744759 - RNA, 19 nt, Homo sapiens
  misc_RNA (1)...(19): siRNA sense strand
guguuuguguccaauaaga

SEQ ID NO: 744760 - RNA, 19 nt, Homo sapiens
  misc_RNA (1)...(19): siRNA sense strand
ccucaacagugacgugauc

SEQ ID NO: 744761 - RNA, 19 nt, Homo sapiens
  misc_RNA (1)...(19): siRNA sense strand
gcccggauccguucccauu

SEQ ID NO: 744762 - RNA, 19 nt, Homo sapiens
  misc_RNA (1)...(19): siRNA sense strand
uauaugccauggaguuaca

SEQ ID NO: 744763 - RNA, 19 nt, Homo sapiens
  misc_RNA (1)...(19): siRNA sense strand
ugucgcaggugcuggagaa

SEQ ID NO: 744764 - RNA, 19 nt, Homo sapiens
  misc_RNA (1)...(19): siRNA sense strand
uggcuugaguccugcauug

SEQ ID NO: 744765 - RNA, 19 nt, Homo sapiens
  misc_RNA (1)...(19): siRNA sense strand
cccgugaccuacucucuga

SEQ ID NO: 744766 - RNA, 19 nt, Homo sapiens
  misc_RNA (1)...(19): siRNA sense strand
gaagaugguguguguaucc

SEQ ID NO: 744767 - RNA, 19 nt, Homo sapiens
  misc_RNA (1)...(19): siRNA sense strand
gcauggagaacgugacagu

SEQ ID NO: 744768 - RNA, 19 nt, Homo sapiens
  misc_RNA (1)...(19): siRNA sense strand
gaggacgucauaguuaaug

SEQ ID NO: 744769 - RNA, 19 nt, Homo sapiens
  misc_RNA (1)...(19): siRNA sense strand
cgcaggugcuggagaagga

SEQ ID NO: 744770 - RNA, 19 nt, Homo sapiens
  misc_RNA (1)...(19): siRNA sense strand
gggugaggacgucauaguu

SEQ ID NO: 744771 - RNA, 19 nt, Homo sapiens
  misc_RNA (1)...(19): siRNA sense strand
ucgaagaugguguguguau

SEQ ID NO: 744772 - RNA, 19 nt, Homo sapiens
  misc_RNA (1)...(19): siRNA sense strand
gugacgugaucugcgauuu

SEQ ID NO: 744773 - RNA, 19 nt, Homo sapiens
  misc_RNA (1)...(19): siRNA sense strand
gagcagaggcugggaaucc

SEQ ID NO: 744774 - RNA, 19 nt, Homo sapiens
  misc_RNA (1)...(19): siRNA sense strand
gaauccgaaucuccauguc

SEQ ID NO: 744775 - RNA, 19 nt, Homo sapiens
  misc_RNA (1)...(19): siRNA sense strand
uccaagccauggugcaguu

SEQ ID NO: 744776 - RNA, 19 nt, Homo sapiens
  misc_RNA (1)...(19): siRNA sense strand
gcugggugaggacgucaua

SEQ ID NO: 744777 - RNA, 19 nt, Homo sapiens
  misc_RNA (1)...(19): siRNA sense strand
cgaagaugguguguguauc

SEQ ID NO: 744778 - RNA, 19 nt, Homo sapiens
  misc_RNA (1)...(19): siRNA sense strand
caagucuauuggcgaguca

SEQ ID NO: 744779 - RNA, 19 nt, Homo sapiens
  misc_RNA (1)...(19): siRNA sense strand
ccagagccucguaucauca

SEQ ID NO: 744780 - RNA, 19 nt, Homo sapiens
  misc_RNA (1)...(19): siRNA sense strand
gagaagccacagguguuug

SEQ ID NO: 744781 - RNA, 19 nt, Homo sapiens
  misc_RNA (1)...(19): siRNA sense strand
ugguggacuucugcaauaa

SEQ ID NO: 744782 - RNA, 19 nt, Homo sapiens
  misc_RNA (1)...(19): siRNA sense strand
uggagaagccacagguguu

SEQ ID NO: 744783 - RNA, 19 nt, Homo sapiens
  misc_RNA (1)...(19): siRNA sense strand
ccaaggaggggcagcuaua

SEQ ID NO: 744784 - RNA, 19 nt, Homo sapiens
  misc_RNA (1)...(19): siRNA sense strand
gacgugaucugcgauuucc

SEQ ID NO: 744785 - RNA, 19 nt, Homo sapiens
  misc_RNA (1)...(19): siRNA sense strand
gcuucuggauggacauugg

SEQ ID NO: 744786 - RNA, 19 nt, Homo sapiens
  misc_RNA (1)...(19): siRNA sense strand
agguguuuguguccaauaa

SEQ ID NO: 744787 - RNA, 19 nt, Homo sapiens
  misc_RNA (1)...(19): siRNA sense strand
gacugcagacccuuucuuc

SEQ ID NO: 744788 - RNA, 19 nt, Homo sapiens
  misc_RNA (1)...(19): siRNA sense strand
gagccucguaucaucaugu

SEQ ID NO: 744789 - RNA, 19 nt, Homo sapiens
  misc_RNA (1)...(19): siRNA sense strand
caacgcaggcauguacauc

SEQ ID NO: 744790 - RNA, 19 nt, Homo sapiens
  misc_RNA (1)...(19): siRNA sense strand
ugacgugaucugcgauuuc

SEQ ID NO: 744791 - RNA, 19 nt, Homo sapiens
  misc_RNA (1)...(19): siRNA sense strand
gagaaacccagcacauuua

SEQ ID NO: 744792 - RNA, 19 nt, Homo sapiens
  misc_RNA (1)...(19): siRNA sense strand
ggagaaacccagcacauuu

SEQ ID NO: 744793 - RNA, 19 nt, Homo sapiens
  misc_RNA (1)...(19): siRNA sense strand
ggaacucgcuucagaccuu

SEQ ID NO: 744794 - RNA, 19 nt, Homo sapiens
  misc_RNA (1)...(19): siRNA sense strand
aaagggaacucgcuucaga

SEQ ID NO: 744795 - RNA, 19 nt, Homo sapiens
  misc_RNA (1)...(19): siRNA sense strand
ggaagcugcugccugcuau

SEQ ID NO: 744796 - RNA, 19 nt, Homo sapiens
  misc_RNA (1)...(19): siRNA sense strand
ccaggacacucacccagaa

SEQ ID NO: 744797 - RNA, 19 nt, Homo sapiens
  misc_RNA (1)...(19): siRNA sense strand
gaacucgcuucagaccuuu

SEQ ID NO: 744798 - RNA, 19 nt, Homo sapiens
  misc_RNA (1)...(19): siRNA sense strand
caacuacggcugcaucguu

SEQ ID NO: 744799 - RNA, 19 nt, Homo sapiens
  misc_RNA (1)...(19): siRNA sense strand
ggacgcaaucccucaacua

SEQ ID NO: 744800 - RNA, 19 nt, Homo sapiens
  misc_RNA (1)...(19): siRNA sense strand
gaucaaguccgcagguuca

SEQ ID NO: 744801 - RNA, 19 nt, Homo sapiens
  misc_RNA (1)...(19): siRNA sense strand
ucaaagcggugauccugau

SEQ ID NO: 744802 - RNA, 19 nt, Homo sapiens
  misc_RNA (1)...(19): siRNA sense strand
gauccaacaccauauugaa

SEQ ID NO: 744803 - RNA, 19 nt, Homo sapiens
  misc_RNA (1)...(19): siRNA sense strand
gaguuuaaccuuccaguca

SEQ ID NO: 744804 - RNA, 19 nt, Homo sapiens
  misc_RNA (1)...(19): siRNA sense strand
cagaacggcuggccaagca

SEQ ID NO: 744805 - RNA, 19 nt, Homo sapiens
  misc_RNA (1)...(19): siRNA sense strand
aaacccagcacauuuauca

SEQ ID NO: 744806 - RNA, 19 nt, Homo sapiens
  misc_RNA (1)...(19): siRNA sense strand
gcacauuuaucagugacau

SEQ ID NO: 744807 - RNA, 19 nt, Homo sapiens
  misc_RNA (1)...(19): siRNA sense strand
ccagcacauuuaucaguga

SEQ ID NO: 744808 - RNA, 19 nt, Homo sapiens
  misc_RNA (1)...(19): siRNA sense strand
gagcccgcauggacaguga

SEQ ID NO: 744809 - RNA, 19 nt, Homo sapiens
  misc_RNA (1)...(19): siRNA sense strand
cacacgagguauugcacua

SEQ ID NO: 744810 - RNA, 19 nt, Homo sapiens
  misc_RNA (1)...(19): siRNA sense strand
gagcaucguccuccaugga

SEQ ID NO: 744811 - RNA, 19 nt, Homo sapiens
  misc_RNA (1)...(19): siRNA sense strand
gggaugucuuccagcguaa

SEQ ID NO: 744812 - RNA, 19 nt, Homo sapiens
  misc_RNA (1)...(19): siRNA sense strand
gggaagcugcugccugcua

SEQ ID NO: 744813 - RNA, 19 nt, Homo sapiens
  misc_RNA (1)...(19): siRNA sense strand
ucagcaggaugggcaauug

SEQ ID NO: 744814 - RNA, 19 nt, Homo sapiens
  misc_RNA (1)...(19): siRNA sense strand
caggagauucugcucauug

SEQ ID NO: 744815 - RNA, 19 nt, Homo sapiens
  misc_RNA (1)...(19): siRNA sense strand
ccgaggugcucauccugaa

SEQ ID NO: 744816 - RNA, 19 nt, Homo sapiens
  misc_RNA (1)...(19): siRNA sense strand
gcagggcagggccagauau

SEQ ID NO: 744817 - RNA, 19 nt, Homo sapiens
  misc_RNA (1)...(19): siRNA sense strand
cagggcagggccagauaua

SEQ ID NO: 744818 - RNA, 19 nt, Homo sapiens
  misc_RNA (1)...(19): siRNA sense strand
cacgagguauugcacuaug

SEQ ID NO: 744819 - RNA, 19 nt, Homo sapiens
  misc_RNA (1)...(19): siRNA sense strand
gccgauaccaggacacuca

SEQ ID NO: 744820 - RNA, 19 nt, Homo sapiens
  misc_RNA (1)...(19): siRNA sense strand
cagaucaaguccgcagguu

SEQ ID NO: 744821 - RNA, 19 nt, Homo sapiens
  misc_RNA (1)...(19): siRNA sense strand
ccagcgucacccuuucuua

SEQ ID NO: 744822 - RNA, 19 nt, Homo sapiens
  misc_RNA (1)...(19): siRNA sense strand
ccgcccagcaggaguuuaa

SEQ ID NO: 744823 - RNA, 19 nt, Homo sapiens
  misc_RNA (1)...(19): siRNA sense strand
gccucuaccugagccgaua

SEQ ID NO: 744824 - RNA, 19 nt, Homo sapiens
  misc_RNA (1)...(19): siRNA sense strand
ugaggugcccaaaccauug

SEQ ID NO: 744825 - RNA, 19 nt, Homo sapiens
  misc_RNA (1)...(19): siRNA sense strand
ccacagacacacgagguau

SEQ ID NO: 744826 - RNA, 19 nt, Homo sapiens
  misc_RNA (1)...(19): siRNA sense strand
gccuagagcaggauguguu

SEQ ID NO: 744827 - RNA, 19 nt, Homo sapiens
  misc_RNA (1)...(19): siRNA sense strand
gaaacccagcacauuuauc

SEQ ID NO: 744828 - RNA, 19 nt, Homo sapiens
  misc_RNA (1)...(19): siRNA sense strand
uggagaaacccagcacauu

SEQ ID NO: 744829 - RNA, 19 nt, Homo sapiens
  misc_RNA (1)...(19): siRNA sense strand
ccuagagcaggauguguuu

SEQ ID NO: 744830 - RNA, 19 nt, Homo sapiens
  misc_RNA (1)...(19): siRNA sense strand
acagacacacgagguauug

SEQ ID NO: 744831 - RNA, 19 nt, Homo sapiens
  misc_RNA (1)...(19): siRNA sense strand
caaagcggugauccugauu

SEQ ID NO: 744832 - RNA, 19 nt, Homo sapiens
  misc_RNA (1)...(19): siRNA sense strand
gcaggaguuuaaccuucca

SEQ ID NO: 744833 - RNA, 19 nt, Homo sapiens
  misc_RNA (1)...(19): siRNA sense strand
caucaacugcggcaucuac

SEQ ID NO: 744834 - RNA, 19 nt, Homo sapiens
  misc_RNA (1)...(19): siRNA sense strand
agaaacccagcacauuuau

SEQ ID NO: 744835 - RNA, 19 nt, Homo sapiens
  misc_RNA (1)...(19): siRNA sense strand
gacgcaaucccucaacuac

SEQ ID NO: 744836 - RNA, 19 nt, Homo sapiens
  misc_RNA (1)...(19): siRNA sense strand
uauacgugcaucucacuga

SEQ ID NO: 744837 - RNA, 19 nt, Homo sapiens
  misc_RNA (1)...(19): siRNA sense strand
gaagcuucaccaaccagau

SEQ ID NO: 744838 - RNA, 19 nt, Homo sapiens
  misc_RNA (1)...(19): siRNA sense strand
gauccgagggaauguguac

SEQ ID NO: 744839 - RNA, 19 nt, Homo sapiens
  misc_RNA (1)...(19): siRNA sense strand
ccauggauccgagggaaug

SEQ ID NO: 744840 - RNA, 19 nt, Homo sapiens
  misc_RNA (1)...(19): siRNA sense strand
caucagagcucaccuuuga

SEQ ID NO: 744841 - RNA, 19 nt, Homo sapiens
  misc_RNA (1)...(19): siRNA sense strand
gcucggagguggcaaguuu

SEQ ID NO: 744842 - RNA, 19 nt, Homo sapiens
  misc_RNA (1)...(19): siRNA sense strand
gaccaaaucuccgauaaga

SEQ ID NO: 744843 - RNA, 19 nt, Homo sapiens
  misc_RNA (1)...(19): siRNA sense strand
gaggacugcuuccagauuu

SEQ ID NO: 744844 - RNA, 19 nt, Homo sapiens
  misc_RNA (1)...(19): siRNA sense strand
gaugaacgcugcccagugu

SEQ ID NO: 744845 - RNA, 19 nt, Homo sapiens
  misc_RNA (1)...(19): siRNA sense strand
agaaauaccucaugaagag

SEQ ID NO: 744846 - RNA, 19 nt, Homo sapiens
  misc_RNA (1)...(19): siRNA sense strand
gaaacagacucccaaagac

SEQ ID NO: 744847 - RNA, 19 nt, Homo sapiens
  misc_RNA (1)...(19): siRNA sense strand
caacagacaaggcaccuaa

SEQ ID NO: 744848 - RNA, 19 nt, Homo sapiens
  misc_RNA (1)...(19): siRNA sense strand
gcaaucugauccagcugua

SEQ ID NO: 744849 - RNA, 19 nt, Homo sapiens
  misc_RNA (1)...(19): siRNA sense strand
cagccaaggucaucaagaa

SEQ ID NO: 744850 - RNA, 19 nt, Homo sapiens
  misc_RNA (1)...(19): siRNA sense strand
ucaccugccuuucugcaua

SEQ ID NO: 744851 - RNA, 19 nt, Homo sapiens
  misc_RNA (1)...(19): siRNA sense strand
gaaggaagugggagagaaa

SEQ ID NO: 744852 - RNA, 19 nt, Homo sapiens
  misc_RNA (1)...(19): siRNA sense strand
gagaacauccuguguguca

SEQ ID NO: 744853 - RNA, 19 nt, Homo sapiens
  misc_RNA (1)...(19): siRNA sense strand
ucaacaaccuggcggagaa

SEQ ID NO: 744854 - RNA, 19 nt, Homo sapiens
  misc_RNA (1)...(19): siRNA sense strand
acacagagacccuaaacaa

SEQ ID NO: 744855 - RNA, 19 nt, Homo sapiens
  misc_RNA (1)...(19): siRNA sense strand
cagagaacauccugugugu

SEQ ID NO: 744856 - RNA, 19 nt, Homo sapiens
  misc_RNA (1)...(19): siRNA sense strand
agacagacauguggaguau

SEQ ID NO: 744857 - RNA, 19 nt, Homo sapiens
  misc_RNA (1)...(19): siRNA sense strand
cuuaagaaauaccucauga

SEQ ID NO: 744858 - RNA, 19 nt, Homo sapiens
  misc_RNA (1)...(19): siRNA sense strand
agaaacagacucccaaaga

SEQ ID NO: 744859 - RNA, 19 nt, Homo sapiens
  misc_RNA (1)...(19): siRNA sense strand
caacugguacuuugaugaa

SEQ ID NO: 744860 - RNA, 19 nt, Homo sapiens
  misc_RNA (1)...(19): siRNA sense strand
ccaaaucuccgauaagaca

SEQ ID NO: 744861 - RNA, 19 nt, Homo sapiens
  misc_RNA (1)...(19): siRNA sense strand
gaagaggcgcuggaagaaa

SEQ ID NO: 744862 - RNA, 19 nt, Homo sapiens
  misc_RNA (1)...(19): siRNA sense strand
acgagaagcugaaggugaa

SEQ ID NO: 744863 - RNA, 19 nt, Homo sapiens
  misc_RNA (1)...(19): siRNA sense strand
gcccaacccucaacuagca

SEQ ID NO: 744864 - RNA, 19 nt, Homo sapiens
  misc_RNA (1)...(19): siRNA sense strand
ucgagaggauuguggauga

SEQ ID NO: 744865 - RNA, 19 nt, Homo sapiens
  misc_RNA (1)...(19): siRNA sense strand
ggaggacugcuuccagauu

SEQ ID NO: 744866 - RNA, 19 nt, Homo sapiens
  misc_RNA (1)...(19): siRNA sense strand
uaagaaauaccucaugaag

SEQ ID NO: 744867 - RNA, 19 nt, Homo sapiens
  misc_RNA (1)...(19): siRNA sense strand
ggugaauuaugaccaaauc

SEQ ID NO: 744868 - RNA, 19 nt, Homo sapiens
  misc_RNA (1)...(19): siRNA sense strand
gagaaagccaaacgcugua

SEQ ID NO: 744869 - RNA, 19 nt, Homo sapiens
  misc_RNA (1)...(19): siRNA sense strand
aaagaaagcuccggaucca

SEQ ID NO: 744870 - RNA, 19 nt, Homo sapiens
  misc_RNA (1)...(19): siRNA sense strand
gcccaucccuggcucaaca

SEQ ID NO: 744871 - RNA, 19 nt, Homo sapiens
  misc_RNA (1)...(19): siRNA sense strand
ccaaggucaucaagaaaca

SEQ ID NO: 744872 - RNA, 19 nt, Homo sapiens
  misc_RNA (1)...(19): siRNA sense strand
agaagcugcuggccaagaa

SEQ ID NO: 744873 - RNA, 19 nt, Homo sapiens
  misc_RNA (1)...(19): siRNA sense strand
gcaacugguacuuugauga

SEQ ID NO: 744874 - RNA, 19 nt, Homo sapiens
  misc_RNA (1)...(19): siRNA sense strand
caguugagcugggaauuca

SEQ ID NO: 744875 - RNA, 19 nt, Homo sapiens
  misc_RNA (1)...(19): siRNA sense strand
cacccacccugaagaaaga

SEQ ID NO: 744876 - RNA, 19 nt, Homo sapiens
  misc_RNA (1)...(19): siRNA sense strand
cugagguggugaauuauga

SEQ ID NO: 744877 - RNA, 19 nt, Homo sapiens
  misc_RNA (1)...(19): siRNA sense strand
caagaaacagacucccaaa

SEQ ID NO: 744878 - RNA, 19 nt, Homo sapiens
  misc_RNA (1)...(19): siRNA sense strand
gggcucaccugccuuucug

SEQ ID NO: 744879 - RNA, 19 nt, Homo sapiens
  misc_RNA (1)...(19): siRNA sense strand
agaaggaagugggagagaa

SEQ ID NO: 744880 - RNA, 19 nt, Homo sapiens
  misc_RNA (1)...(19): siRNA sense strand
acagacauguggaguaugg

SEQ ID NO: 744881 - RNA, 19 nt, Homo sapiens
  misc_RNA (1)...(19): siRNA sense strand
caacaccaccgggcauuug

SEQ ID NO: 744882 - RNA, 19 nt, Homo sapiens
  misc_RNA (1)...(19): siRNA sense strand
gggaaugucagcagugaau

SEQ ID NO: 744883 - RNA, 19 nt, Homo sapiens
  misc_RNA (1)...(19): siRNA sense strand
gcagaagaaggaaagaaca

SEQ ID NO: 744884 - RNA, 19 nt, Homo sapiens
  misc_RNA (1)...(19): siRNA sense strand
gcuguucccucagagaaau

SEQ ID NO: 744885 - RNA, 19 nt, Homo sapiens
  misc_RNA (1)...(19): siRNA sense strand
ccugggagaugaugacaca

SEQ ID NO: 744886 - RNA, 19 nt, Homo sapiens
  misc_RNA (1)...(19): siRNA sense strand
gccaucaucuccaguucug

SEQ ID NO: 744887 - RNA, 19 nt, Homo sapiens
  misc_RNA (1)...(19): siRNA sense strand
cgcaugagaucguccuguu

SEQ ID NO: 744888 - RNA, 19 nt, Homo sapiens
  misc_RNA (1)...(19): siRNA sense strand
gaaagccacaggccucaag

SEQ ID NO: 744889 - RNA, 19 nt, Homo sapiens
  misc_RNA (1)...(19): siRNA sense strand
uaucagacgaggccaaaga

SEQ ID NO: 744890 - RNA, 19 nt, Homo sapiens
  misc_RNA (1)...(19): siRNA sense strand
cagaacccaucaacagaca

SEQ ID NO: 744891 - RNA, 19 nt, Homo sapiens
  misc_RNA (1)...(19): siRNA sense strand
gaagcugaaggugaacuuu

SEQ ID NO: 744892 - RNA, 19 nt, Homo sapiens
  misc_RNA (1)...(19): siRNA sense strand
aaacagacucccaaagaca

SEQ ID NO: 744893 - RNA, 19 nt, Homo sapiens
  misc_RNA (1)...(19): siRNA sense strand
agcagugaauucaguauga

SEQ ID NO: 744894 - RNA, 19 nt, Homo sapiens
  misc_RNA (1)...(19): siRNA sense strand
gugaagaucauugacuuug

SEQ ID NO: 744895 - RNA, 19 nt, Homo sapiens
  misc_RNA (1)...(19): siRNA sense strand
gacagaaaauggagcaguu

SEQ ID NO: 744896 - RNA, 19 nt, Homo sapiens
  misc_RNA (1)...(19): siRNA sense strand
agucccagaucuugcuuaa

SEQ ID NO: 744897 - RNA, 19 nt, Homo sapiens
  misc_RNA (1)...(19): siRNA sense strand
ucuggcaacugguacuuug

SEQ ID NO: 744898 - RNA, 19 nt, Homo sapiens
  misc_RNA (1)...(19): siRNA sense strand
ggugaagaucauugacuuu

SEQ ID NO: 744899 - RNA, 19 nt, Homo sapiens
  misc_RNA (1)...(19): siRNA sense strand
gaacauccugugugucaac

SEQ ID NO: 744900 - RNA, 19 nt, Homo sapiens
  misc_RNA (1)...(19): siRNA sense strand
gcaguugagcugggaauuc

SEQ ID NO: 744901 - RNA, 19 nt, Homo sapiens
  misc_RNA (1)...(19): siRNA sense strand
ugaagaucauugacuuugg

SEQ ID NO: 744902 - RNA, 19 nt, Homo sapiens
  misc_RNA (1)...(19): siRNA sense strand
cagcuguccugccaucauc

SEQ ID NO: 744903 - RNA, 19 nt, Homo sapiens
  misc_RNA (1)...(19): siRNA sense strand
ugaagaggcgcuggaagaa

SEQ ID NO: 744904 - RNA, 19 nt, Homo sapiens
  misc_RNA (1)...(19): siRNA sense strand
gaugacacagagacccuaa

SEQ ID NO: 744905 - RNA, 19 nt, Homo sapiens
  misc_RNA (1)...(19): siRNA sense strand
caugagaucguccuguuca

SEQ ID NO: 744906 - RNA, 19 nt, Homo sapiens
  misc_RNA (1)...(19): siRNA sense strand
agauugaggucaugaacca

SEQ ID NO: 744907 - RNA, 19 nt, Homo sapiens
  misc_RNA (1)...(19): siRNA sense strand
ccaaagacaaggaaauggu

SEQ ID NO: 744908 - RNA, 19 nt, Homo sapiens
  misc_RNA (1)...(19): siRNA sense strand
gaacccaucaacagacaag

SEQ ID NO: 744909 - RNA, 19 nt, Homo sapiens
  misc_RNA (1)...(19): siRNA sense strand
ugucagcagugaauucagu

SEQ ID NO: 744910 - RNA, 19 nt, Homo sapiens
  misc_RNA (1)...(19): siRNA sense strand
gagaagcugcuggccaaga

SEQ ID NO: 744911 - RNA, 19 nt, Homo sapiens
  misc_RNA (1)...(19): siRNA sense strand
aagaaauaccucaugaaga

SEQ ID NO: 744912 - RNA, 19 nt, Homo sapiens
  misc_RNA (1)...(19): siRNA sense strand
uggugaagaucauugacuu

SEQ ID NO: 744913 - RNA, 19 nt, Homo sapiens
  misc_RNA (1)...(19): siRNA sense strand
guaccugcauggagaaagc

SEQ ID NO: 744914 - RNA, 19 nt, Homo sapiens
  misc_RNA (1)...(19): siRNA sense strand
aagaggcgcuggaagaaaa

SEQ ID NO: 744915 - RNA, 19 nt, Homo sapiens
  misc_RNA (1)...(19): siRNA sense strand
cagagacccuaaacaacgu

SEQ ID NO: 744916 - RNA, 19 nt, Homo sapiens
  misc_RNA (1)...(19): siRNA sense strand
ccaucgagacuccgcauga

SEQ ID NO: 744917 - RNA, 19 nt, Homo sapiens
  misc_RNA (1)...(19): siRNA sense strand
gaaccaccgcaaucugauc

SEQ ID NO: 744918 - RNA, 19 nt, Homo sapiens
  misc_RNA (1)...(19): siRNA sense strand
acaaggaaaugguguugcu

SEQ ID NO: 744919 - RNA, 19 nt, Homo sapiens
  misc_RNA (1)...(19): siRNA sense strand
ggcaucagagcucaccuuu

SEQ ID NO: 744920 - RNA, 19 nt, Homo sapiens
  misc_RNA (1)...(19): siRNA sense strand
ggaauucagaacccaucaa

SEQ ID NO: 744921 - RNA, 19 nt, Homo sapiens
  misc_RNA (1)...(19): siRNA sense strand
ucuccaaccucaucgucaa

SEQ ID NO: 744922 - RNA, 19 nt, Homo sapiens
  misc_RNA (1)...(19): siRNA sense strand
cuaaacaacguucuaucug

SEQ ID NO: 744923 - RNA, 19 nt, Homo sapiens
  misc_RNA (1)...(19): siRNA sense strand
gauccacccacccugaaga

SEQ ID NO: 744924 - RNA, 19 nt, Homo sapiens
  misc_RNA (1)...(19): siRNA sense strand
gagcugaggaccgggaaug

SEQ ID NO: 744925 - RNA, 19 nt, Homo sapiens
  misc_RNA (1)...(19): siRNA sense strand
ccgggaaugucagcaguga

SEQ ID NO: 744926 - RNA, 19 nt, Homo sapiens
  misc_RNA (1)...(19): siRNA sense strand
ggcaacugguacuuugaug

SEQ ID NO: 744927 - RNA, 19 nt, Homo sapiens
  misc_RNA (1)...(19): siRNA sense strand
gacccuaaacaacguucua

SEQ ID NO: 744928 - RNA, 19 nt, Homo sapiens
  misc_RNA (1)...(19): siRNA sense strand
gaauucagaacccaucaac

SEQ ID NO: 744929 - RNA, 19 nt, Homo sapiens
  misc_RNA (1)...(19): siRNA sense strand
gauuguggaugaggacuac

SEQ ID NO: 744930 - RNA, 19 nt, Homo sapiens
  misc_RNA (1)...(19): siRNA sense strand
ugguguugcuggagauuga

SEQ ID NO: 744931 - RNA, 19 nt, Homo sapiens
  misc_RNA (1)...(19): siRNA sense strand
caaggcagaagaaggaaag

SEQ ID NO: 744932 - RNA, 19 nt, Homo sapiens
  misc_RNA (1)...(19): siRNA sense strand
ccuaaacaacguucuaucu

SEQ ID NO: 744933 - RNA, 19 nt, Homo sapiens
  misc_RNA (1)...(19): siRNA sense strand
ggaaugucagcagugaauu

SEQ ID NO: 744934 - RNA, 19 nt, Homo sapiens
  misc_RNA (1)...(19): siRNA sense strand
ggauuguggaugaggacua

SEQ ID NO: 744935 - RNA, 19 nt, Homo sapiens
  misc_RNA (1)...(19): siRNA sense strand
caacaaccuggcggagaaa

SEQ ID NO: 744936 - RNA, 19 nt, Homo sapiens
  misc_RNA (1)...(19): siRNA sense strand
cagacgaggccaaagacuu

SEQ ID NO: 744937 - RNA, 19 nt, Homo sapiens
  misc_RNA (1)...(19): siRNA sense strand
ggagaugaugacacagaga

SEQ ID NO: 744938 - RNA, 19 nt, Homo sapiens
  misc_RNA (1)...(19): siRNA sense strand
gguauaaccccaacgagaa

SEQ ID NO: 744939 - RNA, 19 nt, Homo sapiens
  misc_RNA (1)...(19): siRNA sense strand
acugguacuuugaugaaga

SEQ ID NO: 744940 - RNA, 19 nt, Homo sapiens
  misc_RNA (1)...(19): siRNA sense strand
gacaggaaguuugccaaua

SEQ ID NO: 744941 - RNA, 19 nt, Homo sapiens
  misc_RNA (1)...(19): siRNA sense strand
gacugaagaugaggaaauu

SEQ ID NO: 744942 - RNA, 19 nt, Homo sapiens
  misc_RNA (1)...(19): siRNA sense strand
gcagugaucggaagaaaca

SEQ ID NO: 744943 - RNA, 19 nt, Homo sapiens
  misc_RNA (1)...(19): siRNA sense strand
acaggaaguuugccaauag

SEQ ID NO: 744944 - RNA, 19 nt, Homo sapiens
  misc_RNA (1)...(19): siRNA sense strand
cugaagaugaggaaauuua

SEQ ID NO: 744945 - RNA, 19 nt, Homo sapiens
  misc_RNA (1)...(19): siRNA sense strand
gaaccaccucugagacuga

SEQ ID NO: 744946 - RNA, 19 nt, Homo sapiens
  misc_RNA (1)...(19): siRNA sense strand
ccucugagacugaagauga

SEQ ID NO: 744947 - RNA, 19 nt, Homo sapiens
  misc_RNA (1)...(19): siRNA sense strand
ccaaauacaagcucaucaa

SEQ ID NO: 744948 - RNA, 19 nt, Homo sapiens
  misc_RNA (1)...(19): siRNA sense strand
ccacaagcguacucauaca

SEQ ID NO: 744949 - RNA, 19 nt, Homo sapiens
  misc_RNA (1)...(19): siRNA sense strand
aauacaagcucaucaacca

SEQ ID NO: 744950 - RNA, 19 nt, Homo sapiens
  misc_RNA (1)...(19): siRNA sense strand
gcaacggaaccaccucuga

SEQ ID NO: 744951 - RNA, 19 nt, Homo sapiens
  misc_RNA (1)...(19): siRNA sense strand
ugcacgagcuggugaauca

SEQ ID NO: 744952 - RNA, 19 nt, Homo sapiens
  misc_RNA (1)...(19): siRNA sense strand
ugaggaagcacaugaagau

SEQ ID NO: 744953 - RNA, 19 nt, Homo sapiens
  misc_RNA (1)...(19): siRNA sense strand
uccagccgcuucagaauau

SEQ ID NO: 744954 - RNA, 19 nt, Homo sapiens
  misc_RNA (1)...(19): siRNA sense strand
gauucgaggcugugacaaa

SEQ ID NO: 744955 - RNA, 19 nt, Homo sapiens
  misc_RNA (1)...(19): siRNA sense strand
uagcagugaucggaagaaa

SEQ ID NO: 744956 - RNA, 19 nt, Homo sapiens
  misc_RNA (1)...(19): siRNA sense strand
gaaguugugcggacgauac

SEQ ID NO: 744957 - RNA, 19 nt, Homo sapiens
  misc_RNA (1)...(19): siRNA sense strand
ccagugacaagcccuacua

SEQ ID NO: 744958 - RNA, 19 nt, Homo sapiens
  misc_RNA (1)...(19): siRNA sense strand
cgggaacccugaaguugug

SEQ ID NO: 744959 - RNA, 19 nt, Homo sapiens
  misc_RNA (1)...(19): siRNA sense strand
guccagccgcuucagaaua

SEQ ID NO: 744960 - RNA, 19 nt, Homo sapiens
  misc_RNA (1)...(19): siRNA sense strand
ucaaugagugguacguuug

SEQ ID NO: 744961 - RNA, 19 nt, Homo sapiens
  misc_RNA (1)...(19): siRNA sense strand
ccgagaaccucaagaucca

SEQ ID NO: 744962 - RNA, 19 nt, Homo sapiens
  misc_RNA (1)...(19): siRNA sense strand
gccaagcccugcuccaaaa

SEQ ID NO: 744963 - RNA, 19 nt, Homo sapiens
  misc_RNA (1)...(19): siRNA sense strand
gugacaagcccuacuacug

SEQ ID NO: 744964 - RNA, 19 nt, Homo sapiens
  misc_RNA (1)...(19): siRNA sense strand
gcccuacuacugcaagauu

SEQ ID NO: 744965 - RNA, 19 nt, Homo sapiens
  misc_RNA (1)...(19): siRNA sense strand
caagcucccugaggaagca

SEQ ID NO: 744966 - RNA, 19 nt, Homo sapiens
  misc_RNA (1)...(19): siRNA sense strand
gcuccgagaaccucaagau

SEQ ID NO: 744967 - RNA, 19 nt, Homo sapiens
  misc_RNA (1)...(19): siRNA sense strand
agacugaagaugaggaaau

SEQ ID NO: 744968 - RNA, 19 nt, Homo sapiens
  misc_RNA (1)...(19): siRNA sense strand
gaggaagcacaugaagauu

SEQ ID NO: 744969 - RNA, 19 nt, Homo sapiens
  misc_RNA (1)...(19): siRNA sense strand
caaauacaagcucaucaac

SEQ ID NO: 744970 - RNA, 19 nt, Homo sapiens
  misc_RNA (1)...(19): siRNA sense strand
uuacgggaacccugaaguu

SEQ ID NO: 744971 - RNA, 19 nt, Homo sapiens
  misc_RNA (1)...(19): siRNA sense strand
gcaagauucgaggcuguga

SEQ ID NO: 744972 - RNA, 19 nt, Homo sapiens
  misc_RNA (1)...(19): siRNA sense strand
ugacaggaaguuugccaau

SEQ ID NO: 744973 - RNA, 19 nt, Homo sapiens
  misc_RNA (1)...(19): siRNA sense strand
gaaccucaagauccacaag

SEQ ID NO: 744974 - RNA, 19 nt, Homo sapiens
  misc_RNA (1)...(19): siRNA sense strand
gaagaugaggaaauuuacg

SEQ ID NO: 744975 - RNA, 19 nt, Homo sapiens
  misc_RNA (1)...(19): siRNA sense strand
guugugcggacgauacauu

SEQ ID NO: 744976 - RNA, 19 nt, Homo sapiens
  misc_RNA (1)...(19): siRNA sense strand
cgccaagcccugcuccaaa

SEQ ID NO: 744977 - RNA, 19 nt, Homo sapiens
  misc_RNA (1)...(19): siRNA sense strand
gaauuugauggcugugaca

SEQ ID NO: 744978 - RNA, 19 nt, Homo sapiens
  misc_RNA (1)...(19): siRNA sense strand
ggaacuacguggagaucau

SEQ ID NO: 744979 - RNA, 19 nt, Homo sapiens
  misc_RNA (1)...(19): siRNA sense strand
gcugcgaggugaagacaug

SEQ ID NO: 744980 - RNA, 19 nt, Homo sapiens
  misc_RNA (1)...(19): siRNA sense strand
gcgaggacaucgaguuugg

SEQ ID NO: 744981 - RNA, 19 nt, Homo sapiens
  misc_RNA (1)...(19): siRNA sense strand
gguguggccuuugcaguga

SEQ ID NO: 744982 - RNA, 19 nt, Homo sapiens
  misc_RNA (1)...(19): siRNA sense strand
gauggugucucgggaguuc

SEQ ID NO: 744983 - RNA, 19 nt, Homo sapiens
  misc_RNA (1)...(19): siRNA sense strand
gaagugccgcugcguguuc

SEQ ID NO: 744984 - RNA, 19 nt, Homo sapiens
  misc_RNA (1)...(19): siRNA sense strand
gcagugacacgcucaugug

SEQ ID NO: 744985 - RNA, 19 nt, Homo sapiens
  misc_RNA (1)...(19): siRNA sense strand
gaacuacguggagaucaug

SEQ ID NO: 744986 - RNA, 19 nt, Homo sapiens
  misc_RNA (1)...(19): siRNA sense strand
gaugcccgcucagccauga

SEQ ID NO: 744987 - RNA, 19 nt, Homo sapiens
  misc_RNA (1)...(19): siRNA sense strand
gccgagggcaucaagauug

SEQ ID NO: 744988 - RNA, 19 nt, Homo sapiens
  misc_RNA (1)...(19): siRNA sense strand
uagcgaggacaucgaguuu

SEQ ID NO: 744989 - RNA, 19 nt, Homo sapiens
  misc_RNA (1)...(19): siRNA sense strand
gcgcuacaccuacuucaag

SEQ ID NO: 744990 - RNA, 19 nt, Homo sapiens
  misc_RNA (1)...(19): siRNA sense strand
gccaugaaccgccacaaca

SEQ ID NO: 744991 - RNA, 19 nt, Homo sapiens
  misc_RNA (1)...(19): siRNA sense strand
guagcgaggacaucgaguu

SEQ ID NO: 744992 - RNA, 19 nt, Homo sapiens
  misc_RNA (1)...(19): siRNA sense strand
cggagauggugguggagaa

SEQ ID NO: 744993 - RNA, 19 nt, Homo sapiens
  misc_RNA (1)...(19): siRNA sense strand
ccaugaaccgccacaacaa

SEQ ID NO: 744994 - RNA, 19 nt, Homo sapiens
  misc_RNA (1)...(19): siRNA sense strand
ccacucggauacuucuuac

SEQ ID NO: 744995 - RNA, 19 nt, Homo sapiens
  misc_RNA (1)...(19): siRNA sense strand
gcaucaagauuggcaucca

SEQ ID NO: 744996 - RNA, 19 nt, Homo sapiens
  misc_RNA (1)...(19): siRNA sense strand
ccagggagucggccuuugu

SEQ ID NO: 744997 - RNA, 19 nt, Homo sapiens
  misc_RNA (1)...(19): siRNA sense strand
gcaggaacuacguggagau

SEQ ID NO: 744998 - RNA, 19 nt, Homo sapiens
  misc_RNA (1)...(19): siRNA sense strand
cccacucggauacuucuua

SEQ ID NO: 744999 - RNA, 19 nt, Homo sapiens
  misc_RNA (1)...(19): siRNA sense strand
ggccgagggcaucaagauu

SEQ ID NO: 745000 - RNA, 19 nt, Homo sapiens
  misc_RNA (1)...(19): siRNA sense strand
ccgagggcaucaagauugg

SEQ ID NO: 745001 - RNA, 19 nt, Homo sapiens
  misc_RNA (1)...(19): siRNA sense strand
gacacgcucaugugcagaa

SEQ ID NO: 745002 - RNA, 19 nt, Homo sapiens
  misc_RNA (1)...(19): siRNA sense strand
acaaggaccugaagcagua

SEQ ID NO: 745003 - RNA, 19 nt, Homo sapiens
  misc_RNA (1)...(19): siRNA sense strand
ucaccaagcuguugcaguu

SEQ ID NO: 745004 - RNA, 19 nt, Homo sapiens
  misc_RNA (1)...(19): siRNA sense strand
uaaaggagauucagcuaca

SEQ ID NO: 745005 - RNA, 19 nt, Homo sapiens
  misc_RNA (1)...(19): siRNA sense strand
ccaagucaaucccaacaaa

SEQ ID NO: 745006 - RNA, 19 nt, Homo sapiens
  misc_RNA (1)...(19): siRNA sense strand
caacaaagacauacuccaa

SEQ ID NO: 745007 - RNA, 19 nt, Homo sapiens
  misc_RNA (1)...(19): siRNA sense strand
caugaaacauccauucuuc

SEQ ID NO: 745008 - RNA, 19 nt, Homo sapiens
  misc_RNA (1)...(19): siRNA sense strand
aaagcaagcucacagacaa

SEQ ID NO: 745009 - RNA, 19 nt, Homo sapiens
  misc_RNA (1)...(19): siRNA sense strand
ggacuacuccacucagauu

SEQ ID NO: 745010 - RNA, 19 nt, Homo sapiens
  misc_RNA (1)...(19): siRNA sense strand
gagaagcugacccucaaua

SEQ ID NO: 745011 - RNA, 19 nt, Homo sapiens
  misc_RNA (1)...(19): siRNA sense strand
ccacucagauugacaugug

SEQ ID NO: 745012 - RNA, 19 nt, Homo sapiens
  misc_RNA (1)...(19): siRNA sense strand
caacaagcgccuaucacua

SEQ ID NO: 745013 - RNA, 19 nt, Homo sapiens
  misc_RNA (1)...(19): siRNA sense strand
acaaagacauacuccaaug

SEQ ID NO: 745014 - RNA, 19 nt, Homo sapiens
  misc_RNA (1)...(19): siRNA sense strand
gaggugcagucuccaguga

SEQ ID NO: 745015 - RNA, 19 nt, Homo sapiens
  misc_RNA (1)...(19): siRNA sense strand
acgaggaguucaagacaua

SEQ ID NO: 745016 - RNA, 19 nt, Homo sapiens
  misc_RNA (1)...(19): siRNA sense strand
aaacuggagaccuacauua

SEQ ID NO: 745017 - RNA, 19 nt, Homo sapiens
  misc_RNA (1)...(19): siRNA sense strand
ccaaugagguggugacacu

SEQ ID NO: 745018 - RNA, 19 nt, Homo sapiens
  misc_RNA (1)...(19): siRNA sense strand
caacaugcacaacgugaaa

SEQ ID NO: 745019 - RNA, 19 nt, Homo sapiens
  misc_RNA (1)...(19): siRNA sense strand
gagauuggcuuugggaaac

SEQ ID NO: 745020 - RNA, 19 nt, Homo sapiens
  misc_RNA (1)...(19): siRNA sense strand
gagcggauccacaaacuuc

SEQ ID NO: 745021 - RNA, 19 nt, Homo sapiens
  misc_RNA (1)...(19): siRNA sense strand
gaaacuggagaccuacauu

SEQ ID NO: 745022 - RNA, 19 nt, Homo sapiens
  misc_RNA (1)...(19): siRNA sense strand
gaacagcuacacuucaucu

SEQ ID NO: 745023 - RNA, 19 nt, Homo sapiens
  misc_RNA (1)...(19): siRNA sense strand
acauuaagcuggacaaacu

SEQ ID NO: 745024 - RNA, 19 nt, Homo sapiens
  misc_RNA (1)...(19): siRNA sense strand
ccacugaggacaucaacaa

SEQ ID NO: 745025 - RNA, 19 nt, Homo sapiens
  misc_RNA (1)...(19): siRNA sense strand
caaagacauacuccaauga

SEQ ID NO: 745026 - RNA, 19 nt, Homo sapiens
  misc_RNA (1)...(19): siRNA sense strand
gaucagacuggaacaugaa

SEQ ID NO: 745027 - RNA, 19 nt, Homo sapiens
  misc_RNA (1)...(19): siRNA sense strand
aaacggcagcugucaauga

SEQ ID NO: 745028 - RNA, 19 nt, Homo sapiens
  misc_RNA (1)...(19): siRNA sense strand
uggagaagcugacccucaa

SEQ ID NO: 745029 - RNA, 19 nt, Homo sapiens
  misc_RNA (1)...(19): siRNA sense strand
caaacacgccaacaucguu

SEQ ID NO: 745030 - RNA, 19 nt, Homo sapiens
  misc_RNA (1)...(19): siRNA sense strand
gcacgaggacuugaagaug

SEQ ID NO: 745031 - RNA, 19 nt, Homo sapiens
  misc_RNA (1)...(19): siRNA sense strand
aaacacgccaacaucguua

SEQ ID NO: 745032 - RNA, 19 nt, Homo sapiens
  misc_RNA (1)...(19): siRNA sense strand
ggaggaacagcuacacuuc

SEQ ID NO: 745033 - RNA, 19 nt, Homo sapiens
  misc_RNA (1)...(19): siRNA sense strand
uugaguaccuggacaagga

SEQ ID NO: 745034 - RNA, 19 nt, Homo sapiens
  misc_RNA (1)...(19): siRNA sense strand
gcacaacgugaaacuguuc

SEQ ID NO: 745035 - RNA, 19 nt, Homo sapiens
  misc_RNA (1)...(19): siRNA sense strand
cacgcaagaucuccacuga

SEQ ID NO: 745036 - RNA, 19 nt, Homo sapiens
  misc_RNA (1)...(19): siRNA sense strand
agaagucccucacccuugu

SEQ ID NO: 745037 - RNA, 19 nt, Homo sapiens
  misc_RNA (1)...(19): siRNA sense strand
cgcagaggaugccaugaaa

SEQ ID NO: 745038 - RNA, 19 nt, Homo sapiens
  misc_RNA (1)...(19): siRNA sense strand
ccaagcuguugcaguuuga

SEQ ID NO: 745039 - RNA, 19 nt, Homo sapiens
  misc_RNA (1)...(19): siRNA sense strand
caacaucguuacgcuacau

SEQ ID NO: 745040 - RNA, 19 nt, Homo sapiens
  misc_RNA (1)...(19): siRNA sense strand
caucuuccguaucuuagga

SEQ ID NO: 745041 - RNA, 19 nt, Homo sapiens
  misc_RNA (1)...(19): siRNA sense strand
ggugugggcugcaucuucu

SEQ ID NO: 745042 - RNA, 19 nt, Homo sapiens
  misc_RNA (1)...(19): siRNA sense strand
cccagaaccugcucaucaa

SEQ ID NO: 745043 - RNA, 19 nt, Homo sapiens
  misc_RNA (1)...(19): siRNA sense strand
gaucuccacugaggacauc

SEQ ID NO: 745044 - RNA, 19 nt, Homo sapiens
  misc_RNA (1)...(19): siRNA sense strand
caacgaggaguucaagaca

SEQ ID NO: 745045 - RNA, 19 nt, Homo sapiens
  misc_RNA (1)...(19): siRNA sense strand
uugggaaacuggagaccua

SEQ ID NO: 745046 - RNA, 19 nt, Homo sapiens
  misc_RNA (1)...(19): siRNA sense strand
cuucaucuuccguaucuua

SEQ ID NO: 745047 - RNA, 19 nt, Homo sapiens
  misc_RNA (1)...(19): siRNA sense strand
ggcugcaucuucuaugaga

SEQ ID NO: 745048 - RNA, 19 nt, Homo sapiens
  misc_RNA (1)...(19): siRNA sense strand
ggaacaucaucaacaugca

SEQ ID NO: 745049 - RNA, 19 nt, Homo sapiens
  misc_RNA (1)...(19): siRNA sense strand
agaucagacuggaacauga

SEQ ID NO: 745050 - RNA, 19 nt, Homo sapiens
  misc_RNA (1)...(19): siRNA sense strand
gagaucagacuggaacaug

SEQ ID NO: 745051 - RNA, 19 nt, Homo sapiens
  misc_RNA (1)...(19): siRNA sense strand
gugggaacaucaucaacau

SEQ ID NO: 745052 - RNA, 19 nt, Homo sapiens
  misc_RNA (1)...(19): siRNA sense strand
guaccuaugccaccgucua

SEQ ID NO: 745053 - RNA, 19 nt, Homo sapiens
  misc_RNA (1)...(19): siRNA sense strand
cagaggaugccaugaaaca

SEQ ID NO: 745054 - RNA, 19 nt, Homo sapiens
  misc_RNA (1)...(19): siRNA sense strand
gcucaagcuggcugacuuu

SEQ ID NO: 745055 - RNA, 19 nt, Homo sapiens
  misc_RNA (1)...(19): siRNA sense strand
ucaaacggcagcugucaau

SEQ ID NO: 745056 - RNA, 19 nt, Homo sapiens
  misc_RNA (1)...(19): siRNA sense strand
gaggaacagcuacacuuca

SEQ ID NO: 745057 - RNA, 19 nt, Homo sapiens
  misc_RNA (1)...(19): siRNA sense strand
gaucaaacggcagcuguca

SEQ ID NO: 745058 - RNA, 19 nt, Homo sapiens
  misc_RNA (1)...(19): siRNA sense strand
ggaagugucccugcucaag

SEQ ID NO: 745059 - RNA, 19 nt, Homo sapiens
  misc_RNA (1)...(19): siRNA sense strand
gggagcggauccacaaacu

SEQ ID NO: 745060 - RNA, 19 nt, Homo sapiens
  misc_RNA (1)...(19): siRNA sense strand
caucaacaagcgccuauca

SEQ ID NO: 745061 - RNA, 19 nt, Homo sapiens
  misc_RNA (1)...(19): siRNA sense strand
ugagauuggcuuugggaaa

SEQ ID NO: 745062 - RNA, 19 nt, Homo sapiens
  misc_RNA (1)...(19): siRNA sense strand
ccgcagaggaugccaugaa

SEQ ID NO: 745063 - RNA, 19 nt, Homo sapiens
  misc_RNA (1)...(19): siRNA sense strand
ucacccuugucuuugagua

SEQ ID NO: 745064 - RNA, 19 nt, Homo sapiens
  misc_RNA (1)...(19): siRNA sense strand
ugaagcaguaccuggauga

SEQ ID NO: 745065 - RNA, 19 nt, Homo sapiens
  misc_RNA (1)...(19): siRNA sense strand
ccaugaaacauccauucuu

SEQ ID NO: 745066 - RNA, 19 nt, Homo sapiens
  misc_RNA (1)...(19): siRNA sense strand
gcaguuugagggucgaaau

SEQ ID NO: 745067 - RNA, 19 nt, Homo sapiens
  misc_RNA (1)...(19): siRNA sense strand
guucaagacauacaacuac

SEQ ID NO: 745068 - RNA, 19 nt, Homo sapiens
  misc_RNA (1)...(19): siRNA sense strand
ggaugaagaagaucaaacg

SEQ ID NO: 745069 - RNA, 19 nt, Homo sapiens
  misc_RNA (1)...(19): siRNA sense strand
aggaacagcuacacuucau

SEQ ID NO: 745070 - RNA, 19 nt, Homo sapiens
  misc_RNA (1)...(19): siRNA sense strand
ggaaacuggagaccuacau

SEQ ID NO: 745071 - RNA, 19 nt, Homo sapiens
  misc_RNA (1)...(19): siRNA sense strand
ugggcugcaucuucuauga

SEQ ID NO: 745072 - RNA, 19 nt, Homo sapiens
  misc_RNA (1)...(19): siRNA sense strand
ccucaaacacgccaacauc

SEQ ID NO: 745073 - RNA, 19 nt, Homo sapiens
  misc_RNA (1)...(19): siRNA sense strand
gaagcugacccucaauagc

SEQ ID NO: 745074 - RNA, 19 nt, Homo sapiens
  misc_RNA (1)...(19): siRNA sense strand
aaaggagauucagcuacaa

SEQ ID NO: 745075 - RNA, 19 nt, Homo sapiens
  misc_RNA (1)...(19): siRNA sense strand
cacuucaucuuccguaucu

SEQ ID NO: 745076 - RNA, 19 nt, Homo sapiens
  misc_RNA (1)...(19): siRNA sense strand
agaaccugcucaucaacga

SEQ ID NO: 745077 - RNA, 19 nt, Homo sapiens
  misc_RNA (1)...(19): siRNA sense strand
aacuggagaccuacauuaa

SEQ ID NO: 745078 - RNA, 19 nt, Homo sapiens
  misc_RNA (1)...(19): siRNA sense strand
uuccauauuugcacuaaag

SEQ ID NO: 745079 - RNA, 19 nt, Homo sapiens
  misc_RNA (1)...(19): siRNA sense strand
acgugaaacuguuccuguu

SEQ ID NO: 745080 - RNA, 19 nt, Homo sapiens
  misc_RNA (1)...(19): siRNA sense strand
gucccucacccuugucuuu

SEQ ID NO: 745081 - RNA, 19 nt, Homo sapiens
  misc_RNA (1)...(19): siRNA sense strand
ccagugagagugcguaugc

SEQ ID NO: 745082 - RNA, 19 nt, Homo sapiens
  misc_RNA (1)...(19): siRNA sense strand
gcucaaggaccucaaacac

SEQ ID NO: 745083 - RNA, 19 nt, Homo sapiens
  misc_RNA (1)...(19): siRNA sense strand
aagugucccugcucaagga

SEQ ID NO: 745084 - RNA, 19 nt, Homo sapiens
  misc_RNA (1)...(19): siRNA sense strand
ucaacaagcgccuaucacu

SEQ ID NO: 745085 - RNA, 19 nt, Homo sapiens
  misc_RNA (1)...(19): siRNA sense strand
accaagcuguugcaguuug

SEQ ID NO: 745086 - RNA, 19 nt, Homo sapiens
  misc_RNA (1)...(19): siRNA sense strand
gcaaaagcaagcucacaga

SEQ ID NO: 745087 - RNA, 19 nt, Homo sapiens
  misc_RNA (1)...(19): siRNA sense strand
ccacggacuacuccacuca

SEQ ID NO: 745088 - RNA, 19 nt, Homo sapiens
  misc_RNA (1)...(19): siRNA sense strand
aacaagcgccuaucacuac

SEQ ID NO: 745089 - RNA, 19 nt, Homo sapiens
  misc_RNA (1)...(19): siRNA sense strand
caagcucacagacaaccuu

SEQ ID NO: 745090 - RNA, 19 nt, Homo sapiens
  misc_RNA (1)...(19): siRNA sense strand
gacaucaacaagcgccuau

SEQ ID NO: 745091 - RNA, 19 nt, Homo sapiens
  misc_RNA (1)...(19): siRNA sense strand
uauuugcacuaaaggagau

SEQ ID NO: 745092 - RNA, 19 nt, Homo sapiens
  misc_RNA (1)...(19): siRNA sense strand
ggagcggauccacaaacuu

SEQ ID NO: 745093 - RNA, 19 nt, Homo sapiens
  misc_RNA (1)...(19): siRNA sense strand
cuggagaccuacauuaagc

SEQ ID NO: 745094 - RNA, 19 nt, Homo sapiens
  misc_RNA (1)...(19): siRNA sense strand
aaagacauacuccaaugag

SEQ ID NO: 745095 - RNA, 19 nt, Homo sapiens
  misc_RNA (1)...(19): siRNA sense strand
ggagagugaccaggcuuca

SEQ ID NO: 745096 - RNA, 19 nt, Homo sapiens
  misc_RNA (1)...(19): siRNA sense strand
caagucaaucccaacaaag

SEQ ID NO: 745097 - RNA, 19 nt, Homo sapiens
  misc_RNA (1)...(19): siRNA sense strand
aagucaaucccaacaaaga

SEQ ID NO: 745098 - RNA, 19 nt, Homo sapiens
  misc_RNA (1)...(19): siRNA sense strand
caaucccaacaaagacaua

SEQ ID NO: 745099 - RNA, 19 nt, Homo sapiens
  misc_RNA (1)...(19): siRNA sense strand
acaaggaccugaagcagua

SEQ ID NO: 745100 - RNA, 19 nt, Homo sapiens
  misc_RNA (1)...(19): siRNA sense strand
ucaccaagcuguugcaguu

SEQ ID NO: 745101 - RNA, 19 nt, Homo sapiens
  misc_RNA (1)...(19): siRNA sense strand
uaaaggagauucagcuaca

SEQ ID NO: 745102 - RNA, 19 nt, Homo sapiens
  misc_RNA (1)...(19): siRNA sense strand
ccaagucaaucccaacaaa

SEQ ID NO: 745103 - RNA, 19 nt, Homo sapiens
  misc_RNA (1)...(19): siRNA sense strand
caacaaagacauacuccaa

SEQ ID NO: 745104 - RNA, 19 nt, Homo sapiens
  misc_RNA (1)...(19): siRNA sense strand
caugaaacauccauucuuc

SEQ ID NO: 745105 - RNA, 19 nt, Homo sapiens
  misc_RNA (1)...(19): siRNA sense strand
aaagcaagcucacagacaa

SEQ ID NO: 745106 - RNA, 19 nt, Homo sapiens
  misc_RNA (1)...(19): siRNA sense strand
ggacuacuccacucagauu

SEQ ID NO: 745107 - RNA, 19 nt, Homo sapiens
  misc_RNA (1)...(19): siRNA sense strand
gagaagcugacccucaaua

SEQ ID NO: 745108 - RNA, 19 nt, Homo sapiens
  misc_RNA (1)...(19): siRNA sense strand
ccacucagauugacaugug

SEQ ID NO: 745109 - RNA, 19 nt, Homo sapiens
  misc_RNA (1)...(19): siRNA sense strand
caacaagcgccuaucacua

SEQ ID NO: 745110 - RNA, 19 nt, Homo sapiens
  misc_RNA (1)...(19): siRNA sense strand
acaaagacauacuccaaug

SEQ ID NO: 745111 - RNA, 19 nt, Homo sapiens
  misc_RNA (1)...(19): siRNA sense strand
gaggugcagucuccaguga

SEQ ID NO: 745112 - RNA, 19 nt, Homo sapiens
  misc_RNA (1)...(19): siRNA sense strand
acgaggaguucaagacaua

SEQ ID NO: 745113 - RNA, 19 nt, Homo sapiens
  misc_RNA (1)...(19): siRNA sense strand
aaacuggagaccuacauua

SEQ ID NO: 745114 - RNA, 19 nt, Homo sapiens
  misc_RNA (1)...(19): siRNA sense strand
ccaaugagguggugacacu

SEQ ID NO: 745115 - RNA, 19 nt, Homo sapiens
  misc_RNA (1)...(19): siRNA sense strand
caacaugcacaacgugaaa

SEQ ID NO: 745116 - RNA, 19 nt, Homo sapiens
  misc_RNA (1)...(19): siRNA sense strand
gagauuggcuuugggaaac

SEQ ID NO: 745117 - RNA, 19 nt, Homo sapiens
  misc_RNA (1)...(19): siRNA sense strand
gagcggauccacaaacuuc

SEQ ID NO: 745118 - RNA, 19 nt, Homo sapiens
  misc_RNA (1)...(19): siRNA sense strand
gaaacuggagaccuacauu

SEQ ID NO: 745119 - RNA, 19 nt, Homo sapiens
  misc_RNA (1)...(19): siRNA sense strand
gaacagcuacacuucaucu

SEQ ID NO: 745120 - RNA, 19 nt, Homo sapiens
  misc_RNA (1)...(19): siRNA sense strand
acauuaagcuggacaaacu

SEQ ID NO: 745121 - RNA, 19 nt, Homo sapiens
  misc_RNA (1)...(19): siRNA sense strand
ccacugaggacaucaacaa

SEQ ID NO: 745122 - RNA, 19 nt, Homo sapiens
  misc_RNA (1)...(19): siRNA sense strand
caaagacauacuccaauga

SEQ ID NO: 745123 - RNA, 19 nt, Homo sapiens
  misc_RNA (1)...(19): siRNA sense strand
gaucagacuggaacaugaa

SEQ ID NO: 745124 - RNA, 19 nt, Homo sapiens
  misc_RNA (1)...(19): siRNA sense strand
aaacggcagcugucaauga

SEQ ID NO: 745125 - RNA, 19 nt, Homo sapiens
  misc_RNA (1)...(19): siRNA sense strand
uggagaagcugacccucaa

SEQ ID NO: 745126 - RNA, 19 nt, Homo sapiens
  misc_RNA (1)...(19): siRNA sense strand
caaacacgccaacaucguu

SEQ ID NO: 745127 - RNA, 19 nt, Homo sapiens
  misc_RNA (1)...(19): siRNA sense strand
gcacgaggacuugaagaug

SEQ ID NO: 745128 - RNA, 19 nt, Homo sapiens
  misc_RNA (1)...(19): siRNA sense strand
aaacacgccaacaucguua

SEQ ID NO: 745129 - RNA, 19 nt, Homo sapiens
  misc_RNA (1)...(19): siRNA sense strand
ggaggaacagcuacacuuc

SEQ ID NO: 745130 - RNA, 19 nt, Homo sapiens
  misc_RNA (1)...(19): siRNA sense strand
uugaguaccuggacaagga

SEQ ID NO: 745131 - RNA, 19 nt, Homo sapiens
  misc_RNA (1)...(19): siRNA sense strand
gcacaacgugaaacuguuc

SEQ ID NO: 745132 - RNA, 19 nt, Homo sapiens
  misc_RNA (1)...(19): siRNA sense strand
cacgcaagaucuccacuga

SEQ ID NO: 745133 - RNA, 19 nt, Homo sapiens
  misc_RNA (1)...(19): siRNA sense strand
agaagucccucacccuugu

SEQ ID NO: 745134 - RNA, 19 nt, Homo sapiens
  misc_RNA (1)...(19): siRNA sense strand
cgcagaggaugccaugaaa

SEQ ID NO: 745135 - RNA, 19 nt, Homo sapiens
  misc_RNA (1)...(19): siRNA sense strand
ccaagcuguugcaguuuga

SEQ ID NO: 745136 - RNA, 19 nt, Homo sapiens
  misc_RNA (1)...(19): siRNA sense strand
caacaucguuacgcuacau

SEQ ID NO: 745137 - RNA, 19 nt, Homo sapiens
  misc_RNA (1)...(19): siRNA sense strand
caucuuccguaucuuagga

SEQ ID NO: 745138 - RNA, 19 nt, Homo sapiens
  misc_RNA (1)...(19): siRNA sense strand
ggugugggcugcaucuucu

SEQ ID NO: 745139 - RNA, 19 nt, Homo sapiens
  misc_RNA (1)...(19): siRNA sense strand
cccagaaccugcucaucaa

SEQ ID NO: 745140 - RNA, 19 nt, Homo sapiens
  misc_RNA (1)...(19): siRNA sense strand
gaucuccacugaggacauc

SEQ ID NO: 745141 - RNA, 19 nt, Homo sapiens
  misc_RNA (1)...(19): siRNA sense strand
caacgaggaguucaagaca

SEQ ID NO: 745142 - RNA, 19 nt, Homo sapiens
  misc_RNA (1)...(19): siRNA sense strand
uugggaaacuggagaccua

SEQ ID NO: 745143 - RNA, 19 nt, Homo sapiens
  misc_RNA (1)...(19): siRNA sense strand
cuucaucuuccguaucuua

SEQ ID NO: 745144 - RNA, 19 nt, Homo sapiens
  misc_RNA (1)...(19): siRNA sense strand
ggcugcaucuucuaugaga

SEQ ID NO: 745145 - RNA, 19 nt, Homo sapiens
  misc_RNA (1)...(19): siRNA sense strand
ggaacaucaucaacaugca

SEQ ID NO: 745146 - RNA, 19 nt, Homo sapiens
  misc_RNA (1)...(19): siRNA sense strand
agaucagacuggaacauga

SEQ ID NO: 745147 - RNA, 19 nt, Homo sapiens
  misc_RNA (1)...(19): siRNA sense strand
gagaucagacuggaacaug

SEQ ID NO: 745148 - RNA, 19 nt, Homo sapiens
  misc_RNA (1)...(19): siRNA sense strand
gugggaacaucaucaacau

SEQ ID NO: 745149 - RNA, 19 nt, Homo sapiens
  misc_RNA (1)...(19): siRNA sense strand
guaccuaugccaccgucua

SEQ ID NO: 745150 - RNA, 19 nt, Homo sapiens
  misc_RNA (1)...(19): siRNA sense strand
cagaggaugccaugaaaca

SEQ ID NO: 745151 - RNA, 19 nt, Homo sapiens
  misc_RNA (1)...(19): siRNA sense strand
gcucaagcuggcugacuuu

SEQ ID NO: 745152 - RNA, 19 nt, Homo sapiens
  misc_RNA (1)...(19): siRNA sense strand
ucaaacggcagcugucaau

SEQ ID NO: 745153 - RNA, 19 nt, Homo sapiens
  misc_RNA (1)...(19): siRNA sense strand
gaggaacagcuacacuuca

SEQ ID NO: 745154 - RNA, 19 nt, Homo sapiens
  misc_RNA (1)...(19): siRNA sense strand
gaucaaacggcagcuguca

SEQ ID NO: 745155 - RNA, 19 nt, Homo sapiens
  misc_RNA (1)...(19): siRNA sense strand
ggaagugucccugcucaag

SEQ ID NO: 745156 - RNA, 19 nt, Homo sapiens
  misc_RNA (1)...(19): siRNA sense strand
gggagcggauccacaaacu

SEQ ID NO: 745157 - RNA, 19 nt, Homo sapiens
  misc_RNA (1)...(19): siRNA sense strand
caucaacaagcgccuauca

SEQ ID NO: 745158 - RNA, 19 nt, Homo sapiens
  misc_RNA (1)...(19): siRNA sense strand
ugagauuggcuuugggaaa

SEQ ID NO: 745159 - RNA, 19 nt, Homo sapiens
  misc_RNA (1)...(19): siRNA sense strand
ccgcagaggaugccaugaa

SEQ ID NO: 745160 - RNA, 19 nt, Homo sapiens
  misc_RNA (1)...(19): siRNA sense strand
ucacccuugucuuugagua

SEQ ID NO: 745161 - RNA, 19 nt, Homo sapiens
  misc_RNA (1)...(19): siRNA sense strand
ugaagcaguaccuggauga

SEQ ID NO: 745162 - RNA, 19 nt, Homo sapiens
  misc_RNA (1)...(19): siRNA sense strand
ccaugaaacauccauucuu

SEQ ID NO: 745163 - RNA, 19 nt, Homo sapiens
  misc_RNA (1)...(19): siRNA sense strand
gcaguuugagggucgaaau

SEQ ID NO: 745164 - RNA, 19 nt, Homo sapiens
  misc_RNA (1)...(19): siRNA sense strand
guucaagacauacaacuac

SEQ ID NO: 745165 - RNA, 19 nt, Homo sapiens
  misc_RNA (1)...(19): siRNA sense strand
ggaugaagaagaucaaacg

SEQ ID NO: 745166 - RNA, 19 nt, Homo sapiens
  misc_RNA (1)...(19): siRNA sense strand
aggaacagcuacacuucau

SEQ ID NO: 745167 - RNA, 19 nt, Homo sapiens
  misc_RNA (1)...(19): siRNA sense strand
ggaaacuggagaccuacau

SEQ ID NO: 745168 - RNA, 19 nt, Homo sapiens
  misc_RNA (1)...(19): siRNA sense strand
ugggcugcaucuucuauga

SEQ ID NO: 745169 - RNA, 19 nt, Homo sapiens
  misc_RNA (1)...(19): siRNA sense strand
ccucaaacacgccaacauc

SEQ ID NO: 745170 - RNA, 19 nt, Homo sapiens
  misc_RNA (1)...(19): siRNA sense strand
gaagcugacccucaauagc

SEQ ID NO: 745171 - RNA, 19 nt, Homo sapiens
  misc_RNA (1)...(19): siRNA sense strand
aaaggagauucagcuacaa

SEQ ID NO: 745172 - RNA, 19 nt, Homo sapiens
  misc_RNA (1)...(19): siRNA sense strand
cacuucaucuuccguaucu

SEQ ID NO: 745173 - RNA, 19 nt, Homo sapiens
  misc_RNA (1)...(19): siRNA sense strand
agaaccugcucaucaacga

SEQ ID NO: 745174 - RNA, 19 nt, Homo sapiens
  misc_RNA (1)...(19): siRNA sense strand
aacuggagaccuacauuaa

SEQ ID NO: 745175 - RNA, 19 nt, Homo sapiens
  misc_RNA (1)...(19): siRNA sense strand
uuccauauuugcacuaaag

SEQ ID NO: 745176 - RNA, 19 nt, Homo sapiens
  misc_RNA (1)...(19): siRNA sense strand
acgugaaacuguuccuguu

SEQ ID NO: 745177 - RNA, 19 nt, Homo sapiens
  misc_RNA (1)...(19): siRNA sense strand
gucccucacccuugucuuu

SEQ ID NO: 745178 - RNA, 19 nt, Homo sapiens
  misc_RNA (1)...(19): siRNA sense strand
ccagugagagugcguaugc

SEQ ID NO: 745179 - RNA, 19 nt, Homo sapiens
  misc_RNA (1)...(19): siRNA sense strand
gcucaaggaccucaaacac

SEQ ID NO: 745180 - RNA, 19 nt, Homo sapiens
  misc_RNA (1)...(19): siRNA sense strand
aagugucccugcucaagga

SEQ ID NO: 745181 - RNA, 19 nt, Homo sapiens
  misc_RNA (1)...(19): siRNA sense strand
ucaacaagcgccuaucacu

SEQ ID NO: 745182 - RNA, 19 nt, Homo sapiens
  misc_RNA (1)...(19): siRNA sense strand
accaagcuguugcaguuug

SEQ ID NO: 745183 - RNA, 19 nt, Homo sapiens
  misc_RNA (1)...(19): siRNA sense strand
gcaaaagcaagcucacaga

SEQ ID NO: 745184 - RNA, 19 nt, Homo sapiens
  misc_RNA (1)...(19): siRNA sense strand
ccacggacuacuccacuca

SEQ ID NO: 745185 - RNA, 19 nt, Homo sapiens
  misc_RNA (1)...(19): siRNA sense strand
aacaagcgccuaucacuac

SEQ ID NO: 745186 - RNA, 19 nt, Homo sapiens
  misc_RNA (1)...(19): siRNA sense strand
caagcucacagacaaccuu

SEQ ID NO: 745187 - RNA, 19 nt, Homo sapiens
  misc_RNA (1)...(19): siRNA sense strand
gacaucaacaagcgccuau

SEQ ID NO: 745188 - RNA, 19 nt, Homo sapiens
  misc_RNA (1)...(19): siRNA sense strand
uauuugcacuaaaggagau

SEQ ID NO: 745189 - RNA, 19 nt, Homo sapiens
  misc_RNA (1)...(19): siRNA sense strand
ggagcggauccacaaacuu

SEQ ID NO: 745190 - RNA, 19 nt, Homo sapiens
  misc_RNA (1)...(19): siRNA sense strand
cuggagaccuacauuaagc

SEQ ID NO: 745191 - RNA, 19 nt, Homo sapiens
  misc_RNA (1)...(19): siRNA sense strand
aaagacauacuccaaugag

SEQ ID NO: 745192 - RNA, 19 nt, Homo sapiens
  misc_RNA (1)...(19): siRNA sense strand
ggagagugaccaggcuuca

SEQ ID NO: 745193 - RNA, 19 nt, Homo sapiens
  misc_RNA (1)...(19): siRNA sense strand
caagucaaucccaacaaag

SEQ ID NO: 745194 - RNA, 19 nt, Homo sapiens
  misc_RNA (1)...(19): siRNA sense strand
aagucaaucccaacaaaga

SEQ ID NO: 745195 - RNA, 19 nt, Homo sapiens
  misc_RNA (1)...(19): siRNA sense strand
caaucccaacaaagacaua

SEQ ID NO: 745196 - RNA, 19 nt, Homo sapiens
  misc_RNA (1)...(19): siRNA sense strand
acaaggaccugaagcagua

SEQ ID NO: 745197 - RNA, 19 nt, Homo sapiens
  misc_RNA (1)...(19): siRNA sense strand
ucaccaagcuguugcaguu

SEQ ID NO: 745198 - RNA, 19 nt, Homo sapiens
  misc_RNA (1)...(19): siRNA sense strand
uaaaggagauucagcuaca

SEQ ID NO: 745199 - RNA, 19 nt, Homo sapiens
  misc_RNA (1)...(19): siRNA sense strand
ccaagucaaucccaacaaa

SEQ ID NO: 745200 - RNA, 19 nt, Homo sapiens
  misc_RNA (1)...(19): siRNA sense strand
caacaaagacauacuccaa

SEQ ID NO: 745201 - RNA, 19 nt, Homo sapiens
  misc_RNA (1)...(19): siRNA sense strand
caugaaacauccauucuuc

SEQ ID NO: 745202 - RNA, 19 nt, Homo sapiens
  misc_RNA (1)...(19): siRNA sense strand
aaagcaagcucacagacaa

SEQ ID NO: 745203 - RNA, 19 nt, Homo sapiens
  misc_RNA (1)...(19): siRNA sense strand
ggacuacuccacucagauu

SEQ ID NO: 745204 - RNA, 19 nt, Homo sapiens
  misc_RNA (1)...(19): siRNA sense strand
gagaagcugacccucaaua

SEQ ID NO: 745205 - RNA, 19 nt, Homo sapiens
  misc_RNA (1)...(19): siRNA sense strand
ccacucagauugacaugug

SEQ ID NO: 745206 - RNA, 19 nt, Homo sapiens
  misc_RNA (1)...(19): siRNA sense strand
caacaagcgccuaucacua

SEQ ID NO: 745207 - RNA, 19 nt, Homo sapiens
  misc_RNA (1)...(19): siRNA sense strand
acaaagacauacuccaaug

SEQ ID NO: 745208 - RNA, 19 nt, Homo sapiens
  misc_RNA (1)...(19): siRNA sense strand
gaggugcagucuccaguga

SEQ ID NO: 745209 - RNA, 19 nt, Homo sapiens
  misc_RNA (1)...(19): siRNA sense strand
acgaggaguucaagacaua

SEQ ID NO: 745210 - RNA, 19 nt, Homo sapiens
  misc_RNA (1)...(19): siRNA sense strand
aaacuggagaccuacauua

SEQ ID NO: 745211 - RNA, 19 nt, Homo sapiens
  misc_RNA (1)...(19): siRNA sense strand
ccaaugagguggugacacu

SEQ ID NO: 745212 - RNA, 19 nt, Homo sapiens
  misc_RNA (1)...(19): siRNA sense strand
caacaugcacaacgugaaa

SEQ ID NO: 745213 - RNA, 19 nt, Homo sapiens
  misc_RNA (1)...(19): siRNA sense strand
gagauuggcuuugggaaac

SEQ ID NO: 745214 - RNA, 19 nt, Homo sapiens
  misc_RNA (1)...(19): siRNA sense strand
gagcggauccacaaacuuc

SEQ ID NO: 745215 - RNA, 19 nt, Homo sapiens
  misc_RNA (1)...(19): siRNA sense strand
gaaacuggagaccuacauu

SEQ ID NO: 745216 - RNA, 19 nt, Homo sapiens
  misc_RNA (1)...(19): siRNA sense strand
gaacagcuacacuucaucu

SEQ ID NO: 745217 - RNA, 19 nt, Homo sapiens
  misc_RNA (1)...(19): siRNA sense strand
acauuaagcuggacaaacu

SEQ ID NO: 745218 - RNA, 19 nt, Homo sapiens
  misc_RNA (1)...(19): siRNA sense strand
ccacugaggacaucaacaa

SEQ ID NO: 745219 - RNA, 19 nt, Homo sapiens
  misc_RNA (1)...(19): siRNA sense strand
caaagacauacuccaauga

SEQ ID NO: 745220 - RNA, 19 nt, Homo sapiens
  misc_RNA (1)...(19): siRNA sense strand
gaucagacuggaacaugaa

SEQ ID NO: 745221 - RNA, 19 nt, Homo sapiens
  misc_RNA (1)...(19): siRNA sense strand
aaacggcagcugucaauga

SEQ ID NO: 745222 - RNA, 19 nt, Homo sapiens
  misc_RNA (1)...(19): siRNA sense strand
uggagaagcugacccucaa

SEQ ID NO: 745223 - RNA, 19 nt, Homo sapiens
  misc_RNA (1)...(19): siRNA sense strand
caaacacgccaacaucguu

SEQ ID NO: 745224 - RNA, 19 nt, Homo sapiens
  misc_RNA (1)...(19): siRNA sense strand
gcacgaggacuugaagaug

SEQ ID NO: 745225 - RNA, 19 nt, Homo sapiens
  misc_RNA (1)...(19): siRNA sense strand
aaacacgccaacaucguua

SEQ ID NO: 745226 - RNA, 19 nt, Homo sapiens
  misc_RNA (1)...(19): siRNA sense strand
ggaggaacagcuacacuuc

SEQ ID NO: 745227 - RNA, 19 nt, Homo sapiens
  misc_RNA (1)...(19): siRNA sense strand
uugaguaccuggacaagga

SEQ ID NO: 745228 - RNA, 19 nt, Homo sapiens
  misc_RNA (1)...(19): siRNA sense strand
gcacaacgugaaacuguuc

SEQ ID NO: 745229 - RNA, 19 nt, Homo sapiens
  misc_RNA (1)...(19): siRNA sense strand
cacgcaagaucuccacuga

SEQ ID NO: 745230 - RNA, 19 nt, Homo sapiens
  misc_RNA (1)...(19): siRNA sense strand
agaagucccucacccuugu

SEQ ID NO: 745231 - RNA, 19 nt, Homo sapiens
  misc_RNA (1)...(19): siRNA sense strand
cgcagaggaugccaugaaa

SEQ ID NO: 745232 - RNA, 19 nt, Homo sapiens
  misc_RNA (1)...(19): siRNA sense strand
ccaagcuguugcaguuuga

SEQ ID NO: 745233 - RNA, 19 nt, Homo sapiens
  misc_RNA (1)...(19): siRNA sense strand
caacaucguuacgcuacau

SEQ ID NO: 745234 - RNA, 19 nt, Homo sapiens
  misc_RNA (1)...(19): siRNA sense strand
caucuuccguaucuuagga

SEQ ID NO: 745235 - RNA, 19 nt, Homo sapiens
  misc_RNA (1)...(19): siRNA sense strand
ggugugggcugcaucuucu

SEQ ID NO: 745236 - RNA, 19 nt, Homo sapiens
  misc_RNA (1)...(19): siRNA sense strand
cccagaaccugcucaucaa

SEQ ID NO: 745237 - RNA, 19 nt, Homo sapiens
  misc_RNA (1)...(19): siRNA sense strand
gaucuccacugaggacauc

SEQ ID NO: 745238 - RNA, 19 nt, Homo sapiens
  misc_RNA (1)...(19): siRNA sense strand
caacgaggaguucaagaca

SEQ ID NO: 745239 - RNA, 19 nt, Homo sapiens
  misc_RNA (1)...(19): siRNA sense strand
uugggaaacuggagaccua

SEQ ID NO: 745240 - RNA, 19 nt, Homo sapiens
  misc_RNA (1)...(19): siRNA sense strand
cuucaucuuccguaucuua

SEQ ID NO: 745241 - RNA, 19 nt, Homo sapiens
  misc_RNA (1)...(19): siRNA sense strand
ggcugcaucuucuaugaga

SEQ ID NO: 745242 - RNA, 19 nt, Homo sapiens
  misc_RNA (1)...(19): siRNA sense strand
ggaacaucaucaacaugca

SEQ ID NO: 745243 - RNA, 19 nt, Homo sapiens
  misc_RNA (1)...(19): siRNA sense strand
agaucagacuggaacauga

SEQ ID NO: 745244 - RNA, 19 nt, Homo sapiens
  misc_RNA (1)...(19): siRNA sense strand
gagaucagacuggaacaug

SEQ ID NO: 745245 - RNA, 19 nt, Homo sapiens
  misc_RNA (1)...(19): siRNA sense strand
gugggaacaucaucaacau

SEQ ID NO: 745246 - RNA, 19 nt, Homo sapiens
  misc_RNA (1)...(19): siRNA sense strand
guaccuaugccaccgucua

SEQ ID NO: 745247 - RNA, 19 nt, Homo sapiens
  misc_RNA (1)...(19): siRNA sense strand
cagaggaugccaugaaaca

SEQ ID NO: 745248 - RNA, 19 nt, Homo sapiens
  misc_RNA (1)...(19): siRNA sense strand
gcucaagcuggcugacuuu

SEQ ID NO: 745249 - RNA, 19 nt, Homo sapiens
  misc_RNA (1)...(19): siRNA sense strand
ucaaacggcagcugucaau

SEQ ID NO: 745250 - RNA, 19 nt, Homo sapiens
  misc_RNA (1)...(19): siRNA sense strand
gaggaacagcuacacuuca

SEQ ID NO: 745251 - RNA, 19 nt, Homo sapiens
  misc_RNA (1)...(19): siRNA sense strand
gaucaaacggcagcuguca

SEQ ID NO: 745252 - RNA, 19 nt, Homo sapiens
  misc_RNA (1)...(19): siRNA sense strand
ggaagugucccugcucaag

SEQ ID NO: 745253 - RNA, 19 nt, Homo sapiens
  misc_RNA (1)...(19): siRNA sense strand
gggagcggauccacaaacu

SEQ ID NO: 745254 - RNA, 19 nt, Homo sapiens
  misc_RNA (1)...(19): siRNA sense strand
caucaacaagcgccuauca

SEQ ID NO: 745255 - RNA, 19 nt, Homo sapiens
  misc_RNA (1)...(19): siRNA sense strand
ugagauuggcuuugggaaa

SEQ ID NO: 745256 - RNA, 19 nt, Homo sapiens
  misc_RNA (1)...(19): siRNA sense strand
ccgcagaggaugccaugaa

SEQ ID NO: 745257 - RNA, 19 nt, Homo sapiens
  misc_RNA (1)...(19): siRNA sense strand
ucacccuugucuuugagua

SEQ ID NO: 745258 - RNA, 19 nt, Homo sapiens
  misc_RNA (1)...(19): siRNA sense strand
ugaagcaguaccuggauga

SEQ ID NO: 745259 - RNA, 19 nt, Homo sapiens
  misc_RNA (1)...(19): siRNA sense strand
ccaugaaacauccauucuu

SEQ ID NO: 745260 - RNA, 19 nt, Homo sapiens
  misc_RNA (1)...(19): siRNA sense strand
gcaguuugagggucgaaau

SEQ ID NO: 745261 - RNA, 19 nt, Homo sapiens
  misc_RNA (1)...(19): siRNA sense strand
guucaagacauacaacuac

SEQ ID NO: 745262 - RNA, 19 nt, Homo sapiens
  misc_RNA (1)...(19): siRNA sense strand
ggaugaagaagaucaaacg

SEQ ID NO: 745263 - RNA, 19 nt, Homo sapiens
  misc_RNA (1)...(19): siRNA sense strand
aggaacagcuacacuucau

SEQ ID NO: 745264 - RNA, 19 nt, Homo sapiens
  misc_RNA (1)...(19): siRNA sense strand
ggaaacuggagaccuacau

SEQ ID NO: 745265 - RNA, 19 nt, Homo sapiens
  misc_RNA (1)...(19): siRNA sense strand
ugggcugcaucuucuauga

SEQ ID NO: 745266 - RNA, 19 nt, Homo sapiens
  misc_RNA (1)...(19): siRNA sense strand
ccucaaacacgccaacauc

SEQ ID NO: 745267 - RNA, 19 nt, Homo sapiens
  misc_RNA (1)...(19): siRNA sense strand
gaagcugacccucaauagc

SEQ ID NO: 745268 - RNA, 19 nt, Homo sapiens
  misc_RNA (1)...(19): siRNA sense strand
aaaggagauucagcuacaa

SEQ ID NO: 745269 - RNA, 19 nt, Homo sapiens
  misc_RNA (1)...(19): siRNA sense strand
cacuucaucuuccguaucu

SEQ ID NO: 745270 - RNA, 19 nt, Homo sapiens
  misc_RNA (1)...(19): siRNA sense strand
agaaccugcucaucaacga

SEQ ID NO: 745271 - RNA, 19 nt, Homo sapiens
  misc_RNA (1)...(19): siRNA sense strand
aacuggagaccuacauuaa

SEQ ID NO: 745272 - RNA, 19 nt, Homo sapiens
  misc_RNA (1)...(19): siRNA sense strand
uuccauauuugcacuaaag

SEQ ID NO: 745273 - RNA, 19 nt, Homo sapiens
  misc_RNA (1)...(19): siRNA sense strand
acgugaaacuguuccuguu

SEQ ID NO: 745274 - RNA, 19 nt, Homo sapiens
  misc_RNA (1)...(19): siRNA sense strand
gucccucacccuugucuuu

SEQ ID NO: 745275 - RNA, 19 nt, Homo sapiens
  misc_RNA (1)...(19): siRNA sense strand
ccagugagagugcguaugc

SEQ ID NO: 745276 - RNA, 19 nt, Homo sapiens
  misc_RNA (1)...(19): siRNA sense strand
gcucaaggaccucaaacac

SEQ ID NO: 745277 - RNA, 19 nt, Homo sapiens
  misc_RNA (1)...(19): siRNA sense strand
aagugucccugcucaagga

SEQ ID NO: 745278 - RNA, 19 nt, Homo sapiens
  misc_RNA (1)...(19): siRNA sense strand
ucaacaagcgccuaucacu

SEQ ID NO: 745279 - RNA, 19 nt, Homo sapiens
  misc_RNA (1)...(19): siRNA sense strand
accaagcuguugcaguuug

SEQ ID NO: 745280 - RNA, 19 nt, Homo sapiens
  misc_RNA (1)...(19): siRNA sense strand
gcaaaagcaagcucacaga

SEQ ID NO: 745281 - RNA, 19 nt, Homo sapiens
  misc_RNA (1)...(19): siRNA sense strand
ccacggacuacuccacuca

SEQ ID NO: 745282 - RNA, 19 nt, Homo sapiens
  misc_RNA (1)...(19): siRNA sense strand
aacaagcgccuaucacuac

SEQ ID NO: 745283 - RNA, 19 nt, Homo sapiens
  misc_RNA (1)...(19): siRNA sense strand
caagcucacagacaaccuu

SEQ ID NO: 745284 - RNA, 19 nt, Homo sapiens
  misc_RNA (1)...(19): siRNA sense strand
gacaucaacaagcgccuau

SEQ ID NO: 745285 - RNA, 19 nt, Homo sapiens
  misc_RNA (1)...(19): siRNA sense strand
uauuugcacuaaaggagau

SEQ ID NO: 745286 - RNA, 19 nt, Homo sapiens
  misc_RNA (1)...(19): siRNA sense strand
ggagcggauccacaaacuu

SEQ ID NO: 745287 - RNA, 19 nt, Homo sapiens
  misc_RNA (1)...(19): siRNA sense strand
cuggagaccuacauuaagc

SEQ ID NO: 745288 - RNA, 19 nt, Homo sapiens
  misc_RNA (1)...(19): siRNA sense strand
aaagacauacuccaaugag

SEQ ID NO: 745289 - RNA, 19 nt, Homo sapiens
  misc_RNA (1)...(19): siRNA sense strand
ggagagugaccaggcuuca

SEQ ID NO: 745290 - RNA, 19 nt, Homo sapiens
  misc_RNA (1)...(19): siRNA sense strand
caagucaaucccaacaaag

SEQ ID NO: 745291 - RNA, 19 nt, Homo sapiens
  misc_RNA (1)...(19): siRNA sense strand
aagucaaucccaacaaaga

SEQ ID NO: 745292 - RNA, 19 nt, Homo sapiens
  misc_RNA (1)...(19): siRNA sense strand
caaucccaacaaagacaua

SEQ ID NO: 745293 - RNA, 19 nt, Homo sapiens
  misc_RNA (1)...(19): siRNA sense strand
acaaggaccugaagcagua

SEQ ID NO: 745294 - RNA, 19 nt, Homo sapiens
  misc_RNA (1)...(19): siRNA sense strand
ucaccaagcuguugcaguu

SEQ ID NO: 745295 - RNA, 19 nt, Homo sapiens
  misc_RNA (1)...(19): siRNA sense strand
uaaaggagauucagcuaca

SEQ ID NO: 745296 - RNA, 19 nt, Homo sapiens
  misc_RNA (1)...(19): siRNA sense strand
ccaagucaaucccaacaaa

SEQ ID NO: 745297 - RNA, 19 nt, Homo sapiens
  misc_RNA (1)...(19): siRNA sense strand
caacaaagacauacuccaa

SEQ ID NO: 745298 - RNA, 19 nt, Homo sapiens
  misc_RNA (1)...(19): siRNA sense strand
caugaaacauccauucuuc

SEQ ID NO: 745299 - RNA, 19 nt, Homo sapiens
  misc_RNA (1)...(19): siRNA sense strand
aaagcaagcucacagacaa

SEQ ID NO: 745300 - RNA, 19 nt, Homo sapiens
  misc_RNA (1)...(19): siRNA sense strand
ggacuacuccacucagauu

SEQ ID NO: 745301 - RNA, 19 nt, Homo sapiens
  misc_RNA (1)...(19): siRNA sense strand
gagaagcugacccucaaua

SEQ ID NO: 745302 - RNA, 19 nt, Homo sapiens
  misc_RNA (1)...(19): siRNA sense strand
ccacucagauugacaugug

SEQ ID NO: 745303 - RNA, 19 nt, Homo sapiens
  misc_RNA (1)...(19): siRNA sense strand
caacaagcgccuaucacua

SEQ ID NO: 745304 - RNA, 19 nt, Homo sapiens
  misc_RNA (1)...(19): siRNA sense strand
acaaagacauacuccaaug

SEQ ID NO: 745305 - RNA, 19 nt, Homo sapiens
  misc_RNA (1)...(19): siRNA sense strand
gaggugcagucuccaguga

SEQ ID NO: 745306 - RNA, 19 nt, Homo sapiens
  misc_RNA (1)...(19): siRNA sense strand
acgaggaguucaagacaua

SEQ ID NO: 745307 - RNA, 19 nt, Homo sapiens
  misc_RNA (1)...(19): siRNA sense strand
aaacuggagaccuacauua

SEQ ID NO: 745308 - RNA, 19 nt, Homo sapiens
  misc_RNA (1)...(19): siRNA sense strand
ccaaugagguggugacacu

SEQ ID NO: 745309 - RNA, 19 nt, Homo sapiens
  misc_RNA (1)...(19): siRNA sense strand
caacaugcacaacgugaaa

SEQ ID NO: 745310 - RNA, 19 nt, Homo sapiens
  misc_RNA (1)...(19): siRNA sense strand
gagauuggcuuugggaaac

SEQ ID NO: 745311 - RNA, 19 nt, Homo sapiens
  misc_RNA (1)...(19): siRNA sense strand
gagcggauccacaaacuuc

SEQ ID NO: 745312 - RNA, 19 nt, Homo sapiens
  misc_RNA (1)...(19): siRNA sense strand
gaaacuggagaccuacauu

SEQ ID NO: 745313 - RNA, 19 nt, Homo sapiens
  misc_RNA (1)...(19): siRNA sense strand
gaacagcuacacuucaucu

SEQ ID NO: 745314 - RNA, 19 nt, Homo sapiens
  misc_RNA (1)...(19): siRNA sense strand
acauuaagcuggacaaacu

SEQ ID NO: 745315 - RNA, 19 nt, Homo sapiens
  misc_RNA (1)...(19): siRNA sense strand
ccacugaggacaucaacaa

SEQ ID NO: 745316 - RNA, 19 nt, Homo sapiens
  misc_RNA (1)...(19): siRNA sense strand
caaagacauacuccaauga

SEQ ID NO: 745317 - RNA, 19 nt, Homo sapiens
  misc_RNA (1)...(19): siRNA sense strand
gaucagacuggaacaugaa

SEQ ID NO: 745318 - RNA, 19 nt, Homo sapiens
  misc_RNA (1)...(19): siRNA sense strand
aaacggcagcugucaauga

SEQ ID NO: 745319 - RNA, 19 nt, Homo sapiens
  misc_RNA (1)...(19): siRNA sense strand
uggagaagcugacccucaa

SEQ ID NO: 745320 - RNA, 19 nt, Homo sapiens
  misc_RNA (1)...(19): siRNA sense strand
caaacacgccaacaucguu

SEQ ID NO: 745321 - RNA, 19 nt, Homo sapiens
  misc_RNA (1)...(19): siRNA sense strand
gcacgaggacuugaagaug

SEQ ID NO: 745322 - RNA, 19 nt, Homo sapiens
  misc_RNA (1)...(19): siRNA sense strand
aaacacgccaacaucguua

SEQ ID NO: 745323 - RNA, 19 nt, Homo sapiens
  misc_RNA (1)...(19): siRNA sense strand
ggaggaacagcuacacuuc

SEQ ID NO: 745324 - RNA, 19 nt, Homo sapiens
  misc_RNA (1)...(19): siRNA sense strand
uugaguaccuggacaagga

SEQ ID NO: 745325 - RNA, 19 nt, Homo sapiens
  misc_RNA (1)...(19): siRNA sense strand
gcacaacgugaaacuguuc

SEQ ID NO: 745326 - RNA, 19 nt, Homo sapiens
  misc_RNA (1)...(19): siRNA sense strand
cacgcaagaucuccacuga

SEQ ID NO: 745327 - RNA, 19 nt, Homo sapiens
  misc_RNA (1)...(19): siRNA sense strand
agaagucccucacccuugu

SEQ ID NO: 745328 - RNA, 19 nt, Homo sapiens
  misc_RNA (1)...(19): siRNA sense strand
cgcagaggaugccaugaaa

SEQ ID NO: 745329 - RNA, 19 nt, Homo sapiens
  misc_RNA (1)...(19): siRNA sense strand
ccaagcuguugcaguuuga

SEQ ID NO: 745330 - RNA, 19 nt, Homo sapiens
  misc_RNA (1)...(19): siRNA sense strand
caacaucguuacgcuacau

SEQ ID NO: 745331 - RNA, 19 nt, Homo sapiens
  misc_RNA (1)...(19): siRNA sense strand
caucuuccguaucuuagga

SEQ ID NO: 745332 - RNA, 19 nt, Homo sapiens
  misc_RNA (1)...(19): siRNA sense strand
ggugugggcugcaucuucu

SEQ ID NO: 745333 - RNA, 19 nt, Homo sapiens
  misc_RNA (1)...(19): siRNA sense strand
cccagaaccugcucaucaa

SEQ ID NO: 745334 - RNA, 19 nt, Homo sapiens
  misc_RNA (1)...(19): siRNA sense strand
gaucuccacugaggacauc

SEQ ID NO: 745335 - RNA, 19 nt, Homo sapiens
  misc_RNA (1)...(19): siRNA sense strand
caacgaggaguucaagaca

SEQ ID NO: 745336 - RNA, 19 nt, Homo sapiens
  misc_RNA (1)...(19): siRNA sense strand
uugggaaacuggagaccua

SEQ ID NO: 745337 - RNA, 19 nt, Homo sapiens
  misc_RNA (1)...(19): siRNA sense strand
cuucaucuuccguaucuua

SEQ ID NO: 745338 - RNA, 19 nt, Homo sapiens
  misc_RNA (1)...(19): siRNA sense strand
ggcugcaucuucuaugaga

SEQ ID NO: 745339 - RNA, 19 nt, Homo sapiens
  misc_RNA (1)...(19): siRNA sense strand
ggaacaucaucaacaugca

SEQ ID NO: 745340 - RNA, 19 nt, Homo sapiens
  misc_RNA (1)...(19): siRNA sense strand
agaucagacuggaacauga

SEQ ID NO: 745341 - RNA, 19 nt, Homo sapiens
  misc_RNA (1)...(19): siRNA sense strand
gagaucagacuggaacaug

SEQ ID NO: 745342 - RNA, 19 nt, Homo sapiens
  misc_RNA (1)...(19): siRNA sense strand
gugggaacaucaucaacau

SEQ ID NO: 745343 - RNA, 19 nt, Homo sapiens
  misc_RNA (1)...(19): siRNA sense strand
guaccuaugccaccgucua

SEQ ID NO: 745344 - RNA, 19 nt, Homo sapiens
  misc_RNA (1)...(19): siRNA sense strand
cagaggaugccaugaaaca

SEQ ID NO: 745345 - RNA, 19 nt, Homo sapiens
  misc_RNA (1)...(19): siRNA sense strand
gcucaagcuggcugacuuu

SEQ ID NO: 745346 - RNA, 19 nt, Homo sapiens
  misc_RNA (1)...(19): siRNA sense strand
ucaaacggcagcugucaau

SEQ ID NO: 745347 - RNA, 19 nt, Homo sapiens
  misc_RNA (1)...(19): siRNA sense strand
gaggaacagcuacacuuca

SEQ ID NO: 745348 - RNA, 19 nt, Homo sapiens
  misc_RNA (1)...(19): siRNA sense strand
gaucaaacggcagcuguca

SEQ ID NO: 745349 - RNA, 19 nt, Homo sapiens
  misc_RNA (1)...(19): siRNA sense strand
ggaagugucccugcucaag

SEQ ID NO: 745350 - RNA, 19 nt, Homo sapiens
  misc_RNA (1)...(19): siRNA sense strand
gggagcggauccacaaacu

SEQ ID NO: 745351 - RNA, 19 nt, Homo sapiens
  misc_RNA (1)...(19): siRNA sense strand
caucaacaagcgccuauca

SEQ ID NO: 745352 - RNA, 19 nt, Homo sapiens
  misc_RNA (1)...(19): siRNA sense strand
ugagauuggcuuugggaaa

SEQ ID NO: 745353 - RNA, 19 nt, Homo sapiens
  misc_RNA (1)...(19): siRNA sense strand
ccgcagaggaugccaugaa

SEQ ID NO: 745354 - RNA, 19 nt, Homo sapiens
  misc_RNA (1)...(19): siRNA sense strand
ucacccuugucuuugagua

SEQ ID NO: 745355 - RNA, 19 nt, Homo sapiens
  misc_RNA (1)...(19): siRNA sense strand
ugaagcaguaccuggauga

SEQ ID NO: 745356 - RNA, 19 nt, Homo sapiens
  misc_RNA (1)...(19): siRNA sense strand
ccaugaaacauccauucuu

SEQ ID NO: 745357 - RNA, 19 nt, Homo sapiens
  misc_RNA (1)...(19): siRNA sense strand
gcaguuugagggucgaaau

SEQ ID NO: 745358 - RNA, 19 nt, Homo sapiens
  misc_RNA (1)...(19): siRNA sense strand
guucaagacauacaacuac

SEQ ID NO: 745359 - RNA, 19 nt, Homo sapiens
  misc_RNA (1)...(19): siRNA sense strand
ggaugaagaagaucaaacg

SEQ ID NO: 745360 - RNA, 19 nt, Homo sapiens
  misc_RNA (1)...(19): siRNA sense strand
aggaacagcuacacuucau

SEQ ID NO: 745361 - RNA, 19 nt, Homo sapiens
  misc_RNA (1)...(19): siRNA sense strand
ggaaacuggagaccuacau

SEQ ID NO: 745362 - RNA, 19 nt, Homo sapiens
  misc_RNA (1)...(19): siRNA sense strand
ugggcugcaucuucuauga

SEQ ID NO: 745363 - RNA, 19 nt, Homo sapiens
  misc_RNA (1)...(19): siRNA sense strand
ccucaaacacgccaacauc

SEQ ID NO: 745364 - RNA, 19 nt, Homo sapiens
  misc_RNA (1)...(19): siRNA sense strand
gaagcugacccucaauagc

SEQ ID NO: 745365 - RNA, 19 nt, Homo sapiens
  misc_RNA (1)...(19): siRNA sense strand
aaaggagauucagcuacaa

SEQ ID NO: 745366 - RNA, 19 nt, Homo sapiens
  misc_RNA (1)...(19): siRNA sense strand
cacuucaucuuccguaucu

SEQ ID NO: 745367 - RNA, 19 nt, Homo sapiens
  misc_RNA (1)...(19): siRNA sense strand
agaaccugcucaucaacga

SEQ ID NO: 745368 - RNA, 19 nt, Homo sapiens
  misc_RNA (1)...(19): siRNA sense strand
aacuggagaccuacauuaa

SEQ ID NO: 745369 - RNA, 19 nt, Homo sapiens
  misc_RNA (1)...(19): siRNA sense strand
uuccauauuugcacuaaag

SEQ ID NO: 745370 - RNA, 19 nt, Homo sapiens
  misc_RNA (1)...(19): siRNA sense strand
acgugaaacuguuccuguu

SEQ ID NO: 745371 - RNA, 19 nt, Homo sapiens
  misc_RNA (1)...(19): siRNA sense strand
gucccucacccuugucuuu

SEQ ID NO: 745372 - RNA, 19 nt, Homo sapiens
  misc_RNA (1)...(19): siRNA sense strand
ccagugagagugcguaugc

SEQ ID NO: 745373 - RNA, 19 nt, Homo sapiens
  misc_RNA (1)...(19): siRNA sense strand
gcucaaggaccucaaacac

SEQ ID NO: 745374 - RNA, 19 nt, Homo sapiens
  misc_RNA (1)...(19): siRNA sense strand
aagugucccugcucaagga

SEQ ID NO: 745375 - RNA, 19 nt, Homo sapiens
  misc_RNA (1)...(19): siRNA sense strand
ucaacaagcgccuaucacu

SEQ ID NO: 745376 - RNA, 19 nt, Homo sapiens
  misc_RNA (1)...(19): siRNA sense strand
accaagcuguugcaguuug

SEQ ID NO: 745377 - RNA, 19 nt, Homo sapiens
  misc_RNA (1)...(19): siRNA sense strand
gcaaaagcaagcucacaga

SEQ ID NO: 745378 - RNA, 19 nt, Homo sapiens
  misc_RNA (1)...(19): siRNA sense strand
ccacggacuacuccacuca

SEQ ID NO: 745379 - RNA, 19 nt, Homo sapiens
  misc_RNA (1)...(19): siRNA sense strand
aacaagcgccuaucacuac

SEQ ID NO: 745380 - RNA, 19 nt, Homo sapiens
  misc_RNA (1)...(19): siRNA sense strand
caagcucacagacaaccuu

SEQ ID NO: 745381 - RNA, 19 nt, Homo sapiens
  misc_RNA (1)...(19): siRNA sense strand
gacaucaacaagcgccuau

SEQ ID NO: 745382 - RNA, 19 nt, Homo sapiens
  misc_RNA (1)...(19): siRNA sense strand
uauuugcacuaaaggagau

SEQ ID NO: 745383 - RNA, 19 nt, Homo sapiens
  misc_RNA (1)...(19): siRNA sense strand
ggagcggauccacaaacuu

SEQ ID NO: 745384 - RNA, 19 nt, Homo sapiens
  misc_RNA (1)...(19): siRNA sense strand
cuggagaccuacauuaagc

SEQ ID NO: 745385 - RNA, 19 nt, Homo sapiens
  misc_RNA (1)...(19): siRNA sense strand
aaagacauacuccaaugag

SEQ ID NO: 745386 - RNA, 19 nt, Homo sapiens
  misc_RNA (1)...(19): siRNA sense strand
ggagagugaccaggcuuca

SEQ ID NO: 745387 - RNA, 19 nt, Homo sapiens
  misc_RNA (1)...(19): siRNA sense strand
caagucaaucccaacaaag

SEQ ID NO: 745388 - RNA, 19 nt, Homo sapiens
  misc_RNA (1)...(19): siRNA sense strand
aagucaaucccaacaaaga

SEQ ID NO: 745389 - RNA, 19 nt, Homo sapiens
  misc_RNA (1)...(19): siRNA sense strand
caaucccaacaaagacaua

SEQ ID NO: 745390 - RNA, 19 nt, Homo sapiens
  misc_RNA (1)...(19): siRNA sense strand
acaaggaccugaagcagua

SEQ ID NO: 745391 - RNA, 19 nt, Homo sapiens
  misc_RNA (1)...(19): siRNA sense strand
ucaccaagcuguugcaguu

SEQ ID NO: 745392 - RNA, 19 nt, Homo sapiens
  misc_RNA (1)...(19): siRNA sense strand
uaaaggagauucagcuaca

SEQ ID NO: 745393 - RNA, 19 nt, Homo sapiens
  misc_RNA (1)...(19): siRNA sense strand
ccaagucaaucccaacaaa

SEQ ID NO: 745394 - RNA, 19 nt, Homo sapiens
  misc_RNA (1)...(19): siRNA sense strand
caacaaagacauacuccaa

SEQ ID NO: 745395 - RNA, 19 nt, Homo sapiens
  misc_RNA (1)...(19): siRNA sense strand
caugaaacauccauucuuc

SEQ ID NO: 745396 - RNA, 19 nt, Homo sapiens
  misc_RNA (1)...(19): siRNA sense strand
aaagcaagcucacagacaa

SEQ ID NO: 745397 - RNA, 19 nt, Homo sapiens
  misc_RNA (1)...(19): siRNA sense strand
ggacuacuccacucagauu

SEQ ID NO: 745398 - RNA, 19 nt, Homo sapiens
  misc_RNA (1)...(19): siRNA sense strand
gagaagcugacccucaaua

SEQ ID NO: 745399 - RNA, 19 nt, Homo sapiens
  misc_RNA (1)...(19): siRNA sense strand
ccacucagauugacaugug

SEQ ID NO: 745400 - RNA, 19 nt, Homo sapiens
  misc_RNA (1)...(19): siRNA sense strand
caacaagcgccuaucacua

SEQ ID NO: 745401 - RNA, 19 nt, Homo sapiens
  misc_RNA (1)...(19): siRNA sense strand
acaaagacauacuccaaug

SEQ ID NO: 745402 - RNA, 19 nt, Homo sapiens
  misc_RNA (1)...(19): siRNA sense strand
gaggugcagucuccaguga

SEQ ID NO: 745403 - RNA, 19 nt, Homo sapiens
  misc_RNA (1)...(19): siRNA sense strand
acgaggaguucaagacaua

SEQ ID NO: 745404 - RNA, 19 nt, Homo sapiens
  misc_RNA (1)...(19): siRNA sense strand
aaacuggagaccuacauua

SEQ ID NO: 745405 - RNA, 19 nt, Homo sapiens
  misc_RNA (1)...(19): siRNA sense strand
ccaaugagguggugacacu

SEQ ID NO: 745406 - RNA, 19 nt, Homo sapiens
  misc_RNA (1)...(19): siRNA sense strand
caacaugcacaacgugaaa

SEQ ID NO: 745407 - RNA, 19 nt, Homo sapiens
  misc_RNA (1)...(19): siRNA sense strand
gagauuggcuuugggaaac

SEQ ID NO: 745408 - RNA, 19 nt, Homo sapiens
  misc_RNA (1)...(19): siRNA sense strand
gagcggauccacaaacuuc

SEQ ID NO: 745409 - RNA, 19 nt, Homo sapiens
  misc_RNA (1)...(19): siRNA sense strand
gaaacuggagaccuacauu

SEQ ID NO: 745410 - RNA, 19 nt, Homo sapiens
  misc_RNA (1)...(19): siRNA sense strand
gaacagcuacacuucaucu

SEQ ID NO: 745411 - RNA, 19 nt, Homo sapiens
  misc_RNA (1)...(19): siRNA sense strand
acauuaagcuggacaaacu

SEQ ID NO: 745412 - RNA, 19 nt, Homo sapiens
  misc_RNA (1)...(19): siRNA sense strand
ccacugaggacaucaacaa

SEQ ID NO: 745413 - RNA, 19 nt, Homo sapiens
  misc_RNA (1)...(19): siRNA sense strand
caaagacauacuccaauga

SEQ ID NO: 745414 - RNA, 19 nt, Homo sapiens
  misc_RNA (1)...(19): siRNA sense strand
gaucagacuggaacaugaa

SEQ ID NO: 745415 - RNA, 19 nt, Homo sapiens
  misc_RNA (1)...(19): siRNA sense strand
aaacggcagcugucaauga

SEQ ID NO: 745416 - RNA, 19 nt, Homo sapiens
  misc_RNA (1)...(19): siRNA sense strand
uggagaagcugacccucaa

SEQ ID NO: 745417 - RNA, 19 nt, Homo sapiens
  misc_RNA (1)...(19): siRNA sense strand
caaacacgccaacaucguu

SEQ ID NO: 745418 - RNA, 19 nt, Homo sapiens
  misc_RNA (1)...(19): siRNA sense strand
gcacgaggacuugaagaug

SEQ ID NO: 745419 - RNA, 19 nt, Homo sapiens
  misc_RNA (1)...(19): siRNA sense strand
aaacacgccaacaucguua

SEQ ID NO: 745420 - RNA, 19 nt, Homo sapiens
  misc_RNA (1)...(19): siRNA sense strand
ggaggaacagcuacacuuc

SEQ ID NO: 745421 - RNA, 19 nt, Homo sapiens
  misc_RNA (1)...(19): siRNA sense strand
uugaguaccuggacaagga

SEQ ID NO: 745422 - RNA, 19 nt, Homo sapiens
  misc_RNA (1)...(19): siRNA sense strand
gcacaacgugaaacuguuc

SEQ ID NO: 745423 - RNA, 19 nt, Homo sapiens
  misc_RNA (1)...(19): siRNA sense strand
cacgcaagaucuccacuga

SEQ ID NO: 745424 - RNA, 19 nt, Homo sapiens
  misc_RNA (1)...(19): siRNA sense strand
agaagucccucacccuugu

SEQ ID NO: 745425 - RNA, 19 nt, Homo sapiens
  misc_RNA (1)...(19): siRNA sense strand
cgcagaggaugccaugaaa

SEQ ID NO: 745426 - RNA, 19 nt, Homo sapiens
  misc_RNA (1)...(19): siRNA sense strand
ccaagcuguugcaguuuga

SEQ ID NO: 745427 - RNA, 19 nt, Homo sapiens
  misc_RNA (1)...(19): siRNA sense strand
caacaucguuacgcuacau

SEQ ID NO: 745428 - RNA, 19 nt, Homo sapiens
  misc_RNA (1)...(19): siRNA sense strand
caucuuccguaucuuagga

SEQ ID NO: 745429 - RNA, 19 nt, Homo sapiens
  misc_RNA (1)...(19): siRNA sense strand
ggugugggcugcaucuucu

SEQ ID NO: 745430 - RNA, 19 nt, Homo sapiens
  misc_RNA (1)...(19): siRNA sense strand
cccagaaccugcucaucaa

SEQ ID NO: 745431 - RNA, 19 nt, Homo sapiens
  misc_RNA (1)...(19): siRNA sense strand
gaucuccacugaggacauc

SEQ ID NO: 745432 - RNA, 19 nt, Homo sapiens
  misc_RNA (1)...(19): siRNA sense strand
caacgaggaguucaagaca

SEQ ID NO: 745433 - RNA, 19 nt, Homo sapiens
  misc_RNA (1)...(19): siRNA sense strand
uugggaaacuggagaccua

SEQ ID NO: 745434 - RNA, 19 nt, Homo sapiens
  misc_RNA (1)...(19): siRNA sense strand
cuucaucuuccguaucuua

SEQ ID NO: 745435 - RNA, 19 nt, Homo sapiens
  misc_RNA (1)...(19): siRNA sense strand
ggcugcaucuucuaugaga

SEQ ID NO: 745436 - RNA, 19 nt, Homo sapiens
  misc_RNA (1)...(19): siRNA sense strand
ggaacaucaucaacaugca

SEQ ID NO: 745437 - RNA, 19 nt, Homo sapiens
  misc_RNA (1)...(19): siRNA sense strand
agaucagacuggaacauga

SEQ ID NO: 745438 - RNA, 19 nt, Homo sapiens
  misc_RNA (1)...(19): siRNA sense strand
gagaucagacuggaacaug

SEQ ID NO: 745439 - RNA, 19 nt, Homo sapiens
  misc_RNA (1)...(19): siRNA sense strand
gugggaacaucaucaacau

SEQ ID NO: 745440 - RNA, 19 nt, Homo sapiens
  misc_RNA (1)...(19): siRNA sense strand
guaccuaugccaccgucua

SEQ ID NO: 745441 - RNA, 19 nt, Homo sapiens
  misc_RNA (1)...(19): siRNA sense strand
cagaggaugccaugaaaca

SEQ ID NO: 745442 - RNA, 19 nt, Homo sapiens
  misc_RNA (1)...(19): siRNA sense strand
gcucaagcuggcugacuuu

SEQ ID NO: 745443 - RNA, 19 nt, Homo sapiens
  misc_RNA (1)...(19): siRNA sense strand
ucaaacggcagcugucaau

SEQ ID NO: 745444 - RNA, 19 nt, Homo sapiens
  misc_RNA (1)...(19): siRNA sense strand
gaggaacagcuacacuuca

SEQ ID NO: 745445 - RNA, 19 nt, Homo sapiens
  misc_RNA (1)...(19): siRNA sense strand
gaucaaacggcagcuguca

SEQ ID NO: 745446 - RNA, 19 nt, Homo sapiens
  misc_RNA (1)...(19): siRNA sense strand
ggaagugucccugcucaag

SEQ ID NO: 745447 - RNA, 19 nt, Homo sapiens
  misc_RNA (1)...(19): siRNA sense strand
gggagcggauccacaaacu

SEQ ID NO: 745448 - RNA, 19 nt, Homo sapiens
  misc_RNA (1)...(19): siRNA sense strand
caucaacaagcgccuauca

SEQ ID NO: 745449 - RNA, 19 nt, Homo sapiens
  misc_RNA (1)...(19): siRNA sense strand
ugagauuggcuuugggaaa

SEQ ID NO: 745450 - RNA, 19 nt, Homo sapiens
  misc_RNA (1)...(19): siRNA sense strand
ccgcagaggaugccaugaa

SEQ ID NO: 745451 - RNA, 19 nt, Homo sapiens
  misc_RNA (1)...(19): siRNA sense strand
ucacccuugucuuugagua

SEQ ID NO: 745452 - RNA, 19 nt, Homo sapiens
  misc_RNA (1)...(19): siRNA sense strand
ugaagcaguaccuggauga

SEQ ID NO: 745453 - RNA, 19 nt, Homo sapiens
  misc_RNA (1)...(19): siRNA sense strand
ccaugaaacauccauucuu

SEQ ID NO: 745454 - RNA, 19 nt, Homo sapiens
  misc_RNA (1)...(19): siRNA sense strand
gcaguuugagggucgaaau

SEQ ID NO: 745455 - RNA, 19 nt, Homo sapiens
  misc_RNA (1)...(19): siRNA sense strand
guucaagacauacaacuac

SEQ ID NO: 745456 - RNA, 19 nt, Homo sapiens
  misc_RNA (1)...(19): siRNA sense strand
ggaugaagaagaucaaacg

SEQ ID NO: 745457 - RNA, 19 nt, Homo sapiens
  misc_RNA (1)...(19): siRNA sense strand
aggaacagcuacacuucau

SEQ ID NO: 745458 - RNA, 19 nt, Homo sapiens
  misc_RNA (1)...(19): siRNA sense strand
ggaaacuggagaccuacau

SEQ ID NO: 745459 - RNA, 19 nt, Homo sapiens
  misc_RNA (1)...(19): siRNA sense strand
ugggcugcaucuucuauga

SEQ ID NO: 745460 - RNA, 19 nt, Homo sapiens
  misc_RNA (1)...(19): siRNA sense strand
ccucaaacacgccaacauc

SEQ ID NO: 745461 - RNA, 19 nt, Homo sapiens
  misc_RNA (1)...(19): siRNA sense strand
gaagcugacccucaauagc

SEQ ID NO: 745462 - RNA, 19 nt, Homo sapiens
  misc_RNA (1)...(19): siRNA sense strand
aaaggagauucagcuacaa

SEQ ID NO: 745463 - RNA, 19 nt, Homo sapiens
  misc_RNA (1)...(19): siRNA sense strand
cacuucaucuuccguaucu

SEQ ID NO: 745464 - RNA, 19 nt, Homo sapiens
  misc_RNA (1)...(19): siRNA sense strand
agaaccugcucaucaacga

SEQ ID NO: 745465 - RNA, 19 nt, Homo sapiens
  misc_RNA (1)...(19): siRNA sense strand
aacuggagaccuacauuaa

SEQ ID NO: 745466 - RNA, 19 nt, Homo sapiens
  misc_RNA (1)...(19): siRNA sense strand
uuccauauuugcacuaaag

SEQ ID NO: 745467 - RNA, 19 nt, Homo sapiens
  misc_RNA (1)...(19): siRNA sense strand
acgugaaacuguuccuguu

SEQ ID NO: 745468 - RNA, 19 nt, Homo sapiens
  misc_RNA (1)...(19): siRNA sense strand
gucccucacccuugucuuu

SEQ ID NO: 745469 - RNA, 19 nt, Homo sapiens
  misc_RNA (1)...(19): siRNA sense strand
ccagugagagugcguaugc

SEQ ID NO: 745470 - RNA, 19 nt, Homo sapiens
  misc_RNA (1)...(19): siRNA sense strand
gcucaaggaccucaaacac

SEQ ID NO: 745471 - RNA, 19 nt, Homo sapiens
  misc_RNA (1)...(19): siRNA sense strand
aagugucccugcucaagga

SEQ ID NO: 745472 - RNA, 19 nt, Homo sapiens
  misc_RNA (1)...(19): siRNA sense strand
ucaacaagcgccuaucacu

SEQ ID NO: 745473 - RNA, 19 nt, Homo sapiens
  misc_RNA (1)...(19): siRNA sense strand
accaagcuguugcaguuug

SEQ ID NO: 745474 - RNA, 19 nt, Homo sapiens
  misc_RNA (1)...(19): siRNA sense strand
gcaaaagcaagcucacaga

SEQ ID NO: 745475 - RNA, 19 nt, Homo sapiens
  misc_RNA (1)...(19): siRNA sense strand
ccacggacuacuccacuca

SEQ ID NO: 745476 - RNA, 19 nt, Homo sapiens
  misc_RNA (1)...(19): siRNA sense strand
aacaagcgccuaucacuac

SEQ ID NO: 745477 - RNA, 19 nt, Homo sapiens
  misc_RNA (1)...(19): siRNA sense strand
caagcucacagacaaccuu

SEQ ID NO: 745478 - RNA, 19 nt, Homo sapiens
  misc_RNA (1)...(19): siRNA sense strand
gacaucaacaagcgccuau

SEQ ID NO: 745479 - RNA, 19 nt, Homo sapiens
  misc_RNA (1)...(19): siRNA sense strand
uauuugcacuaaaggagau

SEQ ID NO: 745480 - RNA, 19 nt, Homo sapiens
  misc_RNA (1)...(19): siRNA sense strand
ggagcggauccacaaacuu

SEQ ID NO: 745481 - RNA, 19 nt, Homo sapiens
  misc_RNA (1)...(19): siRNA sense strand
cuggagaccuacauuaagc

SEQ ID NO: 745482 - RNA, 19 nt, Homo sapiens
  misc_RNA (1)...(19): siRNA sense strand
aaagacauacuccaaugag

SEQ ID NO: 745483 - RNA, 19 nt, Homo sapiens
  misc_RNA (1)...(19): siRNA sense strand
ggagagugaccaggcuuca

SEQ ID NO: 745484 - RNA, 19 nt, Homo sapiens
  misc_RNA (1)...(19): siRNA sense strand
caagucaaucccaacaaag

SEQ ID NO: 745485 - RNA, 19 nt, Homo sapiens
  misc_RNA (1)...(19): siRNA sense strand
aagucaaucccaacaaaga

SEQ ID NO: 745486 - RNA, 19 nt, Homo sapiens
  misc_RNA (1)...(19): siRNA sense strand
caaucccaacaaagacaua

SEQ ID NO: 745487 - RNA, 19 nt, Homo sapiens
  misc_RNA (1)...(19): siRNA sense strand
acaaggaccugaagcagua

SEQ ID NO: 745488 - RNA, 19 nt, Homo sapiens
  misc_RNA (1)...(19): siRNA sense strand
ucaccaagcuguugcaguu

SEQ ID NO: 745489 - RNA, 19 nt, Homo sapiens
  misc_RNA (1)...(19): siRNA sense strand
uaaaggagauucagcuaca

SEQ ID NO: 745490 - RNA, 19 nt, Homo sapiens
  misc_RNA (1)...(19): siRNA sense strand
ccaagucaaucccaacaaa

SEQ ID NO: 745491 - RNA, 19 nt, Homo sapiens
  misc_RNA (1)...(19): siRNA sense strand
caacaaagacauacuccaa

SEQ ID NO: 745492 - RNA, 19 nt, Homo sapiens
  misc_RNA (1)...(19): siRNA sense strand
caugaaacauccauucuuc

SEQ ID NO: 745493 - RNA, 19 nt, Homo sapiens
  misc_RNA (1)...(19): siRNA sense strand
aaagcaagcucacagacaa

SEQ ID NO: 745494 - RNA, 19 nt, Homo sapiens
  misc_RNA (1)...(19): siRNA sense strand
ggacuacuccacucagauu

SEQ ID NO: 745495 - RNA, 19 nt, Homo sapiens
  misc_RNA (1)...(19): siRNA sense strand
gagaagcugacccucaaua

SEQ ID NO: 745496 - RNA, 19 nt, Homo sapiens
  misc_RNA (1)...(19): siRNA sense strand
ccacucagauugacaugug

SEQ ID NO: 745497 - RNA, 19 nt, Homo sapiens
  misc_RNA (1)...(19): siRNA sense strand
caacaagcgccuaucacua

SEQ ID NO: 745498 - RNA, 19 nt, Homo sapiens
  misc_RNA (1)...(19): siRNA sense strand
acaaagacauacuccaaug

SEQ ID NO: 745499 - RNA, 19 nt, Homo sapiens
  misc_RNA (1)...(19): siRNA sense strand
gaggugcagucuccaguga

SEQ ID NO: 745500 - RNA, 19 nt, Homo sapiens
  misc_RNA (1)...(19): siRNA sense strand
acgaggaguucaagacaua

SEQ ID NO: 745501 - RNA, 19 nt, Homo sapiens
  misc_RNA (1)...(19): siRNA sense strand
aaacuggagaccuacauua

SEQ ID NO: 745502 - RNA, 19 nt, Homo sapiens
  misc_RNA (1)...(19): siRNA sense strand
ccaaugagguggugacacu

SEQ ID NO: 745503 - RNA, 19 nt, Homo sapiens
  misc_RNA (1)...(19): siRNA sense strand
caacaugcacaacgugaaa

SEQ ID NO: 745504 - RNA, 19 nt, Homo sapiens
  misc_RNA (1)...(19): siRNA sense strand
gagauuggcuuugggaaac

SEQ ID NO: 745505 - RNA, 19 nt, Homo sapiens
  misc_RNA (1)...(19): siRNA sense strand
gagcggauccacaaacuuc

SEQ ID NO: 745506 - RNA, 19 nt, Homo sapiens
  misc_RNA (1)...(19): siRNA sense strand
gaaacuggagaccuacauu

SEQ ID NO: 745507 - RNA, 19 nt, Homo sapiens
  misc_RNA (1)...(19): siRNA sense strand
gaacagcuacacuucaucu

SEQ ID NO: 745508 - RNA, 19 nt, Homo sapiens
  misc_RNA (1)...(19): siRNA sense strand
acauuaagcuggacaaacu

SEQ ID NO: 745509 - RNA, 19 nt, Homo sapiens
  misc_RNA (1)...(19): siRNA sense strand
ccacugaggacaucaacaa

SEQ ID NO: 745510 - RNA, 19 nt, Homo sapiens
  misc_RNA (1)...(19): siRNA sense strand
caaagacauacuccaauga

SEQ ID NO: 745511 - RNA, 19 nt, Homo sapiens
  misc_RNA (1)...(19): siRNA sense strand
gaucagacuggaacaugaa

SEQ ID NO: 745512 - RNA, 19 nt, Homo sapiens
  misc_RNA (1)...(19): siRNA sense strand
aaacggcagcugucaauga

SEQ ID NO: 745513 - RNA, 19 nt, Homo sapiens
  misc_RNA (1)...(19): siRNA sense strand
uggagaagcugacccucaa

SEQ ID NO: 745514 - RNA, 19 nt, Homo sapiens
  misc_RNA (1)...(19): siRNA sense strand
caaacacgccaacaucguu

SEQ ID NO: 745515 - RNA, 19 nt, Homo sapiens
  misc_RNA (1)...(19): siRNA sense strand
gcacgaggacuugaagaug

SEQ ID NO: 745516 - RNA, 19 nt, Homo sapiens
  misc_RNA (1)...(19): siRNA sense strand
aaacacgccaacaucguua

SEQ ID NO: 745517 - RNA, 19 nt, Homo sapiens
  misc_RNA (1)...(19): siRNA sense strand
ggaggaacagcuacacuuc

SEQ ID NO: 745518 - RNA, 19 nt, Homo sapiens
  misc_RNA (1)...(19): siRNA sense strand
uugaguaccuggacaagga

SEQ ID NO: 745519 - RNA, 19 nt, Homo sapiens
  misc_RNA (1)...(19): siRNA sense strand
gcacaacgugaaacuguuc

SEQ ID NO: 745520 - RNA, 19 nt, Homo sapiens
  misc_RNA (1)...(19): siRNA sense strand
cacgcaagaucuccacuga

SEQ ID NO: 745521 - RNA, 19 nt, Homo sapiens
  misc_RNA (1)...(19): siRNA sense strand
agaagucccucacccuugu

SEQ ID NO: 745522 - RNA, 19 nt, Homo sapiens
  misc_RNA (1)...(19): siRNA sense strand
cgcagaggaugccaugaaa

SEQ ID NO: 745523 - RNA, 19 nt, Homo sapiens
  misc_RNA (1)...(19): siRNA sense strand
ccaagcuguugcaguuuga

SEQ ID NO: 745524 - RNA, 19 nt, Homo sapiens
  misc_RNA (1)...(19): siRNA sense strand
caacaucguuacgcuacau

SEQ ID NO: 745525 - RNA, 19 nt, Homo sapiens
  misc_RNA (1)...(19): siRNA sense strand
caucuuccguaucuuagga

SEQ ID NO: 745526 - RNA, 19 nt, Homo sapiens
  misc_RNA (1)...(19): siRNA sense strand
ggugugggcugcaucuucu

SEQ ID NO: 745527 - RNA, 19 nt, Homo sapiens
  misc_RNA (1)...(19): siRNA sense strand
cccagaaccugcucaucaa

SEQ ID NO: 745528 - RNA, 19 nt, Homo sapiens
  misc_RNA (1)...(19): siRNA sense strand
gaucuccacugaggacauc

SEQ ID NO: 745529 - RNA, 19 nt, Homo sapiens
  misc_RNA (1)...(19): siRNA sense strand
caacgaggaguucaagaca

SEQ ID NO: 745530 - RNA, 19 nt, Homo sapiens
  misc_RNA (1)...(19): siRNA sense strand
uugggaaacuggagaccua

SEQ ID NO: 745531 - RNA, 19 nt, Homo sapiens
  misc_RNA (1)...(19): siRNA sense strand
cuucaucuuccguaucuua

SEQ ID NO: 745532 - RNA, 19 nt, Homo sapiens
  misc_RNA (1)...(19): siRNA sense strand
ggcugcaucuucuaugaga

SEQ ID NO: 745533 - RNA, 19 nt, Homo sapiens
  misc_RNA (1)...(19): siRNA sense strand
ggaacaucaucaacaugca

SEQ ID NO: 745534 - RNA, 19 nt, Homo sapiens
  misc_RNA (1)...(19): siRNA sense strand
agaucagacuggaacauga

SEQ ID NO: 745535 - RNA, 19 nt, Homo sapiens
  misc_RNA (1)...(19): siRNA sense strand
gagaucagacuggaacaug

SEQ ID NO: 745536 - RNA, 19 nt, Homo sapiens
  misc_RNA (1)...(19): siRNA sense strand
gugggaacaucaucaacau

SEQ ID NO: 745537 - RNA, 19 nt, Homo sapiens
  misc_RNA (1)...(19): siRNA sense strand
guaccuaugccaccgucua

SEQ ID NO: 745538 - RNA, 19 nt, Homo sapiens
  misc_RNA (1)...(19): siRNA sense strand
cagaggaugccaugaaaca

SEQ ID NO: 745539 - RNA, 19 nt, Homo sapiens
  misc_RNA (1)...(19): siRNA sense strand
gcucaagcuggcugacuuu

SEQ ID NO: 745540 - RNA, 19 nt, Homo sapiens
  misc_RNA (1)...(19): siRNA sense strand
ucaaacggcagcugucaau

SEQ ID NO: 745541 - RNA, 19 nt, Homo sapiens
  misc_RNA (1)...(19): siRNA sense strand
gaggaacagcuacacuuca

SEQ ID NO: 745542 - RNA, 19 nt, Homo sapiens
  misc_RNA (1)...(19): siRNA sense strand
gaucaaacggcagcuguca

SEQ ID NO: 745543 - RNA, 19 nt, Homo sapiens
  misc_RNA (1)...(19): siRNA sense strand
ggaagugucccugcucaag

SEQ ID NO: 745544 - RNA, 19 nt, Homo sapiens
  misc_RNA (1)...(19): siRNA sense strand
gggagcggauccacaaacu

SEQ ID NO: 745545 - RNA, 19 nt, Homo sapiens
  misc_RNA (1)...(19): siRNA sense strand
caucaacaagcgccuauca

SEQ ID NO: 745546 - RNA, 19 nt, Homo sapiens
  misc_RNA (1)...(19): siRNA sense strand
ugagauuggcuuugggaaa

SEQ ID NO: 745547 - RNA, 19 nt, Homo sapiens
  misc_RNA (1)...(19): siRNA sense strand
ccgcagaggaugccaugaa

SEQ ID NO: 745548 - RNA, 19 nt, Homo sapiens
  misc_RNA (1)...(19): siRNA sense strand
ucacccuugucuuugagua

SEQ ID NO: 745549 - RNA, 19 nt, Homo sapiens
  misc_RNA (1)...(19): siRNA sense strand
ugaagcaguaccuggauga

SEQ ID NO: 745550 - RNA, 19 nt, Homo sapiens
  misc_RNA (1)...(19): siRNA sense strand
ccaugaaacauccauucuu

SEQ ID NO: 745551 - RNA, 19 nt, Homo sapiens
  misc_RNA (1)...(19): siRNA sense strand
gcaguuugagggucgaaau

SEQ ID NO: 745552 - RNA, 19 nt, Homo sapiens
  misc_RNA (1)...(19): siRNA sense strand
guucaagacauacaacuac

SEQ ID NO: 745553 - RNA, 19 nt, Homo sapiens
  misc_RNA (1)...(19): siRNA sense strand
ggaugaagaagaucaaacg

SEQ ID NO: 745554 - RNA, 19 nt, Homo sapiens
  misc_RNA (1)...(19): siRNA sense strand
aggaacagcuacacuucau

SEQ ID NO: 745555 - RNA, 19 nt, Homo sapiens
  misc_RNA (1)...(19): siRNA sense strand
ggaaacuggagaccuacau

SEQ ID NO: 745556 - RNA, 19 nt, Homo sapiens
  misc_RNA (1)...(19): siRNA sense strand
ugggcugcaucuucuauga

SEQ ID NO: 745557 - RNA, 19 nt, Homo sapiens
  misc_RNA (1)...(19): siRNA sense strand
ccucaaacacgccaacauc

SEQ ID NO: 745558 - RNA, 19 nt, Homo sapiens
  misc_RNA (1)...(19): siRNA sense strand
gaagcugacccucaauagc

SEQ ID NO: 745559 - RNA, 19 nt, Homo sapiens
  misc_RNA (1)...(19): siRNA sense strand
aaaggagauucagcuacaa

SEQ ID NO: 745560 - RNA, 19 nt, Homo sapiens
  misc_RNA (1)...(19): siRNA sense strand
cacuucaucuuccguaucu

SEQ ID NO: 745561 - RNA, 19 nt, Homo sapiens
  misc_RNA (1)...(19): siRNA sense strand
agaaccugcucaucaacga

SEQ ID NO: 745562 - RNA, 19 nt, Homo sapiens
  misc_RNA (1)...(19): siRNA sense strand
aacuggagaccuacauuaa

SEQ ID NO: 745563 - RNA, 19 nt, Homo sapiens
  misc_RNA (1)...(19): siRNA sense strand
uuccauauuugcacuaaag

SEQ ID NO: 745564 - RNA, 19 nt, Homo sapiens
  misc_RNA (1)...(19): siRNA sense strand
acgugaaacuguuccuguu

SEQ ID NO: 745565 - RNA, 19 nt, Homo sapiens
  misc_RNA (1)...(19): siRNA sense strand
gucccucacccuugucuuu

SEQ ID NO: 745566 - RNA, 19 nt, Homo sapiens
  misc_RNA (1)...(19): siRNA sense strand
ccagugagagugcguaugc

SEQ ID NO: 745567 - RNA, 19 nt, Homo sapiens
  misc_RNA (1)...(19): siRNA sense strand
gcucaaggaccucaaacac

SEQ ID NO: 745568 - RNA, 19 nt, Homo sapiens
  misc_RNA (1)...(19): siRNA sense strand
aagugucccugcucaagga

SEQ ID NO: 745569 - RNA, 19 nt, Homo sapiens
  misc_RNA (1)...(19): siRNA sense strand
ucaacaagcgccuaucacu

SEQ ID NO: 745570 - RNA, 19 nt, Homo sapiens
  misc_RNA (1)...(19): siRNA sense strand
accaagcuguugcaguuug

SEQ ID NO: 745571 - RNA, 19 nt, Homo sapiens
  misc_RNA (1)...(19): siRNA sense strand
gcaaaagcaagcucacaga

SEQ ID NO: 745572 - RNA, 19 nt, Homo sapiens
  misc_RNA (1)...(19): siRNA sense strand
ccacggacuacuccacuca

SEQ ID NO: 745573 - RNA, 19 nt, Homo sapiens
  misc_RNA (1)...(19): siRNA sense strand
aacaagcgccuaucacuac

SEQ ID NO: 745574 - RNA, 19 nt, Homo sapiens
  misc_RNA (1)...(19): siRNA sense strand
caagcucacagacaaccuu

SEQ ID NO: 745575 - RNA, 19 nt, Homo sapiens
  misc_RNA (1)...(19): siRNA sense strand
gacaucaacaagcgccuau

SEQ ID NO: 745576 - RNA, 19 nt, Homo sapiens
  misc_RNA (1)...(19): siRNA sense strand
uauuugcacuaaaggagau

SEQ ID NO: 745577 - RNA, 19 nt, Homo sapiens
  misc_RNA (1)...(19): siRNA sense strand
ggagcggauccacaaacuu

SEQ ID NO: 745578 - RNA, 19 nt, Homo sapiens
  misc_RNA (1)...(19): siRNA sense strand
cuggagaccuacauuaagc

SEQ ID NO: 745579 - RNA, 19 nt, Homo sapiens
  misc_RNA (1)...(19): siRNA sense strand
aaagacauacuccaaugag

SEQ ID NO: 745580 - RNA, 19 nt, Homo sapiens
  misc_RNA (1)...(19): siRNA sense strand
ggagagugaccaggcuuca

SEQ ID NO: 745581 - RNA, 19 nt, Homo sapiens
  misc_RNA (1)...(19): siRNA sense strand
caagucaaucccaacaaag

SEQ ID NO: 745582 - RNA, 19 nt, Homo sapiens
  misc_RNA (1)...(19): siRNA sense strand
aagucaaucccaacaaaga

SEQ ID NO: 745583 - RNA, 19 nt, Homo sapiens
  misc_RNA (1)...(19): siRNA sense strand
caaucccaacaaagacaua

SEQ ID NO: 745584 - RNA, 19 nt, Homo sapiens
  misc_RNA (1)...(19): siRNA sense strand
ggacaaacaugcaacauug

SEQ ID NO: 745585 - RNA, 19 nt, Homo sapiens
  misc_RNA (1)...(19): siRNA sense strand
gcaaguggaugucaagaug

SEQ ID NO: 745586 - RNA, 19 nt, Homo sapiens
  misc_RNA (1)...(19): siRNA sense strand
ccaaagacaucguggagaa

SEQ ID NO: 745587 - RNA, 19 nt, Homo sapiens
  misc_RNA (1)...(19): siRNA sense strand
caacagugcuucuccaaag

SEQ ID NO: 745588 - RNA, 19 nt, Homo sapiens
  misc_RNA (1)...(19): siRNA sense strand
gcaggaaggcuauggcuuu

SEQ ID NO: 745589 - RNA, 19 nt, Homo sapiens
  misc_RNA (1)...(19): siRNA sense strand
gaccaaaccugugcuuaug

SEQ ID NO: 745590 - RNA, 19 nt, Homo sapiens
  misc_RNA (1)...(19): siRNA sense strand
gaugaucccuacucaagug

SEQ ID NO: 745591 - RNA, 19 nt, Homo sapiens
  misc_RNA (1)...(19): siRNA sense strand
cggcagcacuggaccauga

SEQ ID NO: 745592 - RNA, 19 nt, Homo sapiens
  misc_RNA (1)...(19): siRNA sense strand
caaguuaacugaggacaag

SEQ ID NO: 745593 - RNA, 19 nt, Homo sapiens
  misc_RNA (1)...(19): siRNA sense strand
ucaagcaauucaacaaguu

SEQ ID NO: 745594 - RNA, 19 nt, Homo sapiens
  misc_RNA (1)...(19): siRNA sense strand
gagaugaucccuacucaag

SEQ ID NO: 745595 - RNA, 19 nt, Homo sapiens
  misc_RNA (1)...(19): siRNA sense strand
gccgugugcuggucaauga

SEQ ID NO: 745596 - RNA, 19 nt, Homo sapiens
  misc_RNA (1)...(19): siRNA sense strand
caagcaauucaacaaguua

SEQ ID NO: 745597 - RNA, 19 nt, Homo sapiens
  misc_RNA (1)...(19): siRNA sense strand
gcauggccauugucaagga

SEQ ID NO: 745598 - RNA, 19 nt, Homo sapiens
  misc_RNA (1)...(19): siRNA sense strand
ugaccaagauccagaagca

SEQ ID NO: 745599 - RNA, 19 nt, Homo sapiens
  misc_RNA (1)...(19): siRNA sense strand
gcggaaaugugagcgugua

SEQ ID NO: 745600 - RNA, 19 nt, Homo sapiens
  misc_RNA (1)...(19): siRNA sense strand
ggaugacagugccaccauu

SEQ ID NO: 745601 - RNA, 19 nt, Homo sapiens
  misc_RNA (1)...(19): siRNA sense strand
gcacuagcugugaggauaa

SEQ ID NO: 745602 - RNA, 19 nt, Homo sapiens
  misc_RNA (1)...(19): siRNA sense strand
ucaugaaggagcugaauaa

SEQ ID NO: 745603 - RNA, 19 nt, Homo sapiens
  misc_RNA (1)...(19): siRNA sense strand
gacggaggcugccauugga

SEQ ID NO: 745604 - RNA, 19 nt, Homo sapiens
  misc_RNA (1)...(19): siRNA sense strand
aagacaucguggagaauua

SEQ ID NO: 745605 - RNA, 19 nt, Homo sapiens
  misc_RNA (1)...(19): siRNA sense strand
gaugacagugccaccauuu

SEQ ID NO: 745606 - RNA, 19 nt, Homo sapiens
  misc_RNA (1)...(19): siRNA sense strand
acugaggacuacaaccuua

SEQ ID NO: 745607 - RNA, 19 nt, Homo sapiens
  misc_RNA (1)...(19): siRNA sense strand
gggacaaacaugcaacauu

SEQ ID NO: 745608 - RNA, 19 nt, Homo sapiens
  misc_RNA (1)...(19): siRNA sense strand
ggucaaugaugcccagaag

SEQ ID NO: 745609 - RNA, 19 nt, Homo sapiens
  misc_RNA (1)...(19): siRNA sense strand
gaagagcaccaaggagguu

SEQ ID NO: 745610 - RNA, 19 nt, Homo sapiens
  misc_RNA (1)...(19): siRNA sense strand
ccaaccagcggaaauguga

SEQ ID NO: 745611 - RNA, 19 nt, Homo sapiens
  misc_RNA (1)...(19): siRNA sense strand
gcaacagugcuucuccaaa

SEQ ID NO: 745612 - RNA, 19 nt, Homo sapiens
  misc_RNA (1)...(19): siRNA sense strand
ggccuguagugccugcuua

SEQ ID NO: 745613 - RNA, 19 nt, Homo sapiens
  misc_RNA (1)...(19): siRNA sense strand
gaaaugugagcguguacug

SEQ ID NO: 745614 - RNA, 19 nt, Homo sapiens
  misc_RNA (1)...(19): siRNA sense strand
gaacguacugucuauugca

SEQ ID NO: 745615 - RNA, 19 nt, Homo sapiens
  misc_RNA (1)...(19): siRNA sense strand
gcaacguacacaagcauga

SEQ ID NO: 745616 - RNA, 19 nt, Homo sapiens
  misc_RNA (1)...(19): siRNA sense strand
caagagugccgaggccuuu

SEQ ID NO: 745617 - RNA, 19 nt, Homo sapiens
  misc_RNA (1)...(19): siRNA sense strand
caggaaggcuauggcuuug

SEQ ID NO: 745618 - RNA, 19 nt, Homo sapiens
  misc_RNA (1)...(19): siRNA sense strand
caggcgaucugguuaugug

SEQ ID NO: 745619 - RNA, 19 nt, Homo sapiens
  misc_RNA (1)...(19): siRNA sense strand
ugcacuagcugugaggaua

SEQ ID NO: 745620 - RNA, 19 nt, Homo sapiens
  misc_RNA (1)...(19): siRNA sense strand
gagcacauucugcgcuuug

SEQ ID NO: 745621 - RNA, 19 nt, Homo sapiens
  misc_RNA (1)...(19): siRNA sense strand
ccacaaggaccaccaguac

SEQ ID NO: 745622 - RNA, 19 nt, Homo sapiens
  misc_RNA (1)...(19): siRNA sense strand
gugaacguacugucuauug

SEQ ID NO: 745623 - RNA, 19 nt, Homo sapiens
  misc_RNA (1)...(19): siRNA sense strand
gaggugagcggccuuaugc

SEQ ID NO: 745624 - RNA, 19 nt, Homo sapiens
  misc_RNA (1)...(19): siRNA sense strand
ccaccaguaccaguucuua

SEQ ID NO: 745625 - RNA, 19 nt, Homo sapiens
  misc_RNA (1)...(19): siRNA sense strand
ccaggugucugacguacag

SEQ ID NO: 745626 - RNA, 19 nt, Homo sapiens
  misc_RNA (1)...(19): siRNA sense strand
gugcaaccagugugaguuu

SEQ ID NO: 745627 - RNA, 19 nt, Homo sapiens
  misc_RNA (1)...(19): siRNA sense strand
gagaccaaaccugugcuua

SEQ ID NO: 745628 - RNA, 19 nt, Homo sapiens
  misc_RNA (1)...(19): siRNA sense strand
cguggagaauuauuucaug

SEQ ID NO: 745629 - RNA, 19 nt, Homo sapiens
  misc_RNA (1)...(19): siRNA sense strand
caacacagcccuuuugcuu

SEQ ID NO: 745630 - RNA, 19 nt, Homo sapiens
  misc_RNA (1)...(19): siRNA sense strand
gacaacaacacagcccuuu

SEQ ID NO: 745631 - RNA, 19 nt, Homo sapiens
  misc_RNA (1)...(19): siRNA sense strand
caacguacacaagcaugaa

SEQ ID NO: 745632 - RNA, 19 nt, Homo sapiens
  misc_RNA (1)...(19): siRNA sense strand
gcgaucugguuaugugcaa

SEQ ID NO: 745633 - RNA, 19 nt, Homo sapiens
  misc_RNA (1)...(19): siRNA sense strand
agaccaaaccugugcuuau

SEQ ID NO: 745634 - RNA, 19 nt, Homo sapiens
  misc_RNA (1)...(19): siRNA sense strand
ggagacggaggcugccauu

SEQ ID NO: 745635 - RNA, 19 nt, Homo sapiens
  misc_RNA (1)...(19): siRNA sense strand
cucaaugccuggaccaaga

SEQ ID NO: 745636 - RNA, 19 nt, Homo sapiens
  misc_RNA (1)...(19): siRNA sense strand
ccacauggcgagaugaagu

SEQ ID NO: 745637 - RNA, 19 nt, Homo sapiens
  misc_RNA (1)...(19): siRNA sense strand
ggagcacauucugcgcuuu

SEQ ID NO: 745638 - RNA, 19 nt, Homo sapiens
  misc_RNA (1)...(19): siRNA sense strand
ugugagagcugugauacuc

SEQ ID NO: 745639 - RNA, 19 nt, Homo sapiens
  misc_RNA (1)...(19): siRNA sense strand
ugagggcccugagaccaaa

SEQ ID NO: 745640 - RNA, 19 nt, Homo sapiens
  misc_RNA (1)...(19): siRNA sense strand
gcagagcguccuggcacua

SEQ ID NO: 745641 - RNA, 19 nt, Homo sapiens
  misc_RNA (1)...(19): siRNA sense strand
aaagacaucguggagaauu

SEQ ID NO: 745642 - RNA, 19 nt, Homo sapiens
  misc_RNA (1)...(19): siRNA sense strand
gcaagcuccuggccucacu

SEQ ID NO: 745643 - RNA, 19 nt, Homo sapiens
  misc_RNA (1)...(19): siRNA sense strand
cgaggccuuuggcaagauu

SEQ ID NO: 745644 - RNA, 19 nt, Homo sapiens
  misc_RNA (1)...(19): siRNA sense strand
gccgaggccuuuggcaaga

SEQ ID NO: 745645 - RNA, 19 nt, Homo sapiens
  misc_RNA (1)...(19): siRNA sense strand
ucuaagaaguugaucuacu

SEQ ID NO: 745646 - RNA, 19 nt, Homo sapiens
  misc_RNA (1)...(19): siRNA sense strand
ggagagugacaacaacaca

SEQ ID NO: 745647 - RNA, 19 nt, Homo sapiens
  misc_RNA (1)...(19): siRNA sense strand
caacaacacagcccuuuug

SEQ ID NO: 745648 - RNA, 19 nt, Homo sapiens
  misc_RNA (1)...(19): siRNA sense strand
ucaaugaugcccagaaggu

SEQ ID NO: 745649 - RNA, 19 nt, Homo sapiens
  misc_RNA (1)...(19): siRNA sense strand
ggccgcauguucaagcaau

SEQ ID NO: 745650 - RNA, 19 nt, Homo sapiens
  misc_RNA (1)...(19): siRNA sense strand
ggagaugaucccuacucaa

SEQ ID NO: 745651 - RNA, 19 nt, Homo sapiens
  misc_RNA (1)...(19): siRNA sense strand
uacugucuauugcaacgua

SEQ ID NO: 745652 - RNA, 19 nt, Homo sapiens
  misc_RNA (1)...(19): siRNA sense strand
gaggacuacaaccuuauug

SEQ ID NO: 745653 - RNA, 19 nt, Homo sapiens
  misc_RNA (1)...(19): siRNA sense strand
ccaugugucaggugugaaa

SEQ ID NO: 745654 - RNA, 19 nt, Homo sapiens
  misc_RNA (1)...(19): siRNA sense strand
ggaccaccaguaccaguuc

SEQ ID NO: 745655 - RNA, 19 nt, Homo sapiens
  misc_RNA (1)...(19): siRNA sense strand
gaucaugaaggagcugaau

SEQ ID NO: 745656 - RNA, 19 nt, Homo sapiens
  misc_RNA (1)...(19): siRNA sense strand
ggaggugcaggaaggcuau

SEQ ID NO: 745657 - RNA, 19 nt, Homo sapiens
  misc_RNA (1)...(19): siRNA sense strand
gaccauacugugcgcucua

SEQ ID NO: 745658 - RNA, 19 nt, Homo sapiens
  misc_RNA (1)...(19): siRNA sense strand
acagaagcgugugcaagug

SEQ ID NO: 745659 - RNA, 19 nt, Homo sapiens
  misc_RNA (1)...(19): siRNA sense strand
guguacugcuggcccuauu

SEQ ID NO: 745660 - RNA, 19 nt, Homo sapiens
  misc_RNA (1)...(19): siRNA sense strand
acacagcccuuuugcuuuc

SEQ ID NO: 745661 - RNA, 19 nt, Homo sapiens
  misc_RNA (1)...(19): siRNA sense strand
ggaguuugcccaggaugug

SEQ ID NO: 745662 - RNA, 19 nt, Homo sapiens
  misc_RNA (1)...(19): siRNA sense strand
ugaacguacugucuauugc

SEQ ID NO: 745663 - RNA, 19 nt, Homo sapiens
  misc_RNA (1)...(19): siRNA sense strand
gcaauucaacaaguuaacu

SEQ ID NO: 745664 - RNA, 19 nt, Homo sapiens
  misc_RNA (1)...(19): siRNA sense strand
aacagugcuucuccaaaga

SEQ ID NO: 745665 - RNA, 19 nt, Homo sapiens
  misc_RNA (1)...(19): siRNA sense strand
agacggaggcugccauugg

SEQ ID NO: 745666 - RNA, 19 nt, Homo sapiens
  misc_RNA (1)...(19): siRNA sense strand
caucguggagaauuauuuc

SEQ ID NO: 745667 - RNA, 19 nt, Homo sapiens
  misc_RNA (1)...(19): siRNA sense strand
gcugcucacucugccaugu

SEQ ID NO: 745668 - RNA, 19 nt, Homo sapiens
  misc_RNA (1)...(19): siRNA sense strand
ugaggacuacaaccuuauu

SEQ ID NO: 745669 - RNA, 19 nt, Homo sapiens
  misc_RNA (1)...(19): siRNA sense strand
gcaccaggagcacauucug

SEQ ID NO: 745670 - RNA, 19 nt, Homo sapiens
  misc_RNA (1)...(19): siRNA sense strand
gaagcaccaggagcacauu

SEQ ID NO: 745671 - RNA, 19 nt, Homo sapiens
  misc_RNA (1)...(19): siRNA sense strand
ccagcucaaugcccacaag

SEQ ID NO: 745672 - RNA, 19 nt, Homo sapiens
  misc_RNA (1)...(19): siRNA sense strand
gaaguacaccaaggaccau

SEQ ID NO: 745673 - RNA, 19 nt, Homo sapiens
  misc_RNA (1)...(19): siRNA sense strand
guaccacugaggacuacaa

SEQ ID NO: 745674 - RNA, 19 nt, Homo sapiens
  misc_RNA (1)...(19): siRNA sense strand
cagagcguccuggcacuaa

SEQ ID NO: 745675 - RNA, 19 nt, Homo sapiens
  misc_RNA (1)...(19): siRNA sense strand
gauggugaacguacugucu

SEQ ID NO: 745676 - RNA, 19 nt, Homo sapiens
  misc_RNA (1)...(19): siRNA sense strand
uacagaagcgugugcaagu

SEQ ID NO: 745677 - RNA, 19 nt, Homo sapiens
  misc_RNA (1)...(19): siRNA sense strand
uagaggaugcagugaggaa

SEQ ID NO: 745678 - RNA, 19 nt, Homo sapiens
  misc_RNA (1)...(19): siRNA sense strand
caauucaacaaguuaacug

SEQ ID NO: 745679 - RNA, 19 nt, Homo sapiens
  misc_RNA (1)...(19): siRNA sense strand
aggagaugaucccuacuca

SEQ ID NO: 745680 - RNA, 19 nt, Homo sapiens
  misc_RNA (1)...(19): siRNA sense strand
acaccaaggaccauacugu

SEQ ID NO: 745681 - RNA, 19 nt, Homo sapiens
  misc_RNA (1)...(19): siRNA sense strand
caaagacaucguggagaau

SEQ ID NO: 745682 - RNA, 19 nt, Homo sapiens
  misc_RNA (1)...(19): siRNA sense strand
gagguucgcagcucaaucc

SEQ ID NO: 745683 - RNA, 19 nt, Homo sapiens
  misc_RNA (1)...(19): siRNA sense strand
gaauaugccucuacuguga

SEQ ID NO: 745684 - RNA, 19 nt, Homo sapiens
  misc_RNA (1)...(19): siRNA sense strand
gaauuacucugccucuaaa

SEQ ID NO: 745685 - RNA, 19 nt, Homo sapiens
  misc_RNA (1)...(19): siRNA sense strand
gugaaacgauugcugagua

SEQ ID NO: 745686 - RNA, 19 nt, Homo sapiens
  misc_RNA (1)...(19): siRNA sense strand
ggagagccaguuuaucuua

SEQ ID NO: 745687 - RNA, 19 nt, Homo sapiens
  misc_RNA (1)...(19): siRNA sense strand
ggaauuacucugccucuaa

SEQ ID NO: 745688 - RNA, 19 nt, Homo sapiens
  misc_RNA (1)...(19): siRNA sense strand
ggaggaagaucuggagaga

SEQ ID NO: 745689 - RNA, 19 nt, Homo sapiens
  misc_RNA (1)...(19): siRNA sense strand
uagaaucacuccuagagaa

SEQ ID NO: 745690 - RNA, 19 nt, Homo sapiens
  misc_RNA (1)...(19): siRNA sense strand
gcagugaggaugaagauga

SEQ ID NO: 745691 - RNA, 19 nt, Homo sapiens
  misc_RNA (1)...(19): siRNA sense strand
gcaagaggagcuagaauca

SEQ ID NO: 745692 - RNA, 19 nt, Homo sapiens
  misc_RNA (1)...(19): siRNA sense strand
caagcuaaaugaaucagau

SEQ ID NO: 745693 - RNA, 19 nt, Homo sapiens
  misc_RNA (1)...(19): siRNA sense strand
acaagaggaucucaucaug

SEQ ID NO: 745694 - RNA, 19 nt, Homo sapiens
  misc_RNA (1)...(19): siRNA sense strand
gaagcagauugacaacaug

SEQ ID NO: 745695 - RNA, 19 nt, Homo sapiens
  misc_RNA (1)...(19): siRNA sense strand
gaauucagaagcagauuga

SEQ ID NO: 745696 - RNA, 19 nt, Homo sapiens
  misc_RNA (1)...(19): siRNA sense strand
ggauaaggacaaagagaaa

SEQ ID NO: 745697 - RNA, 19 nt, Homo sapiens
  misc_RNA (1)...(19): siRNA sense strand
aagagaagguuccggaaga

SEQ ID NO: 745698 - RNA, 19 nt, Homo sapiens
  misc_RNA (1)...(19): siRNA sense strand
guagaccugcccuguguua

SEQ ID NO: 745699 - RNA, 19 nt, Homo sapiens
  misc_RNA (1)...(19): siRNA sense strand
gcagauugacaacaugaaa

SEQ ID NO: 745700 - RNA, 19 nt, Homo sapiens
  misc_RNA (1)...(19): siRNA sense strand
ggaagacagcaaagaagaa

SEQ ID NO: 745701 - RNA, 19 nt, Homo sapiens
  misc_RNA (1)...(19): siRNA sense strand
uaaagaaugucaggaagag

SEQ ID NO: 745702 - RNA, 19 nt, Homo sapiens
  misc_RNA (1)...(19): siRNA sense strand
agagacagcuacaggacaa

SEQ ID NO: 745703 - RNA, 19 nt, Homo sapiens
  misc_RNA (1)...(19): siRNA sense strand
agaagcagauugacaacau

SEQ ID NO: 745704 - RNA, 19 nt, Homo sapiens
  misc_RNA (1)...(19): siRNA sense strand
gagaagggcaguacagucu

SEQ ID NO: 745705 - RNA, 19 nt, Homo sapiens
  misc_RNA (1)...(19): siRNA sense strand
aggaagaucuggagagaca

SEQ ID NO: 745706 - RNA, 19 nt, Homo sapiens
  misc_RNA (1)...(19): siRNA sense strand
gcaguacagucuggucaug

SEQ ID NO: 745707 - RNA, 19 nt, Homo sapiens
  misc_RNA (1)...(19): siRNA sense strand
cagaauaugccucuacugu

SEQ ID NO: 745708 - RNA, 19 nt, Homo sapiens
  misc_RNA (1)...(19): siRNA sense strand
uaguagaccugcccugugu

SEQ ID NO: 745709 - RNA, 19 nt, Homo sapiens
  misc_RNA (1)...(19): siRNA sense strand
uggaugagcucaaacaaaa

SEQ ID NO: 745710 - RNA, 19 nt, Homo sapiens
  misc_RNA (1)...(19): siRNA sense strand
gaaaaucaaggccuggaua

SEQ ID NO: 745711 - RNA, 19 nt, Homo sapiens
  misc_RNA (1)...(19): siRNA sense strand
ggacaagcuaaaugaauca

SEQ ID NO: 745712 - RNA, 19 nt, Homo sapiens
  misc_RNA (1)...(19): siRNA sense strand
aaucacuccuagagaagua

SEQ ID NO: 745713 - RNA, 19 nt, Homo sapiens
  misc_RNA (1)...(19): siRNA sense strand
ggaauucagaagcagauug

SEQ ID NO: 745714 - RNA, 19 nt, Homo sapiens
  misc_RNA (1)...(19): siRNA sense strand
gaguacagaugcugaagcu

SEQ ID NO: 745715 - RNA, 19 nt, Homo sapiens
  misc_RNA (1)...(19): siRNA sense strand
aaggacagacugacaauug

SEQ ID NO: 745716 - RNA, 19 nt, Homo sapiens
  misc_RNA (1)...(19): siRNA sense strand
gaaaggcaagcuccaagag

SEQ ID NO: 745717 - RNA, 19 nt, Homo sapiens
  misc_RNA (1)...(19): siRNA sense strand
gcuaaaugaaucagaugaa

SEQ ID NO: 745718 - RNA, 19 nt, Homo sapiens
  misc_RNA (1)...(19): siRNA sense strand
gaccugcccuguguuaugg

SEQ ID NO: 745719 - RNA, 19 nt, Homo sapiens
  misc_RNA (1)...(19): siRNA sense strand
cagacugacaauugaguua

SEQ ID NO: 745720 - RNA, 19 nt, Homo sapiens
  misc_RNA (1)...(19): siRNA sense strand
gauccuaaagcaagcaaga

SEQ ID NO: 745721 - RNA, 19 nt, Homo sapiens
  misc_RNA (1)...(19): siRNA sense strand
gaaacaaaggaggcagaaa

SEQ ID NO: 745722 - RNA, 19 nt, Homo sapiens
  misc_RNA (1)...(19): siRNA sense strand
cagcagcagugaggaugaa

SEQ ID NO: 745723 - RNA, 19 nt, Homo sapiens
  misc_RNA (1)...(19): siRNA sense strand
aagaggagcuagaaucacu

SEQ ID NO: 745724 - RNA, 19 nt, Homo sapiens
  misc_RNA (1)...(19): siRNA sense strand
gagagccaguuuaucuuac

SEQ ID NO: 745725 - RNA, 19 nt, Homo sapiens
  misc_RNA (1)...(19): siRNA sense strand
aggacagacugacaauuga

SEQ ID NO: 745726 - RNA, 19 nt, Homo sapiens
  misc_RNA (1)...(19): siRNA sense strand
cuacaggacaagcuaaaug

SEQ ID NO: 745727 - RNA, 19 nt, Homo sapiens
  misc_RNA (1)...(19): siRNA sense strand
gacaagaggaucucaucau

SEQ ID NO: 745728 - RNA, 19 nt, Homo sapiens
  misc_RNA (1)...(19): siRNA sense strand
cuaaagaaugucaggaaga

SEQ ID NO: 745729 - RNA, 19 nt, Homo sapiens
  misc_RNA (1)...(19): siRNA sense strand
gaaaaucuggcucucaaga

SEQ ID NO: 745730 - RNA, 19 nt, Homo sapiens
  misc_RNA (1)...(19): siRNA sense strand
aggacaagcuaaaugaauc

SEQ ID NO: 745731 - RNA, 19 nt, Homo sapiens
  misc_RNA (1)...(19): siRNA sense strand
gauaucucuucuccaggaa

SEQ ID NO: 745732 - RNA, 19 nt, Homo sapiens
  misc_RNA (1)...(19): siRNA sense strand
agaugaugcuccucacgaa

SEQ ID NO: 745733 - RNA, 19 nt, Homo sapiens
  misc_RNA (1)...(19): siRNA sense strand
aguacucggugggaaauaa

SEQ ID NO: 745734 - RNA, 19 nt, Homo sapiens
  misc_RNA (1)...(19): siRNA sense strand
gaugaacagcaccaggaaa

SEQ ID NO: 745735 - RNA, 19 nt, Homo sapiens
  misc_RNA (1)...(19): siRNA sense strand
aaacaaaggaggcagaaaa

SEQ ID NO: 745736 - RNA, 19 nt, Homo sapiens
  misc_RNA (1)...(19): siRNA sense strand
caaaggaggcagaaaauca

SEQ ID NO: 745737 - RNA, 19 nt, Homo sapiens
  misc_RNA (1)...(19): siRNA sense strand
aagaaugucaggaagagaa

SEQ ID NO: 745738 - RNA, 19 nt, Homo sapiens
  misc_RNA (1)...(19): siRNA sense strand
gaacagcaccaggaaaaug

SEQ ID NO: 745739 - RNA, 19 nt, Homo sapiens
  misc_RNA (1)...(19): siRNA sense strand
cuaaaugaaucagaugaac

SEQ ID NO: 745740 - RNA, 19 nt, Homo sapiens
  misc_RNA (1)...(19): siRNA sense strand
uacaggacaagcuaaauga

SEQ ID NO: 745741 - RNA, 19 nt, Homo sapiens
  misc_RNA (1)...(19): siRNA sense strand
uucgggagauauucaauga

SEQ ID NO: 745742 - RNA, 19 nt, Homo sapiens
  misc_RNA (1)...(19): siRNA sense strand
gagcuucgggagauauuca

SEQ ID NO: 745743 - RNA, 19 nt, Homo sapiens
  misc_RNA (1)...(19): siRNA sense strand
uaucucuucuccaggaaug

SEQ ID NO: 745744 - RNA, 19 nt, Homo sapiens
  misc_RNA (1)...(19): siRNA sense strand
ugaaacgauugcugaguac

SEQ ID NO: 745745 - RNA, 19 nt, Homo sapiens
  misc_RNA (1)...(19): siRNA sense strand
uuacucugccucuaaagaa

SEQ ID NO: 745746 - RNA, 19 nt, Homo sapiens
  misc_RNA (1)...(19): siRNA sense strand
ugaaaggcaagcuccaaga

SEQ ID NO: 745747 - RNA, 19 nt, Homo sapiens
  misc_RNA (1)...(19): siRNA sense strand
gacugacaauugaguuaca

SEQ ID NO: 745748 - RNA, 19 nt, Homo sapiens
  misc_RNA (1)...(19): siRNA sense strand
cggaagacagcaaagaaga

SEQ ID NO: 745749 - RNA, 19 nt, Homo sapiens
  misc_RNA (1)...(19): siRNA sense strand
uagcacugauccuaaagca

SEQ ID NO: 745750 - RNA, 19 nt, Homo sapiens
  misc_RNA (1)...(19): siRNA sense strand
aaaucuggcucucaagaac

SEQ ID NO: 745751 - RNA, 19 nt, Homo sapiens
  misc_RNA (1)...(19): siRNA sense strand
gaaaaugaaggaaccaauc

SEQ ID NO: 745752 - RNA, 19 nt, Homo sapiens
  misc_RNA (1)...(19): siRNA sense strand
caggacaagcuaaaugaau

SEQ ID NO: 745753 - RNA, 19 nt, Homo sapiens
  misc_RNA (1)...(19): siRNA sense strand
uaucuggaaccacggaauu

SEQ ID NO: 745754 - RNA, 19 nt, Homo sapiens
  misc_RNA (1)...(19): siRNA sense strand
cggaauuacucugccucua

SEQ ID NO: 745755 - RNA, 19 nt, Homo sapiens
  misc_RNA (1)...(19): siRNA sense strand
uccauuggccucaaaauua

SEQ ID NO: 745756 - RNA, 19 nt, Homo sapiens
  misc_RNA (1)...(19): siRNA sense strand
gcagcagcagugaggauga

SEQ ID NO: 745757 - RNA, 19 nt, Homo sapiens
  misc_RNA (1)...(19): siRNA sense strand
uuacaagacagcugauauc

SEQ ID NO: 745758 - RNA, 19 nt, Homo sapiens
  misc_RNA (1)...(19): siRNA sense strand
auuagaacaugaugagcuu

SEQ ID NO: 745759 - RNA, 19 nt, Homo sapiens
  misc_RNA (1)...(19): siRNA sense strand
uguacuggaugagcucaaa

SEQ ID NO: 745760 - RNA, 19 nt, Homo sapiens
  misc_RNA (1)...(19): siRNA sense strand
cgacaagaggaucucauca

SEQ ID NO: 745761 - RNA, 19 nt, Homo sapiens
  misc_RNA (1)...(19): siRNA sense strand
ggacagacugacaauugag

SEQ ID NO: 745762 - RNA, 19 nt, Homo sapiens
  misc_RNA (1)...(19): siRNA sense strand
ugcuagcacugauccuaaa

SEQ ID NO: 745763 - RNA, 19 nt, Homo sapiens
  misc_RNA (1)...(19): siRNA sense strand
aaaggcaagcuccaagaga

SEQ ID NO: 745764 - RNA, 19 nt, Homo sapiens
  misc_RNA (1)...(19): siRNA sense strand
ugaugagcuucgggagaua

SEQ ID NO: 745765 - RNA, 19 nt, Homo sapiens
  misc_RNA (1)...(19): siRNA sense strand
aaucaaggccuggauaucu

SEQ ID NO: 745766 - RNA, 19 nt, Homo sapiens
  misc_RNA (1)...(19): siRNA sense strand
guuaguacucggugggaaa

SEQ ID NO: 745767 - RNA, 19 nt, Homo sapiens
  misc_RNA (1)...(19): siRNA sense strand
augcuuguauccacaguug

SEQ ID NO: 745768 - RNA, 19 nt, Homo sapiens
  misc_RNA (1)...(19): siRNA sense strand
aggauaaggacaaagagaa

SEQ ID NO: 745769 - RNA, 19 nt, Homo sapiens
  misc_RNA (1)...(19): siRNA sense strand
caaggacagacugacaauu

SEQ ID NO: 745770 - RNA, 19 nt, Homo sapiens
  misc_RNA (1)...(19): siRNA sense strand
ucauugacacggaggaaga

SEQ ID NO: 745771 - RNA, 19 nt, Homo sapiens
  misc_RNA (1)...(19): siRNA sense strand
gcagcagugaggaugaaga

SEQ ID NO: 745772 - RNA, 19 nt, Homo sapiens
  misc_RNA (1)...(19): siRNA sense strand
ccugaugggcgucauggaa

SEQ ID NO: 745773 - RNA, 19 nt, Homo sapiens
  misc_RNA (1)...(19): siRNA sense strand
gaugcugaagcuguuagua

SEQ ID NO: 745774 - RNA, 19 nt, Homo sapiens
  misc_RNA (1)...(19): siRNA sense strand
gaaucacuccuagagaagu

SEQ ID NO: 745775 - RNA, 19 nt, Homo sapiens
  misc_RNA (1)...(19): siRNA sense strand
ggacagggcaaaacgacaa

SEQ ID NO: 745776 - RNA, 19 nt, Homo sapiens
  misc_RNA (1)...(19): siRNA sense strand
gaugagcuucgggagauau

SEQ ID NO: 745777 - RNA, 19 nt, Homo sapiens
  misc_RNA (1)...(19): siRNA sense strand
gucauggaaucgucagagu

SEQ ID NO: 745778 - RNA, 19 nt, Homo sapiens
  misc_RNA (1)...(19): siRNA sense strand
ucaaggacagacugacaau

SEQ ID NO: 745779 - RNA, 19 nt, Homo sapiens
  misc_RNA (1)...(19): siRNA sense strand
ugaugggcgucauggaauc

SEQ ID NO: 745780 - RNA, 19 nt, Homo sapiens
  misc_RNA (1)...(19): siRNA sense strand
agaccugcccuguguuaug

SEQ ID NO: 745781 - RNA, 19 nt, Homo sapiens
  misc_RNA (1)...(19): siRNA sense strand
guacucggugggaaauaau

SEQ ID NO: 745782 - RNA, 19 nt, Homo sapiens
  misc_RNA (1)...(19): siRNA sense strand
aacgauugcugaguacaga

SEQ ID NO: 745783 - RNA, 19 nt, Homo sapiens
  misc_RNA (1)...(19): siRNA sense strand
gaacagguauguacuaguu

SEQ ID NO: 745784 - RNA, 19 nt, Homo sapiens
  misc_RNA (1)...(19): siRNA sense strand
ggacaaaccacauuaguaa

SEQ ID NO: 745785 - RNA, 19 nt, Homo sapiens
  misc_RNA (1)...(19): siRNA sense strand
ggaaagcaguugcauugua

SEQ ID NO: 745786 - RNA, 19 nt, Homo sapiens
  misc_RNA (1)...(19): siRNA sense strand
gcaagcgacugauuacuuu

SEQ ID NO: 745787 - RNA, 19 nt, Homo sapiens
  misc_RNA (1)...(19): siRNA sense strand
gaacauagguaucaguuuu

SEQ ID NO: 745788 - RNA, 19 nt, Homo sapiens
  misc_RNA (1)...(19): siRNA sense strand
ucacagagaucuacucaga

SEQ ID NO: 745789 - RNA, 19 nt, Homo sapiens
  misc_RNA (1)...(19): siRNA sense strand
ucagaaugcugccagaaua

SEQ ID NO: 745790 - RNA, 19 nt, Homo sapiens
  misc_RNA (1)...(19): siRNA sense strand
gaagauaaacucacagaga

SEQ ID NO: 745791 - RNA, 19 nt, Homo sapiens
  misc_RNA (1)...(19): siRNA sense strand
caagaacugugaaagguuu

SEQ ID NO: 745792 - RNA, 19 nt, Homo sapiens
  misc_RNA (1)...(19): siRNA sense strand
gaagaaagaagaugucuca

SEQ ID NO: 745793 - RNA, 19 nt, Homo sapiens
  misc_RNA (1)...(19): siRNA sense strand
ccagcaaguugguguaaua

SEQ ID NO: 745794 - RNA, 19 nt, Homo sapiens
  misc_RNA (1)...(19): siRNA sense strand
ggacucugaugaagacuuu

SEQ ID NO: 745795 - RNA, 19 nt, Homo sapiens
  misc_RNA (1)...(19): siRNA sense strand
agauagaccuuguggauaa

SEQ ID NO: 745796 - RNA, 19 nt, Homo sapiens
  misc_RNA (1)...(19): siRNA sense strand
ugaaacaugugauagauug

SEQ ID NO: 745797 - RNA, 19 nt, Homo sapiens
  misc_RNA (1)...(19): siRNA sense strand
gaggagugcuugcauguug

SEQ ID NO: 745798 - RNA, 19 nt, Homo sapiens
  misc_RNA (1)...(19): siRNA sense strand
gaaagcaguugcauuguac

SEQ ID NO: 745799 - RNA, 19 nt, Homo sapiens
  misc_RNA (1)...(19): siRNA sense strand
gcacaugcaacaacaagua

SEQ ID NO: 745800 - RNA, 19 nt, Homo sapiens
  misc_RNA (1)...(19): siRNA sense strand
gugaacgucuucugcuuua

SEQ ID NO: 745801 - RNA, 19 nt, Homo sapiens
  misc_RNA (1)...(19): siRNA sense strand
cgaagcacaucaaagagua

SEQ ID NO: 745802 - RNA, 19 nt, Homo sapiens
  misc_RNA (1)...(19): siRNA sense strand
ugugauagauugacaugua

SEQ ID NO: 745803 - RNA, 19 nt, Homo sapiens
  misc_RNA (1)...(19): siRNA sense strand
caaccaaccugcaucuaga

SEQ ID NO: 745804 - RNA, 19 nt, Homo sapiens
  misc_RNA (1)...(19): siRNA sense strand
gcaagaaccugggacugaa

SEQ ID NO: 745805 - RNA, 19 nt, Homo sapiens
  misc_RNA (1)...(19): siRNA sense strand
gaugcuggcucaaguaguu

SEQ ID NO: 745806 - RNA, 19 nt, Homo sapiens
  misc_RNA (1)...(19): siRNA sense strand
acaaguauaugcacagaaa

SEQ ID NO: 745807 - RNA, 19 nt, Homo sapiens
  misc_RNA (1)...(19): siRNA sense strand
gaaaaucucucuuacaaca

SEQ ID NO: 745808 - RNA, 19 nt, Homo sapiens
  misc_RNA (1)...(19): siRNA sense strand
ggaaagacagaugaaguua

SEQ ID NO: 745809 - RNA, 19 nt, Homo sapiens
  misc_RNA (1)...(19): siRNA sense strand
gaggagauggcaacaauaa

SEQ ID NO: 745810 - RNA, 19 nt, Homo sapiens
  misc_RNA (1)...(19): siRNA sense strand
gaugagagaccaguacaua

SEQ ID NO: 745811 - RNA, 19 nt, Homo sapiens
  misc_RNA (1)...(19): siRNA sense strand
ggaagaugcuggcucaagu

SEQ ID NO: 745812 - RNA, 19 nt, Homo sapiens
  misc_RNA (1)...(19): siRNA sense strand
gcaguugcauuguacuuug

SEQ ID NO: 745813 - RNA, 19 nt, Homo sapiens
  misc_RNA (1)...(19): siRNA sense strand
uaacaaacguguagaacag

SEQ ID NO: 745814 - RNA, 19 nt, Homo sapiens
  misc_RNA (1)...(19): siRNA sense strand
ugagagaccaguacauaua

SEQ ID NO: 745815 - RNA, 19 nt, Homo sapiens
  misc_RNA (1)...(19): siRNA sense strand
gcauuguacuuugaagaua

SEQ ID NO: 745816 - RNA, 19 nt, Homo sapiens
  misc_RNA (1)...(19): siRNA sense strand
gacugaagaugaaauaugu

SEQ ID NO: 745817 - RNA, 19 nt, Homo sapiens
  misc_RNA (1)...(19): siRNA sense strand
gaaaggaaaaucucucuua

SEQ ID NO: 745818 - RNA, 19 nt, Homo sapiens
  misc_RNA (1)...(19): siRNA sense strand
gcacagcacuacuauacag

SEQ ID NO: 745819 - RNA, 19 nt, Homo sapiens
  misc_RNA (1)...(19): siRNA sense strand
aaacugaaccugcagauau

SEQ ID NO: 745820 - RNA, 19 nt, Homo sapiens
  misc_RNA (1)...(19): siRNA sense strand
gcagacagauagaccuugu

SEQ ID NO: 745821 - RNA, 19 nt, Homo sapiens
  misc_RNA (1)...(19): siRNA sense strand
gagagaccaguacauauaa

SEQ ID NO: 745822 - RNA, 19 nt, Homo sapiens
  misc_RNA (1)...(19): siRNA sense strand
gaagaugcuggcucaagua

SEQ ID NO: 745823 - RNA, 19 nt, Homo sapiens
  misc_RNA (1)...(19): siRNA sense strand
uagagaauguuacaaagga

SEQ ID NO: 745824 - RNA, 19 nt, Homo sapiens
  misc_RNA (1)...(19): siRNA sense strand
uaacugaggacucugauga

SEQ ID NO: 745825 - RNA, 19 nt, Homo sapiens
  misc_RNA (1)...(19): siRNA sense strand
uaaagaugaugacccaaau

SEQ ID NO: 745826 - RNA, 19 nt, Homo sapiens
  misc_RNA (1)...(19): siRNA sense strand
aaugaaagcugcaaacagu

SEQ ID NO: 745827 - RNA, 19 nt, Homo sapiens
  misc_RNA (1)...(19): siRNA sense strand
guacacaacaccacaauca

SEQ ID NO: 745828 - RNA, 19 nt, Homo sapiens
  misc_RNA (1)...(19): siRNA sense strand
ggacugaagaugaaauaug

SEQ ID NO: 745829 - RNA, 19 nt, Homo sapiens
  misc_RNA (1)...(19): siRNA sense strand
cuacucaggugcagaauag

SEQ ID NO: 745830 - RNA, 19 nt, Homo sapiens
  misc_RNA (1)...(19): siRNA sense strand
gcacaggucggcaaggauu

SEQ ID NO: 745831 - RNA, 19 nt, Homo sapiens
  misc_RNA (1)...(19): siRNA sense strand
gcucaaguaguuuagauaa

SEQ ID NO: 745832 - RNA, 19 nt, Homo sapiens
  misc_RNA (1)...(19): siRNA sense strand
ccaagaaugcagacagaua

SEQ ID NO: 745833 - RNA, 19 nt, Homo sapiens
  misc_RNA (1)...(19): siRNA sense strand
gagcuaauccccucaguua

SEQ ID NO: 745834 - RNA, 19 nt, Homo sapiens
  misc_RNA (1)...(19): siRNA sense strand
ugaagcauguuaugaacuu

SEQ ID NO: 745835 - RNA, 19 nt, Homo sapiens
  misc_RNA (1)...(19): siRNA sense strand
ggagaguggcuauguaaga

SEQ ID NO: 745836 - RNA, 19 nt, Homo sapiens
  misc_RNA (1)...(19): siRNA sense strand
gaccaguacauauaaagua

SEQ ID NO: 745837 - RNA, 19 nt, Homo sapiens
  misc_RNA (1)...(19): siRNA sense strand
uacaacagcuagagaaugu

SEQ ID NO: 745838 - RNA, 19 nt, Homo sapiens
  misc_RNA (1)...(19): siRNA sense strand
gggacaaaccacauuagua

SEQ ID NO: 745839 - RNA, 19 nt, Homo sapiens
  misc_RNA (1)...(19): siRNA sense strand
caucagcaguugcaacaga

SEQ ID NO: 745840 - RNA, 19 nt, Homo sapiens
  misc_RNA (1)...(19): siRNA sense strand
caacaaguauaugcacaga

SEQ ID NO: 745841 - RNA, 19 nt, Homo sapiens
  misc_RNA (1)...(19): siRNA sense strand
uaucgaagcacaucaaaga

SEQ ID NO: 745842 - RNA, 19 nt, Homo sapiens
  misc_RNA (1)...(19): siRNA sense strand
gaaagccagaaguugaaua

SEQ ID NO: 745843 - RNA, 19 nt, Homo sapiens
  misc_RNA (1)...(19): siRNA sense strand
gaaagugaauuggaugcau

SEQ ID NO: 745844 - RNA, 19 nt, Homo sapiens
  misc_RNA (1)...(19): siRNA sense strand
gcaaagaauguagucaauu

SEQ ID NO: 745845 - RNA, 19 nt, Homo sapiens
  misc_RNA (1)...(19): siRNA sense strand
ggcaaagaauguagucaau

SEQ ID NO: 745846 - RNA, 19 nt, Homo sapiens
  misc_RNA (1)...(19): siRNA sense strand
aagauaaacucacagagau

SEQ ID NO: 745847 - RNA, 19 nt, Homo sapiens
  misc_RNA (1)...(19): siRNA sense strand
agccagaaguugaauauga

SEQ ID NO: 745848 - RNA, 19 nt, Homo sapiens
  misc_RNA (1)...(19): siRNA sense strand
caucuaacuugucauguuc

SEQ ID NO: 745849 - RNA, 19 nt, Homo sapiens
  misc_RNA (1)...(19): siRNA sense strand
aaagugaauuggaugcauu

SEQ ID NO: 745850 - RNA, 19 nt, Homo sapiens
  misc_RNA (1)...(19): siRNA sense strand
caaccugcaucuagaaagu

SEQ ID NO: 745851 - RNA, 19 nt, Homo sapiens
  misc_RNA (1)...(19): siRNA sense strand
gcaaagaggcaacaugaac

SEQ ID NO: 745852 - RNA, 19 nt, Homo sapiens
  misc_RNA (1)...(19): siRNA sense strand
gaaaacgccuaaagucaga

SEQ ID NO: 745853 - RNA, 19 nt, Homo sapiens
  misc_RNA (1)...(19): siRNA sense strand
ggagauggcaacaauaaag

SEQ ID NO: 745854 - RNA, 19 nt, Homo sapiens
  misc_RNA (1)...(19): siRNA sense strand
ugccaugaauuaaguauug

SEQ ID NO: 745855 - RNA, 19 nt, Homo sapiens
  misc_RNA (1)...(19): siRNA sense strand
gcaguuggcuuuuguguag

SEQ ID NO: 745856 - RNA, 19 nt, Homo sapiens
  misc_RNA (1)...(19): siRNA sense strand
ggacuggauaugcacauuu

SEQ ID NO: 745857 - RNA, 19 nt, Homo sapiens
  misc_RNA (1)...(19): siRNA sense strand
ucaucuaacuugucauguu

SEQ ID NO: 745858 - RNA, 19 nt, Homo sapiens
  misc_RNA (1)...(19): siRNA sense strand
gcaacaauaaagaugauga

SEQ ID NO: 745859 - RNA, 19 nt, Homo sapiens
  misc_RNA (1)...(19): siRNA sense strand
gagaagaagaauuauguuc

SEQ ID NO: 745860 - RNA, 19 nt, Homo sapiens
  misc_RNA (1)...(19): siRNA sense strand
gcuagagaauguuacaaag

SEQ ID NO: 745861 - RNA, 19 nt, Homo sapiens
  misc_RNA (1)...(19): siRNA sense strand
acagagaucuacucagaca

SEQ ID NO: 745862 - RNA, 19 nt, Homo sapiens
  misc_RNA (1)...(19): siRNA sense strand
gugauaauuugcaacauag

SEQ ID NO: 745863 - RNA, 19 nt, Homo sapiens
  misc_RNA (1)...(19): siRNA sense strand
gaaguugaauaugauugug

SEQ ID NO: 745864 - RNA, 19 nt, Homo sapiens
  misc_RNA (1)...(19): siRNA sense strand
aaacggaggagaucucuug

SEQ ID NO: 745865 - RNA, 19 nt, Homo sapiens
  misc_RNA (1)...(19): siRNA sense strand
acagaaacaucagcaguug

SEQ ID NO: 745866 - RNA, 19 nt, Homo sapiens
  misc_RNA (1)...(19): siRNA sense strand
aaagacagaugaaguuacu

SEQ ID NO: 745867 - RNA, 19 nt, Homo sapiens
  misc_RNA (1)...(19): siRNA sense strand
acacaaagaacauagguau

SEQ ID NO: 745868 - RNA, 19 nt, Homo sapiens
  misc_RNA (1)...(19): siRNA sense strand
gccagaaguugaauaugau

SEQ ID NO: 745869 - RNA, 19 nt, Homo sapiens
  misc_RNA (1)...(19): siRNA sense strand
caacagccuccucgauuga

SEQ ID NO: 745870 - RNA, 19 nt, Homo sapiens
  misc_RNA (1)...(19): siRNA sense strand
acaacagccuccucgauug

SEQ ID NO: 745871 - RNA, 19 nt, Homo sapiens
  misc_RNA (1)...(19): siRNA sense strand
caaacaagaacaguugaaa

SEQ ID NO: 745872 - RNA, 19 nt, Homo sapiens
  misc_RNA (1)...(19): siRNA sense strand
caucagguuuauccaauuc

SEQ ID NO: 745873 - RNA, 19 nt, Homo sapiens
  misc_RNA (1)...(19): siRNA sense strand
ggagcaauacguuuccauu

SEQ ID NO: 745874 - RNA, 19 nt, Homo sapiens
  misc_RNA (1)...(19): siRNA sense strand
guguagaacaggaaauuaa

SEQ ID NO: 745875 - RNA, 19 nt, Homo sapiens
  misc_RNA (1)...(19): siRNA sense strand
uaaaugagacuaacaaacg

SEQ ID NO: 745876 - RNA, 19 nt, Homo sapiens
  misc_RNA (1)...(19): siRNA sense strand
gcuauuggaacacaaagaa

SEQ ID NO: 745877 - RNA, 19 nt, Homo sapiens
  misc_RNA (1)...(19): siRNA sense strand
gaacacaaagaacauaggu

SEQ ID NO: 745878 - RNA, 19 nt, Homo sapiens
  misc_RNA (1)...(19): siRNA sense strand
gaugaugacccaaaugaag

SEQ ID NO: 745879 - RNA, 19 nt, Homo sapiens
  misc_RNA (1)...(19): siRNA sense strand
gagauggcaacaauaaaga

SEQ ID NO: 745880 - RNA, 19 nt, Homo sapiens
  misc_RNA (1)...(19): siRNA sense strand
uggaggagauggcaacaau

SEQ ID NO: 745881 - RNA, 19 nt, Homo sapiens
  misc_RNA (1)...(19): siRNA sense strand
gcuaauggagcaauacguu

SEQ ID NO: 745882 - RNA, 19 nt, Homo sapiens
  misc_RNA (1)...(19): siRNA sense strand
uagaccuuguggauaauua

SEQ ID NO: 745883 - RNA, 19 nt, Homo sapiens
  misc_RNA (1)...(19): siRNA sense strand
gaacagguauguacuaguu

SEQ ID NO: 745884 - RNA, 19 nt, Homo sapiens
  misc_RNA (1)...(19): siRNA sense strand
ggacaaaccacauuaguaa

SEQ ID NO: 745885 - RNA, 19 nt, Homo sapiens
  misc_RNA (1)...(19): siRNA sense strand
ggaaagcaguugcauugua

SEQ ID NO: 745886 - RNA, 19 nt, Homo sapiens
  misc_RNA (1)...(19): siRNA sense strand
gcaagcgacugauuacuuu

SEQ ID NO: 745887 - RNA, 19 nt, Homo sapiens
  misc_RNA (1)...(19): siRNA sense strand
gaacauagguaucaguuuu

SEQ ID NO: 745888 - RNA, 19 nt, Homo sapiens
  misc_RNA (1)...(19): siRNA sense strand
ucacagagaucuacucaga

SEQ ID NO: 745889 - RNA, 19 nt, Homo sapiens
  misc_RNA (1)...(19): siRNA sense strand
ucagaaugcugccagaaua

SEQ ID NO: 745890 - RNA, 19 nt, Homo sapiens
  misc_RNA (1)...(19): siRNA sense strand
gaagauaaacucacagaga

SEQ ID NO: 745891 - RNA, 19 nt, Homo sapiens
  misc_RNA (1)...(19): siRNA sense strand
caagaacugugaaagguuu

SEQ ID NO: 745892 - RNA, 19 nt, Homo sapiens
  misc_RNA (1)...(19): siRNA sense strand
gaagaaagaagaugucuca

SEQ ID NO: 745893 - RNA, 19 nt, Homo sapiens
  misc_RNA (1)...(19): siRNA sense strand
ccagcaaguugguguaaua

SEQ ID NO: 745894 - RNA, 19 nt, Homo sapiens
  misc_RNA (1)...(19): siRNA sense strand
ggacucugaugaagacuuu

SEQ ID NO: 745895 - RNA, 19 nt, Homo sapiens
  misc_RNA (1)...(19): siRNA sense strand
agauagaccuuguggauaa

SEQ ID NO: 745896 - RNA, 19 nt, Homo sapiens
  misc_RNA (1)...(19): siRNA sense strand
ugaaacaugugauagauug

SEQ ID NO: 745897 - RNA, 19 nt, Homo sapiens
  misc_RNA (1)...(19): siRNA sense strand
gaggagugcuugcauguug

SEQ ID NO: 745898 - RNA, 19 nt, Homo sapiens
  misc_RNA (1)...(19): siRNA sense strand
gaaagcaguugcauuguac

SEQ ID NO: 745899 - RNA, 19 nt, Homo sapiens
  misc_RNA (1)...(19): siRNA sense strand
gcacaugcaacaacaagua

SEQ ID NO: 745900 - RNA, 19 nt, Homo sapiens
  misc_RNA (1)...(19): siRNA sense strand
gugaacgucuucugcuuua

SEQ ID NO: 745901 - RNA, 19 nt, Homo sapiens
  misc_RNA (1)...(19): siRNA sense strand
cgaagcacaucaaagagua

SEQ ID NO: 745902 - RNA, 19 nt, Homo sapiens
  misc_RNA (1)...(19): siRNA sense strand
ugugauagauugacaugua

SEQ ID NO: 745903 - RNA, 19 nt, Homo sapiens
  misc_RNA (1)...(19): siRNA sense strand
caaccaaccugcaucuaga

SEQ ID NO: 745904 - RNA, 19 nt, Homo sapiens
  misc_RNA (1)...(19): siRNA sense strand
gcaagaaccugggacugaa

SEQ ID NO: 745905 - RNA, 19 nt, Homo sapiens
  misc_RNA (1)...(19): siRNA sense strand
gaugcuggcucaaguaguu

SEQ ID NO: 745906 - RNA, 19 nt, Homo sapiens
  misc_RNA (1)...(19): siRNA sense strand
acaaguauaugcacagaaa

SEQ ID NO: 745907 - RNA, 19 nt, Homo sapiens
  misc_RNA (1)...(19): siRNA sense strand
gaaaaucucucuuacaaca

SEQ ID NO: 745908 - RNA, 19 nt, Homo sapiens
  misc_RNA (1)...(19): siRNA sense strand
ggaaagacagaugaaguua

SEQ ID NO: 745909 - RNA, 19 nt, Homo sapiens
  misc_RNA (1)...(19): siRNA sense strand
gaggagauggcaacaauaa

SEQ ID NO: 745910 - RNA, 19 nt, Homo sapiens
  misc_RNA (1)...(19): siRNA sense strand
gaugagagaccaguacaua

SEQ ID NO: 745911 - RNA, 19 nt, Homo sapiens
  misc_RNA (1)...(19): siRNA sense strand
ggaagaugcuggcucaagu

SEQ ID NO: 745912 - RNA, 19 nt, Homo sapiens
  misc_RNA (1)...(19): siRNA sense strand
gcaguugcauuguacuuug

SEQ ID NO: 745913 - RNA, 19 nt, Homo sapiens
  misc_RNA (1)...(19): siRNA sense strand
uaacaaacguguagaacag

SEQ ID NO: 745914 - RNA, 19 nt, Homo sapiens
  misc_RNA (1)...(19): siRNA sense strand
ugagagaccaguacauaua

SEQ ID NO: 745915 - RNA, 19 nt, Homo sapiens
  misc_RNA (1)...(19): siRNA sense strand
gcauuguacuuugaagaua

SEQ ID NO: 745916 - RNA, 19 nt, Homo sapiens
  misc_RNA (1)...(19): siRNA sense strand
gacugaagaugaaauaugu

SEQ ID NO: 745917 - RNA, 19 nt, Homo sapiens
  misc_RNA (1)...(19): siRNA sense strand
gaaaggaaaaucucucuua

SEQ ID NO: 745918 - RNA, 19 nt, Homo sapiens
  misc_RNA (1)...(19): siRNA sense strand
gcacagcacuacuauacag

SEQ ID NO: 745919 - RNA, 19 nt, Homo sapiens
  misc_RNA (1)...(19): siRNA sense strand
aaacugaaccugcagauau

SEQ ID NO: 745920 - RNA, 19 nt, Homo sapiens
  misc_RNA (1)...(19): siRNA sense strand
gcagacagauagaccuugu

SEQ ID NO: 745921 - RNA, 19 nt, Homo sapiens
  misc_RNA (1)...(19): siRNA sense strand
gagagaccaguacauauaa

SEQ ID NO: 745922 - RNA, 19 nt, Homo sapiens
  misc_RNA (1)...(19): siRNA sense strand
gaagaugcuggcucaagua

SEQ ID NO: 745923 - RNA, 19 nt, Homo sapiens
  misc_RNA (1)...(19): siRNA sense strand
uagagaauguuacaaagga

SEQ ID NO: 745924 - RNA, 19 nt, Homo sapiens
  misc_RNA (1)...(19): siRNA sense strand
uaacugaggacucugauga

SEQ ID NO: 745925 - RNA, 19 nt, Homo sapiens
  misc_RNA (1)...(19): siRNA sense strand
uaaagaugaugacccaaau

SEQ ID NO: 745926 - RNA, 19 nt, Homo sapiens
  misc_RNA (1)...(19): siRNA sense strand
aaugaaagcugcaaacagu

SEQ ID NO: 745927 - RNA, 19 nt, Homo sapiens
  misc_RNA (1)...(19): siRNA sense strand
guacacaacaccacaauca

SEQ ID NO: 745928 - RNA, 19 nt, Homo sapiens
  misc_RNA (1)...(19): siRNA sense strand
ggacugaagaugaaauaug

SEQ ID NO: 745929 - RNA, 19 nt, Homo sapiens
  misc_RNA (1)...(19): siRNA sense strand
cuacucaggugcagaauag

SEQ ID NO: 745930 - RNA, 19 nt, Homo sapiens
  misc_RNA (1)...(19): siRNA sense strand
gcacaggucggcaaggauu

SEQ ID NO: 745931 - RNA, 19 nt, Homo sapiens
  misc_RNA (1)...(19): siRNA sense strand
gcucaaguaguuuagauaa

SEQ ID NO: 745932 - RNA, 19 nt, Homo sapiens
  misc_RNA (1)...(19): siRNA sense strand
ccaagaaugcagacagaua

SEQ ID NO: 745933 - RNA, 19 nt, Homo sapiens
  misc_RNA (1)...(19): siRNA sense strand
gagcuaauccccucaguua

SEQ ID NO: 745934 - RNA, 19 nt, Homo sapiens
  misc_RNA (1)...(19): siRNA sense strand
ugaagcauguuaugaacuu

SEQ ID NO: 745935 - RNA, 19 nt, Homo sapiens
  misc_RNA (1)...(19): siRNA sense strand
ggagaguggcuauguaaga

SEQ ID NO: 745936 - RNA, 19 nt, Homo sapiens
  misc_RNA (1)...(19): siRNA sense strand
gaccaguacauauaaagua

SEQ ID NO: 745937 - RNA, 19 nt, Homo sapiens
  misc_RNA (1)...(19): siRNA sense strand
uacaacagcuagagaaugu

SEQ ID NO: 745938 - RNA, 19 nt, Homo sapiens
  misc_RNA (1)...(19): siRNA sense strand
gggacaaaccacauuagua

SEQ ID NO: 745939 - RNA, 19 nt, Homo sapiens
  misc_RNA (1)...(19): siRNA sense strand
caucagcaguugcaacaga

SEQ ID NO: 745940 - RNA, 19 nt, Homo sapiens
  misc_RNA (1)...(19): siRNA sense strand
caacaaguauaugcacaga

SEQ ID NO: 745941 - RNA, 19 nt, Homo sapiens
  misc_RNA (1)...(19): siRNA sense strand
uaucgaagcacaucaaaga

SEQ ID NO: 745942 - RNA, 19 nt, Homo sapiens
  misc_RNA (1)...(19): siRNA sense strand
gaaagccagaaguugaaua

SEQ ID NO: 745943 - RNA, 19 nt, Homo sapiens
  misc_RNA (1)...(19): siRNA sense strand
gaaagugaauuggaugcau

SEQ ID NO: 745944 - RNA, 19 nt, Homo sapiens
  misc_RNA (1)...(19): siRNA sense strand
gcaaagaauguagucaauu

SEQ ID NO: 745945 - RNA, 19 nt, Homo sapiens
  misc_RNA (1)...(19): siRNA sense strand
ggcaaagaauguagucaau

SEQ ID NO: 745946 - RNA, 19 nt, Homo sapiens
  misc_RNA (1)...(19): siRNA sense strand
aagauaaacucacagagau

SEQ ID NO: 745947 - RNA, 19 nt, Homo sapiens
  misc_RNA (1)...(19): siRNA sense strand
agccagaaguugaauauga

SEQ ID NO: 745948 - RNA, 19 nt, Homo sapiens
  misc_RNA (1)...(19): siRNA sense strand
caucuaacuugucauguuc

SEQ ID NO: 745949 - RNA, 19 nt, Homo sapiens
  misc_RNA (1)...(19): siRNA sense strand
aaagugaauuggaugcauu

SEQ ID NO: 745950 - RNA, 19 nt, Homo sapiens
  misc_RNA (1)...(19): siRNA sense strand
caaccugcaucuagaaagu

SEQ ID NO: 745951 - RNA, 19 nt, Homo sapiens
  misc_RNA (1)...(19): siRNA sense strand
gcaaagaggcaacaugaac

SEQ ID NO: 745952 - RNA, 19 nt, Homo sapiens
  misc_RNA (1)...(19): siRNA sense strand
gaaaacgccuaaagucaga

SEQ ID NO: 745953 - RNA, 19 nt, Homo sapiens
  misc_RNA (1)...(19): siRNA sense strand
ggagauggcaacaauaaag

SEQ ID NO: 745954 - RNA, 19 nt, Homo sapiens
  misc_RNA (1)...(19): siRNA sense strand
ugccaugaauuaaguauug

SEQ ID NO: 745955 - RNA, 19 nt, Homo sapiens
  misc_RNA (1)...(19): siRNA sense strand
gcaguuggcuuuuguguag

SEQ ID NO: 745956 - RNA, 19 nt, Homo sapiens
  misc_RNA (1)...(19): siRNA sense strand
ggacuggauaugcacauuu

SEQ ID NO: 745957 - RNA, 19 nt, Homo sapiens
  misc_RNA (1)...(19): siRNA sense strand
ucaucuaacuugucauguu

SEQ ID NO: 745958 - RNA, 19 nt, Homo sapiens
  misc_RNA (1)...(19): siRNA sense strand
gcaacaauaaagaugauga

SEQ ID NO: 745959 - RNA, 19 nt, Homo sapiens
  misc_RNA (1)...(19): siRNA sense strand
gagaagaagaauuauguuc

SEQ ID NO: 745960 - RNA, 19 nt, Homo sapiens
  misc_RNA (1)...(19): siRNA sense strand
gcuagagaauguuacaaag

SEQ ID NO: 745961 - RNA, 19 nt, Homo sapiens
  misc_RNA (1)...(19): siRNA sense strand
acagagaucuacucagaca

SEQ ID NO: 745962 - RNA, 19 nt, Homo sapiens
  misc_RNA (1)...(19): siRNA sense strand
gugauaauuugcaacauag

SEQ ID NO: 745963 - RNA, 19 nt, Homo sapiens
  misc_RNA (1)...(19): siRNA sense strand
gaaguugaauaugauugug

SEQ ID NO: 745964 - RNA, 19 nt, Homo sapiens
  misc_RNA (1)...(19): siRNA sense strand
aaacggaggagaucucuug

SEQ ID NO: 745965 - RNA, 19 nt, Homo sapiens
  misc_RNA (1)...(19): siRNA sense strand
acagaaacaucagcaguug

SEQ ID NO: 745966 - RNA, 19 nt, Homo sapiens
  misc_RNA (1)...(19): siRNA sense strand
aaagacagaugaaguuacu

SEQ ID NO: 745967 - RNA, 19 nt, Homo sapiens
  misc_RNA (1)...(19): siRNA sense strand
acacaaagaacauagguau

SEQ ID NO: 745968 - RNA, 19 nt, Homo sapiens
  misc_RNA (1)...(19): siRNA sense strand
gccagaaguugaauaugau

SEQ ID NO: 745969 - RNA, 19 nt, Homo sapiens
  misc_RNA (1)...(19): siRNA sense strand
caacagccuccucgauuga

SEQ ID NO: 745970 - RNA, 19 nt, Homo sapiens
  misc_RNA (1)...(19): siRNA sense strand
acaacagccuccucgauug

SEQ ID NO: 745971 - RNA, 19 nt, Homo sapiens
  misc_RNA (1)...(19): siRNA sense strand
caaacaagaacaguugaaa

SEQ ID NO: 745972 - RNA, 19 nt, Homo sapiens
  misc_RNA (1)...(19): siRNA sense strand
caucagguuuauccaauuc

SEQ ID NO: 745973 - RNA, 19 nt, Homo sapiens
  misc_RNA (1)...(19): siRNA sense strand
ggagcaauacguuuccauu

SEQ ID NO: 745974 - RNA, 19 nt, Homo sapiens
  misc_RNA (1)...(19): siRNA sense strand
guguagaacaggaaauuaa

SEQ ID NO: 745975 - RNA, 19 nt, Homo sapiens
  misc_RNA (1)...(19): siRNA sense strand
uaaaugagacuaacaaacg

SEQ ID NO: 745976 - RNA, 19 nt, Homo sapiens
  misc_RNA (1)...(19): siRNA sense strand
gcuauuggaacacaaagaa

SEQ ID NO: 745977 - RNA, 19 nt, Homo sapiens
  misc_RNA (1)...(19): siRNA sense strand
gaacacaaagaacauaggu

SEQ ID NO: 745978 - RNA, 19 nt, Homo sapiens
  misc_RNA (1)...(19): siRNA sense strand
gaugaugacccaaaugaag

SEQ ID NO: 745979 - RNA, 19 nt, Homo sapiens
  misc_RNA (1)...(19): siRNA sense strand
gagauggcaacaauaaaga

SEQ ID NO: 745980 - RNA, 19 nt, Homo sapiens
  misc_RNA (1)...(19): siRNA sense strand
uggaggagauggcaacaau

SEQ ID NO: 745981 - RNA, 19 nt, Homo sapiens
  misc_RNA (1)...(19): siRNA sense strand
gcuaauggagcaauacguu

SEQ ID NO: 745982 - RNA, 19 nt, Homo sapiens
  misc_RNA (1)...(19): siRNA sense strand
uagaccuuguggauaauua

SEQ ID NO: 745983 - RNA, 19 nt, Homo sapiens
  misc_RNA (1)...(19): siRNA sense strand
gaacagguauguacuaguu

SEQ ID NO: 745984 - RNA, 19 nt, Homo sapiens
  misc_RNA (1)...(19): siRNA sense strand
ggacaaaccacauuaguaa

SEQ ID NO: 745985 - RNA, 19 nt, Homo sapiens
  misc_RNA (1)...(19): siRNA sense strand
ggaaagcaguugcauugua

SEQ ID NO: 745986 - RNA, 19 nt, Homo sapiens
  misc_RNA (1)...(19): siRNA sense strand
gcaagcgacugauuacuuu

SEQ ID NO: 745987 - RNA, 19 nt, Homo sapiens
  misc_RNA (1)...(19): siRNA sense strand
gaacauagguaucaguuuu

SEQ ID NO: 745988 - RNA, 19 nt, Homo sapiens
  misc_RNA (1)...(19): siRNA sense strand
ucacagagaucuacucaga

SEQ ID NO: 745989 - RNA, 19 nt, Homo sapiens
  misc_RNA (1)...(19): siRNA sense strand
ucagaaugcugccagaaua

SEQ ID NO: 745990 - RNA, 19 nt, Homo sapiens
  misc_RNA (1)...(19): siRNA sense strand
gaagauaaacucacagaga

SEQ ID NO: 745991 - RNA, 19 nt, Homo sapiens
  misc_RNA (1)...(19): siRNA sense strand
caagaacugugaaagguuu

SEQ ID NO: 745992 - RNA, 19 nt, Homo sapiens
  misc_RNA (1)...(19): siRNA sense strand
gaagaaagaagaugucuca

SEQ ID NO: 745993 - RNA, 19 nt, Homo sapiens
  misc_RNA (1)...(19): siRNA sense strand
ccagcaaguugguguaaua

SEQ ID NO: 745994 - RNA, 19 nt, Homo sapiens
  misc_RNA (1)...(19): siRNA sense strand
ggacucugaugaagacuuu

SEQ ID NO: 745995 - RNA, 19 nt, Homo sapiens
  misc_RNA (1)...(19): siRNA sense strand
agauagaccuuguggauaa

SEQ ID NO: 745996 - RNA, 19 nt, Homo sapiens
  misc_RNA (1)...(19): siRNA sense strand
ugaaacaugugauagauug

SEQ ID NO: 745997 - RNA, 19 nt, Homo sapiens
  misc_RNA (1)...(19): siRNA sense strand
gaggagugcuugcauguug

SEQ ID NO: 745998 - RNA, 19 nt, Homo sapiens
  misc_RNA (1)...(19): siRNA sense strand
gaaagcaguugcauuguac

SEQ ID NO: 745999 - RNA, 19 nt, Homo sapiens
  misc_RNA (1)...(19): siRNA sense strand
gcacaugcaacaacaagua

SEQ ID NO: 746000 - RNA, 19 nt, Homo sapiens
  misc_RNA (1)...(19): siRNA sense strand
gugaacgucuucugcuuua

SEQ ID NO: 746001 - RNA, 19 nt, Homo sapiens
  misc_RNA (1)...(19): siRNA sense strand
cgaagcacaucaaagagua

SEQ ID NO: 746002 - RNA, 19 nt, Homo sapiens
  misc_RNA (1)...(19): siRNA sense strand
ugugauagauugacaugua

SEQ ID NO: 746003 - RNA, 19 nt, Homo sapiens
  misc_RNA (1)...(19): siRNA sense strand
caaccaaccugcaucuaga

SEQ ID NO: 746004 - RNA, 19 nt, Homo sapiens
  misc_RNA (1)...(19): siRNA sense strand
gcaagaaccugggacugaa

SEQ ID NO: 746005 - RNA, 19 nt, Homo sapiens
  misc_RNA (1)...(19): siRNA sense strand
gaugcuggcucaaguaguu

SEQ ID NO: 746006 - RNA, 19 nt, Homo sapiens
  misc_RNA (1)...(19): siRNA sense strand
acaaguauaugcacagaaa

SEQ ID NO: 746007 - RNA, 19 nt, Homo sapiens
  misc_RNA (1)...(19): siRNA sense strand
gaaaaucucucuuacaaca

SEQ ID NO: 746008 - RNA, 19 nt, Homo sapiens
  misc_RNA (1)...(19): siRNA sense strand
ggaaagacagaugaaguua

SEQ ID NO: 746009 - RNA, 19 nt, Homo sapiens
  misc_RNA (1)...(19): siRNA sense strand
gaggagauggcaacaauaa

SEQ ID NO: 746010 - RNA, 19 nt, Homo sapiens
  misc_RNA (1)...(19): siRNA sense strand
gaugagagaccaguacaua

SEQ ID NO: 746011 - RNA, 19 nt, Homo sapiens
  misc_RNA (1)...(19): siRNA sense strand
ggaagaugcuggcucaagu

SEQ ID NO: 746012 - RNA, 19 nt, Homo sapiens
  misc_RNA (1)...(19): siRNA sense strand
gcaguugcauuguacuuug

SEQ ID NO: 746013 - RNA, 19 nt, Homo sapiens
  misc_RNA (1)...(19): siRNA sense strand
uaacaaacguguagaacag

SEQ ID NO: 746014 - RNA, 19 nt, Homo sapiens
  misc_RNA (1)...(19): siRNA sense strand
ugagagaccaguacauaua

SEQ ID NO: 746015 - RNA, 19 nt, Homo sapiens
  misc_RNA (1)...(19): siRNA sense strand
gcauuguacuuugaagaua

SEQ ID NO: 746016 - RNA, 19 nt, Homo sapiens
  misc_RNA (1)...(19): siRNA sense strand
gacugaagaugaaauaugu

SEQ ID NO: 746017 - RNA, 19 nt, Homo sapiens
  misc_RNA (1)...(19): siRNA sense strand
gaaaggaaaaucucucuua

SEQ ID NO: 746018 - RNA, 19 nt, Homo sapiens
  misc_RNA (1)...(19): siRNA sense strand
gcacagcacuacuauacag

SEQ ID NO: 746019 - RNA, 19 nt, Homo sapiens
  misc_RNA (1)...(19): siRNA sense strand
aaacugaaccugcagauau

SEQ ID NO: 746020 - RNA, 19 nt, Homo sapiens
  misc_RNA (1)...(19): siRNA sense strand
gcagacagauagaccuugu

SEQ ID NO: 746021 - RNA, 19 nt, Homo sapiens
  misc_RNA (1)...(19): siRNA sense strand
gagagaccaguacauauaa

SEQ ID NO: 746022 - RNA, 19 nt, Homo sapiens
  misc_RNA (1)...(19): siRNA sense strand
gaagaugcuggcucaagua

SEQ ID NO: 746023 - RNA, 19 nt, Homo sapiens
  misc_RNA (1)...(19): siRNA sense strand
uagagaauguuacaaagga

SEQ ID NO: 746024 - RNA, 19 nt, Homo sapiens
  misc_RNA (1)...(19): siRNA sense strand
uaacugaggacucugauga

SEQ ID NO: 746025 - RNA, 19 nt, Homo sapiens
  misc_RNA (1)...(19): siRNA sense strand
uaaagaugaugacccaaau

SEQ ID NO: 746026 - RNA, 19 nt, Homo sapiens
  misc_RNA (1)...(19): siRNA sense strand
aaugaaagcugcaaacagu

SEQ ID NO: 746027 - RNA, 19 nt, Homo sapiens
  misc_RNA (1)...(19): siRNA sense strand
guacacaacaccacaauca

SEQ ID NO: 746028 - RNA, 19 nt, Homo sapiens
  misc_RNA (1)...(19): siRNA sense strand
ggacugaagaugaaauaug

SEQ ID NO: 746029 - RNA, 19 nt, Homo sapiens
  misc_RNA (1)...(19): siRNA sense strand
cuacucaggugcagaauag

SEQ ID NO: 746030 - RNA, 19 nt, Homo sapiens
  misc_RNA (1)...(19): siRNA sense strand
gcacaggucggcaaggauu

SEQ ID NO: 746031 - RNA, 19 nt, Homo sapiens
  misc_RNA (1)...(19): siRNA sense strand
gcucaaguaguuuagauaa

SEQ ID NO: 746032 - RNA, 19 nt, Homo sapiens
  misc_RNA (1)...(19): siRNA sense strand
ccaagaaugcagacagaua

SEQ ID NO: 746033 - RNA, 19 nt, Homo sapiens
  misc_RNA (1)...(19): siRNA sense strand
gagcuaauccccucaguua

SEQ ID NO: 746034 - RNA, 19 nt, Homo sapiens
  misc_RNA (1)...(19): siRNA sense strand
ugaagcauguuaugaacuu

SEQ ID NO: 746035 - RNA, 19 nt, Homo sapiens
  misc_RNA (1)...(19): siRNA sense strand
ggagaguggcuauguaaga

SEQ ID NO: 746036 - RNA, 19 nt, Homo sapiens
  misc_RNA (1)...(19): siRNA sense strand
gaccaguacauauaaagua

SEQ ID NO: 746037 - RNA, 19 nt, Homo sapiens
  misc_RNA (1)...(19): siRNA sense strand
uacaacagcuagagaaugu

SEQ ID NO: 746038 - RNA, 19 nt, Homo sapiens
  misc_RNA (1)...(19): siRNA sense strand
gggacaaaccacauuagua

SEQ ID NO: 746039 - RNA, 19 nt, Homo sapiens
  misc_RNA (1)...(19): siRNA sense strand
caucagcaguugcaacaga

SEQ ID NO: 746040 - RNA, 19 nt, Homo sapiens
  misc_RNA (1)...(19): siRNA sense strand
caacaaguauaugcacaga

SEQ ID NO: 746041 - RNA, 19 nt, Homo sapiens
  misc_RNA (1)...(19): siRNA sense strand
uaucgaagcacaucaaaga

SEQ ID NO: 746042 - RNA, 19 nt, Homo sapiens
  misc_RNA (1)...(19): siRNA sense strand
gaaagccagaaguugaaua

SEQ ID NO: 746043 - RNA, 19 nt, Homo sapiens
  misc_RNA (1)...(19): siRNA sense strand
gaaagugaauuggaugcau

SEQ ID NO: 746044 - RNA, 19 nt, Homo sapiens
  misc_RNA (1)...(19): siRNA sense strand
gcaaagaauguagucaauu

SEQ ID NO: 746045 - RNA, 19 nt, Homo sapiens
  misc_RNA (1)...(19): siRNA sense strand
ggcaaagaauguagucaau

SEQ ID NO: 746046 - RNA, 19 nt, Homo sapiens
  misc_RNA (1)...(19): siRNA sense strand
aagauaaacucacagagau

SEQ ID NO: 746047 - RNA, 19 nt, Homo sapiens
  misc_RNA (1)...(19): siRNA sense strand
agccagaaguugaauauga

SEQ ID NO: 746048 - RNA, 19 nt, Homo sapiens
  misc_RNA (1)...(19): siRNA sense strand
caucuaacuugucauguuc

SEQ ID NO: 746049 - RNA, 19 nt, Homo sapiens
  misc_RNA (1)...(19): siRNA sense strand
aaagugaauuggaugcauu

SEQ ID NO: 746050 - RNA, 19 nt, Homo sapiens
  misc_RNA (1)...(19): siRNA sense strand
caaccugcaucuagaaagu

SEQ ID NO: 746051 - RNA, 19 nt, Homo sapiens
  misc_RNA (1)...(19): siRNA sense strand
gcaaagaggcaacaugaac

SEQ ID NO: 746052 - RNA, 19 nt, Homo sapiens
  misc_RNA (1)...(19): siRNA sense strand
gaaaacgccuaaagucaga

SEQ ID NO: 746053 - RNA, 19 nt, Homo sapiens
  misc_RNA (1)...(19): siRNA sense strand
ggagauggcaacaauaaag

SEQ ID NO: 746054 - RNA, 19 nt, Homo sapiens
  misc_RNA (1)...(19): siRNA sense strand
ugccaugaauuaaguauug

SEQ ID NO: 746055 - RNA, 19 nt, Homo sapiens
  misc_RNA (1)...(19): siRNA sense strand
gcaguuggcuuuuguguag

SEQ ID NO: 746056 - RNA, 19 nt, Homo sapiens
  misc_RNA (1)...(19): siRNA sense strand
ggacuggauaugcacauuu

SEQ ID NO: 746057 - RNA, 19 nt, Homo sapiens
  misc_RNA (1)...(19): siRNA sense strand
ucaucuaacuugucauguu

SEQ ID NO: 746058 - RNA, 19 nt, Homo sapiens
  misc_RNA (1)...(19): siRNA sense strand
gcaacaauaaagaugauga

SEQ ID NO: 746059 - RNA, 19 nt, Homo sapiens
  misc_RNA (1)...(19): siRNA sense strand
gagaagaagaauuauguuc

SEQ ID NO: 746060 - RNA, 19 nt, Homo sapiens
  misc_RNA (1)...(19): siRNA sense strand
gcuagagaauguuacaaag

SEQ ID NO: 746061 - RNA, 19 nt, Homo sapiens
  misc_RNA (1)...(19): siRNA sense strand
acagagaucuacucagaca

SEQ ID NO: 746062 - RNA, 19 nt, Homo sapiens
  misc_RNA (1)...(19): siRNA sense strand
gugauaauuugcaacauag

SEQ ID NO: 746063 - RNA, 19 nt, Homo sapiens
  misc_RNA (1)...(19): siRNA sense strand
gaaguugaauaugauugug

SEQ ID NO: 746064 - RNA, 19 nt, Homo sapiens
  misc_RNA (1)...(19): siRNA sense strand
aaacggaggagaucucuug

SEQ ID NO: 746065 - RNA, 19 nt, Homo sapiens
  misc_RNA (1)...(19): siRNA sense strand
acagaaacaucagcaguug

SEQ ID NO: 746066 - RNA, 19 nt, Homo sapiens
  misc_RNA (1)...(19): siRNA sense strand
aaagacagaugaaguuacu

SEQ ID NO: 746067 - RNA, 19 nt, Homo sapiens
  misc_RNA (1)...(19): siRNA sense strand
acacaaagaacauagguau

SEQ ID NO: 746068 - RNA, 19 nt, Homo sapiens
  misc_RNA (1)...(19): siRNA sense strand
gccagaaguugaauaugau

SEQ ID NO: 746069 - RNA, 19 nt, Homo sapiens
  misc_RNA (1)...(19): siRNA sense strand
caacagccuccucgauuga

SEQ ID NO: 746070 - RNA, 19 nt, Homo sapiens
  misc_RNA (1)...(19): siRNA sense strand
acaacagccuccucgauug

SEQ ID NO: 746071 - RNA, 19 nt, Homo sapiens
  misc_RNA (1)...(19): siRNA sense strand
caaacaagaacaguugaaa

SEQ ID NO: 746072 - RNA, 19 nt, Homo sapiens
  misc_RNA (1)...(19): siRNA sense strand
caucagguuuauccaauuc

SEQ ID NO: 746073 - RNA, 19 nt, Homo sapiens
  misc_RNA (1)...(19): siRNA sense strand
ggagcaauacguuuccauu

SEQ ID NO: 746074 - RNA, 19 nt, Homo sapiens
  misc_RNA (1)...(19): siRNA sense strand
guguagaacaggaaauuaa

SEQ ID NO: 746075 - RNA, 19 nt, Homo sapiens
  misc_RNA (1)...(19): siRNA sense strand
uaaaugagacuaacaaacg

SEQ ID NO: 746076 - RNA, 19 nt, Homo sapiens
  misc_RNA (1)...(19): siRNA sense strand
gcuauuggaacacaaagaa

SEQ ID NO: 746077 - RNA, 19 nt, Homo sapiens
  misc_RNA (1)...(19): siRNA sense strand
gaacacaaagaacauaggu

SEQ ID NO: 746078 - RNA, 19 nt, Homo sapiens
  misc_RNA (1)...(19): siRNA sense strand
gaugaugacccaaaugaag

SEQ ID NO: 746079 - RNA, 19 nt, Homo sapiens
  misc_RNA (1)...(19): siRNA sense strand
gagauggcaacaauaaaga

SEQ ID NO: 746080 - RNA, 19 nt, Homo sapiens
  misc_RNA (1)...(19): siRNA sense strand
uggaggagauggcaacaau

SEQ ID NO: 746081 - RNA, 19 nt, Homo sapiens
  misc_RNA (1)...(19): siRNA sense strand
gcuaauggagcaauacguu

SEQ ID NO: 746082 - RNA, 19 nt, Homo sapiens
  misc_RNA (1)...(19): siRNA sense strand
uagaccuuguggauaauua

SEQ ID NO: 746083 - RNA, 19 nt, Homo sapiens
  misc_RNA (1)...(19): siRNA sense strand
gaacagguauguacuaguu

SEQ ID NO: 746084 - RNA, 19 nt, Homo sapiens
  misc_RNA (1)...(19): siRNA sense strand
ggacaaaccacauuaguaa

SEQ ID NO: 746085 - RNA, 19 nt, Homo sapiens
  misc_RNA (1)...(19): siRNA sense strand
ggaaagcaguugcauugua

SEQ ID NO: 746086 - RNA, 19 nt, Homo sapiens
  misc_RNA (1)...(19): siRNA sense strand
gcaagcgacugauuacuuu

SEQ ID NO: 746087 - RNA, 19 nt, Homo sapiens
  misc_RNA (1)...(19): siRNA sense strand
gaacauagguaucaguuuu

SEQ ID NO: 746088 - RNA, 19 nt, Homo sapiens
  misc_RNA (1)...(19): siRNA sense strand
ucacagagaucuacucaga

SEQ ID NO: 746089 - RNA, 19 nt, Homo sapiens
  misc_RNA (1)...(19): siRNA sense strand
ucagaaugcugccagaaua

SEQ ID NO: 746090 - RNA, 19 nt, Homo sapiens
  misc_RNA (1)...(19): siRNA sense strand
gaagauaaacucacagaga

SEQ ID NO: 746091 - RNA, 19 nt, Homo sapiens
  misc_RNA (1)...(19): siRNA sense strand
caagaacugugaaagguuu

SEQ ID NO: 746092 - RNA, 19 nt, Homo sapiens
  misc_RNA (1)...(19): siRNA sense strand
gaagaaagaagaugucuca

SEQ ID NO: 746093 - RNA, 19 nt, Homo sapiens
  misc_RNA (1)...(19): siRNA sense strand
ccagcaaguugguguaaua

SEQ ID NO: 746094 - RNA, 19 nt, Homo sapiens
  misc_RNA (1)...(19): siRNA sense strand
ggacucugaugaagacuuu

SEQ ID NO: 746095 - RNA, 19 nt, Homo sapiens
  misc_RNA (1)...(19): siRNA sense strand
agauagaccuuguggauaa

SEQ ID NO: 746096 - RNA, 19 nt, Homo sapiens
  misc_RNA (1)...(19): siRNA sense strand
ugaaacaugugauagauug

SEQ ID NO: 746097 - RNA, 19 nt, Homo sapiens
  misc_RNA (1)...(19): siRNA sense strand
gaggagugcuugcauguug

SEQ ID NO: 746098 - RNA, 19 nt, Homo sapiens
  misc_RNA (1)...(19): siRNA sense strand
gaaagcaguugcauuguac

SEQ ID NO: 746099 - RNA, 19 nt, Homo sapiens
  misc_RNA (1)...(19): siRNA sense strand
gcacaugcaacaacaagua

SEQ ID NO: 746100 - RNA, 19 nt, Homo sapiens
  misc_RNA (1)...(19): siRNA sense strand
gugaacgucuucugcuuua

SEQ ID NO: 746101 - RNA, 19 nt, Homo sapiens
  misc_RNA (1)...(19): siRNA sense strand
cgaagcacaucaaagagua

SEQ ID NO: 746102 - RNA, 19 nt, Homo sapiens
  misc_RNA (1)...(19): siRNA sense strand
ugugauagauugacaugua

SEQ ID NO: 746103 - RNA, 19 nt, Homo sapiens
  misc_RNA (1)...(19): siRNA sense strand
caaccaaccugcaucuaga

SEQ ID NO: 746104 - RNA, 19 nt, Homo sapiens
  misc_RNA (1)...(19): siRNA sense strand
gcaagaaccugggacugaa

SEQ ID NO: 746105 - RNA, 19 nt, Homo sapiens
  misc_RNA (1)...(19): siRNA sense strand
gaugcuggcucaaguaguu

SEQ ID NO: 746106 - RNA, 19 nt, Homo sapiens
  misc_RNA (1)...(19): siRNA sense strand
acaaguauaugcacagaaa

SEQ ID NO: 746107 - RNA, 19 nt, Homo sapiens
  misc_RNA (1)...(19): siRNA sense strand
gaaaaucucucuuacaaca

SEQ ID NO: 746108 - RNA, 19 nt, Homo sapiens
  misc_RNA (1)...(19): siRNA sense strand
ggaaagacagaugaaguua

SEQ ID NO: 746109 - RNA, 19 nt, Homo sapiens
  misc_RNA (1)...(19): siRNA sense strand
gaggagauggcaacaauaa

SEQ ID NO: 746110 - RNA, 19 nt, Homo sapiens
  misc_RNA (1)...(19): siRNA sense strand
gaugagagaccaguacaua

SEQ ID NO: 746111 - RNA, 19 nt, Homo sapiens
  misc_RNA (1)...(19): siRNA sense strand
ggaagaugcuggcucaagu

SEQ ID NO: 746112 - RNA, 19 nt, Homo sapiens
  misc_RNA (1)...(19): siRNA sense strand
gcaguugcauuguacuuug

SEQ ID NO: 746113 - RNA, 19 nt, Homo sapiens
  misc_RNA (1)...(19): siRNA sense strand
uaacaaacguguagaacag

SEQ ID NO: 746114 - RNA, 19 nt, Homo sapiens
  misc_RNA (1)...(19): siRNA sense strand
ugagagaccaguacauaua

SEQ ID NO: 746115 - RNA, 19 nt, Homo sapiens
  misc_RNA (1)...(19): siRNA sense strand
gcauuguacuuugaagaua

SEQ ID NO: 746116 - RNA, 19 nt, Homo sapiens
  misc_RNA (1)...(19): siRNA sense strand
gacugaagaugaaauaugu

SEQ ID NO: 746117 - RNA, 19 nt, Homo sapiens
  misc_RNA (1)...(19): siRNA sense strand
gaaaggaaaaucucucuua

SEQ ID NO: 746118 - RNA, 19 nt, Homo sapiens
  misc_RNA (1)...(19): siRNA sense strand
gcacagcacuacuauacag

SEQ ID NO: 746119 - RNA, 19 nt, Homo sapiens
  misc_RNA (1)...(19): siRNA sense strand
aaacugaaccugcagauau

SEQ ID NO: 746120 - RNA, 19 nt, Homo sapiens
  misc_RNA (1)...(19): siRNA sense strand
gcagacagauagaccuugu

SEQ ID NO: 746121 - RNA, 19 nt, Homo sapiens
  misc_RNA (1)...(19): siRNA sense strand
gagagaccaguacauauaa

SEQ ID NO: 746122 - RNA, 19 nt, Homo sapiens
  misc_RNA (1)...(19): siRNA sense strand
gaagaugcuggcucaagua

SEQ ID NO: 746123 - RNA, 19 nt, Homo sapiens
  misc_RNA (1)...(19): siRNA sense strand
uagagaauguuacaaagga

SEQ ID NO: 746124 - RNA, 19 nt, Homo sapiens
  misc_RNA (1)...(19): siRNA sense strand
uaacugaggacucugauga

SEQ ID NO: 746125 - RNA, 19 nt, Homo sapiens
  misc_RNA (1)...(19): siRNA sense strand
uaaagaugaugacccaaau

SEQ ID NO: 746126 - RNA, 19 nt, Homo sapiens
  misc_RNA (1)...(19): siRNA sense strand
aaugaaagcugcaaacagu

SEQ ID NO: 746127 - RNA, 19 nt, Homo sapiens
  misc_RNA (1)...(19): siRNA sense strand
guacacaacaccacaauca

SEQ ID NO: 746128 - RNA, 19 nt, Homo sapiens
  misc_RNA (1)...(19): siRNA sense strand
ggacugaagaugaaauaug

SEQ ID NO: 746129 - RNA, 19 nt, Homo sapiens
  misc_RNA (1)...(19): siRNA sense strand
cuacucaggugcagaauag

SEQ ID NO: 746130 - RNA, 19 nt, Homo sapiens
  misc_RNA (1)...(19): siRNA sense strand
gcacaggucggcaaggauu

SEQ ID NO: 746131 - RNA, 19 nt, Homo sapiens
  misc_RNA (1)...(19): siRNA sense strand
gcucaaguaguuuagauaa

SEQ ID NO: 746132 - RNA, 19 nt, Homo sapiens
  misc_RNA (1)...(19): siRNA sense strand
ccaagaaugcagacagaua

SEQ ID NO: 746133 - RNA, 19 nt, Homo sapiens
  misc_RNA (1)...(19): siRNA sense strand
gagcuaauccccucaguua

SEQ ID NO: 746134 - RNA, 19 nt, Homo sapiens
  misc_RNA (1)...(19): siRNA sense strand
ugaagcauguuaugaacuu

SEQ ID NO: 746135 - RNA, 19 nt, Homo sapiens
  misc_RNA (1)...(19): siRNA sense strand
ggagaguggcuauguaaga

SEQ ID NO: 746136 - RNA, 19 nt, Homo sapiens
  misc_RNA (1)...(19): siRNA sense strand
gaccaguacauauaaagua

SEQ ID NO: 746137 - RNA, 19 nt, Homo sapiens
  misc_RNA (1)...(19): siRNA sense strand
uacaacagcuagagaaugu

SEQ ID NO: 746138 - RNA, 19 nt, Homo sapiens
  misc_RNA (1)...(19): siRNA sense strand
gggacaaaccacauuagua

SEQ ID NO: 746139 - RNA, 19 nt, Homo sapiens
  misc_RNA (1)...(19): siRNA sense strand
caucagcaguugcaacaga

SEQ ID NO: 746140 - RNA, 19 nt, Homo sapiens
  misc_RNA (1)...(19): siRNA sense strand
caacaaguauaugcacaga

SEQ ID NO: 746141 - RNA, 19 nt, Homo sapiens
  misc_RNA (1)...(19): siRNA sense strand
uaucgaagcacaucaaaga

SEQ ID NO: 746142 - RNA, 19 nt, Homo sapiens
  misc_RNA (1)...(19): siRNA sense strand
gaaagccagaaguugaaua

SEQ ID NO: 746143 - RNA, 19 nt, Homo sapiens
  misc_RNA (1)...(19): siRNA sense strand
gaaagugaauuggaugcau

SEQ ID NO: 746144 - RNA, 19 nt, Homo sapiens
  misc_RNA (1)...(19): siRNA sense strand
gcaaagaauguagucaauu

SEQ ID NO: 746145 - RNA, 19 nt, Homo sapiens
  misc_RNA (1)...(19): siRNA sense strand
ggcaaagaauguagucaau

SEQ ID NO: 746146 - RNA, 19 nt, Homo sapiens
  misc_RNA (1)...(19): siRNA sense strand
aagauaaacucacagagau

SEQ ID NO: 746147 - RNA, 19 nt, Homo sapiens
  misc_RNA (1)...(19): siRNA sense strand
agccagaaguugaauauga

SEQ ID NO: 746148 - RNA, 19 nt, Homo sapiens
  misc_RNA (1)...(19): siRNA sense strand
caucuaacuugucauguuc

SEQ ID NO: 746149 - RNA, 19 nt, Homo sapiens
  misc_RNA (1)...(19): siRNA sense strand
aaagugaauuggaugcauu

SEQ ID NO: 746150 - RNA, 19 nt, Homo sapiens
  misc_RNA (1)...(19): siRNA sense strand
caaccugcaucuagaaagu

SEQ ID NO: 746151 - RNA, 19 nt, Homo sapiens
  misc_RNA (1)...(19): siRNA sense strand
gcaaagaggcaacaugaac

SEQ ID NO: 746152 - RNA, 19 nt, Homo sapiens
  misc_RNA (1)...(19): siRNA sense strand
gaaaacgccuaaagucaga

SEQ ID NO: 746153 - RNA, 19 nt, Homo sapiens
  misc_RNA (1)...(19): siRNA sense strand
ggagauggcaacaauaaag

SEQ ID NO: 746154 - RNA, 19 nt, Homo sapiens
  misc_RNA (1)...(19): siRNA sense strand
ugccaugaauuaaguauug

SEQ ID NO: 746155 - RNA, 19 nt, Homo sapiens
  misc_RNA (1)...(19): siRNA sense strand
gcaguuggcuuuuguguag

SEQ ID NO: 746156 - RNA, 19 nt, Homo sapiens
  misc_RNA (1)...(19): siRNA sense strand
ggacuggauaugcacauuu

SEQ ID NO: 746157 - RNA, 19 nt, Homo sapiens
  misc_RNA (1)...(19): siRNA sense strand
ucaucuaacuugucauguu

SEQ ID NO: 746158 - RNA, 19 nt, Homo sapiens
  misc_RNA (1)...(19): siRNA sense strand
gcaacaauaaagaugauga

SEQ ID NO: 746159 - RNA, 19 nt, Homo sapiens
  misc_RNA (1)...(19): siRNA sense strand
gagaagaagaauuauguuc

SEQ ID NO: 746160 - RNA, 19 nt, Homo sapiens
  misc_RNA (1)...(19): siRNA sense strand
gcuagagaauguuacaaag

SEQ ID NO: 746161 - RNA, 19 nt, Homo sapiens
  misc_RNA (1)...(19): siRNA sense strand
acagagaucuacucagaca

SEQ ID NO: 746162 - RNA, 19 nt, Homo sapiens
  misc_RNA (1)...(19): siRNA sense strand
gugauaauuugcaacauag

SEQ ID NO: 746163 - RNA, 19 nt, Homo sapiens
  misc_RNA (1)...(19): siRNA sense strand
gaaguugaauaugauugug

SEQ ID NO: 746164 - RNA, 19 nt, Homo sapiens
  misc_RNA (1)...(19): siRNA sense strand
aaacggaggagaucucuug

SEQ ID NO: 746165 - RNA, 19 nt, Homo sapiens
  misc_RNA (1)...(19): siRNA sense strand
acagaaacaucagcaguug

SEQ ID NO: 746166 - RNA, 19 nt, Homo sapiens
  misc_RNA (1)...(19): siRNA sense strand
aaagacagaugaaguuacu

SEQ ID NO: 746167 - RNA, 19 nt, Homo sapiens
  misc_RNA (1)...(19): siRNA sense strand
acacaaagaacauagguau

SEQ ID NO: 746168 - RNA, 19 nt, Homo sapiens
  misc_RNA (1)...(19): siRNA sense strand
gccagaaguugaauaugau

SEQ ID NO: 746169 - RNA, 19 nt, Homo sapiens
  misc_RNA (1)...(19): siRNA sense strand
caacagccuccucgauuga

SEQ ID NO: 746170 - RNA, 19 nt, Homo sapiens
  misc_RNA (1)...(19): siRNA sense strand
acaacagccuccucgauug

SEQ ID NO: 746171 - RNA, 19 nt, Homo sapiens
  misc_RNA (1)...(19): siRNA sense strand
caaacaagaacaguugaaa

SEQ ID NO: 746172 - RNA, 19 nt, Homo sapiens
  misc_RNA (1)...(19): siRNA sense strand
caucagguuuauccaauuc

SEQ ID NO: 746173 - RNA, 19 nt, Homo sapiens
  misc_RNA (1)...(19): siRNA sense strand
ggagcaauacguuuccauu

SEQ ID NO: 746174 - RNA, 19 nt, Homo sapiens
  misc_RNA (1)...(19): siRNA sense strand
guguagaacaggaaauuaa

SEQ ID NO: 746175 - RNA, 19 nt, Homo sapiens
  misc_RNA (1)...(19): siRNA sense strand
uaaaugagacuaacaaacg

SEQ ID NO: 746176 - RNA, 19 nt, Homo sapiens
  misc_RNA (1)...(19): siRNA sense strand
gcuauuggaacacaaagaa

SEQ ID NO: 746177 - RNA, 19 nt, Homo sapiens
  misc_RNA (1)...(19): siRNA sense strand
gaacacaaagaacauaggu

SEQ ID NO: 746178 - RNA, 19 nt, Homo sapiens
  misc_RNA (1)...(19): siRNA sense strand
gaugaugacccaaaugaag

SEQ ID NO: 746179 - RNA, 19 nt, Homo sapiens
  misc_RNA (1)...(19): siRNA sense strand
gagauggcaacaauaaaga

SEQ ID NO: 746180 - RNA, 19 nt, Homo sapiens
  misc_RNA (1)...(19): siRNA sense strand
uggaggagauggcaacaau

SEQ ID NO: 746181 - RNA, 19 nt, Homo sapiens
  misc_RNA (1)...(19): siRNA sense strand
gcuaauggagcaauacguu

SEQ ID NO: 746182 - RNA, 19 nt, Homo sapiens
  misc_RNA (1)...(19): siRNA sense strand
uagaccuuguggauaauua

SEQ ID NO: 746183 - RNA, 19 nt, Homo sapiens
  misc_RNA (1)...(19): siRNA sense strand
gacauggccuguaugagaa

SEQ ID NO: 746184 - RNA, 19 nt, Homo sapiens
  misc_RNA (1)...(19): siRNA sense strand
guaacuauccgcacuagaa

SEQ ID NO: 746185 - RNA, 19 nt, Homo sapiens
  misc_RNA (1)...(19): siRNA sense strand
gaacgcaagaacagaauga

SEQ ID NO: 746186 - RNA, 19 nt, Homo sapiens
  misc_RNA (1)...(19): siRNA sense strand
gaacgacaccguaacuauc

SEQ ID NO: 746187 - RNA, 19 nt, Homo sapiens
  misc_RNA (1)...(19): siRNA sense strand
gcaagaacagaaugaagaa

SEQ ID NO: 746188 - RNA, 19 nt, Homo sapiens
  misc_RNA (1)...(19): siRNA sense strand
gaaaggaacgcaagaacag

SEQ ID NO: 746189 - RNA, 19 nt, Homo sapiens
  misc_RNA (1)...(19): siRNA sense strand
cuagaaaguucaugaccaa

SEQ ID NO: 746190 - RNA, 19 nt, Homo sapiens
  misc_RNA (1)...(19): siRNA sense strand
gcuuuggcaugauuuauga

SEQ ID NO: 746191 - RNA, 19 nt, Homo sapiens
  misc_RNA (1)...(19): siRNA sense strand
agacauggccuguaugaga

SEQ ID NO: 746192 - RNA, 19 nt, Homo sapiens
  misc_RNA (1)...(19): siRNA sense strand
cgacagugccuaagacaga

SEQ ID NO: 746193 - RNA, 19 nt, Homo sapiens
  misc_RNA (1)...(19): siRNA sense strand
caagacauggccuguauga

SEQ ID NO: 746194 - RNA, 19 nt, Homo sapiens
  misc_RNA (1)...(19): siRNA sense strand
acaacuggcuuuggcauga

SEQ ID NO: 746195 - RNA, 19 nt, Homo sapiens
  misc_RNA (1)...(19): siRNA sense strand
caagaaagcaacgaaagga

SEQ ID NO: 746196 - RNA, 19 nt, Homo sapiens
  misc_RNA (1)...(19): siRNA sense strand
caauguuggugcuggcaaa

SEQ ID NO: 746197 - RNA, 19 nt, Homo sapiens
  misc_RNA (1)...(19): siRNA sense strand
ggacugcaaaggccaaugu

SEQ ID NO: 746198 - RNA, 19 nt, Homo sapiens
  misc_RNA (1)...(19): siRNA sense strand
uaacuauccgcacuagaaa

SEQ ID NO: 746199 - RNA, 19 nt, Homo sapiens
  misc_RNA (1)...(19): siRNA sense strand
ugcaagacauggccuguau

SEQ ID NO: 746200 - RNA, 19 nt, Homo sapiens
  misc_RNA (1)...(19): siRNA sense strand
gacagugccuaagacagaa

SEQ ID NO: 746201 - RNA, 19 nt, Homo sapiens
  misc_RNA (1)...(19): siRNA sense strand
caacgaaaggaacgcaaga

SEQ ID NO: 746202 - RNA, 19 nt, Homo sapiens
  misc_RNA (1)...(19): siRNA sense strand
agaacagaaugaagaaagu

SEQ ID NO: 746203 - RNA, 19 nt, Homo sapiens
  misc_RNA (1)...(19): siRNA sense strand
cgaaaggaacgcaagaaca

SEQ ID NO: 746204 - RNA, 19 nt, Homo sapiens
  misc_RNA (1)...(19): siRNA sense strand
guucaugaccaaccgacua

SEQ ID NO: 746205 - RNA, 19 nt, Homo sapiens
  misc_RNA (1)...(19): siRNA sense strand
gaacagaaugaagaaaguc

SEQ ID NO: 746206 - RNA, 19 nt, Homo sapiens
  misc_RNA (1)...(19): siRNA sense strand
gauuuaugauucccuggau

SEQ ID NO: 746207 - RNA, 19 nt, Homo sapiens
  misc_RNA (1)...(19): siRNA sense strand
uuuaugauucccuggauua

SEQ ID NO: 746208 - RNA, 19 nt, Homo sapiens
  misc_RNA (1)...(19): siRNA sense strand
uauccgcacuagaaaguuc

SEQ ID NO: 746209 - RNA, 19 nt, Homo sapiens
  misc_RNA (1)...(19): siRNA sense strand
cgcaagaacagaaugaaga

SEQ ID NO: 746210 - RNA, 19 nt, Homo sapiens
  misc_RNA (1)...(19): siRNA sense strand
ccuggauuaugcaaagaaa

SEQ ID NO: 746211 - RNA, 19 nt, Homo sapiens
  misc_RNA (1)...(19): siRNA sense strand
cuacuucagaggaaacaaa

SEQ ID NO: 746212 - RNA, 19 nt, Homo sapiens
  misc_RNA (1)...(19): siRNA sense strand
caacuggcuuuggcaugau

SEQ ID NO: 746213 - RNA, 19 nt, Homo sapiens
  misc_RNA (1)...(19): siRNA sense strand
agacagaaauucgggaaaa

SEQ ID NO: 746214 - RNA, 19 nt, Homo sapiens
  misc_RNA (1)...(19): siRNA sense strand
caagaacagaaugaagaaa

SEQ ID NO: 746215 - RNA, 19 nt, Homo sapiens
  misc_RNA (1)...(19): siRNA sense strand
ggucauugauguccuucac

SEQ ID NO: 746216 - RNA, 19 nt, Homo sapiens
  misc_RNA (1)...(19): siRNA sense strand
gcaagacaacuggcuuugg

SEQ ID NO: 746217 - RNA, 19 nt, Homo sapiens
  misc_RNA (1)...(19): siRNA sense strand
gcaagacauggccuguaug

SEQ ID NO: 746218 - RNA, 19 nt, Homo sapiens
  misc_RNA (1)...(19): siRNA sense strand
ggaacgcaagaacagaaug

SEQ ID NO: 746219 - RNA, 19 nt, Homo sapiens
  misc_RNA (1)...(19): siRNA sense strand
ucaagaaagcaacgaaagg

SEQ ID NO: 746220 - RNA, 19 nt, Homo sapiens
  misc_RNA (1)...(19): siRNA sense strand
gcacuagaaaguucaugac

SEQ ID NO: 746221 - RNA, 19 nt, Homo sapiens
  misc_RNA (1)...(19): siRNA sense strand
ccucaagaaagcaacgaaa

SEQ ID NO: 746222 - RNA, 19 nt, Homo sapiens
  misc_RNA (1)...(19): siRNA sense strand
aagaacagaaugaagaaag

SEQ ID NO: 746223 - RNA, 19 nt, Homo sapiens
  misc_RNA (1)...(19): siRNA sense strand
aagaaagcaacgaaaggaa

SEQ ID NO: 746224 - RNA, 19 nt, Homo sapiens
  misc_RNA (1)...(19): siRNA sense strand
gacauggccuguaugagaa

SEQ ID NO: 746225 - RNA, 19 nt, Homo sapiens
  misc_RNA (1)...(19): siRNA sense strand
guaacuauccgcacuagaa

SEQ ID NO: 746226 - RNA, 19 nt, Homo sapiens
  misc_RNA (1)...(19): siRNA sense strand
gaacgcaagaacagaauga

SEQ ID NO: 746227 - RNA, 19 nt, Homo sapiens
  misc_RNA (1)...(19): siRNA sense strand
gaacgacaccguaacuauc

SEQ ID NO: 746228 - RNA, 19 nt, Homo sapiens
  misc_RNA (1)...(19): siRNA sense strand
gcaagaacagaaugaagaa

SEQ ID NO: 746229 - RNA, 19 nt, Homo sapiens
  misc_RNA (1)...(19): siRNA sense strand
gaaaggaacgcaagaacag

SEQ ID NO: 746230 - RNA, 19 nt, Homo sapiens
  misc_RNA (1)...(19): siRNA sense strand
cuagaaaguucaugaccaa

SEQ ID NO: 746231 - RNA, 19 nt, Homo sapiens
  misc_RNA (1)...(19): siRNA sense strand
gcuuuggcaugauuuauga

SEQ ID NO: 746232 - RNA, 19 nt, Homo sapiens
  misc_RNA (1)...(19): siRNA sense strand
agacauggccuguaugaga

SEQ ID NO: 746233 - RNA, 19 nt, Homo sapiens
  misc_RNA (1)...(19): siRNA sense strand
cgacagugccuaagacaga

SEQ ID NO: 746234 - RNA, 19 nt, Homo sapiens
  misc_RNA (1)...(19): siRNA sense strand
caagacauggccuguauga

SEQ ID NO: 746235 - RNA, 19 nt, Homo sapiens
  misc_RNA (1)...(19): siRNA sense strand
acaacuggcuuuggcauga

SEQ ID NO: 746236 - RNA, 19 nt, Homo sapiens
  misc_RNA (1)...(19): siRNA sense strand
caagaaagcaacgaaagga

SEQ ID NO: 746237 - RNA, 19 nt, Homo sapiens
  misc_RNA (1)...(19): siRNA sense strand
ggacugcaaaggccaaugu

SEQ ID NO: 746238 - RNA, 19 nt, Homo sapiens
  misc_RNA (1)...(19): siRNA sense strand
uaacuauccgcacuagaaa

SEQ ID NO: 746239 - RNA, 19 nt, Homo sapiens
  misc_RNA (1)...(19): siRNA sense strand
ugcaagacauggccuguau

SEQ ID NO: 746240 - RNA, 19 nt, Homo sapiens
  misc_RNA (1)...(19): siRNA sense strand
gacagugccuaagacagaa

SEQ ID NO: 746241 - RNA, 19 nt, Homo sapiens
  misc_RNA (1)...(19): siRNA sense strand
caacgaaaggaacgcaaga

SEQ ID NO: 746242 - RNA, 19 nt, Homo sapiens
  misc_RNA (1)...(19): siRNA sense strand
agaacagaaugaagaaagu

SEQ ID NO: 746243 - RNA, 19 nt, Homo sapiens
  misc_RNA (1)...(19): siRNA sense strand
cgaaaggaacgcaagaaca

SEQ ID NO: 746244 - RNA, 19 nt, Homo sapiens
  misc_RNA (1)...(19): siRNA sense strand
gauuuaugauucccuggau

SEQ ID NO: 746245 - RNA, 19 nt, Homo sapiens
  misc_RNA (1)...(19): siRNA sense strand
gaacagaaugaagaaaguc

SEQ ID NO: 746246 - RNA, 19 nt, Homo sapiens
  misc_RNA (1)...(19): siRNA sense strand
guucaugaccaaccgacua

SEQ ID NO: 746247 - RNA, 19 nt, Homo sapiens
  misc_RNA (1)...(19): siRNA sense strand
uuuaugauucccuggauua

SEQ ID NO: 746248 - RNA, 19 nt, Homo sapiens
  misc_RNA (1)...(19): siRNA sense strand
uauccgcacuagaaaguuc

SEQ ID NO: 746249 - RNA, 19 nt, Homo sapiens
  misc_RNA (1)...(19): siRNA sense strand
cgcaagaacagaaugaaga

SEQ ID NO: 746250 - RNA, 19 nt, Homo sapiens
  misc_RNA (1)...(19): siRNA sense strand
ccuggauuaugcaaagaaa

SEQ ID NO: 746251 - RNA, 19 nt, Homo sapiens
  misc_RNA (1)...(19): siRNA sense strand
cuacuucagaggaaacaaa

SEQ ID NO: 746252 - RNA, 19 nt, Homo sapiens
  misc_RNA (1)...(19): siRNA sense strand
caacuggcuuuggcaugau

SEQ ID NO: 746253 - RNA, 19 nt, Homo sapiens
  misc_RNA (1)...(19): siRNA sense strand
agacagaaauucgggaaaa

SEQ ID NO: 746254 - RNA, 19 nt, Homo sapiens
  misc_RNA (1)...(19): siRNA sense strand
caagaacagaaugaagaaa

SEQ ID NO: 746255 - RNA, 19 nt, Homo sapiens
  misc_RNA (1)...(19): siRNA sense strand
ggucauugauguccuucac

SEQ ID NO: 746256 - RNA, 19 nt, Homo sapiens
  misc_RNA (1)...(19): siRNA sense strand
gcaagacaacuggcuuugg

SEQ ID NO: 746257 - RNA, 19 nt, Homo sapiens
  misc_RNA (1)...(19): siRNA sense strand
gcaagacauggccuguaug

SEQ ID NO: 746258 - RNA, 19 nt, Homo sapiens
  misc_RNA (1)...(19): siRNA sense strand
ggaacgcaagaacagaaug

SEQ ID NO: 746259 - RNA, 19 nt, Homo sapiens
  misc_RNA (1)...(19): siRNA sense strand
ucaagaaagcaacgaaagg

SEQ ID NO: 746260 - RNA, 19 nt, Homo sapiens
  misc_RNA (1)...(19): siRNA sense strand
gcacuagaaaguucaugac

SEQ ID NO: 746261 - RNA, 19 nt, Homo sapiens
  misc_RNA (1)...(19): siRNA sense strand
ccucaagaaagcaacgaaa

SEQ ID NO: 746262 - RNA, 19 nt, Homo sapiens
  misc_RNA (1)...(19): siRNA sense strand
aagaacagaaugaagaaag

SEQ ID NO: 746263 - RNA, 19 nt, Homo sapiens
  misc_RNA (1)...(19): siRNA sense strand
aagaaagcaacgaaaggaa

SEQ ID NO: 746264 - RNA, 19 nt, Homo sapiens
  misc_RNA (1)...(19): siRNA sense strand
gaacagaggcuuucuucca

SEQ ID NO: 746265 - RNA, 19 nt, Homo sapiens
  misc_RNA (1)...(19): siRNA sense strand
ccagauggcuacaaugugu

SEQ ID NO: 746266 - RNA, 19 nt, Homo sapiens
  misc_RNA (1)...(19): siRNA sense strand
gaggagauccgcccagaug

SEQ ID NO: 746267 - RNA, 19 nt, Homo sapiens
  misc_RNA (1)...(19): siRNA sense strand
ggaggaagacugugcuuuc

SEQ ID NO: 746268 - RNA, 19 nt, Homo sapiens
  misc_RNA (1)...(19): siRNA sense strand
guacaagaacagaggcuuu

SEQ ID NO: 746269 - RNA, 19 nt, Homo sapiens
  misc_RNA (1)...(19): siRNA sense strand
aaucugacauguucucuuc

SEQ ID NO: 746270 - RNA, 19 nt, Homo sapiens
  misc_RNA (1)...(19): siRNA sense strand
cuuggaaucugacauguuc

SEQ ID NO: 746271 - RNA, 19 nt, Homo sapiens
  misc_RNA (1)...(19): siRNA sense strand
ccagagcgcgcacaguuug

SEQ ID NO: 746272 - RNA, 19 nt, Homo sapiens
  misc_RNA (1)...(19): siRNA sense strand
acaguuugcuggagaucaa

SEQ ID NO: 746273 - RNA, 19 nt, Homo sapiens
  misc_RNA (1)...(19): siRNA sense strand
cgugaggagucccagcuuu

SEQ ID NO: 746274 - RNA, 19 nt, Homo sapiens
  misc_RNA (1)...(19): siRNA sense strand
ccacuuggaaucugacaug

SEQ ID NO: 746275 - RNA, 19 nt, Homo sapiens
  misc_RNA (1)...(19): siRNA sense strand
gaggaagacugugcuuucg

SEQ ID NO: 746276 - RNA, 19 nt, Homo sapiens
  misc_RNA (1)...(19): siRNA sense strand
gcccagauggcuacaaugu

SEQ ID NO: 746277 - RNA, 19 nt, Homo sapiens
  misc_RNA (1)...(19): siRNA sense strand
agcggcagcuguacaagaa

SEQ ID NO: 746278 - RNA, 19 nt, Homo sapiens
  misc_RNA (1)...(19): siRNA sense strand
gucccagcuuugagaagua

SEQ ID NO: 746279 - RNA, 19 nt, Homo sapiens
  misc_RNA (1)...(19): siRNA sense strand
gccagagcgcgcacaguuu

SEQ ID NO: 746280 - RNA, 19 nt, Homo sapiens
  misc_RNA (1)...(19): siRNA sense strand
ccgcccagauggcuacaau

SEQ ID NO: 746281 - RNA, 19 nt, Homo sapiens
  misc_RNA (1)...(19): siRNA sense strand
gugaggagucccagcuuug

SEQ ID NO: 746282 - RNA, 19 nt, Homo sapiens
  misc_RNA (1)...(19): siRNA sense strand
guacucggaggaagacugu

SEQ ID NO: 746283 - RNA, 19 nt, Homo sapiens
  misc_RNA (1)...(19): siRNA sense strand
gaaucugacauguucucuu

SEQ ID NO: 746284 - RNA, 19 nt, Homo sapiens
  misc_RNA (1)...(19): siRNA sense strand
cggcagcuguacaagaaca

SEQ ID NO: 746285 - RNA, 19 nt, Homo sapiens
  misc_RNA (1)...(19): siRNA sense strand
ggagucccagcuuugagaa

SEQ ID NO: 746286 - RNA, 19 nt, Homo sapiens
  misc_RNA (1)...(19): siRNA sense strand
ugaggagucccagcuuuga

SEQ ID NO: 746287 - RNA, 19 nt, Homo sapiens
  misc_RNA (1)...(19): siRNA sense strand
ucccagcuuugagaaguaa

SEQ ID NO: 746288 - RNA, 19 nt, Homo sapiens
  misc_RNA (1)...(19): siRNA sense strand
gcggauaccucgcccaugu

SEQ ID NO: 746289 - RNA, 19 nt, Homo sapiens
  misc_RNA (1)...(19): siRNA sense strand
gaagagaagcaucgaggaa

SEQ ID NO: 746290 - RNA, 19 nt, Homo sapiens
  misc_RNA (1)...(19): siRNA sense strand
ggaagaagccaaaauuaaa

SEQ ID NO: 746291 - RNA, 19 nt, Homo sapiens
  misc_RNA (1)...(19): siRNA sense strand
gcagucagauccacagcau

SEQ ID NO: 746292 - RNA, 19 nt, Homo sapiens
  misc_RNA (1)...(19): siRNA sense strand
ggacggucauuuacgagau

SEQ ID NO: 746293 - RNA, 19 nt, Homo sapiens
  misc_RNA (1)...(19): siRNA sense strand
ggagugaggauucuuugga

SEQ ID NO: 746294 - RNA, 19 nt, Homo sapiens
  misc_RNA (1)...(19): siRNA sense strand
ccaggacggucauuuacga

SEQ ID NO: 746295 - RNA, 19 nt, Homo sapiens
  misc_RNA (1)...(19): siRNA sense strand
uggaauacgucaggaagaa

SEQ ID NO: 746296 - RNA, 19 nt, Homo sapiens
  misc_RNA (1)...(19): siRNA sense strand
cuaagcaugugcccgagaa

SEQ ID NO: 746297 - RNA, 19 nt, Homo sapiens
  misc_RNA (1)...(19): siRNA sense strand
gacggucauuuacgagauu

SEQ ID NO: 746298 - RNA, 19 nt, Homo sapiens
  misc_RNA (1)...(19): siRNA sense strand
gagguuagaggagcauuug

SEQ ID NO: 746299 - RNA, 19 nt, Homo sapiens
  misc_RNA (1)...(19): siRNA sense strand
ggauaccucgcccauguuc

SEQ ID NO: 746300 - RNA, 19 nt, Homo sapiens
  misc_RNA (1)...(19): siRNA sense strand
caagguggccaagguggaa

SEQ ID NO: 746301 - RNA, 19 nt, Homo sapiens
  misc_RNA (1)...(19): siRNA sense strand
gguuagaggagcauuugga

SEQ ID NO: 746302 - RNA, 19 nt, Homo sapiens
  misc_RNA (1)...(19): siRNA sense strand
gcgucaagguggccaaggu

SEQ ID NO: 746303 - RNA, 19 nt, Homo sapiens
  misc_RNA (1)...(19): siRNA sense strand
caggaagaagccaaaauua

SEQ ID NO: 746304 - RNA, 19 nt, Homo sapiens
  misc_RNA (1)...(19): siRNA sense strand
gaaguccaggugagguuag

SEQ ID NO: 746305 - RNA, 19 nt, Homo sapiens
  misc_RNA (1)...(19): siRNA sense strand
ccacgccacuaagcaugug

SEQ ID NO: 746306 - RNA, 19 nt, Homo sapiens
  misc_RNA (1)...(19): siRNA sense strand
agaaguccaggugagguua

SEQ ID NO: 746307 - RNA, 19 nt, Homo sapiens
  misc_RNA (1)...(19): siRNA sense strand
ucaggaagaagccaaaauu

SEQ ID NO: 746308 - RNA, 19 nt, Homo sapiens
  misc_RNA (1)...(19): siRNA sense strand
uggccaagguggaauacgu

SEQ ID NO: 746309 - RNA, 19 nt, Homo sapiens
  misc_RNA (1)...(19): siRNA sense strand
gcggauaccucgcccaugu

SEQ ID NO: 746310 - RNA, 19 nt, Homo sapiens
  misc_RNA (1)...(19): siRNA sense strand
gaagagaagcaucgaggaa

SEQ ID NO: 746311 - RNA, 19 nt, Homo sapiens
  misc_RNA (1)...(19): siRNA sense strand
ggaagaagccaaaauuaaa

SEQ ID NO: 746312 - RNA, 19 nt, Homo sapiens
  misc_RNA (1)...(19): siRNA sense strand
gcagucagauccacagcau

SEQ ID NO: 746313 - RNA, 19 nt, Homo sapiens
  misc_RNA (1)...(19): siRNA sense strand
ggacggucauuuacgagau

SEQ ID NO: 746314 - RNA, 19 nt, Homo sapiens
  misc_RNA (1)...(19): siRNA sense strand
ggagugaggauucuuugga

SEQ ID NO: 746315 - RNA, 19 nt, Homo sapiens
  misc_RNA (1)...(19): siRNA sense strand
ccaggacggucauuuacga

SEQ ID NO: 746316 - RNA, 19 nt, Homo sapiens
  misc_RNA (1)...(19): siRNA sense strand
uggaauacgucaggaagaa

SEQ ID NO: 746317 - RNA, 19 nt, Homo sapiens
  misc_RNA (1)...(19): siRNA sense strand
cuaagcaugugcccgagaa

SEQ ID NO: 746318 - RNA, 19 nt, Homo sapiens
  misc_RNA (1)...(19): siRNA sense strand
gacggucauuuacgagauu

SEQ ID NO: 746319 - RNA, 19 nt, Homo sapiens
  misc_RNA (1)...(19): siRNA sense strand
gagguuagaggagcauuug

SEQ ID NO: 746320 - RNA, 19 nt, Homo sapiens
  misc_RNA (1)...(19): siRNA sense strand
ggauaccucgcccauguuc

SEQ ID NO: 746321 - RNA, 19 nt, Homo sapiens
  misc_RNA (1)...(19): siRNA sense strand
caagguggccaagguggaa

SEQ ID NO: 746322 - RNA, 19 nt, Homo sapiens
  misc_RNA (1)...(19): siRNA sense strand
gguuagaggagcauuugga

SEQ ID NO: 746323 - RNA, 19 nt, Homo sapiens
  misc_RNA (1)...(19): siRNA sense strand
gcgucaagguggccaaggu

SEQ ID NO: 746324 - RNA, 19 nt, Homo sapiens
  misc_RNA (1)...(19): siRNA sense strand
caggaagaagccaaaauua

SEQ ID NO: 746325 - RNA, 19 nt, Homo sapiens
  misc_RNA (1)...(19): siRNA sense strand
gaaguccaggugagguuag

SEQ ID NO: 746326 - RNA, 19 nt, Homo sapiens
  misc_RNA (1)...(19): siRNA sense strand
ccacgccacuaagcaugug

SEQ ID NO: 746327 - RNA, 19 nt, Homo sapiens
  misc_RNA (1)...(19): siRNA sense strand
agaaguccaggugagguua

SEQ ID NO: 746328 - RNA, 19 nt, Homo sapiens
  misc_RNA (1)...(19): siRNA sense strand
ucaggaagaagccaaaauu

SEQ ID NO: 746329 - RNA, 19 nt, Homo sapiens
  misc_RNA (1)...(19): siRNA sense strand
uggccaagguggaauacgu

SEQ ID NO: 746330 - RNA, 19 nt, Homo sapiens
  misc_RNA (1)...(19): siRNA sense strand
gaacaagugucacaauuac

SEQ ID NO: 746331 - RNA, 19 nt, Homo sapiens
  misc_RNA (1)...(19): siRNA sense strand
ggaacaagugucacaauua

SEQ ID NO: 746332 - RNA, 19 nt, Homo sapiens
  misc_RNA (1)...(19): siRNA sense strand
caaucgaccuuuacugaaa

SEQ ID NO: 746333 - RNA, 19 nt, Homo sapiens
  misc_RNA (1)...(19): siRNA sense strand
gaaagucacaaccaauaaa

SEQ ID NO: 746334 - RNA, 19 nt, Homo sapiens
  misc_RNA (1)...(19): siRNA sense strand
ggaaagucacaaccaauaa

SEQ ID NO: 746335 - RNA, 19 nt, Homo sapiens
  misc_RNA (1)...(19): siRNA sense strand
ccacauugccuuacugaaa

SEQ ID NO: 746336 - RNA, 19 nt, Homo sapiens
  misc_RNA (1)...(19): siRNA sense strand
aaagaaauguucgccauga

SEQ ID NO: 746337 - RNA, 19 nt, Homo sapiens
  misc_RNA (1)...(19): siRNA sense strand
caauaaaugucuggaacaa

SEQ ID NO: 746338 - RNA, 19 nt, Homo sapiens
  misc_RNA (1)...(19): siRNA sense strand
gaaacucagauaaaugcua

SEQ ID NO: 746339 - RNA, 19 nt, Homo sapiens
  misc_RNA (1)...(19): siRNA sense strand
aaaggaaagucacaaccaa

SEQ ID NO: 746340 - RNA, 19 nt, Homo sapiens
  misc_RNA (1)...(19): siRNA sense strand
uggaacaagugucacaauu

SEQ ID NO: 746341 - RNA, 19 nt, Homo sapiens
  misc_RNA (1)...(19): siRNA sense strand
ucgcuucaaucgaccuuua

SEQ ID NO: 746342 - RNA, 19 nt, Homo sapiens
  misc_RNA (1)...(19): siRNA sense strand
auaaaugucuggaacaagu

SEQ ID NO: 746343 - RNA, 19 nt, Homo sapiens
  misc_RNA (1)...(19): siRNA sense strand
cacauugccuuacugaaau

SEQ ID NO: 746344 - RNA, 19 nt, Homo sapiens
  misc_RNA (1)...(19): siRNA sense strand
gaccuuuacugaaacaaca

SEQ ID NO: 746345 - RNA, 19 nt, Homo sapiens
  misc_RNA (1)...(19): siRNA sense strand
gcaaugaagaagaggagaa

SEQ ID NO: 746346 - RNA, 19 nt, Homo sapiens
  misc_RNA (1)...(19): siRNA sense strand
aggaaagucacaaccaaua

SEQ ID NO: 746347 - RNA, 19 nt, Homo sapiens
  misc_RNA (1)...(19): siRNA sense strand
agaaauguucgccaugaaa

SEQ ID NO: 746348 - RNA, 19 nt, Homo sapiens
  misc_RNA (1)...(19): siRNA sense strand
caaugaagaagaggagaaa

SEQ ID NO: 746349 - RNA, 19 nt, Homo sapiens
  misc_RNA (1)...(19): siRNA sense strand
aagaaauguucgccaugaa

SEQ ID NO: 746350 - RNA, 19 nt, Homo sapiens
  misc_RNA (1)...(19): siRNA sense strand
acaagugucacaauuacaa

SEQ ID NO: 746351 - RNA, 19 nt, Homo sapiens
  misc_RNA (1)...(19): siRNA sense strand
cuacucaggcaaugaagaa

SEQ ID NO: 746352 - RNA, 19 nt, Homo sapiens
  misc_RNA (1)...(19): siRNA sense strand
gaaauguucgccaugaaaa

SEQ ID NO: 746353 - RNA, 19 nt, Homo sapiens
  misc_RNA (1)...(19): siRNA sense strand
uaaaugcuacucaggcaau

SEQ ID NO: 746354 - RNA, 19 nt, Homo sapiens
  misc_RNA (1)...(19): siRNA sense strand
ucaaucgaccuuuacugaa

SEQ ID NO: 746355 - RNA, 19 nt, Homo sapiens
  misc_RNA (1)...(19): siRNA sense strand
ugucacaauuacaaggauu

SEQ ID NO: 746356 - RNA, 19 nt, Homo sapiens
  misc_RNA (1)...(19): siRNA sense strand
acugaaauccagagccuaa

SEQ ID NO: 746357 - RNA, 19 nt, Homo sapiens
  misc_RNA (1)...(19): siRNA sense strand
ccaauaaaugucuggaaca

SEQ ID NO: 746358 - RNA, 19 nt, Homo sapiens
  misc_RNA (1)...(19): siRNA sense strand
agucacaaccaauaaaugu

SEQ ID NO: 746359 - RNA, 19 nt, Homo sapiens
  misc_RNA (1)...(19): siRNA sense strand
ucacaaccaauaaaugucu

SEQ ID NO: 746360 - RNA, 19 nt, Homo sapiens
  misc_RNA (1)...(19): siRNA sense strand
cggaaacucagauaaaugc

SEQ ID NO: 746361 - RNA, 19 nt, Homo sapiens
  misc_RNA (1)...(19): siRNA sense strand
uucaaucgaccuuuacuga

SEQ ID NO: 746362 - RNA, 19 nt, Homo sapiens
  misc_RNA (1)...(19): siRNA sense strand
auucggaaacucagauaaa

SEQ ID NO: 746363 - RNA, 19 nt, Homo sapiens
  misc_RNA (1)...(19): siRNA sense strand
uucggaaacucagauaaau

SEQ ID NO: 746364 - RNA, 19 nt, Homo sapiens
  misc_RNA (1)...(19): siRNA sense strand
gaacaagugucacaauuac

SEQ ID NO: 746365 - RNA, 19 nt, Homo sapiens
  misc_RNA (1)...(19): siRNA sense strand
ggaacaagugucacaauua

SEQ ID NO: 746366 - RNA, 19 nt, Homo sapiens
  misc_RNA (1)...(19): siRNA sense strand
caaucgaccuuuacugaaa

SEQ ID NO: 746367 - RNA, 19 nt, Homo sapiens
  misc_RNA (1)...(19): siRNA sense strand
gaaagucacaaccaauaaa

SEQ ID NO: 746368 - RNA, 19 nt, Homo sapiens
  misc_RNA (1)...(19): siRNA sense strand
ggaaagucacaaccaauaa

SEQ ID NO: 746369 - RNA, 19 nt, Homo sapiens
  misc_RNA (1)...(19): siRNA sense strand
caauaaaugucuggaacaa

SEQ ID NO: 746370 - RNA, 19 nt, Homo sapiens
  misc_RNA (1)...(19): siRNA sense strand
gaaacucagauaaaugcua

SEQ ID NO: 746371 - RNA, 19 nt, Homo sapiens
  misc_RNA (1)...(19): siRNA sense strand
aaaggaaagucacaaccaa

SEQ ID NO: 746372 - RNA, 19 nt, Homo sapiens
  misc_RNA (1)...(19): siRNA sense strand
uggaacaagugucacaauu

SEQ ID NO: 746373 - RNA, 19 nt, Homo sapiens
  misc_RNA (1)...(19): siRNA sense strand
ucgcuucaaucgaccuuua

SEQ ID NO: 746374 - RNA, 19 nt, Homo sapiens
  misc_RNA (1)...(19): siRNA sense strand
auaaaugucuggaacaagu

SEQ ID NO: 746375 - RNA, 19 nt, Homo sapiens
  misc_RNA (1)...(19): siRNA sense strand
gaccuuuacugaaacaaca

SEQ ID NO: 746376 - RNA, 19 nt, Homo sapiens
  misc_RNA (1)...(19): siRNA sense strand
gcaaugaagaagaggagaa

SEQ ID NO: 746377 - RNA, 19 nt, Homo sapiens
  misc_RNA (1)...(19): siRNA sense strand
aggaaagucacaaccaaua

SEQ ID NO: 746378 - RNA, 19 nt, Homo sapiens
  misc_RNA (1)...(19): siRNA sense strand
caaugaagaagaggagaaa

SEQ ID NO: 746379 - RNA, 19 nt, Homo sapiens
  misc_RNA (1)...(19): siRNA sense strand
cuacucaggcaaugaagaa

SEQ ID NO: 746380 - RNA, 19 nt, Homo sapiens
  misc_RNA (1)...(19): siRNA sense strand
acaagugucacaauuacaa

SEQ ID NO: 746381 - RNA, 19 nt, Homo sapiens
  misc_RNA (1)...(19): siRNA sense strand
uaaaugcuacucaggcaau

SEQ ID NO: 746382 - RNA, 19 nt, Homo sapiens
  misc_RNA (1)...(19): siRNA sense strand
ucaaucgaccuuuacugaa

SEQ ID NO: 746383 - RNA, 19 nt, Homo sapiens
  misc_RNA (1)...(19): siRNA sense strand
ugucacaauuacaaggauu

SEQ ID NO: 746384 - RNA, 19 nt, Homo sapiens
  misc_RNA (1)...(19): siRNA sense strand
ccaauaaaugucuggaaca

SEQ ID NO: 746385 - RNA, 19 nt, Homo sapiens
  misc_RNA (1)...(19): siRNA sense strand
agucacaaccaauaaaugu

SEQ ID NO: 746386 - RNA, 19 nt, Homo sapiens
  misc_RNA (1)...(19): siRNA sense strand
ucacaaccaauaaaugucu

SEQ ID NO: 746387 - RNA, 19 nt, Homo sapiens
  misc_RNA (1)...(19): siRNA sense strand
cggaaacucagauaaaugc

SEQ ID NO: 746388 - RNA, 19 nt, Homo sapiens
  misc_RNA (1)...(19): siRNA sense strand
uucaaucgaccuuuacuga

SEQ ID NO: 746389 - RNA, 19 nt, Homo sapiens
  misc_RNA (1)...(19): siRNA sense strand
uucggaaacucagauaaau

SEQ ID NO: 746390 - RNA, 19 nt, Homo sapiens
  misc_RNA (1)...(19): siRNA sense strand
auucggaaacucagauaaa

SEQ ID NO: 746391 - RNA, 19 nt, Homo sapiens
  misc_RNA (1)...(19): siRNA sense strand
ggacaaagcucaaguauga

SEQ ID NO: 746392 - RNA, 19 nt, Homo sapiens
  misc_RNA (1)...(19): siRNA sense strand
gaauauaacuccacaagau

SEQ ID NO: 746393 - RNA, 19 nt, Homo sapiens
  misc_RNA (1)...(19): siRNA sense strand
ggaacuacauuaagaggua

SEQ ID NO: 746394 - RNA, 19 nt, Homo sapiens
  misc_RNA (1)...(19): siRNA sense strand
gaacuuugcucuucaucuu

SEQ ID NO: 746395 - RNA, 19 nt, Homo sapiens
  misc_RNA (1)...(19): siRNA sense strand
ccaaggacaugcccuacua

SEQ ID NO: 746396 - RNA, 19 nt, Homo sapiens
  misc_RNA (1)...(19): siRNA sense strand
ggaagagccuccagaugug

SEQ ID NO: 746397 - RNA, 19 nt, Homo sapiens
  misc_RNA (1)...(19): siRNA sense strand
ggcaggaacuacauuaaga

SEQ ID NO: 746398 - RNA, 19 nt, Homo sapiens
  misc_RNA (1)...(19): siRNA sense strand
caggagaucuuccgcaugu

SEQ ID NO: 746399 - RNA, 19 nt, Homo sapiens
  misc_RNA (1)...(19): siRNA sense strand
uaagaagugugcuguagug

SEQ ID NO: 746400 - RNA, 19 nt, Homo sapiens
  misc_RNA (1)...(19): siRNA sense strand
ccucugagaucuucaacuu

SEQ ID NO: 746401 - RNA, 19 nt, Homo sapiens
  misc_RNA (1)...(19): siRNA sense strand
gcaaaugggcgaugaacau

SEQ ID NO: 746402 - RNA, 19 nt, Homo sapiens
  misc_RNA (1)...(19): siRNA sense strand
ggagaucuuccgcauguuu

SEQ ID NO: 746403 - RNA, 19 nt, Homo sapiens
  misc_RNA (1)...(19): siRNA sense strand
cuacaucacucaccacuac

SEQ ID NO: 746404 - RNA, 19 nt, Homo sapiens
  misc_RNA (1)...(19): siRNA sense strand
ggacaccaguggcaucuac

SEQ ID NO: 746405 - RNA, 19 nt, Homo sapiens
  misc_RNA (1)...(19): siRNA sense strand
ucacucaccacuacuauga

SEQ ID NO: 746406 - RNA, 19 nt, Homo sapiens
  misc_RNA (1)...(19): siRNA sense strand
gcugaggcacgaaauauug

SEQ ID NO: 746407 - RNA, 19 nt, Homo sapiens
  misc_RNA (1)...(19): siRNA sense strand
agacggauguggucacugu

SEQ ID NO: 746408 - RNA, 19 nt, Homo sapiens
  misc_RNA (1)...(19): siRNA sense strand
ggagcugaggcacgaaaua

SEQ ID NO: 746409 - RNA, 19 nt, Homo sapiens
  misc_RNA (1)...(19): siRNA sense strand
caucagcaccggccucauu

SEQ ID NO: 746410 - RNA, 19 nt, Homo sapiens
  misc_RNA (1)...(19): siRNA sense strand
cacgaaauauuggaaguga

SEQ ID NO: 746411 - RNA, 19 nt, Homo sapiens
  misc_RNA (1)...(19): siRNA sense strand
gagcugaggcacgaaauau

SEQ ID NO: 746412 - RNA, 19 nt, Homo sapiens
  misc_RNA (1)...(19): siRNA sense strand
gaucaacagcgccgacuuc

SEQ ID NO: 746413 - RNA, 19 nt, Homo sapiens
  misc_RNA (1)...(19): siRNA sense strand
ggucccaguuuaagaagug

SEQ ID NO: 746414 - RNA, 19 nt, Homo sapiens
  misc_RNA (1)...(19): siRNA sense strand
ucacagagagguuccacaa

SEQ ID NO: 746415 - RNA, 19 nt, Homo sapiens
  misc_RNA (1)...(19): siRNA sense strand
gaagacggauguggucacu

SEQ ID NO: 746416 - RNA, 19 nt, Homo sapiens
  misc_RNA (1)...(19): siRNA sense strand
caacggaggcaucuugaag

SEQ ID NO: 746417 - RNA, 19 nt, Homo sapiens
  misc_RNA (1)...(19): siRNA sense strand
gggcaacggaggcaucuug

SEQ ID NO: 746418 - RNA, 19 nt, Homo sapiens
  misc_RNA (1)...(19): siRNA sense strand
gccgcaagcugucuacuac

SEQ ID NO: 746419 - RNA, 19 nt, Homo sapiens
  misc_RNA (1)...(19): siRNA sense strand
gccaaccaguucaagucua

SEQ ID NO: 746420 - RNA, 19 nt, Homo sapiens
  misc_RNA (1)...(19): siRNA sense strand
ugaaggugcuguccauggu

SEQ ID NO: 746421 - RNA, 19 nt, Homo sapiens
  misc_RNA (1)...(19): siRNA sense strand
ccaaccaguucaagucuac

SEQ ID NO: 746422 - RNA, 19 nt, Homo sapiens
  misc_RNA (1)...(19): siRNA sense strand
uacuaccggucccaguuua

SEQ ID NO: 746423 - RNA, 19 nt, Homo sapiens
  misc_RNA (1)...(19): siRNA sense strand
cgcaagcugucuacuacuu

SEQ ID NO: 746424 - RNA, 19 nt, Homo sapiens
  misc_RNA (1)...(19): siRNA sense strand
ugaggggccuuuugaauau

SEQ ID NO: 746425 - RNA, 19 nt, Homo sapiens
  misc_RNA (1)...(19): siRNA sense strand
agaaguacaccauggaugu

SEQ ID NO: 746426 - RNA, 19 nt, Homo sapiens
  misc_RNA (1)...(19): siRNA sense strand
cgaaauauuggaagugaag

SEQ ID NO: 746427 - RNA, 19 nt, Homo sapiens
  misc_RNA (1)...(19): siRNA sense strand
acauuaagagguacuuuga

SEQ ID NO: 746428 - RNA, 19 nt, Homo sapiens
  misc_RNA (1)...(19): siRNA sense strand
gcacgaaauauuggaagug

SEQ ID NO: 746429 - RNA, 19 nt, Homo sapiens
  misc_RNA (1)...(19): siRNA sense strand
uauggcaggaacuacauua

SEQ ID NO: 746430 - RNA, 19 nt, Homo sapiens
  misc_RNA (1)...(19): siRNA sense strand
gaaguacaccauggaugug

SEQ ID NO: 746431 - RNA, 19 nt, Homo sapiens
  misc_RNA (1)...(19): siRNA sense strand
gcaacggaggcaucuugaa

SEQ ID NO: 746432 - RNA, 19 nt, Homo sapiens
  misc_RNA (1)...(19): siRNA sense strand
gcaagcugucuacuacuuc

SEQ ID NO: 746433 - RNA, 19 nt, Homo sapiens
  misc_RNA (1)...(19): siRNA sense strand
gcaggaacuacauuaagag

SEQ ID NO: 746434 - RNA, 19 nt, Homo sapiens
  misc_RNA (1)...(19): siRNA sense strand
ugaauauaacuccacaaga

SEQ ID NO: 746435 - RNA, 19 nt, Homo sapiens
  misc_RNA (1)...(19): siRNA sense strand
cuacuaccggucccaguuu

SEQ ID NO: 746436 - RNA, 19 nt, Homo sapiens
  misc_RNA (1)...(19): siRNA sense strand
caguucaagucuacucugu

SEQ ID NO: 746437 - RNA, 19 nt, Homo sapiens
  misc_RNA (1)...(19): siRNA sense strand
ucucugaggccaaccaguu

SEQ ID NO: 746438 - RNA, 19 nt, Homo sapiens
  misc_RNA (1)...(19): siRNA sense strand
gaagcagucagagcuguuc

SEQ ID NO: 746439 - RNA, 19 nt, Homo sapiens
  misc_RNA (1)...(19): siRNA sense strand
gcugcugccugccuucuac

SEQ ID NO: 746440 - RNA, 19 nt, Homo sapiens
  misc_RNA (1)...(19): siRNA sense strand
uuuaagaagugugcuguag

SEQ ID NO: 746441 - RNA, 19 nt, Homo sapiens
  misc_RNA (1)...(19): siRNA sense strand
gggacaaagcucaaguaug

SEQ ID NO: 746442 - RNA, 19 nt, Homo sapiens
  misc_RNA (1)...(19): siRNA sense strand
ggcacgaaauauuggaagu

SEQ ID NO: 746443 - RNA, 19 nt, Homo sapiens
  misc_RNA (1)...(19): siRNA sense strand
cgcaguaccuggucaacgu

SEQ ID NO: 746444 - RNA, 19 nt, Homo sapiens
  misc_RNA (1)...(19): siRNA sense strand
caucuucaucugcgccuuu

SEQ ID NO: 746445 - RNA, 19 nt, Homo sapiens
  misc_RNA (1)...(19): siRNA sense strand
aauauaacuccacaagaug

SEQ ID NO: 746446 - RNA, 19 nt, Homo sapiens
  misc_RNA (1)...(19): siRNA sense strand
cagagagguuccacaagcu

SEQ ID NO: 746447 - RNA, 19 nt, Homo sapiens
  misc_RNA (1)...(19): siRNA sense strand
gagaucuuccgcauguuuc

SEQ ID NO: 746448 - RNA, 19 nt, Homo sapiens
  misc_RNA (1)...(19): siRNA sense strand
cagagaaguacaccaugga

SEQ ID NO: 746449 - RNA, 19 nt, Homo sapiens
  misc_RNA (1)...(19): siRNA sense strand
gccaugcccucugagaucu

SEQ ID NO: 746450 - RNA, 19 nt, Homo sapiens
  misc_RNA (1)...(19): siRNA sense strand
gcaucuaccacaucaacca

SEQ ID NO: 746451 - RNA, 19 nt, Homo sapiens
  misc_RNA (1)...(19): siRNA sense strand
ccacaucaaccaggagauc

SEQ ID NO: 746452 - RNA, 19 nt, Homo sapiens
  misc_RNA (1)...(19): siRNA sense strand
uacauuaagagguacuuug

SEQ ID NO: 746453 - RNA, 19 nt, Homo sapiens
  misc_RNA (1)...(19): siRNA sense strand
gaaagcagcuacagagaaa

SEQ ID NO: 746454 - RNA, 19 nt, Homo sapiens
  misc_RNA (1)...(19): siRNA sense strand
gaacaggaggaggugauua

SEQ ID NO: 746455 - RNA, 19 nt, Homo sapiens
  misc_RNA (1)...(19): siRNA sense strand
gauaugcuaugucaaacug

SEQ ID NO: 746456 - RNA, 19 nt, Homo sapiens
  misc_RNA (1)...(19): siRNA sense strand
gacaaggucugcagcacuu

SEQ ID NO: 746457 - RNA, 19 nt, Homo sapiens
  misc_RNA (1)...(19): siRNA sense strand
acagagaaaugcugguuug

SEQ ID NO: 746458 - RNA, 19 nt, Homo sapiens
  misc_RNA (1)...(19): siRNA sense strand
gagaccagccuaagaguug

SEQ ID NO: 746459 - RNA, 19 nt, Homo sapiens
  misc_RNA (1)...(19): siRNA sense strand
ggaacucuuauguggauua

SEQ ID NO: 746460 - RNA, 19 nt, Homo sapiens
  misc_RNA (1)...(19): siRNA sense strand
gaacucuuauguggauuau

SEQ ID NO: 746461 - RNA, 19 nt, Homo sapiens
  misc_RNA (1)...(19): siRNA sense strand
cugcagcacuuccuugaaa

SEQ ID NO: 746462 - RNA, 19 nt, Homo sapiens
  misc_RNA (1)...(19): siRNA sense strand
gguguaggaugucggagaa

SEQ ID NO: 746463 - RNA, 19 nt, Homo sapiens
  misc_RNA (1)...(19): siRNA sense strand
ccuaagaguugcugcuuuc

SEQ ID NO: 746464 - RNA, 19 nt, Homo sapiens
  misc_RNA (1)...(19): siRNA sense strand
gagaucaugcugugccuuu

SEQ ID NO: 746465 - RNA, 19 nt, Homo sapiens
  misc_RNA (1)...(19): siRNA sense strand
aaaggaccauuuagaagug

SEQ ID NO: 746466 - RNA, 19 nt, Homo sapiens
  misc_RNA (1)...(19): siRNA sense strand
cgaaguaccaugacugugu

SEQ ID NO: 746467 - RNA, 19 nt, Homo sapiens
  misc_RNA (1)...(19): siRNA sense strand
gacugugucugaugccauu

SEQ ID NO: 746468 - RNA, 19 nt, Homo sapiens
  misc_RNA (1)...(19): siRNA sense strand
gagaaagcagcuacagaga

SEQ ID NO: 746469 - RNA, 19 nt, Homo sapiens
  misc_RNA (1)...(19): siRNA sense strand
gaagugugggcuccaguug

SEQ ID NO: 746470 - RNA, 19 nt, Homo sapiens
  misc_RNA (1)...(19): siRNA sense strand
cugaugccauucuucgaua

SEQ ID NO: 746471 - RNA, 19 nt, Homo sapiens
  misc_RNA (1)...(19): siRNA sense strand
gcucuucucaccuggcuaa

SEQ ID NO: 746472 - RNA, 19 nt, Homo sapiens
  misc_RNA (1)...(19): siRNA sense strand
gccuaagaguugcugcuuu

SEQ ID NO: 746473 - RNA, 19 nt, Homo sapiens
  misc_RNA (1)...(19): siRNA sense strand
gagugugguucuccuguca

SEQ ID NO: 746474 - RNA, 19 nt, Homo sapiens
  misc_RNA (1)...(19): siRNA sense strand
ggagaccagccuaagaguu

SEQ ID NO: 746475 - RNA, 19 nt, Homo sapiens
  misc_RNA (1)...(19): siRNA sense strand
acucugagguuccuuccuu

SEQ ID NO: 746476 - RNA, 19 nt, Homo sapiens
  misc_RNA (1)...(19): siRNA sense strand
agaaagcagcuacagagaa

SEQ ID NO: 746477 - RNA, 19 nt, Homo sapiens
  misc_RNA (1)...(19): siRNA sense strand
guaccaugacugugucuga

SEQ ID NO: 746478 - RNA, 19 nt, Homo sapiens
  misc_RNA (1)...(19): siRNA sense strand
gacagccaguugcaccuau

SEQ ID NO: 746479 - RNA, 19 nt, Homo sapiens
  misc_RNA (1)...(19): siRNA sense strand
gaaaaggaccauuuagaag

SEQ ID NO: 746480 - RNA, 19 nt, Homo sapiens
  misc_RNA (1)...(19): siRNA sense strand
aggaggaggugauuacagu

SEQ ID NO: 746481 - RNA, 19 nt, Homo sapiens
  misc_RNA (1)...(19): siRNA sense strand
ugaagaaaaggaccauuua

SEQ ID NO: 746482 - RNA, 19 nt, Homo sapiens
  misc_RNA (1)...(19): siRNA sense strand
cuaaaggagaccagccuaa

SEQ ID NO: 746483 - RNA, 19 nt, Homo sapiens
  misc_RNA (1)...(19): siRNA sense strand
ccuccacucuucagucugu

SEQ ID NO: 746484 - RNA, 19 nt, Homo sapiens
  misc_RNA (1)...(19): siRNA sense strand
agaaugagggcuccuggaa

SEQ ID NO: 746485 - RNA, 19 nt, Homo sapiens
  misc_RNA (1)...(19): siRNA sense strand
agugugggcuccaguuguu

SEQ ID NO: 746486 - RNA, 19 nt, Homo sapiens
  misc_RNA (1)...(19): siRNA sense strand
ggaugucggagaaccaaga

SEQ ID NO: 746487 - RNA, 19 nt, Homo sapiens
  misc_RNA (1)...(19): siRNA sense strand
aaaggagaccagccuaaga

SEQ ID NO: 746488 - RNA, 19 nt, Homo sapiens
  misc_RNA (1)...(19): siRNA sense strand
agauauuccuccauaccaa

SEQ ID NO: 746489 - RNA, 19 nt, Homo sapiens
  misc_RNA (1)...(19): siRNA sense strand
gaguucguguggcugagaa

SEQ ID NO: 746490 - RNA, 19 nt, Homo sapiens
  misc_RNA (1)...(19): siRNA sense strand
cuggaacucuuauguggau

SEQ ID NO: 746491 - RNA, 19 nt, Homo sapiens
  misc_RNA (1)...(19): siRNA sense strand
aaugagggcuccuggaacu

SEQ ID NO: 746492 - RNA, 19 nt, Homo sapiens
  misc_RNA (1)...(19): siRNA sense strand
agaaaaggaccauuuagaa

SEQ ID NO: 746493 - RNA, 19 nt, Homo sapiens
  misc_RNA (1)...(19): siRNA sense strand
gcuccuggaacucuuaugu

SEQ ID NO: 746494 - RNA, 19 nt, Homo sapiens
  misc_RNA (1)...(19): siRNA sense strand
uaaaggagaccagccuaag

SEQ ID NO: 746495 - RNA, 19 nt, Homo sapiens
  misc_RNA (1)...(19): siRNA sense strand
cuucucaccuggcuaaagg

SEQ ID NO: 746496 - RNA, 19 nt, Homo sapiens
  misc_RNA (1)...(19): siRNA sense strand
gugauuacagugcguguuc

SEQ ID NO: 746497 - RNA, 19 nt, Homo sapiens
  misc_RNA (1)...(19): siRNA sense strand
acagccaguugcaccuauu

SEQ ID NO: 746498 - RNA, 19 nt, Homo sapiens
  misc_RNA (1)...(19): siRNA sense strand
gaagaaaaggaccauuuag

SEQ ID NO: 746499 - RNA, 19 nt, Homo sapiens
  misc_RNA (1)...(19): siRNA sense strand
cuacagagaaaugcugguu

SEQ ID NO: 746500 - RNA, 19 nt, Homo sapiens
  misc_RNA (1)...(19): siRNA sense strand
gagggcuccuggaacucuu

SEQ ID NO: 746501 - RNA, 19 nt, Homo sapiens
  misc_RNA (1)...(19): siRNA sense strand
gaugucggagaaccaagaa

SEQ ID NO: 746502 - RNA, 19 nt, Homo sapiens
  misc_RNA (1)...(19): siRNA sense strand
gccauucuucgauaugcua

SEQ ID NO: 746503 - RNA, 19 nt, Homo sapiens
  misc_RNA (1)...(19): siRNA sense strand
aagcagcuacagagaaaug

SEQ ID NO: 746504 - RNA, 19 nt, Homo sapiens
  misc_RNA (1)...(19): siRNA sense strand
cuccaguuguugacucuga

SEQ ID NO: 746505 - RNA, 19 nt, Homo sapiens
  misc_RNA (1)...(19): siRNA sense strand
gugaagaaaaggaccauuu

SEQ ID NO: 746506 - RNA, 19 nt, Homo sapiens
  misc_RNA (1)...(19): siRNA sense strand
ugaugccauucuucgauau

SEQ ID NO: 746507 - RNA, 19 nt, Homo sapiens
  misc_RNA (1)...(19): siRNA sense strand
gugugguucuccugucaga

SEQ ID NO: 746508 - RNA, 19 nt, Homo sapiens
  misc_RNA (1)...(19): siRNA sense strand
uaccaugacugugucugau

SEQ ID NO: 746509 - RNA, 19 nt, Homo sapiens
  misc_RNA (1)...(19): siRNA sense strand
gaucaugcugugccuuugg

SEQ ID NO: 746510 - RNA, 19 nt, Homo sapiens
  misc_RNA (1)...(19): siRNA sense strand
cuuccaagaucggguagga

SEQ ID NO: 746511 - RNA, 19 nt, Homo sapiens
  misc_RNA (1)...(19): siRNA sense strand
gaaagcagcuacagagaaa

SEQ ID NO: 746512 - RNA, 19 nt, Homo sapiens
  misc_RNA (1)...(19): siRNA sense strand
gaacaggaggaggugauua

SEQ ID NO: 746513 - RNA, 19 nt, Homo sapiens
  misc_RNA (1)...(19): siRNA sense strand
gauaugcuaugucaaacug

SEQ ID NO: 746514 - RNA, 19 nt, Homo sapiens
  misc_RNA (1)...(19): siRNA sense strand
gacaaggucugcagcacuu

SEQ ID NO: 746515 - RNA, 19 nt, Homo sapiens
  misc_RNA (1)...(19): siRNA sense strand
acagagaaaugcugguuug

SEQ ID NO: 746516 - RNA, 19 nt, Homo sapiens
  misc_RNA (1)...(19): siRNA sense strand
gagaccagccuaagaguug

SEQ ID NO: 746517 - RNA, 19 nt, Homo sapiens
  misc_RNA (1)...(19): siRNA sense strand
ggaacucuuauguggauua

SEQ ID NO: 746518 - RNA, 19 nt, Homo sapiens
  misc_RNA (1)...(19): siRNA sense strand
gaacucuuauguggauuau

SEQ ID NO: 746519 - RNA, 19 nt, Homo sapiens
  misc_RNA (1)...(19): siRNA sense strand
cugcagcacuuccuugaaa

SEQ ID NO: 746520 - RNA, 19 nt, Homo sapiens
  misc_RNA (1)...(19): siRNA sense strand
gguguaggaugucggagaa

SEQ ID NO: 746521 - RNA, 19 nt, Homo sapiens
  misc_RNA (1)...(19): siRNA sense strand
ccuaagaguugcugcuuuc

SEQ ID NO: 746522 - RNA, 19 nt, Homo sapiens
  misc_RNA (1)...(19): siRNA sense strand
gagaucaugcugugccuuu

SEQ ID NO: 746523 - RNA, 19 nt, Homo sapiens
  misc_RNA (1)...(19): siRNA sense strand
aaaggaccauuuagaagug

SEQ ID NO: 746524 - RNA, 19 nt, Homo sapiens
  misc_RNA (1)...(19): siRNA sense strand
cgaaguaccaugacugugu

SEQ ID NO: 746525 - RNA, 19 nt, Homo sapiens
  misc_RNA (1)...(19): siRNA sense strand
gacugugucugaugccauu

SEQ ID NO: 746526 - RNA, 19 nt, Homo sapiens
  misc_RNA (1)...(19): siRNA sense strand
gagaaagcagcuacagaga

SEQ ID NO: 746527 - RNA, 19 nt, Homo sapiens
  misc_RNA (1)...(19): siRNA sense strand
gaagugugggcuccaguug

SEQ ID NO: 746528 - RNA, 19 nt, Homo sapiens
  misc_RNA (1)...(19): siRNA sense strand
cugaugccauucuucgaua

SEQ ID NO: 746529 - RNA, 19 nt, Homo sapiens
  misc_RNA (1)...(19): siRNA sense strand
gcucuucucaccuggcuaa

SEQ ID NO: 746530 - RNA, 19 nt, Homo sapiens
  misc_RNA (1)...(19): siRNA sense strand
gccuaagaguugcugcuuu

SEQ ID NO: 746531 - RNA, 19 nt, Homo sapiens
  misc_RNA (1)...(19): siRNA sense strand
gagugugguucuccuguca

SEQ ID NO: 746532 - RNA, 19 nt, Homo sapiens
  misc_RNA (1)...(19): siRNA sense strand
ggagaccagccuaagaguu

SEQ ID NO: 746533 - RNA, 19 nt, Homo sapiens
  misc_RNA (1)...(19): siRNA sense strand
acucugagguuccuuccuu

SEQ ID NO: 746534 - RNA, 19 nt, Homo sapiens
  misc_RNA (1)...(19): siRNA sense strand
agaaagcagcuacagagaa

SEQ ID NO: 746535 - RNA, 19 nt, Homo sapiens
  misc_RNA (1)...(19): siRNA sense strand
guaccaugacugugucuga

SEQ ID NO: 746536 - RNA, 19 nt, Homo sapiens
  misc_RNA (1)...(19): siRNA sense strand
gacagccaguugcaccuau

SEQ ID NO: 746537 - RNA, 19 nt, Homo sapiens
  misc_RNA (1)...(19): siRNA sense strand
gaaaaggaccauuuagaag

SEQ ID NO: 746538 - RNA, 19 nt, Homo sapiens
  misc_RNA (1)...(19): siRNA sense strand
aggaggaggugauuacagu

SEQ ID NO: 746539 - RNA, 19 nt, Homo sapiens
  misc_RNA (1)...(19): siRNA sense strand
ugaagaaaaggaccauuua

SEQ ID NO: 746540 - RNA, 19 nt, Homo sapiens
  misc_RNA (1)...(19): siRNA sense strand
cuaaaggagaccagccuaa

SEQ ID NO: 746541 - RNA, 19 nt, Homo sapiens
  misc_RNA (1)...(19): siRNA sense strand
ccuccacucuucagucugu

SEQ ID NO: 746542 - RNA, 19 nt, Homo sapiens
  misc_RNA (1)...(19): siRNA sense strand
agaaugagggcuccuggaa

SEQ ID NO: 746543 - RNA, 19 nt, Homo sapiens
  misc_RNA (1)...(19): siRNA sense strand
agugugggcuccaguuguu

SEQ ID NO: 746544 - RNA, 19 nt, Homo sapiens
  misc_RNA (1)...(19): siRNA sense strand
ggaugucggagaaccaaga

SEQ ID NO: 746545 - RNA, 19 nt, Homo sapiens
  misc_RNA (1)...(19): siRNA sense strand
aaaggagaccagccuaaga

SEQ ID NO: 746546 - RNA, 19 nt, Homo sapiens
  misc_RNA (1)...(19): siRNA sense strand
agauauuccuccauaccaa

SEQ ID NO: 746547 - RNA, 19 nt, Homo sapiens
  misc_RNA (1)...(19): siRNA sense strand
gaguucguguggcugagaa

SEQ ID NO: 746548 - RNA, 19 nt, Homo sapiens
  misc_RNA (1)...(19): siRNA sense strand
cuggaacucuuauguggau

SEQ ID NO: 746549 - RNA, 19 nt, Homo sapiens
  misc_RNA (1)...(19): siRNA sense strand
aaugagggcuccuggaacu

SEQ ID NO: 746550 - RNA, 19 nt, Homo sapiens
  misc_RNA (1)...(19): siRNA sense strand
agaaaaggaccauuuagaa

SEQ ID NO: 746551 - RNA, 19 nt, Homo sapiens
  misc_RNA (1)...(19): siRNA sense strand
gcuccuggaacucuuaugu

SEQ ID NO: 746552 - RNA, 19 nt, Homo sapiens
  misc_RNA (1)...(19): siRNA sense strand
uaaaggagaccagccuaag

SEQ ID NO: 746553 - RNA, 19 nt, Homo sapiens
  misc_RNA (1)...(19): siRNA sense strand
cuucucaccuggcuaaagg

SEQ ID NO: 746554 - RNA, 19 nt, Homo sapiens
  misc_RNA (1)...(19): siRNA sense strand
gugauuacagugcguguuc

SEQ ID NO: 746555 - RNA, 19 nt, Homo sapiens
  misc_RNA (1)...(19): siRNA sense strand
acagccaguugcaccuauu

SEQ ID NO: 746556 - RNA, 19 nt, Homo sapiens
  misc_RNA (1)...(19): siRNA sense strand
gaagaaaaggaccauuuag

SEQ ID NO: 746557 - RNA, 19 nt, Homo sapiens
  misc_RNA (1)...(19): siRNA sense strand
cuacagagaaaugcugguu

SEQ ID NO: 746558 - RNA, 19 nt, Homo sapiens
  misc_RNA (1)...(19): siRNA sense strand
gagggcuccuggaacucuu

SEQ ID NO: 746559 - RNA, 19 nt, Homo sapiens
  misc_RNA (1)...(19): siRNA sense strand
gaugucggagaaccaagaa

SEQ ID NO: 746560 - RNA, 19 nt, Homo sapiens
  misc_RNA (1)...(19): siRNA sense strand
gccauucuucgauaugcua

SEQ ID NO: 746561 - RNA, 19 nt, Homo sapiens
  misc_RNA (1)...(19): siRNA sense strand
aagcagcuacagagaaaug

SEQ ID NO: 746562 - RNA, 19 nt, Homo sapiens
  misc_RNA (1)...(19): siRNA sense strand
cuccaguuguugacucuga

SEQ ID NO: 746563 - RNA, 19 nt, Homo sapiens
  misc_RNA (1)...(19): siRNA sense strand
gugaagaaaaggaccauuu

SEQ ID NO: 746564 - RNA, 19 nt, Homo sapiens
  misc_RNA (1)...(19): siRNA sense strand
ugaugccauucuucgauau

SEQ ID NO: 746565 - RNA, 19 nt, Homo sapiens
  misc_RNA (1)...(19): siRNA sense strand
gugugguucuccugucaga

SEQ ID NO: 746566 - RNA, 19 nt, Homo sapiens
  misc_RNA (1)...(19): siRNA sense strand
uaccaugacugugucugau

SEQ ID NO: 746567 - RNA, 19 nt, Homo sapiens
  misc_RNA (1)...(19): siRNA sense strand
gaucaugcugugccuuugg

SEQ ID NO: 746568 - RNA, 19 nt, Homo sapiens
  misc_RNA (1)...(19): siRNA sense strand
cuuccaagaucggguagga

SEQ ID NO: 746569 - RNA, 19 nt, Homo sapiens
  misc_RNA (1)...(19): siRNA sense strand
gcucucagcugucaaugug

SEQ ID NO: 746570 - RNA, 19 nt, Homo sapiens
  misc_RNA (1)...(19): siRNA sense strand
cgucaacaccaccaucugu

SEQ ID NO: 746571 - RNA, 19 nt, Homo sapiens
  misc_RNA (1)...(19): siRNA sense strand
ggacaaggccauuaagaaa

SEQ ID NO: 746572 - RNA, 19 nt, Homo sapiens
  misc_RNA (1)...(19): siRNA sense strand
acaaggccauuaagaaauu

SEQ ID NO: 746573 - RNA, 19 nt, Homo sapiens
  misc_RNA (1)...(19): siRNA sense strand
ccaaggacaaggccauuaa

SEQ ID NO: 746574 - RNA, 19 nt, Homo sapiens
  misc_RNA (1)...(19): siRNA sense strand
ccuauucgcugcacuaacu

SEQ ID NO: 746575 - RNA, 19 nt, Homo sapiens
  misc_RNA (1)...(19): siRNA sense strand
gacaaggccauuaagaaau

SEQ ID NO: 746576 - RNA, 19 nt, Homo sapiens
  misc_RNA (1)...(19): siRNA sense strand
cuacauuacugugugaguu

SEQ ID NO: 746577 - RNA, 19 nt, Homo sapiens
  misc_RNA (1)...(19): siRNA sense strand
gcaaaguagucaggaaucg

SEQ ID NO: 746578 - RNA, 19 nt, Homo sapiens
  misc_RNA (1)...(19): siRNA sense strand
uaagaaauucgucauucga

SEQ ID NO: 746579 - RNA, 19 nt, Homo sapiens
  misc_RNA (1)...(19): siRNA sense strand
gcagcagucagggacauuu

SEQ ID NO: 746580 - RNA, 19 nt, Homo sapiens
  misc_RNA (1)...(19): siRNA sense strand
aggaaucgaucucgugaag

SEQ ID NO: 746581 - RNA, 19 nt, Homo sapiens
  misc_RNA (1)...(19): siRNA sense strand
uuaagaaauucgucauucg

SEQ ID NO: 746582 - RNA, 19 nt, Homo sapiens
  misc_RNA (1)...(19): siRNA sense strand
cagcaaaguagucaggaau

SEQ ID NO: 746583 - RNA, 19 nt, Homo sapiens
  misc_RNA (1)...(19): siRNA sense strand
aagcuacauuacuguguga

SEQ ID NO: 746584 - RNA, 19 nt, Homo sapiens
  misc_RNA (1)...(19): siRNA sense strand
ugugugaguugugcaauuc

SEQ ID NO: 746585 - RNA, 19 nt, Homo sapiens
  misc_RNA (1)...(19): siRNA sense strand
uucccaagcuguaugugaa

SEQ ID NO: 746586 - RNA, 19 nt, Homo sapiens
  misc_RNA (1)...(19): siRNA sense strand
aggacaaggccauuaagaa

SEQ ID NO: 746587 - RNA, 19 nt, Homo sapiens
  misc_RNA (1)...(19): siRNA sense strand
caaggccauuaagaaauuc

SEQ ID NO: 746588 - RNA, 19 nt, Homo sapiens
  misc_RNA (1)...(19): siRNA sense strand
aaaguagucaggaaucgau

SEQ ID NO: 746589 - RNA, 19 nt, Homo sapiens
  misc_RNA (1)...(19): siRNA sense strand
caaaguagucaggaaucga

SEQ ID NO: 746590 - RNA, 19 nt, Homo sapiens
  misc_RNA (1)...(19): siRNA sense strand
gaugcgugcccaaggacaa

SEQ ID NO: 746591 - RNA, 19 nt, Homo sapiens
  misc_RNA (1)...(19): siRNA sense strand
gcaccuguguacugcagaa

SEQ ID NO: 746592 - RNA, 19 nt, Homo sapiens
  misc_RNA (1)...(19): siRNA sense strand
cagaagaaccugcuacuac

SEQ ID NO: 746593 - RNA, 19 nt, Homo sapiens
  misc_RNA (1)...(19): siRNA sense strand
gcuggaagcccaccacugu

SEQ ID NO: 746594 - RNA, 19 nt, Homo sapiens
  misc_RNA (1)...(19): siRNA sense strand
ccuguguacugcagaagaa

SEQ ID NO: 746595 - RNA, 19 nt, Homo sapiens
  misc_RNA (1)...(19): siRNA sense strand
gcugugagaccacuugcuu

SEQ ID NO: 746596 - RNA, 19 nt, Homo sapiens
  misc_RNA (1)...(19): siRNA sense strand
ccaacuugcugucaaaaca

SEQ ID NO: 746597 - RNA, 19 nt, Homo sapiens
  misc_RNA (1)...(19): siRNA sense strand
uggaagcccaccacuguga

SEQ ID NO: 746598 - RNA, 19 nt, Homo sapiens
  misc_RNA (1)...(19): siRNA sense strand
cgcccaacuugcugucaaa

SEQ ID NO: 746599 - RNA, 19 nt, Homo sapiens
  misc_RNA (1)...(19): siRNA sense strand
ccgcccaacuugcugucaa

SEQ ID NO: 746600 - RNA, 19 nt, Homo sapiens
  misc_RNA (1)...(19): siRNA sense strand
gaacagagcuaaguaugag

SEQ ID NO: 746601 - RNA, 19 nt, Homo sapiens
  misc_RNA (1)...(19): siRNA sense strand
ggaauucuccaaucauaua

SEQ ID NO: 746602 - RNA, 19 nt, Homo sapiens
  misc_RNA (1)...(19): siRNA sense strand
caacaacuggcaaagaaua

SEQ ID NO: 746603 - RNA, 19 nt, Homo sapiens
  misc_RNA (1)...(19): siRNA sense strand
acaaugcucuucuugguuu

SEQ ID NO: 746604 - RNA, 19 nt, Homo sapiens
  misc_RNA (1)...(19): siRNA sense strand
uggaaaggcucagaguuua

SEQ ID NO: 746605 - RNA, 19 nt, Homo sapiens
  misc_RNA (1)...(19): siRNA sense strand
ccaagccagugauauuuaa

SEQ ID NO: 746606 - RNA, 19 nt, Homo sapiens
  misc_RNA (1)...(19): siRNA sense strand
ggaagaagagggagaagga

SEQ ID NO: 746607 - RNA, 19 nt, Homo sapiens
  misc_RNA (1)...(19): siRNA sense strand
aaggagggcuggaaacaaa

SEQ ID NO: 746608 - RNA, 19 nt, Homo sapiens
  misc_RNA (1)...(19): siRNA sense strand
ggaacagagcuaaguauga

SEQ ID NO: 746609 - RNA, 19 nt, Homo sapiens
  misc_RNA (1)...(19): siRNA sense strand
ucacggaauucuccaauca

SEQ ID NO: 746610 - RNA, 19 nt, Homo sapiens
  misc_RNA (1)...(19): siRNA sense strand
acaagggacucuaaccaaa

SEQ ID NO: 746611 - RNA, 19 nt, Homo sapiens
  misc_RNA (1)...(19): siRNA sense strand
ccacaaugcucuucuuggu

SEQ ID NO: 746612 - RNA, 19 nt, Homo sapiens
  misc_RNA (1)...(19): siRNA sense strand
gaaaggcuucuguuacuuc

SEQ ID NO: 746613 - RNA, 19 nt, Homo sapiens
  misc_RNA (1)...(19): siRNA sense strand
ccaagaagcagaaacacuu

SEQ ID NO: 746614 - RNA, 19 nt, Homo sapiens
  misc_RNA (1)...(19): siRNA sense strand
gaagacgacacgcuuugaa

SEQ ID NO: 746615 - RNA, 19 nt, Homo sapiens
  misc_RNA (1)...(19): siRNA sense strand
gaaaggcucagaguuuaga

SEQ ID NO: 746616 - RNA, 19 nt, Homo sapiens
  misc_RNA (1)...(19): siRNA sense strand
ggcaaagaauaaccuguug

SEQ ID NO: 746617 - RNA, 19 nt, Homo sapiens
  misc_RNA (1)...(19): siRNA sense strand
ggacaaugaggaagaggaa

SEQ ID NO: 746618 - RNA, 19 nt, Homo sapiens
  misc_RNA (1)...(19): siRNA sense strand
gccaagccagugauauuua

SEQ ID NO: 746619 - RNA, 19 nt, Homo sapiens
  misc_RNA (1)...(19): siRNA sense strand
ggagaaggagggcuggaaa

SEQ ID NO: 746620 - RNA, 19 nt, Homo sapiens
  misc_RNA (1)...(19): siRNA sense strand
ggaugucccugcgggcuuu

SEQ ID NO: 746621 - RNA, 19 nt, Homo sapiens
  misc_RNA (1)...(19): siRNA sense strand
ccaacgagcccauggaugu

SEQ ID NO: 746622 - RNA, 19 nt, Homo sapiens
  misc_RNA (1)...(19): siRNA sense strand
acggaauucuccaaucaua

SEQ ID NO: 746623 - RNA, 19 nt, Homo sapiens
  misc_RNA (1)...(19): siRNA sense strand
uuagguaucuugucaaacu

SEQ ID NO: 746624 - RNA, 19 nt, Homo sapiens
  misc_RNA (1)...(19): siRNA sense strand
gaccaucggcuuuagguau

SEQ ID NO: 746625 - RNA, 19 nt, Homo sapiens
  misc_RNA (1)...(19): siRNA sense strand
gcaauggguccggcuguuu

SEQ ID NO: 746626 - RNA, 19 nt, Homo sapiens
  misc_RNA (1)...(19): siRNA sense strand
gaaggagggcuggaaacaa

SEQ ID NO: 746627 - RNA, 19 nt, Homo sapiens
  misc_RNA (1)...(19): siRNA sense strand
gccaguacuuguuccaguu

SEQ ID NO: 746628 - RNA, 19 nt, Homo sapiens
  misc_RNA (1)...(19): siRNA sense strand
guagccgaguggacaauga

SEQ ID NO: 746629 - RNA, 19 nt, Homo sapiens
  misc_RNA (1)...(19): siRNA sense strand
gcagcuugccgcucuagaa

SEQ ID NO: 746630 - RNA, 19 nt, Homo sapiens
  misc_RNA (1)...(19): siRNA sense strand
gcacaagggacucuaacca

SEQ ID NO: 746631 - RNA, 19 nt, Homo sapiens
  misc_RNA (1)...(19): siRNA sense strand
ggccaagccagugauauuu

SEQ ID NO: 746632 - RNA, 19 nt, Homo sapiens
  misc_RNA (1)...(19): siRNA sense strand
ccacucaacccaagaagca

SEQ ID NO: 746633 - RNA, 19 nt, Homo sapiens
  misc_RNA (1)...(19): siRNA sense strand
ggaaaggcucagaguuuag

SEQ ID NO: 746634 - RNA, 19 nt, Homo sapiens
  misc_RNA (1)...(19): siRNA sense strand
uguguuggcuguggaaaga

SEQ ID NO: 746635 - RNA, 19 nt, Homo sapiens
  misc_RNA (1)...(19): siRNA sense strand
gggaacagagcuaaguaug

SEQ ID NO: 746636 - RNA, 19 nt, Homo sapiens
  misc_RNA (1)...(19): siRNA sense strand
aaaggguggucuccagaau

SEQ ID NO: 746637 - RNA, 19 nt, Homo sapiens
  misc_RNA (1)...(19): siRNA sense strand
ggcuuuagguaucuuguca

SEQ ID NO: 746638 - RNA, 19 nt, Homo sapiens
  misc_RNA (1)...(19): siRNA sense strand
uuggaaaggcucagaguuu

SEQ ID NO: 746639 - RNA, 19 nt, Homo sapiens
  misc_RNA (1)...(19): siRNA sense strand
ucuguuacuucacggaauu

SEQ ID NO: 746640 - RNA, 19 nt, Homo sapiens
  misc_RNA (1)...(19): siRNA sense strand
caaaggguggucuccagaa

SEQ ID NO: 746641 - RNA, 19 nt, Homo sapiens
  misc_RNA (1)...(19): siRNA sense strand
ccaagguggugggaacaga

SEQ ID NO: 746642 - RNA, 19 nt, Homo sapiens
  misc_RNA (1)...(19): siRNA sense strand
cuuuagguaucuugucaaa

SEQ ID NO: 746643 - RNA, 19 nt, Homo sapiens
  misc_RNA (1)...(19): siRNA sense strand
caaggccaagccagugaua

SEQ ID NO: 746644 - RNA, 19 nt, Homo sapiens
  misc_RNA (1)...(19): siRNA sense strand
gaccuuuaaucuguuggaa

SEQ ID NO: 746645 - RNA, 19 nt, Homo sapiens
  misc_RNA (1)...(19): siRNA sense strand
gcagcagcuugccgcucua

SEQ ID NO: 746646 - RNA, 19 nt, Homo sapiens
  misc_RNA (1)...(19): siRNA sense strand
gcugaagacgacacgcuuu

SEQ ID NO: 746647 - RNA, 19 nt, Homo sapiens
  misc_RNA (1)...(19): siRNA sense strand
aaaggcuucuguuacuuca

SEQ ID NO: 746648 - RNA, 19 nt, Homo sapiens
  misc_RNA (1)...(19): siRNA sense strand
ggagggcuggaaacaaaug

SEQ ID NO: 746649 - RNA, 19 nt, Homo sapiens
  misc_RNA (1)...(19): siRNA sense strand
ccugacaacuugcugaaaa

SEQ ID NO: 746650 - RNA, 19 nt, Homo sapiens
  misc_RNA (1)...(19): siRNA sense strand
gcuugccgcucuagaaggu

SEQ ID NO: 746651 - RNA, 19 nt, Homo sapiens
  misc_RNA (1)...(19): siRNA sense strand
uggcaaagaauaaccuguu

SEQ ID NO: 746652 - RNA, 19 nt, Homo sapiens
  misc_RNA (1)...(19): siRNA sense strand
ccugaaggaugcuguacca

SEQ ID NO: 746653 - RNA, 19 nt, Homo sapiens
  misc_RNA (1)...(19): siRNA sense strand
cacaagggacucuaaccaa

SEQ ID NO: 746654 - RNA, 19 nt, Homo sapiens
  misc_RNA (1)...(19): siRNA sense strand
acaaugaggaagaggaaga

SEQ ID NO: 746655 - RNA, 19 nt, Homo sapiens
  misc_RNA (1)...(19): siRNA sense strand
gcaaagauuccccgaagug

SEQ ID NO: 746656 - RNA, 19 nt, Homo sapiens
  misc_RNA (1)...(19): siRNA sense strand
agacgacacgcuuugaaga

SEQ ID NO: 746657 - RNA, 19 nt, Homo sapiens
  misc_RNA (1)...(19): siRNA sense strand
caagggacucuaaccaaag

SEQ ID NO: 746658 - RNA, 19 nt, Homo sapiens
  misc_RNA (1)...(19): siRNA sense strand
ggugugcgccguugacaag

SEQ ID NO: 746659 - RNA, 19 nt, Homo sapiens
  misc_RNA (1)...(19): siRNA sense strand
gaagcagaaacacuugaag

SEQ ID NO: 746660 - RNA, 19 nt, Homo sapiens
  misc_RNA (1)...(19): siRNA sense strand
ucacuaaacgcagcaaugg

SEQ ID NO: 746661 - RNA, 19 nt, Homo sapiens
  misc_RNA (1)...(19): siRNA sense strand
gaguggacaaugaggaaga

SEQ ID NO: 746662 - RNA, 19 nt, Homo sapiens
  misc_RNA (1)...(19): siRNA sense strand
gaugacaauggccacaaug

SEQ ID NO: 746663 - RNA, 19 nt, Homo sapiens
  misc_RNA (1)...(19): siRNA sense strand
guucuugccagaugacaau

SEQ ID NO: 746664 - RNA, 19 nt, Homo sapiens
  misc_RNA (1)...(19): siRNA sense strand
caagccagugauauuuaaa

SEQ ID NO: 746665 - RNA, 19 nt, Homo sapiens
  misc_RNA (1)...(19): siRNA sense strand
gugggaacagagcuaagua

SEQ ID NO: 746666 - RNA, 19 nt, Homo sapiens
  misc_RNA (1)...(19): siRNA sense strand
agaugacaauggccacaau

SEQ ID NO: 746667 - RNA, 19 nt, Homo sapiens
  misc_RNA (1)...(19): siRNA sense strand
uguuggcuguggaaagaaa

SEQ ID NO: 746668 - RNA, 19 nt, Homo sapiens
  misc_RNA (1)...(19): siRNA sense strand
caaugaggaagaggaagaa

SEQ ID NO: 746669 - RNA, 19 nt, Homo sapiens
  misc_RNA (1)...(19): siRNA sense strand
ugaggaagaggaagaagag

SEQ ID NO: 746670 - RNA, 19 nt, Homo sapiens
  misc_RNA (1)...(19): siRNA sense strand
gcaggaccagcuucugauc

SEQ ID NO: 746671 - RNA, 19 nt, Homo sapiens
  misc_RNA (1)...(19): siRNA sense strand
agagguucuugccagauga

SEQ ID NO: 746672 - RNA, 19 nt, Homo sapiens
  misc_RNA (1)...(19): siRNA sense strand
gggagaaggagggcuggaa

SEQ ID NO: 746673 - RNA, 19 nt, Homo sapiens
  misc_RNA (1)...(19): siRNA sense strand
gguggccucuggagaacca

SEQ ID NO: 746674 - RNA, 19 nt, Homo sapiens
  misc_RNA (1)...(19): siRNA sense strand
uaugagagcgcaggcaugu

SEQ ID NO: 746675 - RNA, 19 nt, Homo sapiens
  misc_RNA (1)...(19): siRNA sense strand
ugaagacgacacgcuuuga

SEQ ID NO: 746676 - RNA, 19 nt, Homo sapiens
  misc_RNA (1)...(19): siRNA sense strand
aggccaagccagugauauu

SEQ ID NO: 746677 - RNA, 19 nt, Homo sapiens
  misc_RNA (1)...(19): siRNA sense strand
agaagcagaaacacuugaa

SEQ ID NO: 746678 - RNA, 19 nt, Homo sapiens
  misc_RNA (1)...(19): siRNA sense strand
gcaaggccaagccagugau

SEQ ID NO: 746679 - RNA, 19 nt, Homo sapiens
  misc_RNA (1)...(19): siRNA sense strand
gucuguuccugacaacuug

SEQ ID NO: 746680 - RNA, 19 nt, Homo sapiens
  misc_RNA (1)...(19): siRNA sense strand
gaacagagcuaaguaugag

SEQ ID NO: 746681 - RNA, 19 nt, Homo sapiens
  misc_RNA (1)...(19): siRNA sense strand
ggaauucuccaaucauaua

SEQ ID NO: 746682 - RNA, 19 nt, Homo sapiens
  misc_RNA (1)...(19): siRNA sense strand
caacaacuggcaaagaaua

SEQ ID NO: 746683 - RNA, 19 nt, Homo sapiens
  misc_RNA (1)...(19): siRNA sense strand
acaaugcucuucuugguuu

SEQ ID NO: 746684 - RNA, 19 nt, Homo sapiens
  misc_RNA (1)...(19): siRNA sense strand
uggaaaggcucagaguuua

SEQ ID NO: 746685 - RNA, 19 nt, Homo sapiens
  misc_RNA (1)...(19): siRNA sense strand
ccaagccagugauauuuaa

SEQ ID NO: 746686 - RNA, 19 nt, Homo sapiens
  misc_RNA (1)...(19): siRNA sense strand
ggaagaagagggagaagga

SEQ ID NO: 746687 - RNA, 19 nt, Homo sapiens
  misc_RNA (1)...(19): siRNA sense strand
aaggagggcuggaaacaaa

SEQ ID NO: 746688 - RNA, 19 nt, Homo sapiens
  misc_RNA (1)...(19): siRNA sense strand
ggaacagagcuaaguauga

SEQ ID NO: 746689 - RNA, 19 nt, Homo sapiens
  misc_RNA (1)...(19): siRNA sense strand
ucacggaauucuccaauca

SEQ ID NO: 746690 - RNA, 19 nt, Homo sapiens
  misc_RNA (1)...(19): siRNA sense strand
acaagggacucuaaccaaa

SEQ ID NO: 746691 - RNA, 19 nt, Homo sapiens
  misc_RNA (1)...(19): siRNA sense strand
ccacaaugcucuucuuggu

SEQ ID NO: 746692 - RNA, 19 nt, Homo sapiens
  misc_RNA (1)...(19): siRNA sense strand
gaaaggcuucuguuacuuc

SEQ ID NO: 746693 - RNA, 19 nt, Homo sapiens
  misc_RNA (1)...(19): siRNA sense strand
ccaagaagcagaaacacuu

SEQ ID NO: 746694 - RNA, 19 nt, Homo sapiens
  misc_RNA (1)...(19): siRNA sense strand
gaagacgacacgcuuugaa

SEQ ID NO: 746695 - RNA, 19 nt, Homo sapiens
  misc_RNA (1)...(19): siRNA sense strand
gaaaggcucagaguuuaga

SEQ ID NO: 746696 - RNA, 19 nt, Homo sapiens
  misc_RNA (1)...(19): siRNA sense strand
ggcaaagaauaaccuguug

SEQ ID NO: 746697 - RNA, 19 nt, Homo sapiens
  misc_RNA (1)...(19): siRNA sense strand
ggacaaugaggaagaggaa

SEQ ID NO: 746698 - RNA, 19 nt, Homo sapiens
  misc_RNA (1)...(19): siRNA sense strand
gccaagccagugauauuua

SEQ ID NO: 746699 - RNA, 19 nt, Homo sapiens
  misc_RNA (1)...(19): siRNA sense strand
ggagaaggagggcuggaaa

SEQ ID NO: 746700 - RNA, 19 nt, Homo sapiens
  misc_RNA (1)...(19): siRNA sense strand
ggaugucccugcgggcuuu

SEQ ID NO: 746701 - RNA, 19 nt, Homo sapiens
  misc_RNA (1)...(19): siRNA sense strand
ccaacgagcccauggaugu

SEQ ID NO: 746702 - RNA, 19 nt, Homo sapiens
  misc_RNA (1)...(19): siRNA sense strand
acggaauucuccaaucaua

SEQ ID NO: 746703 - RNA, 19 nt, Homo sapiens
  misc_RNA (1)...(19): siRNA sense strand
uuagguaucuugucaaacu

SEQ ID NO: 746704 - RNA, 19 nt, Homo sapiens
  misc_RNA (1)...(19): siRNA sense strand
gaccaucggcuuuagguau

SEQ ID NO: 746705 - RNA, 19 nt, Homo sapiens
  misc_RNA (1)...(19): siRNA sense strand
gcaauggguccggcuguuu

SEQ ID NO: 746706 - RNA, 19 nt, Homo sapiens
  misc_RNA (1)...(19): siRNA sense strand
gaaggagggcuggaaacaa

SEQ ID NO: 746707 - RNA, 19 nt, Homo sapiens
  misc_RNA (1)...(19): siRNA sense strand
gccaguacuuguuccaguu

SEQ ID NO: 746708 - RNA, 19 nt, Homo sapiens
  misc_RNA (1)...(19): siRNA sense strand
guagccgaguggacaauga

SEQ ID NO: 746709 - RNA, 19 nt, Homo sapiens
  misc_RNA (1)...(19): siRNA sense strand
gcagcuugccgcucuagaa

SEQ ID NO: 746710 - RNA, 19 nt, Homo sapiens
  misc_RNA (1)...(19): siRNA sense strand
gcacaagggacucuaacca

SEQ ID NO: 746711 - RNA, 19 nt, Homo sapiens
  misc_RNA (1)...(19): siRNA sense strand
ggccaagccagugauauuu

SEQ ID NO: 746712 - RNA, 19 nt, Homo sapiens
  misc_RNA (1)...(19): siRNA sense strand
ccacucaacccaagaagca

SEQ ID NO: 746713 - RNA, 19 nt, Homo sapiens
  misc_RNA (1)...(19): siRNA sense strand
ggaaaggcucagaguuuag

SEQ ID NO: 746714 - RNA, 19 nt, Homo sapiens
  misc_RNA (1)...(19): siRNA sense strand
uguguuggcuguggaaaga

SEQ ID NO: 746715 - RNA, 19 nt, Homo sapiens
  misc_RNA (1)...(19): siRNA sense strand
gggaacagagcuaaguaug

SEQ ID NO: 746716 - RNA, 19 nt, Homo sapiens
  misc_RNA (1)...(19): siRNA sense strand
aaaggguggucuccagaau

SEQ ID NO: 746717 - RNA, 19 nt, Homo sapiens
  misc_RNA (1)...(19): siRNA sense strand
ggcuuuagguaucuuguca

SEQ ID NO: 746718 - RNA, 19 nt, Homo sapiens
  misc_RNA (1)...(19): siRNA sense strand
uuggaaaggcucagaguuu

SEQ ID NO: 746719 - RNA, 19 nt, Homo sapiens
  misc_RNA (1)...(19): siRNA sense strand
ucuguuacuucacggaauu

SEQ ID NO: 746720 - RNA, 19 nt, Homo sapiens
  misc_RNA (1)...(19): siRNA sense strand
caaaggguggucuccagaa

SEQ ID NO: 746721 - RNA, 19 nt, Homo sapiens
  misc_RNA (1)...(19): siRNA sense strand
ccaagguggugggaacaga

SEQ ID NO: 746722 - RNA, 19 nt, Homo sapiens
  misc_RNA (1)...(19): siRNA sense strand
cuuuagguaucuugucaaa

SEQ ID NO: 746723 - RNA, 19 nt, Homo sapiens
  misc_RNA (1)...(19): siRNA sense strand
caaggccaagccagugaua

SEQ ID NO: 746724 - RNA, 19 nt, Homo sapiens
  misc_RNA (1)...(19): siRNA sense strand
gaccuuuaaucuguuggaa

SEQ ID NO: 746725 - RNA, 19 nt, Homo sapiens
  misc_RNA (1)...(19): siRNA sense strand
gcagcagcuugccgcucua

SEQ ID NO: 746726 - RNA, 19 nt, Homo sapiens
  misc_RNA (1)...(19): siRNA sense strand
gcugaagacgacacgcuuu

SEQ ID NO: 746727 - RNA, 19 nt, Homo sapiens
  misc_RNA (1)...(19): siRNA sense strand
aaaggcuucuguuacuuca

SEQ ID NO: 746728 - RNA, 19 nt, Homo sapiens
  misc_RNA (1)...(19): siRNA sense strand
ggagggcuggaaacaaaug

SEQ ID NO: 746729 - RNA, 19 nt, Homo sapiens
  misc_RNA (1)...(19): siRNA sense strand
ccugacaacuugcugaaaa

SEQ ID NO: 746730 - RNA, 19 nt, Homo sapiens
  misc_RNA (1)...(19): siRNA sense strand
gcuugccgcucuagaaggu

SEQ ID NO: 746731 - RNA, 19 nt, Homo sapiens
  misc_RNA (1)...(19): siRNA sense strand
uggcaaagaauaaccuguu

SEQ ID NO: 746732 - RNA, 19 nt, Homo sapiens
  misc_RNA (1)...(19): siRNA sense strand
ccugaaggaugcuguacca

SEQ ID NO: 746733 - RNA, 19 nt, Homo sapiens
  misc_RNA (1)...(19): siRNA sense strand
cacaagggacucuaaccaa

SEQ ID NO: 746734 - RNA, 19 nt, Homo sapiens
  misc_RNA (1)...(19): siRNA sense strand
acaaugaggaagaggaaga

SEQ ID NO: 746735 - RNA, 19 nt, Homo sapiens
  misc_RNA (1)...(19): siRNA sense strand
gcaaagauuccccgaagug

SEQ ID NO: 746736 - RNA, 19 nt, Homo sapiens
  misc_RNA (1)...(19): siRNA sense strand
agacgacacgcuuugaaga

SEQ ID NO: 746737 - RNA, 19 nt, Homo sapiens
  misc_RNA (1)...(19): siRNA sense strand
caagggacucuaaccaaag

SEQ ID NO: 746738 - RNA, 19 nt, Homo sapiens
  misc_RNA (1)...(19): siRNA sense strand
ggugugcgccguugacaag

SEQ ID NO: 746739 - RNA, 19 nt, Homo sapiens
  misc_RNA (1)...(19): siRNA sense strand
gaagcagaaacacuugaag

SEQ ID NO: 746740 - RNA, 19 nt, Homo sapiens
  misc_RNA (1)...(19): siRNA sense strand
ucacuaaacgcagcaaugg

SEQ ID NO: 746741 - RNA, 19 nt, Homo sapiens
  misc_RNA (1)...(19): siRNA sense strand
gaguggacaaugaggaaga

SEQ ID NO: 746742 - RNA, 19 nt, Homo sapiens
  misc_RNA (1)...(19): siRNA sense strand
gaugacaauggccacaaug

SEQ ID NO: 746743 - RNA, 19 nt, Homo sapiens
  misc_RNA (1)...(19): siRNA sense strand
guucuugccagaugacaau

SEQ ID NO: 746744 - RNA, 19 nt, Homo sapiens
  misc_RNA (1)...(19): siRNA sense strand
caagccagugauauuuaaa

SEQ ID NO: 746745 - RNA, 19 nt, Homo sapiens
  misc_RNA (1)...(19): siRNA sense strand
gugggaacagagcuaagua

SEQ ID NO: 746746 - RNA, 19 nt, Homo sapiens
  misc_RNA (1)...(19): siRNA sense strand
agaugacaauggccacaau

SEQ ID NO: 746747 - RNA, 19 nt, Homo sapiens
  misc_RNA (1)...(19): siRNA sense strand
uguuggcuguggaaagaaa

SEQ ID NO: 746748 - RNA, 19 nt, Homo sapiens
  misc_RNA (1)...(19): siRNA sense strand
caaugaggaagaggaagaa

SEQ ID NO: 746749 - RNA, 19 nt, Homo sapiens
  misc_RNA (1)...(19): siRNA sense strand
ugaggaagaggaagaagag

SEQ ID NO: 746750 - RNA, 19 nt, Homo sapiens
  misc_RNA (1)...(19): siRNA sense strand
gcaggaccagcuucugauc

SEQ ID NO: 746751 - RNA, 19 nt, Homo sapiens
  misc_RNA (1)...(19): siRNA sense strand
agagguucuugccagauga

SEQ ID NO: 746752 - RNA, 19 nt, Homo sapiens
  misc_RNA (1)...(19): siRNA sense strand
gggagaaggagggcuggaa

SEQ ID NO: 746753 - RNA, 19 nt, Homo sapiens
  misc_RNA (1)...(19): siRNA sense strand
gguggccucuggagaacca

SEQ ID NO: 746754 - RNA, 19 nt, Homo sapiens
  misc_RNA (1)...(19): siRNA sense strand
uaugagagcgcaggcaugu

SEQ ID NO: 746755 - RNA, 19 nt, Homo sapiens
  misc_RNA (1)...(19): siRNA sense strand
ugaagacgacacgcuuuga

SEQ ID NO: 746756 - RNA, 19 nt, Homo sapiens
  misc_RNA (1)...(19): siRNA sense strand
aggccaagccagugauauu

SEQ ID NO: 746757 - RNA, 19 nt, Homo sapiens
  misc_RNA (1)...(19): siRNA sense strand
agaagcagaaacacuugaa

SEQ ID NO: 746758 - RNA, 19 nt, Homo sapiens
  misc_RNA (1)...(19): siRNA sense strand
gcaaggccaagccagugau

SEQ ID NO: 746759 - RNA, 19 nt, Homo sapiens
  misc_RNA (1)...(19): siRNA sense strand
gucuguuccugacaacuug

SEQ ID NO: 746760 - RNA, 19 nt, Homo sapiens
  misc_RNA (1)...(19): siRNA sense strand
gaacagagcuaaguaugag

SEQ ID NO: 746761 - RNA, 19 nt, Homo sapiens
  misc_RNA (1)...(19): siRNA sense strand
ggaauucuccaaucauaua

SEQ ID NO: 746762 - RNA, 19 nt, Homo sapiens
  misc_RNA (1)...(19): siRNA sense strand
caacaacuggcaaagaaua

SEQ ID NO: 746763 - RNA, 19 nt, Homo sapiens
  misc_RNA (1)...(19): siRNA sense strand
acaaugcucuucuugguuu

SEQ ID NO: 746764 - RNA, 19 nt, Homo sapiens
  misc_RNA (1)...(19): siRNA sense strand
uggaaaggcucagaguuua

SEQ ID NO: 746765 - RNA, 19 nt, Homo sapiens
  misc_RNA (1)...(19): siRNA sense strand
ccaagccagugauauuuaa

SEQ ID NO: 746766 - RNA, 19 nt, Homo sapiens
  misc_RNA (1)...(19): siRNA sense strand
ggaagaagagggagaagga

SEQ ID NO: 746767 - RNA, 19 nt, Homo sapiens
  misc_RNA (1)...(19): siRNA sense strand
aaggagggcuggaaacaaa

SEQ ID NO: 746768 - RNA, 19 nt, Homo sapiens
  misc_RNA (1)...(19): siRNA sense strand
ggaacagagcuaaguauga

SEQ ID NO: 746769 - RNA, 19 nt, Homo sapiens
  misc_RNA (1)...(19): siRNA sense strand
ucacggaauucuccaauca

SEQ ID NO: 746770 - RNA, 19 nt, Homo sapiens
  misc_RNA (1)...(19): siRNA sense strand
acaagggacucuaaccaaa

SEQ ID NO: 746771 - RNA, 19 nt, Homo sapiens
  misc_RNA (1)...(19): siRNA sense strand
ccacaaugcucuucuuggu

SEQ ID NO: 746772 - RNA, 19 nt, Homo sapiens
  misc_RNA (1)...(19): siRNA sense strand
gaaaggcuucuguuacuuc

SEQ ID NO: 746773 - RNA, 19 nt, Homo sapiens
  misc_RNA (1)...(19): siRNA sense strand
ccaagaagcagaaacacuu

SEQ ID NO: 746774 - RNA, 19 nt, Homo sapiens
  misc_RNA (1)...(19): siRNA sense strand
gaagacgacacgcuuugaa

SEQ ID NO: 746775 - RNA, 19 nt, Homo sapiens
  misc_RNA (1)...(19): siRNA sense strand
gaaaggcucagaguuuaga

SEQ ID NO: 746776 - RNA, 19 nt, Homo sapiens
  misc_RNA (1)...(19): siRNA sense strand
ggcaaagaauaaccuguug

SEQ ID NO: 746777 - RNA, 19 nt, Homo sapiens
  misc_RNA (1)...(19): siRNA sense strand
ggacaaugaggaagaggaa

SEQ ID NO: 746778 - RNA, 19 nt, Homo sapiens
  misc_RNA (1)...(19): siRNA sense strand
gccaagccagugauauuua

SEQ ID NO: 746779 - RNA, 19 nt, Homo sapiens
  misc_RNA (1)...(19): siRNA sense strand
ggagaaggagggcuggaaa

SEQ ID NO: 746780 - RNA, 19 nt, Homo sapiens
  misc_RNA (1)...(19): siRNA sense strand
ggaugucccugcgggcuuu

SEQ ID NO: 746781 - RNA, 19 nt, Homo sapiens
  misc_RNA (1)...(19): siRNA sense strand
ccaacgagcccauggaugu

SEQ ID NO: 746782 - RNA, 19 nt, Homo sapiens
  misc_RNA (1)...(19): siRNA sense strand
acggaauucuccaaucaua

SEQ ID NO: 746783 - RNA, 19 nt, Homo sapiens
  misc_RNA (1)...(19): siRNA sense strand
uuagguaucuugucaaacu

SEQ ID NO: 746784 - RNA, 19 nt, Homo sapiens
  misc_RNA (1)...(19): siRNA sense strand
gaccaucggcuuuagguau

SEQ ID NO: 746785 - RNA, 19 nt, Homo sapiens
  misc_RNA (1)...(19): siRNA sense strand
gcaauggguccggcuguuu

SEQ ID NO: 746786 - RNA, 19 nt, Homo sapiens
  misc_RNA (1)...(19): siRNA sense strand
gaaggagggcuggaaacaa

SEQ ID NO: 746787 - RNA, 19 nt, Homo sapiens
  misc_RNA (1)...(19): siRNA sense strand
gccaguacuuguuccaguu

SEQ ID NO: 746788 - RNA, 19 nt, Homo sapiens
  misc_RNA (1)...(19): siRNA sense strand
guagccgaguggacaauga

SEQ ID NO: 746789 - RNA, 19 nt, Homo sapiens
  misc_RNA (1)...(19): siRNA sense strand
gcagcuugccgcucuagaa

SEQ ID NO: 746790 - RNA, 19 nt, Homo sapiens
  misc_RNA (1)...(19): siRNA sense strand
gcacaagggacucuaacca

SEQ ID NO: 746791 - RNA, 19 nt, Homo sapiens
  misc_RNA (1)...(19): siRNA sense strand
ggccaagccagugauauuu

SEQ ID NO: 746792 - RNA, 19 nt, Homo sapiens
  misc_RNA (1)...(19): siRNA sense strand
ccacucaacccaagaagca

SEQ ID NO: 746793 - RNA, 19 nt, Homo sapiens
  misc_RNA (1)...(19): siRNA sense strand
ggaaaggcucagaguuuag

SEQ ID NO: 746794 - RNA, 19 nt, Homo sapiens
  misc_RNA (1)...(19): siRNA sense strand
uguguuggcuguggaaaga

SEQ ID NO: 746795 - RNA, 19 nt, Homo sapiens
  misc_RNA (1)...(19): siRNA sense strand
gggaacagagcuaaguaug

SEQ ID NO: 746796 - RNA, 19 nt, Homo sapiens
  misc_RNA (1)...(19): siRNA sense strand
aaaggguggucuccagaau

SEQ ID NO: 746797 - RNA, 19 nt, Homo sapiens
  misc_RNA (1)...(19): siRNA sense strand
ggcuuuagguaucuuguca

SEQ ID NO: 746798 - RNA, 19 nt, Homo sapiens
  misc_RNA (1)...(19): siRNA sense strand
uuggaaaggcucagaguuu

SEQ ID NO: 746799 - RNA, 19 nt, Homo sapiens
  misc_RNA (1)...(19): siRNA sense strand
ucuguuacuucacggaauu

SEQ ID NO: 746800 - RNA, 19 nt, Homo sapiens
  misc_RNA (1)...(19): siRNA sense strand
caaaggguggucuccagaa

SEQ ID NO: 746801 - RNA, 19 nt, Homo sapiens
  misc_RNA (1)...(19): siRNA sense strand
ccaagguggugggaacaga

SEQ ID NO: 746802 - RNA, 19 nt, Homo sapiens
  misc_RNA (1)...(19): siRNA sense strand
cuuuagguaucuugucaaa

SEQ ID NO: 746803 - RNA, 19 nt, Homo sapiens
  misc_RNA (1)...(19): siRNA sense strand
caaggccaagccagugaua

SEQ ID NO: 746804 - RNA, 19 nt, Homo sapiens
  misc_RNA (1)...(19): siRNA sense strand
gaccuuuaaucuguuggaa

SEQ ID NO: 746805 - RNA, 19 nt, Homo sapiens
  misc_RNA (1)...(19): siRNA sense strand
gcagcagcuugccgcucua

SEQ ID NO: 746806 - RNA, 19 nt, Homo sapiens
  misc_RNA (1)...(19): siRNA sense strand
gcugaagacgacacgcuuu

SEQ ID NO: 746807 - RNA, 19 nt, Homo sapiens
  misc_RNA (1)...(19): siRNA sense strand
aaaggcuucuguuacuuca

SEQ ID NO: 746808 - RNA, 19 nt, Homo sapiens
  misc_RNA (1)...(19): siRNA sense strand
ggagggcuggaaacaaaug

SEQ ID NO: 746809 - RNA, 19 nt, Homo sapiens
  misc_RNA (1)...(19): siRNA sense strand
ccugacaacuugcugaaaa

SEQ ID NO: 746810 - RNA, 19 nt, Homo sapiens
  misc_RNA (1)...(19): siRNA sense strand
gcuugccgcucuagaaggu

SEQ ID NO: 746811 - RNA, 19 nt, Homo sapiens
  misc_RNA (1)...(19): siRNA sense strand
uggcaaagaauaaccuguu

SEQ ID NO: 746812 - RNA, 19 nt, Homo sapiens
  misc_RNA (1)...(19): siRNA sense strand
ccugaaggaugcuguacca

SEQ ID NO: 746813 - RNA, 19 nt, Homo sapiens
  misc_RNA (1)...(19): siRNA sense strand
cacaagggacucuaaccaa

SEQ ID NO: 746814 - RNA, 19 nt, Homo sapiens
  misc_RNA (1)...(19): siRNA sense strand
acaaugaggaagaggaaga

SEQ ID NO: 746815 - RNA, 19 nt, Homo sapiens
  misc_RNA (1)...(19): siRNA sense strand
gcaaagauuccccgaagug

SEQ ID NO: 746816 - RNA, 19 nt, Homo sapiens
  misc_RNA (1)...(19): siRNA sense strand
agacgacacgcuuugaaga

SEQ ID NO: 746817 - RNA, 19 nt, Homo sapiens
  misc_RNA (1)...(19): siRNA sense strand
caagggacucuaaccaaag

SEQ ID NO: 746818 - RNA, 19 nt, Homo sapiens
  misc_RNA (1)...(19): siRNA sense strand
ggugugcgccguugacaag

SEQ ID NO: 746819 - RNA, 19 nt, Homo sapiens
  misc_RNA (1)...(19): siRNA sense strand
gaagcagaaacacuugaag

SEQ ID NO: 746820 - RNA, 19 nt, Homo sapiens
  misc_RNA (1)...(19): siRNA sense strand
ucacuaaacgcagcaaugg

SEQ ID NO: 746821 - RNA, 19 nt, Homo sapiens
  misc_RNA (1)...(19): siRNA sense strand
gaguggacaaugaggaaga

SEQ ID NO: 746822 - RNA, 19 nt, Homo sapiens
  misc_RNA (1)...(19): siRNA sense strand
gaugacaauggccacaaug

SEQ ID NO: 746823 - RNA, 19 nt, Homo sapiens
  misc_RNA (1)...(19): siRNA sense strand
guucuugccagaugacaau

SEQ ID NO: 746824 - RNA, 19 nt, Homo sapiens
  misc_RNA (1)...(19): siRNA sense strand
caagccagugauauuuaaa

SEQ ID NO: 746825 - RNA, 19 nt, Homo sapiens
  misc_RNA (1)...(19): siRNA sense strand
gugggaacagagcuaagua

SEQ ID NO: 746826 - RNA, 19 nt, Homo sapiens
  misc_RNA (1)...(19): siRNA sense strand
agaugacaauggccacaau

SEQ ID NO: 746827 - RNA, 19 nt, Homo sapiens
  misc_RNA (1)...(19): siRNA sense strand
uguuggcuguggaaagaaa

SEQ ID NO: 746828 - RNA, 19 nt, Homo sapiens
  misc_RNA (1)...(19): siRNA sense strand
caaugaggaagaggaagaa

SEQ ID NO: 746829 - RNA, 19 nt, Homo sapiens
  misc_RNA (1)...(19): siRNA sense strand
ugaggaagaggaagaagag

SEQ ID NO: 746830 - RNA, 19 nt, Homo sapiens
  misc_RNA (1)...(19): siRNA sense strand
gcaggaccagcuucugauc

SEQ ID NO: 746831 - RNA, 19 nt, Homo sapiens
  misc_RNA (1)...(19): siRNA sense strand
agagguucuugccagauga

SEQ ID NO: 746832 - RNA, 19 nt, Homo sapiens
  misc_RNA (1)...(19): siRNA sense strand
gggagaaggagggcuggaa

SEQ ID NO: 746833 - RNA, 19 nt, Homo sapiens
  misc_RNA (1)...(19): siRNA sense strand
gguggccucuggagaacca

SEQ ID NO: 746834 - RNA, 19 nt, Homo sapiens
  misc_RNA (1)...(19): siRNA sense strand
uaugagagcgcaggcaugu

SEQ ID NO: 746835 - RNA, 19 nt, Homo sapiens
  misc_RNA (1)...(19): siRNA sense strand
ugaagacgacacgcuuuga

SEQ ID NO: 746836 - RNA, 19 nt, Homo sapiens
  misc_RNA (1)...(19): siRNA sense strand
aggccaagccagugauauu

SEQ ID NO: 746837 - RNA, 19 nt, Homo sapiens
  misc_RNA (1)...(19): siRNA sense strand
agaagcagaaacacuugaa

SEQ ID NO: 746838 - RNA, 19 nt, Homo sapiens
  misc_RNA (1)...(19): siRNA sense strand
gcaaggccaagccagugau

SEQ ID NO: 746839 - RNA, 19 nt, Homo sapiens
  misc_RNA (1)...(19): siRNA sense strand
gucuguuccugacaacuug

SEQ ID NO: 746840 - RNA, 19 nt, Homo sapiens
  misc_RNA (1)...(19): siRNA sense strand
caacaaggcuuacuucuag

SEQ ID NO: 746841 - RNA, 19 nt, Homo sapiens
  misc_RNA (1)...(19): siRNA sense strand
gaaagagcguucagaagaa

SEQ ID NO: 746842 - RNA, 19 nt, Homo sapiens
  misc_RNA (1)...(19): siRNA sense strand
gauggagccuuugaaauua

SEQ ID NO: 746843 - RNA, 19 nt, Homo sapiens
  misc_RNA (1)...(19): siRNA sense strand
ggaaagagcguucagaaga

SEQ ID NO: 746844 - RNA, 19 nt, Homo sapiens
  misc_RNA (1)...(19): siRNA sense strand
gaacucagcugccauugac

SEQ ID NO: 746845 - RNA, 19 nt, Homo sapiens
  misc_RNA (1)...(19): siRNA sense strand
ccaacaaccugguggacua

SEQ ID NO: 746846 - RNA, 19 nt, Homo sapiens
  misc_RNA (1)...(19): siRNA sense strand
gguuugagcuguccaugaa

SEQ ID NO: 746847 - RNA, 19 nt, Homo sapiens
  misc_RNA (1)...(19): siRNA sense strand
gcugggagcaucaucuuua

SEQ ID NO: 746848 - RNA, 19 nt, Homo sapiens
  misc_RNA (1)...(19): siRNA sense strand
gaaugaagcccaagucaca

SEQ ID NO: 746849 - RNA, 19 nt, Homo sapiens
  misc_RNA (1)...(19): siRNA sense strand
cgauggagccuuugaaauu

SEQ ID NO: 746850 - RNA, 19 nt, Homo sapiens
  misc_RNA (1)...(19): siRNA sense strand
gagggaagaugagauugaa

SEQ ID NO: 746851 - RNA, 19 nt, Homo sapiens
  misc_RNA (1)...(19): siRNA sense strand
caaagccgcuaccaaguuc

SEQ ID NO: 746852 - RNA, 19 nt, Homo sapiens
  misc_RNA (1)...(19): siRNA sense strand
gaagccaucaucagcauuu

SEQ ID NO: 746853 - RNA, 19 nt, Homo sapiens
  misc_RNA (1)...(19): siRNA sense strand
uugaagagcuggacagaga

SEQ ID NO: 746854 - RNA, 19 nt, Homo sapiens
  misc_RNA (1)...(19): siRNA sense strand
ggaagggacugccuauggu

SEQ ID NO: 746855 - RNA, 19 nt, Homo sapiens
  misc_RNA (1)...(19): siRNA sense strand
gggcagaccucuuccugau

SEQ ID NO: 746856 - RNA, 19 nt, Homo sapiens
  misc_RNA (1)...(19): siRNA sense strand
gggcaaacccaaucgaauu

SEQ ID NO: 746857 - RNA, 19 nt, Homo sapiens
  misc_RNA (1)...(19): siRNA sense strand
gcaacaagaagucuaacaa

SEQ ID NO: 746858 - RNA, 19 nt, Homo sapiens
  misc_RNA (1)...(19): siRNA sense strand
gcuccuggcuguugaagug

SEQ ID NO: 746859 - RNA, 19 nt, Homo sapiens
  misc_RNA (1)...(19): siRNA sense strand
aaugagaacuguaacaaca

SEQ ID NO: 746860 - RNA, 19 nt, Homo sapiens
  misc_RNA (1)...(19): siRNA sense strand
agucaacucugaucucuga

SEQ ID NO: 746861 - RNA, 19 nt, Homo sapiens
  misc_RNA (1)...(19): siRNA sense strand
ccaaguucaugcucaaaga

SEQ ID NO: 746862 - RNA, 19 nt, Homo sapiens
  misc_RNA (1)...(19): siRNA sense strand
cagcugccauugacuuuga

SEQ ID NO: 746863 - RNA, 19 nt, Homo sapiens
  misc_RNA (1)...(19): siRNA sense strand
aagagaaaccucccaauga

SEQ ID NO: 746864 - RNA, 19 nt, Homo sapiens
  misc_RNA (1)...(19): siRNA sense strand
gcacaacaaggcuuacuuc

SEQ ID NO: 746865 - RNA, 19 nt, Homo sapiens
  misc_RNA (1)...(19): siRNA sense strand
ggagaacucagcugccauu

SEQ ID NO: 746866 - RNA, 19 nt, Homo sapiens
  misc_RNA (1)...(19): siRNA sense strand
gaaggcagaggacauggaa

SEQ ID NO: 746867 - RNA, 19 nt, Homo sapiens
  misc_RNA (1)...(19): siRNA sense strand
cacagacaguccugaauga

SEQ ID NO: 746868 - RNA, 19 nt, Homo sapiens
  misc_RNA (1)...(19): siRNA sense strand
agacgaggaugcagaggaa

SEQ ID NO: 746869 - RNA, 19 nt, Homo sapiens
  misc_RNA (1)...(19): siRNA sense strand
gagggagugucaccuacuu

SEQ ID NO: 746870 - RNA, 19 nt, Homo sapiens
  misc_RNA (1)...(19): siRNA sense strand
ggccaucacuguccucauc

SEQ ID NO: 746871 - RNA, 19 nt, Homo sapiens
  misc_RNA (1)...(19): siRNA sense strand
ccacugggcuuaucuacac

SEQ ID NO: 746872 - RNA, 19 nt, Homo sapiens
  misc_RNA (1)...(19): siRNA sense strand
gaacgauggagccuuugaa

SEQ ID NO: 746873 - RNA, 19 nt, Homo sapiens
  misc_RNA (1)...(19): siRNA sense strand
gaagaagagugugcacaac

SEQ ID NO: 746874 - RNA, 19 nt, Homo sapiens
  misc_RNA (1)...(19): siRNA sense strand
ccaaagccgcuaccaaguu

SEQ ID NO: 746875 - RNA, 19 nt, Homo sapiens
  misc_RNA (1)...(19): siRNA sense strand
ggacauggaaggcaaguac

SEQ ID NO: 746876 - RNA, 19 nt, Homo sapiens
  misc_RNA (1)...(19): siRNA sense strand
agagaaaccucccaaugag

SEQ ID NO: 746877 - RNA, 19 nt, Homo sapiens
  misc_RNA (1)...(19): siRNA sense strand
gcucggagguacugaaggu

SEQ ID NO: 746878 - RNA, 19 nt, Homo sapiens
  misc_RNA (1)...(19): siRNA sense strand
agaagagugugcacaacaa

SEQ ID NO: 746879 - RNA, 19 nt, Homo sapiens
  misc_RNA (1)...(19): siRNA sense strand
gggagccaaugccaaauuc

SEQ ID NO: 746880 - RNA, 19 nt, Homo sapiens
  misc_RNA (1)...(19): siRNA sense strand
cuacuacguugccaggauu

SEQ ID NO: 746881 - RNA, 19 nt, Homo sapiens
  misc_RNA (1)...(19): siRNA sense strand
aaagagaaaccucccaaug

SEQ ID NO: 746882 - RNA, 19 nt, Homo sapiens
  misc_RNA (1)...(19): siRNA sense strand
ccuguaggcucucacguau

SEQ ID NO: 746883 - RNA, 19 nt, Homo sapiens
  misc_RNA (1)...(19): siRNA sense strand
cuaacaagguccugccaau

SEQ ID NO: 746884 - RNA, 19 nt, Homo sapiens
  misc_RNA (1)...(19): siRNA sense strand
agaucuggcucaagaauuc

SEQ ID NO: 746885 - RNA, 19 nt, Homo sapiens
  misc_RNA (1)...(19): siRNA sense strand
gguacaacuucuaugugaa

SEQ ID NO: 746886 - RNA, 19 nt, Homo sapiens
  misc_RNA (1)...(19): siRNA sense strand
ccagagaaguucaguucca

SEQ ID NO: 746887 - RNA, 19 nt, Homo sapiens
  misc_RNA (1)...(19): siRNA sense strand
ccacagacaguccugaaug

SEQ ID NO: 746888 - RNA, 19 nt, Homo sapiens
  misc_RNA (1)...(19): siRNA sense strand
ccagggagccaaugccaaa

SEQ ID NO: 746889 - RNA, 19 nt, Homo sapiens
  misc_RNA (1)...(19): siRNA sense strand
ugggaacgauggagccuuu

SEQ ID NO: 746890 - RNA, 19 nt, Homo sapiens
  misc_RNA (1)...(19): siRNA sense strand
acagagagagggaagauga

SEQ ID NO: 746891 - RNA, 19 nt, Homo sapiens
  misc_RNA (1)...(19): siRNA sense strand
gaagaagacgauggugcua

SEQ ID NO: 746892 - RNA, 19 nt, Homo sapiens
  misc_RNA (1)...(19): siRNA sense strand
guacaggugacugaaauga

SEQ ID NO: 746893 - RNA, 19 nt, Homo sapiens
  misc_RNA (1)...(19): siRNA sense strand
ugaaauauuccaccuaugg

SEQ ID NO: 746894 - RNA, 19 nt, Homo sapiens
  misc_RNA (1)...(19): siRNA sense strand
acaacaaggcuuacuucua

SEQ ID NO: 746895 - RNA, 19 nt, Homo sapiens
  misc_RNA (1)...(19): siRNA sense strand
gagaaaccucccaaugaga

SEQ ID NO: 746896 - RNA, 19 nt, Homo sapiens
  misc_RNA (1)...(19): siRNA sense strand
ucacacugcuggaugucaa

SEQ ID NO: 746897 - RNA, 19 nt, Homo sapiens
  misc_RNA (1)...(19): siRNA sense strand
ucaccuacuuccugcagaa

SEQ ID NO: 746898 - RNA, 19 nt, Homo sapiens
  misc_RNA (1)...(19): siRNA sense strand
ucucugagcucaagcaaaa

SEQ ID NO: 746899 - RNA, 19 nt, Homo sapiens
  misc_RNA (1)...(19): siRNA sense strand
caacaagaagucuaacaag

SEQ ID NO: 746900 - RNA, 19 nt, Homo sapiens
  misc_RNA (1)...(19): siRNA sense strand
ccacagccuuacucaagau

SEQ ID NO: 746901 - RNA, 19 nt, Homo sapiens
  misc_RNA (1)...(19): siRNA sense strand
agugaaauauuccaccuau

SEQ ID NO: 746902 - RNA, 19 nt, Homo sapiens
  misc_RNA (1)...(19): siRNA sense strand
ggacagagagagggaagau

SEQ ID NO: 746903 - RNA, 19 nt, Homo sapiens
  misc_RNA (1)...(19): siRNA sense strand
uaacaacaacagcccagaa

SEQ ID NO: 746904 - RNA, 19 nt, Homo sapiens
  misc_RNA (1)...(19): siRNA sense strand
gcaccaaagccgcuaccaa

SEQ ID NO: 746905 - RNA, 19 nt, Homo sapiens
  misc_RNA (1)...(19): siRNA sense strand
aaacaucacccugguugaa

SEQ ID NO: 746906 - RNA, 19 nt, Homo sapiens
  misc_RNA (1)...(19): siRNA sense strand
ggagaucuggcucaagaau

SEQ ID NO: 746907 - RNA, 19 nt, Homo sapiens
  misc_RNA (1)...(19): siRNA sense strand
gaagagcuggacagagaga

SEQ ID NO: 746908 - RNA, 19 nt, Homo sapiens
  misc_RNA (1)...(19): siRNA sense strand
agguacaacuucuauguga

SEQ ID NO: 746909 - RNA, 19 nt, Homo sapiens
  misc_RNA (1)...(19): siRNA sense strand
gggccacucuggacuacga

SEQ ID NO: 746910 - RNA, 19 nt, Homo sapiens
  misc_RNA (1)...(19): siRNA sense strand
ccaaugagaacuguaacaa

SEQ ID NO: 746911 - RNA, 19 nt, Homo sapiens
  misc_RNA (1)...(19): siRNA sense strand
gaaacaucacccugguuga

SEQ ID NO: 746912 - RNA, 19 nt, Homo sapiens
  misc_RNA (1)...(19): siRNA sense strand
ggggagaucuggcucaaga

SEQ ID NO: 746913 - RNA, 19 nt, Homo sapiens
  misc_RNA (1)...(19): siRNA sense strand
ggugaccgaugccaaugau

SEQ ID NO: 746914 - RNA, 19 nt, Homo sapiens
  misc_RNA (1)...(19): siRNA sense strand
gagaucuggcucaagaauu

SEQ ID NO: 746915 - RNA, 19 nt, Homo sapiens
  misc_RNA (1)...(19): siRNA sense strand
uguaggcucucacguauac

SEQ ID NO: 746916 - RNA, 19 nt, Homo sapiens
  misc_RNA (1)...(19): siRNA sense strand
gagccaaugccaaauucaa

SEQ ID NO: 746917 - RNA, 19 nt, Homo sapiens
  misc_RNA (1)...(19): siRNA sense strand
gaaauuaaugagacaucug

SEQ ID NO: 746918 - RNA, 19 nt, Homo sapiens
  misc_RNA (1)...(19): siRNA sense strand
ggaacgauggagccuuuga

SEQ ID NO: 746919 - RNA, 19 nt, Homo sapiens
  misc_RNA (1)...(19): siRNA sense strand
ugaccgaugccaaugauga

SEQ ID NO: 746920 - RNA, 19 nt, Homo sapiens
  misc_RNA (1)...(19): siRNA sense strand
agaaaccucccaaugagaa

SEQ ID NO: 746921 - RNA, 19 nt, Homo sapiens
  misc_RNA (1)...(19): siRNA sense strand
gagauugaagccaucauca

SEQ ID NO: 746922 - RNA, 19 nt, Homo sapiens
  misc_RNA (1)...(19): siRNA sense strand
ccagguacaacuucuaugu

SEQ ID NO: 746923 - RNA, 19 nt, Homo sapiens
  misc_RNA (1)...(19): siRNA sense strand
ggagagagcggaccccaaa

SEQ ID NO: 746924 - RNA, 19 nt, Homo sapiens
  misc_RNA (1)...(19): siRNA sense strand
gaagguggucgccauggau

SEQ ID NO: 746925 - RNA, 19 nt, Homo sapiens
  misc_RNA (1)...(19): siRNA sense strand
gggcugaugugguguucuc

SEQ ID NO: 746926 - RNA, 19 nt, Homo sapiens
  misc_RNA (1)...(19): siRNA sense strand
cugggagcaucaucuuuaa

SEQ ID NO: 746927 - RNA, 19 nt, Homo sapiens
  misc_RNA (1)...(19): siRNA sense strand
cuaccaaguucaugcucaa

SEQ ID NO: 746928 - RNA, 19 nt, Homo sapiens
  misc_RNA (1)...(19): siRNA sense strand
caacguguucgacaucaau

SEQ ID NO: 746929 - RNA, 19 nt, Homo sapiens
  misc_RNA (1)...(19): siRNA sense strand
ccaaaguauuaaccuucaa

SEQ ID NO: 746930 - RNA, 19 nt, Homo sapiens
  misc_RNA (1)...(19): siRNA sense strand
ucaagaucaccgucaauga

SEQ ID NO: 746931 - RNA, 19 nt, Homo sapiens
  misc_RNA (1)...(19): siRNA sense strand
ccagucaccaucaggauug

SEQ ID NO: 746932 - RNA, 19 nt, Homo sapiens
  misc_RNA (1)...(19): siRNA sense strand
ggagcaucaucuuuaaggu

SEQ ID NO: 746933 - RNA, 19 nt, Homo sapiens
  misc_RNA (1)...(19): siRNA sense strand
gaccgugccuacugucucu

SEQ ID NO: 746934 - RNA, 19 nt, Homo sapiens
  misc_RNA (1)...(19): siRNA sense strand
ugaagguggucgccaugga

SEQ ID NO: 746935 - RNA, 19 nt, Homo sapiens
  misc_RNA (1)...(19): siRNA sense strand
ccaccacggucacggucaa

SEQ ID NO: 746936 - RNA, 19 nt, Homo sapiens
  misc_RNA (1)...(19): siRNA sense strand
ccagucaacucugaucucu

SEQ ID NO: 746937 - RNA, 19 nt, Homo sapiens
  misc_RNA (1)...(19): siRNA sense strand
caacaacagcccagaaagc

SEQ ID NO: 746938 - RNA, 19 nt, Homo sapiens
  misc_RNA (1)...(19): siRNA sense strand
agagagggaagaugagauu

SEQ ID NO: 746939 - RNA, 19 nt, Homo sapiens
  misc_RNA (1)...(19): siRNA sense strand
caaguucgacucccucuac

SEQ ID NO: 746940 - RNA, 19 nt, Homo sapiens
  misc_RNA (1)...(19): siRNA sense strand
gauggaaccuguguuauua

SEQ ID NO: 746941 - RNA, 19 nt, Homo sapiens
  misc_RNA (1)...(19): siRNA sense strand
gaaccuguguuauuaguga

SEQ ID NO: 746942 - RNA, 19 nt, Homo sapiens
  misc_RNA (1)...(19): siRNA sense strand
caacauugcccgcuuuaua

SEQ ID NO: 746943 - RNA, 19 nt, Homo sapiens
  misc_RNA (1)...(19): siRNA sense strand
gaaagaaacaaaucuguga

SEQ ID NO: 746944 - RNA, 19 nt, Homo sapiens
  misc_RNA (1)...(19): siRNA sense strand
gcagaaauguccuagugaa

SEQ ID NO: 746945 - RNA, 19 nt, Homo sapiens
  misc_RNA (1)...(19): siRNA sense strand
uaaccgagaugagacaaua

SEQ ID NO: 746946 - RNA, 19 nt, Homo sapiens
  misc_RNA (1)...(19): siRNA sense strand
gaaaggauggcugaacuua

SEQ ID NO: 746947 - RNA, 19 nt, Homo sapiens
  misc_RNA (1)...(19): siRNA sense strand
gauggaacaugacaacauu

SEQ ID NO: 746948 - RNA, 19 nt, Homo sapiens
  misc_RNA (1)...(19): siRNA sense strand
ggaagauaaugcagccaua

SEQ ID NO: 746949 - RNA, 19 nt, Homo sapiens
  misc_RNA (1)...(19): siRNA sense strand
cuacaaccauggugucuaa

SEQ ID NO: 746950 - RNA, 19 nt, Homo sapiens
  misc_RNA (1)...(19): siRNA sense strand
gcacagauuuauguaaugu

SEQ ID NO: 746951 - RNA, 19 nt, Homo sapiens
  misc_RNA (1)...(19): siRNA sense strand
agaaggagcugugaacuug

SEQ ID NO: 746952 - RNA, 19 nt, Homo sapiens
  misc_RNA (1)...(19): siRNA sense strand
ugaaacaaguagacaugua

SEQ ID NO: 746953 - RNA, 19 nt, Homo sapiens
  misc_RNA (1)...(19): siRNA sense strand
cagcagaaauguccuagug

SEQ ID NO: 746954 - RNA, 19 nt, Homo sapiens
  misc_RNA (1)...(19): siRNA sense strand
cauggugucuaaagauaua

SEQ ID NO: 746955 - RNA, 19 nt, Homo sapiens
  misc_RNA (1)...(19): siRNA sense strand
ugaaucagcuuugaaacaa

SEQ ID NO: 746956 - RNA, 19 nt, Homo sapiens
  misc_RNA (1)...(19): siRNA sense strand
gauaguugccuuaugcuuu

SEQ ID NO: 746957 - RNA, 19 nt, Homo sapiens
  misc_RNA (1)...(19): siRNA sense strand
gaaacaaguagacauguau

SEQ ID NO: 746958 - RNA, 19 nt, Homo sapiens
  misc_RNA (1)...(19): siRNA sense strand
gagagucacugcagaugga

SEQ ID NO: 746959 - RNA, 19 nt, Homo sapiens
  misc_RNA (1)...(19): siRNA sense strand
aguagaaucucucaugaaa

SEQ ID NO: 746960 - RNA, 19 nt, Homo sapiens
  misc_RNA (1)...(19): siRNA sense strand
gaaaauagccuggcaguga

SEQ ID NO: 746961 - RNA, 19 nt, Homo sapiens
  misc_RNA (1)...(19): siRNA sense strand
uaaacaaggucuucacagu

SEQ ID NO: 746962 - RNA, 19 nt, Homo sapiens
  misc_RNA (1)...(19): siRNA sense strand
caaccauggugucuaaaga

SEQ ID NO: 746963 - RNA, 19 nt, Homo sapiens
  misc_RNA (1)...(19): siRNA sense strand
cugaaucgcuggacuguga

SEQ ID NO: 746964 - RNA, 19 nt, Homo sapiens
  misc_RNA (1)...(19): siRNA sense strand
acgaggagaucauuauaaa

SEQ ID NO: 746965 - RNA, 19 nt, Homo sapiens
  misc_RNA (1)...(19): siRNA sense strand
gggaauccguaccagagua

SEQ ID NO: 746966 - RNA, 19 nt, Homo sapiens
  misc_RNA (1)...(19): siRNA sense strand
gaagauaaugcagccauaa

SEQ ID NO: 746967 - RNA, 19 nt, Homo sapiens
  misc_RNA (1)...(19): siRNA sense strand
ggcaucagucucuguauua

SEQ ID NO: 746968 - RNA, 19 nt, Homo sapiens
  misc_RNA (1)...(19): siRNA sense strand
ggaguacuaucccaaugga

SEQ ID NO: 746969 - RNA, 19 nt, Homo sapiens
  misc_RNA (1)...(19): siRNA sense strand
aaacaaggucuucacagua

SEQ ID NO: 746970 - RNA, 19 nt, Homo sapiens
  misc_RNA (1)...(19): siRNA sense strand
uggcuuaucuucacacaga

SEQ ID NO: 746971 - RNA, 19 nt, Homo sapiens
  misc_RNA (1)...(19): siRNA sense strand
acugugaagucaacaauaa

SEQ ID NO: 746972 - RNA, 19 nt, Homo sapiens
  misc_RNA (1)...(19): siRNA sense strand
ccaugaggcugacuggaaa

SEQ ID NO: 746973 - RNA, 19 nt, Homo sapiens
  misc_RNA (1)...(19): siRNA sense strand
ugaagaauguguaguaacu

SEQ ID NO: 746974 - RNA, 19 nt, Homo sapiens
  misc_RNA (1)...(19): siRNA sense strand
aaggauggcugaacuuaug

SEQ ID NO: 746975 - RNA, 19 nt, Homo sapiens
  misc_RNA (1)...(19): siRNA sense strand
gguaagcucuugccgucuu

SEQ ID NO: 746976 - RNA, 19 nt, Homo sapiens
  misc_RNA (1)...(19): siRNA sense strand
ugacaacauugcccgcuuu

SEQ ID NO: 746977 - RNA, 19 nt, Homo sapiens
  misc_RNA (1)...(19): siRNA sense strand
gaggcugacuggaaauaga

SEQ ID NO: 746978 - RNA, 19 nt, Homo sapiens
  misc_RNA (1)...(19): siRNA sense strand
gaucaagaaacgugugaaa

SEQ ID NO: 746979 - RNA, 19 nt, Homo sapiens
  misc_RNA (1)...(19): siRNA sense strand
ggagauauuuaugagaugu

SEQ ID NO: 746980 - RNA, 19 nt, Homo sapiens
  misc_RNA (1)...(19): siRNA sense strand
cauguaugcucuuggacua

SEQ ID NO: 746981 - RNA, 19 nt, Homo sapiens
  misc_RNA (1)...(19): siRNA sense strand
gacaggagaccguaaacaa

SEQ ID NO: 746982 - RNA, 19 nt, Homo sapiens
  misc_RNA (1)...(19): siRNA sense strand
aacaaggucuucacaguau

SEQ ID NO: 746983 - RNA, 19 nt, Homo sapiens
  misc_RNA (1)...(19): siRNA sense strand
gaauggaacauaccguuuc

SEQ ID NO: 746984 - RNA, 19 nt, Homo sapiens
  misc_RNA (1)...(19): siRNA sense strand
gcaauuucccaucgagauu

SEQ ID NO: 746985 - RNA, 19 nt, Homo sapiens
  misc_RNA (1)...(19): siRNA sense strand
cuagaggacuggcuuaucu

SEQ ID NO: 746986 - RNA, 19 nt, Homo sapiens
  misc_RNA (1)...(19): siRNA sense strand
guauuuaagucuccacaca

SEQ ID NO: 746987 - RNA, 19 nt, Homo sapiens
  misc_RNA (1)...(19): siRNA sense strand
cgaacccucucuugaucua

SEQ ID NO: 746988 - RNA, 19 nt, Homo sapiens
  misc_RNA (1)...(19): siRNA sense strand
gcuauggccuuugggagaa

SEQ ID NO: 746989 - RNA, 19 nt, Homo sapiens
  misc_RNA (1)...(19): siRNA sense strand
gcucuuggacuaaucuauu

SEQ ID NO: 746990 - RNA, 19 nt, Homo sapiens
  misc_RNA (1)...(19): siRNA sense strand
agacauguaugcucuugga

SEQ ID NO: 746991 - RNA, 19 nt, Homo sapiens
  misc_RNA (1)...(19): siRNA sense strand
gcagauggacgcauggaau

SEQ ID NO: 746992 - RNA, 19 nt, Homo sapiens
  misc_RNA (1)...(19): siRNA sense strand
uugcaaaccgucagaauuu

SEQ ID NO: 746993 - RNA, 19 nt, Homo sapiens
  misc_RNA (1)...(19): siRNA sense strand
uggcugaacuuaugaugau

SEQ ID NO: 746994 - RNA, 19 nt, Homo sapiens
  misc_RNA (1)...(19): siRNA sense strand
uaagcgagguuggcacuau

SEQ ID NO: 746995 - RNA, 19 nt, Homo sapiens
  misc_RNA (1)...(19): siRNA sense strand
ccacgaggagaucauuaua

SEQ ID NO: 746996 - RNA, 19 nt, Homo sapiens
  misc_RNA (1)...(19): siRNA sense strand
cagauggacgcauggaaua

SEQ ID NO: 746997 - RNA, 19 nt, Homo sapiens
  misc_RNA (1)...(19): siRNA sense strand
aaugucaacuuuacugaga

SEQ ID NO: 746998 - RNA, 19 nt, Homo sapiens
  misc_RNA (1)...(19): siRNA sense strand
gaaggaggcacugcuacaa

SEQ ID NO: 746999 - RNA, 19 nt, Homo sapiens
  misc_RNA (1)...(19): siRNA sense strand
cagaguaccagauggcuuu

SEQ ID NO: 747000 - RNA, 19 nt, Homo sapiens
  misc_RNA (1)...(19): siRNA sense strand
guagacauguaugcucuug

SEQ ID NO: 747001 - RNA, 19 nt, Homo sapiens
  misc_RNA (1)...(19): siRNA sense strand
gaacuugagggacugugaa

SEQ ID NO: 747002 - RNA, 19 nt, Homo sapiens
  misc_RNA (1)...(19): siRNA sense strand
caguccaccucauucauuu

SEQ ID NO: 747003 - RNA, 19 nt, Homo sapiens
  misc_RNA (1)...(19): siRNA sense strand
aaaacucccuauucucuua

SEQ ID NO: 747004 - RNA, 19 nt, Homo sapiens
  misc_RNA (1)...(19): siRNA sense strand
cuaugaagaauguguagua

SEQ ID NO: 747005 - RNA, 19 nt, Homo sapiens
  misc_RNA (1)...(19): siRNA sense strand
ugauggaaccuguguuauu

SEQ ID NO: 747006 - RNA, 19 nt, Homo sapiens
  misc_RNA (1)...(19): siRNA sense strand
aaugauggaaccuguguua

SEQ ID NO: 747007 - RNA, 19 nt, Homo sapiens
  misc_RNA (1)...(19): siRNA sense strand
ggacuggcuuaucuucaca

SEQ ID NO: 747008 - RNA, 19 nt, Homo sapiens
  misc_RNA (1)...(19): siRNA sense strand
aauauuugcuugugaugga

SEQ ID NO: 747009 - RNA, 19 nt, Homo sapiens
  misc_RNA (1)...(19): siRNA sense strand
cagagugccuuugauggaa

SEQ ID NO: 747010 - RNA, 19 nt, Homo sapiens
  misc_RNA (1)...(19): siRNA sense strand
ucaaggagacaaucgaaga

SEQ ID NO: 747011 - RNA, 19 nt, Homo sapiens
  misc_RNA (1)...(19): siRNA sense strand
aacacaagauggcaaauca

SEQ ID NO: 747012 - RNA, 19 nt, Homo sapiens
  misc_RNA (1)...(19): siRNA sense strand
aauccaaugucuacugcua

SEQ ID NO: 747013 - RNA, 19 nt, Homo sapiens
  misc_RNA (1)...(19): siRNA sense strand
auauuaugcucgaaaggua

SEQ ID NO: 747014 - RNA, 19 nt, Homo sapiens
  misc_RNA (1)...(19): siRNA sense strand
caacaauaauggcaguaac

SEQ ID NO: 747015 - RNA, 19 nt, Homo sapiens
  misc_RNA (1)...(19): siRNA sense strand
caaaucaggaucaggugaa

SEQ ID NO: 747016 - RNA, 19 nt, Homo sapiens
  misc_RNA (1)...(19): siRNA sense strand
ggaaaggauggcugaacuu

SEQ ID NO: 747017 - RNA, 19 nt, Homo sapiens
  misc_RNA (1)...(19): siRNA sense strand
gacaauauuaugcucgaaa

SEQ ID NO: 747018 - RNA, 19 nt, Homo sapiens
  misc_RNA (1)...(19): siRNA sense strand
uaccguuucugcuguugua

SEQ ID NO: 747019 - RNA, 19 nt, Homo sapiens
  misc_RNA (1)...(19): siRNA sense strand
gcccaacagucaauccaau

SEQ ID NO: 747020 - RNA, 19 nt, Homo sapiens
  misc_RNA (1)...(19): siRNA sense strand
gaaaccaucccacuuuuga

SEQ ID NO: 747021 - RNA, 19 nt, Homo sapiens
  misc_RNA (1)...(19): siRNA sense strand
ggacaauauuaugcucgaa

SEQ ID NO: 747022 - RNA, 19 nt, Homo sapiens
  misc_RNA (1)...(19): siRNA sense strand
auaguugccuuaugcuuug

SEQ ID NO: 747023 - RNA, 19 nt, Homo sapiens
  misc_RNA (1)...(19): siRNA sense strand
uggcaucagucucuguauu

SEQ ID NO: 747024 - RNA, 19 nt, Homo sapiens
  misc_RNA (1)...(19): siRNA sense strand
ccacucaguccaccucauu

SEQ ID NO: 747025 - RNA, 19 nt, Homo sapiens
  misc_RNA (1)...(19): siRNA sense strand
gucuaaagauauaggaaug

SEQ ID NO: 747026 - RNA, 19 nt, Homo sapiens
  misc_RNA (1)...(19): siRNA sense strand
ggagacaaucgaagacugu

SEQ ID NO: 747027 - RNA, 19 nt, Homo sapiens
  misc_RNA (1)...(19): siRNA sense strand
ugggagauauuuaugagau

SEQ ID NO: 747028 - RNA, 19 nt, Homo sapiens
  misc_RNA (1)...(19): siRNA sense strand
ggacugugaaucagcuuug

SEQ ID NO: 747029 - RNA, 19 nt, Homo sapiens
  misc_RNA (1)...(19): siRNA sense strand
gacaacauugcccgcuuua

SEQ ID NO: 747030 - RNA, 19 nt, Homo sapiens
  misc_RNA (1)...(19): siRNA sense strand
aaucauugcuuuggcauca

SEQ ID NO: 747031 - RNA, 19 nt, Homo sapiens
  misc_RNA (1)...(19): siRNA sense strand
cgagaugagacaauaauca

SEQ ID NO: 747032 - RNA, 19 nt, Homo sapiens
  misc_RNA (1)...(19): siRNA sense strand
cagggcaguucauuccaaa

SEQ ID NO: 747033 - RNA, 19 nt, Homo sapiens
  misc_RNA (1)...(19): siRNA sense strand
caagauggcaaaucaggau

SEQ ID NO: 747034 - RNA, 19 nt, Homo sapiens
  misc_RNA (1)...(19): siRNA sense strand
ggaucuuuaugcaaguauu

SEQ ID NO: 747035 - RNA, 19 nt, Homo sapiens
  misc_RNA (1)...(19): siRNA sense strand
gauggacgcauggaauauu

SEQ ID NO: 747036 - RNA, 19 nt, Homo sapiens
  misc_RNA (1)...(19): siRNA sense strand
gcaaaccgucagaauuuua

SEQ ID NO: 747037 - RNA, 19 nt, Homo sapiens
  misc_RNA (1)...(19): siRNA sense strand
gaguagaaucucucaugaa

SEQ ID NO: 747038 - RNA, 19 nt, Homo sapiens
  misc_RNA (1)...(19): siRNA sense strand
gcaucagucucuguauuag

SEQ ID NO: 747039 - RNA, 19 nt, Homo sapiens
  misc_RNA (1)...(19): siRNA sense strand
accauggugucuaaagaua

SEQ ID NO: 747040 - RNA, 19 nt, Homo sapiens
  misc_RNA (1)...(19): siRNA sense strand
gauggaaccuguguuauua

SEQ ID NO: 747041 - RNA, 19 nt, Homo sapiens
  misc_RNA (1)...(19): siRNA sense strand
gaaccuguguuauuaguga

SEQ ID NO: 747042 - RNA, 19 nt, Homo sapiens
  misc_RNA (1)...(19): siRNA sense strand
caacauugcccgcuuuaua

SEQ ID NO: 747043 - RNA, 19 nt, Homo sapiens
  misc_RNA (1)...(19): siRNA sense strand
gaaagaaacaaaucuguga

SEQ ID NO: 747044 - RNA, 19 nt, Homo sapiens
  misc_RNA (1)...(19): siRNA sense strand
gcagaaauguccuagugaa

SEQ ID NO: 747045 - RNA, 19 nt, Homo sapiens
  misc_RNA (1)...(19): siRNA sense strand
uaaccgagaugagacaaua

SEQ ID NO: 747046 - RNA, 19 nt, Homo sapiens
  misc_RNA (1)...(19): siRNA sense strand
gaaaggauggcugaacuua

SEQ ID NO: 747047 - RNA, 19 nt, Homo sapiens
  misc_RNA (1)...(19): siRNA sense strand
gauggaacaugacaacauu

SEQ ID NO: 747048 - RNA, 19 nt, Homo sapiens
  misc_RNA (1)...(19): siRNA sense strand
ggaagauaaugcagccaua

SEQ ID NO: 747049 - RNA, 19 nt, Homo sapiens
  misc_RNA (1)...(19): siRNA sense strand
gcacagauuuauguaaugu

SEQ ID NO: 747050 - RNA, 19 nt, Homo sapiens
  misc_RNA (1)...(19): siRNA sense strand
agaaggagcugugaacuug

SEQ ID NO: 747051 - RNA, 19 nt, Homo sapiens
  misc_RNA (1)...(19): siRNA sense strand
ugaaacaaguagacaugua

SEQ ID NO: 747052 - RNA, 19 nt, Homo sapiens
  misc_RNA (1)...(19): siRNA sense strand
cagcagaaauguccuagug

SEQ ID NO: 747053 - RNA, 19 nt, Homo sapiens
  misc_RNA (1)...(19): siRNA sense strand
ugaaucagcuuugaaacaa

SEQ ID NO: 747054 - RNA, 19 nt, Homo sapiens
  misc_RNA (1)...(19): siRNA sense strand
gauaguugccuuaugcuuu

SEQ ID NO: 747055 - RNA, 19 nt, Homo sapiens
  misc_RNA (1)...(19): siRNA sense strand
gaaacaaguagacauguau

SEQ ID NO: 747056 - RNA, 19 nt, Homo sapiens
  misc_RNA (1)...(19): siRNA sense strand
gagagucacugcagaugga

SEQ ID NO: 747057 - RNA, 19 nt, Homo sapiens
  misc_RNA (1)...(19): siRNA sense strand
aguagaaucucucaugaaa

SEQ ID NO: 747058 - RNA, 19 nt, Homo sapiens
  misc_RNA (1)...(19): siRNA sense strand
gaaaauagccuggcaguga

SEQ ID NO: 747059 - RNA, 19 nt, Homo sapiens
  misc_RNA (1)...(19): siRNA sense strand
uaaacaaggucuucacagu

SEQ ID NO: 747060 - RNA, 19 nt, Homo sapiens
  misc_RNA (1)...(19): siRNA sense strand
acgaggagaucauuauaaa

SEQ ID NO: 747061 - RNA, 19 nt, Homo sapiens
  misc_RNA (1)...(19): siRNA sense strand
gggaauccguaccagagua

SEQ ID NO: 747062 - RNA, 19 nt, Homo sapiens
  misc_RNA (1)...(19): siRNA sense strand
gaagauaaugcagccauaa

SEQ ID NO: 747063 - RNA, 19 nt, Homo sapiens
  misc_RNA (1)...(19): siRNA sense strand
ggcaucagucucuguauua

SEQ ID NO: 747064 - RNA, 19 nt, Homo sapiens
  misc_RNA (1)...(19): siRNA sense strand
ggaguacuaucccaaugga

SEQ ID NO: 747065 - RNA, 19 nt, Homo sapiens
  misc_RNA (1)...(19): siRNA sense strand
aaacaaggucuucacagua

SEQ ID NO: 747066 - RNA, 19 nt, Homo sapiens
  misc_RNA (1)...(19): siRNA sense strand
uggcuuaucuucacacaga

SEQ ID NO: 747067 - RNA, 19 nt, Homo sapiens
  misc_RNA (1)...(19): siRNA sense strand
ccaugaggcugacuggaaa

SEQ ID NO: 747068 - RNA, 19 nt, Homo sapiens
  misc_RNA (1)...(19): siRNA sense strand
ugaagaauguguaguaacu

SEQ ID NO: 747069 - RNA, 19 nt, Homo sapiens
  misc_RNA (1)...(19): siRNA sense strand
aaggauggcugaacuuaug

SEQ ID NO: 747070 - RNA, 19 nt, Homo sapiens
  misc_RNA (1)...(19): siRNA sense strand
gguaagcucuugccgucuu

SEQ ID NO: 747071 - RNA, 19 nt, Homo sapiens
  misc_RNA (1)...(19): siRNA sense strand
ugacaacauugcccgcuuu

SEQ ID NO: 747072 - RNA, 19 nt, Homo sapiens
  misc_RNA (1)...(19): siRNA sense strand
gaggcugacuggaaauaga

SEQ ID NO: 747073 - RNA, 19 nt, Homo sapiens
  misc_RNA (1)...(19): siRNA sense strand
ggagauauuuaugagaugu

SEQ ID NO: 747074 - RNA, 19 nt, Homo sapiens
  misc_RNA (1)...(19): siRNA sense strand
cauguaugcucuuggacua

SEQ ID NO: 747075 - RNA, 19 nt, Homo sapiens
  misc_RNA (1)...(19): siRNA sense strand
gacaggagaccguaaacaa

SEQ ID NO: 747076 - RNA, 19 nt, Homo sapiens
  misc_RNA (1)...(19): siRNA sense strand
aacaaggucuucacaguau

SEQ ID NO: 747077 - RNA, 19 nt, Homo sapiens
  misc_RNA (1)...(19): siRNA sense strand
gaauggaacauaccguuuc

SEQ ID NO: 747078 - RNA, 19 nt, Homo sapiens
  misc_RNA (1)...(19): siRNA sense strand
gcaauuucccaucgagauu

SEQ ID NO: 747079 - RNA, 19 nt, Homo sapiens
  misc_RNA (1)...(19): siRNA sense strand
cuagaggacuggcuuaucu

SEQ ID NO: 747080 - RNA, 19 nt, Homo sapiens
  misc_RNA (1)...(19): siRNA sense strand
guauuuaagucuccacaca

SEQ ID NO: 747081 - RNA, 19 nt, Homo sapiens
  misc_RNA (1)...(19): siRNA sense strand
cgaacccucucuugaucua

SEQ ID NO: 747082 - RNA, 19 nt, Homo sapiens
  misc_RNA (1)...(19): siRNA sense strand
gcuauggccuuugggagaa

SEQ ID NO: 747083 - RNA, 19 nt, Homo sapiens
  misc_RNA (1)...(19): siRNA sense strand
gcucuuggacuaaucuauu

SEQ ID NO: 747084 - RNA, 19 nt, Homo sapiens
  misc_RNA (1)...(19): siRNA sense strand
agacauguaugcucuugga

SEQ ID NO: 747085 - RNA, 19 nt, Homo sapiens
  misc_RNA (1)...(19): siRNA sense strand
gcagauggacgcauggaau

SEQ ID NO: 747086 - RNA, 19 nt, Homo sapiens
  misc_RNA (1)...(19): siRNA sense strand
uugcaaaccgucagaauuu

SEQ ID NO: 747087 - RNA, 19 nt, Homo sapiens
  misc_RNA (1)...(19): siRNA sense strand
uggcugaacuuaugaugau

SEQ ID NO: 747088 - RNA, 19 nt, Homo sapiens
  misc_RNA (1)...(19): siRNA sense strand
uaagcgagguuggcacuau

SEQ ID NO: 747089 - RNA, 19 nt, Homo sapiens
  misc_RNA (1)...(19): siRNA sense strand
ccacgaggagaucauuaua

SEQ ID NO: 747090 - RNA, 19 nt, Homo sapiens
  misc_RNA (1)...(19): siRNA sense strand
cagauggacgcauggaaua

SEQ ID NO: 747091 - RNA, 19 nt, Homo sapiens
  misc_RNA (1)...(19): siRNA sense strand
aaugucaacuuuacugaga

SEQ ID NO: 747092 - RNA, 19 nt, Homo sapiens
  misc_RNA (1)...(19): siRNA sense strand
cagaguaccagauggcuuu

SEQ ID NO: 747093 - RNA, 19 nt, Homo sapiens
  misc_RNA (1)...(19): siRNA sense strand
guagacauguaugcucuug

SEQ ID NO: 747094 - RNA, 19 nt, Homo sapiens
  misc_RNA (1)...(19): siRNA sense strand
gaacuugagggacugugaa

SEQ ID NO: 747095 - RNA, 19 nt, Homo sapiens
  misc_RNA (1)...(19): siRNA sense strand
caguccaccucauucauuu

SEQ ID NO: 747096 - RNA, 19 nt, Homo sapiens
  misc_RNA (1)...(19): siRNA sense strand
cuaugaagaauguguagua

SEQ ID NO: 747097 - RNA, 19 nt, Homo sapiens
  misc_RNA (1)...(19): siRNA sense strand
ugauggaaccuguguuauu

SEQ ID NO: 747098 - RNA, 19 nt, Homo sapiens
  misc_RNA (1)...(19): siRNA sense strand
aaugauggaaccuguguua

SEQ ID NO: 747099 - RNA, 19 nt, Homo sapiens
  misc_RNA (1)...(19): siRNA sense strand
ggacuggcuuaucuucaca

SEQ ID NO: 747100 - RNA, 19 nt, Homo sapiens
  misc_RNA (1)...(19): siRNA sense strand
aauauuugcuugugaugga

SEQ ID NO: 747101 - RNA, 19 nt, Homo sapiens
  misc_RNA (1)...(19): siRNA sense strand
cagagugccuuugauggaa

SEQ ID NO: 747102 - RNA, 19 nt, Homo sapiens
  misc_RNA (1)...(19): siRNA sense strand
ucaaggagacaaucgaaga

SEQ ID NO: 747103 - RNA, 19 nt, Homo sapiens
  misc_RNA (1)...(19): siRNA sense strand
aauccaaugucuacugcua

SEQ ID NO: 747104 - RNA, 19 nt, Homo sapiens
  misc_RNA (1)...(19): siRNA sense strand
gacaauauuaugcucgaaa

SEQ ID NO: 747105 - RNA, 19 nt, Homo sapiens
  misc_RNA (1)...(19): siRNA sense strand
ggaaaggauggcugaacuu

SEQ ID NO: 747106 - RNA, 19 nt, Homo sapiens
  misc_RNA (1)...(19): siRNA sense strand
auauuaugcucgaaaggua

SEQ ID NO: 747107 - RNA, 19 nt, Homo sapiens
  misc_RNA (1)...(19): siRNA sense strand
uaccguuucugcuguugua

SEQ ID NO: 747108 - RNA, 19 nt, Homo sapiens
  misc_RNA (1)...(19): siRNA sense strand
gcccaacagucaauccaau

SEQ ID NO: 747109 - RNA, 19 nt, Homo sapiens
  misc_RNA (1)...(19): siRNA sense strand
gaaaccaucccacuuuuga

SEQ ID NO: 747110 - RNA, 19 nt, Homo sapiens
  misc_RNA (1)...(19): siRNA sense strand
ggacaauauuaugcucgaa

SEQ ID NO: 747111 - RNA, 19 nt, Homo sapiens
  misc_RNA (1)...(19): siRNA sense strand
auaguugccuuaugcuuug

SEQ ID NO: 747112 - RNA, 19 nt, Homo sapiens
  misc_RNA (1)...(19): siRNA sense strand
uggcaucagucucuguauu

SEQ ID NO: 747113 - RNA, 19 nt, Homo sapiens
  misc_RNA (1)...(19): siRNA sense strand
ccacucaguccaccucauu

SEQ ID NO: 747114 - RNA, 19 nt, Homo sapiens
  misc_RNA (1)...(19): siRNA sense strand
ggagacaaucgaagacugu

SEQ ID NO: 747115 - RNA, 19 nt, Homo sapiens
  misc_RNA (1)...(19): siRNA sense strand
ugggagauauuuaugagau

SEQ ID NO: 747116 - RNA, 19 nt, Homo sapiens
  misc_RNA (1)...(19): siRNA sense strand
ggacugugaaucagcuuug

SEQ ID NO: 747117 - RNA, 19 nt, Homo sapiens
  misc_RNA (1)...(19): siRNA sense strand
gacaacauugcccgcuuua

SEQ ID NO: 747118 - RNA, 19 nt, Homo sapiens
  misc_RNA (1)...(19): siRNA sense strand
aaucauugcuuuggcauca

SEQ ID NO: 747119 - RNA, 19 nt, Homo sapiens
  misc_RNA (1)...(19): siRNA sense strand
cgagaugagacaauaauca

SEQ ID NO: 747120 - RNA, 19 nt, Homo sapiens
  misc_RNA (1)...(19): siRNA sense strand
gaguagaaucucucaugaa

SEQ ID NO: 747121 - RNA, 19 nt, Homo sapiens
  misc_RNA (1)...(19): siRNA sense strand
ggaucuuuaugcaaguauu

SEQ ID NO: 747122 - RNA, 19 nt, Homo sapiens
  misc_RNA (1)...(19): siRNA sense strand
gauggacgcauggaauauu

SEQ ID NO: 747123 - RNA, 19 nt, Homo sapiens
  misc_RNA (1)...(19): siRNA sense strand
gcaaaccgucagaauuuua

SEQ ID NO: 747124 - RNA, 19 nt, Homo sapiens
  misc_RNA (1)...(19): siRNA sense strand
gcaucagucucuguauuag

SEQ ID NO: 747125 - RNA, 19 nt, Homo sapiens
  misc_RNA (1)...(19): siRNA sense strand
gaaucagcuuugaaacaag

SEQ ID NO: 747126 - RNA, 19 nt, Homo sapiens
  misc_RNA (1)...(19): siRNA sense strand
gcugaacuuaugaugauuu

SEQ ID NO: 747127 - RNA, 19 nt, Homo sapiens
  misc_RNA (1)...(19): siRNA sense strand
ccagauggcuuuucagaca

SEQ ID NO: 747128 - RNA, 19 nt, Homo sapiens
  misc_RNA (1)...(19): siRNA sense strand
gggagauauuuaugagaug

SEQ ID NO: 747129 - RNA, 19 nt, Homo sapiens
  misc_RNA (1)...(19): siRNA sense strand
guagcacagauuuauguaa

SEQ ID NO: 747130 - RNA, 19 nt, Homo sapiens
  misc_RNA (1)...(19): siRNA sense strand
aauuucccaucgagauuua

SEQ ID NO: 747131 - RNA, 19 nt, Homo sapiens
  misc_RNA (1)...(19): siRNA sense strand
cauccgaacccucucuuga

SEQ ID NO: 747132 - RNA, 19 nt, Homo sapiens
  misc_RNA (1)...(19): siRNA sense strand
gggaaagaaacaaaucugu

SEQ ID NO: 747133 - RNA, 19 nt, Homo sapiens
  misc_RNA (1)...(19): siRNA sense strand
gcuaugugcguuuaaagau

SEQ ID NO: 747134 - RNA, 19 nt, Homo sapiens
  misc_RNA (1)...(19): siRNA sense strand
gaaggagcugugaacuuga

SEQ ID NO: 747135 - RNA, 19 nt, Homo sapiens
  misc_RNA (1)...(19): siRNA sense strand
cagaaauguccuagugaaa

SEQ ID NO: 747136 - RNA, 19 nt, Homo sapiens
  misc_RNA (1)...(19): siRNA sense strand
caaggauguuggucucaca

SEQ ID NO: 747137 - RNA, 19 nt, Homo sapiens
  misc_RNA (1)...(19): siRNA sense strand
caaggucuucacaguauga

SEQ ID NO: 747138 - RNA, 19 nt, Homo sapiens
  misc_RNA (1)...(19): siRNA sense strand
gugaaucagcuuugaaaca

SEQ ID NO: 747139 - RNA, 19 nt, Homo sapiens
  misc_RNA (1)...(19): siRNA sense strand
gagguuggcacuaucagau

SEQ ID NO: 747140 - RNA, 19 nt, Homo sapiens
  misc_RNA (1)...(19): siRNA sense strand
gauggaaccuguguuauua

SEQ ID NO: 747141 - RNA, 19 nt, Homo sapiens
  misc_RNA (1)...(19): siRNA sense strand
gaaccuguguuauuaguga

SEQ ID NO: 747142 - RNA, 19 nt, Homo sapiens
  misc_RNA (1)...(19): siRNA sense strand
caacauugcccgcuuuaua

SEQ ID NO: 747143 - RNA, 19 nt, Homo sapiens
  misc_RNA (1)...(19): siRNA sense strand
gaaagaaacaaaucuguga

SEQ ID NO: 747144 - RNA, 19 nt, Homo sapiens
  misc_RNA (1)...(19): siRNA sense strand
gcagaaauguccuagugaa

SEQ ID NO: 747145 - RNA, 19 nt, Homo sapiens
  misc_RNA (1)...(19): siRNA sense strand
uaaccgagaugagacaaua

SEQ ID NO: 747146 - RNA, 19 nt, Homo sapiens
  misc_RNA (1)...(19): siRNA sense strand
gaaaggauggcugaacuua

SEQ ID NO: 747147 - RNA, 19 nt, Homo sapiens
  misc_RNA (1)...(19): siRNA sense strand
gauggaacaugacaacauu

SEQ ID NO: 747148 - RNA, 19 nt, Homo sapiens
  misc_RNA (1)...(19): siRNA sense strand
ggaagauaaugcagccaua

SEQ ID NO: 747149 - RNA, 19 nt, Homo sapiens
  misc_RNA (1)...(19): siRNA sense strand
cuacaaccauggugucuaa

SEQ ID NO: 747150 - RNA, 19 nt, Homo sapiens
  misc_RNA (1)...(19): siRNA sense strand
gcacagauuuauguaaugu

SEQ ID NO: 747151 - RNA, 19 nt, Homo sapiens
  misc_RNA (1)...(19): siRNA sense strand
agaaggagcugugaacuug

SEQ ID NO: 747152 - RNA, 19 nt, Homo sapiens
  misc_RNA (1)...(19): siRNA sense strand
ugaaacaaguagacaugua

SEQ ID NO: 747153 - RNA, 19 nt, Homo sapiens
  misc_RNA (1)...(19): siRNA sense strand
cagcagaaauguccuagug

SEQ ID NO: 747154 - RNA, 19 nt, Homo sapiens
  misc_RNA (1)...(19): siRNA sense strand
cauggugucuaaagauaua

SEQ ID NO: 747155 - RNA, 19 nt, Homo sapiens
  misc_RNA (1)...(19): siRNA sense strand
ugaaucagcuuugaaacaa

SEQ ID NO: 747156 - RNA, 19 nt, Homo sapiens
  misc_RNA (1)...(19): siRNA sense strand
gauaguugccuuaugcuuu

SEQ ID NO: 747157 - RNA, 19 nt, Homo sapiens
  misc_RNA (1)...(19): siRNA sense strand
gaaacaaguagacauguau

SEQ ID NO: 747158 - RNA, 19 nt, Homo sapiens
  misc_RNA (1)...(19): siRNA sense strand
gagagucacugcagaugga

SEQ ID NO: 747159 - RNA, 19 nt, Homo sapiens
  misc_RNA (1)...(19): siRNA sense strand
aguagaaucucucaugaaa

SEQ ID NO: 747160 - RNA, 19 nt, Homo sapiens
  misc_RNA (1)...(19): siRNA sense strand
gaaaauagccuggcaguga

SEQ ID NO: 747161 - RNA, 19 nt, Homo sapiens
  misc_RNA (1)...(19): siRNA sense strand
uaaacaaggucuucacagu

SEQ ID NO: 747162 - RNA, 19 nt, Homo sapiens
  misc_RNA (1)...(19): siRNA sense strand
caaccauggugucuaaaga

SEQ ID NO: 747163 - RNA, 19 nt, Homo sapiens
  misc_RNA (1)...(19): siRNA sense strand
cugaaucgcuggacuguga

SEQ ID NO: 747164 - RNA, 19 nt, Homo sapiens
  misc_RNA (1)...(19): siRNA sense strand
acgaggagaucauuauaaa

SEQ ID NO: 747165 - RNA, 19 nt, Homo sapiens
  misc_RNA (1)...(19): siRNA sense strand
gggaauccguaccagagua

SEQ ID NO: 747166 - RNA, 19 nt, Homo sapiens
  misc_RNA (1)...(19): siRNA sense strand
gaagauaaugcagccauaa

SEQ ID NO: 747167 - RNA, 19 nt, Homo sapiens
  misc_RNA (1)...(19): siRNA sense strand
ggcaucagucucuguauua

SEQ ID NO: 747168 - RNA, 19 nt, Homo sapiens
  misc_RNA (1)...(19): siRNA sense strand
ggaguacuaucccaaugga

SEQ ID NO: 747169 - RNA, 19 nt, Homo sapiens
  misc_RNA (1)...(19): siRNA sense strand
aaacaaggucuucacagua

SEQ ID NO: 747170 - RNA, 19 nt, Homo sapiens
  misc_RNA (1)...(19): siRNA sense strand
uggcuuaucuucacacaga

SEQ ID NO: 747171 - RNA, 19 nt, Homo sapiens
  misc_RNA (1)...(19): siRNA sense strand
acugugaagucaacaauaa

SEQ ID NO: 747172 - RNA, 19 nt, Homo sapiens
  misc_RNA (1)...(19): siRNA sense strand
ccaugaggcugacuggaaa

SEQ ID NO: 747173 - RNA, 19 nt, Homo sapiens
  misc_RNA (1)...(19): siRNA sense strand
ugaagaauguguaguaacu

SEQ ID NO: 747174 - RNA, 19 nt, Homo sapiens
  misc_RNA (1)...(19): siRNA sense strand
aaggauggcugaacuuaug

SEQ ID NO: 747175 - RNA, 19 nt, Homo sapiens
  misc_RNA (1)...(19): siRNA sense strand
gguaagcucuugccgucuu

SEQ ID NO: 747176 - RNA, 19 nt, Homo sapiens
  misc_RNA (1)...(19): siRNA sense strand
ugacaacauugcccgcuuu

SEQ ID NO: 747177 - RNA, 19 nt, Homo sapiens
  misc_RNA (1)...(19): siRNA sense strand
gaggcugacuggaaauaga

SEQ ID NO: 747178 - RNA, 19 nt, Homo sapiens
  misc_RNA (1)...(19): siRNA sense strand
gaucaagaaacgugugaaa

SEQ ID NO: 747179 - RNA, 19 nt, Homo sapiens
  misc_RNA (1)...(19): siRNA sense strand
ggagauauuuaugagaugu

SEQ ID NO: 747180 - RNA, 19 nt, Homo sapiens
  misc_RNA (1)...(19): siRNA sense strand
cauguaugcucuuggacua

SEQ ID NO: 747181 - RNA, 19 nt, Homo sapiens
  misc_RNA (1)...(19): siRNA sense strand
gacaggagaccguaaacaa

SEQ ID NO: 747182 - RNA, 19 nt, Homo sapiens
  misc_RNA (1)...(19): siRNA sense strand
aacaaggucuucacaguau

SEQ ID NO: 747183 - RNA, 19 nt, Homo sapiens
  misc_RNA (1)...(19): siRNA sense strand
gaauggaacauaccguuuc

SEQ ID NO: 747184 - RNA, 19 nt, Homo sapiens
  misc_RNA (1)...(19): siRNA sense strand
gcaauuucccaucgagauu

SEQ ID NO: 747185 - RNA, 19 nt, Homo sapiens
  misc_RNA (1)...(19): siRNA sense strand
cuagaggacuggcuuaucu

SEQ ID NO: 747186 - RNA, 19 nt, Homo sapiens
  misc_RNA (1)...(19): siRNA sense strand
guauuuaagucuccacaca

SEQ ID NO: 747187 - RNA, 19 nt, Homo sapiens
  misc_RNA (1)...(19): siRNA sense strand
cgaacccucucuugaucua

SEQ ID NO: 747188 - RNA, 19 nt, Homo sapiens
  misc_RNA (1)...(19): siRNA sense strand
gcuauggccuuugggagaa

SEQ ID NO: 747189 - RNA, 19 nt, Homo sapiens
  misc_RNA (1)...(19): siRNA sense strand
gcucuuggacuaaucuauu

SEQ ID NO: 747190 - RNA, 19 nt, Homo sapiens
  misc_RNA (1)...(19): siRNA sense strand
agacauguaugcucuugga

SEQ ID NO: 747191 - RNA, 19 nt, Homo sapiens
  misc_RNA (1)...(19): siRNA sense strand
gcagauggacgcauggaau

SEQ ID NO: 747192 - RNA, 19 nt, Homo sapiens
  misc_RNA (1)...(19): siRNA sense strand
uugcaaaccgucagaauuu

SEQ ID NO: 747193 - RNA, 19 nt, Homo sapiens
  misc_RNA (1)...(19): siRNA sense strand
uggcugaacuuaugaugau

SEQ ID NO: 747194 - RNA, 19 nt, Homo sapiens
  misc_RNA (1)...(19): siRNA sense strand
uaagcgagguuggcacuau

SEQ ID NO: 747195 - RNA, 19 nt, Homo sapiens
  misc_RNA (1)...(19): siRNA sense strand
ccacgaggagaucauuaua

SEQ ID NO: 747196 - RNA, 19 nt, Homo sapiens
  misc_RNA (1)...(19): siRNA sense strand
cagauggacgcauggaaua

SEQ ID NO: 747197 - RNA, 19 nt, Homo sapiens
  misc_RNA (1)...(19): siRNA sense strand
aaugucaacuuuacugaga

SEQ ID NO: 747198 - RNA, 19 nt, Homo sapiens
  misc_RNA (1)...(19): siRNA sense strand
gaaggaggcacugcuacaa

SEQ ID NO: 747199 - RNA, 19 nt, Homo sapiens
  misc_RNA (1)...(19): siRNA sense strand
cagaguaccagauggcuuu

SEQ ID NO: 747200 - RNA, 19 nt, Homo sapiens
  misc_RNA (1)...(19): siRNA sense strand
guagacauguaugcucuug

SEQ ID NO: 747201 - RNA, 19 nt, Homo sapiens
  misc_RNA (1)...(19): siRNA sense strand
gaacuugagggacugugaa

SEQ ID NO: 747202 - RNA, 19 nt, Homo sapiens
  misc_RNA (1)...(19): siRNA sense strand
caguccaccucauucauuu

SEQ ID NO: 747203 - RNA, 19 nt, Homo sapiens
  misc_RNA (1)...(19): siRNA sense strand
aaaacucccuauucucuua

SEQ ID NO: 747204 - RNA, 19 nt, Homo sapiens
  misc_RNA (1)...(19): siRNA sense strand
cuaugaagaauguguagua

SEQ ID NO: 747205 - RNA, 19 nt, Homo sapiens
  misc_RNA (1)...(19): siRNA sense strand
ugauggaaccuguguuauu

SEQ ID NO: 747206 - RNA, 19 nt, Homo sapiens
  misc_RNA (1)...(19): siRNA sense strand
aaugauggaaccuguguua

SEQ ID NO: 747207 - RNA, 19 nt, Homo sapiens
  misc_RNA (1)...(19): siRNA sense strand
ggacuggcuuaucuucaca

SEQ ID NO: 747208 - RNA, 19 nt, Homo sapiens
  misc_RNA (1)...(19): siRNA sense strand
aauauuugcuugugaugga

SEQ ID NO: 747209 - RNA, 19 nt, Homo sapiens
  misc_RNA (1)...(19): siRNA sense strand
cagagugccuuugauggaa

SEQ ID NO: 747210 - RNA, 19 nt, Homo sapiens
  misc_RNA (1)...(19): siRNA sense strand
ucaaggagacaaucgaaga

SEQ ID NO: 747211 - RNA, 19 nt, Homo sapiens
  misc_RNA (1)...(19): siRNA sense strand
aacacaagauggcaaauca

SEQ ID NO: 747212 - RNA, 19 nt, Homo sapiens
  misc_RNA (1)...(19): siRNA sense strand
aauccaaugucuacugcua

SEQ ID NO: 747213 - RNA, 19 nt, Homo sapiens
  misc_RNA (1)...(19): siRNA sense strand
auauuaugcucgaaaggua

SEQ ID NO: 747214 - RNA, 19 nt, Homo sapiens
  misc_RNA (1)...(19): siRNA sense strand
caacaauaauggcaguaac

SEQ ID NO: 747215 - RNA, 19 nt, Homo sapiens
  misc_RNA (1)...(19): siRNA sense strand
caaaucaggaucaggugaa

SEQ ID NO: 747216 - RNA, 19 nt, Homo sapiens
  misc_RNA (1)...(19): siRNA sense strand
ggaaaggauggcugaacuu

SEQ ID NO: 747217 - RNA, 19 nt, Homo sapiens
  misc_RNA (1)...(19): siRNA sense strand
gacaauauuaugcucgaaa

SEQ ID NO: 747218 - RNA, 19 nt, Homo sapiens
  misc_RNA (1)...(19): siRNA sense strand
uaccguuucugcuguugua

SEQ ID NO: 747219 - RNA, 19 nt, Homo sapiens
  misc_RNA (1)...(19): siRNA sense strand
gcccaacagucaauccaau

SEQ ID NO: 747220 - RNA, 19 nt, Homo sapiens
  misc_RNA (1)...(19): siRNA sense strand
gaaaccaucccacuuuuga

SEQ ID NO: 747221 - RNA, 19 nt, Homo sapiens
  misc_RNA (1)...(19): siRNA sense strand
ggacaauauuaugcucgaa

SEQ ID NO: 747222 - RNA, 19 nt, Homo sapiens
  misc_RNA (1)...(19): siRNA sense strand
auaguugccuuaugcuuug

SEQ ID NO: 747223 - RNA, 19 nt, Homo sapiens
  misc_RNA (1)...(19): siRNA sense strand
uggcaucagucucuguauu

SEQ ID NO: 747224 - RNA, 19 nt, Homo sapiens
  misc_RNA (1)...(19): siRNA sense strand
ccacucaguccaccucauu

SEQ ID NO: 747225 - RNA, 19 nt, Homo sapiens
  misc_RNA (1)...(19): siRNA sense strand
gucuaaagauauaggaaug

SEQ ID NO: 747226 - RNA, 19 nt, Homo sapiens
  misc_RNA (1)...(19): siRNA sense strand
ggagacaaucgaagacugu

SEQ ID NO: 747227 - RNA, 19 nt, Homo sapiens
  misc_RNA (1)...(19): siRNA sense strand
ugggagauauuuaugagau

SEQ ID NO: 747228 - RNA, 19 nt, Homo sapiens
  misc_RNA (1)...(19): siRNA sense strand
ggacugugaaucagcuuug

SEQ ID NO: 747229 - RNA, 19 nt, Homo sapiens
  misc_RNA (1)...(19): siRNA sense strand
gacaacauugcccgcuuua

SEQ ID NO: 747230 - RNA, 19 nt, Homo sapiens
  misc_RNA (1)...(19): siRNA sense strand
aaucauugcuuuggcauca

SEQ ID NO: 747231 - RNA, 19 nt, Homo sapiens
  misc_RNA (1)...(19): siRNA sense strand
cgagaugagacaauaauca

SEQ ID NO: 747232 - RNA, 19 nt, Homo sapiens
  misc_RNA (1)...(19): siRNA sense strand
cagggcaguucauuccaaa

SEQ ID NO: 747233 - RNA, 19 nt, Homo sapiens
  misc_RNA (1)...(19): siRNA sense strand
caagauggcaaaucaggau

SEQ ID NO: 747234 - RNA, 19 nt, Homo sapiens
  misc_RNA (1)...(19): siRNA sense strand
ggaucuuuaugcaaguauu

SEQ ID NO: 747235 - RNA, 19 nt, Homo sapiens
  misc_RNA (1)...(19): siRNA sense strand
gauggacgcauggaauauu

SEQ ID NO: 747236 - RNA, 19 nt, Homo sapiens
  misc_RNA (1)...(19): siRNA sense strand
gcaaaccgucagaauuuua

SEQ ID NO: 747237 - RNA, 19 nt, Homo sapiens
  misc_RNA (1)...(19): siRNA sense strand
gaguagaaucucucaugaa

SEQ ID NO: 747238 - RNA, 19 nt, Homo sapiens
  misc_RNA (1)...(19): siRNA sense strand
gcaucagucucuguauuag

SEQ ID NO: 747239 - RNA, 19 nt, Homo sapiens
  misc_RNA (1)...(19): siRNA sense strand
accauggugucuaaagaua

SEQ ID NO: 747240 - RNA, 19 nt, Homo sapiens
  misc_RNA (1)...(19): siRNA sense strand
gauggaaccuguguuauua

SEQ ID NO: 747241 - RNA, 19 nt, Homo sapiens
  misc_RNA (1)...(19): siRNA sense strand
gaaccuguguuauuaguga

SEQ ID NO: 747242 - RNA, 19 nt, Homo sapiens
  misc_RNA (1)...(19): siRNA sense strand
caacauugcccgcuuuaua

SEQ ID NO: 747243 - RNA, 19 nt, Homo sapiens
  misc_RNA (1)...(19): siRNA sense strand
gaaagaaacaaaucuguga

SEQ ID NO: 747244 - RNA, 19 nt, Homo sapiens
  misc_RNA (1)...(19): siRNA sense strand
gcagaaauguccuagugaa

SEQ ID NO: 747245 - RNA, 19 nt, Homo sapiens
  misc_RNA (1)...(19): siRNA sense strand
uaaccgagaugagacaaua

SEQ ID NO: 747246 - RNA, 19 nt, Homo sapiens
  misc_RNA (1)...(19): siRNA sense strand
gaaaggauggcugaacuua

SEQ ID NO: 747247 - RNA, 19 nt, Homo sapiens
  misc_RNA (1)...(19): siRNA sense strand
gauggaacaugacaacauu

SEQ ID NO: 747248 - RNA, 19 nt, Homo sapiens
  misc_RNA (1)...(19): siRNA sense strand
ggaagauaaugcagccaua

SEQ ID NO: 747249 - RNA, 19 nt, Homo sapiens
  misc_RNA (1)...(19): siRNA sense strand
gcacagauuuauguaaugu

SEQ ID NO: 747250 - RNA, 19 nt, Homo sapiens
  misc_RNA (1)...(19): siRNA sense strand
agaaggagcugugaacuug

SEQ ID NO: 747251 - RNA, 19 nt, Homo sapiens
  misc_RNA (1)...(19): siRNA sense strand
ugaaacaaguagacaugua

SEQ ID NO: 747252 - RNA, 19 nt, Homo sapiens
  misc_RNA (1)...(19): siRNA sense strand
cagcagaaauguccuagug

SEQ ID NO: 747253 - RNA, 19 nt, Homo sapiens
  misc_RNA (1)...(19): siRNA sense strand
ugaaucagcuuugaaacaa

SEQ ID NO: 747254 - RNA, 19 nt, Homo sapiens
  misc_RNA (1)...(19): siRNA sense strand
gauaguugccuuaugcuuu

SEQ ID NO: 747255 - RNA, 19 nt, Homo sapiens
  misc_RNA (1)...(19): siRNA sense strand
gaaacaaguagacauguau

SEQ ID NO: 747256 - RNA, 19 nt, Homo sapiens
  misc_RNA (1)...(19): siRNA sense strand
gagagucacugcagaugga

SEQ ID NO: 747257 - RNA, 19 nt, Homo sapiens
  misc_RNA (1)...(19): siRNA sense strand
aguagaaucucucaugaaa

SEQ ID NO: 747258 - RNA, 19 nt, Homo sapiens
  misc_RNA (1)...(19): siRNA sense strand
gaaaauagccuggcaguga

SEQ ID NO: 747259 - RNA, 19 nt, Homo sapiens
  misc_RNA (1)...(19): siRNA sense strand
uaaacaaggucuucacagu

SEQ ID NO: 747260 - RNA, 19 nt, Homo sapiens
  misc_RNA (1)...(19): siRNA sense strand
acgaggagaucauuauaaa

SEQ ID NO: 747261 - RNA, 19 nt, Homo sapiens
  misc_RNA (1)...(19): siRNA sense strand
gggaauccguaccagagua

SEQ ID NO: 747262 - RNA, 19 nt, Homo sapiens
  misc_RNA (1)...(19): siRNA sense strand
gaagauaaugcagccauaa

SEQ ID NO: 747263 - RNA, 19 nt, Homo sapiens
  misc_RNA (1)...(19): siRNA sense strand
ggcaucagucucuguauua

SEQ ID NO: 747264 - RNA, 19 nt, Homo sapiens
  misc_RNA (1)...(19): siRNA sense strand
ggaguacuaucccaaugga

SEQ ID NO: 747265 - RNA, 19 nt, Homo sapiens
  misc_RNA (1)...(19): siRNA sense strand
aaacaaggucuucacagua

SEQ ID NO: 747266 - RNA, 19 nt, Homo sapiens
  misc_RNA (1)...(19): siRNA sense strand
uggcuuaucuucacacaga

SEQ ID NO: 747267 - RNA, 19 nt, Homo sapiens
  misc_RNA (1)...(19): siRNA sense strand
ccaugaggcugacuggaaa

SEQ ID NO: 747268 - RNA, 19 nt, Homo sapiens
  misc_RNA (1)...(19): siRNA sense strand
ugaagaauguguaguaacu

SEQ ID NO: 747269 - RNA, 19 nt, Homo sapiens
  misc_RNA (1)...(19): siRNA sense strand
aaggauggcugaacuuaug

SEQ ID NO: 747270 - RNA, 19 nt, Homo sapiens
  misc_RNA (1)...(19): siRNA sense strand
gguaagcucuugccgucuu

SEQ ID NO: 747271 - RNA, 19 nt, Homo sapiens
  misc_RNA (1)...(19): siRNA sense strand
ugacaacauugcccgcuuu

SEQ ID NO: 747272 - RNA, 19 nt, Homo sapiens
  misc_RNA (1)...(19): siRNA sense strand
gaggcugacuggaaauaga

SEQ ID NO: 747273 - RNA, 19 nt, Homo sapiens
  misc_RNA (1)...(19): siRNA sense strand
ggagauauuuaugagaugu

SEQ ID NO: 747274 - RNA, 19 nt, Homo sapiens
  misc_RNA (1)...(19): siRNA sense strand
cauguaugcucuuggacua

SEQ ID NO: 747275 - RNA, 19 nt, Homo sapiens
  misc_RNA (1)...(19): siRNA sense strand
gacaggagaccguaaacaa

SEQ ID NO: 747276 - RNA, 19 nt, Homo sapiens
  misc_RNA (1)...(19): siRNA sense strand
aacaaggucuucacaguau

SEQ ID NO: 747277 - RNA, 19 nt, Homo sapiens
  misc_RNA (1)...(19): siRNA sense strand
gaauggaacauaccguuuc

SEQ ID NO: 747278 - RNA, 19 nt, Homo sapiens
  misc_RNA (1)...(19): siRNA sense strand
gcaauuucccaucgagauu

SEQ ID NO: 747279 - RNA, 19 nt, Homo sapiens
  misc_RNA (1)...(19): siRNA sense strand
cuagaggacuggcuuaucu

SEQ ID NO: 747280 - RNA, 19 nt, Homo sapiens
  misc_RNA (1)...(19): siRNA sense strand
guauuuaagucuccacaca

SEQ ID NO: 747281 - RNA, 19 nt, Homo sapiens
  misc_RNA (1)...(19): siRNA sense strand
cgaacccucucuugaucua

SEQ ID NO: 747282 - RNA, 19 nt, Homo sapiens
  misc_RNA (1)...(19): siRNA sense strand
gcuauggccuuugggagaa

SEQ ID NO: 747283 - RNA, 19 nt, Homo sapiens
  misc_RNA (1)...(19): siRNA sense strand
gcucuuggacuaaucuauu

SEQ ID NO: 747284 - RNA, 19 nt, Homo sapiens
  misc_RNA (1)...(19): siRNA sense strand
agacauguaugcucuugga

SEQ ID NO: 747285 - RNA, 19 nt, Homo sapiens
  misc_RNA (1)...(19): siRNA sense strand
gcagauggacgcauggaau

SEQ ID NO: 747286 - RNA, 19 nt, Homo sapiens
  misc_RNA (1)...(19): siRNA sense strand
uugcaaaccgucagaauuu

SEQ ID NO: 747287 - RNA, 19 nt, Homo sapiens
  misc_RNA (1)...(19): siRNA sense strand
uggcugaacuuaugaugau

SEQ ID NO: 747288 - RNA, 19 nt, Homo sapiens
  misc_RNA (1)...(19): siRNA sense strand
uaagcgagguuggcacuau

SEQ ID NO: 747289 - RNA, 19 nt, Homo sapiens
  misc_RNA (1)...(19): siRNA sense strand
ccacgaggagaucauuaua

SEQ ID NO: 747290 - RNA, 19 nt, Homo sapiens
  misc_RNA (1)...(19): siRNA sense strand
cagauggacgcauggaaua

SEQ ID NO: 747291 - RNA, 19 nt, Homo sapiens
  misc_RNA (1)...(19): siRNA sense strand
aaugucaacuuuacugaga

SEQ ID NO: 747292 - RNA, 19 nt, Homo sapiens
  misc_RNA (1)...(19): siRNA sense strand
cagaguaccagauggcuuu

SEQ ID NO: 747293 - RNA, 19 nt, Homo sapiens
  misc_RNA (1)...(19): siRNA sense strand
guagacauguaugcucuug

SEQ ID NO: 747294 - RNA, 19 nt, Homo sapiens
  misc_RNA (1)...(19): siRNA sense strand
gaacuugagggacugugaa

SEQ ID NO: 747295 - RNA, 19 nt, Homo sapiens
  misc_RNA (1)...(19): siRNA sense strand
caguccaccucauucauuu

SEQ ID NO: 747296 - RNA, 19 nt, Homo sapiens
  misc_RNA (1)...(19): siRNA sense strand
cuaugaagaauguguagua

SEQ ID NO: 747297 - RNA, 19 nt, Homo sapiens
  misc_RNA (1)...(19): siRNA sense strand
ugauggaaccuguguuauu

SEQ ID NO: 747298 - RNA, 19 nt, Homo sapiens
  misc_RNA (1)...(19): siRNA sense strand
aaugauggaaccuguguua

SEQ ID NO: 747299 - RNA, 19 nt, Homo sapiens
  misc_RNA (1)...(19): siRNA sense strand
ggacuggcuuaucuucaca

SEQ ID NO: 747300 - RNA, 19 nt, Homo sapiens
  misc_RNA (1)...(19): siRNA sense strand
aauauuugcuugugaugga

SEQ ID NO: 747301 - RNA, 19 nt, Homo sapiens
  misc_RNA (1)...(19): siRNA sense strand
cagagugccuuugauggaa

SEQ ID NO: 747302 - RNA, 19 nt, Homo sapiens
  misc_RNA (1)...(19): siRNA sense strand
ucaaggagacaaucgaaga

SEQ ID NO: 747303 - RNA, 19 nt, Homo sapiens
  misc_RNA (1)...(19): siRNA sense strand
aauccaaugucuacugcua

SEQ ID NO: 747304 - RNA, 19 nt, Homo sapiens
  misc_RNA (1)...(19): siRNA sense strand
gacaauauuaugcucgaaa

SEQ ID NO: 747305 - RNA, 19 nt, Homo sapiens
  misc_RNA (1)...(19): siRNA sense strand
ggaaaggauggcugaacuu

SEQ ID NO: 747306 - RNA, 19 nt, Homo sapiens
  misc_RNA (1)...(19): siRNA sense strand
auauuaugcucgaaaggua

SEQ ID NO: 747307 - RNA, 19 nt, Homo sapiens
  misc_RNA (1)...(19): siRNA sense strand
uaccguuucugcuguugua

SEQ ID NO: 747308 - RNA, 19 nt, Homo sapiens
  misc_RNA (1)...(19): siRNA sense strand
gcccaacagucaauccaau

SEQ ID NO: 747309 - RNA, 19 nt, Homo sapiens
  misc_RNA (1)...(19): siRNA sense strand
gaaaccaucccacuuuuga

SEQ ID NO: 747310 - RNA, 19 nt, Homo sapiens
  misc_RNA (1)...(19): siRNA sense strand
ggacaauauuaugcucgaa

SEQ ID NO: 747311 - RNA, 19 nt, Homo sapiens
  misc_RNA (1)...(19): siRNA sense strand
auaguugccuuaugcuuug

SEQ ID NO: 747312 - RNA, 19 nt, Homo sapiens
  misc_RNA (1)...(19): siRNA sense strand
uggcaucagucucuguauu

SEQ ID NO: 747313 - RNA, 19 nt, Homo sapiens
  misc_RNA (1)...(19): siRNA sense strand
ccacucaguccaccucauu

SEQ ID NO: 747314 - RNA, 19 nt, Homo sapiens
  misc_RNA (1)...(19): siRNA sense strand
ggagacaaucgaagacugu

SEQ ID NO: 747315 - RNA, 19 nt, Homo sapiens
  misc_RNA (1)...(19): siRNA sense strand
ugggagauauuuaugagau

SEQ ID NO: 747316 - RNA, 19 nt, Homo sapiens
  misc_RNA (1)...(19): siRNA sense strand
ggacugugaaucagcuuug

SEQ ID NO: 747317 - RNA, 19 nt, Homo sapiens
  misc_RNA (1)...(19): siRNA sense strand
gacaacauugcccgcuuua

SEQ ID NO: 747318 - RNA, 19 nt, Homo sapiens
  misc_RNA (1)...(19): siRNA sense strand
aaucauugcuuuggcauca

SEQ ID NO: 747319 - RNA, 19 nt, Homo sapiens
  misc_RNA (1)...(19): siRNA sense strand
cgagaugagacaauaauca

SEQ ID NO: 747320 - RNA, 19 nt, Homo sapiens
  misc_RNA (1)...(19): siRNA sense strand
gaguagaaucucucaugaa

SEQ ID NO: 747321 - RNA, 19 nt, Homo sapiens
  misc_RNA (1)...(19): siRNA sense strand
ggaucuuuaugcaaguauu

SEQ ID NO: 747322 - RNA, 19 nt, Homo sapiens
  misc_RNA (1)...(19): siRNA sense strand
gauggacgcauggaauauu

SEQ ID NO: 747323 - RNA, 19 nt, Homo sapiens
  misc_RNA (1)...(19): siRNA sense strand
gcaaaccgucagaauuuua

SEQ ID NO: 747324 - RNA, 19 nt, Homo sapiens
  misc_RNA (1)...(19): siRNA sense strand
gcaucagucucuguauuag

SEQ ID NO: 747325 - RNA, 19 nt, Homo sapiens
  misc_RNA (1)...(19): siRNA sense strand
gaaucagcuuugaaacaag

SEQ ID NO: 747326 - RNA, 19 nt, Homo sapiens
  misc_RNA (1)...(19): siRNA sense strand
gcugaacuuaugaugauuu

SEQ ID NO: 747327 - RNA, 19 nt, Homo sapiens
  misc_RNA (1)...(19): siRNA sense strand
ccagauggcuuuucagaca

SEQ ID NO: 747328 - RNA, 19 nt, Homo sapiens
  misc_RNA (1)...(19): siRNA sense strand
gggagauauuuaugagaug

SEQ ID NO: 747329 - RNA, 19 nt, Homo sapiens
  misc_RNA (1)...(19): siRNA sense strand
guagcacagauuuauguaa

SEQ ID NO: 747330 - RNA, 19 nt, Homo sapiens
  misc_RNA (1)...(19): siRNA sense strand
aauuucccaucgagauuua

SEQ ID NO: 747331 - RNA, 19 nt, Homo sapiens
  misc_RNA (1)...(19): siRNA sense strand
cauccgaacccucucuuga

SEQ ID NO: 747332 - RNA, 19 nt, Homo sapiens
  misc_RNA (1)...(19): siRNA sense strand
gggaaagaaacaaaucugu

SEQ ID NO: 747333 - RNA, 19 nt, Homo sapiens
  misc_RNA (1)...(19): siRNA sense strand
gcuaugugcguuuaaagau

SEQ ID NO: 747334 - RNA, 19 nt, Homo sapiens
  misc_RNA (1)...(19): siRNA sense strand
gaaggagcugugaacuuga

SEQ ID NO: 747335 - RNA, 19 nt, Homo sapiens
  misc_RNA (1)...(19): siRNA sense strand
cagaaauguccuagugaaa

SEQ ID NO: 747336 - RNA, 19 nt, Homo sapiens
  misc_RNA (1)...(19): siRNA sense strand
caaggauguuggucucaca

SEQ ID NO: 747337 - RNA, 19 nt, Homo sapiens
  misc_RNA (1)...(19): siRNA sense strand
caaggucuucacaguauga

SEQ ID NO: 747338 - RNA, 19 nt, Homo sapiens
  misc_RNA (1)...(19): siRNA sense strand
gugaaucagcuuugaaaca

SEQ ID NO: 747339 - RNA, 19 nt, Homo sapiens
  misc_RNA (1)...(19): siRNA sense strand
gagguuggcacuaucagau

SEQ ID NO: 747340 - RNA, 19 nt, Homo sapiens
  misc_RNA (1)...(19): siRNA sense strand
gagaagaaguccacacuau

SEQ ID NO: 747341 - RNA, 19 nt, Homo sapiens
  misc_RNA (1)...(19): siRNA sense strand
gcaaggaccucuucaucaa

SEQ ID NO: 747342 - RNA, 19 nt, Homo sapiens
  misc_RNA (1)...(19): siRNA sense strand
ggaaugccaucucccaaug

SEQ ID NO: 747343 - RNA, 19 nt, Homo sapiens
  misc_RNA (1)...(19): siRNA sense strand
gaagaaguccacacuaugu

SEQ ID NO: 747344 - RNA, 19 nt, Homo sapiens
  misc_RNA (1)...(19): siRNA sense strand
gcggugaucuugcuguauu

SEQ ID NO: 747345 - RNA, 19 nt, Homo sapiens
  misc_RNA (1)...(19): siRNA sense strand
gagucuauaugcagaguaa

SEQ ID NO: 747346 - RNA, 19 nt, Homo sapiens
  misc_RNA (1)...(19): siRNA sense strand
gccuagagcugcuggagaa

SEQ ID NO: 747347 - RNA, 19 nt, Homo sapiens
  misc_RNA (1)...(19): siRNA sense strand
caacacgugugacaucauc

SEQ ID NO: 747348 - RNA, 19 nt, Homo sapiens
  misc_RNA (1)...(19): siRNA sense strand
cgcggagucuuguucuuua

SEQ ID NO: 747349 - RNA, 19 nt, Homo sapiens
  misc_RNA (1)...(19): siRNA sense strand
cccagaaccuuccaagaga

SEQ ID NO: 747350 - RNA, 19 nt, Homo sapiens
  misc_RNA (1)...(19): siRNA sense strand
gacaucaucacccucuaua

SEQ ID NO: 747351 - RNA, 19 nt, Homo sapiens
  misc_RNA (1)...(19): siRNA sense strand
gagaugauccagcgucugu

SEQ ID NO: 747352 - RNA, 19 nt, Homo sapiens
  misc_RNA (1)...(19): siRNA sense strand
uagagcugcuggagaaaug

SEQ ID NO: 747353 - RNA, 19 nt, Homo sapiens
  misc_RNA (1)...(19): siRNA sense strand
gugcagcagugacaagcaa

SEQ ID NO: 747354 - RNA, 19 nt, Homo sapiens
  misc_RNA (1)...(19): siRNA sense strand
caucaucacccucuauauc

SEQ ID NO: 747355 - RNA, 19 nt, Homo sapiens
  misc_RNA (1)...(19): siRNA sense strand
ucgaggagcucuucagcau

SEQ ID NO: 747356 - RNA, 19 nt, Homo sapiens
  misc_RNA (1)...(19): siRNA sense strand
gcgcggagucuuguucuuu

SEQ ID NO: 747357 - RNA, 19 nt, Homo sapiens
  misc_RNA (1)...(19): siRNA sense strand
acaacauggugcucauuga

SEQ ID NO: 747358 - RNA, 19 nt, Homo sapiens
  misc_RNA (1)...(19): siRNA sense strand
cuauaucucugccaucaag

SEQ ID NO: 747359 - RNA, 19 nt, Homo sapiens
  misc_RNA (1)...(19): siRNA sense strand
gacaacauggugcucauug

SEQ ID NO: 747360 - RNA, 19 nt, Homo sapiens
  misc_RNA (1)...(19): siRNA sense strand
gugaagucaugcugaagga

SEQ ID NO: 747361 - RNA, 19 nt, Homo sapiens
  misc_RNA (1)...(19): siRNA sense strand
ggacacagugcggcagauu

SEQ ID NO: 747362 - RNA, 19 nt, Homo sapiens
  misc_RNA (1)...(19): siRNA sense strand
gcgagaacucugcggauga

SEQ ID NO: 747363 - RNA, 19 nt, Homo sapiens
  misc_RNA (1)...(19): siRNA sense strand
aaggaccucuucaucaaug

SEQ ID NO: 747364 - RNA, 19 nt, Homo sapiens
  misc_RNA (1)...(19): siRNA sense strand
gaugauccagcgucuguau

SEQ ID NO: 747365 - RNA, 19 nt, Homo sapiens
  misc_RNA (1)...(19): siRNA sense strand
ccagaaccuuccaagagau

SEQ ID NO: 747366 - RNA, 19 nt, Homo sapiens
  misc_RNA (1)...(19): siRNA sense strand
ggagucuuguucuuuagca

SEQ ID NO: 747367 - RNA, 19 nt, Homo sapiens
  misc_RNA (1)...(19): siRNA sense strand
agacaggccaggacaguga

SEQ ID NO: 747368 - RNA, 19 nt, Homo sapiens
  misc_RNA (1)...(19): siRNA sense strand
ggacaacauggugcucauu

SEQ ID NO: 747369 - RNA, 19 nt, Homo sapiens
  misc_RNA (1)...(19): siRNA sense strand
cagcaaggaccucuucauc

SEQ ID NO: 747370 - RNA, 19 nt, Homo sapiens
  misc_RNA (1)...(19): siRNA sense strand
cgagaagaaguccacacua

SEQ ID NO: 747371 - RNA, 19 nt, Homo sapiens
  misc_RNA (1)...(19): siRNA sense strand
gaggcuuacugcaagaagu

SEQ ID NO: 747372 - RNA, 19 nt, Homo sapiens
  misc_RNA (1)...(19): siRNA sense strand
agggcuaccugcagaagaa

SEQ ID NO: 747373 - RNA, 19 nt, Homo sapiens
  misc_RNA (1)...(19): siRNA sense strand
caacaucuccccugaguuc

SEQ ID NO: 747374 - RNA, 19 nt, Homo sapiens
  misc_RNA (1)...(19): siRNA sense strand
agaagaaguccacacuaug

SEQ ID NO: 747375 - RNA, 19 nt, Homo sapiens
  misc_RNA (1)...(19): siRNA sense strand
caccuucucugucauugag

SEQ ID NO: 747376 - RNA, 19 nt, Homo sapiens
  misc_RNA (1)...(19): siRNA sense strand
ucugugaagucaugcugaa

SEQ ID NO: 747377 - RNA, 19 nt, Homo sapiens
  misc_RNA (1)...(19): siRNA sense strand
cgagaacucugcggaugag

SEQ ID NO: 747378 - RNA, 19 nt, Homo sapiens
  misc_RNA (1)...(19): siRNA sense strand
gcccggacaggaguuguua

SEQ ID NO: 747379 - RNA, 19 nt, Homo sapiens
  misc_RNA (1)...(19): siRNA sense strand
gagagucuauaugcagagu

SEQ ID NO: 747380 - RNA, 19 nt, Homo sapiens
  misc_RNA (1)...(19): siRNA sense strand
gcugccacgugcaaagguu

SEQ ID NO: 747381 - RNA, 19 nt, Homo sapiens
  misc_RNA (1)...(19): siRNA sense strand
cagcaucguccgagacuuc

SEQ ID NO: 747382 - RNA, 19 nt, Homo sapiens
  misc_RNA (1)...(19): siRNA sense strand
gcggagucuuguucuuuag

SEQ ID NO: 747383 - RNA, 19 nt, Homo sapiens
  misc_RNA (1)...(19): siRNA sense strand
gcaccuucucugucauuga

SEQ ID NO: 747384 - RNA, 19 nt, Homo sapiens
  misc_RNA (1)...(19): siRNA sense strand
gcuggacccuggaggaacu

SEQ ID NO: 747385 - RNA, 19 nt, Homo sapiens
  misc_RNA (1)...(19): siRNA sense strand
gccaggacagugaggauga

SEQ ID NO: 747386 - RNA, 19 nt, Homo sapiens
  misc_RNA (1)...(19): siRNA sense strand
ggagacaggccaggacagu

SEQ ID NO: 747387 - RNA, 19 nt, Homo sapiens
  misc_RNA (1)...(19): siRNA sense strand
uggaggugcugcagaacga

SEQ ID NO: 747388 - RNA, 19 nt, Homo sapiens
  misc_RNA (1)...(19): siRNA sense strand
caaggaccucuucaucaau

SEQ ID NO: 747389 - RNA, 19 nt, Homo sapiens
  misc_RNA (1)...(19): siRNA sense strand
ucguggaggugcugcagaa

SEQ ID NO: 747390 - RNA, 19 nt, Homo sapiens
  misc_RNA (1)...(19): siRNA sense strand
cuguaugggugcuucuuga

SEQ ID NO: 747391 - RNA, 19 nt, Homo sapiens
  misc_RNA (1)...(19): siRNA sense strand
gcagggugcagcagugaca

SEQ ID NO: 747392 - RNA, 19 nt, Homo sapiens
  misc_RNA (1)...(19): siRNA sense strand
gggacaacauggugcucau

SEQ ID NO: 747393 - RNA, 19 nt, Homo sapiens
  misc_RNA (1)...(19): siRNA sense strand
ugacaucaucacccucuau

SEQ ID NO: 747394 - RNA, 19 nt, Homo sapiens
  misc_RNA (1)...(19): siRNA sense strand
acacagugcggcagauugu

SEQ ID NO: 747395 - RNA, 19 nt, Homo sapiens
  misc_RNA (1)...(19): siRNA sense strand
agaaguccacacuauguug

SEQ ID NO: 747396 - RNA, 19 nt, Homo sapiens
  misc_RNA (1)...(19): siRNA sense strand
gcuguugagcuguccaaga

SEQ ID NO: 747397 - RNA, 19 nt, Homo sapiens
  misc_RNA (1)...(19): siRNA sense strand
guaugggugcuucuugaga

SEQ ID NO: 747398 - RNA, 19 nt, Homo sapiens
  misc_RNA (1)...(19): siRNA sense strand
gacacagugcggcagauug

SEQ ID NO: 747399 - RNA, 19 nt, Homo sapiens
  misc_RNA (1)...(19): siRNA sense strand
ucuaccgccugcccaagaa

SEQ ID NO: 747400 - RNA, 19 nt, Homo sapiens
  misc_RNA (1)...(19): siRNA sense strand
gggaccagcagcucgucua

SEQ ID NO: 747401 - RNA, 19 nt, Homo sapiens
  misc_RNA (1)...(19): siRNA sense strand
aggcggugaucuugcugua

SEQ ID NO: 747402 - RNA, 19 nt, Homo sapiens
  misc_RNA (1)...(19): siRNA sense strand
gcagcaaggaccucuucau

SEQ ID NO: 747403 - RNA, 19 nt, Homo sapiens
  misc_RNA (1)...(19): siRNA sense strand
gcgagaagaaguccacacu

SEQ ID NO: 747404 - RNA, 19 nt, Homo sapiens
  misc_RNA (1)...(19): siRNA sense strand
gcuccuuccugcgugaguu

SEQ ID NO: 747405 - RNA, 19 nt, Homo sapiens
  misc_RNA (1)...(19): siRNA sense strand
gugcagucccgccaaagga

SEQ ID NO: 747406 - RNA, 19 nt, Homo sapiens
  misc_RNA (1)...(19): siRNA sense strand
gaaccuuccaagagaugau

SEQ ID NO: 747407 - RNA, 19 nt, Homo sapiens
  misc_RNA (1)...(19): siRNA sense strand
uccuggagguggccuguga

SEQ ID NO: 747408 - RNA, 19 nt, Homo sapiens
  misc_RNA (1)...(19): siRNA sense strand
caacauggugcucauugac

SEQ ID NO: 747409 - RNA, 19 nt, Homo sapiens
  misc_RNA (1)...(19): siRNA sense strand
cccggcaccuucucuguca

SEQ ID NO: 747410 - RNA, 19 nt, Homo sapiens
  misc_RNA (1)...(19): siRNA sense strand
gagcaaggcggugaaaaug

SEQ ID NO: 747411 - RNA, 19 nt, Homo sapiens
  misc_RNA (1)...(19): siRNA sense strand
cggugaucuugcuguauuu

SEQ ID NO: 747412 - RNA, 19 nt, Homo sapiens
  misc_RNA (1)...(19): siRNA sense strand
ugcgugaguuccacaagug

SEQ ID NO: 747413 - RNA, 19 nt, Homo sapiens
  misc_RNA (1)...(19): siRNA sense strand
gccucucacuggaucguau

SEQ ID NO: 747414 - RNA, 19 nt, Homo sapiens
  misc_RNA (1)...(19): siRNA sense strand
gcgcaucgaggagcucuuc

SEQ ID NO: 747415 - RNA, 19 nt, Homo sapiens
  misc_RNA (1)...(19): siRNA sense strand
gaacuugacuucuuugaga

SEQ ID NO: 747416 - RNA, 19 nt, Homo sapiens
  misc_RNA (1)...(19): siRNA sense strand
uaacuugccugaagaagaa

SEQ ID NO: 747417 - RNA, 19 nt, Homo sapiens
  misc_RNA (1)...(19): siRNA sense strand
ggagguggcagaacaguua

SEQ ID NO: 747418 - RNA, 19 nt, Homo sapiens
  misc_RNA (1)...(19): siRNA sense strand
ggcaggaucugauucauug

SEQ ID NO: 747419 - RNA, 19 nt, Homo sapiens
  misc_RNA (1)...(19): siRNA sense strand
gcaaugcugacuaucaaua

SEQ ID NO: 747420 - RNA, 19 nt, Homo sapiens
  misc_RNA (1)...(19): siRNA sense strand
gaagaaaauucgucaaguu

SEQ ID NO: 747421 - RNA, 19 nt, Homo sapiens
  misc_RNA (1)...(19): siRNA sense strand
ucauagcgguuacgacuuu

SEQ ID NO: 747422 - RNA, 19 nt, Homo sapiens
  misc_RNA (1)...(19): siRNA sense strand
gaugugaaguaccucauga

SEQ ID NO: 747423 - RNA, 19 nt, Homo sapiens
  misc_RNA (1)...(19): siRNA sense strand
ugaaguaccucaugaagag

SEQ ID NO: 747424 - RNA, 19 nt, Homo sapiens
  misc_RNA (1)...(19): siRNA sense strand
cagcuaggacugacauuua

SEQ ID NO: 747425 - RNA, 19 nt, Homo sapiens
  misc_RNA (1)...(19): siRNA sense strand
uuacgacuuuggcuacuua

SEQ ID NO: 747426 - RNA, 19 nt, Homo sapiens
  misc_RNA (1)...(19): siRNA sense strand
ugagauccuucgauuguuu

SEQ ID NO: 747427 - RNA, 19 nt, Homo sapiens
  misc_RNA (1)...(19): siRNA sense strand
gaauugaaacccaguacuu

SEQ ID NO: 747428 - RNA, 19 nt, Homo sapiens
  misc_RNA (1)...(19): siRNA sense strand
gacuuuggcuacuuaauca

SEQ ID NO: 747429 - RNA, 19 nt, Homo sapiens
  misc_RNA (1)...(19): siRNA sense strand
gguguaauguagacuuguu

SEQ ID NO: 747430 - RNA, 19 nt, Homo sapiens
  misc_RNA (1)...(19): siRNA sense strand
ugaaugagcaaggagaaua

SEQ ID NO: 747431 - RNA, 19 nt, Homo sapiens
  misc_RNA (1)...(19): siRNA sense strand
caagacccauuggagaauu

SEQ ID NO: 747432 - RNA, 19 nt, Homo sapiens
  misc_RNA (1)...(19): siRNA sense strand
aaagauaauucagcuagga

SEQ ID NO: 747433 - RNA, 19 nt, Homo sapiens
  misc_RNA (1)...(19): siRNA sense strand
gaaaauucgucaaguuauc

SEQ ID NO: 747434 - RNA, 19 nt, Homo sapiens
  misc_RNA (1)...(19): siRNA sense strand
auaauuacguugcuaugga

SEQ ID NO: 747435 - RNA, 19 nt, Homo sapiens
  misc_RNA (1)...(19): siRNA sense strand
uaccaacuauugcggugua

SEQ ID NO: 747436 - RNA, 19 nt, Homo sapiens
  misc_RNA (1)...(19): siRNA sense strand
ucucaaagguggauuacag

SEQ ID NO: 747437 - RNA, 19 nt, Homo sapiens
  misc_RNA (1)...(19): siRNA sense strand
gaggaggaaggaauugaaa

SEQ ID NO: 747438 - RNA, 19 nt, Homo sapiens
  misc_RNA (1)...(19): siRNA sense strand
cuacuaacaacaucuggua

SEQ ID NO: 747439 - RNA, 19 nt, Homo sapiens
  misc_RNA (1)...(19): siRNA sense strand
cuauagagcuacuaacaac

SEQ ID NO: 747440 - RNA, 19 nt, Homo sapiens
  misc_RNA (1)...(19): siRNA sense strand
gacuaucaauaccaacuau

SEQ ID NO: 747441 - RNA, 19 nt, Homo sapiens
  misc_RNA (1)...(19): siRNA sense strand
ggagaauucaggagcaaug

SEQ ID NO: 747442 - RNA, 19 nt, Homo sapiens
  misc_RNA (1)...(19): siRNA sense strand
ggauaggaccacaacauca

SEQ ID NO: 747443 - RNA, 19 nt, Homo sapiens
  misc_RNA (1)...(19): siRNA sense strand
gaacggauaggaccacaac

SEQ ID NO: 747444 - RNA, 19 nt, Homo sapiens
  misc_RNA (1)...(19): siRNA sense strand
caacuauugcgguguaaug

SEQ ID NO: 747445 - RNA, 19 nt, Homo sapiens
  misc_RNA (1)...(19): siRNA sense strand
ccaguacuuugcagaacuu

SEQ ID NO: 747446 - RNA, 19 nt, Homo sapiens
  misc_RNA (1)...(19): siRNA sense strand
gcgguguaauguagacuug

SEQ ID NO: 747447 - RNA, 19 nt, Homo sapiens
  misc_RNA (1)...(19): siRNA sense strand
ggagugguccucugugaag

SEQ ID NO: 747448 - RNA, 19 nt, Homo sapiens
  misc_RNA (1)...(19): siRNA sense strand
ucuuugagauccuucgauu

SEQ ID NO: 747449 - RNA, 19 nt, Homo sapiens
  misc_RNA (1)...(19): siRNA sense strand
uacaggagguggcagaaca

SEQ ID NO: 747450 - RNA, 19 nt, Homo sapiens
  misc_RNA (1)...(19): siRNA sense strand
cuauugcgguguaauguag

SEQ ID NO: 747451 - RNA, 19 nt, Homo sapiens
  misc_RNA (1)...(19): siRNA sense strand
cgacuuuggcuacuuaauc

SEQ ID NO: 747452 - RNA, 19 nt, Homo sapiens
  misc_RNA (1)...(19): siRNA sense strand
gcaagacccauuggagaau

SEQ ID NO: 747453 - RNA, 19 nt, Homo sapiens
  misc_RNA (1)...(19): siRNA sense strand
agaauacccuccaggaacu

SEQ ID NO: 747454 - RNA, 19 nt, Homo sapiens
  misc_RNA (1)...(19): siRNA sense strand
gaacuucuuaugacuucug

SEQ ID NO: 747455 - RNA, 19 nt, Homo sapiens
  misc_RNA (1)...(19): siRNA sense strand
gugaaguaccucaugaaga

SEQ ID NO: 747456 - RNA, 19 nt, Homo sapiens
  misc_RNA (1)...(19): siRNA sense strand
gaaugagcaaggagaauac

SEQ ID NO: 747457 - RNA, 19 nt, Homo sapiens
  misc_RNA (1)...(19): siRNA sense strand
acucuaacuugccugaaga

SEQ ID NO: 747458 - RNA, 19 nt, Homo sapiens
  misc_RNA (1)...(19): siRNA sense strand
gauaggaccacaacaucag

SEQ ID NO: 747459 - RNA, 19 nt, Homo sapiens
  misc_RNA (1)...(19): siRNA sense strand
cuaggacugacauuuauga

SEQ ID NO: 747460 - RNA, 19 nt, Homo sapiens
  misc_RNA (1)...(19): siRNA sense strand
gugaaggggucaaaugguu

SEQ ID NO: 747461 - RNA, 19 nt, Homo sapiens
  misc_RNA (1)...(19): siRNA sense strand
ugacuaucaauaccaacua

SEQ ID NO: 747462 - RNA, 19 nt, Homo sapiens
  misc_RNA (1)...(19): siRNA sense strand
cuaacuugccugaagaaga

SEQ ID NO: 747463 - RNA, 19 nt, Homo sapiens
  misc_RNA (1)...(19): siRNA sense strand
ugacggaggacauguaugc

SEQ ID NO: 747464 - RNA, 19 nt, Homo sapiens
  misc_RNA (1)...(19): siRNA sense strand
ccuaaccaacucuaacuug

SEQ ID NO: 747465 - RNA, 19 nt, Homo sapiens
  misc_RNA (1)...(19): siRNA sense strand
cuggagugguccucuguga

SEQ ID NO: 747466 - RNA, 19 nt, Homo sapiens
  misc_RNA (1)...(19): siRNA sense strand
guguaauguagacuuguua

SEQ ID NO: 747467 - RNA, 19 nt, Homo sapiens
  misc_RNA (1)...(19): siRNA sense strand
ugacuucuuugagauccuu

SEQ ID NO: 747468 - RNA, 19 nt, Homo sapiens
  misc_RNA (1)...(19): siRNA sense strand
aauugaaacccaguacuuu

SEQ ID NO: 747469 - RNA, 19 nt, Homo sapiens
  misc_RNA (1)...(19): siRNA sense strand
ugaggaggaaggaauugaa

SEQ ID NO: 747470 - RNA, 19 nt, Homo sapiens
  misc_RNA (1)...(19): siRNA sense strand
agcuaggacugacauuuau

SEQ ID NO: 747471 - RNA, 19 nt, Homo sapiens
  misc_RNA (1)...(19): siRNA sense strand
uuugagauccuucgauugu

SEQ ID NO: 747472 - RNA, 19 nt, Homo sapiens
  misc_RNA (1)...(19): siRNA sense strand
gagcuacuaacaacaucug

SEQ ID NO: 747473 - RNA, 19 nt, Homo sapiens
  misc_RNA (1)...(19): siRNA sense strand
gcucacaggaauggccuuu

SEQ ID NO: 747474 - RNA, 19 nt, Homo sapiens
  misc_RNA (1)...(19): siRNA sense strand
ugcaagacccauuggagaa

SEQ ID NO: 747475 - RNA, 19 nt, Homo sapiens
  misc_RNA (1)...(19): siRNA sense strand
ucuauagagcuacuaacaa

SEQ ID NO: 747476 - RNA, 19 nt, Homo sapiens
  misc_RNA (1)...(19): siRNA sense strand
guuacgacuuuggcuacuu

SEQ ID NO: 747477 - RNA, 19 nt, Homo sapiens
  misc_RNA (1)...(19): siRNA sense strand
ggaauugaaacccaguacu

SEQ ID NO: 747478 - RNA, 19 nt, Homo sapiens
  misc_RNA (1)...(19): siRNA sense strand
ugucauuucauagcgguua

SEQ ID NO: 747479 - RNA, 19 nt, Homo sapiens
  misc_RNA (1)...(19): siRNA sense strand
gaacuugacuucuuugaga

SEQ ID NO: 747480 - RNA, 19 nt, Homo sapiens
  misc_RNA (1)...(19): siRNA sense strand
uaacuugccugaagaagaa

SEQ ID NO: 747481 - RNA, 19 nt, Homo sapiens
  misc_RNA (1)...(19): siRNA sense strand
ggagguggcagaacaguua

SEQ ID NO: 747482 - RNA, 19 nt, Homo sapiens
  misc_RNA (1)...(19): siRNA sense strand
ggcaggaucugauucauug

SEQ ID NO: 747483 - RNA, 19 nt, Homo sapiens
  misc_RNA (1)...(19): siRNA sense strand
gcaaugcugacuaucaaua

SEQ ID NO: 747484 - RNA, 19 nt, Homo sapiens
  misc_RNA (1)...(19): siRNA sense strand
gaagaaaauucgucaaguu

SEQ ID NO: 747485 - RNA, 19 nt, Homo sapiens
  misc_RNA (1)...(19): siRNA sense strand
ucauagcgguuacgacuuu

SEQ ID NO: 747486 - RNA, 19 nt, Homo sapiens
  misc_RNA (1)...(19): siRNA sense strand
gaugugaaguaccucauga

SEQ ID NO: 747487 - RNA, 19 nt, Homo sapiens
  misc_RNA (1)...(19): siRNA sense strand
ugaaguaccucaugaagag

SEQ ID NO: 747488 - RNA, 19 nt, Homo sapiens
  misc_RNA (1)...(19): siRNA sense strand
cagcuaggacugacauuua

SEQ ID NO: 747489 - RNA, 19 nt, Homo sapiens
  misc_RNA (1)...(19): siRNA sense strand
uuacgacuuuggcuacuua

SEQ ID NO: 747490 - RNA, 19 nt, Homo sapiens
  misc_RNA (1)...(19): siRNA sense strand
ugagauccuucgauuguuu

SEQ ID NO: 747491 - RNA, 19 nt, Homo sapiens
  misc_RNA (1)...(19): siRNA sense strand
gaauugaaacccaguacuu

SEQ ID NO: 747492 - RNA, 19 nt, Homo sapiens
  misc_RNA (1)...(19): siRNA sense strand
gacuuuggcuacuuaauca

SEQ ID NO: 747493 - RNA, 19 nt, Homo sapiens
  misc_RNA (1)...(19): siRNA sense strand
gguguaauguagacuuguu

SEQ ID NO: 747494 - RNA, 19 nt, Homo sapiens
  misc_RNA (1)...(19): siRNA sense strand
ugaaugagcaaggagaaua

SEQ ID NO: 747495 - RNA, 19 nt, Homo sapiens
  misc_RNA (1)...(19): siRNA sense strand
caagacccauuggagaauu

SEQ ID NO: 747496 - RNA, 19 nt, Homo sapiens
  misc_RNA (1)...(19): siRNA sense strand
aaagauaauucagcuagga

SEQ ID NO: 747497 - RNA, 19 nt, Homo sapiens
  misc_RNA (1)...(19): siRNA sense strand
gaaaauucgucaaguuauc

SEQ ID NO: 747498 - RNA, 19 nt, Homo sapiens
  misc_RNA (1)...(19): siRNA sense strand
auaauuacguugcuaugga

SEQ ID NO: 747499 - RNA, 19 nt, Homo sapiens
  misc_RNA (1)...(19): siRNA sense strand
uaccaacuauugcggugua

SEQ ID NO: 747500 - RNA, 19 nt, Homo sapiens
  misc_RNA (1)...(19): siRNA sense strand
ucucaaagguggauuacag

SEQ ID NO: 747501 - RNA, 19 nt, Homo sapiens
  misc_RNA (1)...(19): siRNA sense strand
gaggaggaaggaauugaaa

SEQ ID NO: 747502 - RNA, 19 nt, Homo sapiens
  misc_RNA (1)...(19): siRNA sense strand
cuacuaacaacaucuggua

SEQ ID NO: 747503 - RNA, 19 nt, Homo sapiens
  misc_RNA (1)...(19): siRNA sense strand
cuauagagcuacuaacaac

SEQ ID NO: 747504 - RNA, 19 nt, Homo sapiens
  misc_RNA (1)...(19): siRNA sense strand
gacuaucaauaccaacuau

SEQ ID NO: 747505 - RNA, 19 nt, Homo sapiens
  misc_RNA (1)...(19): siRNA sense strand
ggagaauucaggagcaaug

SEQ ID NO: 747506 - RNA, 19 nt, Homo sapiens
  misc_RNA (1)...(19): siRNA sense strand
ggauaggaccacaacauca

SEQ ID NO: 747507 - RNA, 19 nt, Homo sapiens
  misc_RNA (1)...(19): siRNA sense strand
gaacggauaggaccacaac

SEQ ID NO: 747508 - RNA, 19 nt, Homo sapiens
  misc_RNA (1)...(19): siRNA sense strand
caacuauugcgguguaaug

SEQ ID NO: 747509 - RNA, 19 nt, Homo sapiens
  misc_RNA (1)...(19): siRNA sense strand
ccaguacuuugcagaacuu

SEQ ID NO: 747510 - RNA, 19 nt, Homo sapiens
  misc_RNA (1)...(19): siRNA sense strand
gcgguguaauguagacuug

SEQ ID NO: 747511 - RNA, 19 nt, Homo sapiens
  misc_RNA (1)...(19): siRNA sense strand
ggagugguccucugugaag

SEQ ID NO: 747512 - RNA, 19 nt, Homo sapiens
  misc_RNA (1)...(19): siRNA sense strand
ucuuugagauccuucgauu

SEQ ID NO: 747513 - RNA, 19 nt, Homo sapiens
  misc_RNA (1)...(19): siRNA sense strand
uacaggagguggcagaaca

SEQ ID NO: 747514 - RNA, 19 nt, Homo sapiens
  misc_RNA (1)...(19): siRNA sense strand
cuauugcgguguaauguag

SEQ ID NO: 747515 - RNA, 19 nt, Homo sapiens
  misc_RNA (1)...(19): siRNA sense strand
cgacuuuggcuacuuaauc

SEQ ID NO: 747516 - RNA, 19 nt, Homo sapiens
  misc_RNA (1)...(19): siRNA sense strand
gcaagacccauuggagaau

SEQ ID NO: 747517 - RNA, 19 nt, Homo sapiens
  misc_RNA (1)...(19): siRNA sense strand
agaauacccuccaggaacu

SEQ ID NO: 747518 - RNA, 19 nt, Homo sapiens
  misc_RNA (1)...(19): siRNA sense strand
gaacuucuuaugacuucug

SEQ ID NO: 747519 - RNA, 19 nt, Homo sapiens
  misc_RNA (1)...(19): siRNA sense strand
gugaaguaccucaugaaga

SEQ ID NO: 747520 - RNA, 19 nt, Homo sapiens
  misc_RNA (1)...(19): siRNA sense strand
gaaugagcaaggagaauac

SEQ ID NO: 747521 - RNA, 19 nt, Homo sapiens
  misc_RNA (1)...(19): siRNA sense strand
acucuaacuugccugaaga

SEQ ID NO: 747522 - RNA, 19 nt, Homo sapiens
  misc_RNA (1)...(19): siRNA sense strand
gauaggaccacaacaucag

SEQ ID NO: 747523 - RNA, 19 nt, Homo sapiens
  misc_RNA (1)...(19): siRNA sense strand
cuaggacugacauuuauga

SEQ ID NO: 747524 - RNA, 19 nt, Homo sapiens
  misc_RNA (1)...(19): siRNA sense strand
gugaaggggucaaaugguu

SEQ ID NO: 747525 - RNA, 19 nt, Homo sapiens
  misc_RNA (1)...(19): siRNA sense strand
ugacuaucaauaccaacua

SEQ ID NO: 747526 - RNA, 19 nt, Homo sapiens
  misc_RNA (1)...(19): siRNA sense strand
cuaacuugccugaagaaga

SEQ ID NO: 747527 - RNA, 19 nt, Homo sapiens
  misc_RNA (1)...(19): siRNA sense strand
ugacggaggacauguaugc

SEQ ID NO: 747528 - RNA, 19 nt, Homo sapiens
  misc_RNA (1)...(19): siRNA sense strand
ccuaaccaacucuaacuug

SEQ ID NO: 747529 - RNA, 19 nt, Homo sapiens
  misc_RNA (1)...(19): siRNA sense strand
cuggagugguccucuguga

SEQ ID NO: 747530 - RNA, 19 nt, Homo sapiens
  misc_RNA (1)...(19): siRNA sense strand
guguaauguagacuuguua

SEQ ID NO: 747531 - RNA, 19 nt, Homo sapiens
  misc_RNA (1)...(19): siRNA sense strand
ugacuucuuugagauccuu

SEQ ID NO: 747532 - RNA, 19 nt, Homo sapiens
  misc_RNA (1)...(19): siRNA sense strand
aauugaaacccaguacuuu

SEQ ID NO: 747533 - RNA, 19 nt, Homo sapiens
  misc_RNA (1)...(19): siRNA sense strand
ugaggaggaaggaauugaa

SEQ ID NO: 747534 - RNA, 19 nt, Homo sapiens
  misc_RNA (1)...(19): siRNA sense strand
agcuaggacugacauuuau

SEQ ID NO: 747535 - RNA, 19 nt, Homo sapiens
  misc_RNA (1)...(19): siRNA sense strand
uuugagauccuucgauugu

SEQ ID NO: 747536 - RNA, 19 nt, Homo sapiens
  misc_RNA (1)...(19): siRNA sense strand
gagcuacuaacaacaucug

SEQ ID NO: 747537 - RNA, 19 nt, Homo sapiens
  misc_RNA (1)...(19): siRNA sense strand
gcucacaggaauggccuuu

SEQ ID NO: 747538 - RNA, 19 nt, Homo sapiens
  misc_RNA (1)...(19): siRNA sense strand
ugcaagacccauuggagaa

SEQ ID NO: 747539 - RNA, 19 nt, Homo sapiens
  misc_RNA (1)...(19): siRNA sense strand
ucuauagagcuacuaacaa

SEQ ID NO: 747540 - RNA, 19 nt, Homo sapiens
  misc_RNA (1)...(19): siRNA sense strand
guuacgacuuuggcuacuu

SEQ ID NO: 747541 - RNA, 19 nt, Homo sapiens
  misc_RNA (1)...(19): siRNA sense strand
ggaauugaaacccaguacu

SEQ ID NO: 747542 - RNA, 19 nt, Homo sapiens
  misc_RNA (1)...(19): siRNA sense strand
ugucauuucauagcgguua

SEQ ID NO: 747543 - RNA, 19 nt, Homo sapiens
  misc_RNA (1)...(19): siRNA sense strand
ugaaugcuauccuugcaaa

SEQ ID NO: 747544 - RNA, 19 nt, Homo sapiens
  misc_RNA (1)...(19): siRNA sense strand
cgccaaagauggagggaau

SEQ ID NO: 747545 - RNA, 19 nt, Homo sapiens
  misc_RNA (1)...(19): siRNA sense strand
ugagucgccuggagaacuu

SEQ ID NO: 747546 - RNA, 19 nt, Homo sapiens
  misc_RNA (1)...(19): siRNA sense strand
ggauccugcugaaugcuau

SEQ ID NO: 747547 - RNA, 19 nt, Homo sapiens
  misc_RNA (1)...(19): siRNA sense strand
gcugaaugcuauccuugca

SEQ ID NO: 747548 - RNA, 19 nt, Homo sapiens
  misc_RNA (1)...(19): siRNA sense strand
ucaagauggucauguacuc

SEQ ID NO: 747549 - RNA, 19 nt, Homo sapiens
  misc_RNA (1)...(19): siRNA sense strand
aaagauggagggaauguca

SEQ ID NO: 747550 - RNA, 19 nt, Homo sapiens
  misc_RNA (1)...(19): siRNA sense strand
gcgcagggcauggaagguu

SEQ ID NO: 747551 - RNA, 19 nt, Homo sapiens
  misc_RNA (1)...(19): siRNA sense strand
cccucaagauggucaugua

SEQ ID NO: 747552 - RNA, 19 nt, Homo sapiens
  misc_RNA (1)...(19): siRNA sense strand
ccaaagauggagggaaugu

SEQ ID NO: 747553 - RNA, 19 nt, Homo sapiens
  misc_RNA (1)...(19): siRNA sense strand
ccauggacccacacaagga

SEQ ID NO: 747554 - RNA, 19 nt, Homo sapiens
  misc_RNA (1)...(19): siRNA sense strand
gggauccugcugaaugcua

SEQ ID NO: 747555 - RNA, 19 nt, Homo sapiens
  misc_RNA (1)...(19): siRNA sense strand
caagauggucauguacuca

SEQ ID NO: 747556 - RNA, 19 nt, Homo sapiens
  misc_RNA (1)...(19): siRNA sense strand
gaaucccgccaaagaugga

SEQ ID NO: 747557 - RNA, 19 nt, Homo sapiens
  misc_RNA (1)...(19): siRNA sense strand
ccauggacccacacaagga

SEQ ID NO: 747558 - RNA, 19 nt, Homo sapiens
  misc_RNA (1)...(19): siRNA sense strand
ccauggacccacacaagga

SEQ ID NO: 747559 - RNA, 19 nt, Homo sapiens
  misc_RNA (1)...(19): siRNA sense strand
ugaaugcuauccuugcaaa

SEQ ID NO: 747560 - RNA, 19 nt, Homo sapiens
  misc_RNA (1)...(19): siRNA sense strand
cgccaaagauggagggaau

SEQ ID NO: 747561 - RNA, 19 nt, Homo sapiens
  misc_RNA (1)...(19): siRNA sense strand
ugagucgccuggagaacuu

SEQ ID NO: 747562 - RNA, 19 nt, Homo sapiens
  misc_RNA (1)...(19): siRNA sense strand
ggauccugcugaaugcuau

SEQ ID NO: 747563 - RNA, 19 nt, Homo sapiens
  misc_RNA (1)...(19): siRNA sense strand
gcugaaugcuauccuugca

SEQ ID NO: 747564 - RNA, 19 nt, Homo sapiens
  misc_RNA (1)...(19): siRNA sense strand
ucaagauggucauguacuc

SEQ ID NO: 747565 - RNA, 19 nt, Homo sapiens
  misc_RNA (1)...(19): siRNA sense strand
aaagauggagggaauguca

SEQ ID NO: 747566 - RNA, 19 nt, Homo sapiens
  misc_RNA (1)...(19): siRNA sense strand
gcgcagggcauggaagguu

SEQ ID NO: 747567 - RNA, 19 nt, Homo sapiens
  misc_RNA (1)...(19): siRNA sense strand
cccucaagauggucaugua

SEQ ID NO: 747568 - RNA, 19 nt, Homo sapiens
  misc_RNA (1)...(19): siRNA sense strand
ccaaagauggagggaaugu

SEQ ID NO: 747569 - RNA, 19 nt, Homo sapiens
  misc_RNA (1)...(19): siRNA sense strand
ccauggacccacacaagga

SEQ ID NO: 747570 - RNA, 19 nt, Homo sapiens
  misc_RNA (1)...(19): siRNA sense strand
gggauccugcugaaugcua

SEQ ID NO: 747571 - RNA, 19 nt, Homo sapiens
  misc_RNA (1)...(19): siRNA sense strand
caagauggucauguacuca

SEQ ID NO: 747572 - RNA, 19 nt, Homo sapiens
  misc_RNA (1)...(19): siRNA sense strand
gaaucccgccaaagaugga

SEQ ID NO: 747573 - RNA, 19 nt, Homo sapiens
  misc_RNA (1)...(19): siRNA sense strand
ugaagaaagucaugcauuu

SEQ ID NO: 747574 - RNA, 19 nt, Homo sapiens
  misc_RNA (1)...(19): siRNA sense strand
agaagaagcugaaugagaa

SEQ ID NO: 747575 - RNA, 19 nt, Homo sapiens
  misc_RNA (1)...(19): siRNA sense strand
ccaaguggcuguaaaccua

SEQ ID NO: 747576 - RNA, 19 nt, Homo sapiens
  misc_RNA (1)...(19): siRNA sense strand
gaagaaagucaugcauuua

SEQ ID NO: 747577 - RNA, 19 nt, Homo sapiens
  misc_RNA (1)...(19): siRNA sense strand
gaacaaagaagaagaagag

SEQ ID NO: 747578 - RNA, 19 nt, Homo sapiens
  misc_RNA (1)...(19): siRNA sense strand
agacacagcucaucccaaa

SEQ ID NO: 747579 - RNA, 19 nt, Homo sapiens
  misc_RNA (1)...(19): siRNA sense strand
gaagacagugugccagaua

SEQ ID NO: 747580 - RNA, 19 nt, Homo sapiens
  misc_RNA (1)...(19): siRNA sense strand
aaaccuagcugaagacaca

SEQ ID NO: 747581 - RNA, 19 nt, Homo sapiens
  misc_RNA (1)...(19): siRNA sense strand
gaaguugagaguagagaua

SEQ ID NO: 747582 - RNA, 19 nt, Homo sapiens
  misc_RNA (1)...(19): siRNA sense strand
cgaagaagaagcugaauga

SEQ ID NO: 747583 - RNA, 19 nt, Homo sapiens
  misc_RNA (1)...(19): siRNA sense strand
uuucaaagcugcacaacuu

SEQ ID NO: 747584 - RNA, 19 nt, Homo sapiens
  misc_RNA (1)...(19): siRNA sense strand
caaacuaucgcuucauuga

SEQ ID NO: 747585 - RNA, 19 nt, Homo sapiens
  misc_RNA (1)...(19): siRNA sense strand
agagagauuucagcacuua

SEQ ID NO: 747586 - RNA, 19 nt, Homo sapiens
  misc_RNA (1)...(19): siRNA sense strand
gauaaagagucagcgaaug

SEQ ID NO: 747587 - RNA, 19 nt, Homo sapiens
  misc_RNA (1)...(19): siRNA sense strand
ccaucugccuggacuauuu

SEQ ID NO: 747588 - RNA, 19 nt, Homo sapiens
  misc_RNA (1)...(19): siRNA sense strand
ugaagaagaggaccuguuu

SEQ ID NO: 747589 - RNA, 19 nt, Homo sapiens
  misc_RNA (1)...(19): siRNA sense strand
gggaaugucuccuucuaca

SEQ ID NO: 747590 - RNA, 19 nt, Homo sapiens
  misc_RNA (1)...(19): siRNA sense strand
aaacauuacugggaaguug

SEQ ID NO: 747591 - RNA, 19 nt, Homo sapiens
  misc_RNA (1)...(19): siRNA sense strand
gcacuuacccuguguucug

SEQ ID NO: 747592 - RNA, 19 nt, Homo sapiens
  misc_RNA (1)...(19): siRNA sense strand
gaagaagagacgaagaaga

SEQ ID NO: 747593 - RNA, 19 nt, Homo sapiens
  misc_RNA (1)...(19): siRNA sense strand
gggaauuacugaucguuca

SEQ ID NO: 747594 - RNA, 19 nt, Homo sapiens
  misc_RNA (1)...(19): siRNA sense strand
ugaaugagaacacguuaaa

SEQ ID NO: 747595 - RNA, 19 nt, Homo sapiens
  misc_RNA (1)...(19): siRNA sense strand
aagaagagacgaagaagaa

SEQ ID NO: 747596 - RNA, 19 nt, Homo sapiens
  misc_RNA (1)...(19): siRNA sense strand
ggaccuguuucuucagaga

SEQ ID NO: 747597 - RNA, 19 nt, Homo sapiens
  misc_RNA (1)...(19): siRNA sense strand
gaggaccuguuucuucaga

SEQ ID NO: 747598 - RNA, 19 nt, Homo sapiens
  misc_RNA (1)...(19): siRNA sense strand
ggaagggagauacgugaaa

SEQ ID NO: 747599 - RNA, 19 nt, Homo sapiens
  misc_RNA (1)...(19): siRNA sense strand
gaggacgucaugggaauua

SEQ ID NO: 747600 - RNA, 19 nt, Homo sapiens
  misc_RNA (1)...(19): siRNA sense strand
ggaaggauaagauaaagag

SEQ ID NO: 747601 - RNA, 19 nt, Homo sapiens
  misc_RNA (1)...(19): siRNA sense strand
gagauugaacaaagaagaa

SEQ ID NO: 747602 - RNA, 19 nt, Homo sapiens
  misc_RNA (1)...(19): siRNA sense strand
gggaggacgucaugggaau

SEQ ID NO: 747603 - RNA, 19 nt, Homo sapiens
  misc_RNA (1)...(19): siRNA sense strand
gaagaagaagagacgaaga

SEQ ID NO: 747604 - RNA, 19 nt, Homo sapiens
  misc_RNA (1)...(19): siRNA sense strand
gcaucugggcgauuuauug

SEQ ID NO: 747605 - RNA, 19 nt, Homo sapiens
  misc_RNA (1)...(19): siRNA sense strand
ucagaagacugcuuuugua

SEQ ID NO: 747606 - RNA, 19 nt, Homo sapiens
  misc_RNA (1)...(19): siRNA sense strand
gaagggagauacgugaaaa

SEQ ID NO: 747607 - RNA, 19 nt, Homo sapiens
  misc_RNA (1)...(19): siRNA sense strand
caaucaaacuaucgcuuca

SEQ ID NO: 747608 - RNA, 19 nt, Homo sapiens
  misc_RNA (1)...(19): siRNA sense strand
gaacucccacccagcaaga

SEQ ID NO: 747609 - RNA, 19 nt, Homo sapiens
  misc_RNA (1)...(19): siRNA sense strand
gagaacacguuaaaacuca

SEQ ID NO: 747610 - RNA, 19 nt, Homo sapiens
  misc_RNA (1)...(19): siRNA sense strand
gaacuauucccuugaagcu

SEQ ID NO: 747611 - RNA, 19 nt, Homo sapiens
  misc_RNA (1)...(19): siRNA sense strand
ccauuagcaucuuuaguca

SEQ ID NO: 747612 - RNA, 19 nt, Homo sapiens
  misc_RNA (1)...(19): siRNA sense strand
aggauaagauaaagaguca

SEQ ID NO: 747613 - RNA, 19 nt, Homo sapiens
  misc_RNA (1)...(19): siRNA sense strand
ggacugggaaugucuccuu

SEQ ID NO: 747614 - RNA, 19 nt, Homo sapiens
  misc_RNA (1)...(19): siRNA sense strand
auaaagagucagcgaauga

SEQ ID NO: 747615 - RNA, 19 nt, Homo sapiens
  misc_RNA (1)...(19): siRNA sense strand
uccaggaugugaacuauuc

SEQ ID NO: 747616 - RNA, 19 nt, Homo sapiens
  misc_RNA (1)...(19): siRNA sense strand
gaagacugcuuuuguagag

SEQ ID NO: 747617 - RNA, 19 nt, Homo sapiens
  misc_RNA (1)...(19): siRNA sense strand
uggccaagaugaagaaagu

SEQ ID NO: 747618 - RNA, 19 nt, Homo sapiens
  misc_RNA (1)...(19): siRNA sense strand
ucaccucagggaaacauua

SEQ ID NO: 747619 - RNA, 19 nt, Homo sapiens
  misc_RNA (1)...(19): siRNA sense strand
ggacauccaggaggaguug

SEQ ID NO: 747620 - RNA, 19 nt, Homo sapiens
  misc_RNA (1)...(19): siRNA sense strand
uaccauugaugaaggaaau

SEQ ID NO: 747621 - RNA, 19 nt, Homo sapiens
  misc_RNA (1)...(19): siRNA sense strand
agaaagucaugcauuuaca

SEQ ID NO: 747622 - RNA, 19 nt, Homo sapiens
  misc_RNA (1)...(19): siRNA sense strand
aagaagaagcugaaugaga

SEQ ID NO: 747623 - RNA, 19 nt, Homo sapiens
  misc_RNA (1)...(19): siRNA sense strand
gagaaucagcacggaguuu

SEQ ID NO: 747624 - RNA, 19 nt, Homo sapiens
  misc_RNA (1)...(19): siRNA sense strand
gugggcaucugggcgauuu

SEQ ID NO: 747625 - RNA, 19 nt, Homo sapiens
  misc_RNA (1)...(19): siRNA sense strand
ugugaacuauucccuugaa

SEQ ID NO: 747626 - RNA, 19 nt, Homo sapiens
  misc_RNA (1)...(19): siRNA sense strand
ggagugcugcuggcuauug

SEQ ID NO: 747627 - RNA, 19 nt, Homo sapiens
  misc_RNA (1)...(19): siRNA sense strand
aggaaaugcuaaagcgauu

SEQ ID NO: 747628 - RNA, 19 nt, Homo sapiens
  misc_RNA (1)...(19): siRNA sense strand
aagaagaagagacgaagaa

SEQ ID NO: 747629 - RNA, 19 nt, Homo sapiens
  misc_RNA (1)...(19): siRNA sense strand
gaaacauuacugggaaguu

SEQ ID NO: 747630 - RNA, 19 nt, Homo sapiens
  misc_RNA (1)...(19): siRNA sense strand
gauuccaaguggcuguaaa

SEQ ID NO: 747631 - RNA, 19 nt, Homo sapiens
  misc_RNA (1)...(19): siRNA sense strand
uggccaggcugacugagaa

SEQ ID NO: 747632 - RNA, 19 nt, Homo sapiens
  misc_RNA (1)...(19): siRNA sense strand
gaagaagaggaccuguuuc

SEQ ID NO: 747633 - RNA, 19 nt, Homo sapiens
  misc_RNA (1)...(19): siRNA sense strand
gaauuacugaucguucaaa

SEQ ID NO: 747634 - RNA, 19 nt, Homo sapiens
  misc_RNA (1)...(19): siRNA sense strand
cccuggagcugcuucagaa

SEQ ID NO: 747635 - RNA, 19 nt, Homo sapiens
  misc_RNA (1)...(19): siRNA sense strand
gcugaaugagaacacguua

SEQ ID NO: 747636 - RNA, 19 nt, Homo sapiens
  misc_RNA (1)...(19): siRNA sense strand
ggaauuacugaucguucaa

SEQ ID NO: 747637 - RNA, 19 nt, Homo sapiens
  misc_RNA (1)...(19): siRNA sense strand
gcuaaagcgauuccaagug

SEQ ID NO: 747638 - RNA, 19 nt, Homo sapiens
  misc_RNA (1)...(19): siRNA sense strand
gcacggaguuuucaaagcu

SEQ ID NO: 747639 - RNA, 19 nt, Homo sapiens
  misc_RNA (1)...(19): siRNA sense strand
cugggaaugucuccuucua

SEQ ID NO: 747640 - RNA, 19 nt, Homo sapiens
  misc_RNA (1)...(19): siRNA sense strand
cuguaaaccuagcugaaga

SEQ ID NO: 747641 - RNA, 19 nt, Homo sapiens
  misc_RNA (1)...(19): siRNA sense strand
gaaagucaugcauuuacag

SEQ ID NO: 747642 - RNA, 19 nt, Homo sapiens
  misc_RNA (1)...(19): siRNA sense strand
agacgaagaagaagcugaa

SEQ ID NO: 747643 - RNA, 19 nt, Homo sapiens
  misc_RNA (1)...(19): siRNA sense strand
ugaguccauuagcaucuuu

SEQ ID NO: 747644 - RNA, 19 nt, Homo sapiens
  misc_RNA (1)...(19): siRNA sense strand
acaguggaaggauaagaua

SEQ ID NO: 747645 - RNA, 19 nt, Homo sapiens
  misc_RNA (1)...(19): siRNA sense strand
gugaagaacgccacacagu

SEQ ID NO: 747646 - RNA, 19 nt, Homo sapiens
  misc_RNA (1)...(19): siRNA sense strand
ugccagauaccauugauga

SEQ ID NO: 747647 - RNA, 19 nt, Homo sapiens
  misc_RNA (1)...(19): siRNA sense strand
ucagagauugaacaaagaa

SEQ ID NO: 747648 - RNA, 19 nt, Homo sapiens
  misc_RNA (1)...(19): siRNA sense strand
guggaaggauaagauaaag

SEQ ID NO: 747649 - RNA, 19 nt, Homo sapiens
  misc_RNA (1)...(19): siRNA sense strand
cgagugcggccacaacuuc

SEQ ID NO: 747650 - RNA, 19 nt, Homo sapiens
  misc_RNA (1)...(19): siRNA sense strand
uagagagauuucagcacuu

SEQ ID NO: 747651 - RNA, 19 nt, Homo sapiens
  misc_RNA (1)...(19): siRNA sense strand
agucaugcauuuacaggau

SEQ ID NO: 747652 - RNA, 19 nt, Homo sapiens
  misc_RNA (1)...(19): siRNA sense strand
ccagauaccauugaugaag

SEQ ID NO: 747653 - RNA, 19 nt, Homo sapiens
  misc_RNA (1)...(19): siRNA sense strand
aucaaacuaucgcuucauu

SEQ ID NO: 747654 - RNA, 19 nt, Homo sapiens
  misc_RNA (1)...(19): siRNA sense strand
gauugaacaaagaagaaga

SEQ ID NO: 747655 - RNA, 19 nt, Homo sapiens
  misc_RNA (1)...(19): siRNA sense strand
gagugcugcuggcuauugg

SEQ ID NO: 747656 - RNA, 19 nt, Homo sapiens
  misc_RNA (1)...(19): siRNA sense strand
gccaagaugaagaaaguca

SEQ ID NO: 747657 - RNA, 19 nt, Homo sapiens
  misc_RNA (1)...(19): siRNA sense strand
cagcaucagccaguucuug

SEQ ID NO: 747658 - RNA, 19 nt, Homo sapiens
  misc_RNA (1)...(19): siRNA sense strand
ugaagacagugugccagau

SEQ ID NO: 747659 - RNA, 19 nt, Homo sapiens
  misc_RNA (1)...(19): siRNA sense strand
uugaagcugugaaggugaa

SEQ ID NO: 747660 - RNA, 19 nt, Homo sapiens
  misc_RNA (1)...(19): siRNA sense strand
gaagaagaagcugaaugag

SEQ ID NO: 747661 - RNA, 19 nt, Homo sapiens
  misc_RNA (1)...(19): siRNA sense strand
ggaaguugagaguagagau

SEQ ID NO: 747662 - RNA, 19 nt, Homo sapiens
  misc_RNA (1)...(19): siRNA sense strand
acugggaaguugagaguag

SEQ ID NO: 747663 - RNA, 19 nt, Homo sapiens
  misc_RNA (1)...(19): siRNA sense strand
aguggaaggauaagauaaa

SEQ ID NO: 747664 - RNA, 19 nt, Homo sapiens
  misc_RNA (1)...(19): siRNA sense strand
ggaggacgucaugggaauu

SEQ ID NO: 747665 - RNA, 19 nt, Homo sapiens
  misc_RNA (1)...(19): siRNA sense strand
gcuguaaaccuagcugaag

SEQ ID NO: 747666 - RNA, 19 nt, Homo sapiens
  misc_RNA (1)...(19): siRNA sense strand
agagauugaacaaagaaga

SEQ ID NO: 747667 - RNA, 19 nt, Homo sapiens
  misc_RNA (1)...(19): siRNA sense strand
uccauuagcaucuuuaguc

SEQ ID NO: 747668 - RNA, 19 nt, Homo sapiens
  misc_RNA (1)...(19): siRNA sense strand
gaucgugggacugggaaug

SEQ ID NO: 747669 - RNA, 19 nt, Homo sapiens
  misc_RNA (1)...(19): siRNA sense strand
uuggagugcugcuggcuau

SEQ ID NO: 747670 - RNA, 19 nt, Homo sapiens
  misc_RNA (1)...(19): siRNA sense strand
agucagcgaaugagaauca

SEQ ID NO: 747671 - RNA, 19 nt, Homo sapiens
  misc_RNA (1)...(19): siRNA sense strand
aagaaagucaugcauuuac

SEQ ID NO: 747672 - RNA, 19 nt, Homo sapiens
  misc_RNA (1)...(19): siRNA sense strand
gaaggauaagauaaagagu

SEQ ID NO: 747673 - RNA, 19 nt, Homo sapiens
  misc_RNA (1)...(19): siRNA sense strand
ugaagaaagucaugcauuu

SEQ ID NO: 747674 - RNA, 19 nt, Homo sapiens
  misc_RNA (1)...(19): siRNA sense strand
agaagaagcugaaugagaa

SEQ ID NO: 747675 - RNA, 19 nt, Homo sapiens
  misc_RNA (1)...(19): siRNA sense strand
ccaaguggcuguaaaccua

SEQ ID NO: 747676 - RNA, 19 nt, Homo sapiens
  misc_RNA (1)...(19): siRNA sense strand
gaagaaagucaugcauuua

SEQ ID NO: 747677 - RNA, 19 nt, Homo sapiens
  misc_RNA (1)...(19): siRNA sense strand
gaacaaagaagaagaagag

SEQ ID NO: 747678 - RNA, 19 nt, Homo sapiens
  misc_RNA (1)...(19): siRNA sense strand
agacacagcucaucccaaa

SEQ ID NO: 747679 - RNA, 19 nt, Homo sapiens
  misc_RNA (1)...(19): siRNA sense strand
gaagacagugugccagaua

SEQ ID NO: 747680 - RNA, 19 nt, Homo sapiens
  misc_RNA (1)...(19): siRNA sense strand
aaaccuagcugaagacaca

SEQ ID NO: 747681 - RNA, 19 nt, Homo sapiens
  misc_RNA (1)...(19): siRNA sense strand
gaaguugagaguagagaua

SEQ ID NO: 747682 - RNA, 19 nt, Homo sapiens
  misc_RNA (1)...(19): siRNA sense strand
cgaagaagaagcugaauga

SEQ ID NO: 747683 - RNA, 19 nt, Homo sapiens
  misc_RNA (1)...(19): siRNA sense strand
uuucaaagcugcacaacuu

SEQ ID NO: 747684 - RNA, 19 nt, Homo sapiens
  misc_RNA (1)...(19): siRNA sense strand
caaacuaucgcuucauuga

SEQ ID NO: 747685 - RNA, 19 nt, Homo sapiens
  misc_RNA (1)...(19): siRNA sense strand
agagagauuucagcacuua

SEQ ID NO: 747686 - RNA, 19 nt, Homo sapiens
  misc_RNA (1)...(19): siRNA sense strand
gauaaagagucagcgaaug

SEQ ID NO: 747687 - RNA, 19 nt, Homo sapiens
  misc_RNA (1)...(19): siRNA sense strand
ccaucugccuggacuauuu

SEQ ID NO: 747688 - RNA, 19 nt, Homo sapiens
  misc_RNA (1)...(19): siRNA sense strand
ugaagaagaggaccuguuu

SEQ ID NO: 747689 - RNA, 19 nt, Homo sapiens
  misc_RNA (1)...(19): siRNA sense strand
gggaaugucuccuucuaca

SEQ ID NO: 747690 - RNA, 19 nt, Homo sapiens
  misc_RNA (1)...(19): siRNA sense strand
aaacauuacugggaaguug

SEQ ID NO: 747691 - RNA, 19 nt, Homo sapiens
  misc_RNA (1)...(19): siRNA sense strand
gcacuuacccuguguucug

SEQ ID NO: 747692 - RNA, 19 nt, Homo sapiens
  misc_RNA (1)...(19): siRNA sense strand
gaagaagagacgaagaaga

SEQ ID NO: 747693 - RNA, 19 nt, Homo sapiens
  misc_RNA (1)...(19): siRNA sense strand
gggaauuacugaucguuca

SEQ ID NO: 747694 - RNA, 19 nt, Homo sapiens
  misc_RNA (1)...(19): siRNA sense strand
ugaaugagaacacguuaaa

SEQ ID NO: 747695 - RNA, 19 nt, Homo sapiens
  misc_RNA (1)...(19): siRNA sense strand
aagaagagacgaagaagaa

SEQ ID NO: 747696 - RNA, 19 nt, Homo sapiens
  misc_RNA (1)...(19): siRNA sense strand
ggaccuguuucuucagaga

SEQ ID NO: 747697 - RNA, 19 nt, Homo sapiens
  misc_RNA (1)...(19): siRNA sense strand
gaggaccuguuucuucaga

SEQ ID NO: 747698 - RNA, 19 nt, Homo sapiens
  misc_RNA (1)...(19): siRNA sense strand
ggaagggagauacgugaaa

SEQ ID NO: 747699 - RNA, 19 nt, Homo sapiens
  misc_RNA (1)...(19): siRNA sense strand
gaggacgucaugggaauua

SEQ ID NO: 747700 - RNA, 19 nt, Homo sapiens
  misc_RNA (1)...(19): siRNA sense strand
ggaaggauaagauaaagag

SEQ ID NO: 747701 - RNA, 19 nt, Homo sapiens
  misc_RNA (1)...(19): siRNA sense strand
gagauugaacaaagaagaa

SEQ ID NO: 747702 - RNA, 19 nt, Homo sapiens
  misc_RNA (1)...(19): siRNA sense strand
gggaggacgucaugggaau

SEQ ID NO: 747703 - RNA, 19 nt, Homo sapiens
  misc_RNA (1)...(19): siRNA sense strand
gaagaagaagagacgaaga

SEQ ID NO: 747704 - RNA, 19 nt, Homo sapiens
  misc_RNA (1)...(19): siRNA sense strand
gcaucugggcgauuuauug

SEQ ID NO: 747705 - RNA, 19 nt, Homo sapiens
  misc_RNA (1)...(19): siRNA sense strand
ucagaagacugcuuuugua

SEQ ID NO: 747706 - RNA, 19 nt, Homo sapiens
  misc_RNA (1)...(19): siRNA sense strand
gaagggagauacgugaaaa

SEQ ID NO: 747707 - RNA, 19 nt, Homo sapiens
  misc_RNA (1)...(19): siRNA sense strand
caaucaaacuaucgcuuca

SEQ ID NO: 747708 - RNA, 19 nt, Homo sapiens
  misc_RNA (1)...(19): siRNA sense strand
gaacucccacccagcaaga

SEQ ID NO: 747709 - RNA, 19 nt, Homo sapiens
  misc_RNA (1)...(19): siRNA sense strand
gagaacacguuaaaacuca

SEQ ID NO: 747710 - RNA, 19 nt, Homo sapiens
  misc_RNA (1)...(19): siRNA sense strand
gaacuauucccuugaagcu

SEQ ID NO: 747711 - RNA, 19 nt, Homo sapiens
  misc_RNA (1)...(19): siRNA sense strand
ccauuagcaucuuuaguca

SEQ ID NO: 747712 - RNA, 19 nt, Homo sapiens
  misc_RNA (1)...(19): siRNA sense strand
aggauaagauaaagaguca

SEQ ID NO: 747713 - RNA, 19 nt, Homo sapiens
  misc_RNA (1)...(19): siRNA sense strand
ggacugggaaugucuccuu

SEQ ID NO: 747714 - RNA, 19 nt, Homo sapiens
  misc_RNA (1)...(19): siRNA sense strand
auaaagagucagcgaauga

SEQ ID NO: 747715 - RNA, 19 nt, Homo sapiens
  misc_RNA (1)...(19): siRNA sense strand
uccaggaugugaacuauuc

SEQ ID NO: 747716 - RNA, 19 nt, Homo sapiens
  misc_RNA (1)...(19): siRNA sense strand
gaagacugcuuuuguagag

SEQ ID NO: 747717 - RNA, 19 nt, Homo sapiens
  misc_RNA (1)...(19): siRNA sense strand
uggccaagaugaagaaagu

SEQ ID NO: 747718 - RNA, 19 nt, Homo sapiens
  misc_RNA (1)...(19): siRNA sense strand
ucaccucagggaaacauua

SEQ ID NO: 747719 - RNA, 19 nt, Homo sapiens
  misc_RNA (1)...(19): siRNA sense strand
ggacauccaggaggaguug

SEQ ID NO: 747720 - RNA, 19 nt, Homo sapiens
  misc_RNA (1)...(19): siRNA sense strand
uaccauugaugaaggaaau

SEQ ID NO: 747721 - RNA, 19 nt, Homo sapiens
  misc_RNA (1)...(19): siRNA sense strand
agaaagucaugcauuuaca

SEQ ID NO: 747722 - RNA, 19 nt, Homo sapiens
  misc_RNA (1)...(19): siRNA sense strand
aagaagaagcugaaugaga

SEQ ID NO: 747723 - RNA, 19 nt, Homo sapiens
  misc_RNA (1)...(19): siRNA sense strand
gagaaucagcacggaguuu

SEQ ID NO: 747724 - RNA, 19 nt, Homo sapiens
  misc_RNA (1)...(19): siRNA sense strand
gugggcaucugggcgauuu

SEQ ID NO: 747725 - RNA, 19 nt, Homo sapiens
  misc_RNA (1)...(19): siRNA sense strand
ugugaacuauucccuugaa

SEQ ID NO: 747726 - RNA, 19 nt, Homo sapiens
  misc_RNA (1)...(19): siRNA sense strand
ggagugcugcuggcuauug

SEQ ID NO: 747727 - RNA, 19 nt, Homo sapiens
  misc_RNA (1)...(19): siRNA sense strand
aggaaaugcuaaagcgauu

SEQ ID NO: 747728 - RNA, 19 nt, Homo sapiens
  misc_RNA (1)...(19): siRNA sense strand
aagaagaagagacgaagaa

SEQ ID NO: 747729 - RNA, 19 nt, Homo sapiens
  misc_RNA (1)...(19): siRNA sense strand
gaaacauuacugggaaguu

SEQ ID NO: 747730 - RNA, 19 nt, Homo sapiens
  misc_RNA (1)...(19): siRNA sense strand
gauuccaaguggcuguaaa

SEQ ID NO: 747731 - RNA, 19 nt, Homo sapiens
  misc_RNA (1)...(19): siRNA sense strand
uggccaggcugacugagaa

SEQ ID NO: 747732 - RNA, 19 nt, Homo sapiens
  misc_RNA (1)...(19): siRNA sense strand
gaagaagaggaccuguuuc

SEQ ID NO: 747733 - RNA, 19 nt, Homo sapiens
  misc_RNA (1)...(19): siRNA sense strand
gaauuacugaucguucaaa

SEQ ID NO: 747734 - RNA, 19 nt, Homo sapiens
  misc_RNA (1)...(19): siRNA sense strand
cccuggagcugcuucagaa

SEQ ID NO: 747735 - RNA, 19 nt, Homo sapiens
  misc_RNA (1)...(19): siRNA sense strand
gcugaaugagaacacguua

SEQ ID NO: 747736 - RNA, 19 nt, Homo sapiens
  misc_RNA (1)...(19): siRNA sense strand
ggaauuacugaucguucaa

SEQ ID NO: 747737 - RNA, 19 nt, Homo sapiens
  misc_RNA (1)...(19): siRNA sense strand
gcuaaagcgauuccaagug

SEQ ID NO: 747738 - RNA, 19 nt, Homo sapiens
  misc_RNA (1)...(19): siRNA sense strand
gcacggaguuuucaaagcu

SEQ ID NO: 747739 - RNA, 19 nt, Homo sapiens
  misc_RNA (1)...(19): siRNA sense strand
cugggaaugucuccuucua

SEQ ID NO: 747740 - RNA, 19 nt, Homo sapiens
  misc_RNA (1)...(19): siRNA sense strand
cuguaaaccuagcugaaga

SEQ ID NO: 747741 - RNA, 19 nt, Homo sapiens
  misc_RNA (1)...(19): siRNA sense strand
gaaagucaugcauuuacag

SEQ ID NO: 747742 - RNA, 19 nt, Homo sapiens
  misc_RNA (1)...(19): siRNA sense strand
agacgaagaagaagcugaa

SEQ ID NO: 747743 - RNA, 19 nt, Homo sapiens
  misc_RNA (1)...(19): siRNA sense strand
ugaguccauuagcaucuuu

SEQ ID NO: 747744 - RNA, 19 nt, Homo sapiens
  misc_RNA (1)...(19): siRNA sense strand
acaguggaaggauaagaua

SEQ ID NO: 747745 - RNA, 19 nt, Homo sapiens
  misc_RNA (1)...(19): siRNA sense strand
gugaagaacgccacacagu

SEQ ID NO: 747746 - RNA, 19 nt, Homo sapiens
  misc_RNA (1)...(19): siRNA sense strand
ugccagauaccauugauga

SEQ ID NO: 747747 - RNA, 19 nt, Homo sapiens
  misc_RNA (1)...(19): siRNA sense strand
ucagagauugaacaaagaa

SEQ ID NO: 747748 - RNA, 19 nt, Homo sapiens
  misc_RNA (1)...(19): siRNA sense strand
guggaaggauaagauaaag

SEQ ID NO: 747749 - RNA, 19 nt, Homo sapiens
  misc_RNA (1)...(19): siRNA sense strand
cgagugcggccacaacuuc

SEQ ID NO: 747750 - RNA, 19 nt, Homo sapiens
  misc_RNA (1)...(19): siRNA sense strand
uagagagauuucagcacuu

SEQ ID NO: 747751 - RNA, 19 nt, Homo sapiens
  misc_RNA (1)...(19): siRNA sense strand
agucaugcauuuacaggau

SEQ ID NO: 747752 - RNA, 19 nt, Homo sapiens
  misc_RNA (1)...(19): siRNA sense strand
ccagauaccauugaugaag

SEQ ID NO: 747753 - RNA, 19 nt, Homo sapiens
  misc_RNA (1)...(19): siRNA sense strand
aucaaacuaucgcuucauu

SEQ ID NO: 747754 - RNA, 19 nt, Homo sapiens
  misc_RNA (1)...(19): siRNA sense strand
gauugaacaaagaagaaga

SEQ ID NO: 747755 - RNA, 19 nt, Homo sapiens
  misc_RNA (1)...(19): siRNA sense strand
gagugcugcuggcuauugg

SEQ ID NO: 747756 - RNA, 19 nt, Homo sapiens
  misc_RNA (1)...(19): siRNA sense strand
gccaagaugaagaaaguca

SEQ ID NO: 747757 - RNA, 19 nt, Homo sapiens
  misc_RNA (1)...(19): siRNA sense strand
cagcaucagccaguucuug

SEQ ID NO: 747758 - RNA, 19 nt, Homo sapiens
  misc_RNA (1)...(19): siRNA sense strand
ugaagacagugugccagau

SEQ ID NO: 747759 - RNA, 19 nt, Homo sapiens
  misc_RNA (1)...(19): siRNA sense strand
uugaagcugugaaggugaa

SEQ ID NO: 747760 - RNA, 19 nt, Homo sapiens
  misc_RNA (1)...(19): siRNA sense strand
gaagaagaagcugaaugag

SEQ ID NO: 747761 - RNA, 19 nt, Homo sapiens
  misc_RNA (1)...(19): siRNA sense strand
ggaaguugagaguagagau

SEQ ID NO: 747762 - RNA, 19 nt, Homo sapiens
  misc_RNA (1)...(19): siRNA sense strand
acugggaaguugagaguag

SEQ ID NO: 747763 - RNA, 19 nt, Homo sapiens
  misc_RNA (1)...(19): siRNA sense strand
aguggaaggauaagauaaa

SEQ ID NO: 747764 - RNA, 19 nt, Homo sapiens
  misc_RNA (1)...(19): siRNA sense strand
ggaggacgucaugggaauu

SEQ ID NO: 747765 - RNA, 19 nt, Homo sapiens
  misc_RNA (1)...(19): siRNA sense strand
gcuguaaaccuagcugaag

SEQ ID NO: 747766 - RNA, 19 nt, Homo sapiens
  misc_RNA (1)...(19): siRNA sense strand
agagauugaacaaagaaga

SEQ ID NO: 747767 - RNA, 19 nt, Homo sapiens
  misc_RNA (1)...(19): siRNA sense strand
uccauuagcaucuuuaguc

SEQ ID NO: 747768 - RNA, 19 nt, Homo sapiens
  misc_RNA (1)...(19): siRNA sense strand
gaucgugggacugggaaug

SEQ ID NO: 747769 - RNA, 19 nt, Homo sapiens
  misc_RNA (1)...(19): siRNA sense strand
uuggagugcugcuggcuau

SEQ ID NO: 747770 - RNA, 19 nt, Homo sapiens
  misc_RNA (1)...(19): siRNA sense strand
agucagcgaaugagaauca

SEQ ID NO: 747771 - RNA, 19 nt, Homo sapiens
  misc_RNA (1)...(19): siRNA sense strand
aagaaagucaugcauuuac

SEQ ID NO: 747772 - RNA, 19 nt, Homo sapiens
  misc_RNA (1)...(19): siRNA sense strand
gaaggauaagauaaagagu

SEQ ID NO: 747773 - RNA, 19 nt, Homo sapiens
  misc_RNA (1)...(19): siRNA sense strand
gcaggaagcugaagaguug

SEQ ID NO: 747774 - RNA, 19 nt, Homo sapiens
  misc_RNA (1)...(19): siRNA sense strand
gcagaaaguugaucauugu

SEQ ID NO: 747775 - RNA, 19 nt, Homo sapiens
  misc_RNA (1)...(19): siRNA sense strand
gagaguagcugcccugugu

SEQ ID NO: 747776 - RNA, 19 nt, Homo sapiens
  misc_RNA (1)...(19): siRNA sense strand
ugaagaagccagaaacuuu

SEQ ID NO: 747777 - RNA, 19 nt, Homo sapiens
  misc_RNA (1)...(19): siRNA sense strand
uuagagagcugacagaugu

SEQ ID NO: 747778 - RNA, 19 nt, Homo sapiens
  misc_RNA (1)...(19): siRNA sense strand
ggcagaaaguugaucauug

SEQ ID NO: 747779 - RNA, 19 nt, Homo sapiens
  misc_RNA (1)...(19): siRNA sense strand
ggaggaagacauucugaaa

SEQ ID NO: 747780 - RNA, 19 nt, Homo sapiens
  misc_RNA (1)...(19): siRNA sense strand
ggaagacucaaauacagua

SEQ ID NO: 747781 - RNA, 19 nt, Homo sapiens
  misc_RNA (1)...(19): siRNA sense strand
gaaggaggaggaagacauu

SEQ ID NO: 747782 - RNA, 19 nt, Homo sapiens
  misc_RNA (1)...(19): siRNA sense strand
gaaaggaaugcuagaagug

SEQ ID NO: 747783 - RNA, 19 nt, Homo sapiens
  misc_RNA (1)...(19): siRNA sense strand
ggguguggauggcgucaua

SEQ ID NO: 747784 - RNA, 19 nt, Homo sapiens
  misc_RNA (1)...(19): siRNA sense strand
ggaauccugguuaauguaa

SEQ ID NO: 747785 - RNA, 19 nt, Homo sapiens
  misc_RNA (1)...(19): siRNA sense strand
aagcaugccucacugcaaa

SEQ ID NO: 747786 - RNA, 19 nt, Homo sapiens
  misc_RNA (1)...(19): siRNA sense strand
ugaaaggaaugcuagaagu

SEQ ID NO: 747787 - RNA, 19 nt, Homo sapiens
  misc_RNA (1)...(19): siRNA sense strand
gagaacauacggccuaauc

SEQ ID NO: 747788 - RNA, 19 nt, Homo sapiens
  misc_RNA (1)...(19): siRNA sense strand
ggacggagaacgugaccuu

SEQ ID NO: 747789 - RNA, 19 nt, Homo sapiens
  misc_RNA (1)...(19): siRNA sense strand
ggagagcaaugagcugcaa

SEQ ID NO: 747790 - RNA, 19 nt, Homo sapiens
  misc_RNA (1)...(19): siRNA sense strand
gaauccugguuaauguaaa

SEQ ID NO: 747791 - RNA, 19 nt, Homo sapiens
  misc_RNA (1)...(19): siRNA sense strand
gaacgugaccuugaagaag

SEQ ID NO: 747792 - RNA, 19 nt, Homo sapiens
  misc_RNA (1)...(19): siRNA sense strand
uuaccagccugagaacaua

SEQ ID NO: 747793 - RNA, 19 nt, Homo sapiens
  misc_RNA (1)...(19): siRNA sense strand
cggagaacgugaccuugaa

SEQ ID NO: 747794 - RNA, 19 nt, Homo sapiens
  misc_RNA (1)...(19): siRNA sense strand
gcaaugagcugcaaaaccu

SEQ ID NO: 747795 - RNA, 19 nt, Homo sapiens
  misc_RNA (1)...(19): siRNA sense strand
gcucagggaggucaaguug

SEQ ID NO: 747796 - RNA, 19 nt, Homo sapiens
  misc_RNA (1)...(19): siRNA sense strand
gaagaagccagaaacuuuu

SEQ ID NO: 747797 - RNA, 19 nt, Homo sapiens
  misc_RNA (1)...(19): siRNA sense strand
gcccaggaguaccaaguga

SEQ ID NO: 747798 - RNA, 19 nt, Homo sapiens
  misc_RNA (1)...(19): siRNA sense strand
ggaaugcuagaaguguuua

SEQ ID NO: 747799 - RNA, 19 nt, Homo sapiens
  misc_RNA (1)...(19): siRNA sense strand
ugacaucagagaagagaaa

SEQ ID NO: 747800 - RNA, 19 nt, Homo sapiens
  misc_RNA (1)...(19): siRNA sense strand
ccacaagaaguccaugcua

SEQ ID NO: 747801 - RNA, 19 nt, Homo sapiens
  misc_RNA (1)...(19): siRNA sense strand
agaaguccaugcuagacaa

SEQ ID NO: 747802 - RNA, 19 nt, Homo sapiens
  misc_RNA (1)...(19): siRNA sense strand
gggcagaaaguugaucauu

SEQ ID NO: 747803 - RNA, 19 nt, Homo sapiens
  misc_RNA (1)...(19): siRNA sense strand
cuucuggaauccugguuaa

SEQ ID NO: 747804 - RNA, 19 nt, Homo sapiens
  misc_RNA (1)...(19): siRNA sense strand
gaaguccaugcuagacaaa

SEQ ID NO: 747805 - RNA, 19 nt, Homo sapiens
  misc_RNA (1)...(19): siRNA sense strand
uuacgaacucugaaacuga

SEQ ID NO: 747806 - RNA, 19 nt, Homo sapiens
  misc_RNA (1)...(19): siRNA sense strand
gucauuugcuggcuuugug

SEQ ID NO: 747807 - RNA, 19 nt, Homo sapiens
  misc_RNA (1)...(19): siRNA sense strand
gccuggaacuccugacaca

SEQ ID NO: 747808 - RNA, 19 nt, Homo sapiens
  misc_RNA (1)...(19): siRNA sense strand
gagaacgugaccuugaaga

SEQ ID NO: 747809 - RNA, 19 nt, Homo sapiens
  misc_RNA (1)...(19): siRNA sense strand
cuggaauccugguuaaugu

SEQ ID NO: 747810 - RNA, 19 nt, Homo sapiens
  misc_RNA (1)...(19): siRNA sense strand
gaggaggaagacauucuga

SEQ ID NO: 747811 - RNA, 19 nt, Homo sapiens
  misc_RNA (1)...(19): siRNA sense strand
ucacugcaaaccacaagaa

SEQ ID NO: 747812 - RNA, 19 nt, Homo sapiens
  misc_RNA (1)...(19): siRNA sense strand
gaacucugaaacugagaug

SEQ ID NO: 747813 - RNA, 19 nt, Homo sapiens
  misc_RNA (1)...(19): siRNA sense strand
acaagaaguccaugcuaga

SEQ ID NO: 747814 - RNA, 19 nt, Homo sapiens
  misc_RNA (1)...(19): siRNA sense strand
aaggaaugcuagaaguguu

SEQ ID NO: 747815 - RNA, 19 nt, Homo sapiens
  misc_RNA (1)...(19): siRNA sense strand
ugacaaaaccaacgucuug

SEQ ID NO: 747816 - RNA, 19 nt, Homo sapiens
  misc_RNA (1)...(19): siRNA sense strand
ugcuagaaguguuuagaga

SEQ ID NO: 747817 - RNA, 19 nt, Homo sapiens
  misc_RNA (1)...(19): siRNA sense strand
ggaggaggaagacauucug

SEQ ID NO: 747818 - RNA, 19 nt, Homo sapiens
  misc_RNA (1)...(19): siRNA sense strand
ucgagcuccugaucugaaa

SEQ ID NO: 747819 - RNA, 19 nt, Homo sapiens
  misc_RNA (1)...(19): siRNA sense strand
guuucgagcuccugaucug

SEQ ID NO: 747820 - RNA, 19 nt, Homo sapiens
  misc_RNA (1)...(19): siRNA sense strand
ugaaaagccuuacgaacuc

SEQ ID NO: 747821 - RNA, 19 nt, Homo sapiens
  misc_RNA (1)...(19): siRNA sense strand
gaggaagacauucugaaaa

SEQ ID NO: 747822 - RNA, 19 nt, Homo sapiens
  misc_RNA (1)...(19): siRNA sense strand
aaggucauuugcuggcuuu

SEQ ID NO: 747823 - RNA, 19 nt, Homo sapiens
  misc_RNA (1)...(19): siRNA sense strand
caagcaugccucacugcaa

SEQ ID NO: 747824 - RNA, 19 nt, Homo sapiens
  misc_RNA (1)...(19): siRNA sense strand
gcagacccagucccugaga

SEQ ID NO: 747825 - RNA, 19 nt, Homo sapiens
  misc_RNA (1)...(19): siRNA sense strand
gcuucuggaauccugguua

SEQ ID NO: 747826 - RNA, 19 nt, Homo sapiens
  misc_RNA (1)...(19): siRNA sense strand
cuggaagacucaaauacag

SEQ ID NO: 747827 - RNA, 19 nt, Homo sapiens
  misc_RNA (1)...(19): siRNA sense strand
ccuggaagacucaaauaca

SEQ ID NO: 747828 - RNA, 19 nt, Homo sapiens
  misc_RNA (1)...(19): siRNA sense strand
gaaacuucuacucuucugu

SEQ ID NO: 747829 - RNA, 19 nt, Homo sapiens
  misc_RNA (1)...(19): siRNA sense strand
aaaggaaugcuagaagugu

SEQ ID NO: 747830 - RNA, 19 nt, Homo sapiens
  misc_RNA (1)...(19): siRNA sense strand
ggacugggaggagagcaau

SEQ ID NO: 747831 - RNA, 19 nt, Homo sapiens
  misc_RNA (1)...(19): siRNA sense strand
uggagaugcugaggcagaa

SEQ ID NO: 747832 - RNA, 19 nt, Homo sapiens
  misc_RNA (1)...(19): siRNA sense strand
guuaccagccugagaacau

SEQ ID NO: 747833 - RNA, 19 nt, Homo sapiens
  misc_RNA (1)...(19): siRNA sense strand
ggaggacgggaaggucauu

SEQ ID NO: 747834 - RNA, 19 nt, Homo sapiens
  misc_RNA (1)...(19): siRNA sense strand
agaacgugaccuugaagaa

SEQ ID NO: 747835 - RNA, 19 nt, Homo sapiens
  misc_RNA (1)...(19): siRNA sense strand
ggagaacgugaccuugaag

SEQ ID NO: 747836 - RNA, 19 nt, Homo sapiens
  misc_RNA (1)...(19): siRNA sense strand
ugcaaaaccuggagaagga

SEQ ID NO: 747837 - RNA, 19 nt, Homo sapiens
  misc_RNA (1)...(19): siRNA sense strand
cugcaaaccacaagaaguc

SEQ ID NO: 747838 - RNA, 19 nt, Homo sapiens
  misc_RNA (1)...(19): siRNA sense strand
ggacgggaaggucauuugc

SEQ ID NO: 747839 - RNA, 19 nt, Homo sapiens
  misc_RNA (1)...(19): siRNA sense strand
cugagaacauacggccuaa

SEQ ID NO: 747840 - RNA, 19 nt, Homo sapiens
  misc_RNA (1)...(19): siRNA sense strand
uggagaaggaggaggaaga

SEQ ID NO: 747841 - RNA, 19 nt, Homo sapiens
  misc_RNA (1)...(19): siRNA sense strand
ucuggaauccugguuaaug

SEQ ID NO: 747842 - RNA, 19 nt, Homo sapiens
  misc_RNA (1)...(19): siRNA sense strand
cuuacgaacucugaaacug

SEQ ID NO: 747843 - RNA, 19 nt, Homo sapiens
  misc_RNA (1)...(19): siRNA sense strand
gcaggaagcugaagaguug

SEQ ID NO: 747844 - RNA, 19 nt, Homo sapiens
  misc_RNA (1)...(19): siRNA sense strand
gcagaaaguugaucauugu

SEQ ID NO: 747845 - RNA, 19 nt, Homo sapiens
  misc_RNA (1)...(19): siRNA sense strand
gagaguagcugcccugugu

SEQ ID NO: 747846 - RNA, 19 nt, Homo sapiens
  misc_RNA (1)...(19): siRNA sense strand
ugaagaagccagaaacuuu

SEQ ID NO: 747847 - RNA, 19 nt, Homo sapiens
  misc_RNA (1)...(19): siRNA sense strand
uuagagagcugacagaugu

SEQ ID NO: 747848 - RNA, 19 nt, Homo sapiens
  misc_RNA (1)...(19): siRNA sense strand
ggcagaaaguugaucauug

SEQ ID NO: 747849 - RNA, 19 nt, Homo sapiens
  misc_RNA (1)...(19): siRNA sense strand
ggaggaagacauucugaaa

SEQ ID NO: 747850 - RNA, 19 nt, Homo sapiens
  misc_RNA (1)...(19): siRNA sense strand
ggaagacucaaauacagua

SEQ ID NO: 747851 - RNA, 19 nt, Homo sapiens
  misc_RNA (1)...(19): siRNA sense strand
gaaggaggaggaagacauu

SEQ ID NO: 747852 - RNA, 19 nt, Homo sapiens
  misc_RNA (1)...(19): siRNA sense strand
gaaaggaaugcuagaagug

SEQ ID NO: 747853 - RNA, 19 nt, Homo sapiens
  misc_RNA (1)...(19): siRNA sense strand
ggguguggauggcgucaua

SEQ ID NO: 747854 - RNA, 19 nt, Homo sapiens
  misc_RNA (1)...(19): siRNA sense strand
ggaauccugguuaauguaa

SEQ ID NO: 747855 - RNA, 19 nt, Homo sapiens
  misc_RNA (1)...(19): siRNA sense strand
aagcaugccucacugcaaa

SEQ ID NO: 747856 - RNA, 19 nt, Homo sapiens
  misc_RNA (1)...(19): siRNA sense strand
ugaaaggaaugcuagaagu

SEQ ID NO: 747857 - RNA, 19 nt, Homo sapiens
  misc_RNA (1)...(19): siRNA sense strand
gagaacauacggccuaauc

SEQ ID NO: 747858 - RNA, 19 nt, Homo sapiens
  misc_RNA (1)...(19): siRNA sense strand
ggacggagaacgugaccuu

SEQ ID NO: 747859 - RNA, 19 nt, Homo sapiens
  misc_RNA (1)...(19): siRNA sense strand
ggagagcaaugagcugcaa

SEQ ID NO: 747860 - RNA, 19 nt, Homo sapiens
  misc_RNA (1)...(19): siRNA sense strand
gaauccugguuaauguaaa

SEQ ID NO: 747861 - RNA, 19 nt, Homo sapiens
  misc_RNA (1)...(19): siRNA sense strand
gaacgugaccuugaagaag

SEQ ID NO: 747862 - RNA, 19 nt, Homo sapiens
  misc_RNA (1)...(19): siRNA sense strand
uuaccagccugagaacaua

SEQ ID NO: 747863 - RNA, 19 nt, Homo sapiens
  misc_RNA (1)...(19): siRNA sense strand
cggagaacgugaccuugaa

SEQ ID NO: 747864 - RNA, 19 nt, Homo sapiens
  misc_RNA (1)...(19): siRNA sense strand
gcaaugagcugcaaaaccu

SEQ ID NO: 747865 - RNA, 19 nt, Homo sapiens
  misc_RNA (1)...(19): siRNA sense strand
gcucagggaggucaaguug

SEQ ID NO: 747866 - RNA, 19 nt, Homo sapiens
  misc_RNA (1)...(19): siRNA sense strand
gaagaagccagaaacuuuu

SEQ ID NO: 747867 - RNA, 19 nt, Homo sapiens
  misc_RNA (1)...(19): siRNA sense strand
gcccaggaguaccaaguga

SEQ ID NO: 747868 - RNA, 19 nt, Homo sapiens
  misc_RNA (1)...(19): siRNA sense strand
ggaaugcuagaaguguuua

SEQ ID NO: 747869 - RNA, 19 nt, Homo sapiens
  misc_RNA (1)...(19): siRNA sense strand
ugacaucagagaagagaaa

SEQ ID NO: 747870 - RNA, 19 nt, Homo sapiens
  misc_RNA (1)...(19): siRNA sense strand
ccacaagaaguccaugcua

SEQ ID NO: 747871 - RNA, 19 nt, Homo sapiens
  misc_RNA (1)...(19): siRNA sense strand
agaaguccaugcuagacaa

SEQ ID NO: 747872 - RNA, 19 nt, Homo sapiens
  misc_RNA (1)...(19): siRNA sense strand
gggcagaaaguugaucauu

SEQ ID NO: 747873 - RNA, 19 nt, Homo sapiens
  misc_RNA (1)...(19): siRNA sense strand
cuucuggaauccugguuaa

SEQ ID NO: 747874 - RNA, 19 nt, Homo sapiens
  misc_RNA (1)...(19): siRNA sense strand
gaaguccaugcuagacaaa

SEQ ID NO: 747875 - RNA, 19 nt, Homo sapiens
  misc_RNA (1)...(19): siRNA sense strand
uuacgaacucugaaacuga

SEQ ID NO: 747876 - RNA, 19 nt, Homo sapiens
  misc_RNA (1)...(19): siRNA sense strand
gucauuugcuggcuuugug

SEQ ID NO: 747877 - RNA, 19 nt, Homo sapiens
  misc_RNA (1)...(19): siRNA sense strand
gccuggaacuccugacaca

SEQ ID NO: 747878 - RNA, 19 nt, Homo sapiens
  misc_RNA (1)...(19): siRNA sense strand
gagaacgugaccuugaaga

SEQ ID NO: 747879 - RNA, 19 nt, Homo sapiens
  misc_RNA (1)...(19): siRNA sense strand
cuggaauccugguuaaugu

SEQ ID NO: 747880 - RNA, 19 nt, Homo sapiens
  misc_RNA (1)...(19): siRNA sense strand
gaggaggaagacauucuga

SEQ ID NO: 747881 - RNA, 19 nt, Homo sapiens
  misc_RNA (1)...(19): siRNA sense strand
ucacugcaaaccacaagaa

SEQ ID NO: 747882 - RNA, 19 nt, Homo sapiens
  misc_RNA (1)...(19): siRNA sense strand
gaacucugaaacugagaug

SEQ ID NO: 747883 - RNA, 19 nt, Homo sapiens
  misc_RNA (1)...(19): siRNA sense strand
acaagaaguccaugcuaga

SEQ ID NO: 747884 - RNA, 19 nt, Homo sapiens
  misc_RNA (1)...(19): siRNA sense strand
aaggaaugcuagaaguguu

SEQ ID NO: 747885 - RNA, 19 nt, Homo sapiens
  misc_RNA (1)...(19): siRNA sense strand
ugacaaaaccaacgucuug

SEQ ID NO: 747886 - RNA, 19 nt, Homo sapiens
  misc_RNA (1)...(19): siRNA sense strand
ugcuagaaguguuuagaga

SEQ ID NO: 747887 - RNA, 19 nt, Homo sapiens
  misc_RNA (1)...(19): siRNA sense strand
ggaggaggaagacauucug

SEQ ID NO: 747888 - RNA, 19 nt, Homo sapiens
  misc_RNA (1)...(19): siRNA sense strand
ucgagcuccugaucugaaa

SEQ ID NO: 747889 - RNA, 19 nt, Homo sapiens
  misc_RNA (1)...(19): siRNA sense strand
guuucgagcuccugaucug

SEQ ID NO: 747890 - RNA, 19 nt, Homo sapiens
  misc_RNA (1)...(19): siRNA sense strand
ugaaaagccuuacgaacuc

SEQ ID NO: 747891 - RNA, 19 nt, Homo sapiens
  misc_RNA (1)...(19): siRNA sense strand
gaggaagacauucugaaaa

SEQ ID NO: 747892 - RNA, 19 nt, Homo sapiens
  misc_RNA (1)...(19): siRNA sense strand
aaggucauuugcuggcuuu

SEQ ID NO: 747893 - RNA, 19 nt, Homo sapiens
  misc_RNA (1)...(19): siRNA sense strand
caagcaugccucacugcaa

SEQ ID NO: 747894 - RNA, 19 nt, Homo sapiens
  misc_RNA (1)...(19): siRNA sense strand
gcagacccagucccugaga

SEQ ID NO: 747895 - RNA, 19 nt, Homo sapiens
  misc_RNA (1)...(19): siRNA sense strand
gcuucuggaauccugguua

SEQ ID NO: 747896 - RNA, 19 nt, Homo sapiens
  misc_RNA (1)...(19): siRNA sense strand
cuggaagacucaaauacag

SEQ ID NO: 747897 - RNA, 19 nt, Homo sapiens
  misc_RNA (1)...(19): siRNA sense strand
ccuggaagacucaaauaca

SEQ ID NO: 747898 - RNA, 19 nt, Homo sapiens
  misc_RNA (1)...(19): siRNA sense strand
gaaacuucuacucuucugu

SEQ ID NO: 747899 - RNA, 19 nt, Homo sapiens
  misc_RNA (1)...(19): siRNA sense strand
aaaggaaugcuagaagugu

SEQ ID NO: 747900 - RNA, 19 nt, Homo sapiens
  misc_RNA (1)...(19): siRNA sense strand
ggacugggaggagagcaau

SEQ ID NO: 747901 - RNA, 19 nt, Homo sapiens
  misc_RNA (1)...(19): siRNA sense strand
uggagaugcugaggcagaa

SEQ ID NO: 747902 - RNA, 19 nt, Homo sapiens
  misc_RNA (1)...(19): siRNA sense strand
guuaccagccugagaacau

SEQ ID NO: 747903 - RNA, 19 nt, Homo sapiens
  misc_RNA (1)...(19): siRNA sense strand
ggaggacgggaaggucauu

SEQ ID NO: 747904 - RNA, 19 nt, Homo sapiens
  misc_RNA (1)...(19): siRNA sense strand
agaacgugaccuugaagaa

SEQ ID NO: 747905 - RNA, 19 nt, Homo sapiens
  misc_RNA (1)...(19): siRNA sense strand
ggagaacgugaccuugaag

SEQ ID NO: 747906 - RNA, 19 nt, Homo sapiens
  misc_RNA (1)...(19): siRNA sense strand
ugcaaaaccuggagaagga

SEQ ID NO: 747907 - RNA, 19 nt, Homo sapiens
  misc_RNA (1)...(19): siRNA sense strand
cugcaaaccacaagaaguc

SEQ ID NO: 747908 - RNA, 19 nt, Homo sapiens
  misc_RNA (1)...(19): siRNA sense strand
ggacgggaaggucauuugc

SEQ ID NO: 747909 - RNA, 19 nt, Homo sapiens
  misc_RNA (1)...(19): siRNA sense strand
cugagaacauacggccuaa

SEQ ID NO: 747910 - RNA, 19 nt, Homo sapiens
  misc_RNA (1)...(19): siRNA sense strand
uggagaaggaggaggaaga

SEQ ID NO: 747911 - RNA, 19 nt, Homo sapiens
  misc_RNA (1)...(19): siRNA sense strand
ucuggaauccugguuaaug

SEQ ID NO: 747912 - RNA, 19 nt, Homo sapiens
  misc_RNA (1)...(19): siRNA sense strand
cuuacgaacucugaaacug

SEQ ID NO: 747913 - RNA, 19 nt, Homo sapiens
  misc_RNA (1)...(19): siRNA sense strand
gcaggaagcugaagaguug

SEQ ID NO: 747914 - RNA, 19 nt, Homo sapiens
  misc_RNA (1)...(19): siRNA sense strand
gcagaaaguugaucauugu

SEQ ID NO: 747915 - RNA, 19 nt, Homo sapiens
  misc_RNA (1)...(19): siRNA sense strand
gagaguagcugcccugugu

SEQ ID NO: 747916 - RNA, 19 nt, Homo sapiens
  misc_RNA (1)...(19): siRNA sense strand
ugaagaagccagaaacuuu

SEQ ID NO: 747917 - RNA, 19 nt, Homo sapiens
  misc_RNA (1)...(19): siRNA sense strand
uuagagagcugacagaugu

SEQ ID NO: 747918 - RNA, 19 nt, Homo sapiens
  misc_RNA (1)...(19): siRNA sense strand
ggcagaaaguugaucauug

SEQ ID NO: 747919 - RNA, 19 nt, Homo sapiens
  misc_RNA (1)...(19): siRNA sense strand
ggaggaagacauucugaaa

SEQ ID NO: 747920 - RNA, 19 nt, Homo sapiens
  misc_RNA (1)...(19): siRNA sense strand
ggaagacucaaauacagua

SEQ ID NO: 747921 - RNA, 19 nt, Homo sapiens
  misc_RNA (1)...(19): siRNA sense strand
gaaggaggaggaagacauu

SEQ ID NO: 747922 - RNA, 19 nt, Homo sapiens
  misc_RNA (1)...(19): siRNA sense strand
gaaaggaaugcuagaagug

SEQ ID NO: 747923 - RNA, 19 nt, Homo sapiens
  misc_RNA (1)...(19): siRNA sense strand
ggguguggauggcgucaua

SEQ ID NO: 747924 - RNA, 19 nt, Homo sapiens
  misc_RNA (1)...(19): siRNA sense strand
ggaauccugguuaauguaa

SEQ ID NO: 747925 - RNA, 19 nt, Homo sapiens
  misc_RNA (1)...(19): siRNA sense strand
aagcaugccucacugcaaa

SEQ ID NO: 747926 - RNA, 19 nt, Homo sapiens
  misc_RNA (1)...(19): siRNA sense strand
ugaaaggaaugcuagaagu

SEQ ID NO: 747927 - RNA, 19 nt, Homo sapiens
  misc_RNA (1)...(19): siRNA sense strand
gagaacauacggccuaauc

SEQ ID NO: 747928 - RNA, 19 nt, Homo sapiens
  misc_RNA (1)...(19): siRNA sense strand
ggacggagaacgugaccuu

SEQ ID NO: 747929 - RNA, 19 nt, Homo sapiens
  misc_RNA (1)...(19): siRNA sense strand
ggagagcaaugagcugcaa

SEQ ID NO: 747930 - RNA, 19 nt, Homo sapiens
  misc_RNA (1)...(19): siRNA sense strand
gaauccugguuaauguaaa

SEQ ID NO: 747931 - RNA, 19 nt, Homo sapiens
  misc_RNA (1)...(19): siRNA sense strand
gaacgugaccuugaagaag

SEQ ID NO: 747932 - RNA, 19 nt, Homo sapiens
  misc_RNA (1)...(19): siRNA sense strand
uuaccagccugagaacaua

SEQ ID NO: 747933 - RNA, 19 nt, Homo sapiens
  misc_RNA (1)...(19): siRNA sense strand
cggagaacgugaccuugaa

SEQ ID NO: 747934 - RNA, 19 nt, Homo sapiens
  misc_RNA (1)...(19): siRNA sense strand
gcaaugagcugcaaaaccu

SEQ ID NO: 747935 - RNA, 19 nt, Homo sapiens
  misc_RNA (1)...(19): siRNA sense strand
gcucagggaggucaaguug

SEQ ID NO: 747936 - RNA, 19 nt, Homo sapiens
  misc_RNA (1)...(19): siRNA sense strand
gaagaagccagaaacuuuu

SEQ ID NO: 747937 - RNA, 19 nt, Homo sapiens
  misc_RNA (1)...(19): siRNA sense strand
gcccaggaguaccaaguga

SEQ ID NO: 747938 - RNA, 19 nt, Homo sapiens
  misc_RNA (1)...(19): siRNA sense strand
ggaaugcuagaaguguuua

SEQ ID NO: 747939 - RNA, 19 nt, Homo sapiens
  misc_RNA (1)...(19): siRNA sense strand
ugacaucagagaagagaaa

SEQ ID NO: 747940 - RNA, 19 nt, Homo sapiens
  misc_RNA (1)...(19): siRNA sense strand
ccacaagaaguccaugcua

SEQ ID NO: 747941 - RNA, 19 nt, Homo sapiens
  misc_RNA (1)...(19): siRNA sense strand
agaaguccaugcuagacaa

SEQ ID NO: 747942 - RNA, 19 nt, Homo sapiens
  misc_RNA (1)...(19): siRNA sense strand
gggcagaaaguugaucauu

SEQ ID NO: 747943 - RNA, 19 nt, Homo sapiens
  misc_RNA (1)...(19): siRNA sense strand
cuucuggaauccugguuaa

SEQ ID NO: 747944 - RNA, 19 nt, Homo sapiens
  misc_RNA (1)...(19): siRNA sense strand
gaaguccaugcuagacaaa

SEQ ID NO: 747945 - RNA, 19 nt, Homo sapiens
  misc_RNA (1)...(19): siRNA sense strand
uuacgaacucugaaacuga

SEQ ID NO: 747946 - RNA, 19 nt, Homo sapiens
  misc_RNA (1)...(19): siRNA sense strand
gucauuugcuggcuuugug

SEQ ID NO: 747947 - RNA, 19 nt, Homo sapiens
  misc_RNA (1)...(19): siRNA sense strand
gccuggaacuccugacaca

SEQ ID NO: 747948 - RNA, 19 nt, Homo sapiens
  misc_RNA (1)...(19): siRNA sense strand
gagaacgugaccuugaaga

SEQ ID NO: 747949 - RNA, 19 nt, Homo sapiens
  misc_RNA (1)...(19): siRNA sense strand
cuggaauccugguuaaugu

SEQ ID NO: 747950 - RNA, 19 nt, Homo sapiens
  misc_RNA (1)...(19): siRNA sense strand
gaggaggaagacauucuga

SEQ ID NO: 747951 - RNA, 19 nt, Homo sapiens
  misc_RNA (1)...(19): siRNA sense strand
ucacugcaaaccacaagaa

SEQ ID NO: 747952 - RNA, 19 nt, Homo sapiens
  misc_RNA (1)...(19): siRNA sense strand
gaacucugaaacugagaug

SEQ ID NO: 747953 - RNA, 19 nt, Homo sapiens
  misc_RNA (1)...(19): siRNA sense strand
acaagaaguccaugcuaga

SEQ ID NO: 747954 - RNA, 19 nt, Homo sapiens
  misc_RNA (1)...(19): siRNA sense strand
aaggaaugcuagaaguguu

SEQ ID NO: 747955 - RNA, 19 nt, Homo sapiens
  misc_RNA (1)...(19): siRNA sense strand
ugacaaaaccaacgucuug

SEQ ID NO: 747956 - RNA, 19 nt, Homo sapiens
  misc_RNA (1)...(19): siRNA sense strand
ugcuagaaguguuuagaga

SEQ ID NO: 747957 - RNA, 19 nt, Homo sapiens
  misc_RNA (1)...(19): siRNA sense strand
ggaggaggaagacauucug

SEQ ID NO: 747958 - RNA, 19 nt, Homo sapiens
  misc_RNA (1)...(19): siRNA sense strand
ucgagcuccugaucugaaa

SEQ ID NO: 747959 - RNA, 19 nt, Homo sapiens
  misc_RNA (1)...(19): siRNA sense strand
guuucgagcuccugaucug

SEQ ID NO: 747960 - RNA, 19 nt, Homo sapiens
  misc_RNA (1)...(19): siRNA sense strand
ugaaaagccuuacgaacuc

SEQ ID NO: 747961 - RNA, 19 nt, Homo sapiens
  misc_RNA (1)...(19): siRNA sense strand
gaggaagacauucugaaaa

SEQ ID NO: 747962 - RNA, 19 nt, Homo sapiens
  misc_RNA (1)...(19): siRNA sense strand
aaggucauuugcuggcuuu

SEQ ID NO: 747963 - RNA, 19 nt, Homo sapiens
  misc_RNA (1)...(19): siRNA sense strand
caagcaugccucacugcaa

SEQ ID NO: 747964 - RNA, 19 nt, Homo sapiens
  misc_RNA (1)...(19): siRNA sense strand
gcagacccagucccugaga

SEQ ID NO: 747965 - RNA, 19 nt, Homo sapiens
  misc_RNA (1)...(19): siRNA sense strand
gcuucuggaauccugguua

SEQ ID NO: 747966 - RNA, 19 nt, Homo sapiens
  misc_RNA (1)...(19): siRNA sense strand
cuggaagacucaaauacag

SEQ ID NO: 747967 - RNA, 19 nt, Homo sapiens
  misc_RNA (1)...(19): siRNA sense strand
ccuggaagacucaaauaca

SEQ ID NO: 747968 - RNA, 19 nt, Homo sapiens
  misc_RNA (1)...(19): siRNA sense strand
gaaacuucuacucuucugu

SEQ ID NO: 747969 - RNA, 19 nt, Homo sapiens
  misc_RNA (1)...(19): siRNA sense strand
aaaggaaugcuagaagugu

SEQ ID NO: 747970 - RNA, 19 nt, Homo sapiens
  misc_RNA (1)...(19): siRNA sense strand
ggacugggaggagagcaau

SEQ ID NO: 747971 - RNA, 19 nt, Homo sapiens
  misc_RNA (1)...(19): siRNA sense strand
uggagaugcugaggcagaa

SEQ ID NO: 747972 - RNA, 19 nt, Homo sapiens
  misc_RNA (1)...(19): siRNA sense strand
guuaccagccugagaacau

SEQ ID NO: 747973 - RNA, 19 nt, Homo sapiens
  misc_RNA (1)...(19): siRNA sense strand
ggaggacgggaaggucauu

SEQ ID NO: 747974 - RNA, 19 nt, Homo sapiens
  misc_RNA (1)...(19): siRNA sense strand
agaacgugaccuugaagaa

SEQ ID NO: 747975 - RNA, 19 nt, Homo sapiens
  misc_RNA (1)...(19): siRNA sense strand
ggagaacgugaccuugaag

SEQ ID NO: 747976 - RNA, 19 nt, Homo sapiens
  misc_RNA (1)...(19): siRNA sense strand
ugcaaaaccuggagaagga

SEQ ID NO: 747977 - RNA, 19 nt, Homo sapiens
  misc_RNA (1)...(19): siRNA sense strand
cugcaaaccacaagaaguc

SEQ ID NO: 747978 - RNA, 19 nt, Homo sapiens
  misc_RNA (1)...(19): siRNA sense strand
ggacgggaaggucauuugc

SEQ ID NO: 747979 - RNA, 19 nt, Homo sapiens
  misc_RNA (1)...(19): siRNA sense strand
cugagaacauacggccuaa

SEQ ID NO: 747980 - RNA, 19 nt, Homo sapiens
  misc_RNA (1)...(19): siRNA sense strand
uggagaaggaggaggaaga

SEQ ID NO: 747981 - RNA, 19 nt, Homo sapiens
  misc_RNA (1)...(19): siRNA sense strand
ucuggaauccugguuaaug

SEQ ID NO: 747982 - RNA, 19 nt, Homo sapiens
  misc_RNA (1)...(19): siRNA sense strand
cuuacgaacucugaaacug

SEQ ID NO: 747983 - RNA, 19 nt, Homo sapiens
  misc_RNA (1)...(19): siRNA sense strand
gcaggaagcugaagaguug

SEQ ID NO: 747984 - RNA, 19 nt, Homo sapiens
  misc_RNA (1)...(19): siRNA sense strand
gcagaaaguugaucauugu

SEQ ID NO: 747985 - RNA, 19 nt, Homo sapiens
  misc_RNA (1)...(19): siRNA sense strand
gagaguagcugcccugugu

SEQ ID NO: 747986 - RNA, 19 nt, Homo sapiens
  misc_RNA (1)...(19): siRNA sense strand
ugaagaagccagaaacuuu

SEQ ID NO: 747987 - RNA, 19 nt, Homo sapiens
  misc_RNA (1)...(19): siRNA sense strand
uuagagagcugacagaugu

SEQ ID NO: 747988 - RNA, 19 nt, Homo sapiens
  misc_RNA (1)...(19): siRNA sense strand
ggcagaaaguugaucauug

SEQ ID NO: 747989 - RNA, 19 nt, Homo sapiens
  misc_RNA (1)...(19): siRNA sense strand
ggaggaagacauucugaaa

SEQ ID NO: 747990 - RNA, 19 nt, Homo sapiens
  misc_RNA (1)...(19): siRNA sense strand
ggaagacucaaauacagua

SEQ ID NO: 747991 - RNA, 19 nt, Homo sapiens
  misc_RNA (1)...(19): siRNA sense strand
gaaggaggaggaagacauu

SEQ ID NO: 747992 - RNA, 19 nt, Homo sapiens
  misc_RNA (1)...(19): siRNA sense strand
gaaaggaaugcuagaagug

SEQ ID NO: 747993 - RNA, 19 nt, Homo sapiens
  misc_RNA (1)...(19): siRNA sense strand
ggguguggauggcgucaua

SEQ ID NO: 747994 - RNA, 19 nt, Homo sapiens
  misc_RNA (1)...(19): siRNA sense strand
ggaauccugguuaauguaa

SEQ ID NO: 747995 - RNA, 19 nt, Homo sapiens
  misc_RNA (1)...(19): siRNA sense strand
aagcaugccucacugcaaa

SEQ ID NO: 747996 - RNA, 19 nt, Homo sapiens
  misc_RNA (1)...(19): siRNA sense strand
ugaaaggaaugcuagaagu

SEQ ID NO: 747997 - RNA, 19 nt, Homo sapiens
  misc_RNA (1)...(19): siRNA sense strand
gagaacauacggccuaauc

SEQ ID NO: 747998 - RNA, 19 nt, Homo sapiens
  misc_RNA (1)...(19): siRNA sense strand
ggacggagaacgugaccuu

SEQ ID NO: 747999 - RNA, 19 nt, Homo sapiens
  misc_RNA (1)...(19): siRNA sense strand
ggagagcaaugagcugcaa

SEQ ID NO: 748000 - RNA, 19 nt, Homo sapiens
  misc_RNA (1)...(19): siRNA sense strand
gaauccugguuaauguaaa

SEQ ID NO: 748001 - RNA, 19 nt, Homo sapiens
  misc_RNA (1)...(19): siRNA sense strand
gaacgugaccuugaagaag

SEQ ID NO: 748002 - RNA, 19 nt, Homo sapiens
  misc_RNA (1)...(19): siRNA sense strand
uuaccagccugagaacaua

SEQ ID NO: 748003 - RNA, 19 nt, Homo sapiens
  misc_RNA (1)...(19): siRNA sense strand
cggagaacgugaccuugaa

SEQ ID NO: 748004 - RNA, 19 nt, Homo sapiens
  misc_RNA (1)...(19): siRNA sense strand
gcaaugagcugcaaaaccu

SEQ ID NO: 748005 - RNA, 19 nt, Homo sapiens
  misc_RNA (1)...(19): siRNA sense strand
gcucagggaggucaaguug

SEQ ID NO: 748006 - RNA, 19 nt, Homo sapiens
  misc_RNA (1)...(19): siRNA sense strand
gaagaagccagaaacuuuu

SEQ ID NO: 748007 - RNA, 19 nt, Homo sapiens
  misc_RNA (1)...(19): siRNA sense strand
gcccaggaguaccaaguga

SEQ ID NO: 748008 - RNA, 19 nt, Homo sapiens
  misc_RNA (1)...(19): siRNA sense strand
ggaaugcuagaaguguuua

SEQ ID NO: 748009 - RNA, 19 nt, Homo sapiens
  misc_RNA (1)...(19): siRNA sense strand
ugacaucagagaagagaaa

SEQ ID NO: 748010 - RNA, 19 nt, Homo sapiens
  misc_RNA (1)...(19): siRNA sense strand
ccacaagaaguccaugcua

SEQ ID NO: 748011 - RNA, 19 nt, Homo sapiens
  misc_RNA (1)...(19): siRNA sense strand
agaaguccaugcuagacaa

SEQ ID NO: 748012 - RNA, 19 nt, Homo sapiens
  misc_RNA (1)...(19): siRNA sense strand
gggcagaaaguugaucauu

SEQ ID NO: 748013 - RNA, 19 nt, Homo sapiens
  misc_RNA (1)...(19): siRNA sense strand
cuucuggaauccugguuaa

SEQ ID NO: 748014 - RNA, 19 nt, Homo sapiens
  misc_RNA (1)...(19): siRNA sense strand
gaaguccaugcuagacaaa

SEQ ID NO: 748015 - RNA, 19 nt, Homo sapiens
  misc_RNA (1)...(19): siRNA sense strand
uuacgaacucugaaacuga

SEQ ID NO: 748016 - RNA, 19 nt, Homo sapiens
  misc_RNA (1)...(19): siRNA sense strand
gucauuugcuggcuuugug

SEQ ID NO: 748017 - RNA, 19 nt, Homo sapiens
  misc_RNA (1)...(19): siRNA sense strand
gccuggaacuccugacaca

SEQ ID NO: 748018 - RNA, 19 nt, Homo sapiens
  misc_RNA (1)...(19): siRNA sense strand
gagaacgugaccuugaaga

SEQ ID NO: 748019 - RNA, 19 nt, Homo sapiens
  misc_RNA (1)...(19): siRNA sense strand
cuggaauccugguuaaugu

SEQ ID NO: 748020 - RNA, 19 nt, Homo sapiens
  misc_RNA (1)...(19): siRNA sense strand
gaggaggaagacauucuga

SEQ ID NO: 748021 - RNA, 19 nt, Homo sapiens
  misc_RNA (1)...(19): siRNA sense strand
ucacugcaaaccacaagaa

SEQ ID NO: 748022 - RNA, 19 nt, Homo sapiens
  misc_RNA (1)...(19): siRNA sense strand
gaacucugaaacugagaug

SEQ ID NO: 748023 - RNA, 19 nt, Homo sapiens
  misc_RNA (1)...(19): siRNA sense strand
acaagaaguccaugcuaga

SEQ ID NO: 748024 - RNA, 19 nt, Homo sapiens
  misc_RNA (1)...(19): siRNA sense strand
aaggaaugcuagaaguguu

SEQ ID NO: 748025 - RNA, 19 nt, Homo sapiens
  misc_RNA (1)...(19): siRNA sense strand
ugacaaaaccaacgucuug

SEQ ID NO: 748026 - RNA, 19 nt, Homo sapiens
  misc_RNA (1)...(19): siRNA sense strand
ugcuagaaguguuuagaga

SEQ ID NO: 748027 - RNA, 19 nt, Homo sapiens
  misc_RNA (1)...(19): siRNA sense strand
ggaggaggaagacauucug

SEQ ID NO: 748028 - RNA, 19 nt, Homo sapiens
  misc_RNA (1)...(19): siRNA sense strand
ucgagcuccugaucugaaa

SEQ ID NO: 748029 - RNA, 19 nt, Homo sapiens
  misc_RNA (1)...(19): siRNA sense strand
guuucgagcuccugaucug

SEQ ID NO: 748030 - RNA, 19 nt, Homo sapiens
  misc_RNA (1)...(19): siRNA sense strand
ugaaaagccuuacgaacuc

SEQ ID NO: 748031 - RNA, 19 nt, Homo sapiens
  misc_RNA (1)...(19): siRNA sense strand
gaggaagacauucugaaaa

SEQ ID NO: 748032 - RNA, 19 nt, Homo sapiens
  misc_RNA (1)...(19): siRNA sense strand
aaggucauuugcuggcuuu

SEQ ID NO: 748033 - RNA, 19 nt, Homo sapiens
  misc_RNA (1)...(19): siRNA sense strand
caagcaugccucacugcaa

SEQ ID NO: 748034 - RNA, 19 nt, Homo sapiens
  misc_RNA (1)...(19): siRNA sense strand
gcagacccagucccugaga

SEQ ID NO: 748035 - RNA, 19 nt, Homo sapiens
  misc_RNA (1)...(19): siRNA sense strand
gcuucuggaauccugguua

SEQ ID NO: 748036 - RNA, 19 nt, Homo sapiens
  misc_RNA (1)...(19): siRNA sense strand
cuggaagacucaaauacag

SEQ ID NO: 748037 - RNA, 19 nt, Homo sapiens
  misc_RNA (1)...(19): siRNA sense strand
ccuggaagacucaaauaca

SEQ ID NO: 748038 - RNA, 19 nt, Homo sapiens
  misc_RNA (1)...(19): siRNA sense strand
gaaacuucuacucuucugu

SEQ ID NO: 748039 - RNA, 19 nt, Homo sapiens
  misc_RNA (1)...(19): siRNA sense strand
aaaggaaugcuagaagugu

SEQ ID NO: 748040 - RNA, 19 nt, Homo sapiens
  misc_RNA (1)...(19): siRNA sense strand
ggacugggaggagagcaau

SEQ ID NO: 748041 - RNA, 19 nt, Homo sapiens
  misc_RNA (1)...(19): siRNA sense strand
uggagaugcugaggcagaa

SEQ ID NO: 748042 - RNA, 19 nt, Homo sapiens
  misc_RNA (1)...(19): siRNA sense strand
guuaccagccugagaacau

SEQ ID NO: 748043 - RNA, 19 nt, Homo sapiens
  misc_RNA (1)...(19): siRNA sense strand
ggaggacgggaaggucauu

SEQ ID NO: 748044 - RNA, 19 nt, Homo sapiens
  misc_RNA (1)...(19): siRNA sense strand
agaacgugaccuugaagaa

SEQ ID NO: 748045 - RNA, 19 nt, Homo sapiens
  misc_RNA (1)...(19): siRNA sense strand
ggagaacgugaccuugaag

SEQ ID NO: 748046 - RNA, 19 nt, Homo sapiens
  misc_RNA (1)...(19): siRNA sense strand
ugcaaaaccuggagaagga

SEQ ID NO: 748047 - RNA, 19 nt, Homo sapiens
  misc_RNA (1)...(19): siRNA sense strand
cugcaaaccacaagaaguc

SEQ ID NO: 748048 - RNA, 19 nt, Homo sapiens
  misc_RNA (1)...(19): siRNA sense strand
ggacgggaaggucauuugc

SEQ ID NO: 748049 - RNA, 19 nt, Homo sapiens
  misc_RNA (1)...(19): siRNA sense strand
cugagaacauacggccuaa

SEQ ID NO: 748050 - RNA, 19 nt, Homo sapiens
  misc_RNA (1)...(19): siRNA sense strand
uggagaaggaggaggaaga

SEQ ID NO: 748051 - RNA, 19 nt, Homo sapiens
  misc_RNA (1)...(19): siRNA sense strand
ucuggaauccugguuaaug

SEQ ID NO: 748052 - RNA, 19 nt, Homo sapiens
  misc_RNA (1)...(19): siRNA sense strand
cuuacgaacucugaaacug

SEQ ID NO: 748053 - RNA, 19 nt, Homo sapiens
  misc_RNA (1)...(19): siRNA sense strand
gcaggaagcugaagaguug

SEQ ID NO: 748054 - RNA, 19 nt, Homo sapiens
  misc_RNA (1)...(19): siRNA sense strand
gcagaaaguugaucauugu

SEQ ID NO: 748055 - RNA, 19 nt, Homo sapiens
  misc_RNA (1)...(19): siRNA sense strand
gagaguagcugcccugugu

SEQ ID NO: 748056 - RNA, 19 nt, Homo sapiens
  misc_RNA (1)...(19): siRNA sense strand
ugaagaagccagaaacuuu

SEQ ID NO: 748057 - RNA, 19 nt, Homo sapiens
  misc_RNA (1)...(19): siRNA sense strand
uuagagagcugacagaugu

SEQ ID NO: 748058 - RNA, 19 nt, Homo sapiens
  misc_RNA (1)...(19): siRNA sense strand
ggcagaaaguugaucauug

SEQ ID NO: 748059 - RNA, 19 nt, Homo sapiens
  misc_RNA (1)...(19): siRNA sense strand
ggaggaagacauucugaaa

SEQ ID NO: 748060 - RNA, 19 nt, Homo sapiens
  misc_RNA (1)...(19): siRNA sense strand
ggaagacucaaauacagua

SEQ ID NO: 748061 - RNA, 19 nt, Homo sapiens
  misc_RNA (1)...(19): siRNA sense strand
gaaggaggaggaagacauu

SEQ ID NO: 748062 - RNA, 19 nt, Homo sapiens
  misc_RNA (1)...(19): siRNA sense strand
gaaaggaaugcuagaagug

SEQ ID NO: 748063 - RNA, 19 nt, Homo sapiens
  misc_RNA (1)...(19): siRNA sense strand
ggguguggauggcgucaua

SEQ ID NO: 748064 - RNA, 19 nt, Homo sapiens
  misc_RNA (1)...(19): siRNA sense strand
ggaauccugguuaauguaa

SEQ ID NO: 748065 - RNA, 19 nt, Homo sapiens
  misc_RNA (1)...(19): siRNA sense strand
aagcaugccucacugcaaa

SEQ ID NO: 748066 - RNA, 19 nt, Homo sapiens
  misc_RNA (1)...(19): siRNA sense strand
ugaaaggaaugcuagaagu

SEQ ID NO: 748067 - RNA, 19 nt, Homo sapiens
  misc_RNA (1)...(19): siRNA sense strand
gagaacauacggccuaauc

SEQ ID NO: 748068 - RNA, 19 nt, Homo sapiens
  misc_RNA (1)...(19): siRNA sense strand
ggacggagaacgugaccuu

SEQ ID NO: 748069 - RNA, 19 nt, Homo sapiens
  misc_RNA (1)...(19): siRNA sense strand
ggagagcaaugagcugcaa

SEQ ID NO: 748070 - RNA, 19 nt, Homo sapiens
  misc_RNA (1)...(19): siRNA sense strand
gaauccugguuaauguaaa

SEQ ID NO: 748071 - RNA, 19 nt, Homo sapiens
  misc_RNA (1)...(19): siRNA sense strand
gaacgugaccuugaagaag

SEQ ID NO: 748072 - RNA, 19 nt, Homo sapiens
  misc_RNA (1)...(19): siRNA sense strand
uuaccagccugagaacaua

SEQ ID NO: 748073 - RNA, 19 nt, Homo sapiens
  misc_RNA (1)...(19): siRNA sense strand
cggagaacgugaccuugaa

SEQ ID NO: 748074 - RNA, 19 nt, Homo sapiens
  misc_RNA (1)...(19): siRNA sense strand
gcaaugagcugcaaaaccu

SEQ ID NO: 748075 - RNA, 19 nt, Homo sapiens
  misc_RNA (1)...(19): siRNA sense strand
gcucagggaggucaaguug

SEQ ID NO: 748076 - RNA, 19 nt, Homo sapiens
  misc_RNA (1)...(19): siRNA sense strand
gaagaagccagaaacuuuu

SEQ ID NO: 748077 - RNA, 19 nt, Homo sapiens
  misc_RNA (1)...(19): siRNA sense strand
gcccaggaguaccaaguga

SEQ ID NO: 748078 - RNA, 19 nt, Homo sapiens
  misc_RNA (1)...(19): siRNA sense strand
ggaaugcuagaaguguuua

SEQ ID NO: 748079 - RNA, 19 nt, Homo sapiens
  misc_RNA (1)...(19): siRNA sense strand
ugacaucagagaagagaaa

SEQ ID NO: 748080 - RNA, 19 nt, Homo sapiens
  misc_RNA (1)...(19): siRNA sense strand
ccacaagaaguccaugcua

SEQ ID NO: 748081 - RNA, 19 nt, Homo sapiens
  misc_RNA (1)...(19): siRNA sense strand
agaaguccaugcuagacaa

SEQ ID NO: 748082 - RNA, 19 nt, Homo sapiens
  misc_RNA (1)...(19): siRNA sense strand
gggcagaaaguugaucauu

SEQ ID NO: 748083 - RNA, 19 nt, Homo sapiens
  misc_RNA (1)...(19): siRNA sense strand
cuucuggaauccugguuaa

SEQ ID NO: 748084 - RNA, 19 nt, Homo sapiens
  misc_RNA (1)...(19): siRNA sense strand
gaaguccaugcuagacaaa

SEQ ID NO: 748085 - RNA, 19 nt, Homo sapiens
  misc_RNA (1)...(19): siRNA sense strand
uuacgaacucugaaacuga

SEQ ID NO: 748086 - RNA, 19 nt, Homo sapiens
  misc_RNA (1)...(19): siRNA sense strand
gucauuugcuggcuuugug

SEQ ID NO: 748087 - RNA, 19 nt, Homo sapiens
  misc_RNA (1)...(19): siRNA sense strand
gccuggaacuccugacaca

SEQ ID NO: 748088 - RNA, 19 nt, Homo sapiens
  misc_RNA (1)...(19): siRNA sense strand
gagaacgugaccuugaaga

SEQ ID NO: 748089 - RNA, 19 nt, Homo sapiens
  misc_RNA (1)...(19): siRNA sense strand
cuggaauccugguuaaugu

SEQ ID NO: 748090 - RNA, 19 nt, Homo sapiens
  misc_RNA (1)...(19): siRNA sense strand
gaggaggaagacauucuga

SEQ ID NO: 748091 - RNA, 19 nt, Homo sapiens
  misc_RNA (1)...(19): siRNA sense strand
ucacugcaaaccacaagaa

SEQ ID NO: 748092 - RNA, 19 nt, Homo sapiens
  misc_RNA (1)...(19): siRNA sense strand
gaacucugaaacugagaug

SEQ ID NO: 748093 - RNA, 19 nt, Homo sapiens
  misc_RNA (1)...(19): siRNA sense strand
acaagaaguccaugcuaga

SEQ ID NO: 748094 - RNA, 19 nt, Homo sapiens
  misc_RNA (1)...(19): siRNA sense strand
aaggaaugcuagaaguguu

SEQ ID NO: 748095 - RNA, 19 nt, Homo sapiens
  misc_RNA (1)...(19): siRNA sense strand
ugacaaaaccaacgucuug

SEQ ID NO: 748096 - RNA, 19 nt, Homo sapiens
  misc_RNA (1)...(19): siRNA sense strand
ugcuagaaguguuuagaga

SEQ ID NO: 748097 - RNA, 19 nt, Homo sapiens
  misc_RNA (1)...(19): siRNA sense strand
ggaggaggaagacauucug

SEQ ID NO: 748098 - RNA, 19 nt, Homo sapiens
  misc_RNA (1)...(19): siRNA sense strand
ucgagcuccugaucugaaa

SEQ ID NO: 748099 - RNA, 19 nt, Homo sapiens
  misc_RNA (1)...(19): siRNA sense strand
guuucgagcuccugaucug

SEQ ID NO: 748100 - RNA, 19 nt, Homo sapiens
  misc_RNA (1)...(19): siRNA sense strand
ugaaaagccuuacgaacuc

SEQ ID NO: 748101 - RNA, 19 nt, Homo sapiens
  misc_RNA (1)...(19): siRNA sense strand
gaggaagacauucugaaaa

SEQ ID NO: 748102 - RNA, 19 nt, Homo sapiens
  misc_RNA (1)...(19): siRNA sense strand
aaggucauuugcuggcuuu

SEQ ID NO: 748103 - RNA, 19 nt, Homo sapiens
  misc_RNA (1)...(19): siRNA sense strand
caagcaugccucacugcaa

SEQ ID NO: 748104 - RNA, 19 nt, Homo sapiens
  misc_RNA (1)...(19): siRNA sense strand
gcagacccagucccugaga

SEQ ID NO: 748105 - RNA, 19 nt, Homo sapiens
  misc_RNA (1)...(19): siRNA sense strand
gcuucuggaauccugguua

SEQ ID NO: 748106 - RNA, 19 nt, Homo sapiens
  misc_RNA (1)...(19): siRNA sense strand
cuggaagacucaaauacag

SEQ ID NO: 748107 - RNA, 19 nt, Homo sapiens
  misc_RNA (1)...(19): siRNA sense strand
ccuggaagacucaaauaca

SEQ ID NO: 748108 - RNA, 19 nt, Homo sapiens
  misc_RNA (1)...(19): siRNA sense strand
gaaacuucuacucuucugu

SEQ ID NO: 748109 - RNA, 19 nt, Homo sapiens
  misc_RNA (1)...(19): siRNA sense strand
aaaggaaugcuagaagugu

SEQ ID NO: 748110 - RNA, 19 nt, Homo sapiens
  misc_RNA (1)...(19): siRNA sense strand
ggacugggaggagagcaau

SEQ ID NO: 748111 - RNA, 19 nt, Homo sapiens
  misc_RNA (1)...(19): siRNA sense strand
uggagaugcugaggcagaa

SEQ ID NO: 748112 - RNA, 19 nt, Homo sapiens
  misc_RNA (1)...(19): siRNA sense strand
guuaccagccugagaacau

SEQ ID NO: 748113 - RNA, 19 nt, Homo sapiens
  misc_RNA (1)...(19): siRNA sense strand
ggaggacgggaaggucauu

SEQ ID NO: 748114 - RNA, 19 nt, Homo sapiens
  misc_RNA (1)...(19): siRNA sense strand
agaacgugaccuugaagaa

SEQ ID NO: 748115 - RNA, 19 nt, Homo sapiens
  misc_RNA (1)...(19): siRNA sense strand
ggagaacgugaccuugaag

SEQ ID NO: 748116 - RNA, 19 nt, Homo sapiens
  misc_RNA (1)...(19): siRNA sense strand
ugcaaaaccuggagaagga

SEQ ID NO: 748117 - RNA, 19 nt, Homo sapiens
  misc_RNA (1)...(19): siRNA sense strand
cugcaaaccacaagaaguc

SEQ ID NO: 748118 - RNA, 19 nt, Homo sapiens
  misc_RNA (1)...(19): siRNA sense strand
ggacgggaaggucauuugc

SEQ ID NO: 748119 - RNA, 19 nt, Homo sapiens
  misc_RNA (1)...(19): siRNA sense strand
cugagaacauacggccuaa

SEQ ID NO: 748120 - RNA, 19 nt, Homo sapiens
  misc_RNA (1)...(19): siRNA sense strand
uggagaaggaggaggaaga

SEQ ID NO: 748121 - RNA, 19 nt, Homo sapiens
  misc_RNA (1)...(19): siRNA sense strand
ucuggaauccugguuaaug

SEQ ID NO: 748122 - RNA, 19 nt, Homo sapiens
  misc_RNA (1)...(19): siRNA sense strand
cuuacgaacucugaaacug

SEQ ID NO: 748123 - RNA, 19 nt, Homo sapiens
  misc_RNA (1)...(19): siRNA sense strand
gcaggaagcugaagaguug

SEQ ID NO: 748124 - RNA, 19 nt, Homo sapiens
  misc_RNA (1)...(19): siRNA sense strand
gcagaaaguugaucauugu

SEQ ID NO: 748125 - RNA, 19 nt, Homo sapiens
  misc_RNA (1)...(19): siRNA sense strand
gagaguagcugcccugugu

SEQ ID NO: 748126 - RNA, 19 nt, Homo sapiens
  misc_RNA (1)...(19): siRNA sense strand
ugaagaagccagaaacuuu

SEQ ID NO: 748127 - RNA, 19 nt, Homo sapiens
  misc_RNA (1)...(19): siRNA sense strand
uuagagagcugacagaugu

SEQ ID NO: 748128 - RNA, 19 nt, Homo sapiens
  misc_RNA (1)...(19): siRNA sense strand
ggcagaaaguugaucauug

SEQ ID NO: 748129 - RNA, 19 nt, Homo sapiens
  misc_RNA (1)...(19): siRNA sense strand
ggaggaagacauucugaaa

SEQ ID NO: 748130 - RNA, 19 nt, Homo sapiens
  misc_RNA (1)...(19): siRNA sense strand
ggaagacucaaauacagua

SEQ ID NO: 748131 - RNA, 19 nt, Homo sapiens
  misc_RNA (1)...(19): siRNA sense strand
gaaggaggaggaagacauu

SEQ ID NO: 748132 - RNA, 19 nt, Homo sapiens
  misc_RNA (1)...(19): siRNA sense strand
gaaaggaaugcuagaagug

SEQ ID NO: 748133 - RNA, 19 nt, Homo sapiens
  misc_RNA (1)...(19): siRNA sense strand
ggguguggauggcgucaua

SEQ ID NO: 748134 - RNA, 19 nt, Homo sapiens
  misc_RNA (1)...(19): siRNA sense strand
ggaauccugguuaauguaa

SEQ ID NO: 748135 - RNA, 19 nt, Homo sapiens
  misc_RNA (1)...(19): siRNA sense strand
aagcaugccucacugcaaa

SEQ ID NO: 748136 - RNA, 19 nt, Homo sapiens
  misc_RNA (1)...(19): siRNA sense strand
ugaaaggaaugcuagaagu

SEQ ID NO: 748137 - RNA, 19 nt, Homo sapiens
  misc_RNA (1)...(19): siRNA sense strand
gagaacauacggccuaauc

SEQ ID NO: 748138 - RNA, 19 nt, Homo sapiens
  misc_RNA (1)...(19): siRNA sense strand
ggacggagaacgugaccuu

SEQ ID NO: 748139 - RNA, 19 nt, Homo sapiens
  misc_RNA (1)...(19): siRNA sense strand
ggagagcaaugagcugcaa

SEQ ID NO: 748140 - RNA, 19 nt, Homo sapiens
  misc_RNA (1)...(19): siRNA sense strand
gaauccugguuaauguaaa

SEQ ID NO: 748141 - RNA, 19 nt, Homo sapiens
  misc_RNA (1)...(19): siRNA sense strand
gaacgugaccuugaagaag

SEQ ID NO: 748142 - RNA, 19 nt, Homo sapiens
  misc_RNA (1)...(19): siRNA sense strand
uuaccagccugagaacaua

SEQ ID NO: 748143 - RNA, 19 nt, Homo sapiens
  misc_RNA (1)...(19): siRNA sense strand
cggagaacgugaccuugaa

SEQ ID NO: 748144 - RNA, 19 nt, Homo sapiens
  misc_RNA (1)...(19): siRNA sense strand
gcaaugagcugcaaaaccu

SEQ ID NO: 748145 - RNA, 19 nt, Homo sapiens
  misc_RNA (1)...(19): siRNA sense strand
gcucagggaggucaaguug

SEQ ID NO: 748146 - RNA, 19 nt, Homo sapiens
  misc_RNA (1)...(19): siRNA sense strand
gaagaagccagaaacuuuu

SEQ ID NO: 748147 - RNA, 19 nt, Homo sapiens
  misc_RNA (1)...(19): siRNA sense strand
gcccaggaguaccaaguga

SEQ ID NO: 748148 - RNA, 19 nt, Homo sapiens
  misc_RNA (1)...(19): siRNA sense strand
ggaaugcuagaaguguuua

SEQ ID NO: 748149 - RNA, 19 nt, Homo sapiens
  misc_RNA (1)...(19): siRNA sense strand
ugacaucagagaagagaaa

SEQ ID NO: 748150 - RNA, 19 nt, Homo sapiens
  misc_RNA (1)...(19): siRNA sense strand
ccacaagaaguccaugcua

SEQ ID NO: 748151 - RNA, 19 nt, Homo sapiens
  misc_RNA (1)...(19): siRNA sense strand
agaaguccaugcuagacaa

SEQ ID NO: 748152 - RNA, 19 nt, Homo sapiens
  misc_RNA (1)...(19): siRNA sense strand
gggcagaaaguugaucauu

SEQ ID NO: 748153 - RNA, 19 nt, Homo sapiens
  misc_RNA (1)...(19): siRNA sense strand
cuucuggaauccugguuaa

SEQ ID NO: 748154 - RNA, 19 nt, Homo sapiens
  misc_RNA (1)...(19): siRNA sense strand
gaaguccaugcuagacaaa

SEQ ID NO: 748155 - RNA, 19 nt, Homo sapiens
  misc_RNA (1)...(19): siRNA sense strand
uuacgaacucugaaacuga

SEQ ID NO: 748156 - RNA, 19 nt, Homo sapiens
  misc_RNA (1)...(19): siRNA sense strand
gucauuugcuggcuuugug

SEQ ID NO: 748157 - RNA, 19 nt, Homo sapiens
  misc_RNA (1)...(19): siRNA sense strand
gccuggaacuccugacaca

SEQ ID NO: 748158 - RNA, 19 nt, Homo sapiens
  misc_RNA (1)...(19): siRNA sense strand
gagaacgugaccuugaaga

SEQ ID NO: 748159 - RNA, 19 nt, Homo sapiens
  misc_RNA (1)...(19): siRNA sense strand
cuggaauccugguuaaugu

SEQ ID NO: 748160 - RNA, 19 nt, Homo sapiens
  misc_RNA (1)...(19): siRNA sense strand
gaggaggaagacauucuga

SEQ ID NO: 748161 - RNA, 19 nt, Homo sapiens
  misc_RNA (1)...(19): siRNA sense strand
ucacugcaaaccacaagaa

SEQ ID NO: 748162 - RNA, 19 nt, Homo sapiens
  misc_RNA (1)...(19): siRNA sense strand
gaacucugaaacugagaug

SEQ ID NO: 748163 - RNA, 19 nt, Homo sapiens
  misc_RNA (1)...(19): siRNA sense strand
acaagaaguccaugcuaga

SEQ ID NO: 748164 - RNA, 19 nt, Homo sapiens
  misc_RNA (1)...(19): siRNA sense strand
aaggaaugcuagaaguguu

SEQ ID NO: 748165 - RNA, 19 nt, Homo sapiens
  misc_RNA (1)...(19): siRNA sense strand
ugacaaaaccaacgucuug

SEQ ID NO: 748166 - RNA, 19 nt, Homo sapiens
  misc_RNA (1)...(19): siRNA sense strand
ugcuagaaguguuuagaga

SEQ ID NO: 748167 - RNA, 19 nt, Homo sapiens
  misc_RNA (1)...(19): siRNA sense strand
ggaggaggaagacauucug

SEQ ID NO: 748168 - RNA, 19 nt, Homo sapiens
  misc_RNA (1)...(19): siRNA sense strand
ucgagcuccugaucugaaa

SEQ ID NO: 748169 - RNA, 19 nt, Homo sapiens
  misc_RNA (1)...(19): siRNA sense strand
guuucgagcuccugaucug

SEQ ID NO: 748170 - RNA, 19 nt, Homo sapiens
  misc_RNA (1)...(19): siRNA sense strand
ugaaaagccuuacgaacuc

SEQ ID NO: 748171 - RNA, 19 nt, Homo sapiens
  misc_RNA (1)...(19): siRNA sense strand
gaggaagacauucugaaaa

SEQ ID NO: 748172 - RNA, 19 nt, Homo sapiens
  misc_RNA (1)...(19): siRNA sense strand
aaggucauuugcuggcuuu

SEQ ID NO: 748173 - RNA, 19 nt, Homo sapiens
  misc_RNA (1)...(19): siRNA sense strand
caagcaugccucacugcaa

SEQ ID NO: 748174 - RNA, 19 nt, Homo sapiens
  misc_RNA (1)...(19): siRNA sense strand
gcagacccagucccugaga

SEQ ID NO: 748175 - RNA, 19 nt, Homo sapiens
  misc_RNA (1)...(19): siRNA sense strand
gcuucuggaauccugguua

SEQ ID NO: 748176 - RNA, 19 nt, Homo sapiens
  misc_RNA (1)...(19): siRNA sense strand
cuggaagacucaaauacag

SEQ ID NO: 748177 - RNA, 19 nt, Homo sapiens
  misc_RNA (1)...(19): siRNA sense strand
ccuggaagacucaaauaca

SEQ ID NO: 748178 - RNA, 19 nt, Homo sapiens
  misc_RNA (1)...(19): siRNA sense strand
gaaacuucuacucuucugu

SEQ ID NO: 748179 - RNA, 19 nt, Homo sapiens
  misc_RNA (1)...(19): siRNA sense strand
aaaggaaugcuagaagugu

SEQ ID NO: 748180 - RNA, 19 nt, Homo sapiens
  misc_RNA (1)...(19): siRNA sense strand
ggacugggaggagagcaau

SEQ ID NO: 748181 - RNA, 19 nt, Homo sapiens
  misc_RNA (1)...(19): siRNA sense strand
uggagaugcugaggcagaa

SEQ ID NO: 748182 - RNA, 19 nt, Homo sapiens
  misc_RNA (1)...(19): siRNA sense strand
guuaccagccugagaacau

SEQ ID NO: 748183 - RNA, 19 nt, Homo sapiens
  misc_RNA (1)...(19): siRNA sense strand
ggaggacgggaaggucauu

SEQ ID NO: 748184 - RNA, 19 nt, Homo sapiens
  misc_RNA (1)...(19): siRNA sense strand
agaacgugaccuugaagaa

SEQ ID NO: 748185 - RNA, 19 nt, Homo sapiens
  misc_RNA (1)...(19): siRNA sense strand
ggagaacgugaccuugaag

SEQ ID NO: 748186 - RNA, 19 nt, Homo sapiens
  misc_RNA (1)...(19): siRNA sense strand
ugcaaaaccuggagaagga

SEQ ID NO: 748187 - RNA, 19 nt, Homo sapiens
  misc_RNA (1)...(19): siRNA sense strand
cugcaaaccacaagaaguc

SEQ ID NO: 748188 - RNA, 19 nt, Homo sapiens
  misc_RNA (1)...(19): siRNA sense strand
ggacgggaaggucauuugc

SEQ ID NO: 748189 - RNA, 19 nt, Homo sapiens
  misc_RNA (1)...(19): siRNA sense strand
cugagaacauacggccuaa

SEQ ID NO: 748190 - RNA, 19 nt, Homo sapiens
  misc_RNA (1)...(19): siRNA sense strand
uggagaaggaggaggaaga

SEQ ID NO: 748191 - RNA, 19 nt, Homo sapiens
  misc_RNA (1)...(19): siRNA sense strand
ucuggaauccugguuaaug

SEQ ID NO: 748192 - RNA, 19 nt, Homo sapiens
  misc_RNA (1)...(19): siRNA sense strand
cuuacgaacucugaaacug

SEQ ID NO: 748193 - RNA, 19 nt, Homo sapiens
  misc_RNA (1)...(19): siRNA sense strand
ggauacagcuaguguuuga

SEQ ID NO: 748194 - RNA, 19 nt, Homo sapiens
  misc_RNA (1)...(19): siRNA sense strand
gaaaccaguaccauuauua

SEQ ID NO: 748195 - RNA, 19 nt, Homo sapiens
  misc_RNA (1)...(19): siRNA sense strand
uggaagaucugcucaagua

SEQ ID NO: 748196 - RNA, 19 nt, Homo sapiens
  misc_RNA (1)...(19): siRNA sense strand
aaaccuggauucaagauuu

SEQ ID NO: 748197 - RNA, 19 nt, Homo sapiens
  misc_RNA (1)...(19): siRNA sense strand
gaauuacucggucaauaua

SEQ ID NO: 748198 - RNA, 19 nt, Homo sapiens
  misc_RNA (1)...(19): siRNA sense strand
gcgcauccaucaaagcuuu

SEQ ID NO: 748199 - RNA, 19 nt, Homo sapiens
  misc_RNA (1)...(19): siRNA sense strand
ggaauuacucggucaauau

SEQ ID NO: 748200 - RNA, 19 nt, Homo sapiens
  misc_RNA (1)...(19): siRNA sense strand
gcagagcgcauccaucaaa

SEQ ID NO: 748201 - RNA, 19 nt, Homo sapiens
  misc_RNA (1)...(19): siRNA sense strand
caagaacgaaccaaauuaa

SEQ ID NO: 748202 - RNA, 19 nt, Homo sapiens
  misc_RNA (1)...(19): siRNA sense strand
gaagauauauccgaaacca

SEQ ID NO: 748203 - RNA, 19 nt, Homo sapiens
  misc_RNA (1)...(19): siRNA sense strand
cuauaacucuccaucagua

SEQ ID NO: 748204 - RNA, 19 nt, Homo sapiens
  misc_RNA (1)...(19): siRNA sense strand
guacuucaauccagaguca

SEQ ID NO: 748205 - RNA, 19 nt, Homo sapiens
  misc_RNA (1)...(19): siRNA sense strand
uggauaggcucaaugauga

SEQ ID NO: 748206 - RNA, 19 nt, Homo sapiens
  misc_RNA (1)...(19): siRNA sense strand
ucaagaacgaaccaaauua

SEQ ID NO: 748207 - RNA, 19 nt, Homo sapiens
  misc_RNA (1)...(19): siRNA sense strand
uguggaaguugaagauaua

SEQ ID NO: 748208 - RNA, 19 nt, Homo sapiens
  misc_RNA (1)...(19): siRNA sense strand
ccaguuggaucaccaugaa

SEQ ID NO: 748209 - RNA, 19 nt, Homo sapiens
  misc_RNA (1)...(19): siRNA sense strand
caugaacgaugugauugua

SEQ ID NO: 748210 - RNA, 19 nt, Homo sapiens
  misc_RNA (1)...(19): siRNA sense strand
aaugauaucuguagguaug

SEQ ID NO: 748211 - RNA, 19 nt, Homo sapiens
  misc_RNA (1)...(19): siRNA sense strand
cgaaaccaguaccauuauu

SEQ ID NO: 748212 - RNA, 19 nt, Homo sapiens
  misc_RNA (1)...(19): siRNA sense strand
gagcugaaguuggccaaug

SEQ ID NO: 748213 - RNA, 19 nt, Homo sapiens
  misc_RNA (1)...(19): siRNA sense strand
gauuguaucugcagcucaa

SEQ ID NO: 748214 - RNA, 19 nt, Homo sapiens
  misc_RNA (1)...(19): siRNA sense strand
ggaaccugcuccugacaug

SEQ ID NO: 748215 - RNA, 19 nt, Homo sapiens
  misc_RNA (1)...(19): siRNA sense strand
caugagguauuacaguuug

SEQ ID NO: 748216 - RNA, 19 nt, Homo sapiens
  misc_RNA (1)...(19): siRNA sense strand
gaccauggcucuaguugac

SEQ ID NO: 748217 - RNA, 19 nt, Homo sapiens
  misc_RNA (1)...(19): siRNA sense strand
uaagagaagagcugaaguu

SEQ ID NO: 748218 - RNA, 19 nt, Homo sapiens
  misc_RNA (1)...(19): siRNA sense strand
gcucaagaccaccucgaua

SEQ ID NO: 748219 - RNA, 19 nt, Homo sapiens
  misc_RNA (1)...(19): siRNA sense strand
gugcagcgcuguggaggaa

SEQ ID NO: 748220 - RNA, 19 nt, Homo sapiens
  misc_RNA (1)...(19): siRNA sense strand
aaccuggauucaagauuua

SEQ ID NO: 748221 - RNA, 19 nt, Homo sapiens
  misc_RNA (1)...(19): siRNA sense strand
ucaggagaauacacggaua

SEQ ID NO: 748222 - RNA, 19 nt, Homo sapiens
  misc_RNA (1)...(19): siRNA sense strand
gaagaucuugagaauaugu

SEQ ID NO: 748223 - RNA, 19 nt, Homo sapiens
  misc_RNA (1)...(19): siRNA sense strand
ggcuaaaccuggauucaag

SEQ ID NO: 748224 - RNA, 19 nt, Homo sapiens
  misc_RNA (1)...(19): siRNA sense strand
gcagcgcuguggaggaaau

SEQ ID NO: 748225 - RNA, 19 nt, Homo sapiens
  misc_RNA (1)...(19): siRNA sense strand
uaacggaucccacucugau

SEQ ID NO: 748226 - RNA, 19 nt, Homo sapiens
  misc_RNA (1)...(19): siRNA sense strand
cauggcggcuucacucuca

SEQ ID NO: 748227 - RNA, 19 nt, Homo sapiens
  misc_RNA (1)...(19): siRNA sense strand
ugaacgaugugauuguauc

SEQ ID NO: 748228 - RNA, 19 nt, Homo sapiens
  misc_RNA (1)...(19): siRNA sense strand
ggaaauuguggcuguggaa

SEQ ID NO: 748229 - RNA, 19 nt, Homo sapiens
  misc_RNA (1)...(19): siRNA sense strand
aggaauuacucggucaaua

SEQ ID NO: 748230 - RNA, 19 nt, Homo sapiens
  misc_RNA (1)...(19): siRNA sense strand
uccgaaaccaguaccauua

SEQ ID NO: 748231 - RNA, 19 nt, Homo sapiens
  misc_RNA (1)...(19): siRNA sense strand
gauauauccgaaaccagua

SEQ ID NO: 748232 - RNA, 19 nt, Homo sapiens
  misc_RNA (1)...(19): siRNA sense strand
ggaucaccaugaacgaugu

SEQ ID NO: 748233 - RNA, 19 nt, Homo sapiens
  misc_RNA (1)...(19): siRNA sense strand
cacaugcaauucagggaaa

SEQ ID NO: 748234 - RNA, 19 nt, Homo sapiens
  misc_RNA (1)...(19): siRNA sense strand
agaauuugauacaguggaa

SEQ ID NO: 748235 - RNA, 19 nt, Homo sapiens
  misc_RNA (1)...(19): siRNA sense strand
gaauacacggauacagcua

SEQ ID NO: 748236 - RNA, 19 nt, Homo sapiens
  misc_RNA (1)...(19): siRNA sense strand
ccgcagagcgcauccauca

SEQ ID NO: 748237 - RNA, 19 nt, Homo sapiens
  misc_RNA (1)...(19): siRNA sense strand
ucuaaucugcgcaaacuuu

SEQ ID NO: 748238 - RNA, 19 nt, Homo sapiens
  misc_RNA (1)...(19): siRNA sense strand
gaccggaagucaaaaguug

SEQ ID NO: 748239 - RNA, 19 nt, Homo sapiens
  misc_RNA (1)...(19): siRNA sense strand
ccauccaggugaaaggaaa

SEQ ID NO: 748240 - RNA, 19 nt, Homo sapiens
  misc_RNA (1)...(19): siRNA sense strand
caacugggaaucugucaca

SEQ ID NO: 748241 - RNA, 19 nt, Homo sapiens
  misc_RNA (1)...(19): siRNA sense strand
gagccuggccacaucaaga

SEQ ID NO: 748242 - RNA, 19 nt, Homo sapiens
  misc_RNA (1)...(19): siRNA sense strand
gaagaucugcucaaguacu

SEQ ID NO: 748243 - RNA, 19 nt, Homo sapiens
  misc_RNA (1)...(19): siRNA sense strand
gcucaucuuugucuacacu

SEQ ID NO: 748244 - RNA, 19 nt, Homo sapiens
  misc_RNA (1)...(19): siRNA sense strand
aagaucugcucaaguacuu

SEQ ID NO: 748245 - RNA, 19 nt, Homo sapiens
  misc_RNA (1)...(19): siRNA sense strand
gaaucugucacaagcucua

SEQ ID NO: 748246 - RNA, 19 nt, Homo sapiens
  misc_RNA (1)...(19): siRNA sense strand
caccaugaacgaugugauu

SEQ ID NO: 748247 - RNA, 19 nt, Homo sapiens
  misc_RNA (1)...(19): siRNA sense strand
gcuaagaccauggcucuag

SEQ ID NO: 748248 - RNA, 19 nt, Homo sapiens
  misc_RNA (1)...(19): siRNA sense strand
ugacuacuuuguggcuaaa

SEQ ID NO: 748249 - RNA, 19 nt, Homo sapiens
  misc_RNA (1)...(19): siRNA sense strand
cucaagaccaccucgauaa

SEQ ID NO: 748250 - RNA, 19 nt, Homo sapiens
  misc_RNA (1)...(19): siRNA sense strand
guugcacucccaggaauua

SEQ ID NO: 748251 - RNA, 19 nt, Homo sapiens
  misc_RNA (1)...(19): siRNA sense strand
gagaccaacugggaaucug

SEQ ID NO: 748252 - RNA, 19 nt, Homo sapiens
  misc_RNA (1)...(19): siRNA sense strand
ccagagucauggcaagaag

SEQ ID NO: 748253 - RNA, 19 nt, Homo sapiens
  misc_RNA (1)...(19): siRNA sense strand
gucacaagcucuauuucag

SEQ ID NO: 748254 - RNA, 19 nt, Homo sapiens
  misc_RNA (1)...(19): siRNA sense strand
gaacgaugugauuguaucu

SEQ ID NO: 748255 - RNA, 19 nt, Homo sapiens
  misc_RNA (1)...(19): siRNA sense strand
gcuaaaccuggauucaaga

SEQ ID NO: 748256 - RNA, 19 nt, Homo sapiens
  misc_RNA (1)...(19): siRNA sense strand
cuagauucccgaacagcua

SEQ ID NO: 748257 - RNA, 19 nt, Homo sapiens
  misc_RNA (1)...(19): siRNA sense strand
gaucugcucaaguacuuca

SEQ ID NO: 748258 - RNA, 19 nt, Homo sapiens
  misc_RNA (1)...(19): siRNA sense strand
cagcuaguguuugacaauc

SEQ ID NO: 748259 - RNA, 19 nt, Homo sapiens
  misc_RNA (1)...(19): siRNA sense strand
cuaagaccauggcucuagu

SEQ ID NO: 748260 - RNA, 19 nt, Homo sapiens
  misc_RNA (1)...(19): siRNA sense strand
uugcagaauuugauacagu

SEQ ID NO: 748261 - RNA, 19 nt, Homo sapiens
  misc_RNA (1)...(19): siRNA sense strand
ucacauucaaguccgauga

SEQ ID NO: 748262 - RNA, 19 nt, Homo sapiens
  misc_RNA (1)...(19): siRNA sense strand
uggauuagaggaagcagaa

SEQ ID NO: 748263 - RNA, 19 nt, Homo sapiens
  misc_RNA (1)...(19): siRNA sense strand
ccaauguggucuucuuucc

SEQ ID NO: 748264 - RNA, 19 nt, Homo sapiens
  misc_RNA (1)...(19): siRNA sense strand
cuggauaggcucaaugaug

SEQ ID NO: 748265 - RNA, 19 nt, Homo sapiens
  misc_RNA (1)...(19): siRNA sense strand
guaacggaucccacucuga

SEQ ID NO: 748266 - RNA, 19 nt, Homo sapiens
  misc_RNA (1)...(19): siRNA sense strand
aaucaagaacgaaccaaau

SEQ ID NO: 748267 - RNA, 19 nt, Homo sapiens
  misc_RNA (1)...(19): siRNA sense strand
aaaccaguaccauuauuag

SEQ ID NO: 748268 - RNA, 19 nt, Homo sapiens
  misc_RNA (1)...(19): siRNA sense strand
ggaaguugaagauauaucc

SEQ ID NO: 748269 - RNA, 19 nt, Homo sapiens
  misc_RNA (1)...(19): siRNA sense strand
gauaucuguagguaugauu

SEQ ID NO: 748270 - RNA, 19 nt, Homo sapiens
  misc_RNA (1)...(19): siRNA sense strand
aguccuagauucccgaaca

SEQ ID NO: 748271 - RNA, 19 nt, Homo sapiens
  misc_RNA (1)...(19): siRNA sense strand
caguugcacucccaggaau

SEQ ID NO: 748272 - RNA, 19 nt, Homo sapiens
  misc_RNA (1)...(19): siRNA sense strand
augaugaugccaagcguua

SEQ ID NO: 748273 - RNA, 19 nt, Homo sapiens
  misc_RNA (1)...(19): siRNA sense strand
gaugaugccaagcguuaca

SEQ ID NO: 748274 - RNA, 19 nt, Homo sapiens
  misc_RNA (1)...(19): siRNA sense strand
ucaugagguauuacaguuu

SEQ ID NO: 748275 - RNA, 19 nt, Homo sapiens
  misc_RNA (1)...(19): siRNA sense strand
ggccaauguggucuucuuu

SEQ ID NO: 748276 - RNA, 19 nt, Homo sapiens
  misc_RNA (1)...(19): siRNA sense strand
uuguggaaguugaagauau

SEQ ID NO: 748277 - RNA, 19 nt, Homo sapiens
  misc_RNA (1)...(19): siRNA sense strand
gaugccaagcguuacaguu

SEQ ID NO: 748278 - RNA, 19 nt, Homo sapiens
  misc_RNA (1)...(19): siRNA sense strand
ugucacaagcucuauuuca

SEQ ID NO: 748279 - RNA, 19 nt, Homo sapiens
  misc_RNA (1)...(19): siRNA sense strand
acggauacagcuaguguuu

SEQ ID NO: 748280 - RNA, 19 nt, Homo sapiens
  misc_RNA (1)...(19): siRNA sense strand
aaaucaagaacgaaccaaa

SEQ ID NO: 748281 - RNA, 19 nt, Homo sapiens
  misc_RNA (1)...(19): siRNA sense strand
ccgaaaccaguaccauuau

SEQ ID NO: 748282 - RNA, 19 nt, Homo sapiens
  misc_RNA (1)...(19): siRNA sense strand
uuucagggguauccuauaa

SEQ ID NO: 748283 - RNA, 19 nt, Homo sapiens
  misc_RNA (1)...(19): siRNA sense strand
cagagcgcauccaucaaag

SEQ ID NO: 748284 - RNA, 19 nt, Homo sapiens
  misc_RNA (1)...(19): siRNA sense strand
gcuaguguuugacaaucag

SEQ ID NO: 748285 - RNA, 19 nt, Homo sapiens
  misc_RNA (1)...(19): siRNA sense strand
uggccaauguggucuucuu

SEQ ID NO: 748286 - RNA, 19 nt, Homo sapiens
  misc_RNA (1)...(19): siRNA sense strand
gccaagcguuacaguugca

SEQ ID NO: 748287 - RNA, 19 nt, Homo sapiens
  misc_RNA (1)...(19): siRNA sense strand
gauaggcucaaugaugaug

SEQ ID NO: 748288 - RNA, 19 nt, Homo sapiens
  misc_RNA (1)...(19): siRNA sense strand
gcucaaguacuucaaucca

SEQ ID NO: 748289 - RNA, 19 nt, Homo sapiens
  misc_RNA (1)...(19): siRNA sense strand
aucaugagguauuacaguu

SEQ ID NO: 748290 - RNA, 19 nt, Homo sapiens
  misc_RNA (1)...(19): siRNA sense strand
acucuaaucugcgcaaacu

SEQ ID NO: 748291 - RNA, 19 nt, Homo sapiens
  misc_RNA (1)...(19): siRNA sense strand
ccauggcucuaguugacau

SEQ ID NO: 748292 - RNA, 19 nt, Homo sapiens
  misc_RNA (1)...(19): siRNA sense strand
guuugagccuggccacauc

SEQ ID NO: 748293 - RNA, 19 nt, Homo sapiens
  misc_RNA (1)...(19): siRNA sense strand
ggauacagcuaguguuuga

SEQ ID NO: 748294 - RNA, 19 nt, Homo sapiens
  misc_RNA (1)...(19): siRNA sense strand
gaaaccaguaccauuauua

SEQ ID NO: 748295 - RNA, 19 nt, Homo sapiens
  misc_RNA (1)...(19): siRNA sense strand
uggaagaucugcucaagua

SEQ ID NO: 748296 - RNA, 19 nt, Homo sapiens
  misc_RNA (1)...(19): siRNA sense strand
aaaccuggauucaagauuu

SEQ ID NO: 748297 - RNA, 19 nt, Homo sapiens
  misc_RNA (1)...(19): siRNA sense strand
gaauuacucggucaauaua

SEQ ID NO: 748298 - RNA, 19 nt, Homo sapiens
  misc_RNA (1)...(19): siRNA sense strand
gcgcauccaucaaagcuuu

SEQ ID NO: 748299 - RNA, 19 nt, Homo sapiens
  misc_RNA (1)...(19): siRNA sense strand
ggaauuacucggucaauau

SEQ ID NO: 748300 - RNA, 19 nt, Homo sapiens
  misc_RNA (1)...(19): siRNA sense strand
gcagagcgcauccaucaaa

SEQ ID NO: 748301 - RNA, 19 nt, Homo sapiens
  misc_RNA (1)...(19): siRNA sense strand
caagaacgaaccaaauuaa

SEQ ID NO: 748302 - RNA, 19 nt, Homo sapiens
  misc_RNA (1)...(19): siRNA sense strand
gaagauauauccgaaacca

SEQ ID NO: 748303 - RNA, 19 nt, Homo sapiens
  misc_RNA (1)...(19): siRNA sense strand
cuauaacucuccaucagua

SEQ ID NO: 748304 - RNA, 19 nt, Homo sapiens
  misc_RNA (1)...(19): siRNA sense strand
guacuucaauccagaguca

SEQ ID NO: 748305 - RNA, 19 nt, Homo sapiens
  misc_RNA (1)...(19): siRNA sense strand
uggauaggcucaaugauga

SEQ ID NO: 748306 - RNA, 19 nt, Homo sapiens
  misc_RNA (1)...(19): siRNA sense strand
ucaagaacgaaccaaauua

SEQ ID NO: 748307 - RNA, 19 nt, Homo sapiens
  misc_RNA (1)...(19): siRNA sense strand
uguggaaguugaagauaua

SEQ ID NO: 748308 - RNA, 19 nt, Homo sapiens
  misc_RNA (1)...(19): siRNA sense strand
ccaguuggaucaccaugaa

SEQ ID NO: 748309 - RNA, 19 nt, Homo sapiens
  misc_RNA (1)...(19): siRNA sense strand
caugaacgaugugauugua

SEQ ID NO: 748310 - RNA, 19 nt, Homo sapiens
  misc_RNA (1)...(19): siRNA sense strand
aaugauaucuguagguaug

SEQ ID NO: 748311 - RNA, 19 nt, Homo sapiens
  misc_RNA (1)...(19): siRNA sense strand
cgaaaccaguaccauuauu

SEQ ID NO: 748312 - RNA, 19 nt, Homo sapiens
  misc_RNA (1)...(19): siRNA sense strand
gagcugaaguuggccaaug

SEQ ID NO: 748313 - RNA, 19 nt, Homo sapiens
  misc_RNA (1)...(19): siRNA sense strand
gauuguaucugcagcucaa

SEQ ID NO: 748314 - RNA, 19 nt, Homo sapiens
  misc_RNA (1)...(19): siRNA sense strand
ggaaccugcuccugacaug

SEQ ID NO: 748315 - RNA, 19 nt, Homo sapiens
  misc_RNA (1)...(19): siRNA sense strand
caugagguauuacaguuug

SEQ ID NO: 748316 - RNA, 19 nt, Homo sapiens
  misc_RNA (1)...(19): siRNA sense strand
gaccauggcucuaguugac

SEQ ID NO: 748317 - RNA, 19 nt, Homo sapiens
  misc_RNA (1)...(19): siRNA sense strand
uaagagaagagcugaaguu

SEQ ID NO: 748318 - RNA, 19 nt, Homo sapiens
  misc_RNA (1)...(19): siRNA sense strand
gcucaagaccaccucgaua

SEQ ID NO: 748319 - RNA, 19 nt, Homo sapiens
  misc_RNA (1)...(19): siRNA sense strand
gugcagcgcuguggaggaa

SEQ ID NO: 748320 - RNA, 19 nt, Homo sapiens
  misc_RNA (1)...(19): siRNA sense strand
aaccuggauucaagauuua

SEQ ID NO: 748321 - RNA, 19 nt, Homo sapiens
  misc_RNA (1)...(19): siRNA sense strand
ucaggagaauacacggaua

SEQ ID NO: 748322 - RNA, 19 nt, Homo sapiens
  misc_RNA (1)...(19): siRNA sense strand
gaagaucuugagaauaugu

SEQ ID NO: 748323 - RNA, 19 nt, Homo sapiens
  misc_RNA (1)...(19): siRNA sense strand
ggcuaaaccuggauucaag

SEQ ID NO: 748324 - RNA, 19 nt, Homo sapiens
  misc_RNA (1)...(19): siRNA sense strand
gcagcgcuguggaggaaau

SEQ ID NO: 748325 - RNA, 19 nt, Homo sapiens
  misc_RNA (1)...(19): siRNA sense strand
uaacggaucccacucugau

SEQ ID NO: 748326 - RNA, 19 nt, Homo sapiens
  misc_RNA (1)...(19): siRNA sense strand
cauggcggcuucacucuca

SEQ ID NO: 748327 - RNA, 19 nt, Homo sapiens
  misc_RNA (1)...(19): siRNA sense strand
ugaacgaugugauuguauc

SEQ ID NO: 748328 - RNA, 19 nt, Homo sapiens
  misc_RNA (1)...(19): siRNA sense strand
ggaaauuguggcuguggaa

SEQ ID NO: 748329 - RNA, 19 nt, Homo sapiens
  misc_RNA (1)...(19): siRNA sense strand
aggaauuacucggucaaua

SEQ ID NO: 748330 - RNA, 19 nt, Homo sapiens
  misc_RNA (1)...(19): siRNA sense strand
uccgaaaccaguaccauua

SEQ ID NO: 748331 - RNA, 19 nt, Homo sapiens
  misc_RNA (1)...(19): siRNA sense strand
gauauauccgaaaccagua

SEQ ID NO: 748332 - RNA, 19 nt, Homo sapiens
  misc_RNA (1)...(19): siRNA sense strand
ggaucaccaugaacgaugu

SEQ ID NO: 748333 - RNA, 19 nt, Homo sapiens
  misc_RNA (1)...(19): siRNA sense strand
cacaugcaauucagggaaa

SEQ ID NO: 748334 - RNA, 19 nt, Homo sapiens
  misc_RNA (1)...(19): siRNA sense strand
agaauuugauacaguggaa

SEQ ID NO: 748335 - RNA, 19 nt, Homo sapiens
  misc_RNA (1)...(19): siRNA sense strand
gaauacacggauacagcua

SEQ ID NO: 748336 - RNA, 19 nt, Homo sapiens
  misc_RNA (1)...(19): siRNA sense strand
ccgcagagcgcauccauca

SEQ ID NO: 748337 - RNA, 19 nt, Homo sapiens
  misc_RNA (1)...(19): siRNA sense strand
ucuaaucugcgcaaacuuu

SEQ ID NO: 748338 - RNA, 19 nt, Homo sapiens
  misc_RNA (1)...(19): siRNA sense strand
gaccggaagucaaaaguug

SEQ ID NO: 748339 - RNA, 19 nt, Homo sapiens
  misc_RNA (1)...(19): siRNA sense strand
ccauccaggugaaaggaaa

SEQ ID NO: 748340 - RNA, 19 nt, Homo sapiens
  misc_RNA (1)...(19): siRNA sense strand
caacugggaaucugucaca

SEQ ID NO: 748341 - RNA, 19 nt, Homo sapiens
  misc_RNA (1)...(19): siRNA sense strand
gagccuggccacaucaaga

SEQ ID NO: 748342 - RNA, 19 nt, Homo sapiens
  misc_RNA (1)...(19): siRNA sense strand
gaagaucugcucaaguacu

SEQ ID NO: 748343 - RNA, 19 nt, Homo sapiens
  misc_RNA (1)...(19): siRNA sense strand
gcucaucuuugucuacacu

SEQ ID NO: 748344 - RNA, 19 nt, Homo sapiens
  misc_RNA (1)...(19): siRNA sense strand
aagaucugcucaaguacuu

SEQ ID NO: 748345 - RNA, 19 nt, Homo sapiens
  misc_RNA (1)...(19): siRNA sense strand
gaaucugucacaagcucua

SEQ ID NO: 748346 - RNA, 19 nt, Homo sapiens
  misc_RNA (1)...(19): siRNA sense strand
caccaugaacgaugugauu

SEQ ID NO: 748347 - RNA, 19 nt, Homo sapiens
  misc_RNA (1)...(19): siRNA sense strand
gcuaagaccauggcucuag

SEQ ID NO: 748348 - RNA, 19 nt, Homo sapiens
  misc_RNA (1)...(19): siRNA sense strand
ugacuacuuuguggcuaaa

SEQ ID NO: 748349 - RNA, 19 nt, Homo sapiens
  misc_RNA (1)...(19): siRNA sense strand
cucaagaccaccucgauaa

SEQ ID NO: 748350 - RNA, 19 nt, Homo sapiens
  misc_RNA (1)...(19): siRNA sense strand
guugcacucccaggaauua

SEQ ID NO: 748351 - RNA, 19 nt, Homo sapiens
  misc_RNA (1)...(19): siRNA sense strand
gagaccaacugggaaucug

SEQ ID NO: 748352 - RNA, 19 nt, Homo sapiens
  misc_RNA (1)...(19): siRNA sense strand
ccagagucauggcaagaag

SEQ ID NO: 748353 - RNA, 19 nt, Homo sapiens
  misc_RNA (1)...(19): siRNA sense strand
gucacaagcucuauuucag

SEQ ID NO: 748354 - RNA, 19 nt, Homo sapiens
  misc_RNA (1)...(19): siRNA sense strand
gaacgaugugauuguaucu

SEQ ID NO: 748355 - RNA, 19 nt, Homo sapiens
  misc_RNA (1)...(19): siRNA sense strand
gcuaaaccuggauucaaga

SEQ ID NO: 748356 - RNA, 19 nt, Homo sapiens
  misc_RNA (1)...(19): siRNA sense strand
cuagauucccgaacagcua

SEQ ID NO: 748357 - RNA, 19 nt, Homo sapiens
  misc_RNA (1)...(19): siRNA sense strand
gaucugcucaaguacuuca

SEQ ID NO: 748358 - RNA, 19 nt, Homo sapiens
  misc_RNA (1)...(19): siRNA sense strand
cagcuaguguuugacaauc

SEQ ID NO: 748359 - RNA, 19 nt, Homo sapiens
  misc_RNA (1)...(19): siRNA sense strand
cuaagaccauggcucuagu

SEQ ID NO: 748360 - RNA, 19 nt, Homo sapiens
  misc_RNA (1)...(19): siRNA sense strand
uugcagaauuugauacagu

SEQ ID NO: 748361 - RNA, 19 nt, Homo sapiens
  misc_RNA (1)...(19): siRNA sense strand
ucacauucaaguccgauga

SEQ ID NO: 748362 - RNA, 19 nt, Homo sapiens
  misc_RNA (1)...(19): siRNA sense strand
uggauuagaggaagcagaa

SEQ ID NO: 748363 - RNA, 19 nt, Homo sapiens
  misc_RNA (1)...(19): siRNA sense strand
ccaauguggucuucuuucc

SEQ ID NO: 748364 - RNA, 19 nt, Homo sapiens
  misc_RNA (1)...(19): siRNA sense strand
cuggauaggcucaaugaug

SEQ ID NO: 748365 - RNA, 19 nt, Homo sapiens
  misc_RNA (1)...(19): siRNA sense strand
guaacggaucccacucuga

SEQ ID NO: 748366 - RNA, 19 nt, Homo sapiens
  misc_RNA (1)...(19): siRNA sense strand
aaucaagaacgaaccaaau

SEQ ID NO: 748367 - RNA, 19 nt, Homo sapiens
  misc_RNA (1)...(19): siRNA sense strand
aaaccaguaccauuauuag

SEQ ID NO: 748368 - RNA, 19 nt, Homo sapiens
  misc_RNA (1)...(19): siRNA sense strand
ggaaguugaagauauaucc

SEQ ID NO: 748369 - RNA, 19 nt, Homo sapiens
  misc_RNA (1)...(19): siRNA sense strand
gauaucuguagguaugauu

SEQ ID NO: 748370 - RNA, 19 nt, Homo sapiens
  misc_RNA (1)...(19): siRNA sense strand
aguccuagauucccgaaca

SEQ ID NO: 748371 - RNA, 19 nt, Homo sapiens
  misc_RNA (1)...(19): siRNA sense strand
caguugcacucccaggaau

SEQ ID NO: 748372 - RNA, 19 nt, Homo sapiens
  misc_RNA (1)...(19): siRNA sense strand
augaugaugccaagcguua

SEQ ID NO: 748373 - RNA, 19 nt, Homo sapiens
  misc_RNA (1)...(19): siRNA sense strand
gaugaugccaagcguuaca

SEQ ID NO: 748374 - RNA, 19 nt, Homo sapiens
  misc_RNA (1)...(19): siRNA sense strand
ucaugagguauuacaguuu

SEQ ID NO: 748375 - RNA, 19 nt, Homo sapiens
  misc_RNA (1)...(19): siRNA sense strand
ggccaauguggucuucuuu

SEQ ID NO: 748376 - RNA, 19 nt, Homo sapiens
  misc_RNA (1)...(19): siRNA sense strand
uuguggaaguugaagauau

SEQ ID NO: 748377 - RNA, 19 nt, Homo sapiens
  misc_RNA (1)...(19): siRNA sense strand
gaugccaagcguuacaguu

SEQ ID NO: 748378 - RNA, 19 nt, Homo sapiens
  misc_RNA (1)...(19): siRNA sense strand
ugucacaagcucuauuuca

SEQ ID NO: 748379 - RNA, 19 nt, Homo sapiens
  misc_RNA (1)...(19): siRNA sense strand
acggauacagcuaguguuu

SEQ ID NO: 748380 - RNA, 19 nt, Homo sapiens
  misc_RNA (1)...(19): siRNA sense strand
aaaucaagaacgaaccaaa

SEQ ID NO: 748381 - RNA, 19 nt, Homo sapiens
  misc_RNA (1)...(19): siRNA sense strand
ccgaaaccaguaccauuau

SEQ ID NO: 748382 - RNA, 19 nt, Homo sapiens
  misc_RNA (1)...(19): siRNA sense strand
uuucagggguauccuauaa

SEQ ID NO: 748383 - RNA, 19 nt, Homo sapiens
  misc_RNA (1)...(19): siRNA sense strand
cagagcgcauccaucaaag

SEQ ID NO: 748384 - RNA, 19 nt, Homo sapiens
  misc_RNA (1)...(19): siRNA sense strand
gcuaguguuugacaaucag

SEQ ID NO: 748385 - RNA, 19 nt, Homo sapiens
  misc_RNA (1)...(19): siRNA sense strand
uggccaauguggucuucuu

SEQ ID NO: 748386 - RNA, 19 nt, Homo sapiens
  misc_RNA (1)...(19): siRNA sense strand
gccaagcguuacaguugca

SEQ ID NO: 748387 - RNA, 19 nt, Homo sapiens
  misc_RNA (1)...(19): siRNA sense strand
gauaggcucaaugaugaug

SEQ ID NO: 748388 - RNA, 19 nt, Homo sapiens
  misc_RNA (1)...(19): siRNA sense strand
gcucaaguacuucaaucca

SEQ ID NO: 748389 - RNA, 19 nt, Homo sapiens
  misc_RNA (1)...(19): siRNA sense strand
aucaugagguauuacaguu

SEQ ID NO: 748390 - RNA, 19 nt, Homo sapiens
  misc_RNA (1)...(19): siRNA sense strand
acucuaaucugcgcaaacu

SEQ ID NO: 748391 - RNA, 19 nt, Homo sapiens
  misc_RNA (1)...(19): siRNA sense strand
ccauggcucuaguugacau

SEQ ID NO: 748392 - RNA, 19 nt, Homo sapiens
  misc_RNA (1)...(19): siRNA sense strand
guuugagccuggccacauc

SEQ ID NO: 748393 - RNA, 19 nt, Homo sapiens
  misc_RNA (1)...(19): siRNA sense strand
gagaagaauugguuuguug

SEQ ID NO: 748394 - RNA, 19 nt, Homo sapiens
  misc_RNA (1)...(19): siRNA sense strand
gccagucucuucugauuaa

SEQ ID NO: 748395 - RNA, 19 nt, Homo sapiens
  misc_RNA (1)...(19): siRNA sense strand
ccagaaagcaaucuuguuu

SEQ ID NO: 748396 - RNA, 19 nt, Homo sapiens
  misc_RNA (1)...(19): siRNA sense strand
ucacagcccugaccgagaa

SEQ ID NO: 748397 - RNA, 19 nt, Homo sapiens
  misc_RNA (1)...(19): siRNA sense strand
ccaagaagcaugcagagaa

SEQ ID NO: 748398 - RNA, 19 nt, Homo sapiens
  misc_RNA (1)...(19): siRNA sense strand
uggaaaggcuggaggagaa

SEQ ID NO: 748399 - RNA, 19 nt, Homo sapiens
  misc_RNA (1)...(19): siRNA sense strand
caagaagcaugcagagaag

SEQ ID NO: 748400 - RNA, 19 nt, Homo sapiens
  misc_RNA (1)...(19): siRNA sense strand
ggaaaucaccaccuucaca

SEQ ID NO: 748401 - RNA, 19 nt, Homo sapiens
  misc_RNA (1)...(19): siRNA sense strand
acaccuauauauccaagaa

SEQ ID NO: 748402 - RNA, 19 nt, Homo sapiens
  misc_RNA (1)...(19): siRNA sense strand
gaggagaaccauuacaaca

SEQ ID NO: 748403 - RNA, 19 nt, Homo sapiens
  misc_RNA (1)...(19): siRNA sense strand
gcagagaagaauugguuug

SEQ ID NO: 748404 - RNA, 19 nt, Homo sapiens
  misc_RNA (1)...(19): siRNA sense strand
caccaaaugaggaauguuu

SEQ ID NO: 748405 - RNA, 19 nt, Homo sapiens
  misc_RNA (1)...(19): siRNA sense strand
gcccugaccgagaaguuua

SEQ ID NO: 748406 - RNA, 19 nt, Homo sapiens
  misc_RNA (1)...(19): siRNA sense strand
gaagaaugggagcugcaaa

SEQ ID NO: 748407 - RNA, 19 nt, Homo sapiens
  misc_RNA (1)...(19): siRNA sense strand
ggcuggaggagaaccauua

SEQ ID NO: 748408 - RNA, 19 nt, Homo sapiens
  misc_RNA (1)...(19): siRNA sense strand
agagaagaauugguuuguu

SEQ ID NO: 748409 - RNA, 19 nt, Homo sapiens
  misc_RNA (1)...(19): siRNA sense strand
ccauuacaacaccuauaua

SEQ ID NO: 748410 - RNA, 19 nt, Homo sapiens
  misc_RNA (1)...(19): siRNA sense strand
cugccagucucuucugauu

SEQ ID NO: 748411 - RNA, 19 nt, Homo sapiens
  misc_RNA (1)...(19): siRNA sense strand
cccaaacuccucuacugua

SEQ ID NO: 748412 - RNA, 19 nt, Homo sapiens
  misc_RNA (1)...(19): siRNA sense strand
gaaccauuacaacaccuau

SEQ ID NO: 748413 - RNA, 19 nt, Homo sapiens
  misc_RNA (1)...(19): siRNA sense strand
ugaccgagaaguuuaaucu

SEQ ID NO: 748414 - RNA, 19 nt, Homo sapiens
  misc_RNA (1)...(19): siRNA sense strand
gacucacuauggccagaaa

SEQ ID NO: 748415 - RNA, 19 nt, Homo sapiens
  misc_RNA (1)...(19): siRNA sense strand
uaaucugccuccagggaau

SEQ ID NO: 748416 - RNA, 19 nt, Homo sapiens
  misc_RNA (1)...(19): siRNA sense strand
uuacaacaccuauauaucc

SEQ ID NO: 748417 - RNA, 19 nt, Homo sapiens
  misc_RNA (1)...(19): siRNA sense strand
gcccaaacuccucuacugu

SEQ ID NO: 748418 - RNA, 19 nt, Homo sapiens
  misc_RNA (1)...(19): siRNA sense strand
ggaggagaaccauuacaac

SEQ ID NO: 748419 - RNA, 19 nt, Homo sapiens
  misc_RNA (1)...(19): siRNA sense strand
gaagcaugcagagaagaau

SEQ ID NO: 748420 - RNA, 19 nt, Homo sapiens
  misc_RNA (1)...(19): siRNA sense strand
gccagaaagcaaucuuguu

SEQ ID NO: 748421 - RNA, 19 nt, Homo sapiens
  misc_RNA (1)...(19): siRNA sense strand
uggaggagaaccauuacaa

SEQ ID NO: 748422 - RNA, 19 nt, Homo sapiens
  misc_RNA (1)...(19): siRNA sense strand
cagagaagaauugguuugu

SEQ ID NO: 748423 - RNA, 19 nt, Homo sapiens
  misc_RNA (1)...(19): siRNA sense strand
uacaacaccuauauaucca

SEQ ID NO: 748424 - RNA, 19 nt, Homo sapiens
  misc_RNA (1)...(19): siRNA sense strand
agaagcaugcagagaagaa

SEQ ID NO: 748425 - RNA, 19 nt, Homo sapiens
  misc_RNA (1)...(19): siRNA sense strand
ggccagaaagcaaucuugu

SEQ ID NO: 748426 - RNA, 19 nt, Homo sapiens
  misc_RNA (1)...(19): siRNA sense strand
aaaugaggaauguuuguuc

SEQ ID NO: 748427 - RNA, 19 nt, Homo sapiens
  misc_RNA (1)...(19): siRNA sense strand
uuguuggccucaagaagaa

SEQ ID NO: 748428 - RNA, 19 nt, Homo sapiens
  misc_RNA (1)...(19): siRNA sense strand
ucacagcccugaccgagaa

SEQ ID NO: 748429 - RNA, 19 nt, Homo sapiens
  misc_RNA (1)...(19): siRNA sense strand
ggaaaucaccaccuucaca

SEQ ID NO: 748430 - RNA, 19 nt, Homo sapiens
  misc_RNA (1)...(19): siRNA sense strand
gcccugaccgagaaguuua

SEQ ID NO: 748431 - RNA, 19 nt, Homo sapiens
  misc_RNA (1)...(19): siRNA sense strand
cccaaacuccucuacugua

SEQ ID NO: 748432 - RNA, 19 nt, Homo sapiens
  misc_RNA (1)...(19): siRNA sense strand
ugaccgagaaguuuaaucu

SEQ ID NO: 748433 - RNA, 19 nt, Homo sapiens
  misc_RNA (1)...(19): siRNA sense strand
uaaucugccuccagggaau

SEQ ID NO: 748434 - RNA, 19 nt, Homo sapiens
  misc_RNA (1)...(19): siRNA sense strand
gcccaaacuccucuacugu

SEQ ID NO: 748435 - RNA, 19 nt, Homo sapiens
  misc_RNA (1)...(19): siRNA sense strand
ucacagcccugaccgagaa

SEQ ID NO: 748436 - RNA, 19 nt, Homo sapiens
  misc_RNA (1)...(19): siRNA sense strand
ggaaaucaccaccuucaca

SEQ ID NO: 748437 - RNA, 19 nt, Homo sapiens
  misc_RNA (1)...(19): siRNA sense strand
gcccugaccgagaaguuua

SEQ ID NO: 748438 - RNA, 19 nt, Homo sapiens
  misc_RNA (1)...(19): siRNA sense strand
cccaaacuccucuacugua

SEQ ID NO: 748439 - RNA, 19 nt, Homo sapiens
  misc_RNA (1)...(19): siRNA sense strand
ugaccgagaaguuuaaucu

SEQ ID NO: 748440 - RNA, 19 nt, Homo sapiens
  misc_RNA (1)...(19): siRNA sense strand
uaaucugccuccagggaau

SEQ ID NO: 748441 - RNA, 19 nt, Homo sapiens
  misc_RNA (1)...(19): siRNA sense strand
gcccaaacuccucuacugu

SEQ ID NO: 748442 - RNA, 19 nt, Homo sapiens
  misc_RNA (1)...(19): siRNA sense strand
gacacgagccgauccauca

SEQ ID NO: 748443 - RNA, 19 nt, Homo sapiens
  misc_RNA (1)...(19): siRNA sense strand
uccaucauccgcaauguaa

SEQ ID NO: 748444 - RNA, 19 nt, Homo sapiens
  misc_RNA (1)...(19): siRNA sense strand
gauccaucauccgcaaugu

SEQ ID NO: 748445 - RNA, 19 nt, Homo sapiens
  misc_RNA (1)...(19): siRNA sense strand
gcaggugcgcguggaauuc

SEQ ID NO: 748446 - RNA, 19 nt, Homo sapiens
  misc_RNA (1)...(19): siRNA sense strand
gagaagaauugguuuguug

SEQ ID NO: 748447 - RNA, 19 nt, Homo sapiens
  misc_RNA (1)...(19): siRNA sense strand
gccagucucuucugauuaa

SEQ ID NO: 748448 - RNA, 19 nt, Homo sapiens
  misc_RNA (1)...(19): siRNA sense strand
ccagaaagcaaucuuguuu

SEQ ID NO: 748449 - RNA, 19 nt, Homo sapiens
  misc_RNA (1)...(19): siRNA sense strand
ucacagcccugaccgagaa

SEQ ID NO: 748450 - RNA, 19 nt, Homo sapiens
  misc_RNA (1)...(19): siRNA sense strand
ccaagaagcaugcagagaa

SEQ ID NO: 748451 - RNA, 19 nt, Homo sapiens
  misc_RNA (1)...(19): siRNA sense strand
uggaaaggcuggaggagaa

SEQ ID NO: 748452 - RNA, 19 nt, Homo sapiens
  misc_RNA (1)...(19): siRNA sense strand
caagaagcaugcagagaag

SEQ ID NO: 748453 - RNA, 19 nt, Homo sapiens
  misc_RNA (1)...(19): siRNA sense strand
ggaaaucaccaccuucaca

SEQ ID NO: 748454 - RNA, 19 nt, Homo sapiens
  misc_RNA (1)...(19): siRNA sense strand
acaccuauauauccaagaa

SEQ ID NO: 748455 - RNA, 19 nt, Homo sapiens
  misc_RNA (1)...(19): siRNA sense strand
gaggagaaccauuacaaca

SEQ ID NO: 748456 - RNA, 19 nt, Homo sapiens
  misc_RNA (1)...(19): siRNA sense strand
gcagagaagaauugguuug

SEQ ID NO: 748457 - RNA, 19 nt, Homo sapiens
  misc_RNA (1)...(19): siRNA sense strand
caccaaaugaggaauguuu

SEQ ID NO: 748458 - RNA, 19 nt, Homo sapiens
  misc_RNA (1)...(19): siRNA sense strand
gcccugaccgagaaguuua

SEQ ID NO: 748459 - RNA, 19 nt, Homo sapiens
  misc_RNA (1)...(19): siRNA sense strand
gaagaaugggagcugcaaa

SEQ ID NO: 748460 - RNA, 19 nt, Homo sapiens
  misc_RNA (1)...(19): siRNA sense strand
ggcuggaggagaaccauua

SEQ ID NO: 748461 - RNA, 19 nt, Homo sapiens
  misc_RNA (1)...(19): siRNA sense strand
agagaagaauugguuuguu

SEQ ID NO: 748462 - RNA, 19 nt, Homo sapiens
  misc_RNA (1)...(19): siRNA sense strand
ccauuacaacaccuauaua

SEQ ID NO: 748463 - RNA, 19 nt, Homo sapiens
  misc_RNA (1)...(19): siRNA sense strand
cugccagucucuucugauu

SEQ ID NO: 748464 - RNA, 19 nt, Homo sapiens
  misc_RNA (1)...(19): siRNA sense strand
cccaaacuccucuacugua

SEQ ID NO: 748465 - RNA, 19 nt, Homo sapiens
  misc_RNA (1)...(19): siRNA sense strand
gaaccauuacaacaccuau

SEQ ID NO: 748466 - RNA, 19 nt, Homo sapiens
  misc_RNA (1)...(19): siRNA sense strand
ugaccgagaaguuuaaucu

SEQ ID NO: 748467 - RNA, 19 nt, Homo sapiens
  misc_RNA (1)...(19): siRNA sense strand
gacucacuauggccagaaa

SEQ ID NO: 748468 - RNA, 19 nt, Homo sapiens
  misc_RNA (1)...(19): siRNA sense strand
uaaucugccuccagggaau

SEQ ID NO: 748469 - RNA, 19 nt, Homo sapiens
  misc_RNA (1)...(19): siRNA sense strand
uuacaacaccuauauaucc

SEQ ID NO: 748470 - RNA, 19 nt, Homo sapiens
  misc_RNA (1)...(19): siRNA sense strand
gcccaaacuccucuacugu

SEQ ID NO: 748471 - RNA, 19 nt, Homo sapiens
  misc_RNA (1)...(19): siRNA sense strand
ggaggagaaccauuacaac

SEQ ID NO: 748472 - RNA, 19 nt, Homo sapiens
  misc_RNA (1)...(19): siRNA sense strand
gaagcaugcagagaagaau

SEQ ID NO: 748473 - RNA, 19 nt, Homo sapiens
  misc_RNA (1)...(19): siRNA sense strand
gccagaaagcaaucuuguu

SEQ ID NO: 748474 - RNA, 19 nt, Homo sapiens
  misc_RNA (1)...(19): siRNA sense strand
uggaggagaaccauuacaa

SEQ ID NO: 748475 - RNA, 19 nt, Homo sapiens
  misc_RNA (1)...(19): siRNA sense strand
cagagaagaauugguuugu

SEQ ID NO: 748476 - RNA, 19 nt, Homo sapiens
  misc_RNA (1)...(19): siRNA sense strand
uacaacaccuauauaucca

SEQ ID NO: 748477 - RNA, 19 nt, Homo sapiens
  misc_RNA (1)...(19): siRNA sense strand
agaagcaugcagagaagaa

SEQ ID NO: 748478 - RNA, 19 nt, Homo sapiens
  misc_RNA (1)...(19): siRNA sense strand
ggccagaaagcaaucuugu

SEQ ID NO: 748479 - RNA, 19 nt, Homo sapiens
  misc_RNA (1)...(19): siRNA sense strand
aaaugaggaauguuuguuc

SEQ ID NO: 748480 - RNA, 19 nt, Homo sapiens
  misc_RNA (1)...(19): siRNA sense strand
uuguuggccucaagaagaa

SEQ ID NO: 748481 - RNA, 19 nt, Homo sapiens
  misc_RNA (1)...(19): siRNA sense strand
ucacagcccugaccgagaa

SEQ ID NO: 748482 - RNA, 19 nt, Homo sapiens
  misc_RNA (1)...(19): siRNA sense strand
ggaaaucaccaccuucaca

SEQ ID NO: 748483 - RNA, 19 nt, Homo sapiens
  misc_RNA (1)...(19): siRNA sense strand
gcccugaccgagaaguuua

SEQ ID NO: 748484 - RNA, 19 nt, Homo sapiens
  misc_RNA (1)...(19): siRNA sense strand
cccaaacuccucuacugua

SEQ ID NO: 748485 - RNA, 19 nt, Homo sapiens
  misc_RNA (1)...(19): siRNA sense strand
ugaccgagaaguuuaaucu

SEQ ID NO: 748486 - RNA, 19 nt, Homo sapiens
  misc_RNA (1)...(19): siRNA sense strand
uaaucugccuccagggaau

SEQ ID NO: 748487 - RNA, 19 nt, Homo sapiens
  misc_RNA (1)...(19): siRNA sense strand
gcccaaacuccucuacugu

SEQ ID NO: 748488 - RNA, 19 nt, Homo sapiens
  misc_RNA (1)...(19): siRNA sense strand
ucacagcccugaccgagaa

SEQ ID NO: 748489 - RNA, 19 nt, Homo sapiens
  misc_RNA (1)...(19): siRNA sense strand
ggaaaucaccaccuucaca

SEQ ID NO: 748490 - RNA, 19 nt, Homo sapiens
  misc_RNA (1)...(19): siRNA sense strand
gcccugaccgagaaguuua

SEQ ID NO: 748491 - RNA, 19 nt, Homo sapiens
  misc_RNA (1)...(19): siRNA sense strand
cccaaacuccucuacugua

SEQ ID NO: 748492 - RNA, 19 nt, Homo sapiens
  misc_RNA (1)...(19): siRNA sense strand
ugaccgagaaguuuaaucu

SEQ ID NO: 748493 - RNA, 19 nt, Homo sapiens
  misc_RNA (1)...(19): siRNA sense strand
uaaucugccuccagggaau

SEQ ID NO: 748494 - RNA, 19 nt, Homo sapiens
  misc_RNA (1)...(19): siRNA sense strand
gcccaaacuccucuacugu

SEQ ID NO: 748495 - RNA, 19 nt, Homo sapiens
  misc_RNA (1)...(19): siRNA sense strand
gaagauggcuugucagaug

SEQ ID NO: 748496 - RNA, 19 nt, Homo sapiens
  misc_RNA (1)...(19): siRNA sense strand
gaaguuaagucgcagaaug

SEQ ID NO: 748497 - RNA, 19 nt, Homo sapiens
  misc_RNA (1)...(19): siRNA sense strand
ggacaaagaacccaaagaa

SEQ ID NO: 748498 - RNA, 19 nt, Homo sapiens
  misc_RNA (1)...(19): siRNA sense strand
gaagggauuuacagaaguu

SEQ ID NO: 748499 - RNA, 19 nt, Homo sapiens
  misc_RNA (1)...(19): siRNA sense strand
ggaguucgacccaacaaua

SEQ ID NO: 748500 - RNA, 19 nt, Homo sapiens
  misc_RNA (1)...(19): siRNA sense strand
caaagaacccaaagaagaa

SEQ ID NO: 748501 - RNA, 19 nt, Homo sapiens
  misc_RNA (1)...(19): siRNA sense strand
ggagaaagggaauguguuu

SEQ ID NO: 748502 - RNA, 19 nt, Homo sapiens
  misc_RNA (1)...(19): siRNA sense strand
gaagagaagaggaggcuaa

SEQ ID NO: 748503 - RNA, 19 nt, Homo sapiens
  misc_RNA (1)...(19): siRNA sense strand
gaaagaagggauuuacaga

SEQ ID NO: 748504 - RNA, 19 nt, Homo sapiens
  misc_RNA (1)...(19): siRNA sense strand
gaaaagcaguggugucaaa

SEQ ID NO: 748505 - RNA, 19 nt, Homo sapiens
  misc_RNA (1)...(19): siRNA sense strand
ucgagaagcucaaacagaa

SEQ ID NO: 748506 - RNA, 19 nt, Homo sapiens
  misc_RNA (1)...(19): siRNA sense strand
caagucaccugcucccaaa

SEQ ID NO: 748507 - RNA, 19 nt, Homo sapiens
  misc_RNA (1)...(19): siRNA sense strand
gcagcaggcacaccaaaua

SEQ ID NO: 748508 - RNA, 19 nt, Homo sapiens
  misc_RNA (1)...(19): siRNA sense strand
ggaaacugcuggcuugaag

SEQ ID NO: 748509 - RNA, 19 nt, Homo sapiens
  misc_RNA (1)...(19): siRNA sense strand
gaaugacgaugaugaagag

SEQ ID NO: 748510 - RNA, 19 nt, Homo sapiens
  misc_RNA (1)...(19): siRNA sense strand
caagaaagauacgagauag

SEQ ID NO: 748511 - RNA, 19 nt, Homo sapiens
  misc_RNA (1)...(19): siRNA sense strand
caagaaagaagacaaggaa

SEQ ID NO: 748512 - RNA, 19 nt, Homo sapiens
  misc_RNA (1)...(19): siRNA sense strand
gcagaagaaugcaaaauga

SEQ ID NO: 748513 - RNA, 19 nt, Homo sapiens
  misc_RNA (1)...(19): siRNA sense strand
ccaagaaagauacgagaua

SEQ ID NO: 748514 - RNA, 19 nt, Homo sapiens
  misc_RNA (1)...(19): siRNA sense strand
acaaagaacccaaagaaga

SEQ ID NO: 748515 - RNA, 19 nt, Homo sapiens
  misc_RNA (1)...(19): siRNA sense strand
gaaaagcaaucuguggaua

SEQ ID NO: 748516 - RNA, 19 nt, Homo sapiens
  misc_RNA (1)...(19): siRNA sense strand
caagaaaccauucaagugu

SEQ ID NO: 748517 - RNA, 19 nt, Homo sapiens
  misc_RNA (1)...(19): siRNA sense strand
gccagaagaugccagaaga

SEQ ID NO: 748518 - RNA, 19 nt, Homo sapiens
  misc_RNA (1)...(19): siRNA sense strand
guacgcaacaucaagagua

SEQ ID NO: 748519 - RNA, 19 nt, Homo sapiens
  misc_RNA (1)...(19): siRNA sense strand
ucccaaaccuucugacuug

SEQ ID NO: 748520 - RNA, 19 nt, Homo sapiens
  misc_RNA (1)...(19): siRNA sense strand
ggaaugacgaugaugaaga

SEQ ID NO: 748521 - RNA, 19 nt, Homo sapiens
  misc_RNA (1)...(19): siRNA sense strand
gaaagucgccaagaaagau

SEQ ID NO: 748522 - RNA, 19 nt, Homo sapiens
  misc_RNA (1)...(19): siRNA sense strand
gagaauucaugacccacaa

SEQ ID NO: 748523 - RNA, 19 nt, Homo sapiens
  misc_RNA (1)...(19): siRNA sense strand
gauagaagagcgagcagaa

SEQ ID NO: 748524 - RNA, 19 nt, Homo sapiens
  misc_RNA (1)...(19): siRNA sense strand
aagaagaaguuaagagcuu

SEQ ID NO: 748525 - RNA, 19 nt, Homo sapiens
  misc_RNA (1)...(19): siRNA sense strand
gaagaggaggcuaaaggaa

SEQ ID NO: 748526 - RNA, 19 nt, Homo sapiens
  misc_RNA (1)...(19): siRNA sense strand
cgagauagaggaaacagaa

SEQ ID NO: 748527 - RNA, 19 nt, Homo sapiens
  misc_RNA (1)...(19): siRNA sense strand
gaagguguacgcaacauca

SEQ ID NO: 748528 - RNA, 19 nt, Homo sapiens
  misc_RNA (1)...(19): siRNA sense strand
uagaagagcgagcagaauu

SEQ ID NO: 748529 - RNA, 19 nt, Homo sapiens
  misc_RNA (1)...(19): siRNA sense strand
gaguucgacccaacaauaa

SEQ ID NO: 748530 - RNA, 19 nt, Homo sapiens
  misc_RNA (1)...(19): siRNA sense strand
ccuaaagguucaucucuca

SEQ ID NO: 748531 - RNA, 19 nt, Homo sapiens
  misc_RNA (1)...(19): siRNA sense strand
ggaggaagccgaucgaaaa

SEQ ID NO: 748532 - RNA, 19 nt, Homo sapiens
  misc_RNA (1)...(19): siRNA sense strand
gaucgaaagaagggauuua

SEQ ID NO: 748533 - RNA, 19 nt, Homo sapiens
  misc_RNA (1)...(19): siRNA sense strand
gaacccaaagaagaaguua

SEQ ID NO: 748534 - RNA, 19 nt, Homo sapiens
  misc_RNA (1)...(19): siRNA sense strand
cagaaacagucaccaaguc

SEQ ID NO: 748535 - RNA, 19 nt, Homo sapiens
  misc_RNA (1)...(19): siRNA sense strand
caaaccuucugacuugaga

SEQ ID NO: 748536 - RNA, 19 nt, Homo sapiens
  misc_RNA (1)...(19): siRNA sense strand
gagaagaggaggcuaaagg

SEQ ID NO: 748537 - RNA, 19 nt, Homo sapiens
  misc_RNA (1)...(19): siRNA sense strand
ccaaagcgagggagcauug

SEQ ID NO: 748538 - RNA, 19 nt, Homo sapiens
  misc_RNA (1)...(19): siRNA sense strand
gauacgagauagaggaaac

SEQ ID NO: 748539 - RNA, 19 nt, Homo sapiens
  misc_RNA (1)...(19): siRNA sense strand
ucaaugaauggcuaacuaa

SEQ ID NO: 748540 - RNA, 19 nt, Homo sapiens
  misc_RNA (1)...(19): siRNA sense strand
gacaagaaaccauucaagu

SEQ ID NO: 748541 - RNA, 19 nt, Homo sapiens
  misc_RNA (1)...(19): siRNA sense strand
agaggaggcuaaaggaaga

SEQ ID NO: 748542 - RNA, 19 nt, Homo sapiens
  misc_RNA (1)...(19): siRNA sense strand
aagaagggauuuacagaag

SEQ ID NO: 748543 - RNA, 19 nt, Homo sapiens
  misc_RNA (1)...(19): siRNA sense strand
ccagaggaaugacgaugau

SEQ ID NO: 748544 - RNA, 19 nt, Homo sapiens
  misc_RNA (1)...(19): siRNA sense strand
cagcaggcacaccaaauaa

SEQ ID NO: 748545 - RNA, 19 nt, Homo sapiens
  misc_RNA (1)...(19): siRNA sense strand
ccaagacaaccaccacaaa

SEQ ID NO: 748546 - RNA, 19 nt, Homo sapiens
  misc_RNA (1)...(19): siRNA sense strand
ccacaaacuuaaacauacu

SEQ ID NO: 748547 - RNA, 19 nt, Homo sapiens
  misc_RNA (1)...(19): siRNA sense strand
aagaaaccauucaaguguu

SEQ ID NO: 748548 - RNA, 19 nt, Homo sapiens
  misc_RNA (1)...(19): siRNA sense strand
aaagaagggauuuacagaa

SEQ ID NO: 748549 - RNA, 19 nt, Homo sapiens
  misc_RNA (1)...(19): siRNA sense strand
gcaguauaccagugcaauu

SEQ ID NO: 748550 - RNA, 19 nt, Homo sapiens
  misc_RNA (1)...(19): siRNA sense strand
gaggaaugacgaugaugaa

SEQ ID NO: 748551 - RNA, 19 nt, Homo sapiens
  misc_RNA (1)...(19): siRNA sense strand
gcugagaaacgccagaaga

SEQ ID NO: 748552 - RNA, 19 nt, Homo sapiens
  misc_RNA (1)...(19): siRNA sense strand
ccaagcagaagaaugcaaa

SEQ ID NO: 748553 - RNA, 19 nt, Homo sapiens
  misc_RNA (1)...(19): siRNA sense strand
cagcaauagucuccaagau

SEQ ID NO: 748554 - RNA, 19 nt, Homo sapiens
  misc_RNA (1)...(19): siRNA sense strand
acaagaaaccauucaagug

SEQ ID NO: 748555 - RNA, 19 nt, Homo sapiens
  misc_RNA (1)...(19): siRNA sense strand
ucagagaggaggaagagaa

SEQ ID NO: 748556 - RNA, 19 nt, Homo sapiens
  misc_RNA (1)...(19): siRNA sense strand
aaaugaaacuaccgagaag

SEQ ID NO: 748557 - RNA, 19 nt, Homo sapiens
  misc_RNA (1)...(19): siRNA sense strand
ggaggugaaugcccagaac

SEQ ID NO: 748558 - RNA, 19 nt, Homo sapiens
  misc_RNA (1)...(19): siRNA sense strand
ggcagaagcaggaggaaga

SEQ ID NO: 748559 - RNA, 19 nt, Homo sapiens
  misc_RNA (1)...(19): siRNA sense strand
cgagggagcauuggagaaa

SEQ ID NO: 748560 - RNA, 19 nt, Homo sapiens
  misc_RNA (1)...(19): siRNA sense strand
aaacagaaacagucaccaa

SEQ ID NO: 748561 - RNA, 19 nt, Homo sapiens
  misc_RNA (1)...(19): siRNA sense strand
ucaagaguaugugggagaa

SEQ ID NO: 748562 - RNA, 19 nt, Homo sapiens
  misc_RNA (1)...(19): siRNA sense strand
uaaaggaagagauugaaag

SEQ ID NO: 748563 - RNA, 19 nt, Homo sapiens
  misc_RNA (1)...(19): siRNA sense strand
caaugaauggcuaacuaaa

SEQ ID NO: 748564 - RNA, 19 nt, Homo sapiens
  misc_RNA (1)...(19): siRNA sense strand
caaaucgacccaucaagca

SEQ ID NO: 748565 - RNA, 19 nt, Homo sapiens
  misc_RNA (1)...(19): siRNA sense strand
aaagguucaucucucaaga

SEQ ID NO: 748566 - RNA, 19 nt, Homo sapiens
  misc_RNA (1)...(19): siRNA sense strand
cagaagauggcuugucaga

SEQ ID NO: 748567 - RNA, 19 nt, Homo sapiens
  misc_RNA (1)...(19): siRNA sense strand
gagauagaggaaacagaaa

SEQ ID NO: 748568 - RNA, 19 nt, Homo sapiens
  misc_RNA (1)...(19): siRNA sense strand
caggagacguauccagcaa

SEQ ID NO: 748569 - RNA, 19 nt, Homo sapiens
  misc_RNA (1)...(19): siRNA sense strand
gcagcaauagucuccaaga

SEQ ID NO: 748570 - RNA, 19 nt, Homo sapiens
  misc_RNA (1)...(19): siRNA sense strand
agaagagcgagcagaauuu

SEQ ID NO: 748571 - RNA, 19 nt, Homo sapiens
  misc_RNA (1)...(19): siRNA sense strand
ugaaagucgccaagaaaga

SEQ ID NO: 748572 - RNA, 19 nt, Homo sapiens
  misc_RNA (1)...(19): siRNA sense strand
uuggagggaugcugaagaa

SEQ ID NO: 748573 - RNA, 19 nt, Homo sapiens
  misc_RNA (1)...(19): siRNA sense strand
gaggaaacagaaacaguca

SEQ ID NO: 748574 - RNA, 19 nt, Homo sapiens
  misc_RNA (1)...(19): siRNA sense strand
gauagaggaaacagaaaca

SEQ ID NO: 748575 - RNA, 19 nt, Homo sapiens
  misc_RNA (1)...(19): siRNA sense strand
aagugaaagucgccaagaa

SEQ ID NO: 748576 - RNA, 19 nt, Homo sapiens
  misc_RNA (1)...(19): siRNA sense strand
aaagcaaucuguggauaag

SEQ ID NO: 748577 - RNA, 19 nt, Homo sapiens
  misc_RNA (1)...(19): siRNA sense strand
aagauggcuugucagauga

SEQ ID NO: 748578 - RNA, 19 nt, Homo sapiens
  misc_RNA (1)...(19): siRNA sense strand
gaggcuaaaggaagagauu

SEQ ID NO: 748579 - RNA, 19 nt, Homo sapiens
  misc_RNA (1)...(19): siRNA sense strand
cccacaaacuuaaacauac

SEQ ID NO: 748580 - RNA, 19 nt, Homo sapiens
  misc_RNA (1)...(19): siRNA sense strand
aaacagucaccaaguccua

SEQ ID NO: 748581 - RNA, 19 nt, Homo sapiens
  misc_RNA (1)...(19): siRNA sense strand
gcagaagcaggaggaagaa

SEQ ID NO: 748582 - RNA, 19 nt, Homo sapiens
  misc_RNA (1)...(19): siRNA sense strand
cagaugacaagaaaccauu

SEQ ID NO: 748583 - RNA, 19 nt, Homo sapiens
  misc_RNA (1)...(19): siRNA sense strand
gcuaaaggaagagauugaa

SEQ ID NO: 748584 - RNA, 19 nt, Homo sapiens
  misc_RNA (1)...(19): siRNA sense strand
gacaaagaacccaaagaag

SEQ ID NO: 748585 - RNA, 19 nt, Homo sapiens
  misc_RNA (1)...(19): siRNA sense strand
aagcggaaccucugggaaa

SEQ ID NO: 748586 - RNA, 19 nt, Homo sapiens
  misc_RNA (1)...(19): siRNA sense strand
gaaaggcgaagagcagaag

SEQ ID NO: 748587 - RNA, 19 nt, Homo sapiens
  misc_RNA (1)...(19): siRNA sense strand
gcuggaggaacucaagaaa

SEQ ID NO: 748588 - RNA, 19 nt, Homo sapiens
  misc_RNA (1)...(19): siRNA sense strand
cgaaagaagggauuuacag

SEQ ID NO: 748589 - RNA, 19 nt, Homo sapiens
  misc_RNA (1)...(19): siRNA sense strand
gaaggaguucgacccaaca

SEQ ID NO: 748590 - RNA, 19 nt, Homo sapiens
  misc_RNA (1)...(19): siRNA sense strand
gaagagcgagcagaauuuu

SEQ ID NO: 748591 - RNA, 19 nt, Homo sapiens
  misc_RNA (1)...(19): siRNA sense strand
cuaaaggaagagauugaaa

SEQ ID NO: 748592 - RNA, 19 nt, Homo sapiens
  misc_RNA (1)...(19): siRNA sense strand
uucaugacccacaaacuua

SEQ ID NO: 748593 - RNA, 19 nt, Homo sapiens
  misc_RNA (1)...(19): siRNA sense strand
ccaaagaagaaguuaagag

SEQ ID NO: 748594 - RNA, 19 nt, Homo sapiens
  misc_RNA (1)...(19): siRNA sense strand
aucaaugaauggcuaacua

SEQ ID NO: 748595 - RNA, 19 nt, Homo sapiens
  misc_RNA (1)...(19): siRNA sense strand
gaagauggcuugucagaug

SEQ ID NO: 748596 - RNA, 19 nt, Homo sapiens
  misc_RNA (1)...(19): siRNA sense strand
gaaguuaagucgcagaaug

SEQ ID NO: 748597 - RNA, 19 nt, Homo sapiens
  misc_RNA (1)...(19): siRNA sense strand
ggacaaagaacccaaagaa

SEQ ID NO: 748598 - RNA, 19 nt, Homo sapiens
  misc_RNA (1)...(19): siRNA sense strand
gaagggauuuacagaaguu

SEQ ID NO: 748599 - RNA, 19 nt, Homo sapiens
  misc_RNA (1)...(19): siRNA sense strand
ggaguucgacccaacaaua

SEQ ID NO: 748600 - RNA, 19 nt, Homo sapiens
  misc_RNA (1)...(19): siRNA sense strand
caaagaacccaaagaagaa

SEQ ID NO: 748601 - RNA, 19 nt, Homo sapiens
  misc_RNA (1)...(19): siRNA sense strand
ggagaaagggaauguguuu

SEQ ID NO: 748602 - RNA, 19 nt, Homo sapiens
  misc_RNA (1)...(19): siRNA sense strand
gaagagaagaggaggcuaa

SEQ ID NO: 748603 - RNA, 19 nt, Homo sapiens
  misc_RNA (1)...(19): siRNA sense strand
gaaagaagggauuuacaga

SEQ ID NO: 748604 - RNA, 19 nt, Homo sapiens
  misc_RNA (1)...(19): siRNA sense strand
gaaaagcaguggugucaaa

SEQ ID NO: 748605 - RNA, 19 nt, Homo sapiens
  misc_RNA (1)...(19): siRNA sense strand
ucgagaagcucaaacagaa

SEQ ID NO: 748606 - RNA, 19 nt, Homo sapiens
  misc_RNA (1)...(19): siRNA sense strand
caagucaccugcucccaaa

SEQ ID NO: 748607 - RNA, 19 nt, Homo sapiens
  misc_RNA (1)...(19): siRNA sense strand
gcagcaggcacaccaaaua

SEQ ID NO: 748608 - RNA, 19 nt, Homo sapiens
  misc_RNA (1)...(19): siRNA sense strand
ggaaacugcuggcuugaag

SEQ ID NO: 748609 - RNA, 19 nt, Homo sapiens
  misc_RNA (1)...(19): siRNA sense strand
gaaugacgaugaugaagag

SEQ ID NO: 748610 - RNA, 19 nt, Homo sapiens
  misc_RNA (1)...(19): siRNA sense strand
caagaaagauacgagauag

SEQ ID NO: 748611 - RNA, 19 nt, Homo sapiens
  misc_RNA (1)...(19): siRNA sense strand
caagaaagaagacaaggaa

SEQ ID NO: 748612 - RNA, 19 nt, Homo sapiens
  misc_RNA (1)...(19): siRNA sense strand
gcagaagaaugcaaaauga

SEQ ID NO: 748613 - RNA, 19 nt, Homo sapiens
  misc_RNA (1)...(19): siRNA sense strand
ccaagaaagauacgagaua

SEQ ID NO: 748614 - RNA, 19 nt, Homo sapiens
  misc_RNA (1)...(19): siRNA sense strand
acaaagaacccaaagaaga

SEQ ID NO: 748615 - RNA, 19 nt, Homo sapiens
  misc_RNA (1)...(19): siRNA sense strand
gaaaagcaaucuguggaua

SEQ ID NO: 748616 - RNA, 19 nt, Homo sapiens
  misc_RNA (1)...(19): siRNA sense strand
caagaaaccauucaagugu

SEQ ID NO: 748617 - RNA, 19 nt, Homo sapiens
  misc_RNA (1)...(19): siRNA sense strand
gccagaagaugccagaaga

SEQ ID NO: 748618 - RNA, 19 nt, Homo sapiens
  misc_RNA (1)...(19): siRNA sense strand
guacgcaacaucaagagua

SEQ ID NO: 748619 - RNA, 19 nt, Homo sapiens
  misc_RNA (1)...(19): siRNA sense strand
ucccaaaccuucugacuug

SEQ ID NO: 748620 - RNA, 19 nt, Homo sapiens
  misc_RNA (1)...(19): siRNA sense strand
ggaaugacgaugaugaaga

SEQ ID NO: 748621 - RNA, 19 nt, Homo sapiens
  misc_RNA (1)...(19): siRNA sense strand
gaaagucgccaagaaagau

SEQ ID NO: 748622 - RNA, 19 nt, Homo sapiens
  misc_RNA (1)...(19): siRNA sense strand
gagaauucaugacccacaa

SEQ ID NO: 748623 - RNA, 19 nt, Homo sapiens
  misc_RNA (1)...(19): siRNA sense strand
gauagaagagcgagcagaa

SEQ ID NO: 748624 - RNA, 19 nt, Homo sapiens
  misc_RNA (1)...(19): siRNA sense strand
aagaagaaguuaagagcuu

SEQ ID NO: 748625 - RNA, 19 nt, Homo sapiens
  misc_RNA (1)...(19): siRNA sense strand
gaagaggaggcuaaaggaa

SEQ ID NO: 748626 - RNA, 19 nt, Homo sapiens
  misc_RNA (1)...(19): siRNA sense strand
cgagauagaggaaacagaa

SEQ ID NO: 748627 - RNA, 19 nt, Homo sapiens
  misc_RNA (1)...(19): siRNA sense strand
gaagguguacgcaacauca

SEQ ID NO: 748628 - RNA, 19 nt, Homo sapiens
  misc_RNA (1)...(19): siRNA sense strand
uagaagagcgagcagaauu

SEQ ID NO: 748629 - RNA, 19 nt, Homo sapiens
  misc_RNA (1)...(19): siRNA sense strand
gaguucgacccaacaauaa

SEQ ID NO: 748630 - RNA, 19 nt, Homo sapiens
  misc_RNA (1)...(19): siRNA sense strand
ccuaaagguucaucucuca

SEQ ID NO: 748631 - RNA, 19 nt, Homo sapiens
  misc_RNA (1)...(19): siRNA sense strand
ggaggaagccgaucgaaaa

SEQ ID NO: 748632 - RNA, 19 nt, Homo sapiens
  misc_RNA (1)...(19): siRNA sense strand
gaucgaaagaagggauuua

SEQ ID NO: 748633 - RNA, 19 nt, Homo sapiens
  misc_RNA (1)...(19): siRNA sense strand
gaacccaaagaagaaguua

SEQ ID NO: 748634 - RNA, 19 nt, Homo sapiens
  misc_RNA (1)...(19): siRNA sense strand
cagaaacagucaccaaguc

SEQ ID NO: 748635 - RNA, 19 nt, Homo sapiens
  misc_RNA (1)...(19): siRNA sense strand
caaaccuucugacuugaga

SEQ ID NO: 748636 - RNA, 19 nt, Homo sapiens
  misc_RNA (1)...(19): siRNA sense strand
gagaagaggaggcuaaagg

SEQ ID NO: 748637 - RNA, 19 nt, Homo sapiens
  misc_RNA (1)...(19): siRNA sense strand
ccaaagcgagggagcauug

SEQ ID NO: 748638 - RNA, 19 nt, Homo sapiens
  misc_RNA (1)...(19): siRNA sense strand
gauacgagauagaggaaac

SEQ ID NO: 748639 - RNA, 19 nt, Homo sapiens
  misc_RNA (1)...(19): siRNA sense strand
ucaaugaauggcuaacuaa

SEQ ID NO: 748640 - RNA, 19 nt, Homo sapiens
  misc_RNA (1)...(19): siRNA sense strand
gacaagaaaccauucaagu

SEQ ID NO: 748641 - RNA, 19 nt, Homo sapiens
  misc_RNA (1)...(19): siRNA sense strand
agaggaggcuaaaggaaga

SEQ ID NO: 748642 - RNA, 19 nt, Homo sapiens
  misc_RNA (1)...(19): siRNA sense strand
aagaagggauuuacagaag

SEQ ID NO: 748643 - RNA, 19 nt, Homo sapiens
  misc_RNA (1)...(19): siRNA sense strand
ccagaggaaugacgaugau

SEQ ID NO: 748644 - RNA, 19 nt, Homo sapiens
  misc_RNA (1)...(19): siRNA sense strand
cagcaggcacaccaaauaa

SEQ ID NO: 748645 - RNA, 19 nt, Homo sapiens
  misc_RNA (1)...(19): siRNA sense strand
ccaagacaaccaccacaaa

SEQ ID NO: 748646 - RNA, 19 nt, Homo sapiens
  misc_RNA (1)...(19): siRNA sense strand
ccacaaacuuaaacauacu

SEQ ID NO: 748647 - RNA, 19 nt, Homo sapiens
  misc_RNA (1)...(19): siRNA sense strand
aagaaaccauucaaguguu

SEQ ID NO: 748648 - RNA, 19 nt, Homo sapiens
  misc_RNA (1)...(19): siRNA sense strand
aaagaagggauuuacagaa

SEQ ID NO: 748649 - RNA, 19 nt, Homo sapiens
  misc_RNA (1)...(19): siRNA sense strand
gcaguauaccagugcaauu

SEQ ID NO: 748650 - RNA, 19 nt, Homo sapiens
  misc_RNA (1)...(19): siRNA sense strand
gaggaaugacgaugaugaa

SEQ ID NO: 748651 - RNA, 19 nt, Homo sapiens
  misc_RNA (1)...(19): siRNA sense strand
gcugagaaacgccagaaga

SEQ ID NO: 748652 - RNA, 19 nt, Homo sapiens
  misc_RNA (1)...(19): siRNA sense strand
ccaagcagaagaaugcaaa

SEQ ID NO: 748653 - RNA, 19 nt, Homo sapiens
  misc_RNA (1)...(19): siRNA sense strand
cagcaauagucuccaagau

SEQ ID NO: 748654 - RNA, 19 nt, Homo sapiens
  misc_RNA (1)...(19): siRNA sense strand
acaagaaaccauucaagug

SEQ ID NO: 748655 - RNA, 19 nt, Homo sapiens
  misc_RNA (1)...(19): siRNA sense strand
ucagagaggaggaagagaa

SEQ ID NO: 748656 - RNA, 19 nt, Homo sapiens
  misc_RNA (1)...(19): siRNA sense strand
aaaugaaacuaccgagaag

SEQ ID NO: 748657 - RNA, 19 nt, Homo sapiens
  misc_RNA (1)...(19): siRNA sense strand
ggaggugaaugcccagaac

SEQ ID NO: 748658 - RNA, 19 nt, Homo sapiens
  misc_RNA (1)...(19): siRNA sense strand
ggcagaagcaggaggaaga

SEQ ID NO: 748659 - RNA, 19 nt, Homo sapiens
  misc_RNA (1)...(19): siRNA sense strand
cgagggagcauuggagaaa

SEQ ID NO: 748660 - RNA, 19 nt, Homo sapiens
  misc_RNA (1)...(19): siRNA sense strand
aaacagaaacagucaccaa

SEQ ID NO: 748661 - RNA, 19 nt, Homo sapiens
  misc_RNA (1)...(19): siRNA sense strand
ucaagaguaugugggagaa

SEQ ID NO: 748662 - RNA, 19 nt, Homo sapiens
  misc_RNA (1)...(19): siRNA sense strand
uaaaggaagagauugaaag

SEQ ID NO: 748663 - RNA, 19 nt, Homo sapiens
  misc_RNA (1)...(19): siRNA sense strand
caaugaauggcuaacuaaa

SEQ ID NO: 748664 - RNA, 19 nt, Homo sapiens
  misc_RNA (1)...(19): siRNA sense strand
caaaucgacccaucaagca

SEQ ID NO: 748665 - RNA, 19 nt, Homo sapiens
  misc_RNA (1)...(19): siRNA sense strand
aaagguucaucucucaaga

SEQ ID NO: 748666 - RNA, 19 nt, Homo sapiens
  misc_RNA (1)...(19): siRNA sense strand
cagaagauggcuugucaga

SEQ ID NO: 748667 - RNA, 19 nt, Homo sapiens
  misc_RNA (1)...(19): siRNA sense strand
gagauagaggaaacagaaa

SEQ ID NO: 748668 - RNA, 19 nt, Homo sapiens
  misc_RNA (1)...(19): siRNA sense strand
caggagacguauccagcaa

SEQ ID NO: 748669 - RNA, 19 nt, Homo sapiens
  misc_RNA (1)...(19): siRNA sense strand
gcagcaauagucuccaaga

SEQ ID NO: 748670 - RNA, 19 nt, Homo sapiens
  misc_RNA (1)...(19): siRNA sense strand
agaagagcgagcagaauuu

SEQ ID NO: 748671 - RNA, 19 nt, Homo sapiens
  misc_RNA (1)...(19): siRNA sense strand
ugaaagucgccaagaaaga

SEQ ID NO: 748672 - RNA, 19 nt, Homo sapiens
  misc_RNA (1)...(19): siRNA sense strand
uuggagggaugcugaagaa

SEQ ID NO: 748673 - RNA, 19 nt, Homo sapiens
  misc_RNA (1)...(19): siRNA sense strand
gaggaaacagaaacaguca

SEQ ID NO: 748674 - RNA, 19 nt, Homo sapiens
  misc_RNA (1)...(19): siRNA sense strand
gauagaggaaacagaaaca

SEQ ID NO: 748675 - RNA, 19 nt, Homo sapiens
  misc_RNA (1)...(19): siRNA sense strand
aagugaaagucgccaagaa

SEQ ID NO: 748676 - RNA, 19 nt, Homo sapiens
  misc_RNA (1)...(19): siRNA sense strand
aaagcaaucuguggauaag

SEQ ID NO: 748677 - RNA, 19 nt, Homo sapiens
  misc_RNA (1)...(19): siRNA sense strand
aagauggcuugucagauga

SEQ ID NO: 748678 - RNA, 19 nt, Homo sapiens
  misc_RNA (1)...(19): siRNA sense strand
gaggcuaaaggaagagauu

SEQ ID NO: 748679 - RNA, 19 nt, Homo sapiens
  misc_RNA (1)...(19): siRNA sense strand
cccacaaacuuaaacauac

SEQ ID NO: 748680 - RNA, 19 nt, Homo sapiens
  misc_RNA (1)...(19): siRNA sense strand
aaacagucaccaaguccua

SEQ ID NO: 748681 - RNA, 19 nt, Homo sapiens
  misc_RNA (1)...(19): siRNA sense strand
gcagaagcaggaggaagaa

SEQ ID NO: 748682 - RNA, 19 nt, Homo sapiens
  misc_RNA (1)...(19): siRNA sense strand
cagaugacaagaaaccauu

SEQ ID NO: 748683 - RNA, 19 nt, Homo sapiens
  misc_RNA (1)...(19): siRNA sense strand
gcuaaaggaagagauugaa

SEQ ID NO: 748684 - RNA, 19 nt, Homo sapiens
  misc_RNA (1)...(19): siRNA sense strand
gacaaagaacccaaagaag

SEQ ID NO: 748685 - RNA, 19 nt, Homo sapiens
  misc_RNA (1)...(19): siRNA sense strand
aagcggaaccucugggaaa

SEQ ID NO: 748686 - RNA, 19 nt, Homo sapiens
  misc_RNA (1)...(19): siRNA sense strand
gaaaggcgaagagcagaag

SEQ ID NO: 748687 - RNA, 19 nt, Homo sapiens
  misc_RNA (1)...(19): siRNA sense strand
gcuggaggaacucaagaaa

SEQ ID NO: 748688 - RNA, 19 nt, Homo sapiens
  misc_RNA (1)...(19): siRNA sense strand
cgaaagaagggauuuacag

SEQ ID NO: 748689 - RNA, 19 nt, Homo sapiens
  misc_RNA (1)...(19): siRNA sense strand
gaaggaguucgacccaaca

SEQ ID NO: 748690 - RNA, 19 nt, Homo sapiens
  misc_RNA (1)...(19): siRNA sense strand
gaagagcgagcagaauuuu

SEQ ID NO: 748691 - RNA, 19 nt, Homo sapiens
  misc_RNA (1)...(19): siRNA sense strand
cuaaaggaagagauugaaa

SEQ ID NO: 748692 - RNA, 19 nt, Homo sapiens
  misc_RNA (1)...(19): siRNA sense strand
uucaugacccacaaacuua

SEQ ID NO: 748693 - RNA, 19 nt, Homo sapiens
  misc_RNA (1)...(19): siRNA sense strand
ccaaagaagaaguuaagag

SEQ ID NO: 748694 - RNA, 19 nt, Homo sapiens
  misc_RNA (1)...(19): siRNA sense strand
aucaaugaauggcuaacua

SEQ ID NO: 748695 - RNA, 19 nt, Homo sapiens
  misc_RNA (1)...(19): siRNA sense strand
gaagauggcuugucagaug

SEQ ID NO: 748696 - RNA, 19 nt, Homo sapiens
  misc_RNA (1)...(19): siRNA sense strand
gaaguuaagucgcagaaug

SEQ ID NO: 748697 - RNA, 19 nt, Homo sapiens
  misc_RNA (1)...(19): siRNA sense strand
ggacaaagaacccaaagaa

SEQ ID NO: 748698 - RNA, 19 nt, Homo sapiens
  misc_RNA (1)...(19): siRNA sense strand
gaagggauuuacagaaguu

SEQ ID NO: 748699 - RNA, 19 nt, Homo sapiens
  misc_RNA (1)...(19): siRNA sense strand
ggaguucgacccaacaaua

SEQ ID NO: 748700 - RNA, 19 nt, Homo sapiens
  misc_RNA (1)...(19): siRNA sense strand
caaagaacccaaagaagaa

SEQ ID NO: 748701 - RNA, 19 nt, Homo sapiens
  misc_RNA (1)...(19): siRNA sense strand
ggagaaagggaauguguuu

SEQ ID NO: 748702 - RNA, 19 nt, Homo sapiens
  misc_RNA (1)...(19): siRNA sense strand
gaagagaagaggaggcuaa

SEQ ID NO: 748703 - RNA, 19 nt, Homo sapiens
  misc_RNA (1)...(19): siRNA sense strand
gaaagaagggauuuacaga

SEQ ID NO: 748704 - RNA, 19 nt, Homo sapiens
  misc_RNA (1)...(19): siRNA sense strand
gaaaagcaguggugucaaa

SEQ ID NO: 748705 - RNA, 19 nt, Homo sapiens
  misc_RNA (1)...(19): siRNA sense strand
ucgagaagcucaaacagaa

SEQ ID NO: 748706 - RNA, 19 nt, Homo sapiens
  misc_RNA (1)...(19): siRNA sense strand
caagucaccugcucccaaa

SEQ ID NO: 748707 - RNA, 19 nt, Homo sapiens
  misc_RNA (1)...(19): siRNA sense strand
gcagcaggcacaccaaaua

SEQ ID NO: 748708 - RNA, 19 nt, Homo sapiens
  misc_RNA (1)...(19): siRNA sense strand
ggaaacugcuggcuugaag

SEQ ID NO: 748709 - RNA, 19 nt, Homo sapiens
  misc_RNA (1)...(19): siRNA sense strand
gaaugacgaugaugaagag

SEQ ID NO: 748710 - RNA, 19 nt, Homo sapiens
  misc_RNA (1)...(19): siRNA sense strand
caagaaagauacgagauag

SEQ ID NO: 748711 - RNA, 19 nt, Homo sapiens
  misc_RNA (1)...(19): siRNA sense strand
caagaaagaagacaaggaa

SEQ ID NO: 748712 - RNA, 19 nt, Homo sapiens
  misc_RNA (1)...(19): siRNA sense strand
gcagaagaaugcaaaauga

SEQ ID NO: 748713 - RNA, 19 nt, Homo sapiens
  misc_RNA (1)...(19): siRNA sense strand
ccaagaaagauacgagaua

SEQ ID NO: 748714 - RNA, 19 nt, Homo sapiens
  misc_RNA (1)...(19): siRNA sense strand
acaaagaacccaaagaaga

SEQ ID NO: 748715 - RNA, 19 nt, Homo sapiens
  misc_RNA (1)...(19): siRNA sense strand
gaaaagcaaucuguggaua

SEQ ID NO: 748716 - RNA, 19 nt, Homo sapiens
  misc_RNA (1)...(19): siRNA sense strand
caagaaaccauucaagugu

SEQ ID NO: 748717 - RNA, 19 nt, Homo sapiens
  misc_RNA (1)...(19): siRNA sense strand
gccagaagaugccagaaga

SEQ ID NO: 748718 - RNA, 19 nt, Homo sapiens
  misc_RNA (1)...(19): siRNA sense strand
guacgcaacaucaagagua

SEQ ID NO: 748719 - RNA, 19 nt, Homo sapiens
  misc_RNA (1)...(19): siRNA sense strand
ucccaaaccuucugacuug

SEQ ID NO: 748720 - RNA, 19 nt, Homo sapiens
  misc_RNA (1)...(19): siRNA sense strand
ggaaugacgaugaugaaga

SEQ ID NO: 748721 - RNA, 19 nt, Homo sapiens
  misc_RNA (1)...(19): siRNA sense strand
gaaagucgccaagaaagau

SEQ ID NO: 748722 - RNA, 19 nt, Homo sapiens
  misc_RNA (1)...(19): siRNA sense strand
gagaauucaugacccacaa

SEQ ID NO: 748723 - RNA, 19 nt, Homo sapiens
  misc_RNA (1)...(19): siRNA sense strand
gauagaagagcgagcagaa

SEQ ID NO: 748724 - RNA, 19 nt, Homo sapiens
  misc_RNA (1)...(19): siRNA sense strand
aagaagaaguuaagagcuu

SEQ ID NO: 748725 - RNA, 19 nt, Homo sapiens
  misc_RNA (1)...(19): siRNA sense strand
gaagaggaggcuaaaggaa

SEQ ID NO: 748726 - RNA, 19 nt, Homo sapiens
  misc_RNA (1)...(19): siRNA sense strand
cgagauagaggaaacagaa

SEQ ID NO: 748727 - RNA, 19 nt, Homo sapiens
  misc_RNA (1)...(19): siRNA sense strand
gaagguguacgcaacauca

SEQ ID NO: 748728 - RNA, 19 nt, Homo sapiens
  misc_RNA (1)...(19): siRNA sense strand
uagaagagcgagcagaauu

SEQ ID NO: 748729 - RNA, 19 nt, Homo sapiens
  misc_RNA (1)...(19): siRNA sense strand
gaguucgacccaacaauaa

SEQ ID NO: 748730 - RNA, 19 nt, Homo sapiens
  misc_RNA (1)...(19): siRNA sense strand
ccuaaagguucaucucuca

SEQ ID NO: 748731 - RNA, 19 nt, Homo sapiens
  misc_RNA (1)...(19): siRNA sense strand
ggaggaagccgaucgaaaa

SEQ ID NO: 748732 - RNA, 19 nt, Homo sapiens
  misc_RNA (1)...(19): siRNA sense strand
gaucgaaagaagggauuua

SEQ ID NO: 748733 - RNA, 19 nt, Homo sapiens
  misc_RNA (1)...(19): siRNA sense strand
gaacccaaagaagaaguua

SEQ ID NO: 748734 - RNA, 19 nt, Homo sapiens
  misc_RNA (1)...(19): siRNA sense strand
cagaaacagucaccaaguc

SEQ ID NO: 748735 - RNA, 19 nt, Homo sapiens
  misc_RNA (1)...(19): siRNA sense strand
caaaccuucugacuugaga

SEQ ID NO: 748736 - RNA, 19 nt, Homo sapiens
  misc_RNA (1)...(19): siRNA sense strand
gagaagaggaggcuaaagg

SEQ ID NO: 748737 - RNA, 19 nt, Homo sapiens
  misc_RNA (1)...(19): siRNA sense strand
ccaaagcgagggagcauug

SEQ ID NO: 748738 - RNA, 19 nt, Homo sapiens
  misc_RNA (1)...(19): siRNA sense strand
gauacgagauagaggaaac

SEQ ID NO: 748739 - RNA, 19 nt, Homo sapiens
  misc_RNA (1)...(19): siRNA sense strand
ucaaugaauggcuaacuaa

SEQ ID NO: 748740 - RNA, 19 nt, Homo sapiens
  misc_RNA (1)...(19): siRNA sense strand
gacaagaaaccauucaagu

SEQ ID NO: 748741 - RNA, 19 nt, Homo sapiens
  misc_RNA (1)...(19): siRNA sense strand
agaggaggcuaaaggaaga

SEQ ID NO: 748742 - RNA, 19 nt, Homo sapiens
  misc_RNA (1)...(19): siRNA sense strand
aagaagggauuuacagaag

SEQ ID NO: 748743 - RNA, 19 nt, Homo sapiens
  misc_RNA (1)...(19): siRNA sense strand
ccagaggaaugacgaugau

SEQ ID NO: 748744 - RNA, 19 nt, Homo sapiens
  misc_RNA (1)...(19): siRNA sense strand
cagcaggcacaccaaauaa

SEQ ID NO: 748745 - RNA, 19 nt, Homo sapiens
  misc_RNA (1)...(19): siRNA sense strand
ccaagacaaccaccacaaa

SEQ ID NO: 748746 - RNA, 19 nt, Homo sapiens
  misc_RNA (1)...(19): siRNA sense strand
ccacaaacuuaaacauacu

SEQ ID NO: 748747 - RNA, 19 nt, Homo sapiens
  misc_RNA (1)...(19): siRNA sense strand
aagaaaccauucaaguguu

SEQ ID NO: 748748 - RNA, 19 nt, Homo sapiens
  misc_RNA (1)...(19): siRNA sense strand
aaagaagggauuuacagaa

SEQ ID NO: 748749 - RNA, 19 nt, Homo sapiens
  misc_RNA (1)...(19): siRNA sense strand
gcaguauaccagugcaauu

SEQ ID NO: 748750 - RNA, 19 nt, Homo sapiens
  misc_RNA (1)...(19): siRNA sense strand
gaggaaugacgaugaugaa

SEQ ID NO: 748751 - RNA, 19 nt, Homo sapiens
  misc_RNA (1)...(19): siRNA sense strand
gcugagaaacgccagaaga

SEQ ID NO: 748752 - RNA, 19 nt, Homo sapiens
  misc_RNA (1)...(19): siRNA sense strand
ccaagcagaagaaugcaaa

SEQ ID NO: 748753 - RNA, 19 nt, Homo sapiens
  misc_RNA (1)...(19): siRNA sense strand
cagcaauagucuccaagau

SEQ ID NO: 748754 - RNA, 19 nt, Homo sapiens
  misc_RNA (1)...(19): siRNA sense strand
acaagaaaccauucaagug

SEQ ID NO: 748755 - RNA, 19 nt, Homo sapiens
  misc_RNA (1)...(19): siRNA sense strand
ucagagaggaggaagagaa

SEQ ID NO: 748756 - RNA, 19 nt, Homo sapiens
  misc_RNA (1)...(19): siRNA sense strand
aaaugaaacuaccgagaag

SEQ ID NO: 748757 - RNA, 19 nt, Homo sapiens
  misc_RNA (1)...(19): siRNA sense strand
ggaggugaaugcccagaac

SEQ ID NO: 748758 - RNA, 19 nt, Homo sapiens
  misc_RNA (1)...(19): siRNA sense strand
ggcagaagcaggaggaaga

SEQ ID NO: 748759 - RNA, 19 nt, Homo sapiens
  misc_RNA (1)...(19): siRNA sense strand
cgagggagcauuggagaaa

SEQ ID NO: 748760 - RNA, 19 nt, Homo sapiens
  misc_RNA (1)...(19): siRNA sense strand
aaacagaaacagucaccaa

SEQ ID NO: 748761 - RNA, 19 nt, Homo sapiens
  misc_RNA (1)...(19): siRNA sense strand
ucaagaguaugugggagaa

SEQ ID NO: 748762 - RNA, 19 nt, Homo sapiens
  misc_RNA (1)...(19): siRNA sense strand
uaaaggaagagauugaaag

SEQ ID NO: 748763 - RNA, 19 nt, Homo sapiens
  misc_RNA (1)...(19): siRNA sense strand
caaugaauggcuaacuaaa

SEQ ID NO: 748764 - RNA, 19 nt, Homo sapiens
  misc_RNA (1)...(19): siRNA sense strand
caaaucgacccaucaagca

SEQ ID NO: 748765 - RNA, 19 nt, Homo sapiens
  misc_RNA (1)...(19): siRNA sense strand
aaagguucaucucucaaga

SEQ ID NO: 748766 - RNA, 19 nt, Homo sapiens
  misc_RNA (1)...(19): siRNA sense strand
cagaagauggcuugucaga

SEQ ID NO: 748767 - RNA, 19 nt, Homo sapiens
  misc_RNA (1)...(19): siRNA sense strand
gagauagaggaaacagaaa

SEQ ID NO: 748768 - RNA, 19 nt, Homo sapiens
  misc_RNA (1)...(19): siRNA sense strand
caggagacguauccagcaa

SEQ ID NO: 748769 - RNA, 19 nt, Homo sapiens
  misc_RNA (1)...(19): siRNA sense strand
gcagcaauagucuccaaga

SEQ ID NO: 748770 - RNA, 19 nt, Homo sapiens
  misc_RNA (1)...(19): siRNA sense strand
agaagagcgagcagaauuu

SEQ ID NO: 748771 - RNA, 19 nt, Homo sapiens
  misc_RNA (1)...(19): siRNA sense strand
ugaaagucgccaagaaaga

SEQ ID NO: 748772 - RNA, 19 nt, Homo sapiens
  misc_RNA (1)...(19): siRNA sense strand
uuggagggaugcugaagaa

SEQ ID NO: 748773 - RNA, 19 nt, Homo sapiens
  misc_RNA (1)...(19): siRNA sense strand
gaggaaacagaaacaguca

SEQ ID NO: 748774 - RNA, 19 nt, Homo sapiens
  misc_RNA (1)...(19): siRNA sense strand
gauagaggaaacagaaaca

SEQ ID NO: 748775 - RNA, 19 nt, Homo sapiens
  misc_RNA (1)...(19): siRNA sense strand
aagugaaagucgccaagaa

SEQ ID NO: 748776 - RNA, 19 nt, Homo sapiens
  misc_RNA (1)...(19): siRNA sense strand
aaagcaaucuguggauaag

SEQ ID NO: 748777 - RNA, 19 nt, Homo sapiens
  misc_RNA (1)...(19): siRNA sense strand
aagauggcuugucagauga

SEQ ID NO: 748778 - RNA, 19 nt, Homo sapiens
  misc_RNA (1)...(19): siRNA sense strand
gaggcuaaaggaagagauu

SEQ ID NO: 748779 - RNA, 19 nt, Homo sapiens
  misc_RNA (1)...(19): siRNA sense strand
cccacaaacuuaaacauac

SEQ ID NO: 748780 - RNA, 19 nt, Homo sapiens
  misc_RNA (1)...(19): siRNA sense strand
aaacagucaccaaguccua

SEQ ID NO: 748781 - RNA, 19 nt, Homo sapiens
  misc_RNA (1)...(19): siRNA sense strand
gcagaagcaggaggaagaa

SEQ ID NO: 748782 - RNA, 19 nt, Homo sapiens
  misc_RNA (1)...(19): siRNA sense strand
cagaugacaagaaaccauu

SEQ ID NO: 748783 - RNA, 19 nt, Homo sapiens
  misc_RNA (1)...(19): siRNA sense strand
gcuaaaggaagagauugaa

SEQ ID NO: 748784 - RNA, 19 nt, Homo sapiens
  misc_RNA (1)...(19): siRNA sense strand
gacaaagaacccaaagaag

SEQ ID NO: 748785 - RNA, 19 nt, Homo sapiens
  misc_RNA (1)...(19): siRNA sense strand
aagcggaaccucugggaaa

SEQ ID NO: 748786 - RNA, 19 nt, Homo sapiens
  misc_RNA (1)...(19): siRNA sense strand
gaaaggcgaagagcagaag

SEQ ID NO: 748787 - RNA, 19 nt, Homo sapiens
  misc_RNA (1)...(19): siRNA sense strand
gcuggaggaacucaagaaa

SEQ ID NO: 748788 - RNA, 19 nt, Homo sapiens
  misc_RNA (1)...(19): siRNA sense strand
cgaaagaagggauuuacag

SEQ ID NO: 748789 - RNA, 19 nt, Homo sapiens
  misc_RNA (1)...(19): siRNA sense strand
gaaggaguucgacccaaca

SEQ ID NO: 748790 - RNA, 19 nt, Homo sapiens
  misc_RNA (1)...(19): siRNA sense strand
gaagagcgagcagaauuuu

SEQ ID NO: 748791 - RNA, 19 nt, Homo sapiens
  misc_RNA (1)...(19): siRNA sense strand
cuaaaggaagagauugaaa

SEQ ID NO: 748792 - RNA, 19 nt, Homo sapiens
  misc_RNA (1)...(19): siRNA sense strand
uucaugacccacaaacuua

SEQ ID NO: 748793 - RNA, 19 nt, Homo sapiens
  misc_RNA (1)...(19): siRNA sense strand
ccaaagaagaaguuaagag

SEQ ID NO: 748794 - RNA, 19 nt, Homo sapiens
  misc_RNA (1)...(19): siRNA sense strand
aucaaugaauggcuaacua

SEQ ID NO: 748795 - RNA, 19 nt, Homo sapiens
  misc_RNA (1)...(19): siRNA sense strand
gaagauggcuugucagaug

SEQ ID NO: 748796 - RNA, 19 nt, Homo sapiens
  misc_RNA (1)...(19): siRNA sense strand
gaaguuaagucgcagaaug

SEQ ID NO: 748797 - RNA, 19 nt, Homo sapiens
  misc_RNA (1)...(19): siRNA sense strand
ggacaaagaacccaaagaa

SEQ ID NO: 748798 - RNA, 19 nt, Homo sapiens
  misc_RNA (1)...(19): siRNA sense strand
gaagggauuuacagaaguu

SEQ ID NO: 748799 - RNA, 19 nt, Homo sapiens
  misc_RNA (1)...(19): siRNA sense strand
ggaguucgacccaacaaua

SEQ ID NO: 748800 - RNA, 19 nt, Homo sapiens
  misc_RNA (1)...(19): siRNA sense strand
caaagaacccaaagaagaa

SEQ ID NO: 748801 - RNA, 19 nt, Homo sapiens
  misc_RNA (1)...(19): siRNA sense strand
ggagaaagggaauguguuu

SEQ ID NO: 748802 - RNA, 19 nt, Homo sapiens
  misc_RNA (1)...(19): siRNA sense strand
gaagagaagaggaggcuaa

SEQ ID NO: 748803 - RNA, 19 nt, Homo sapiens
  misc_RNA (1)...(19): siRNA sense strand
gaaagaagggauuuacaga

SEQ ID NO: 748804 - RNA, 19 nt, Homo sapiens
  misc_RNA (1)...(19): siRNA sense strand
gaaaagcaguggugucaaa

SEQ ID NO: 748805 - RNA, 19 nt, Homo sapiens
  misc_RNA (1)...(19): siRNA sense strand
ucgagaagcucaaacagaa

SEQ ID NO: 748806 - RNA, 19 nt, Homo sapiens
  misc_RNA (1)...(19): siRNA sense strand
caagucaccugcucccaaa

SEQ ID NO: 748807 - RNA, 19 nt, Homo sapiens
  misc_RNA (1)...(19): siRNA sense strand
gcagcaggcacaccaaaua

SEQ ID NO: 748808 - RNA, 19 nt, Homo sapiens
  misc_RNA (1)...(19): siRNA sense strand
ggaaacugcuggcuugaag

SEQ ID NO: 748809 - RNA, 19 nt, Homo sapiens
  misc_RNA (1)...(19): siRNA sense strand
gaaugacgaugaugaagag

SEQ ID NO: 748810 - RNA, 19 nt, Homo sapiens
  misc_RNA (1)...(19): siRNA sense strand
caagaaagauacgagauag

SEQ ID NO: 748811 - RNA, 19 nt, Homo sapiens
  misc_RNA (1)...(19): siRNA sense strand
caagaaagaagacaaggaa

SEQ ID NO: 748812 - RNA, 19 nt, Homo sapiens
  misc_RNA (1)...(19): siRNA sense strand
gcagaagaaugcaaaauga

SEQ ID NO: 748813 - RNA, 19 nt, Homo sapiens
  misc_RNA (1)...(19): siRNA sense strand
ccaagaaagauacgagaua

SEQ ID NO: 748814 - RNA, 19 nt, Homo sapiens
  misc_RNA (1)...(19): siRNA sense strand
acaaagaacccaaagaaga

SEQ ID NO: 748815 - RNA, 19 nt, Homo sapiens
  misc_RNA (1)...(19): siRNA sense strand
gaaaagcaaucuguggaua

SEQ ID NO: 748816 - RNA, 19 nt, Homo sapiens
  misc_RNA (1)...(19): siRNA sense strand
caagaaaccauucaagugu

SEQ ID NO: 748817 - RNA, 19 nt, Homo sapiens
  misc_RNA (1)...(19): siRNA sense strand
gccagaagaugccagaaga

SEQ ID NO: 748818 - RNA, 19 nt, Homo sapiens
  misc_RNA (1)...(19): siRNA sense strand
guacgcaacaucaagagua

SEQ ID NO: 748819 - RNA, 19 nt, Homo sapiens
  misc_RNA (1)...(19): siRNA sense strand
ucccaaaccuucugacuug

SEQ ID NO: 748820 - RNA, 19 nt, Homo sapiens
  misc_RNA (1)...(19): siRNA sense strand
ggaaugacgaugaugaaga

SEQ ID NO: 748821 - RNA, 19 nt, Homo sapiens
  misc_RNA (1)...(19): siRNA sense strand
gaaagucgccaagaaagau

SEQ ID NO: 748822 - RNA, 19 nt, Homo sapiens
  misc_RNA (1)...(19): siRNA sense strand
gagaauucaugacccacaa

SEQ ID NO: 748823 - RNA, 19 nt, Homo sapiens
  misc_RNA (1)...(19): siRNA sense strand
gauagaagagcgagcagaa

SEQ ID NO: 748824 - RNA, 19 nt, Homo sapiens
  misc_RNA (1)...(19): siRNA sense strand
aagaagaaguuaagagcuu

SEQ ID NO: 748825 - RNA, 19 nt, Homo sapiens
  misc_RNA (1)...(19): siRNA sense strand
gaagaggaggcuaaaggaa

SEQ ID NO: 748826 - RNA, 19 nt, Homo sapiens
  misc_RNA (1)...(19): siRNA sense strand
cgagauagaggaaacagaa

SEQ ID NO: 748827 - RNA, 19 nt, Homo sapiens
  misc_RNA (1)...(19): siRNA sense strand
gaagguguacgcaacauca

SEQ ID NO: 748828 - RNA, 19 nt, Homo sapiens
  misc_RNA (1)...(19): siRNA sense strand
uagaagagcgagcagaauu

SEQ ID NO: 748829 - RNA, 19 nt, Homo sapiens
  misc_RNA (1)...(19): siRNA sense strand
gaguucgacccaacaauaa

SEQ ID NO: 748830 - RNA, 19 nt, Homo sapiens
  misc_RNA (1)...(19): siRNA sense strand
ccuaaagguucaucucuca

SEQ ID NO: 748831 - RNA, 19 nt, Homo sapiens
  misc_RNA (1)...(19): siRNA sense strand
ggaggaagccgaucgaaaa

SEQ ID NO: 748832 - RNA, 19 nt, Homo sapiens
  misc_RNA (1)...(19): siRNA sense strand
gaucgaaagaagggauuua

SEQ ID NO: 748833 - RNA, 19 nt, Homo sapiens
  misc_RNA (1)...(19): siRNA sense strand
gaacccaaagaagaaguua

SEQ ID NO: 748834 - RNA, 19 nt, Homo sapiens
  misc_RNA (1)...(19): siRNA sense strand
cagaaacagucaccaaguc

SEQ ID NO: 748835 - RNA, 19 nt, Homo sapiens
  misc_RNA (1)...(19): siRNA sense strand
caaaccuucugacuugaga

SEQ ID NO: 748836 - RNA, 19 nt, Homo sapiens
  misc_RNA (1)...(19): siRNA sense strand
gagaagaggaggcuaaagg

SEQ ID NO: 748837 - RNA, 19 nt, Homo sapiens
  misc_RNA (1)...(19): siRNA sense strand
ccaaagcgagggagcauug

SEQ ID NO: 748838 - RNA, 19 nt, Homo sapiens
  misc_RNA (1)...(19): siRNA sense strand
gauacgagauagaggaaac

SEQ ID NO: 748839 - RNA, 19 nt, Homo sapiens
  misc_RNA (1)...(19): siRNA sense strand
ucaaugaauggcuaacuaa

SEQ ID NO: 748840 - RNA, 19 nt, Homo sapiens
  misc_RNA (1)...(19): siRNA sense strand
gacaagaaaccauucaagu

SEQ ID NO: 748841 - RNA, 19 nt, Homo sapiens
  misc_RNA (1)...(19): siRNA sense strand
agaggaggcuaaaggaaga

SEQ ID NO: 748842 - RNA, 19 nt, Homo sapiens
  misc_RNA (1)...(19): siRNA sense strand
aagaagggauuuacagaag

SEQ ID NO: 748843 - RNA, 19 nt, Homo sapiens
  misc_RNA (1)...(19): siRNA sense strand
ccagaggaaugacgaugau

SEQ ID NO: 748844 - RNA, 19 nt, Homo sapiens
  misc_RNA (1)...(19): siRNA sense strand
cagcaggcacaccaaauaa

SEQ ID NO: 748845 - RNA, 19 nt, Homo sapiens
  misc_RNA (1)...(19): siRNA sense strand
ccaagacaaccaccacaaa

SEQ ID NO: 748846 - RNA, 19 nt, Homo sapiens
  misc_RNA (1)...(19): siRNA sense strand
ccacaaacuuaaacauacu

SEQ ID NO: 748847 - RNA, 19 nt, Homo sapiens
  misc_RNA (1)...(19): siRNA sense strand
aagaaaccauucaaguguu

SEQ ID NO: 748848 - RNA, 19 nt, Homo sapiens
  misc_RNA (1)...(19): siRNA sense strand
aaagaagggauuuacagaa

SEQ ID NO: 748849 - RNA, 19 nt, Homo sapiens
  misc_RNA (1)...(19): siRNA sense strand
gcaguauaccagugcaauu

SEQ ID NO: 748850 - RNA, 19 nt, Homo sapiens
  misc_RNA (1)...(19): siRNA sense strand
gaggaaugacgaugaugaa

SEQ ID NO: 748851 - RNA, 19 nt, Homo sapiens
  misc_RNA (1)...(19): siRNA sense strand
gcugagaaacgccagaaga

SEQ ID NO: 748852 - RNA, 19 nt, Homo sapiens
  misc_RNA (1)...(19): siRNA sense strand
ccaagcagaagaaugcaaa

SEQ ID NO: 748853 - RNA, 19 nt, Homo sapiens
  misc_RNA (1)...(19): siRNA sense strand
cagcaauagucuccaagau

SEQ ID NO: 748854 - RNA, 19 nt, Homo sapiens
  misc_RNA (1)...(19): siRNA sense strand
acaagaaaccauucaagug

SEQ ID NO: 748855 - RNA, 19 nt, Homo sapiens
  misc_RNA (1)...(19): siRNA sense strand
ucagagaggaggaagagaa

SEQ ID NO: 748856 - RNA, 19 nt, Homo sapiens
  misc_RNA (1)...(19): siRNA sense strand
aaaugaaacuaccgagaag

SEQ ID NO: 748857 - RNA, 19 nt, Homo sapiens
  misc_RNA (1)...(19): siRNA sense strand
ggaggugaaugcccagaac

SEQ ID NO: 748858 - RNA, 19 nt, Homo sapiens
  misc_RNA (1)...(19): siRNA sense strand
ggcagaagcaggaggaaga

SEQ ID NO: 748859 - RNA, 19 nt, Homo sapiens
  misc_RNA (1)...(19): siRNA sense strand
cgagggagcauuggagaaa

SEQ ID NO: 748860 - RNA, 19 nt, Homo sapiens
  misc_RNA (1)...(19): siRNA sense strand
aaacagaaacagucaccaa

SEQ ID NO: 748861 - RNA, 19 nt, Homo sapiens
  misc_RNA (1)...(19): siRNA sense strand
ucaagaguaugugggagaa

SEQ ID NO: 748862 - RNA, 19 nt, Homo sapiens
  misc_RNA (1)...(19): siRNA sense strand
uaaaggaagagauugaaag

SEQ ID NO: 748863 - RNA, 19 nt, Homo sapiens
  misc_RNA (1)...(19): siRNA sense strand
caaugaauggcuaacuaaa

SEQ ID NO: 748864 - RNA, 19 nt, Homo sapiens
  misc_RNA (1)...(19): siRNA sense strand
caaaucgacccaucaagca

SEQ ID NO: 748865 - RNA, 19 nt, Homo sapiens
  misc_RNA (1)...(19): siRNA sense strand
aaagguucaucucucaaga

SEQ ID NO: 748866 - RNA, 19 nt, Homo sapiens
  misc_RNA (1)...(19): siRNA sense strand
cagaagauggcuugucaga

SEQ ID NO: 748867 - RNA, 19 nt, Homo sapiens
  misc_RNA (1)...(19): siRNA sense strand
gagauagaggaaacagaaa

SEQ ID NO: 748868 - RNA, 19 nt, Homo sapiens
  misc_RNA (1)...(19): siRNA sense strand
caggagacguauccagcaa

SEQ ID NO: 748869 - RNA, 19 nt, Homo sapiens
  misc_RNA (1)...(19): siRNA sense strand
gcagcaauagucuccaaga

SEQ ID NO: 748870 - RNA, 19 nt, Homo sapiens
  misc_RNA (1)...(19): siRNA sense strand
agaagagcgagcagaauuu

SEQ ID NO: 748871 - RNA, 19 nt, Homo sapiens
  misc_RNA (1)...(19): siRNA sense strand
ugaaagucgccaagaaaga

SEQ ID NO: 748872 - RNA, 19 nt, Homo sapiens
  misc_RNA (1)...(19): siRNA sense strand
uuggagggaugcugaagaa

SEQ ID NO: 748873 - RNA, 19 nt, Homo sapiens
  misc_RNA (1)...(19): siRNA sense strand
gaggaaacagaaacaguca

SEQ ID NO: 748874 - RNA, 19 nt, Homo sapiens
  misc_RNA (1)...(19): siRNA sense strand
gauagaggaaacagaaaca

SEQ ID NO: 748875 - RNA, 19 nt, Homo sapiens
  misc_RNA (1)...(19): siRNA sense strand
aagugaaagucgccaagaa

SEQ ID NO: 748876 - RNA, 19 nt, Homo sapiens
  misc_RNA (1)...(19): siRNA sense strand
aaagcaaucuguggauaag

SEQ ID NO: 748877 - RNA, 19 nt, Homo sapiens
  misc_RNA (1)...(19): siRNA sense strand
aagauggcuugucagauga

SEQ ID NO: 748878 - RNA, 19 nt, Homo sapiens
  misc_RNA (1)...(19): siRNA sense strand
gaggcuaaaggaagagauu

SEQ ID NO: 748879 - RNA, 19 nt, Homo sapiens
  misc_RNA (1)...(19): siRNA sense strand
cccacaaacuuaaacauac

SEQ ID NO: 748880 - RNA, 19 nt, Homo sapiens
  misc_RNA (1)...(19): siRNA sense strand
aaacagucaccaaguccua

SEQ ID NO: 748881 - RNA, 19 nt, Homo sapiens
  misc_RNA (1)...(19): siRNA sense strand
gcagaagcaggaggaagaa

SEQ ID NO: 748882 - RNA, 19 nt, Homo sapiens
  misc_RNA (1)...(19): siRNA sense strand
cagaugacaagaaaccauu

SEQ ID NO: 748883 - RNA, 19 nt, Homo sapiens
  misc_RNA (1)...(19): siRNA sense strand
gcuaaaggaagagauugaa

SEQ ID NO: 748884 - RNA, 19 nt, Homo sapiens
  misc_RNA (1)...(19): siRNA sense strand
gacaaagaacccaaagaag

SEQ ID NO: 748885 - RNA, 19 nt, Homo sapiens
  misc_RNA (1)...(19): siRNA sense strand
aagcggaaccucugggaaa

SEQ ID NO: 748886 - RNA, 19 nt, Homo sapiens
  misc_RNA (1)...(19): siRNA sense strand
gaaaggcgaagagcagaag

SEQ ID NO: 748887 - RNA, 19 nt, Homo sapiens
  misc_RNA (1)...(19): siRNA sense strand
gcuggaggaacucaagaaa

SEQ ID NO: 748888 - RNA, 19 nt, Homo sapiens
  misc_RNA (1)...(19): siRNA sense strand
cgaaagaagggauuuacag

SEQ ID NO: 748889 - RNA, 19 nt, Homo sapiens
  misc_RNA (1)...(19): siRNA sense strand
gaaggaguucgacccaaca

SEQ ID NO: 748890 - RNA, 19 nt, Homo sapiens
  misc_RNA (1)...(19): siRNA sense strand
gaagagcgagcagaauuuu

SEQ ID NO: 748891 - RNA, 19 nt, Homo sapiens
  misc_RNA (1)...(19): siRNA sense strand
cuaaaggaagagauugaaa

SEQ ID NO: 748892 - RNA, 19 nt, Homo sapiens
  misc_RNA (1)...(19): siRNA sense strand
uucaugacccacaaacuua

SEQ ID NO: 748893 - RNA, 19 nt, Homo sapiens
  misc_RNA (1)...(19): siRNA sense strand
ccaaagaagaaguuaagag

SEQ ID NO: 748894 - RNA, 19 nt, Homo sapiens
  misc_RNA (1)...(19): siRNA sense strand
aucaaugaauggcuaacua

SEQ ID NO: 748895 - RNA, 19 nt, Homo sapiens
  misc_RNA (1)...(19): siRNA sense strand
gaagauggcuugucagaug

SEQ ID NO: 748896 - RNA, 19 nt, Homo sapiens
  misc_RNA (1)...(19): siRNA sense strand
gaaguuaagucgcagaaug

SEQ ID NO: 748897 - RNA, 19 nt, Homo sapiens
  misc_RNA (1)...(19): siRNA sense strand
ggacaaagaacccaaagaa

SEQ ID NO: 748898 - RNA, 19 nt, Homo sapiens
  misc_RNA (1)...(19): siRNA sense strand
gaagggauuuacagaaguu

SEQ ID NO: 748899 - RNA, 19 nt, Homo sapiens
  misc_RNA (1)...(19): siRNA sense strand
ggaguucgacccaacaaua

SEQ ID NO: 748900 - RNA, 19 nt, Homo sapiens
  misc_RNA (1)...(19): siRNA sense strand
caaagaacccaaagaagaa

SEQ ID NO: 748901 - RNA, 19 nt, Homo sapiens
  misc_RNA (1)...(19): siRNA sense strand
ggagaaagggaauguguuu

SEQ ID NO: 748902 - RNA, 19 nt, Homo sapiens
  misc_RNA (1)...(19): siRNA sense strand
gaagagaagaggaggcuaa

SEQ ID NO: 748903 - RNA, 19 nt, Homo sapiens
  misc_RNA (1)...(19): siRNA sense strand
gaaagaagggauuuacaga

SEQ ID NO: 748904 - RNA, 19 nt, Homo sapiens
  misc_RNA (1)...(19): siRNA sense strand
gaaaagcaguggugucaaa

SEQ ID NO: 748905 - RNA, 19 nt, Homo sapiens
  misc_RNA (1)...(19): siRNA sense strand
ucgagaagcucaaacagaa

SEQ ID NO: 748906 - RNA, 19 nt, Homo sapiens
  misc_RNA (1)...(19): siRNA sense strand
caagucaccugcucccaaa

SEQ ID NO: 748907 - RNA, 19 nt, Homo sapiens
  misc_RNA (1)...(19): siRNA sense strand
gcagcaggcacaccaaaua

SEQ ID NO: 748908 - RNA, 19 nt, Homo sapiens
  misc_RNA (1)...(19): siRNA sense strand
ggaaacugcuggcuugaag

SEQ ID NO: 748909 - RNA, 19 nt, Homo sapiens
  misc_RNA (1)...(19): siRNA sense strand
gaaugacgaugaugaagag

SEQ ID NO: 748910 - RNA, 19 nt, Homo sapiens
  misc_RNA (1)...(19): siRNA sense strand
caagaaagauacgagauag

SEQ ID NO: 748911 - RNA, 19 nt, Homo sapiens
  misc_RNA (1)...(19): siRNA sense strand
caagaaagaagacaaggaa

SEQ ID NO: 748912 - RNA, 19 nt, Homo sapiens
  misc_RNA (1)...(19): siRNA sense strand
gcagaagaaugcaaaauga

SEQ ID NO: 748913 - RNA, 19 nt, Homo sapiens
  misc_RNA (1)...(19): siRNA sense strand
ccaagaaagauacgagaua

SEQ ID NO: 748914 - RNA, 19 nt, Homo sapiens
  misc_RNA (1)...(19): siRNA sense strand
acaaagaacccaaagaaga

SEQ ID NO: 748915 - RNA, 19 nt, Homo sapiens
  misc_RNA (1)...(19): siRNA sense strand
gaaaagcaaucuguggaua

SEQ ID NO: 748916 - RNA, 19 nt, Homo sapiens
  misc_RNA (1)...(19): siRNA sense strand
caagaaaccauucaagugu

SEQ ID NO: 748917 - RNA, 19 nt, Homo sapiens
  misc_RNA (1)...(19): siRNA sense strand
gccagaagaugccagaaga

SEQ ID NO: 748918 - RNA, 19 nt, Homo sapiens
  misc_RNA (1)...(19): siRNA sense strand
guacgcaacaucaagagua

SEQ ID NO: 748919 - RNA, 19 nt, Homo sapiens
  misc_RNA (1)...(19): siRNA sense strand
ucccaaaccuucugacuug

SEQ ID NO: 748920 - RNA, 19 nt, Homo sapiens
  misc_RNA (1)...(19): siRNA sense strand
ggaaugacgaugaugaaga

SEQ ID NO: 748921 - RNA, 19 nt, Homo sapiens
  misc_RNA (1)...(19): siRNA sense strand
gaaagucgccaagaaagau

SEQ ID NO: 748922 - RNA, 19 nt, Homo sapiens
  misc_RNA (1)...(19): siRNA sense strand
gagaauucaugacccacaa

SEQ ID NO: 748923 - RNA, 19 nt, Homo sapiens
  misc_RNA (1)...(19): siRNA sense strand
gauagaagagcgagcagaa

SEQ ID NO: 748924 - RNA, 19 nt, Homo sapiens
  misc_RNA (1)...(19): siRNA sense strand
aagaagaaguuaagagcuu

SEQ ID NO: 748925 - RNA, 19 nt, Homo sapiens
  misc_RNA (1)...(19): siRNA sense strand
gaagaggaggcuaaaggaa

SEQ ID NO: 748926 - RNA, 19 nt, Homo sapiens
  misc_RNA (1)...(19): siRNA sense strand
cgagauagaggaaacagaa

SEQ ID NO: 748927 - RNA, 19 nt, Homo sapiens
  misc_RNA (1)...(19): siRNA sense strand
gaagguguacgcaacauca

SEQ ID NO: 748928 - RNA, 19 nt, Homo sapiens
  misc_RNA (1)...(19): siRNA sense strand
uagaagagcgagcagaauu

SEQ ID NO: 748929 - RNA, 19 nt, Homo sapiens
  misc_RNA (1)...(19): siRNA sense strand
gaguucgacccaacaauaa

SEQ ID NO: 748930 - RNA, 19 nt, Homo sapiens
  misc_RNA (1)...(19): siRNA sense strand
ccuaaagguucaucucuca

SEQ ID NO: 748931 - RNA, 19 nt, Homo sapiens
  misc_RNA (1)...(19): siRNA sense strand
ggaggaagccgaucgaaaa

SEQ ID NO: 748932 - RNA, 19 nt, Homo sapiens
  misc_RNA (1)...(19): siRNA sense strand
gaucgaaagaagggauuua

SEQ ID NO: 748933 - RNA, 19 nt, Homo sapiens
  misc_RNA (1)...(19): siRNA sense strand
gaacccaaagaagaaguua

SEQ ID NO: 748934 - RNA, 19 nt, Homo sapiens
  misc_RNA (1)...(19): siRNA sense strand
cagaaacagucaccaaguc

SEQ ID NO: 748935 - RNA, 19 nt, Homo sapiens
  misc_RNA (1)...(19): siRNA sense strand
caaaccuucugacuugaga

SEQ ID NO: 748936 - RNA, 19 nt, Homo sapiens
  misc_RNA (1)...(19): siRNA sense strand
gagaagaggaggcuaaagg

SEQ ID NO: 748937 - RNA, 19 nt, Homo sapiens
  misc_RNA (1)...(19): siRNA sense strand
ccaaagcgagggagcauug

SEQ ID NO: 748938 - RNA, 19 nt, Homo sapiens
  misc_RNA (1)...(19): siRNA sense strand
gauacgagauagaggaaac

SEQ ID NO: 748939 - RNA, 19 nt, Homo sapiens
  misc_RNA (1)...(19): siRNA sense strand
ucaaugaauggcuaacuaa

SEQ ID NO: 748940 - RNA, 19 nt, Homo sapiens
  misc_RNA (1)...(19): siRNA sense strand
gacaagaaaccauucaagu

SEQ ID NO: 748941 - RNA, 19 nt, Homo sapiens
  misc_RNA (1)...(19): siRNA sense strand
agaggaggcuaaaggaaga

SEQ ID NO: 748942 - RNA, 19 nt, Homo sapiens
  misc_RNA (1)...(19): siRNA sense strand
aagaagggauuuacagaag

SEQ ID NO: 748943 - RNA, 19 nt, Homo sapiens
  misc_RNA (1)...(19): siRNA sense strand
ccagaggaaugacgaugau

SEQ ID NO: 748944 - RNA, 19 nt, Homo sapiens
  misc_RNA (1)...(19): siRNA sense strand
cagcaggcacaccaaauaa

SEQ ID NO: 748945 - RNA, 19 nt, Homo sapiens
  misc_RNA (1)...(19): siRNA sense strand
ccaagacaaccaccacaaa

SEQ ID NO: 748946 - RNA, 19 nt, Homo sapiens
  misc_RNA (1)...(19): siRNA sense strand
ccacaaacuuaaacauacu

SEQ ID NO: 748947 - RNA, 19 nt, Homo sapiens
  misc_RNA (1)...(19): siRNA sense strand
aagaaaccauucaaguguu

SEQ ID NO: 748948 - RNA, 19 nt, Homo sapiens
  misc_RNA (1)...(19): siRNA sense strand
aaagaagggauuuacagaa

SEQ ID NO: 748949 - RNA, 19 nt, Homo sapiens
  misc_RNA (1)...(19): siRNA sense strand
gcaguauaccagugcaauu

SEQ ID NO: 748950 - RNA, 19 nt, Homo sapiens
  misc_RNA (1)...(19): siRNA sense strand
gaggaaugacgaugaugaa

SEQ ID NO: 748951 - RNA, 19 nt, Homo sapiens
  misc_RNA (1)...(19): siRNA sense strand
gcugagaaacgccagaaga

SEQ ID NO: 748952 - RNA, 19 nt, Homo sapiens
  misc_RNA (1)...(19): siRNA sense strand
ccaagcagaagaaugcaaa

SEQ ID NO: 748953 - RNA, 19 nt, Homo sapiens
  misc_RNA (1)...(19): siRNA sense strand
cagcaauagucuccaagau

SEQ ID NO: 748954 - RNA, 19 nt, Homo sapiens
  misc_RNA (1)...(19): siRNA sense strand
acaagaaaccauucaagug

SEQ ID NO: 748955 - RNA, 19 nt, Homo sapiens
  misc_RNA (1)...(19): siRNA sense strand
ucagagaggaggaagagaa

SEQ ID NO: 748956 - RNA, 19 nt, Homo sapiens
  misc_RNA (1)...(19): siRNA sense strand
aaaugaaacuaccgagaag

SEQ ID NO: 748957 - RNA, 19 nt, Homo sapiens
  misc_RNA (1)...(19): siRNA sense strand
ggaggugaaugcccagaac

SEQ ID NO: 748958 - RNA, 19 nt, Homo sapiens
  misc_RNA (1)...(19): siRNA sense strand
ggcagaagcaggaggaaga

SEQ ID NO: 748959 - RNA, 19 nt, Homo sapiens
  misc_RNA (1)...(19): siRNA sense strand
cgagggagcauuggagaaa

SEQ ID NO: 748960 - RNA, 19 nt, Homo sapiens
  misc_RNA (1)...(19): siRNA sense strand
aaacagaaacagucaccaa

SEQ ID NO: 748961 - RNA, 19 nt, Homo sapiens
  misc_RNA (1)...(19): siRNA sense strand
ucaagaguaugugggagaa

SEQ ID NO: 748962 - RNA, 19 nt, Homo sapiens
  misc_RNA (1)...(19): siRNA sense strand
uaaaggaagagauugaaag

SEQ ID NO: 748963 - RNA, 19 nt, Homo sapiens
  misc_RNA (1)...(19): siRNA sense strand
caaugaauggcuaacuaaa

SEQ ID NO: 748964 - RNA, 19 nt, Homo sapiens
  misc_RNA (1)...(19): siRNA sense strand
caaaucgacccaucaagca

SEQ ID NO: 748965 - RNA, 19 nt, Homo sapiens
  misc_RNA (1)...(19): siRNA sense strand
aaagguucaucucucaaga

SEQ ID NO: 748966 - RNA, 19 nt, Homo sapiens
  misc_RNA (1)...(19): siRNA sense strand
cagaagauggcuugucaga

SEQ ID NO: 748967 - RNA, 19 nt, Homo sapiens
  misc_RNA (1)...(19): siRNA sense strand
gagauagaggaaacagaaa

SEQ ID NO: 748968 - RNA, 19 nt, Homo sapiens
  misc_RNA (1)...(19): siRNA sense strand
caggagacguauccagcaa

SEQ ID NO: 748969 - RNA, 19 nt, Homo sapiens
  misc_RNA (1)...(19): siRNA sense strand
gcagcaauagucuccaaga

SEQ ID NO: 748970 - RNA, 19 nt, Homo sapiens
  misc_RNA (1)...(19): siRNA sense strand
agaagagcgagcagaauuu

SEQ ID NO: 748971 - RNA, 19 nt, Homo sapiens
  misc_RNA (1)...(19): siRNA sense strand
ugaaagucgccaagaaaga

SEQ ID NO: 748972 - RNA, 19 nt, Homo sapiens
  misc_RNA (1)...(19): siRNA sense strand
uuggagggaugcugaagaa

SEQ ID NO: 748973 - RNA, 19 nt, Homo sapiens
  misc_RNA (1)...(19): siRNA sense strand
gaggaaacagaaacaguca

SEQ ID NO: 748974 - RNA, 19 nt, Homo sapiens
  misc_RNA (1)...(19): siRNA sense strand
gauagaggaaacagaaaca

SEQ ID NO: 748975 - RNA, 19 nt, Homo sapiens
  misc_RNA (1)...(19): siRNA sense strand
aagugaaagucgccaagaa

SEQ ID NO: 748976 - RNA, 19 nt, Homo sapiens
  misc_RNA (1)...(19): siRNA sense strand
aaagcaaucuguggauaag

SEQ ID NO: 748977 - RNA, 19 nt, Homo sapiens
  misc_RNA (1)...(19): siRNA sense strand
aagauggcuugucagauga

SEQ ID NO: 748978 - RNA, 19 nt, Homo sapiens
  misc_RNA (1)...(19): siRNA sense strand
gaggcuaaaggaagagauu

SEQ ID NO: 748979 - RNA, 19 nt, Homo sapiens
  misc_RNA (1)...(19): siRNA sense strand
cccacaaacuuaaacauac

SEQ ID NO: 748980 - RNA, 19 nt, Homo sapiens
  misc_RNA (1)...(19): siRNA sense strand
aaacagucaccaaguccua

SEQ ID NO: 748981 - RNA, 19 nt, Homo sapiens
  misc_RNA (1)...(19): siRNA sense strand
gcagaagcaggaggaagaa

SEQ ID NO: 748982 - RNA, 19 nt, Homo sapiens
  misc_RNA (1)...(19): siRNA sense strand
cagaugacaagaaaccauu

SEQ ID NO: 748983 - RNA, 19 nt, Homo sapiens
  misc_RNA (1)...(19): siRNA sense strand
gcuaaaggaagagauugaa

SEQ ID NO: 748984 - RNA, 19 nt, Homo sapiens
  misc_RNA (1)...(19): siRNA sense strand
gacaaagaacccaaagaag

SEQ ID NO: 748985 - RNA, 19 nt, Homo sapiens
  misc_RNA (1)...(19): siRNA sense strand
aagcggaaccucugggaaa

SEQ ID NO: 748986 - RNA, 19 nt, Homo sapiens
  misc_RNA (1)...(19): siRNA sense strand
gaaaggcgaagagcagaag

SEQ ID NO: 748987 - RNA, 19 nt, Homo sapiens
  misc_RNA (1)...(19): siRNA sense strand
gcuggaggaacucaagaaa

SEQ ID NO: 748988 - RNA, 19 nt, Homo sapiens
  misc_RNA (1)...(19): siRNA sense strand
cgaaagaagggauuuacag

SEQ ID NO: 748989 - RNA, 19 nt, Homo sapiens
  misc_RNA (1)...(19): siRNA sense strand
gaaggaguucgacccaaca

SEQ ID NO: 748990 - RNA, 19 nt, Homo sapiens
  misc_RNA (1)...(19): siRNA sense strand
gaagagcgagcagaauuuu

SEQ ID NO: 748991 - RNA, 19 nt, Homo sapiens
  misc_RNA (1)...(19): siRNA sense strand
cuaaaggaagagauugaaa

SEQ ID NO: 748992 - RNA, 19 nt, Homo sapiens
  misc_RNA (1)...(19): siRNA sense strand
uucaugacccacaaacuua

SEQ ID NO: 748993 - RNA, 19 nt, Homo sapiens
  misc_RNA (1)...(19): siRNA sense strand
ccaaagaagaaguuaagag

SEQ ID NO: 748994 - RNA, 19 nt, Homo sapiens
  misc_RNA (1)...(19): siRNA sense strand
aucaaugaauggcuaacua

SEQ ID NO: 748995 - RNA, 19 nt, Homo sapiens
  misc_RNA (1)...(19): siRNA sense strand
gaagauggcuugucagaug

SEQ ID NO: 748996 - RNA, 19 nt, Homo sapiens
  misc_RNA (1)...(19): siRNA sense strand
gaaguuaagucgcagaaug

SEQ ID NO: 748997 - RNA, 19 nt, Homo sapiens
  misc_RNA (1)...(19): siRNA sense strand
ggacaaagaacccaaagaa

SEQ ID NO: 748998 - RNA, 19 nt, Homo sapiens
  misc_RNA (1)...(19): siRNA sense strand
gaagggauuuacagaaguu

SEQ ID NO: 748999 - RNA, 19 nt, Homo sapiens
  misc_RNA (1)...(19): siRNA sense strand
ggaguucgacccaacaaua

SEQ ID NO: 749000 - RNA, 19 nt, Homo sapiens
  misc_RNA (1)...(19): siRNA sense strand
caaagaacccaaagaagaa

SEQ ID NO: 749001 - RNA, 19 nt, Homo sapiens
  misc_RNA (1)...(19): siRNA sense strand
ggagaaagggaauguguuu

SEQ ID NO: 749002 - RNA, 19 nt, Homo sapiens
  misc_RNA (1)...(19): siRNA sense strand
gaagagaagaggaggcuaa

SEQ ID NO: 749003 - RNA, 19 nt, Homo sapiens
  misc_RNA (1)...(19): siRNA sense strand
gaaagaagggauuuacaga

SEQ ID NO: 749004 - RNA, 19 nt, Homo sapiens
  misc_RNA (1)...(19): siRNA sense strand
gaaaagcaguggugucaaa

SEQ ID NO: 749005 - RNA, 19 nt, Homo sapiens
  misc_RNA (1)...(19): siRNA sense strand
ucgagaagcucaaacagaa

SEQ ID NO: 749006 - RNA, 19 nt, Homo sapiens
  misc_RNA (1)...(19): siRNA sense strand
caagucaccugcucccaaa

SEQ ID NO: 749007 - RNA, 19 nt, Homo sapiens
  misc_RNA (1)...(19): siRNA sense strand
gcagcaggcacaccaaaua

SEQ ID NO: 749008 - RNA, 19 nt, Homo sapiens
  misc_RNA (1)...(19): siRNA sense strand
ggaaacugcuggcuugaag

SEQ ID NO: 749009 - RNA, 19 nt, Homo sapiens
  misc_RNA (1)...(19): siRNA sense strand
gaaugacgaugaugaagag

SEQ ID NO: 749010 - RNA, 19 nt, Homo sapiens
  misc_RNA (1)...(19): siRNA sense strand
caagaaagauacgagauag

SEQ ID NO: 749011 - RNA, 19 nt, Homo sapiens
  misc_RNA (1)...(19): siRNA sense strand
caagaaagaagacaaggaa

SEQ ID NO: 749012 - RNA, 19 nt, Homo sapiens
  misc_RNA (1)...(19): siRNA sense strand
gcagaagaaugcaaaauga

SEQ ID NO: 749013 - RNA, 19 nt, Homo sapiens
  misc_RNA (1)...(19): siRNA sense strand
ccaagaaagauacgagaua

SEQ ID NO: 749014 - RNA, 19 nt, Homo sapiens
  misc_RNA (1)...(19): siRNA sense strand
acaaagaacccaaagaaga

SEQ ID NO: 749015 - RNA, 19 nt, Homo sapiens
  misc_RNA (1)...(19): siRNA sense strand
gaaaagcaaucuguggaua

SEQ ID NO: 749016 - RNA, 19 nt, Homo sapiens
  misc_RNA (1)...(19): siRNA sense strand
caagaaaccauucaagugu

SEQ ID NO: 749017 - RNA, 19 nt, Homo sapiens
  misc_RNA (1)...(19): siRNA sense strand
gccagaagaugccagaaga

SEQ ID NO: 749018 - RNA, 19 nt, Homo sapiens
  misc_RNA (1)...(19): siRNA sense strand
guacgcaacaucaagagua

SEQ ID NO: 749019 - RNA, 19 nt, Homo sapiens
  misc_RNA (1)...(19): siRNA sense strand
ucccaaaccuucugacuug

SEQ ID NO: 749020 - RNA, 19 nt, Homo sapiens
  misc_RNA (1)...(19): siRNA sense strand
ggaaugacgaugaugaaga

SEQ ID NO: 749021 - RNA, 19 nt, Homo sapiens
  misc_RNA (1)...(19): siRNA sense strand
gaaagucgccaagaaagau

SEQ ID NO: 749022 - RNA, 19 nt, Homo sapiens
  misc_RNA (1)...(19): siRNA sense strand
gagaauucaugacccacaa

SEQ ID NO: 749023 - RNA, 19 nt, Homo sapiens
  misc_RNA (1)...(19): siRNA sense strand
gauagaagagcgagcagaa

SEQ ID NO: 749024 - RNA, 19 nt, Homo sapiens
  misc_RNA (1)...(19): siRNA sense strand
aagaagaaguuaagagcuu

SEQ ID NO: 749025 - RNA, 19 nt, Homo sapiens
  misc_RNA (1)...(19): siRNA sense strand
gaagaggaggcuaaaggaa

SEQ ID NO: 749026 - RNA, 19 nt, Homo sapiens
  misc_RNA (1)...(19): siRNA sense strand
cgagauagaggaaacagaa

SEQ ID NO: 749027 - RNA, 19 nt, Homo sapiens
  misc_RNA (1)...(19): siRNA sense strand
gaagguguacgcaacauca

SEQ ID NO: 749028 - RNA, 19 nt, Homo sapiens
  misc_RNA (1)...(19): siRNA sense strand
uagaagagcgagcagaauu

SEQ ID NO: 749029 - RNA, 19 nt, Homo sapiens
  misc_RNA (1)...(19): siRNA sense strand
gaguucgacccaacaauaa

SEQ ID NO: 749030 - RNA, 19 nt, Homo sapiens
  misc_RNA (1)...(19): siRNA sense strand
ccuaaagguucaucucuca

SEQ ID NO: 749031 - RNA, 19 nt, Homo sapiens
  misc_RNA (1)...(19): siRNA sense strand
ggaggaagccgaucgaaaa

SEQ ID NO: 749032 - RNA, 19 nt, Homo sapiens
  misc_RNA (1)...(19): siRNA sense strand
gaucgaaagaagggauuua

SEQ ID NO: 749033 - RNA, 19 nt, Homo sapiens
  misc_RNA (1)...(19): siRNA sense strand
gaacccaaagaagaaguua

SEQ ID NO: 749034 - RNA, 19 nt, Homo sapiens
  misc_RNA (1)...(19): siRNA sense strand
cagaaacagucaccaaguc

SEQ ID NO: 749035 - RNA, 19 nt, Homo sapiens
  misc_RNA (1)...(19): siRNA sense strand
caaaccuucugacuugaga

SEQ ID NO: 749036 - RNA, 19 nt, Homo sapiens
  misc_RNA (1)...(19): siRNA sense strand
gagaagaggaggcuaaagg

SEQ ID NO: 749037 - RNA, 19 nt, Homo sapiens
  misc_RNA (1)...(19): siRNA sense strand
ccaaagcgagggagcauug

SEQ ID NO: 749038 - RNA, 19 nt, Homo sapiens
  misc_RNA (1)...(19): siRNA sense strand
gauacgagauagaggaaac

SEQ ID NO: 749039 - RNA, 19 nt, Homo sapiens
  misc_RNA (1)...(19): siRNA sense strand
ucaaugaauggcuaacuaa

SEQ ID NO: 749040 - RNA, 19 nt, Homo sapiens
  misc_RNA (1)...(19): siRNA sense strand
gacaagaaaccauucaagu

SEQ ID NO: 749041 - RNA, 19 nt, Homo sapiens
  misc_RNA (1)...(19): siRNA sense strand
agaggaggcuaaaggaaga

SEQ ID NO: 749042 - RNA, 19 nt, Homo sapiens
  misc_RNA (1)...(19): siRNA sense strand
aagaagggauuuacagaag

SEQ ID NO: 749043 - RNA, 19 nt, Homo sapiens
  misc_RNA (1)...(19): siRNA sense strand
ccagaggaaugacgaugau

SEQ ID NO: 749044 - RNA, 19 nt, Homo sapiens
  misc_RNA (1)...(19): siRNA sense strand
cagcaggcacaccaaauaa

SEQ ID NO: 749045 - RNA, 19 nt, Homo sapiens
  misc_RNA (1)...(19): siRNA sense strand
ccaagacaaccaccacaaa

SEQ ID NO: 749046 - RNA, 19 nt, Homo sapiens
  misc_RNA (1)...(19): siRNA sense strand
ccacaaacuuaaacauacu

SEQ ID NO: 749047 - RNA, 19 nt, Homo sapiens
  misc_RNA (1)...(19): siRNA sense strand
aagaaaccauucaaguguu

SEQ ID NO: 749048 - RNA, 19 nt, Homo sapiens
  misc_RNA (1)...(19): siRNA sense strand
aaagaagggauuuacagaa

SEQ ID NO: 749049 - RNA, 19 nt, Homo sapiens
  misc_RNA (1)...(19): siRNA sense strand
gcaguauaccagugcaauu

SEQ ID NO: 749050 - RNA, 19 nt, Homo sapiens
  misc_RNA (1)...(19): siRNA sense strand
gaggaaugacgaugaugaa

SEQ ID NO: 749051 - RNA, 19 nt, Homo sapiens
  misc_RNA (1)...(19): siRNA sense strand
gcugagaaacgccagaaga

SEQ ID NO: 749052 - RNA, 19 nt, Homo sapiens
  misc_RNA (1)...(19): siRNA sense strand
ccaagcagaagaaugcaaa

SEQ ID NO: 749053 - RNA, 19 nt, Homo sapiens
  misc_RNA (1)...(19): siRNA sense strand
cagcaauagucuccaagau

SEQ ID NO: 749054 - RNA, 19 nt, Homo sapiens
  misc_RNA (1)...(19): siRNA sense strand
acaagaaaccauucaagug

SEQ ID NO: 749055 - RNA, 19 nt, Homo sapiens
  misc_RNA (1)...(19): siRNA sense strand
ucagagaggaggaagagaa

SEQ ID NO: 749056 - RNA, 19 nt, Homo sapiens
  misc_RNA (1)...(19): siRNA sense strand
aaaugaaacuaccgagaag

SEQ ID NO: 749057 - RNA, 19 nt, Homo sapiens
  misc_RNA (1)...(19): siRNA sense strand
ggaggugaaugcccagaac

SEQ ID NO: 749058 - RNA, 19 nt, Homo sapiens
  misc_RNA (1)...(19): siRNA sense strand
ggcagaagcaggaggaaga

SEQ ID NO: 749059 - RNA, 19 nt, Homo sapiens
  misc_RNA (1)...(19): siRNA sense strand
cgagggagcauuggagaaa

SEQ ID NO: 749060 - RNA, 19 nt, Homo sapiens
  misc_RNA (1)...(19): siRNA sense strand
aaacagaaacagucaccaa

SEQ ID NO: 749061 - RNA, 19 nt, Homo sapiens
  misc_RNA (1)...(19): siRNA sense strand
ucaagaguaugugggagaa

SEQ ID NO: 749062 - RNA, 19 nt, Homo sapiens
  misc_RNA (1)...(19): siRNA sense strand
uaaaggaagagauugaaag

SEQ ID NO: 749063 - RNA, 19 nt, Homo sapiens
  misc_RNA (1)...(19): siRNA sense strand
caaugaauggcuaacuaaa

SEQ ID NO: 749064 - RNA, 19 nt, Homo sapiens
  misc_RNA (1)...(19): siRNA sense strand
caaaucgacccaucaagca

SEQ ID NO: 749065 - RNA, 19 nt, Homo sapiens
  misc_RNA (1)...(19): siRNA sense strand
aaagguucaucucucaaga

SEQ ID NO: 749066 - RNA, 19 nt, Homo sapiens
  misc_RNA (1)...(19): siRNA sense strand
cagaagauggcuugucaga

SEQ ID NO: 749067 - RNA, 19 nt, Homo sapiens
  misc_RNA (1)...(19): siRNA sense strand
gagauagaggaaacagaaa

SEQ ID NO: 749068 - RNA, 19 nt, Homo sapiens
  misc_RNA (1)...(19): siRNA sense strand
caggagacguauccagcaa

SEQ ID NO: 749069 - RNA, 19 nt, Homo sapiens
  misc_RNA (1)...(19): siRNA sense strand
gcagcaauagucuccaaga

SEQ ID NO: 749070 - RNA, 19 nt, Homo sapiens
  misc_RNA (1)...(19): siRNA sense strand
agaagagcgagcagaauuu

SEQ ID NO: 749071 - RNA, 19 nt, Homo sapiens
  misc_RNA (1)...(19): siRNA sense strand
ugaaagucgccaagaaaga

SEQ ID NO: 749072 - RNA, 19 nt, Homo sapiens
  misc_RNA (1)...(19): siRNA sense strand
uuggagggaugcugaagaa

SEQ ID NO: 749073 - RNA, 19 nt, Homo sapiens
  misc_RNA (1)...(19): siRNA sense strand
gaggaaacagaaacaguca

SEQ ID NO: 749074 - RNA, 19 nt, Homo sapiens
  misc_RNA (1)...(19): siRNA sense strand
gauagaggaaacagaaaca

SEQ ID NO: 749075 - RNA, 19 nt, Homo sapiens
  misc_RNA (1)...(19): siRNA sense strand
aagugaaagucgccaagaa

SEQ ID NO: 749076 - RNA, 19 nt, Homo sapiens
  misc_RNA (1)...(19): siRNA sense strand
aaagcaaucuguggauaag

SEQ ID NO: 749077 - RNA, 19 nt, Homo sapiens
  misc_RNA (1)...(19): siRNA sense strand
aagauggcuugucagauga

SEQ ID NO: 749078 - RNA, 19 nt, Homo sapiens
  misc_RNA (1)...(19): siRNA sense strand
gaggcuaaaggaagagauu

SEQ ID NO: 749079 - RNA, 19 nt, Homo sapiens
  misc_RNA (1)...(19): siRNA sense strand
cccacaaacuuaaacauac

SEQ ID NO: 749080 - RNA, 19 nt, Homo sapiens
  misc_RNA (1)...(19): siRNA sense strand
aaacagucaccaaguccua

SEQ ID NO: 749081 - RNA, 19 nt, Homo sapiens
  misc_RNA (1)...(19): siRNA sense strand
gcagaagcaggaggaagaa

SEQ ID NO: 749082 - RNA, 19 nt, Homo sapiens
  misc_RNA (1)...(19): siRNA sense strand
cagaugacaagaaaccauu

SEQ ID NO: 749083 - RNA, 19 nt, Homo sapiens
  misc_RNA (1)...(19): siRNA sense strand
gcuaaaggaagagauugaa

SEQ ID NO: 749084 - RNA, 19 nt, Homo sapiens
  misc_RNA (1)...(19): siRNA sense strand
gacaaagaacccaaagaag

SEQ ID NO: 749085 - RNA, 19 nt, Homo sapiens
  misc_RNA (1)...(19): siRNA sense strand
aagcggaaccucugggaaa

SEQ ID NO: 749086 - RNA, 19 nt, Homo sapiens
  misc_RNA (1)...(19): siRNA sense strand
gaaaggcgaagagcagaag

SEQ ID NO: 749087 - RNA, 19 nt, Homo sapiens
  misc_RNA (1)...(19): siRNA sense strand
gcuggaggaacucaagaaa

SEQ ID NO: 749088 - RNA, 19 nt, Homo sapiens
  misc_RNA (1)...(19): siRNA sense strand
cgaaagaagggauuuacag

SEQ ID NO: 749089 - RNA, 19 nt, Homo sapiens
  misc_RNA (1)...(19): siRNA sense strand
gaaggaguucgacccaaca

SEQ ID NO: 749090 - RNA, 19 nt, Homo sapiens
  misc_RNA (1)...(19): siRNA sense strand
gaagagcgagcagaauuuu

SEQ ID NO: 749091 - RNA, 19 nt, Homo sapiens
  misc_RNA (1)...(19): siRNA sense strand
cuaaaggaagagauugaaa

SEQ ID NO: 749092 - RNA, 19 nt, Homo sapiens
  misc_RNA (1)...(19): siRNA sense strand
uucaugacccacaaacuua

SEQ ID NO: 749093 - RNA, 19 nt, Homo sapiens
  misc_RNA (1)...(19): siRNA sense strand
ccaaagaagaaguuaagag

SEQ ID NO: 749094 - RNA, 19 nt, Homo sapiens
  misc_RNA (1)...(19): siRNA sense strand
aucaaugaauggcuaacua

SEQ ID NO: 749095 - RNA, 19 nt, Homo sapiens
  misc_RNA (1)...(19): siRNA sense strand
gaagauggcuugucagaug

SEQ ID NO: 749096 - RNA, 19 nt, Homo sapiens
  misc_RNA (1)...(19): siRNA sense strand
gaaguuaagucgcagaaug

SEQ ID NO: 749097 - RNA, 19 nt, Homo sapiens
  misc_RNA (1)...(19): siRNA sense strand
ggacaaagaacccaaagaa

SEQ ID NO: 749098 - RNA, 19 nt, Homo sapiens
  misc_RNA (1)...(19): siRNA sense strand
gaagggauuuacagaaguu

SEQ ID NO: 749099 - RNA, 19 nt, Homo sapiens
  misc_RNA (1)...(19): siRNA sense strand
ggaguucgacccaacaaua

SEQ ID NO: 749100 - RNA, 19 nt, Homo sapiens
  misc_RNA (1)...(19): siRNA sense strand
caaagaacccaaagaagaa

SEQ ID NO: 749101 - RNA, 19 nt, Homo sapiens
  misc_RNA (1)...(19): siRNA sense strand
ggagaaagggaauguguuu

SEQ ID NO: 749102 - RNA, 19 nt, Homo sapiens
  misc_RNA (1)...(19): siRNA sense strand
gaagagaagaggaggcuaa

SEQ ID NO: 749103 - RNA, 19 nt, Homo sapiens
  misc_RNA (1)...(19): siRNA sense strand
gaaagaagggauuuacaga

SEQ ID NO: 749104 - RNA, 19 nt, Homo sapiens
  misc_RNA (1)...(19): siRNA sense strand
gaaaagcaguggugucaaa

SEQ ID NO: 749105 - RNA, 19 nt, Homo sapiens
  misc_RNA (1)...(19): siRNA sense strand
ucgagaagcucaaacagaa

SEQ ID NO: 749106 - RNA, 19 nt, Homo sapiens
  misc_RNA (1)...(19): siRNA sense strand
caagucaccugcucccaaa

SEQ ID NO: 749107 - RNA, 19 nt, Homo sapiens
  misc_RNA (1)...(19): siRNA sense strand
gcagcaggcacaccaaaua

SEQ ID NO: 749108 - RNA, 19 nt, Homo sapiens
  misc_RNA (1)...(19): siRNA sense strand
ggaaacugcuggcuugaag

SEQ ID NO: 749109 - RNA, 19 nt, Homo sapiens
  misc_RNA (1)...(19): siRNA sense strand
gaaugacgaugaugaagag

SEQ ID NO: 749110 - RNA, 19 nt, Homo sapiens
  misc_RNA (1)...(19): siRNA sense strand
caagaaagauacgagauag

SEQ ID NO: 749111 - RNA, 19 nt, Homo sapiens
  misc_RNA (1)...(19): siRNA sense strand
caagaaagaagacaaggaa

SEQ ID NO: 749112 - RNA, 19 nt, Homo sapiens
  misc_RNA (1)...(19): siRNA sense strand
gcagaagaaugcaaaauga

SEQ ID NO: 749113 - RNA, 19 nt, Homo sapiens
  misc_RNA (1)...(19): siRNA sense strand
ccaagaaagauacgagaua

SEQ ID NO: 749114 - RNA, 19 nt, Homo sapiens
  misc_RNA (1)...(19): siRNA sense strand
acaaagaacccaaagaaga

SEQ ID NO: 749115 - RNA, 19 nt, Homo sapiens
  misc_RNA (1)...(19): siRNA sense strand
gaaaagcaaucuguggaua

SEQ ID NO: 749116 - RNA, 19 nt, Homo sapiens
  misc_RNA (1)...(19): siRNA sense strand
caagaaaccauucaagugu

SEQ ID NO: 749117 - RNA, 19 nt, Homo sapiens
  misc_RNA (1)...(19): siRNA sense strand
gccagaagaugccagaaga

SEQ ID NO: 749118 - RNA, 19 nt, Homo sapiens
  misc_RNA (1)...(19): siRNA sense strand
guacgcaacaucaagagua

SEQ ID NO: 749119 - RNA, 19 nt, Homo sapiens
  misc_RNA (1)...(19): siRNA sense strand
ucccaaaccuucugacuug

SEQ ID NO: 749120 - RNA, 19 nt, Homo sapiens
  misc_RNA (1)...(19): siRNA sense strand
ggaaugacgaugaugaaga

SEQ ID NO: 749121 - RNA, 19 nt, Homo sapiens
  misc_RNA (1)...(19): siRNA sense strand
gaaagucgccaagaaagau

SEQ ID NO: 749122 - RNA, 19 nt, Homo sapiens
  misc_RNA (1)...(19): siRNA sense strand
gagaauucaugacccacaa

SEQ ID NO: 749123 - RNA, 19 nt, Homo sapiens
  misc_RNA (1)...(19): siRNA sense strand
gauagaagagcgagcagaa

SEQ ID NO: 749124 - RNA, 19 nt, Homo sapiens
  misc_RNA (1)...(19): siRNA sense strand
aagaagaaguuaagagcuu

SEQ ID NO: 749125 - RNA, 19 nt, Homo sapiens
  misc_RNA (1)...(19): siRNA sense strand
gaagaggaggcuaaaggaa

SEQ ID NO: 749126 - RNA, 19 nt, Homo sapiens
  misc_RNA (1)...(19): siRNA sense strand
cgagauagaggaaacagaa

SEQ ID NO: 749127 - RNA, 19 nt, Homo sapiens
  misc_RNA (1)...(19): siRNA sense strand
gaagguguacgcaacauca

SEQ ID NO: 749128 - RNA, 19 nt, Homo sapiens
  misc_RNA (1)...(19): siRNA sense strand
uagaagagcgagcagaauu

SEQ ID NO: 749129 - RNA, 19 nt, Homo sapiens
  misc_RNA (1)...(19): siRNA sense strand
gaguucgacccaacaauaa

SEQ ID NO: 749130 - RNA, 19 nt, Homo sapiens
  misc_RNA (1)...(19): siRNA sense strand
ccuaaagguucaucucuca

SEQ ID NO: 749131 - RNA, 19 nt, Homo sapiens
  misc_RNA (1)...(19): siRNA sense strand
ggaggaagccgaucgaaaa

SEQ ID NO: 749132 - RNA, 19 nt, Homo sapiens
  misc_RNA (1)...(19): siRNA sense strand
gaucgaaagaagggauuua

SEQ ID NO: 749133 - RNA, 19 nt, Homo sapiens
  misc_RNA (1)...(19): siRNA sense strand
gaacccaaagaagaaguua

SEQ ID NO: 749134 - RNA, 19 nt, Homo sapiens
  misc_RNA (1)...(19): siRNA sense strand
cagaaacagucaccaaguc

SEQ ID NO: 749135 - RNA, 19 nt, Homo sapiens
  misc_RNA (1)...(19): siRNA sense strand
caaaccuucugacuugaga

SEQ ID NO: 749136 - RNA, 19 nt, Homo sapiens
  misc_RNA (1)...(19): siRNA sense strand
gagaagaggaggcuaaagg

SEQ ID NO: 749137 - RNA, 19 nt, Homo sapiens
  misc_RNA (1)...(19): siRNA sense strand
ccaaagcgagggagcauug

SEQ ID NO: 749138 - RNA, 19 nt, Homo sapiens
  misc_RNA (1)...(19): siRNA sense strand
gauacgagauagaggaaac

SEQ ID NO: 749139 - RNA, 19 nt, Homo sapiens
  misc_RNA (1)...(19): siRNA sense strand
ucaaugaauggcuaacuaa

SEQ ID NO: 749140 - RNA, 19 nt, Homo sapiens
  misc_RNA (1)...(19): siRNA sense strand
gacaagaaaccauucaagu

SEQ ID NO: 749141 - RNA, 19 nt, Homo sapiens
  misc_RNA (1)...(19): siRNA sense strand
agaggaggcuaaaggaaga

SEQ ID NO: 749142 - RNA, 19 nt, Homo sapiens
  misc_RNA (1)...(19): siRNA sense strand
aagaagggauuuacagaag

SEQ ID NO: 749143 - RNA, 19 nt, Homo sapiens
  misc_RNA (1)...(19): siRNA sense strand
ccagaggaaugacgaugau

SEQ ID NO: 749144 - RNA, 19 nt, Homo sapiens
  misc_RNA (1)...(19): siRNA sense strand
cagcaggcacaccaaauaa

SEQ ID NO: 749145 - RNA, 19 nt, Homo sapiens
  misc_RNA (1)...(19): siRNA sense strand
ccaagacaaccaccacaaa

SEQ ID NO: 749146 - RNA, 19 nt, Homo sapiens
  misc_RNA (1)...(19): siRNA sense strand
ccacaaacuuaaacauacu

SEQ ID NO: 749147 - RNA, 19 nt, Homo sapiens
  misc_RNA (1)...(19): siRNA sense strand
aagaaaccauucaaguguu

SEQ ID NO: 749148 - RNA, 19 nt, Homo sapiens
  misc_RNA (1)...(19): siRNA sense strand
aaagaagggauuuacagaa

SEQ ID NO: 749149 - RNA, 19 nt, Homo sapiens
  misc_RNA (1)...(19): siRNA sense strand
gcaguauaccagugcaauu

SEQ ID NO: 749150 - RNA, 19 nt, Homo sapiens
  misc_RNA (1)...(19): siRNA sense strand
gaggaaugacgaugaugaa

SEQ ID NO: 749151 - RNA, 19 nt, Homo sapiens
  misc_RNA (1)...(19): siRNA sense strand
gcugagaaacgccagaaga

SEQ ID NO: 749152 - RNA, 19 nt, Homo sapiens
  misc_RNA (1)...(19): siRNA sense strand
ccaagcagaagaaugcaaa

SEQ ID NO: 749153 - RNA, 19 nt, Homo sapiens
  misc_RNA (1)...(19): siRNA sense strand
cagcaauagucuccaagau

SEQ ID NO: 749154 - RNA, 19 nt, Homo sapiens
  misc_RNA (1)...(19): siRNA sense strand
acaagaaaccauucaagug

SEQ ID NO: 749155 - RNA, 19 nt, Homo sapiens
  misc_RNA (1)...(19): siRNA sense strand
ucagagaggaggaagagaa

SEQ ID NO: 749156 - RNA, 19 nt, Homo sapiens
  misc_RNA (1)...(19): siRNA sense strand
aaaugaaacuaccgagaag

SEQ ID NO: 749157 - RNA, 19 nt, Homo sapiens
  misc_RNA (1)...(19): siRNA sense strand
ggaggugaaugcccagaac

SEQ ID NO: 749158 - RNA, 19 nt, Homo sapiens
  misc_RNA (1)...(19): siRNA sense strand
ggcagaagcaggaggaaga

SEQ ID NO: 749159 - RNA, 19 nt, Homo sapiens
  misc_RNA (1)...(19): siRNA sense strand
cgagggagcauuggagaaa

SEQ ID NO: 749160 - RNA, 19 nt, Homo sapiens
  misc_RNA (1)...(19): siRNA sense strand
aaacagaaacagucaccaa

SEQ ID NO: 749161 - RNA, 19 nt, Homo sapiens
  misc_RNA (1)...(19): siRNA sense strand
ucaagaguaugugggagaa

SEQ ID NO: 749162 - RNA, 19 nt, Homo sapiens
  misc_RNA (1)...(19): siRNA sense strand
uaaaggaagagauugaaag

SEQ ID NO: 749163 - RNA, 19 nt, Homo sapiens
  misc_RNA (1)...(19): siRNA sense strand
caaugaauggcuaacuaaa

SEQ ID NO: 749164 - RNA, 19 nt, Homo sapiens
  misc_RNA (1)...(19): siRNA sense strand
caaaucgacccaucaagca

SEQ ID NO: 749165 - RNA, 19 nt, Homo sapiens
  misc_RNA (1)...(19): siRNA sense strand
aaagguucaucucucaaga

SEQ ID NO: 749166 - RNA, 19 nt, Homo sapiens
  misc_RNA (1)...(19): siRNA sense strand
cagaagauggcuugucaga

SEQ ID NO: 749167 - RNA, 19 nt, Homo sapiens
  misc_RNA (1)...(19): siRNA sense strand
gagauagaggaaacagaaa

SEQ ID NO: 749168 - RNA, 19 nt, Homo sapiens
  misc_RNA (1)...(19): siRNA sense strand
caggagacguauccagcaa

SEQ ID NO: 749169 - RNA, 19 nt, Homo sapiens
  misc_RNA (1)...(19): siRNA sense strand
gcagcaauagucuccaaga

SEQ ID NO: 749170 - RNA, 19 nt, Homo sapiens
  misc_RNA (1)...(19): siRNA sense strand
agaagagcgagcagaauuu

SEQ ID NO: 749171 - RNA, 19 nt, Homo sapiens
  misc_RNA (1)...(19): siRNA sense strand
ugaaagucgccaagaaaga

SEQ ID NO: 749172 - RNA, 19 nt, Homo sapiens
  misc_RNA (1)...(19): siRNA sense strand
uuggagggaugcugaagaa

SEQ ID NO: 749173 - RNA, 19 nt, Homo sapiens
  misc_RNA (1)...(19): siRNA sense strand
gaggaaacagaaacaguca

SEQ ID NO: 749174 - RNA, 19 nt, Homo sapiens
  misc_RNA (1)...(19): siRNA sense strand
gauagaggaaacagaaaca

SEQ ID NO: 749175 - RNA, 19 nt, Homo sapiens
  misc_RNA (1)...(19): siRNA sense strand
aagugaaagucgccaagaa

SEQ ID NO: 749176 - RNA, 19 nt, Homo sapiens
  misc_RNA (1)...(19): siRNA sense strand
aaagcaaucuguggauaag

SEQ ID NO: 749177 - RNA, 19 nt, Homo sapiens
  misc_RNA (1)...(19): siRNA sense strand
aagauggcuugucagauga

SEQ ID NO: 749178 - RNA, 19 nt, Homo sapiens
  misc_RNA (1)...(19): siRNA sense strand
gaggcuaaaggaagagauu

SEQ ID NO: 749179 - RNA, 19 nt, Homo sapiens
  misc_RNA (1)...(19): siRNA sense strand
cccacaaacuuaaacauac

SEQ ID NO: 749180 - RNA, 19 nt, Homo sapiens
  misc_RNA (1)...(19): siRNA sense strand
aaacagucaccaaguccua

SEQ ID NO: 749181 - RNA, 19 nt, Homo sapiens
  misc_RNA (1)...(19): siRNA sense strand
gcagaagcaggaggaagaa

SEQ ID NO: 749182 - RNA, 19 nt, Homo sapiens
  misc_RNA (1)...(19): siRNA sense strand
cagaugacaagaaaccauu

SEQ ID NO: 749183 - RNA, 19 nt, Homo sapiens
  misc_RNA (1)...(19): siRNA sense strand
gcuaaaggaagagauugaa

SEQ ID NO: 749184 - RNA, 19 nt, Homo sapiens
  misc_RNA (1)...(19): siRNA sense strand
gacaaagaacccaaagaag

SEQ ID NO: 749185 - RNA, 19 nt, Homo sapiens
  misc_RNA (1)...(19): siRNA sense strand
aagcggaaccucugggaaa

SEQ ID NO: 749186 - RNA, 19 nt, Homo sapiens
  misc_RNA (1)...(19): siRNA sense strand
gaaaggcgaagagcagaag

SEQ ID NO: 749187 - RNA, 19 nt, Homo sapiens
  misc_RNA (1)...(19): siRNA sense strand
gcuggaggaacucaagaaa

SEQ ID NO: 749188 - RNA, 19 nt, Homo sapiens
  misc_RNA (1)...(19): siRNA sense strand
cgaaagaagggauuuacag

SEQ ID NO: 749189 - RNA, 19 nt, Homo sapiens
  misc_RNA (1)...(19): siRNA sense strand
gaaggaguucgacccaaca

SEQ ID NO: 749190 - RNA, 19 nt, Homo sapiens
  misc_RNA (1)...(19): siRNA sense strand
gaagagcgagcagaauuuu

SEQ ID NO: 749191 - RNA, 19 nt, Homo sapiens
  misc_RNA (1)...(19): siRNA sense strand
cuaaaggaagagauugaaa

SEQ ID NO: 749192 - RNA, 19 nt, Homo sapiens
  misc_RNA (1)...(19): siRNA sense strand
uucaugacccacaaacuua

SEQ ID NO: 749193 - RNA, 19 nt, Homo sapiens
  misc_RNA (1)...(19): siRNA sense strand
ccaaagaagaaguuaagag

SEQ ID NO: 749194 - RNA, 19 nt, Homo sapiens
  misc_RNA (1)...(19): siRNA sense strand
aucaaugaauggcuaacua

SEQ ID NO: 749195 - RNA, 19 nt, Homo sapiens
  misc_RNA (1)...(19): siRNA sense strand
gaagauggcuugucagaug

SEQ ID NO: 749196 - RNA, 19 nt, Homo sapiens
  misc_RNA (1)...(19): siRNA sense strand
gaaguuaagucgcagaaug

SEQ ID NO: 749197 - RNA, 19 nt, Homo sapiens
  misc_RNA (1)...(19): siRNA sense strand
ggacaaagaacccaaagaa

SEQ ID NO: 749198 - RNA, 19 nt, Homo sapiens
  misc_RNA (1)...(19): siRNA sense strand
gaagggauuuacagaaguu

SEQ ID NO: 749199 - RNA, 19 nt, Homo sapiens
  misc_RNA (1)...(19): siRNA sense strand
ggaguucgacccaacaaua

SEQ ID NO: 749200 - RNA, 19 nt, Homo sapiens
  misc_RNA (1)...(19): siRNA sense strand
caaagaacccaaagaagaa

SEQ ID NO: 749201 - RNA, 19 nt, Homo sapiens
  misc_RNA (1)...(19): siRNA sense strand
ggagaaagggaauguguuu

SEQ ID NO: 749202 - RNA, 19 nt, Homo sapiens
  misc_RNA (1)...(19): siRNA sense strand
gaagagaagaggaggcuaa

SEQ ID NO: 749203 - RNA, 19 nt, Homo sapiens
  misc_RNA (1)...(19): siRNA sense strand
gaaagaagggauuuacaga

SEQ ID NO: 749204 - RNA, 19 nt, Homo sapiens
  misc_RNA (1)...(19): siRNA sense strand
gaaaagcaguggugucaaa

SEQ ID NO: 749205 - RNA, 19 nt, Homo sapiens
  misc_RNA (1)...(19): siRNA sense strand
ucgagaagcucaaacagaa

SEQ ID NO: 749206 - RNA, 19 nt, Homo sapiens
  misc_RNA (1)...(19): siRNA sense strand
caagucaccugcucccaaa

SEQ ID NO: 749207 - RNA, 19 nt, Homo sapiens
  misc_RNA (1)...(19): siRNA sense strand
gcagcaggcacaccaaaua

SEQ ID NO: 749208 - RNA, 19 nt, Homo sapiens
  misc_RNA (1)...(19): siRNA sense strand
ggaaacugcuggcuugaag

SEQ ID NO: 749209 - RNA, 19 nt, Homo sapiens
  misc_RNA (1)...(19): siRNA sense strand
gaaugacgaugaugaagag

SEQ ID NO: 749210 - RNA, 19 nt, Homo sapiens
  misc_RNA (1)...(19): siRNA sense strand
caagaaagauacgagauag

SEQ ID NO: 749211 - RNA, 19 nt, Homo sapiens
  misc_RNA (1)...(19): siRNA sense strand
caagaaagaagacaaggaa

SEQ ID NO: 749212 - RNA, 19 nt, Homo sapiens
  misc_RNA (1)...(19): siRNA sense strand
gcagaagaaugcaaaauga

SEQ ID NO: 749213 - RNA, 19 nt, Homo sapiens
  misc_RNA (1)...(19): siRNA sense strand
ccaagaaagauacgagaua

SEQ ID NO: 749214 - RNA, 19 nt, Homo sapiens
  misc_RNA (1)...(19): siRNA sense strand
acaaagaacccaaagaaga

SEQ ID NO: 749215 - RNA, 19 nt, Homo sapiens
  misc_RNA (1)...(19): siRNA sense strand
gaaaagcaaucuguggaua

SEQ ID NO: 749216 - RNA, 19 nt, Homo sapiens
  misc_RNA (1)...(19): siRNA sense strand
caagaaaccauucaagugu

SEQ ID NO: 749217 - RNA, 19 nt, Homo sapiens
  misc_RNA (1)...(19): siRNA sense strand
gccagaagaugccagaaga

SEQ ID NO: 749218 - RNA, 19 nt, Homo sapiens
  misc_RNA (1)...(19): siRNA sense strand
guacgcaacaucaagagua

SEQ ID NO: 749219 - RNA, 19 nt, Homo sapiens
  misc_RNA (1)...(19): siRNA sense strand
ucccaaaccuucugacuug

SEQ ID NO: 749220 - RNA, 19 nt, Homo sapiens
  misc_RNA (1)...(19): siRNA sense strand
ggaaugacgaugaugaaga

SEQ ID NO: 749221 - RNA, 19 nt, Homo sapiens
  misc_RNA (1)...(19): siRNA sense strand
gaaagucgccaagaaagau

SEQ ID NO: 749222 - RNA, 19 nt, Homo sapiens
  misc_RNA (1)...(19): siRNA sense strand
gagaauucaugacccacaa

SEQ ID NO: 749223 - RNA, 19 nt, Homo sapiens
  misc_RNA (1)...(19): siRNA sense strand
gauagaagagcgagcagaa

SEQ ID NO: 749224 - RNA, 19 nt, Homo sapiens
  misc_RNA (1)...(19): siRNA sense strand
aagaagaaguuaagagcuu

SEQ ID NO: 749225 - RNA, 19 nt, Homo sapiens
  misc_RNA (1)...(19): siRNA sense strand
gaagaggaggcuaaaggaa

SEQ ID NO: 749226 - RNA, 19 nt, Homo sapiens
  misc_RNA (1)...(19): siRNA sense strand
cgagauagaggaaacagaa

SEQ ID NO: 749227 - RNA, 19 nt, Homo sapiens
  misc_RNA (1)...(19): siRNA sense strand
gaagguguacgcaacauca

SEQ ID NO: 749228 - RNA, 19 nt, Homo sapiens
  misc_RNA (1)...(19): siRNA sense strand
uagaagagcgagcagaauu

SEQ ID NO: 749229 - RNA, 19 nt, Homo sapiens
  misc_RNA (1)...(19): siRNA sense strand
gaguucgacccaacaauaa

SEQ ID NO: 749230 - RNA, 19 nt, Homo sapiens
  misc_RNA (1)...(19): siRNA sense strand
ccuaaagguucaucucuca

SEQ ID NO: 749231 - RNA, 19 nt, Homo sapiens
  misc_RNA (1)...(19): siRNA sense strand
ggaggaagccgaucgaaaa

SEQ ID NO: 749232 - RNA, 19 nt, Homo sapiens
  misc_RNA (1)...(19): siRNA sense strand
gaucgaaagaagggauuua

SEQ ID NO: 749233 - RNA, 19 nt, Homo sapiens
  misc_RNA (1)...(19): siRNA sense strand
gaacccaaagaagaaguua

SEQ ID NO: 749234 - RNA, 19 nt, Homo sapiens
  misc_RNA (1)...(19): siRNA sense strand
cagaaacagucaccaaguc

SEQ ID NO: 749235 - RNA, 19 nt, Homo sapiens
  misc_RNA (1)...(19): siRNA sense strand
caaaccuucugacuugaga

SEQ ID NO: 749236 - RNA, 19 nt, Homo sapiens
  misc_RNA (1)...(19): siRNA sense strand
gagaagaggaggcuaaagg

SEQ ID NO: 749237 - RNA, 19 nt, Homo sapiens
  misc_RNA (1)...(19): siRNA sense strand
ccaaagcgagggagcauug

SEQ ID NO: 749238 - RNA, 19 nt, Homo sapiens
  misc_RNA (1)...(19): siRNA sense strand
gauacgagauagaggaaac

SEQ ID NO: 749239 - RNA, 19 nt, Homo sapiens
  misc_RNA (1)...(19): siRNA sense strand
ucaaugaauggcuaacuaa

SEQ ID NO: 749240 - RNA, 19 nt, Homo sapiens
  misc_RNA (1)...(19): siRNA sense strand
gacaagaaaccauucaagu

SEQ ID NO: 749241 - RNA, 19 nt, Homo sapiens
  misc_RNA (1)...(19): siRNA sense strand
agaggaggcuaaaggaaga

SEQ ID NO: 749242 - RNA, 19 nt, Homo sapiens
  misc_RNA (1)...(19): siRNA sense strand
aagaagggauuuacagaag

SEQ ID NO: 749243 - RNA, 19 nt, Homo sapiens
  misc_RNA (1)...(19): siRNA sense strand
ccagaggaaugacgaugau

SEQ ID NO: 749244 - RNA, 19 nt, Homo sapiens
  misc_RNA (1)...(19): siRNA sense strand
cagcaggcacaccaaauaa

SEQ ID NO: 749245 - RNA, 19 nt, Homo sapiens
  misc_RNA (1)...(19): siRNA sense strand
ccaagacaaccaccacaaa

SEQ ID NO: 749246 - RNA, 19 nt, Homo sapiens
  misc_RNA (1)...(19): siRNA sense strand
ccacaaacuuaaacauacu

SEQ ID NO: 749247 - RNA, 19 nt, Homo sapiens
  misc_RNA (1)...(19): siRNA sense strand
aagaaaccauucaaguguu

SEQ ID NO: 749248 - RNA, 19 nt, Homo sapiens
  misc_RNA (1)...(19): siRNA sense strand
aaagaagggauuuacagaa

SEQ ID NO: 749249 - RNA, 19 nt, Homo sapiens
  misc_RNA (1)...(19): siRNA sense strand
gcaguauaccagugcaauu

SEQ ID NO: 749250 - RNA, 19 nt, Homo sapiens
  misc_RNA (1)...(19): siRNA sense strand
gaggaaugacgaugaugaa

SEQ ID NO: 749251 - RNA, 19 nt, Homo sapiens
  misc_RNA (1)...(19): siRNA sense strand
gcugagaaacgccagaaga

SEQ ID NO: 749252 - RNA, 19 nt, Homo sapiens
  misc_RNA (1)...(19): siRNA sense strand
ccaagcagaagaaugcaaa

SEQ ID NO: 749253 - RNA, 19 nt, Homo sapiens
  misc_RNA (1)...(19): siRNA sense strand
cagcaauagucuccaagau

SEQ ID NO: 749254 - RNA, 19 nt, Homo sapiens
  misc_RNA (1)...(19): siRNA sense strand
acaagaaaccauucaagug

SEQ ID NO: 749255 - RNA, 19 nt, Homo sapiens
  misc_RNA (1)...(19): siRNA sense strand
ucagagaggaggaagagaa

SEQ ID NO: 749256 - RNA, 19 nt, Homo sapiens
  misc_RNA (1)...(19): siRNA sense strand
aaaugaaacuaccgagaag

SEQ ID NO: 749257 - RNA, 19 nt, Homo sapiens
  misc_RNA (1)...(19): siRNA sense strand
ggaggugaaugcccagaac

SEQ ID NO: 749258 - RNA, 19 nt, Homo sapiens
  misc_RNA (1)...(19): siRNA sense strand
ggcagaagcaggaggaaga

SEQ ID NO: 749259 - RNA, 19 nt, Homo sapiens
  misc_RNA (1)...(19): siRNA sense strand
cgagggagcauuggagaaa

SEQ ID NO: 749260 - RNA, 19 nt, Homo sapiens
  misc_RNA (1)...(19): siRNA sense strand
aaacagaaacagucaccaa

SEQ ID NO: 749261 - RNA, 19 nt, Homo sapiens
  misc_RNA (1)...(19): siRNA sense strand
ucaagaguaugugggagaa

SEQ ID NO: 749262 - RNA, 19 nt, Homo sapiens
  misc_RNA (1)...(19): siRNA sense strand
uaaaggaagagauugaaag

SEQ ID NO: 749263 - RNA, 19 nt, Homo sapiens
  misc_RNA (1)...(19): siRNA sense strand
caaugaauggcuaacuaaa

SEQ ID NO: 749264 - RNA, 19 nt, Homo sapiens
  misc_RNA (1)...(19): siRNA sense strand
caaaucgacccaucaagca

SEQ ID NO: 749265 - RNA, 19 nt, Homo sapiens
  misc_RNA (1)...(19): siRNA sense strand
aaagguucaucucucaaga

SEQ ID NO: 749266 - RNA, 19 nt, Homo sapiens
  misc_RNA (1)...(19): siRNA sense strand
cagaagauggcuugucaga

SEQ ID NO: 749267 - RNA, 19 nt, Homo sapiens
  misc_RNA (1)...(19): siRNA sense strand
gagauagaggaaacagaaa

SEQ ID NO: 749268 - RNA, 19 nt, Homo sapiens
  misc_RNA (1)...(19): siRNA sense strand
caggagacguauccagcaa

SEQ ID NO: 749269 - RNA, 19 nt, Homo sapiens
  misc_RNA (1)...(19): siRNA sense strand
gcagcaauagucuccaaga

SEQ ID NO: 749270 - RNA, 19 nt, Homo sapiens
  misc_RNA (1)...(19): siRNA sense strand
agaagagcgagcagaauuu

SEQ ID NO: 749271 - RNA, 19 nt, Homo sapiens
  misc_RNA (1)...(19): siRNA sense strand
ugaaagucgccaagaaaga

SEQ ID NO: 749272 - RNA, 19 nt, Homo sapiens
  misc_RNA (1)...(19): siRNA sense strand
uuggagggaugcugaagaa

SEQ ID NO: 749273 - RNA, 19 nt, Homo sapiens
  misc_RNA (1)...(19): siRNA sense strand
gaggaaacagaaacaguca

SEQ ID NO: 749274 - RNA, 19 nt, Homo sapiens
  misc_RNA (1)...(19): siRNA sense strand
gauagaggaaacagaaaca

SEQ ID NO: 749275 - RNA, 19 nt, Homo sapiens
  misc_RNA (1)...(19): siRNA sense strand
aagugaaagucgccaagaa

SEQ ID NO: 749276 - RNA, 19 nt, Homo sapiens
  misc_RNA (1)...(19): siRNA sense strand
aaagcaaucuguggauaag

SEQ ID NO: 749277 - RNA, 19 nt, Homo sapiens
  misc_RNA (1)...(19): siRNA sense strand
aagauggcuugucagauga

SEQ ID NO: 749278 - RNA, 19 nt, Homo sapiens
  misc_RNA (1)...(19): siRNA sense strand
gaggcuaaaggaagagauu

SEQ ID NO: 749279 - RNA, 19 nt, Homo sapiens
  misc_RNA (1)...(19): siRNA sense strand
cccacaaacuuaaacauac

SEQ ID NO: 749280 - RNA, 19 nt, Homo sapiens
  misc_RNA (1)...(19): siRNA sense strand
aaacagucaccaaguccua

SEQ ID NO: 749281 - RNA, 19 nt, Homo sapiens
  misc_RNA (1)...(19): siRNA sense strand
gcagaagcaggaggaagaa

SEQ ID NO: 749282 - RNA, 19 nt, Homo sapiens
  misc_RNA (1)...(19): siRNA sense strand
cagaugacaagaaaccauu

SEQ ID NO: 749283 - RNA, 19 nt, Homo sapiens
  misc_RNA (1)...(19): siRNA sense strand
gcuaaaggaagagauugaa

SEQ ID NO: 749284 - RNA, 19 nt, Homo sapiens
  misc_RNA (1)...(19): siRNA sense strand
gacaaagaacccaaagaag

SEQ ID NO: 749285 - RNA, 19 nt, Homo sapiens
  misc_RNA (1)...(19): siRNA sense strand
aagcggaaccucugggaaa

SEQ ID NO: 749286 - RNA, 19 nt, Homo sapiens
  misc_RNA (1)...(19): siRNA sense strand
gaaaggcgaagagcagaag

SEQ ID NO: 749287 - RNA, 19 nt, Homo sapiens
  misc_RNA (1)...(19): siRNA sense strand
gcuggaggaacucaagaaa

SEQ ID NO: 749288 - RNA, 19 nt, Homo sapiens
  misc_RNA (1)...(19): siRNA sense strand
cgaaagaagggauuuacag

SEQ ID NO: 749289 - RNA, 19 nt, Homo sapiens
  misc_RNA (1)...(19): siRNA sense strand
gaaggaguucgacccaaca

SEQ ID NO: 749290 - RNA, 19 nt, Homo sapiens
  misc_RNA (1)...(19): siRNA sense strand
gaagagcgagcagaauuuu

SEQ ID NO: 749291 - RNA, 19 nt, Homo sapiens
  misc_RNA (1)...(19): siRNA sense strand
cuaaaggaagagauugaaa

SEQ ID NO: 749292 - RNA, 19 nt, Homo sapiens
  misc_RNA (1)...(19): siRNA sense strand
uucaugacccacaaacuua

SEQ ID NO: 749293 - RNA, 19 nt, Homo sapiens
  misc_RNA (1)...(19): siRNA sense strand
ccaaagaagaaguuaagag

SEQ ID NO: 749294 - RNA, 19 nt, Homo sapiens
  misc_RNA (1)...(19): siRNA sense strand
aucaaugaauggcuaacua

SEQ ID NO: 749295 - RNA, 19 nt, Homo sapiens
  misc_RNA (1)...(19): siRNA sense strand
gaagauggcuugucagaug

SEQ ID NO: 749296 - RNA, 19 nt, Homo sapiens
  misc_RNA (1)...(19): siRNA sense strand
gaaguuaagucgcagaaug

SEQ ID NO: 749297 - RNA, 19 nt, Homo sapiens
  misc_RNA (1)...(19): siRNA sense strand
ggacaaagaacccaaagaa

SEQ ID NO: 749298 - RNA, 19 nt, Homo sapiens
  misc_RNA (1)...(19): siRNA sense strand
gaagggauuuacagaaguu

SEQ ID NO: 749299 - RNA, 19 nt, Homo sapiens
  misc_RNA (1)...(19): siRNA sense strand
ggaguucgacccaacaaua

SEQ ID NO: 749300 - RNA, 19 nt, Homo sapiens
  misc_RNA (1)...(19): siRNA sense strand
caaagaacccaaagaagaa

SEQ ID NO: 749301 - RNA, 19 nt, Homo sapiens
  misc_RNA (1)...(19): siRNA sense strand
ggagaaagggaauguguuu

SEQ ID NO: 749302 - RNA, 19 nt, Homo sapiens
  misc_RNA (1)...(19): siRNA sense strand
gaagagaagaggaggcuaa

SEQ ID NO: 749303 - RNA, 19 nt, Homo sapiens
  misc_RNA (1)...(19): siRNA sense strand
gaaagaagggauuuacaga

SEQ ID NO: 749304 - RNA, 19 nt, Homo sapiens
  misc_RNA (1)...(19): siRNA sense strand
gaaaagcaguggugucaaa

SEQ ID NO: 749305 - RNA, 19 nt, Homo sapiens
  misc_RNA (1)...(19): siRNA sense strand
ucgagaagcucaaacagaa

SEQ ID NO: 749306 - RNA, 19 nt, Homo sapiens
  misc_RNA (1)...(19): siRNA sense strand
caagucaccugcucccaaa

SEQ ID NO: 749307 - RNA, 19 nt, Homo sapiens
  misc_RNA (1)...(19): siRNA sense strand
gcagcaggcacaccaaaua

SEQ ID NO: 749308 - RNA, 19 nt, Homo sapiens
  misc_RNA (1)...(19): siRNA sense strand
ggaaacugcuggcuugaag

SEQ ID NO: 749309 - RNA, 19 nt, Homo sapiens
  misc_RNA (1)...(19): siRNA sense strand
gaaugacgaugaugaagag

SEQ ID NO: 749310 - RNA, 19 nt, Homo sapiens
  misc_RNA (1)...(19): siRNA sense strand
caagaaagauacgagauag

SEQ ID NO: 749311 - RNA, 19 nt, Homo sapiens
  misc_RNA (1)...(19): siRNA sense strand
caagaaagaagacaaggaa

SEQ ID NO: 749312 - RNA, 19 nt, Homo sapiens
  misc_RNA (1)...(19): siRNA sense strand
gcagaagaaugcaaaauga

SEQ ID NO: 749313 - RNA, 19 nt, Homo sapiens
  misc_RNA (1)...(19): siRNA sense strand
ccaagaaagauacgagaua

SEQ ID NO: 749314 - RNA, 19 nt, Homo sapiens
  misc_RNA (1)...(19): siRNA sense strand
acaaagaacccaaagaaga

SEQ ID NO: 749315 - RNA, 19 nt, Homo sapiens
  misc_RNA (1)...(19): siRNA sense strand
gaaaagcaaucuguggaua

SEQ ID NO: 749316 - RNA, 19 nt, Homo sapiens
  misc_RNA (1)...(19): siRNA sense strand
caagaaaccauucaagugu

SEQ ID NO: 749317 - RNA, 19 nt, Homo sapiens
  misc_RNA (1)...(19): siRNA sense strand
gccagaagaugccagaaga

SEQ ID NO: 749318 - RNA, 19 nt, Homo sapiens
  misc_RNA (1)...(19): siRNA sense strand
guacgcaacaucaagagua

SEQ ID NO: 749319 - RNA, 19 nt, Homo sapiens
  misc_RNA (1)...(19): siRNA sense strand
ucccaaaccuucugacuug

SEQ ID NO: 749320 - RNA, 19 nt, Homo sapiens
  misc_RNA (1)...(19): siRNA sense strand
ggaaugacgaugaugaaga

SEQ ID NO: 749321 - RNA, 19 nt, Homo sapiens
  misc_RNA (1)...(19): siRNA sense strand
gaaagucgccaagaaagau

SEQ ID NO: 749322 - RNA, 19 nt, Homo sapiens
  misc_RNA (1)...(19): siRNA sense strand
gagaauucaugacccacaa

SEQ ID NO: 749323 - RNA, 19 nt, Homo sapiens
  misc_RNA (1)...(19): siRNA sense strand
gauagaagagcgagcagaa

SEQ ID NO: 749324 - RNA, 19 nt, Homo sapiens
  misc_RNA (1)...(19): siRNA sense strand
aagaagaaguuaagagcuu

SEQ ID NO: 749325 - RNA, 19 nt, Homo sapiens
  misc_RNA (1)...(19): siRNA sense strand
gaagaggaggcuaaaggaa

SEQ ID NO: 749326 - RNA, 19 nt, Homo sapiens
  misc_RNA (1)...(19): siRNA sense strand
cgagauagaggaaacagaa

SEQ ID NO: 749327 - RNA, 19 nt, Homo sapiens
  misc_RNA (1)...(19): siRNA sense strand
gaagguguacgcaacauca

SEQ ID NO: 749328 - RNA, 19 nt, Homo sapiens
  misc_RNA (1)...(19): siRNA sense strand
uagaagagcgagcagaauu

SEQ ID NO: 749329 - RNA, 19 nt, Homo sapiens
  misc_RNA (1)...(19): siRNA sense strand
gaguucgacccaacaauaa

SEQ ID NO: 749330 - RNA, 19 nt, Homo sapiens
  misc_RNA (1)...(19): siRNA sense strand
ccuaaagguucaucucuca

SEQ ID NO: 749331 - RNA, 19 nt, Homo sapiens
  misc_RNA (1)...(19): siRNA sense strand
ggaggaagccgaucgaaaa

SEQ ID NO: 749332 - RNA, 19 nt, Homo sapiens
  misc_RNA (1)...(19): siRNA sense strand
gaucgaaagaagggauuua

SEQ ID NO: 749333 - RNA, 19 nt, Homo sapiens
  misc_RNA (1)...(19): siRNA sense strand
gaacccaaagaagaaguua

SEQ ID NO: 749334 - RNA, 19 nt, Homo sapiens
  misc_RNA (1)...(19): siRNA sense strand
cagaaacagucaccaaguc

SEQ ID NO: 749335 - RNA, 19 nt, Homo sapiens
  misc_RNA (1)...(19): siRNA sense strand
caaaccuucugacuugaga

SEQ ID NO: 749336 - RNA, 19 nt, Homo sapiens
  misc_RNA (1)...(19): siRNA sense strand
gagaagaggaggcuaaagg

SEQ ID NO: 749337 - RNA, 19 nt, Homo sapiens
  misc_RNA (1)...(19): siRNA sense strand
ccaaagcgagggagcauug

SEQ ID NO: 749338 - RNA, 19 nt, Homo sapiens
  misc_RNA (1)...(19): siRNA sense strand
gauacgagauagaggaaac

SEQ ID NO: 749339 - RNA, 19 nt, Homo sapiens
  misc_RNA (1)...(19): siRNA sense strand
ucaaugaauggcuaacuaa

SEQ ID NO: 749340 - RNA, 19 nt, Homo sapiens
  misc_RNA (1)...(19): siRNA sense strand
gacaagaaaccauucaagu

SEQ ID NO: 749341 - RNA, 19 nt, Homo sapiens
  misc_RNA (1)...(19): siRNA sense strand
agaggaggcuaaaggaaga

SEQ ID NO: 749342 - RNA, 19 nt, Homo sapiens
  misc_RNA (1)...(19): siRNA sense strand
aagaagggauuuacagaag

SEQ ID NO: 749343 - RNA, 19 nt, Homo sapiens
  misc_RNA (1)...(19): siRNA sense strand
ccagaggaaugacgaugau

SEQ ID NO: 749344 - RNA, 19 nt, Homo sapiens
  misc_RNA (1)...(19): siRNA sense strand
cagcaggcacaccaaauaa

SEQ ID NO: 749345 - RNA, 19 nt, Homo sapiens
  misc_RNA (1)...(19): siRNA sense strand
ccaagacaaccaccacaaa

SEQ ID NO: 749346 - RNA, 19 nt, Homo sapiens
  misc_RNA (1)...(19): siRNA sense strand
ccacaaacuuaaacauacu

SEQ ID NO: 749347 - RNA, 19 nt, Homo sapiens
  misc_RNA (1)...(19): siRNA sense strand
aagaaaccauucaaguguu

SEQ ID NO: 749348 - RNA, 19 nt, Homo sapiens
  misc_RNA (1)...(19): siRNA sense strand
aaagaagggauuuacagaa

SEQ ID NO: 749349 - RNA, 19 nt, Homo sapiens
  misc_RNA (1)...(19): siRNA sense strand
gcaguauaccagugcaauu

SEQ ID NO: 749350 - RNA, 19 nt, Homo sapiens
  misc_RNA (1)...(19): siRNA sense strand
gaggaaugacgaugaugaa

SEQ ID NO: 749351 - RNA, 19 nt, Homo sapiens
  misc_RNA (1)...(19): siRNA sense strand
gcugagaaacgccagaaga

SEQ ID NO: 749352 - RNA, 19 nt, Homo sapiens
  misc_RNA (1)...(19): siRNA sense strand
ccaagcagaagaaugcaaa

SEQ ID NO: 749353 - RNA, 19 nt, Homo sapiens
  misc_RNA (1)...(19): siRNA sense strand
cagcaauagucuccaagau

SEQ ID NO: 749354 - RNA, 19 nt, Homo sapiens
  misc_RNA (1)...(19): siRNA sense strand
acaagaaaccauucaagug

SEQ ID NO: 749355 - RNA, 19 nt, Homo sapiens
  misc_RNA (1)...(19): siRNA sense strand
ucagagaggaggaagagaa

SEQ ID NO: 749356 - RNA, 19 nt, Homo sapiens
  misc_RNA (1)...(19): siRNA sense strand
aaaugaaacuaccgagaag

SEQ ID NO: 749357 - RNA, 19 nt, Homo sapiens
  misc_RNA (1)...(19): siRNA sense strand
ggaggugaaugcccagaac

SEQ ID NO: 749358 - RNA, 19 nt, Homo sapiens
  misc_RNA (1)...(19): siRNA sense strand
ggcagaagcaggaggaaga

SEQ ID NO: 749359 - RNA, 19 nt, Homo sapiens
  misc_RNA (1)...(19): siRNA sense strand
cgagggagcauuggagaaa

SEQ ID NO: 749360 - RNA, 19 nt, Homo sapiens
  misc_RNA (1)...(19): siRNA sense strand
aaacagaaacagucaccaa

SEQ ID NO: 749361 - RNA, 19 nt, Homo sapiens
  misc_RNA (1)...(19): siRNA sense strand
ucaagaguaugugggagaa

SEQ ID NO: 749362 - RNA, 19 nt, Homo sapiens
  misc_RNA (1)...(19): siRNA sense strand
uaaaggaagagauugaaag

SEQ ID NO: 749363 - RNA, 19 nt, Homo sapiens
  misc_RNA (1)...(19): siRNA sense strand
caaugaauggcuaacuaaa

SEQ ID NO: 749364 - RNA, 19 nt, Homo sapiens
  misc_RNA (1)...(19): siRNA sense strand
caaaucgacccaucaagca

SEQ ID NO: 749365 - RNA, 19 nt, Homo sapiens
  misc_RNA (1)...(19): siRNA sense strand
aaagguucaucucucaaga

SEQ ID NO: 749366 - RNA, 19 nt, Homo sapiens
  misc_RNA (1)...(19): siRNA sense strand
cagaagauggcuugucaga

SEQ ID NO: 749367 - RNA, 19 nt, Homo sapiens
  misc_RNA (1)...(19): siRNA sense strand
gagauagaggaaacagaaa

SEQ ID NO: 749368 - RNA, 19 nt, Homo sapiens
  misc_RNA (1)...(19): siRNA sense strand
caggagacguauccagcaa

SEQ ID NO: 749369 - RNA, 19 nt, Homo sapiens
  misc_RNA (1)...(19): siRNA sense strand
gcagcaauagucuccaaga

SEQ ID NO: 749370 - RNA, 19 nt, Homo sapiens
  misc_RNA (1)...(19): siRNA sense strand
agaagagcgagcagaauuu

SEQ ID NO: 749371 - RNA, 19 nt, Homo sapiens
  misc_RNA (1)...(19): siRNA sense strand
ugaaagucgccaagaaaga

SEQ ID NO: 749372 - RNA, 19 nt, Homo sapiens
  misc_RNA (1)...(19): siRNA sense strand
uuggagggaugcugaagaa

SEQ ID NO: 749373 - RNA, 19 nt, Homo sapiens
  misc_RNA (1)...(19): siRNA sense strand
gaggaaacagaaacaguca

SEQ ID NO: 749374 - RNA, 19 nt, Homo sapiens
  misc_RNA (1)...(19): siRNA sense strand
gauagaggaaacagaaaca

SEQ ID NO: 749375 - RNA, 19 nt, Homo sapiens
  misc_RNA (1)...(19): siRNA sense strand
aagugaaagucgccaagaa

SEQ ID NO: 749376 - RNA, 19 nt, Homo sapiens
  misc_RNA (1)...(19): siRNA sense strand
aaagcaaucuguggauaag

SEQ ID NO: 749377 - RNA, 19 nt, Homo sapiens
  misc_RNA (1)...(19): siRNA sense strand
aagauggcuugucagauga

SEQ ID NO: 749378 - RNA, 19 nt, Homo sapiens
  misc_RNA (1)...(19): siRNA sense strand
gaggcuaaaggaagagauu

SEQ ID NO: 749379 - RNA, 19 nt, Homo sapiens
  misc_RNA (1)...(19): siRNA sense strand
cccacaaacuuaaacauac

SEQ ID NO: 749380 - RNA, 19 nt, Homo sapiens
  misc_RNA (1)...(19): siRNA sense strand
aaacagucaccaaguccua

SEQ ID NO: 749381 - RNA, 19 nt, Homo sapiens
  misc_RNA (1)...(19): siRNA sense strand
gcagaagcaggaggaagaa

SEQ ID NO: 749382 - RNA, 19 nt, Homo sapiens
  misc_RNA (1)...(19): siRNA sense strand
cagaugacaagaaaccauu

SEQ ID NO: 749383 - RNA, 19 nt, Homo sapiens
  misc_RNA (1)...(19): siRNA sense strand
gcuaaaggaagagauugaa

SEQ ID NO: 749384 - RNA, 19 nt, Homo sapiens
  misc_RNA (1)...(19): siRNA sense strand
gacaaagaacccaaagaag

SEQ ID NO: 749385 - RNA, 19 nt, Homo sapiens
  misc_RNA (1)...(19): siRNA sense strand
aagcggaaccucugggaaa

SEQ ID NO: 749386 - RNA, 19 nt, Homo sapiens
  misc_RNA (1)...(19): siRNA sense strand
gaaaggcgaagagcagaag

SEQ ID NO: 749387 - RNA, 19 nt, Homo sapiens
  misc_RNA (1)...(19): siRNA sense strand
gcuggaggaacucaagaaa

SEQ ID NO: 749388 - RNA, 19 nt, Homo sapiens
  misc_RNA (1)...(19): siRNA sense strand
cgaaagaagggauuuacag

SEQ ID NO: 749389 - RNA, 19 nt, Homo sapiens
  misc_RNA (1)...(19): siRNA sense strand
gaaggaguucgacccaaca

SEQ ID NO: 749390 - RNA, 19 nt, Homo sapiens
  misc_RNA (1)...(19): siRNA sense strand
gaagagcgagcagaauuuu

SEQ ID NO: 749391 - RNA, 19 nt, Homo sapiens
  misc_RNA (1)...(19): siRNA sense strand
cuaaaggaagagauugaaa

SEQ ID NO: 749392 - RNA, 19 nt, Homo sapiens
  misc_RNA (1)...(19): siRNA sense strand
uucaugacccacaaacuua

SEQ ID NO: 749393 - RNA, 19 nt, Homo sapiens
  misc_RNA (1)...(19): siRNA sense strand
ccaaagaagaaguuaagag

SEQ ID NO: 749394 - RNA, 19 nt, Homo sapiens
  misc_RNA (1)...(19): siRNA sense strand
aucaaugaauggcuaacua

SEQ ID NO: 749395 - RNA, 19 nt, Homo sapiens
  misc_RNA (1)...(19): siRNA sense strand
gaagauggcuugucagaug

SEQ ID NO: 749396 - RNA, 19 nt, Homo sapiens
  misc_RNA (1)...(19): siRNA sense strand
gaaguuaagucgcagaaug

SEQ ID NO: 749397 - RNA, 19 nt, Homo sapiens
  misc_RNA (1)...(19): siRNA sense strand
ggacaaagaacccaaagaa

SEQ ID NO: 749398 - RNA, 19 nt, Homo sapiens
  misc_RNA (1)...(19): siRNA sense strand
gaagggauuuacagaaguu

SEQ ID NO: 749399 - RNA, 19 nt, Homo sapiens
  misc_RNA (1)...(19): siRNA sense strand
ggaguucgacccaacaaua

SEQ ID NO: 749400 - RNA, 19 nt, Homo sapiens
  misc_RNA (1)...(19): siRNA sense strand
caaagaacccaaagaagaa

SEQ ID NO: 749401 - RNA, 19 nt, Homo sapiens
  misc_RNA (1)...(19): siRNA sense strand
ggagaaagggaauguguuu

SEQ ID NO: 749402 - RNA, 19 nt, Homo sapiens
  misc_RNA (1)...(19): siRNA sense strand
gaagagaagaggaggcuaa

SEQ ID NO: 749403 - RNA, 19 nt, Homo sapiens
  misc_RNA (1)...(19): siRNA sense strand
gaaagaagggauuuacaga

SEQ ID NO: 749404 - RNA, 19 nt, Homo sapiens
  misc_RNA (1)...(19): siRNA sense strand
gaaaagcaguggugucaaa

SEQ ID NO: 749405 - RNA, 19 nt, Homo sapiens
  misc_RNA (1)...(19): siRNA sense strand
ucgagaagcucaaacagaa

SEQ ID NO: 749406 - RNA, 19 nt, Homo sapiens
  misc_RNA (1)...(19): siRNA sense strand
caagucaccugcucccaaa

SEQ ID NO: 749407 - RNA, 19 nt, Homo sapiens
  misc_RNA (1)...(19): siRNA sense strand
gcagcaggcacaccaaaua

SEQ ID NO: 749408 - RNA, 19 nt, Homo sapiens
  misc_RNA (1)...(19): siRNA sense strand
ggaaacugcuggcuugaag

SEQ ID NO: 749409 - RNA, 19 nt, Homo sapiens
  misc_RNA (1)...(19): siRNA sense strand
gaaugacgaugaugaagag

SEQ ID NO: 749410 - RNA, 19 nt, Homo sapiens
  misc_RNA (1)...(19): siRNA sense strand
caagaaagauacgagauag

SEQ ID NO: 749411 - RNA, 19 nt, Homo sapiens
  misc_RNA (1)...(19): siRNA sense strand
caagaaagaagacaaggaa

SEQ ID NO: 749412 - RNA, 19 nt, Homo sapiens
  misc_RNA (1)...(19): siRNA sense strand
gcagaagaaugcaaaauga

SEQ ID NO: 749413 - RNA, 19 nt, Homo sapiens
  misc_RNA (1)...(19): siRNA sense strand
ccaagaaagauacgagaua

SEQ ID NO: 749414 - RNA, 19 nt, Homo sapiens
  misc_RNA (1)...(19): siRNA sense strand
acaaagaacccaaagaaga

SEQ ID NO: 749415 - RNA, 19 nt, Homo sapiens
  misc_RNA (1)...(19): siRNA sense strand
gaaaagcaaucuguggaua

SEQ ID NO: 749416 - RNA, 19 nt, Homo sapiens
  misc_RNA (1)...(19): siRNA sense strand
caagaaaccauucaagugu

SEQ ID NO: 749417 - RNA, 19 nt, Homo sapiens
  misc_RNA (1)...(19): siRNA sense strand
gccagaagaugccagaaga

SEQ ID NO: 749418 - RNA, 19 nt, Homo sapiens
  misc_RNA (1)...(19): siRNA sense strand
guacgcaacaucaagagua

SEQ ID NO: 749419 - RNA, 19 nt, Homo sapiens
  misc_RNA (1)...(19): siRNA sense strand
ucccaaaccuucugacuug

SEQ ID NO: 749420 - RNA, 19 nt, Homo sapiens
  misc_RNA (1)...(19): siRNA sense strand
ggaaugacgaugaugaaga

SEQ ID NO: 749421 - RNA, 19 nt, Homo sapiens
  misc_RNA (1)...(19): siRNA sense strand
gaaagucgccaagaaagau

SEQ ID NO: 749422 - RNA, 19 nt, Homo sapiens
  misc_RNA (1)...(19): siRNA sense strand
gagaauucaugacccacaa

SEQ ID NO: 749423 - RNA, 19 nt, Homo sapiens
  misc_RNA (1)...(19): siRNA sense strand
gauagaagagcgagcagaa

SEQ ID NO: 749424 - RNA, 19 nt, Homo sapiens
  misc_RNA (1)...(19): siRNA sense strand
aagaagaaguuaagagcuu

SEQ ID NO: 749425 - RNA, 19 nt, Homo sapiens
  misc_RNA (1)...(19): siRNA sense strand
gaagaggaggcuaaaggaa

SEQ ID NO: 749426 - RNA, 19 nt, Homo sapiens
  misc_RNA (1)...(19): siRNA sense strand
cgagauagaggaaacagaa

SEQ ID NO: 749427 - RNA, 19 nt, Homo sapiens
  misc_RNA (1)...(19): siRNA sense strand
gaagguguacgcaacauca

SEQ ID NO: 749428 - RNA, 19 nt, Homo sapiens
  misc_RNA (1)...(19): siRNA sense strand
uagaagagcgagcagaauu

SEQ ID NO: 749429 - RNA, 19 nt, Homo sapiens
  misc_RNA (1)...(19): siRNA sense strand
gaguucgacccaacaauaa

SEQ ID NO: 749430 - RNA, 19 nt, Homo sapiens
  misc_RNA (1)...(19): siRNA sense strand
ccuaaagguucaucucuca

SEQ ID NO: 749431 - RNA, 19 nt, Homo sapiens
  misc_RNA (1)...(19): siRNA sense strand
ggaggaagccgaucgaaaa

SEQ ID NO: 749432 - RNA, 19 nt, Homo sapiens
  misc_RNA (1)...(19): siRNA sense strand
gaucgaaagaagggauuua

SEQ ID NO: 749433 - RNA, 19 nt, Homo sapiens
  misc_RNA (1)...(19): siRNA sense strand
gaacccaaagaagaaguua

SEQ ID NO: 749434 - RNA, 19 nt, Homo sapiens
  misc_RNA (1)...(19): siRNA sense strand
cagaaacagucaccaaguc

SEQ ID NO: 749435 - RNA, 19 nt, Homo sapiens
  misc_RNA (1)...(19): siRNA sense strand
caaaccuucugacuugaga

SEQ ID NO: 749436 - RNA, 19 nt, Homo sapiens
  misc_RNA (1)...(19): siRNA sense strand
gagaagaggaggcuaaagg

SEQ ID NO: 749437 - RNA, 19 nt, Homo sapiens
  misc_RNA (1)...(19): siRNA sense strand
ccaaagcgagggagcauug

SEQ ID NO: 749438 - RNA, 19 nt, Homo sapiens
  misc_RNA (1)...(19): siRNA sense strand
gauacgagauagaggaaac

SEQ ID NO: 749439 - RNA, 19 nt, Homo sapiens
  misc_RNA (1)...(19): siRNA sense strand
ucaaugaauggcuaacuaa

SEQ ID NO: 749440 - RNA, 19 nt, Homo sapiens
  misc_RNA (1)...(19): siRNA sense strand
gacaagaaaccauucaagu

SEQ ID NO: 749441 - RNA, 19 nt, Homo sapiens
  misc_RNA (1)...(19): siRNA sense strand
agaggaggcuaaaggaaga

SEQ ID NO: 749442 - RNA, 19 nt, Homo sapiens
  misc_RNA (1)...(19): siRNA sense strand
aagaagggauuuacagaag

SEQ ID NO: 749443 - RNA, 19 nt, Homo sapiens
  misc_RNA (1)...(19): siRNA sense strand
ccagaggaaugacgaugau

SEQ ID NO: 749444 - RNA, 19 nt, Homo sapiens
  misc_RNA (1)...(19): siRNA sense strand
cagcaggcacaccaaauaa

SEQ ID NO: 749445 - RNA, 19 nt, Homo sapiens
  misc_RNA (1)...(19): siRNA sense strand
ccaagacaaccaccacaaa

SEQ ID NO: 749446 - RNA, 19 nt, Homo sapiens
  misc_RNA (1)...(19): siRNA sense strand
ccacaaacuuaaacauacu

SEQ ID NO: 749447 - RNA, 19 nt, Homo sapiens
  misc_RNA (1)...(19): siRNA sense strand
aagaaaccauucaaguguu

SEQ ID NO: 749448 - RNA, 19 nt, Homo sapiens
  misc_RNA (1)...(19): siRNA sense strand
aaagaagggauuuacagaa

SEQ ID NO: 749449 - RNA, 19 nt, Homo sapiens
  misc_RNA (1)...(19): siRNA sense strand
gcaguauaccagugcaauu

SEQ ID NO: 749450 - RNA, 19 nt, Homo sapiens
  misc_RNA (1)...(19): siRNA sense strand
gaggaaugacgaugaugaa

SEQ ID NO: 749451 - RNA, 19 nt, Homo sapiens
  misc_RNA (1)...(19): siRNA sense strand
gcugagaaacgccagaaga

SEQ ID NO: 749452 - RNA, 19 nt, Homo sapiens
  misc_RNA (1)...(19): siRNA sense strand
ccaagcagaagaaugcaaa

SEQ ID NO: 749453 - RNA, 19 nt, Homo sapiens
  misc_RNA (1)...(19): siRNA sense strand
cagcaauagucuccaagau

SEQ ID NO: 749454 - RNA, 19 nt, Homo sapiens
  misc_RNA (1)...(19): siRNA sense strand
acaagaaaccauucaagug

SEQ ID NO: 749455 - RNA, 19 nt, Homo sapiens
  misc_RNA (1)...(19): siRNA sense strand
ucagagaggaggaagagaa

SEQ ID NO: 749456 - RNA, 19 nt, Homo sapiens
  misc_RNA (1)...(19): siRNA sense strand
aaaugaaacuaccgagaag

SEQ ID NO: 749457 - RNA, 19 nt, Homo sapiens
  misc_RNA (1)...(19): siRNA sense strand
ggaggugaaugcccagaac

SEQ ID NO: 749458 - RNA, 19 nt, Homo sapiens
  misc_RNA (1)...(19): siRNA sense strand
ggcagaagcaggaggaaga

SEQ ID NO: 749459 - RNA, 19 nt, Homo sapiens
  misc_RNA (1)...(19): siRNA sense strand
cgagggagcauuggagaaa

SEQ ID NO: 749460 - RNA, 19 nt, Homo sapiens
  misc_RNA (1)...(19): siRNA sense strand
aaacagaaacagucaccaa

SEQ ID NO: 749461 - RNA, 19 nt, Homo sapiens
  misc_RNA (1)...(19): siRNA sense strand
ucaagaguaugugggagaa

SEQ ID NO: 749462 - RNA, 19 nt, Homo sapiens
  misc_RNA (1)...(19): siRNA sense strand
uaaaggaagagauugaaag

SEQ ID NO: 749463 - RNA, 19 nt, Homo sapiens
  misc_RNA (1)...(19): siRNA sense strand
caaugaauggcuaacuaaa

SEQ ID NO: 749464 - RNA, 19 nt, Homo sapiens
  misc_RNA (1)...(19): siRNA sense strand
caaaucgacccaucaagca

SEQ ID NO: 749465 - RNA, 19 nt, Homo sapiens
  misc_RNA (1)...(19): siRNA sense strand
aaagguucaucucucaaga

SEQ ID NO: 749466 - RNA, 19 nt, Homo sapiens
  misc_RNA (1)...(19): siRNA sense strand
cagaagauggcuugucaga

SEQ ID NO: 749467 - RNA, 19 nt, Homo sapiens
  misc_RNA (1)...(19): siRNA sense strand
gagauagaggaaacagaaa

SEQ ID NO: 749468 - RNA, 19 nt, Homo sapiens
  misc_RNA (1)...(19): siRNA sense strand
caggagacguauccagcaa

SEQ ID NO: 749469 - RNA, 19 nt, Homo sapiens
  misc_RNA (1)...(19): siRNA sense strand
gcagcaauagucuccaaga

SEQ ID NO: 749470 - RNA, 19 nt, Homo sapiens
  misc_RNA (1)...(19): siRNA sense strand
agaagagcgagcagaauuu

SEQ ID NO: 749471 - RNA, 19 nt, Homo sapiens
  misc_RNA (1)...(19): siRNA sense strand
ugaaagucgccaagaaaga

SEQ ID NO: 749472 - RNA, 19 nt, Homo sapiens
  misc_RNA (1)...(19): siRNA sense strand
uuggagggaugcugaagaa

SEQ ID NO: 749473 - RNA, 19 nt, Homo sapiens
  misc_RNA (1)...(19): siRNA sense strand
gaggaaacagaaacaguca

SEQ ID NO: 749474 - RNA, 19 nt, Homo sapiens
  misc_RNA (1)...(19): siRNA sense strand
gauagaggaaacagaaaca

SEQ ID NO: 749475 - RNA, 19 nt, Homo sapiens
  misc_RNA (1)...(19): siRNA sense strand
aagugaaagucgccaagaa

SEQ ID NO: 749476 - RNA, 19 nt, Homo sapiens
  misc_RNA (1)...(19): siRNA sense strand
aaagcaaucuguggauaag

SEQ ID NO: 749477 - RNA, 19 nt, Homo sapiens
  misc_RNA (1)...(19): siRNA sense strand
aagauggcuugucagauga

SEQ ID NO: 749478 - RNA, 19 nt, Homo sapiens
  misc_RNA (1)...(19): siRNA sense strand
gaggcuaaaggaagagauu

SEQ ID NO: 749479 - RNA, 19 nt, Homo sapiens
  misc_RNA (1)...(19): siRNA sense strand
cccacaaacuuaaacauac

SEQ ID NO: 749480 - RNA, 19 nt, Homo sapiens
  misc_RNA (1)...(19): siRNA sense strand
aaacagucaccaaguccua

SEQ ID NO: 749481 - RNA, 19 nt, Homo sapiens
  misc_RNA (1)...(19): siRNA sense strand
gcagaagcaggaggaagaa

SEQ ID NO: 749482 - RNA, 19 nt, Homo sapiens
  misc_RNA (1)...(19): siRNA sense strand
cagaugacaagaaaccauu

SEQ ID NO: 749483 - RNA, 19 nt, Homo sapiens
  misc_RNA (1)...(19): siRNA sense strand
gcuaaaggaagagauugaa

SEQ ID NO: 749484 - RNA, 19 nt, Homo sapiens
  misc_RNA (1)...(19): siRNA sense strand
gacaaagaacccaaagaag

SEQ ID NO: 749485 - RNA, 19 nt, Homo sapiens
  misc_RNA (1)...(19): siRNA sense strand
aagcggaaccucugggaaa

SEQ ID NO: 749486 - RNA, 19 nt, Homo sapiens
  misc_RNA (1)...(19): siRNA sense strand
gaaaggcgaagagcagaag

SEQ ID NO: 749487 - RNA, 19 nt, Homo sapiens
  misc_RNA (1)...(19): siRNA sense strand
gcuggaggaacucaagaaa

SEQ ID NO: 749488 - RNA, 19 nt, Homo sapiens
  misc_RNA (1)...(19): siRNA sense strand
cgaaagaagggauuuacag

SEQ ID NO: 749489 - RNA, 19 nt, Homo sapiens
  misc_RNA (1)...(19): siRNA sense strand
gaaggaguucgacccaaca

SEQ ID NO: 749490 - RNA, 19 nt, Homo sapiens
  misc_RNA (1)...(19): siRNA sense strand
gaagagcgagcagaauuuu

SEQ ID NO: 749491 - RNA, 19 nt, Homo sapiens
  misc_RNA (1)...(19): siRNA sense strand
cuaaaggaagagauugaaa

SEQ ID NO: 749492 - RNA, 19 nt, Homo sapiens
  misc_RNA (1)...(19): siRNA sense strand
uucaugacccacaaacuua

SEQ ID NO: 749493 - RNA, 19 nt, Homo sapiens
  misc_RNA (1)...(19): siRNA sense strand
ccaaagaagaaguuaagag

SEQ ID NO: 749494 - RNA, 19 nt, Homo sapiens
  misc_RNA (1)...(19): siRNA sense strand
aucaaugaauggcuaacua

SEQ ID NO: 749495 - RNA, 19 nt, Homo sapiens
  misc_RNA (1)...(19): siRNA sense strand
gaagauggcuugucagaug

SEQ ID NO: 749496 - RNA, 19 nt, Homo sapiens
  misc_RNA (1)...(19): siRNA sense strand
gaaguuaagucgcagaaug

SEQ ID NO: 749497 - RNA, 19 nt, Homo sapiens
  misc_RNA (1)...(19): siRNA sense strand
ggacaaagaacccaaagaa

SEQ ID NO: 749498 - RNA, 19 nt, Homo sapiens
  misc_RNA (1)...(19): siRNA sense strand
gaagggauuuacagaaguu

SEQ ID NO: 749499 - RNA, 19 nt, Homo sapiens
  misc_RNA (1)...(19): siRNA sense strand
ggaguucgacccaacaaua

SEQ ID NO: 749500 - RNA, 19 nt, Homo sapiens
  misc_RNA (1)...(19): siRNA sense strand
caaagaacccaaagaagaa

SEQ ID NO: 749501 - RNA, 19 nt, Homo sapiens
  misc_RNA (1)...(19): siRNA sense strand
ggagaaagggaauguguuu

SEQ ID NO: 749502 - RNA, 19 nt, Homo sapiens
  misc_RNA (1)...(19): siRNA sense strand
gaagagaagaggaggcuaa

SEQ ID NO: 749503 - RNA, 19 nt, Homo sapiens
  misc_RNA (1)...(19): siRNA sense strand
gaaagaagggauuuacaga

SEQ ID NO: 749504 - RNA, 19 nt, Homo sapiens
  misc_RNA (1)...(19): siRNA sense strand
gaaaagcaguggugucaaa

SEQ ID NO: 749505 - RNA, 19 nt, Homo sapiens
  misc_RNA (1)...(19): siRNA sense strand
ucgagaagcucaaacagaa

SEQ ID NO: 749506 - RNA, 19 nt, Homo sapiens
  misc_RNA (1)...(19): siRNA sense strand
caagucaccugcucccaaa

SEQ ID NO: 749507 - RNA, 19 nt, Homo sapiens
  misc_RNA (1)...(19): siRNA sense strand
gcagcaggcacaccaaaua

SEQ ID NO: 749508 - RNA, 19 nt, Homo sapiens
  misc_RNA (1)...(19): siRNA sense strand
ggaaacugcuggcuugaag

SEQ ID NO: 749509 - RNA, 19 nt, Homo sapiens
  misc_RNA (1)...(19): siRNA sense strand
gaaugacgaugaugaagag

SEQ ID NO: 749510 - RNA, 19 nt, Homo sapiens
  misc_RNA (1)...(19): siRNA sense strand
caagaaagauacgagauag

SEQ ID NO: 749511 - RNA, 19 nt, Homo sapiens
  misc_RNA (1)...(19): siRNA sense strand
caagaaagaagacaaggaa

SEQ ID NO: 749512 - RNA, 19 nt, Homo sapiens
  misc_RNA (1)...(19): siRNA sense strand
gcagaagaaugcaaaauga

SEQ ID NO: 749513 - RNA, 19 nt, Homo sapiens
  misc_RNA (1)...(19): siRNA sense strand
ccaagaaagauacgagaua

SEQ ID NO: 749514 - RNA, 19 nt, Homo sapiens
  misc_RNA (1)...(19): siRNA sense strand
acaaagaacccaaagaaga

SEQ ID NO: 749515 - RNA, 19 nt, Homo sapiens
  misc_RNA (1)...(19): siRNA sense strand
gaaaagcaaucuguggaua

SEQ ID NO: 749516 - RNA, 19 nt, Homo sapiens
  misc_RNA (1)...(19): siRNA sense strand
caagaaaccauucaagugu

SEQ ID NO: 749517 - RNA, 19 nt, Homo sapiens
  misc_RNA (1)...(19): siRNA sense strand
gccagaagaugccagaaga

SEQ ID NO: 749518 - RNA, 19 nt, Homo sapiens
  misc_RNA (1)...(19): siRNA sense strand
guacgcaacaucaagagua

SEQ ID NO: 749519 - RNA, 19 nt, Homo sapiens
  misc_RNA (1)...(19): siRNA sense strand
ucccaaaccuucugacuug

SEQ ID NO: 749520 - RNA, 19 nt, Homo sapiens
  misc_RNA (1)...(19): siRNA sense strand
ggaaugacgaugaugaaga

SEQ ID NO: 749521 - RNA, 19 nt, Homo sapiens
  misc_RNA (1)...(19): siRNA sense strand
gaaagucgccaagaaagau

SEQ ID NO: 749522 - RNA, 19 nt, Homo sapiens
  misc_RNA (1)...(19): siRNA sense strand
gagaauucaugacccacaa

SEQ ID NO: 749523 - RNA, 19 nt, Homo sapiens
  misc_RNA (1)...(19): siRNA sense strand
gauagaagagcgagcagaa

SEQ ID NO: 749524 - RNA, 19 nt, Homo sapiens
  misc_RNA (1)...(19): siRNA sense strand
aagaagaaguuaagagcuu

SEQ ID NO: 749525 - RNA, 19 nt, Homo sapiens
  misc_RNA (1)...(19): siRNA sense strand
gaagaggaggcuaaaggaa

SEQ ID NO: 749526 - RNA, 19 nt, Homo sapiens
  misc_RNA (1)...(19): siRNA sense strand
cgagauagaggaaacagaa

SEQ ID NO: 749527 - RNA, 19 nt, Homo sapiens
  misc_RNA (1)...(19): siRNA sense strand
gaagguguacgcaacauca

SEQ ID NO: 749528 - RNA, 19 nt, Homo sapiens
  misc_RNA (1)...(19): siRNA sense strand
uagaagagcgagcagaauu

SEQ ID NO: 749529 - RNA, 19 nt, Homo sapiens
  misc_RNA (1)...(19): siRNA sense strand
gaguucgacccaacaauaa

SEQ ID NO: 749530 - RNA, 19 nt, Homo sapiens
  misc_RNA (1)...(19): siRNA sense strand
ccuaaagguucaucucuca

SEQ ID NO: 749531 - RNA, 19 nt, Homo sapiens
  misc_RNA (1)...(19): siRNA sense strand
ggaggaagccgaucgaaaa

SEQ ID NO: 749532 - RNA, 19 nt, Homo sapiens
  misc_RNA (1)...(19): siRNA sense strand
gaucgaaagaagggauuua

SEQ ID NO: 749533 - RNA, 19 nt, Homo sapiens
  misc_RNA (1)...(19): siRNA sense strand
gaacccaaagaagaaguua

SEQ ID NO: 749534 - RNA, 19 nt, Homo sapiens
  misc_RNA (1)...(19): siRNA sense strand
cagaaacagucaccaaguc

SEQ ID NO: 749535 - RNA, 19 nt, Homo sapiens
  misc_RNA (1)...(19): siRNA sense strand
caaaccuucugacuugaga

SEQ ID NO: 749536 - RNA, 19 nt, Homo sapiens
  misc_RNA (1)...(19): siRNA sense strand
gagaagaggaggcuaaagg

SEQ ID NO: 749537 - RNA, 19 nt, Homo sapiens
  misc_RNA (1)...(19): siRNA sense strand
ccaaagcgagggagcauug

SEQ ID NO: 749538 - RNA, 19 nt, Homo sapiens
  misc_RNA (1)...(19): siRNA sense strand
gauacgagauagaggaaac

SEQ ID NO: 749539 - RNA, 19 nt, Homo sapiens
  misc_RNA (1)...(19): siRNA sense strand
ucaaugaauggcuaacuaa

SEQ ID NO: 749540 - RNA, 19 nt, Homo sapiens
  misc_RNA (1)...(19): siRNA sense strand
gacaagaaaccauucaagu

SEQ ID NO: 749541 - RNA, 19 nt, Homo sapiens
  misc_RNA (1)...(19): siRNA sense strand
agaggaggcuaaaggaaga

SEQ ID NO: 749542 - RNA, 19 nt, Homo sapiens
  misc_RNA (1)...(19): siRNA sense strand
aagaagggauuuacagaag

SEQ ID NO: 749543 - RNA, 19 nt, Homo sapiens
  misc_RNA (1)...(19): siRNA sense strand
ccagaggaaugacgaugau

SEQ ID NO: 749544 - RNA, 19 nt, Homo sapiens
  misc_RNA (1)...(19): siRNA sense strand
cagcaggcacaccaaauaa

SEQ ID NO: 749545 - RNA, 19 nt, Homo sapiens
  misc_RNA (1)...(19): siRNA sense strand
ccaagacaaccaccacaaa

SEQ ID NO: 749546 - RNA, 19 nt, Homo sapiens
  misc_RNA (1)...(19): siRNA sense strand
ccacaaacuuaaacauacu

SEQ ID NO: 749547 - RNA, 19 nt, Homo sapiens
  misc_RNA (1)...(19): siRNA sense strand
aagaaaccauucaaguguu

SEQ ID NO: 749548 - RNA, 19 nt, Homo sapiens
  misc_RNA (1)...(19): siRNA sense strand
aaagaagggauuuacagaa

SEQ ID NO: 749549 - RNA, 19 nt, Homo sapiens
  misc_RNA (1)...(19): siRNA sense strand
gcaguauaccagugcaauu

SEQ ID NO: 749550 - RNA, 19 nt, Homo sapiens
  misc_RNA (1)...(19): siRNA sense strand
gaggaaugacgaugaugaa

SEQ ID NO: 749551 - RNA, 19 nt, Homo sapiens
  misc_RNA (1)...(19): siRNA sense strand
gcugagaaacgccagaaga

SEQ ID NO: 749552 - RNA, 19 nt, Homo sapiens
  misc_RNA (1)...(19): siRNA sense strand
ccaagcagaagaaugcaaa

SEQ ID NO: 749553 - RNA, 19 nt, Homo sapiens
  misc_RNA (1)...(19): siRNA sense strand
cagcaauagucuccaagau

SEQ ID NO: 749554 - RNA, 19 nt, Homo sapiens
  misc_RNA (1)...(19): siRNA sense strand
acaagaaaccauucaagug

SEQ ID NO: 749555 - RNA, 19 nt, Homo sapiens
  misc_RNA (1)...(19): siRNA sense strand
ucagagaggaggaagagaa

SEQ ID NO: 749556 - RNA, 19 nt, Homo sapiens
  misc_RNA (1)...(19): siRNA sense strand
aaaugaaacuaccgagaag

SEQ ID NO: 749557 - RNA, 19 nt, Homo sapiens
  misc_RNA (1)...(19): siRNA sense strand
ggaggugaaugcccagaac

SEQ ID NO: 749558 - RNA, 19 nt, Homo sapiens
  misc_RNA (1)...(19): siRNA sense strand
ggcagaagcaggaggaaga

SEQ ID NO: 749559 - RNA, 19 nt, Homo sapiens
  misc_RNA (1)...(19): siRNA sense strand
cgagggagcauuggagaaa

SEQ ID NO: 749560 - RNA, 19 nt, Homo sapiens
  misc_RNA (1)...(19): siRNA sense strand
aaacagaaacagucaccaa

SEQ ID NO: 749561 - RNA, 19 nt, Homo sapiens
  misc_RNA (1)...(19): siRNA sense strand
ucaagaguaugugggagaa

SEQ ID NO: 749562 - RNA, 19 nt, Homo sapiens
  misc_RNA (1)...(19): siRNA sense strand
uaaaggaagagauugaaag

SEQ ID NO: 749563 - RNA, 19 nt, Homo sapiens
  misc_RNA (1)...(19): siRNA sense strand
caaugaauggcuaacuaaa

SEQ ID NO: 749564 - RNA, 19 nt, Homo sapiens
  misc_RNA (1)...(19): siRNA sense strand
caaaucgacccaucaagca

SEQ ID NO: 749565 - RNA, 19 nt, Homo sapiens
  misc_RNA (1)...(19): siRNA sense strand
aaagguucaucucucaaga

SEQ ID NO: 749566 - RNA, 19 nt, Homo sapiens
  misc_RNA (1)...(19): siRNA sense strand
cagaagauggcuugucaga

SEQ ID NO: 749567 - RNA, 19 nt, Homo sapiens
  misc_RNA (1)...(19): siRNA sense strand
gagauagaggaaacagaaa

SEQ ID NO: 749568 - RNA, 19 nt, Homo sapiens
  misc_RNA (1)...(19): siRNA sense strand
caggagacguauccagcaa

SEQ ID NO: 749569 - RNA, 19 nt, Homo sapiens
  misc_RNA (1)...(19): siRNA sense strand
gcagcaauagucuccaaga

SEQ ID NO: 749570 - RNA, 19 nt, Homo sapiens
  misc_RNA (1)...(19): siRNA sense strand
agaagagcgagcagaauuu

SEQ ID NO: 749571 - RNA, 19 nt, Homo sapiens
  misc_RNA (1)...(19): siRNA sense strand
ugaaagucgccaagaaaga

SEQ ID NO: 749572 - RNA, 19 nt, Homo sapiens
  misc_RNA (1)...(19): siRNA sense strand
uuggagggaugcugaagaa

SEQ ID NO: 749573 - RNA, 19 nt, Homo sapiens
  misc_RNA (1)...(19): siRNA sense strand
gaggaaacagaaacaguca

SEQ ID NO: 749574 - RNA, 19 nt, Homo sapiens
  misc_RNA (1)...(19): siRNA sense strand
gauagaggaaacagaaaca

SEQ ID NO: 749575 - RNA, 19 nt, Homo sapiens
  misc_RNA (1)...(19): siRNA sense strand
aagugaaagucgccaagaa

SEQ ID NO: 749576 - RNA, 19 nt, Homo sapiens
  misc_RNA (1)...(19): siRNA sense strand
aaagcaaucuguggauaag

SEQ ID NO: 749577 - RNA, 19 nt, Homo sapiens
  misc_RNA (1)...(19): siRNA sense strand
aagauggcuugucagauga

SEQ ID NO: 749578 - RNA, 19 nt, Homo sapiens
  misc_RNA (1)...(19): siRNA sense strand
gaggcuaaaggaagagauu

SEQ ID NO: 749579 - RNA, 19 nt, Homo sapiens
  misc_RNA (1)...(19): siRNA sense strand
cccacaaacuuaaacauac

SEQ ID NO: 749580 - RNA, 19 nt, Homo sapiens
  misc_RNA (1)...(19): siRNA sense strand
aaacagucaccaaguccua

SEQ ID NO: 749581 - RNA, 19 nt, Homo sapiens
  misc_RNA (1)...(19): siRNA sense strand
gcagaagcaggaggaagaa

SEQ ID NO: 749582 - RNA, 19 nt, Homo sapiens
  misc_RNA (1)...(19): siRNA sense strand
cagaugacaagaaaccauu

SEQ ID NO: 749583 - RNA, 19 nt, Homo sapiens
  misc_RNA (1)...(19): siRNA sense strand
gcuaaaggaagagauugaa

SEQ ID NO: 749584 - RNA, 19 nt, Homo sapiens
  misc_RNA (1)...(19): siRNA sense strand
gacaaagaacccaaagaag

SEQ ID NO: 749585 - RNA, 19 nt, Homo sapiens
  misc_RNA (1)...(19): siRNA sense strand
aagcggaaccucugggaaa

SEQ ID NO: 749586 - RNA, 19 nt, Homo sapiens
  misc_RNA (1)...(19): siRNA sense strand
gaaaggcgaagagcagaag

SEQ ID NO: 749587 - RNA, 19 nt, Homo sapiens
  misc_RNA (1)...(19): siRNA sense strand
gcuggaggaacucaagaaa

SEQ ID NO: 749588 - RNA, 19 nt, Homo sapiens
  misc_RNA (1)...(19): siRNA sense strand
cgaaagaagggauuuacag

SEQ ID NO: 749589 - RNA, 19 nt, Homo sapiens
  misc_RNA (1)...(19): siRNA sense strand
gaaggaguucgacccaaca

SEQ ID NO: 749590 - RNA, 19 nt, Homo sapiens
  misc_RNA (1)...(19): siRNA sense strand
gaagagcgagcagaauuuu

SEQ ID NO: 749591 - RNA, 19 nt, Homo sapiens
  misc_RNA (1)...(19): siRNA sense strand
cuaaaggaagagauugaaa

SEQ ID NO: 749592 - RNA, 19 nt, Homo sapiens
  misc_RNA (1)...(19): siRNA sense strand
uucaugacccacaaacuua

SEQ ID NO: 749593 - RNA, 19 nt, Homo sapiens
  misc_RNA (1)...(19): siRNA sense strand
ccaaagaagaaguuaagag

SEQ ID NO: 749594 - RNA, 19 nt, Homo sapiens
  misc_RNA (1)...(19): siRNA sense strand
aucaaugaauggcuaacua

SEQ ID NO: 749595 - RNA, 19 nt, Homo sapiens
  misc_RNA (1)...(19): siRNA sense strand
gaagauggcuugucagaug

SEQ ID NO: 749596 - RNA, 19 nt, Homo sapiens
  misc_RNA (1)...(19): siRNA sense strand
gaaguuaagucgcagaaug

SEQ ID NO: 749597 - RNA, 19 nt, Homo sapiens
  misc_RNA (1)...(19): siRNA sense strand
ggacaaagaacccaaagaa

SEQ ID NO: 749598 - RNA, 19 nt, Homo sapiens
  misc_RNA (1)...(19): siRNA sense strand
gaagggauuuacagaaguu

SEQ ID NO: 749599 - RNA, 19 nt, Homo sapiens
  misc_RNA (1)...(19): siRNA sense strand
ggaguucgacccaacaaua

SEQ ID NO: 749600 - RNA, 19 nt, Homo sapiens
  misc_RNA (1)...(19): siRNA sense strand
caaagaacccaaagaagaa

SEQ ID NO: 749601 - RNA, 19 nt, Homo sapiens
  misc_RNA (1)...(19): siRNA sense strand
ggagaaagggaauguguuu

SEQ ID NO: 749602 - RNA, 19 nt, Homo sapiens
  misc_RNA (1)...(19): siRNA sense strand
gaagagaagaggaggcuaa

SEQ ID NO: 749603 - RNA, 19 nt, Homo sapiens
  misc_RNA (1)...(19): siRNA sense strand
gaaagaagggauuuacaga

SEQ ID NO: 749604 - RNA, 19 nt, Homo sapiens
  misc_RNA (1)...(19): siRNA sense strand
gaaaagcaguggugucaaa

SEQ ID NO: 749605 - RNA, 19 nt, Homo sapiens
  misc_RNA (1)...(19): siRNA sense strand
ucgagaagcucaaacagaa

SEQ ID NO: 749606 - RNA, 19 nt, Homo sapiens
  misc_RNA (1)...(19): siRNA sense strand
caagucaccugcucccaaa

SEQ ID NO: 749607 - RNA, 19 nt, Homo sapiens
  misc_RNA (1)...(19): siRNA sense strand
gcagcaggcacaccaaaua

SEQ ID NO: 749608 - RNA, 19 nt, Homo sapiens
  misc_RNA (1)...(19): siRNA sense strand
ggaaacugcuggcuugaag

SEQ ID NO: 749609 - RNA, 19 nt, Homo sapiens
  misc_RNA (1)...(19): siRNA sense strand
gaaugacgaugaugaagag

SEQ ID NO: 749610 - RNA, 19 nt, Homo sapiens
  misc_RNA (1)...(19): siRNA sense strand
caagaaagauacgagauag

SEQ ID NO: 749611 - RNA, 19 nt, Homo sapiens
  misc_RNA (1)...(19): siRNA sense strand
caagaaagaagacaaggaa

SEQ ID NO: 749612 - RNA, 19 nt, Homo sapiens
  misc_RNA (1)...(19): siRNA sense strand
gcagaagaaugcaaaauga

SEQ ID NO: 749613 - RNA, 19 nt, Homo sapiens
  misc_RNA (1)...(19): siRNA sense strand
ccaagaaagauacgagaua

SEQ ID NO: 749614 - RNA, 19 nt, Homo sapiens
  misc_RNA (1)...(19): siRNA sense strand
acaaagaacccaaagaaga

SEQ ID NO: 749615 - RNA, 19 nt, Homo sapiens
  misc_RNA (1)...(19): siRNA sense strand
gaaaagcaaucuguggaua

SEQ ID NO: 749616 - RNA, 19 nt, Homo sapiens
  misc_RNA (1)...(19): siRNA sense strand
caagaaaccauucaagugu

SEQ ID NO: 749617 - RNA, 19 nt, Homo sapiens
  misc_RNA (1)...(19): siRNA sense strand
gccagaagaugccagaaga

SEQ ID NO: 749618 - RNA, 19 nt, Homo sapiens
  misc_RNA (1)...(19): siRNA sense strand
guacgcaacaucaagagua

SEQ ID NO: 749619 - RNA, 19 nt, Homo sapiens
  misc_RNA (1)...(19): siRNA sense strand
ucccaaaccuucugacuug

SEQ ID NO: 749620 - RNA, 19 nt, Homo sapiens
  misc_RNA (1)...(19): siRNA sense strand
ggaaugacgaugaugaaga

SEQ ID NO: 749621 - RNA, 19 nt, Homo sapiens
  misc_RNA (1)...(19): siRNA sense strand
gaaagucgccaagaaagau

SEQ ID NO: 749622 - RNA, 19 nt, Homo sapiens
  misc_RNA (1)...(19): siRNA sense strand
gagaauucaugacccacaa

SEQ ID NO: 749623 - RNA, 19 nt, Homo sapiens
  misc_RNA (1)...(19): siRNA sense strand
gauagaagagcgagcagaa

SEQ ID NO: 749624 - RNA, 19 nt, Homo sapiens
  misc_RNA (1)...(19): siRNA sense strand
aagaagaaguuaagagcuu

SEQ ID NO: 749625 - RNA, 19 nt, Homo sapiens
  misc_RNA (1)...(19): siRNA sense strand
gaagaggaggcuaaaggaa

SEQ ID NO: 749626 - RNA, 19 nt, Homo sapiens
  misc_RNA (1)...(19): siRNA sense strand
cgagauagaggaaacagaa

SEQ ID NO: 749627 - RNA, 19 nt, Homo sapiens
  misc_RNA (1)...(19): siRNA sense strand
gaagguguacgcaacauca

SEQ ID NO: 749628 - RNA, 19 nt, Homo sapiens
  misc_RNA (1)...(19): siRNA sense strand
uagaagagcgagcagaauu

SEQ ID NO: 749629 - RNA, 19 nt, Homo sapiens
  misc_RNA (1)...(19): siRNA sense strand
gaguucgacccaacaauaa

SEQ ID NO: 749630 - RNA, 19 nt, Homo sapiens
  misc_RNA (1)...(19): siRNA sense strand
ccuaaagguucaucucuca

SEQ ID NO: 749631 - RNA, 19 nt, Homo sapiens
  misc_RNA (1)...(19): siRNA sense strand
ggaggaagccgaucgaaaa

SEQ ID NO: 749632 - RNA, 19 nt, Homo sapiens
  misc_RNA (1)...(19): siRNA sense strand
gaucgaaagaagggauuua

SEQ ID NO: 749633 - RNA, 19 nt, Homo sapiens
  misc_RNA (1)...(19): siRNA sense strand
gaacccaaagaagaaguua

SEQ ID NO: 749634 - RNA, 19 nt, Homo sapiens
  misc_RNA (1)...(19): siRNA sense strand
cagaaacagucaccaaguc

SEQ ID NO: 749635 - RNA, 19 nt, Homo sapiens
  misc_RNA (1)...(19): siRNA sense strand
caaaccuucugacuugaga

SEQ ID NO: 749636 - RNA, 19 nt, Homo sapiens
  misc_RNA (1)...(19): siRNA sense strand
gagaagaggaggcuaaagg

SEQ ID NO: 749637 - RNA, 19 nt, Homo sapiens
  misc_RNA (1)...(19): siRNA sense strand
ccaaagcgagggagcauug

SEQ ID NO: 749638 - RNA, 19 nt, Homo sapiens
  misc_RNA (1)...(19): siRNA sense strand
gauacgagauagaggaaac

SEQ ID NO: 749639 - RNA, 19 nt, Homo sapiens
  misc_RNA (1)...(19): siRNA sense strand
ucaaugaauggcuaacuaa

SEQ ID NO: 749640 - RNA, 19 nt, Homo sapiens
  misc_RNA (1)...(19): siRNA sense strand
gacaagaaaccauucaagu

SEQ ID NO: 749641 - RNA, 19 nt, Homo sapiens
  misc_RNA (1)...(19): siRNA sense strand
agaggaggcuaaaggaaga

SEQ ID NO: 749642 - RNA, 19 nt, Homo sapiens
  misc_RNA (1)...(19): siRNA sense strand
aagaagggauuuacagaag

SEQ ID NO: 749643 - RNA, 19 nt, Homo sapiens
  misc_RNA (1)...(19): siRNA sense strand
ccagaggaaugacgaugau

SEQ ID NO: 749644 - RNA, 19 nt, Homo sapiens
  misc_RNA (1)...(19): siRNA sense strand
cagcaggcacaccaaauaa

SEQ ID NO: 749645 - RNA, 19 nt, Homo sapiens
  misc_RNA (1)...(19): siRNA sense strand
ccaagacaaccaccacaaa

SEQ ID NO: 749646 - RNA, 19 nt, Homo sapiens
  misc_RNA (1)...(19): siRNA sense strand
ccacaaacuuaaacauacu

SEQ ID NO: 749647 - RNA, 19 nt, Homo sapiens
  misc_RNA (1)...(19): siRNA sense strand
aagaaaccauucaaguguu

SEQ ID NO: 749648 - RNA, 19 nt, Homo sapiens
  misc_RNA (1)...(19): siRNA sense strand
aaagaagggauuuacagaa

SEQ ID NO: 749649 - RNA, 19 nt, Homo sapiens
  misc_RNA (1)...(19): siRNA sense strand
gcaguauaccagugcaauu

SEQ ID NO: 749650 - RNA, 19 nt, Homo sapiens
  misc_RNA (1)...(19): siRNA sense strand
gaggaaugacgaugaugaa

SEQ ID NO: 749651 - RNA, 19 nt, Homo sapiens
  misc_RNA (1)...(19): siRNA sense strand
gcugagaaacgccagaaga

SEQ ID NO: 749652 - RNA, 19 nt, Homo sapiens
  misc_RNA (1)...(19): siRNA sense strand
ccaagcagaagaaugcaaa

SEQ ID NO: 749653 - RNA, 19 nt, Homo sapiens
  misc_RNA (1)...(19): siRNA sense strand
cagcaauagucuccaagau

SEQ ID NO: 749654 - RNA, 19 nt, Homo sapiens
  misc_RNA (1)...(19): siRNA sense strand
acaagaaaccauucaagug

SEQ ID NO: 749655 - RNA, 19 nt, Homo sapiens
  misc_RNA (1)...(19): siRNA sense strand
ucagagaggaggaagagaa

SEQ ID NO: 749656 - RNA, 19 nt, Homo sapiens
  misc_RNA (1)...(19): siRNA sense strand
aaaugaaacuaccgagaag

SEQ ID NO: 749657 - RNA, 19 nt, Homo sapiens
  misc_RNA (1)...(19): siRNA sense strand
ggaggugaaugcccagaac

SEQ ID NO: 749658 - RNA, 19 nt, Homo sapiens
  misc_RNA (1)...(19): siRNA sense strand
ggcagaagcaggaggaaga

SEQ ID NO: 749659 - RNA, 19 nt, Homo sapiens
  misc_RNA (1)...(19): siRNA sense strand
cgagggagcauuggagaaa

SEQ ID NO: 749660 - RNA, 19 nt, Homo sapiens
  misc_RNA (1)...(19): siRNA sense strand
aaacagaaacagucaccaa

SEQ ID NO: 749661 - RNA, 19 nt, Homo sapiens
  misc_RNA (1)...(19): siRNA sense strand
ucaagaguaugugggagaa

SEQ ID NO: 749662 - RNA, 19 nt, Homo sapiens
  misc_RNA (1)...(19): siRNA sense strand
uaaaggaagagauugaaag

SEQ ID NO: 749663 - RNA, 19 nt, Homo sapiens
  misc_RNA (1)...(19): siRNA sense strand
caaugaauggcuaacuaaa

SEQ ID NO: 749664 - RNA, 19 nt, Homo sapiens
  misc_RNA (1)...(19): siRNA sense strand
caaaucgacccaucaagca

SEQ ID NO: 749665 - RNA, 19 nt, Homo sapiens
  misc_RNA (1)...(19): siRNA sense strand
aaagguucaucucucaaga

SEQ ID NO: 749666 - RNA, 19 nt, Homo sapiens
  misc_RNA (1)...(19): siRNA sense strand
cagaagauggcuugucaga

SEQ ID NO: 749667 - RNA, 19 nt, Homo sapiens
  misc_RNA (1)...(19): siRNA sense strand
gagauagaggaaacagaaa

SEQ ID NO: 749668 - RNA, 19 nt, Homo sapiens
  misc_RNA (1)...(19): siRNA sense strand
caggagacguauccagcaa

SEQ ID NO: 749669 - RNA, 19 nt, Homo sapiens
  misc_RNA (1)...(19): siRNA sense strand
gcagcaauagucuccaaga

SEQ ID NO: 749670 - RNA, 19 nt, Homo sapiens
  misc_RNA (1)...(19): siRNA sense strand
agaagagcgagcagaauuu

SEQ ID NO: 749671 - RNA, 19 nt, Homo sapiens
  misc_RNA (1)...(19): siRNA sense strand
ugaaagucgccaagaaaga

SEQ ID NO: 749672 - RNA, 19 nt, Homo sapiens
  misc_RNA (1)...(19): siRNA sense strand
uuggagggaugcugaagaa

SEQ ID NO: 749673 - RNA, 19 nt, Homo sapiens
  misc_RNA (1)...(19): siRNA sense strand
gaggaaacagaaacaguca

SEQ ID NO: 749674 - RNA, 19 nt, Homo sapiens
  misc_RNA (1)...(19): siRNA sense strand
gauagaggaaacagaaaca

SEQ ID NO: 749675 - RNA, 19 nt, Homo sapiens
  misc_RNA (1)...(19): siRNA sense strand
aagugaaagucgccaagaa

SEQ ID NO: 749676 - RNA, 19 nt, Homo sapiens
  misc_RNA (1)...(19): siRNA sense strand
aaagcaaucuguggauaag

SEQ ID NO: 749677 - RNA, 19 nt, Homo sapiens
  misc_RNA (1)...(19): siRNA sense strand
aagauggcuugucagauga

SEQ ID NO: 749678 - RNA, 19 nt, Homo sapiens
  misc_RNA (1)...(19): siRNA sense strand
gaggcuaaaggaagagauu

SEQ ID NO: 749679 - RNA, 19 nt, Homo sapiens
  misc_RNA (1)...(19): siRNA sense strand
cccacaaacuuaaacauac

SEQ ID NO: 749680 - RNA, 19 nt, Homo sapiens
  misc_RNA (1)...(19): siRNA sense strand
aaacagucaccaaguccua

SEQ ID NO: 749681 - RNA, 19 nt, Homo sapiens
  misc_RNA (1)...(19): siRNA sense strand
gcagaagcaggaggaagaa

SEQ ID NO: 749682 - RNA, 19 nt, Homo sapiens
  misc_RNA (1)...(19): siRNA sense strand
cagaugacaagaaaccauu

SEQ ID NO: 749683 - RNA, 19 nt, Homo sapiens
  misc_RNA (1)...(19): siRNA sense strand
gcuaaaggaagagauugaa

SEQ ID NO: 749684 - RNA, 19 nt, Homo sapiens
  misc_RNA (1)...(19): siRNA sense strand
gacaaagaacccaaagaag

SEQ ID NO: 749685 - RNA, 19 nt, Homo sapiens
  misc_RNA (1)...(19): siRNA sense strand
aagcggaaccucugggaaa

SEQ ID NO: 749686 - RNA, 19 nt, Homo sapiens
  misc_RNA (1)...(19): siRNA sense strand
gaaaggcgaagagcagaag

SEQ ID NO: 749687 - RNA, 19 nt, Homo sapiens
  misc_RNA (1)...(19): siRNA sense strand
gcuggaggaacucaagaaa

SEQ ID NO: 749688 - RNA, 19 nt, Homo sapiens
  misc_RNA (1)...(19): siRNA sense strand
cgaaagaagggauuuacag

SEQ ID NO: 749689 - RNA, 19 nt, Homo sapiens
  misc_RNA (1)...(19): siRNA sense strand
gaaggaguucgacccaaca

SEQ ID NO: 749690 - RNA, 19 nt, Homo sapiens
  misc_RNA (1)...(19): siRNA sense strand
gaagagcgagcagaauuuu

SEQ ID NO: 749691 - RNA, 19 nt, Homo sapiens
  misc_RNA (1)...(19): siRNA sense strand
cuaaaggaagagauugaaa

SEQ ID NO: 749692 - RNA, 19 nt, Homo sapiens
  misc_RNA (1)...(19): siRNA sense strand
uucaugacccacaaacuua

SEQ ID NO: 749693 - RNA, 19 nt, Homo sapiens
  misc_RNA (1)...(19): siRNA sense strand
ccaaagaagaaguuaagag

SEQ ID NO: 749694 - RNA, 19 nt, Homo sapiens
  misc_RNA (1)...(19): siRNA sense strand
aucaaugaauggcuaacua

SEQ ID NO: 749695 - RNA, 19 nt, Homo sapiens
  misc_RNA (1)...(19): siRNA sense strand
gaagauggcuugucagaug

SEQ ID NO: 749696 - RNA, 19 nt, Homo sapiens
  misc_RNA (1)...(19): siRNA sense strand
gaaguuaagucgcagaaug

SEQ ID NO: 749697 - RNA, 19 nt, Homo sapiens
  misc_RNA (1)...(19): siRNA sense strand
ggacaaagaacccaaagaa

SEQ ID NO: 749698 - RNA, 19 nt, Homo sapiens
  misc_RNA (1)...(19): siRNA sense strand
gaagggauuuacagaaguu

SEQ ID NO: 749699 - RNA, 19 nt, Homo sapiens
  misc_RNA (1)...(19): siRNA sense strand
ggaguucgacccaacaaua

SEQ ID NO: 749700 - RNA, 19 nt, Homo sapiens
  misc_RNA (1)...(19): siRNA sense strand
caaagaacccaaagaagaa

SEQ ID NO: 749701 - RNA, 19 nt, Homo sapiens
  misc_RNA (1)...(19): siRNA sense strand
ggagaaagggaauguguuu

SEQ ID NO: 749702 - RNA, 19 nt, Homo sapiens
  misc_RNA (1)...(19): siRNA sense strand
gaagagaagaggaggcuaa

SEQ ID NO: 749703 - RNA, 19 nt, Homo sapiens
  misc_RNA (1)...(19): siRNA sense strand
gaaagaagggauuuacaga

SEQ ID NO: 749704 - RNA, 19 nt, Homo sapiens
  misc_RNA (1)...(19): siRNA sense strand
gaaaagcaguggugucaaa

SEQ ID NO: 749705 - RNA, 19 nt, Homo sapiens
  misc_RNA (1)...(19): siRNA sense strand
ucgagaagcucaaacagaa

SEQ ID NO: 749706 - RNA, 19 nt, Homo sapiens
  misc_RNA (1)...(19): siRNA sense strand
caagucaccugcucccaaa

SEQ ID NO: 749707 - RNA, 19 nt, Homo sapiens
  misc_RNA (1)...(19): siRNA sense strand
gcagcaggcacaccaaaua

SEQ ID NO: 749708 - RNA, 19 nt, Homo sapiens
  misc_RNA (1)...(19): siRNA sense strand
ggaaacugcuggcuugaag

SEQ ID NO: 749709 - RNA, 19 nt, Homo sapiens
  misc_RNA (1)...(19): siRNA sense strand
gaaugacgaugaugaagag

SEQ ID NO: 749710 - RNA, 19 nt, Homo sapiens
  misc_RNA (1)...(19): siRNA sense strand
caagaaagauacgagauag

SEQ ID NO: 749711 - RNA, 19 nt, Homo sapiens
  misc_RNA (1)...(19): siRNA sense strand
caagaaagaagacaaggaa

SEQ ID NO: 749712 - RNA, 19 nt, Homo sapiens
  misc_RNA (1)...(19): siRNA sense strand
gcagaagaaugcaaaauga

SEQ ID NO: 749713 - RNA, 19 nt, Homo sapiens
  misc_RNA (1)...(19): siRNA sense strand
ccaagaaagauacgagaua

SEQ ID NO: 749714 - RNA, 19 nt, Homo sapiens
  misc_RNA (1)...(19): siRNA sense strand
acaaagaacccaaagaaga

SEQ ID NO: 749715 - RNA, 19 nt, Homo sapiens
  misc_RNA (1)...(19): siRNA sense strand
gaaaagcaaucuguggaua

SEQ ID NO: 749716 - RNA, 19 nt, Homo sapiens
  misc_RNA (1)...(19): siRNA sense strand
caagaaaccauucaagugu

SEQ ID NO: 749717 - RNA, 19 nt, Homo sapiens
  misc_RNA (1)...(19): siRNA sense strand
gccagaagaugccagaaga

SEQ ID NO: 749718 - RNA, 19 nt, Homo sapiens
  misc_RNA (1)...(19): siRNA sense strand
guacgcaacaucaagagua

SEQ ID NO: 749719 - RNA, 19 nt, Homo sapiens
  misc_RNA (1)...(19): siRNA sense strand
ucccaaaccuucugacuug

SEQ ID NO: 749720 - RNA, 19 nt, Homo sapiens
  misc_RNA (1)...(19): siRNA sense strand
ggaaugacgaugaugaaga

SEQ ID NO: 749721 - RNA, 19 nt, Homo sapiens
  misc_RNA (1)...(19): siRNA sense strand
gaaagucgccaagaaagau

SEQ ID NO: 749722 - RNA, 19 nt, Homo sapiens
  misc_RNA (1)...(19): siRNA sense strand
gagaauucaugacccacaa

SEQ ID NO: 749723 - RNA, 19 nt, Homo sapiens
  misc_RNA (1)...(19): siRNA sense strand
gauagaagagcgagcagaa

SEQ ID NO: 749724 - RNA, 19 nt, Homo sapiens
  misc_RNA (1)...(19): siRNA sense strand
aagaagaaguuaagagcuu

SEQ ID NO: 749725 - RNA, 19 nt, Homo sapiens
  misc_RNA (1)...(19): siRNA sense strand
gaagaggaggcuaaaggaa

SEQ ID NO: 749726 - RNA, 19 nt, Homo sapiens
  misc_RNA (1)...(19): siRNA sense strand
cgagauagaggaaacagaa

SEQ ID NO: 749727 - RNA, 19 nt, Homo sapiens
  misc_RNA (1)...(19): siRNA sense strand
gaagguguacgcaacauca

SEQ ID NO: 749728 - RNA, 19 nt, Homo sapiens
  misc_RNA (1)...(19): siRNA sense strand
uagaagagcgagcagaauu

SEQ ID NO: 749729 - RNA, 19 nt, Homo sapiens
  misc_RNA (1)...(19): siRNA sense strand
gaguucgacccaacaauaa

SEQ ID NO: 749730 - RNA, 19 nt, Homo sapiens
  misc_RNA (1)...(19): siRNA sense strand
ccuaaagguucaucucuca

SEQ ID NO: 749731 - RNA, 19 nt, Homo sapiens
  misc_RNA (1)...(19): siRNA sense strand
ggaggaagccgaucgaaaa

SEQ ID NO: 749732 - RNA, 19 nt, Homo sapiens
  misc_RNA (1)...(19): siRNA sense strand
gaucgaaagaagggauuua

SEQ ID NO: 749733 - RNA, 19 nt, Homo sapiens
  misc_RNA (1)...(19): siRNA sense strand
gaacccaaagaagaaguua

SEQ ID NO: 749734 - RNA, 19 nt, Homo sapiens
  misc_RNA (1)...(19): siRNA sense strand
cagaaacagucaccaaguc

SEQ ID NO: 749735 - RNA, 19 nt, Homo sapiens
  misc_RNA (1)...(19): siRNA sense strand
caaaccuucugacuugaga

SEQ ID NO: 749736 - RNA, 19 nt, Homo sapiens
  misc_RNA (1)...(19): siRNA sense strand
gagaagaggaggcuaaagg

SEQ ID NO: 749737 - RNA, 19 nt, Homo sapiens
  misc_RNA (1)...(19): siRNA sense strand
ccaaagcgagggagcauug

SEQ ID NO: 749738 - RNA, 19 nt, Homo sapiens
  misc_RNA (1)...(19): siRNA sense strand
gauacgagauagaggaaac

SEQ ID NO: 749739 - RNA, 19 nt, Homo sapiens
  misc_RNA (1)...(19): siRNA sense strand
ucaaugaauggcuaacuaa

SEQ ID NO: 749740 - RNA, 19 nt, Homo sapiens
  misc_RNA (1)...(19): siRNA sense strand
gacaagaaaccauucaagu

SEQ ID NO: 749741 - RNA, 19 nt, Homo sapiens
  misc_RNA (1)...(19): siRNA sense strand
agaggaggcuaaaggaaga

SEQ ID NO: 749742 - RNA, 19 nt, Homo sapiens
  misc_RNA (1)...(19): siRNA sense strand
aagaagggauuuacagaag

SEQ ID NO: 749743 - RNA, 19 nt, Homo sapiens
  misc_RNA (1)...(19): siRNA sense strand
ccagaggaaugacgaugau

SEQ ID NO: 749744 - RNA, 19 nt, Homo sapiens
  misc_RNA (1)...(19): siRNA sense strand
cagcaggcacaccaaauaa

SEQ ID NO: 749745 - RNA, 19 nt, Homo sapiens
  misc_RNA (1)...(19): siRNA sense strand
ccaagacaaccaccacaaa

SEQ ID NO: 749746 - RNA, 19 nt, Homo sapiens
  misc_RNA (1)...(19): siRNA sense strand
ccacaaacuuaaacauacu

SEQ ID NO: 749747 - RNA, 19 nt, Homo sapiens
  misc_RNA (1)...(19): siRNA sense strand
aagaaaccauucaaguguu

SEQ ID NO: 749748 - RNA, 19 nt, Homo sapiens
  misc_RNA (1)...(19): siRNA sense strand
aaagaagggauuuacagaa

SEQ ID NO: 749749 - RNA, 19 nt, Homo sapiens
  misc_RNA (1)...(19): siRNA sense strand
gcaguauaccagugcaauu

SEQ ID NO: 749750 - RNA, 19 nt, Homo sapiens
  misc_RNA (1)...(19): siRNA sense strand
gaggaaugacgaugaugaa

SEQ ID NO: 749751 - RNA, 19 nt, Homo sapiens
  misc_RNA (1)...(19): siRNA sense strand
gcugagaaacgccagaaga

SEQ ID NO: 749752 - RNA, 19 nt, Homo sapiens
  misc_RNA (1)...(19): siRNA sense strand
ccaagcagaagaaugcaaa

SEQ ID NO: 749753 - RNA, 19 nt, Homo sapiens
  misc_RNA (1)...(19): siRNA sense strand
cagcaauagucuccaagau

SEQ ID NO: 749754 - RNA, 19 nt, Homo sapiens
  misc_RNA (1)...(19): siRNA sense strand
acaagaaaccauucaagug

SEQ ID NO: 749755 - RNA, 19 nt, Homo sapiens
  misc_RNA (1)...(19): siRNA sense strand
ucagagaggaggaagagaa

SEQ ID NO: 749756 - RNA, 19 nt, Homo sapiens
  misc_RNA (1)...(19): siRNA sense strand
aaaugaaacuaccgagaag

SEQ ID NO: 749757 - RNA, 19 nt, Homo sapiens
  misc_RNA (1)...(19): siRNA sense strand
ggaggugaaugcccagaac

SEQ ID NO: 749758 - RNA, 19 nt, Homo sapiens
  misc_RNA (1)...(19): siRNA sense strand
ggcagaagcaggaggaaga

SEQ ID NO: 749759 - RNA, 19 nt, Homo sapiens
  misc_RNA (1)...(19): siRNA sense strand
cgagggagcauuggagaaa

SEQ ID NO: 749760 - RNA, 19 nt, Homo sapiens
  misc_RNA (1)...(19): siRNA sense strand
aaacagaaacagucaccaa

SEQ ID NO: 749761 - RNA, 19 nt, Homo sapiens
  misc_RNA (1)...(19): siRNA sense strand
ucaagaguaugugggagaa

SEQ ID NO: 749762 - RNA, 19 nt, Homo sapiens
  misc_RNA (1)...(19): siRNA sense strand
uaaaggaagagauugaaag

SEQ ID NO: 749763 - RNA, 19 nt, Homo sapiens
  misc_RNA (1)...(19): siRNA sense strand
caaugaauggcuaacuaaa

SEQ ID NO: 749764 - RNA, 19 nt, Homo sapiens
  misc_RNA (1)...(19): siRNA sense strand
caaaucgacccaucaagca

SEQ ID NO: 749765 - RNA, 19 nt, Homo sapiens
  misc_RNA (1)...(19): siRNA sense strand
aaagguucaucucucaaga

SEQ ID NO: 749766 - RNA, 19 nt, Homo sapiens
  misc_RNA (1)...(19): siRNA sense strand
cagaagauggcuugucaga

SEQ ID NO: 749767 - RNA, 19 nt, Homo sapiens
  misc_RNA (1)...(19): siRNA sense strand
gagauagaggaaacagaaa

SEQ ID NO: 749768 - RNA, 19 nt, Homo sapiens
  misc_RNA (1)...(19): siRNA sense strand
caggagacguauccagcaa

SEQ ID NO: 749769 - RNA, 19 nt, Homo sapiens
  misc_RNA (1)...(19): siRNA sense strand
gcagcaauagucuccaaga

SEQ ID NO: 749770 - RNA, 19 nt, Homo sapiens
  misc_RNA (1)...(19): siRNA sense strand
agaagagcgagcagaauuu

SEQ ID NO: 749771 - RNA, 19 nt, Homo sapiens
  misc_RNA (1)...(19): siRNA sense strand
ugaaagucgccaagaaaga

SEQ ID NO: 749772 - RNA, 19 nt, Homo sapiens
  misc_RNA (1)...(19): siRNA sense strand
uuggagggaugcugaagaa

SEQ ID NO: 749773 - RNA, 19 nt, Homo sapiens
  misc_RNA (1)...(19): siRNA sense strand
gaggaaacagaaacaguca

SEQ ID NO: 749774 - RNA, 19 nt, Homo sapiens
  misc_RNA (1)...(19): siRNA sense strand
gauagaggaaacagaaaca

SEQ ID NO: 749775 - RNA, 19 nt, Homo sapiens
  misc_RNA (1)...(19): siRNA sense strand
aagugaaagucgccaagaa

SEQ ID NO: 749776 - RNA, 19 nt, Homo sapiens
  misc_RNA (1)...(19): siRNA sense strand
aaagcaaucuguggauaag

SEQ ID NO: 749777 - RNA, 19 nt, Homo sapiens
  misc_RNA (1)...(19): siRNA sense strand
aagauggcuugucagauga

SEQ ID NO: 749778 - RNA, 19 nt, Homo sapiens
  misc_RNA (1)...(19): siRNA sense strand
gaggcuaaaggaagagauu

SEQ ID NO: 749779 - RNA, 19 nt, Homo sapiens
  misc_RNA (1)...(19): siRNA sense strand
cccacaaacuuaaacauac

SEQ ID NO: 749780 - RNA, 19 nt, Homo sapiens
  misc_RNA (1)...(19): siRNA sense strand
aaacagucaccaaguccua

SEQ ID NO: 749781 - RNA, 19 nt, Homo sapiens
  misc_RNA (1)...(19): siRNA sense strand
gcagaagcaggaggaagaa

SEQ ID NO: 749782 - RNA, 19 nt, Homo sapiens
  misc_RNA (1)...(19): siRNA sense strand
cagaugacaagaaaccauu

SEQ ID NO: 749783 - RNA, 19 nt, Homo sapiens
  misc_RNA (1)...(19): siRNA sense strand
gcuaaaggaagagauugaa

SEQ ID NO: 749784 - RNA, 19 nt, Homo sapiens
  misc_RNA (1)...(19): siRNA sense strand
gacaaagaacccaaagaag

SEQ ID NO: 749785 - RNA, 19 nt, Homo sapiens
  misc_RNA (1)...(19): siRNA sense strand
aagcggaaccucugggaaa

SEQ ID NO: 749786 - RNA, 19 nt, Homo sapiens
  misc_RNA (1)...(19): siRNA sense strand
gaaaggcgaagagcagaag

SEQ ID NO: 749787 - RNA, 19 nt, Homo sapiens
  misc_RNA (1)...(19): siRNA sense strand
gcuggaggaacucaagaaa

SEQ ID NO: 749788 - RNA, 19 nt, Homo sapiens
  misc_RNA (1)...(19): siRNA sense strand
cgaaagaagggauuuacag

SEQ ID NO: 749789 - RNA, 19 nt, Homo sapiens
  misc_RNA (1)...(19): siRNA sense strand
gaaggaguucgacccaaca

SEQ ID NO: 749790 - RNA, 19 nt, Homo sapiens
  misc_RNA (1)...(19): siRNA sense strand
gaagagcgagcagaauuuu

SEQ ID NO: 749791 - RNA, 19 nt, Homo sapiens
  misc_RNA (1)...(19): siRNA sense strand
cuaaaggaagagauugaaa

SEQ ID NO: 749792 - RNA, 19 nt, Homo sapiens
  misc_RNA (1)...(19): siRNA sense strand
uucaugacccacaaacuua

SEQ ID NO: 749793 - RNA, 19 nt, Homo sapiens
  misc_RNA (1)...(19): siRNA sense strand
ccaaagaagaaguuaagag

SEQ ID NO: 749794 - RNA, 19 nt, Homo sapiens
  misc_RNA (1)...(19): siRNA sense strand
aucaaugaauggcuaacua

SEQ ID NO: 749795 - RNA, 19 nt, Homo sapiens
  misc_RNA (1)...(19): siRNA sense strand
gaagauggcuugucagaug

SEQ ID NO: 749796 - RNA, 19 nt, Homo sapiens
  misc_RNA (1)...(19): siRNA sense strand
gaaguuaagucgcagaaug

SEQ ID NO: 749797 - RNA, 19 nt, Homo sapiens
  misc_RNA (1)...(19): siRNA sense strand
ggacaaagaacccaaagaa

SEQ ID NO: 749798 - RNA, 19 nt, Homo sapiens
  misc_RNA (1)...(19): siRNA sense strand
gaagggauuuacagaaguu

SEQ ID NO: 749799 - RNA, 19 nt, Homo sapiens
  misc_RNA (1)...(19): siRNA sense strand
ggaguucgacccaacaaua

SEQ ID NO: 749800 - RNA, 19 nt, Homo sapiens
  misc_RNA (1)...(19): siRNA sense strand
caaagaacccaaagaagaa

SEQ ID NO: 749801 - RNA, 19 nt, Homo sapiens
  misc_RNA (1)...(19): siRNA sense strand
ggagaaagggaauguguuu

SEQ ID NO: 749802 - RNA, 19 nt, Homo sapiens
  misc_RNA (1)...(19): siRNA sense strand
gaagagaagaggaggcuaa

SEQ ID NO: 749803 - RNA, 19 nt, Homo sapiens
  misc_RNA (1)...(19): siRNA sense strand
gaaagaagggauuuacaga

SEQ ID NO: 749804 - RNA, 19 nt, Homo sapiens
  misc_RNA (1)...(19): siRNA sense strand
gaaaagcaguggugucaaa

SEQ ID NO: 749805 - RNA, 19 nt, Homo sapiens
  misc_RNA (1)...(19): siRNA sense strand
ucgagaagcucaaacagaa

SEQ ID NO: 749806 - RNA, 19 nt, Homo sapiens
  misc_RNA (1)...(19): siRNA sense strand
caagucaccugcucccaaa

SEQ ID NO: 749807 - RNA, 19 nt, Homo sapiens
  misc_RNA (1)...(19): siRNA sense strand
gcagcaggcacaccaaaua

SEQ ID NO: 749808 - RNA, 19 nt, Homo sapiens
  misc_RNA (1)...(19): siRNA sense strand
ggaaacugcuggcuugaag

SEQ ID NO: 749809 - RNA, 19 nt, Homo sapiens
  misc_RNA (1)...(19): siRNA sense strand
gaaugacgaugaugaagag

SEQ ID NO: 749810 - RNA, 19 nt, Homo sapiens
  misc_RNA (1)...(19): siRNA sense strand
caagaaagauacgagauag

SEQ ID NO: 749811 - RNA, 19 nt, Homo sapiens
  misc_RNA (1)...(19): siRNA sense strand
caagaaagaagacaaggaa

SEQ ID NO: 749812 - RNA, 19 nt, Homo sapiens
  misc_RNA (1)...(19): siRNA sense strand
gcagaagaaugcaaaauga

SEQ ID NO: 749813 - RNA, 19 nt, Homo sapiens
  misc_RNA (1)...(19): siRNA sense strand
ccaagaaagauacgagaua

SEQ ID NO: 749814 - RNA, 19 nt, Homo sapiens
  misc_RNA (1)...(19): siRNA sense strand
acaaagaacccaaagaaga

SEQ ID NO: 749815 - RNA, 19 nt, Homo sapiens
  misc_RNA (1)...(19): siRNA sense strand
gaaaagcaaucuguggaua

SEQ ID NO: 749816 - RNA, 19 nt, Homo sapiens
  misc_RNA (1)...(19): siRNA sense strand
caagaaaccauucaagugu

SEQ ID NO: 749817 - RNA, 19 nt, Homo sapiens
  misc_RNA (1)...(19): siRNA sense strand
gccagaagaugccagaaga

SEQ ID NO: 749818 - RNA, 19 nt, Homo sapiens
  misc_RNA (1)...(19): siRNA sense strand
guacgcaacaucaagagua

SEQ ID NO: 749819 - RNA, 19 nt, Homo sapiens
  misc_RNA (1)...(19): siRNA sense strand
ucccaaaccuucugacuug

SEQ ID NO: 749820 - RNA, 19 nt, Homo sapiens
  misc_RNA (1)...(19): siRNA sense strand
ggaaugacgaugaugaaga

SEQ ID NO: 749821 - RNA, 19 nt, Homo sapiens
  misc_RNA (1)...(19): siRNA sense strand
gaaagucgccaagaaagau

SEQ ID NO: 749822 - RNA, 19 nt, Homo sapiens
  misc_RNA (1)...(19): siRNA sense strand
gagaauucaugacccacaa

SEQ ID NO: 749823 - RNA, 19 nt, Homo sapiens
  misc_RNA (1)...(19): siRNA sense strand
gauagaagagcgagcagaa

SEQ ID NO: 749824 - RNA, 19 nt, Homo sapiens
  misc_RNA (1)...(19): siRNA sense strand
aagaagaaguuaagagcuu

SEQ ID NO: 749825 - RNA, 19 nt, Homo sapiens
  misc_RNA (1)...(19): siRNA sense strand
gaagaggaggcuaaaggaa

SEQ ID NO: 749826 - RNA, 19 nt, Homo sapiens
  misc_RNA (1)...(19): siRNA sense strand
cgagauagaggaaacagaa

SEQ ID NO: 749827 - RNA, 19 nt, Homo sapiens
  misc_RNA (1)...(19): siRNA sense strand
gaagguguacgcaacauca

SEQ ID NO: 749828 - RNA, 19 nt, Homo sapiens
  misc_RNA (1)...(19): siRNA sense strand
uagaagagcgagcagaauu

SEQ ID NO: 749829 - RNA, 19 nt, Homo sapiens
  misc_RNA (1)...(19): siRNA sense strand
gaguucgacccaacaauaa

SEQ ID NO: 749830 - RNA, 19 nt, Homo sapiens
  misc_RNA (1)...(19): siRNA sense strand
ccuaaagguucaucucuca

SEQ ID NO: 749831 - RNA, 19 nt, Homo sapiens
  misc_RNA (1)...(19): siRNA sense strand
ggaggaagccgaucgaaaa

SEQ ID NO: 749832 - RNA, 19 nt, Homo sapiens
  misc_RNA (1)...(19): siRNA sense strand
gaucgaaagaagggauuua

SEQ ID NO: 749833 - RNA, 19 nt, Homo sapiens
  misc_RNA (1)...(19): siRNA sense strand
gaacccaaagaagaaguua

SEQ ID NO: 749834 - RNA, 19 nt, Homo sapiens
  misc_RNA (1)...(19): siRNA sense strand
cagaaacagucaccaaguc

SEQ ID NO: 749835 - RNA, 19 nt, Homo sapiens
  misc_RNA (1)...(19): siRNA sense strand
caaaccuucugacuugaga

SEQ ID NO: 749836 - RNA, 19 nt, Homo sapiens
  misc_RNA (1)...(19): siRNA sense strand
gagaagaggaggcuaaagg

SEQ ID NO: 749837 - RNA, 19 nt, Homo sapiens
  misc_RNA (1)...(19): siRNA sense strand
ccaaagcgagggagcauug

SEQ ID NO: 749838 - RNA, 19 nt, Homo sapiens
  misc_RNA (1)...(19): siRNA sense strand
gauacgagauagaggaaac

SEQ ID NO: 749839 - RNA, 19 nt, Homo sapiens
  misc_RNA (1)...(19): siRNA sense strand
ucaaugaauggcuaacuaa

SEQ ID NO: 749840 - RNA, 19 nt, Homo sapiens
  misc_RNA (1)...(19): siRNA sense strand
gacaagaaaccauucaagu

SEQ ID NO: 749841 - RNA, 19 nt, Homo sapiens
  misc_RNA (1)...(19): siRNA sense strand
agaggaggcuaaaggaaga

SEQ ID NO: 749842 - RNA, 19 nt, Homo sapiens
  misc_RNA (1)...(19): siRNA sense strand
aagaagggauuuacagaag

SEQ ID NO: 749843 - RNA, 19 nt, Homo sapiens
  misc_RNA (1)...(19): siRNA sense strand
ccagaggaaugacgaugau

SEQ ID NO: 749844 - RNA, 19 nt, Homo sapiens
  misc_RNA (1)...(19): siRNA sense strand
cagcaggcacaccaaauaa

SEQ ID NO: 749845 - RNA, 19 nt, Homo sapiens
  misc_RNA (1)...(19): siRNA sense strand
ccaagacaaccaccacaaa

SEQ ID NO: 749846 - RNA, 19 nt, Homo sapiens
  misc_RNA (1)...(19): siRNA sense strand
ccacaaacuuaaacauacu

SEQ ID NO: 749847 - RNA, 19 nt, Homo sapiens
  misc_RNA (1)...(19): siRNA sense strand
aagaaaccauucaaguguu

SEQ ID NO: 749848 - RNA, 19 nt, Homo sapiens
  misc_RNA (1)...(19): siRNA sense strand
aaagaagggauuuacagaa

SEQ ID NO: 749849 - RNA, 19 nt, Homo sapiens
  misc_RNA (1)...(19): siRNA sense strand
gcaguauaccagugcaauu

SEQ ID NO: 749850 - RNA, 19 nt, Homo sapiens
  misc_RNA (1)...(19): siRNA sense strand
gaggaaugacgaugaugaa

SEQ ID NO: 749851 - RNA, 19 nt, Homo sapiens
  misc_RNA (1)...(19): siRNA sense strand
gcugagaaacgccagaaga

SEQ ID NO: 749852 - RNA, 19 nt, Homo sapiens
  misc_RNA (1)...(19): siRNA sense strand
ccaagcagaagaaugcaaa

SEQ ID NO: 749853 - RNA, 19 nt, Homo sapiens
  misc_RNA (1)...(19): siRNA sense strand
cagcaauagucuccaagau

SEQ ID NO: 749854 - RNA, 19 nt, Homo sapiens
  misc_RNA (1)...(19): siRNA sense strand
acaagaaaccauucaagug

SEQ ID NO: 749855 - RNA, 19 nt, Homo sapiens
  misc_RNA (1)...(19): siRNA sense strand
ucagagaggaggaagagaa

SEQ ID NO: 749856 - RNA, 19 nt, Homo sapiens
  misc_RNA (1)...(19): siRNA sense strand
aaaugaaacuaccgagaag

SEQ ID NO: 749857 - RNA, 19 nt, Homo sapiens
  misc_RNA (1)...(19): siRNA sense strand
ggaggugaaugcccagaac

SEQ ID NO: 749858 - RNA, 19 nt, Homo sapiens
  misc_RNA (1)...(19): siRNA sense strand
ggcagaagcaggaggaaga

SEQ ID NO: 749859 - RNA, 19 nt, Homo sapiens
  misc_RNA (1)...(19): siRNA sense strand
cgagggagcauuggagaaa

SEQ ID NO: 749860 - RNA, 19 nt, Homo sapiens
  misc_RNA (1)...(19): siRNA sense strand
aaacagaaacagucaccaa

SEQ ID NO: 749861 - RNA, 19 nt, Homo sapiens
  misc_RNA (1)...(19): siRNA sense strand
ucaagaguaugugggagaa

SEQ ID NO: 749862 - RNA, 19 nt, Homo sapiens
  misc_RNA (1)...(19): siRNA sense strand
uaaaggaagagauugaaag

SEQ ID NO: 749863 - RNA, 19 nt, Homo sapiens
  misc_RNA (1)...(19): siRNA sense strand
caaugaauggcuaacuaaa

SEQ ID NO: 749864 - RNA, 19 nt, Homo sapiens
  misc_RNA (1)...(19): siRNA sense strand
caaaucgacccaucaagca

SEQ ID NO: 749865 - RNA, 19 nt, Homo sapiens
  misc_RNA (1)...(19): siRNA sense strand
aaagguucaucucucaaga

SEQ ID NO: 749866 - RNA, 19 nt, Homo sapiens
  misc_RNA (1)...(19): siRNA sense strand
cagaagauggcuugucaga

SEQ ID NO: 749867 - RNA, 19 nt, Homo sapiens
  misc_RNA (1)...(19): siRNA sense strand
gagauagaggaaacagaaa

SEQ ID NO: 749868 - RNA, 19 nt, Homo sapiens
  misc_RNA (1)...(19): siRNA sense strand
caggagacguauccagcaa

SEQ ID NO: 749869 - RNA, 19 nt, Homo sapiens
  misc_RNA (1)...(19): siRNA sense strand
gcagcaauagucuccaaga

SEQ ID NO: 749870 - RNA, 19 nt, Homo sapiens
  misc_RNA (1)...(19): siRNA sense strand
agaagagcgagcagaauuu

SEQ ID NO: 749871 - RNA, 19 nt, Homo sapiens
  misc_RNA (1)...(19): siRNA sense strand
ugaaagucgccaagaaaga

SEQ ID NO: 749872 - RNA, 19 nt, Homo sapiens
  misc_RNA (1)...(19): siRNA sense strand
uuggagggaugcugaagaa

SEQ ID NO: 749873 - RNA, 19 nt, Homo sapiens
  misc_RNA (1)...(19): siRNA sense strand
gaggaaacagaaacaguca

SEQ ID NO: 749874 - RNA, 19 nt, Homo sapiens
  misc_RNA (1)...(19): siRNA sense strand
gauagaggaaacagaaaca

SEQ ID NO: 749875 - RNA, 19 nt, Homo sapiens
  misc_RNA (1)...(19): siRNA sense strand
aagugaaagucgccaagaa

SEQ ID NO: 749876 - RNA, 19 nt, Homo sapiens
  misc_RNA (1)...(19): siRNA sense strand
aaagcaaucuguggauaag

SEQ ID NO: 749877 - RNA, 19 nt, Homo sapiens
  misc_RNA (1)...(19): siRNA sense strand
aagauggcuugucagauga

SEQ ID NO: 749878 - RNA, 19 nt, Homo sapiens
  misc_RNA (1)...(19): siRNA sense strand
gaggcuaaaggaagagauu

SEQ ID NO: 749879 - RNA, 19 nt, Homo sapiens
  misc_RNA (1)...(19): siRNA sense strand
cccacaaacuuaaacauac

SEQ ID NO: 749880 - RNA, 19 nt, Homo sapiens
  misc_RNA (1)...(19): siRNA sense strand
aaacagucaccaaguccua

SEQ ID NO: 749881 - RNA, 19 nt, Homo sapiens
  misc_RNA (1)...(19): siRNA sense strand
gcagaagcaggaggaagaa

SEQ ID NO: 749882 - RNA, 19 nt, Homo sapiens
  misc_RNA (1)...(19): siRNA sense strand
cagaugacaagaaaccauu

SEQ ID NO: 749883 - RNA, 19 nt, Homo sapiens
  misc_RNA (1)...(19): siRNA sense strand
gcuaaaggaagagauugaa

SEQ ID NO: 749884 - RNA, 19 nt, Homo sapiens
  misc_RNA (1)...(19): siRNA sense strand
gacaaagaacccaaagaag

SEQ ID NO: 749885 - RNA, 19 nt, Homo sapiens
  misc_RNA (1)...(19): siRNA sense strand
aagcggaaccucugggaaa

SEQ ID NO: 749886 - RNA, 19 nt, Homo sapiens
  misc_RNA (1)...(19): siRNA sense strand
gaaaggcgaagagcagaag

SEQ ID NO: 749887 - RNA, 19 nt, Homo sapiens
  misc_RNA (1)...(19): siRNA sense strand
gcuggaggaacucaagaaa

SEQ ID NO: 749888 - RNA, 19 nt, Homo sapiens
  misc_RNA (1)...(19): siRNA sense strand
cgaaagaagggauuuacag

SEQ ID NO: 749889 - RNA, 19 nt, Homo sapiens
  misc_RNA (1)...(19): siRNA sense strand
gaaggaguucgacccaaca

SEQ ID NO: 749890 - RNA, 19 nt, Homo sapiens
  misc_RNA (1)...(19): siRNA sense strand
gaagagcgagcagaauuuu

SEQ ID NO: 749891 - RNA, 19 nt, Homo sapiens
  misc_RNA (1)...(19): siRNA sense strand
cuaaaggaagagauugaaa

SEQ ID NO: 749892 - RNA, 19 nt, Homo sapiens
  misc_RNA (1)...(19): siRNA sense strand
uucaugacccacaaacuua

SEQ ID NO: 749893 - RNA, 19 nt, Homo sapiens
  misc_RNA (1)...(19): siRNA sense strand
ccaaagaagaaguuaagag

SEQ ID NO: 749894 - RNA, 19 nt, Homo sapiens
  misc_RNA (1)...(19): siRNA sense strand
aucaaugaauggcuaacua

SEQ ID NO: 749895 - RNA, 19 nt, Homo sapiens
  misc_RNA (1)...(19): siRNA sense strand
gaagauggcuugucagaug

SEQ ID NO: 749896 - RNA, 19 nt, Homo sapiens
  misc_RNA (1)...(19): siRNA sense strand
gaaguuaagucgcagaaug

SEQ ID NO: 749897 - RNA, 19 nt, Homo sapiens
  misc_RNA (1)...(19): siRNA sense strand
ggacaaagaacccaaagaa

SEQ ID NO: 749898 - RNA, 19 nt, Homo sapiens
  misc_RNA (1)...(19): siRNA sense strand
gaagggauuuacagaaguu

SEQ ID NO: 749899 - RNA, 19 nt, Homo sapiens
  misc_RNA (1)...(19): siRNA sense strand
ggaguucgacccaacaaua

SEQ ID NO: 749900 - RNA, 19 nt, Homo sapiens
  misc_RNA (1)...(19): siRNA sense strand
caaagaacccaaagaagaa

SEQ ID NO: 749901 - RNA, 19 nt, Homo sapiens
  misc_RNA (1)...(19): siRNA sense strand
ggagaaagggaauguguuu

SEQ ID NO: 749902 - RNA, 19 nt, Homo sapiens
  misc_RNA (1)...(19): siRNA sense strand
gaagagaagaggaggcuaa

SEQ ID NO: 749903 - RNA, 19 nt, Homo sapiens
  misc_RNA (1)...(19): siRNA sense strand
gaaagaagggauuuacaga

SEQ ID NO: 749904 - RNA, 19 nt, Homo sapiens
  misc_RNA (1)...(19): siRNA sense strand
gaaaagcaguggugucaaa

SEQ ID NO: 749905 - RNA, 19 nt, Homo sapiens
  misc_RNA (1)...(19): siRNA sense strand
ucgagaagcucaaacagaa

SEQ ID NO: 749906 - RNA, 19 nt, Homo sapiens
  misc_RNA (1)...(19): siRNA sense strand
caagucaccugcucccaaa

SEQ ID NO: 749907 - RNA, 19 nt, Homo sapiens
  misc_RNA (1)...(19): siRNA sense strand
gcagcaggcacaccaaaua

SEQ ID NO: 749908 - RNA, 19 nt, Homo sapiens
  misc_RNA (1)...(19): siRNA sense strand
ggaaacugcuggcuugaag

SEQ ID NO: 749909 - RNA, 19 nt, Homo sapiens
  misc_RNA (1)...(19): siRNA sense strand
gaaugacgaugaugaagag

SEQ ID NO: 749910 - RNA, 19 nt, Homo sapiens
  misc_RNA (1)...(19): siRNA sense strand
caagaaagauacgagauag

SEQ ID NO: 749911 - RNA, 19 nt, Homo sapiens
  misc_RNA (1)...(19): siRNA sense strand
caagaaagaagacaaggaa

SEQ ID NO: 749912 - RNA, 19 nt, Homo sapiens
  misc_RNA (1)...(19): siRNA sense strand
gcagaagaaugcaaaauga

SEQ ID NO: 749913 - RNA, 19 nt, Homo sapiens
  misc_RNA (1)...(19): siRNA sense strand
ccaagaaagauacgagaua

SEQ ID NO: 749914 - RNA, 19 nt, Homo sapiens
  misc_RNA (1)...(19): siRNA sense strand
acaaagaacccaaagaaga

SEQ ID NO: 749915 - RNA, 19 nt, Homo sapiens
  misc_RNA (1)...(19): siRNA sense strand
gaaaagcaaucuguggaua

SEQ ID NO: 749916 - RNA, 19 nt, Homo sapiens
  misc_RNA (1)...(19): siRNA sense strand
caagaaaccauucaagugu

SEQ ID NO: 749917 - RNA, 19 nt, Homo sapiens
  misc_RNA (1)...(19): siRNA sense strand
gccagaagaugccagaaga

SEQ ID NO: 749918 - RNA, 19 nt, Homo sapiens
  misc_RNA (1)...(19): siRNA sense strand
guacgcaacaucaagagua

SEQ ID NO: 749919 - RNA, 19 nt, Homo sapiens
  misc_RNA (1)...(19): siRNA sense strand
ucccaaaccuucugacuug

SEQ ID NO: 749920 - RNA, 19 nt, Homo sapiens
  misc_RNA (1)...(19): siRNA sense strand
ggaaugacgaugaugaaga

SEQ ID NO: 749921 - RNA, 19 nt, Homo sapiens
  misc_RNA (1)...(19): siRNA sense strand
gaaagucgccaagaaagau

SEQ ID NO: 749922 - RNA, 19 nt, Homo sapiens
  misc_RNA (1)...(19): siRNA sense strand
gagaauucaugacccacaa

SEQ ID NO: 749923 - RNA, 19 nt, Homo sapiens
  misc_RNA (1)...(19): siRNA sense strand
gauagaagagcgagcagaa

SEQ ID NO: 749924 - RNA, 19 nt, Homo sapiens
  misc_RNA (1)...(19): siRNA sense strand
aagaagaaguuaagagcuu

SEQ ID NO: 749925 - RNA, 19 nt, Homo sapiens
  misc_RNA (1)...(19): siRNA sense strand
gaagaggaggcuaaaggaa

SEQ ID NO: 749926 - RNA, 19 nt, Homo sapiens
  misc_RNA (1)...(19): siRNA sense strand
cgagauagaggaaacagaa

SEQ ID NO: 749927 - RNA, 19 nt, Homo sapiens
  misc_RNA (1)...(19): siRNA sense strand
gaagguguacgcaacauca

SEQ ID NO: 749928 - RNA, 19 nt, Homo sapiens
  misc_RNA (1)...(19): siRNA sense strand
uagaagagcgagcagaauu

SEQ ID NO: 749929 - RNA, 19 nt, Homo sapiens
  misc_RNA (1)...(19): siRNA sense strand
gaguucgacccaacaauaa

SEQ ID NO: 749930 - RNA, 19 nt, Homo sapiens
  misc_RNA (1)...(19): siRNA sense strand
ccuaaagguucaucucuca

SEQ ID NO: 749931 - RNA, 19 nt, Homo sapiens
  misc_RNA (1)...(19): siRNA sense strand
ggaggaagccgaucgaaaa

SEQ ID NO: 749932 - RNA, 19 nt, Homo sapiens
  misc_RNA (1)...(19): siRNA sense strand
gaucgaaagaagggauuua

SEQ ID NO: 749933 - RNA, 19 nt, Homo sapiens
  misc_RNA (1)...(19): siRNA sense strand
gaacccaaagaagaaguua

SEQ ID NO: 749934 - RNA, 19 nt, Homo sapiens
  misc_RNA (1)...(19): siRNA sense strand
cagaaacagucaccaaguc

SEQ ID NO: 749935 - RNA, 19 nt, Homo sapiens
  misc_RNA (1)...(19): siRNA sense strand
caaaccuucugacuugaga

SEQ ID NO: 749936 - RNA, 19 nt, Homo sapiens
  misc_RNA (1)...(19): siRNA sense strand
gagaagaggaggcuaaagg

SEQ ID NO: 749937 - RNA, 19 nt, Homo sapiens
  misc_RNA (1)...(19): siRNA sense strand
ccaaagcgagggagcauug

SEQ ID NO: 749938 - RNA, 19 nt, Homo sapiens
  misc_RNA (1)...(19): siRNA sense strand
gauacgagauagaggaaac

SEQ ID NO: 749939 - RNA, 19 nt, Homo sapiens
  misc_RNA (1)...(19): siRNA sense strand
ucaaugaauggcuaacuaa

SEQ ID NO: 749940 - RNA, 19 nt, Homo sapiens
  misc_RNA (1)...(19): siRNA sense strand
gacaagaaaccauucaagu

SEQ ID NO: 749941 - RNA, 19 nt, Homo sapiens
  misc_RNA (1)...(19): siRNA sense strand
agaggaggcuaaaggaaga

SEQ ID NO: 749942 - RNA, 19 nt, Homo sapiens
  misc_RNA (1)...(19): siRNA sense strand
aagaagggauuuacagaag

SEQ ID NO: 749943 - RNA, 19 nt, Homo sapiens
  misc_RNA (1)...(19): siRNA sense strand
ccagaggaaugacgaugau

SEQ ID NO: 749944 - RNA, 19 nt, Homo sapiens
  misc_RNA (1)...(19): siRNA sense strand
cagcaggcacaccaaauaa

SEQ ID NO: 749945 - RNA, 19 nt, Homo sapiens
  misc_RNA (1)...(19): siRNA sense strand
ccaagacaaccaccacaaa

SEQ ID NO: 749946 - RNA, 19 nt, Homo sapiens
  misc_RNA (1)...(19): siRNA sense strand
ccacaaacuuaaacauacu

SEQ ID NO: 749947 - RNA, 19 nt, Homo sapiens
  misc_RNA (1)...(19): siRNA sense strand
aagaaaccauucaaguguu

SEQ ID NO: 749948 - RNA, 19 nt, Homo sapiens
  misc_RNA (1)...(19): siRNA sense strand
aaagaagggauuuacagaa

SEQ ID NO: 749949 - RNA, 19 nt, Homo sapiens
  misc_RNA (1)...(19): siRNA sense strand
gcaguauaccagugcaauu

SEQ ID NO: 749950 - RNA, 19 nt, Homo sapiens
  misc_RNA (1)...(19): siRNA sense strand
gaggaaugacgaugaugaa

SEQ ID NO: 749951 - RNA, 19 nt, Homo sapiens
  misc_RNA (1)...(19): siRNA sense strand
gcugagaaacgccagaaga

SEQ ID NO: 749952 - RNA, 19 nt, Homo sapiens
  misc_RNA (1)...(19): siRNA sense strand
ccaagcagaagaaugcaaa

SEQ ID NO: 749953 - RNA, 19 nt, Homo sapiens
  misc_RNA (1)...(19): siRNA sense strand
cagcaauagucuccaagau

SEQ ID NO: 749954 - RNA, 19 nt, Homo sapiens
  misc_RNA (1)...(19): siRNA sense strand
acaagaaaccauucaagug

SEQ ID NO: 749955 - RNA, 19 nt, Homo sapiens
  misc_RNA (1)...(19): siRNA sense strand
ucagagaggaggaagagaa

SEQ ID NO: 749956 - RNA, 19 nt, Homo sapiens
  misc_RNA (1)...(19): siRNA sense strand
aaaugaaacuaccgagaag

SEQ ID NO: 749957 - RNA, 19 nt, Homo sapiens
  misc_RNA (1)...(19): siRNA sense strand
ggaggugaaugcccagaac

SEQ ID NO: 749958 - RNA, 19 nt, Homo sapiens
  misc_RNA (1)...(19): siRNA sense strand
ggcagaagcaggaggaaga

SEQ ID NO: 749959 - RNA, 19 nt, Homo sapiens
  misc_RNA (1)...(19): siRNA sense strand
cgagggagcauuggagaaa

SEQ ID NO: 749960 - RNA, 19 nt, Homo sapiens
  misc_RNA (1)...(19): siRNA sense strand
aaacagaaacagucaccaa

SEQ ID NO: 749961 - RNA, 19 nt, Homo sapiens
  misc_RNA (1)...(19): siRNA sense strand
ucaagaguaugugggagaa

SEQ ID NO: 749962 - RNA, 19 nt, Homo sapiens
  misc_RNA (1)...(19): siRNA sense strand
uaaaggaagagauugaaag

SEQ ID NO: 749963 - RNA, 19 nt, Homo sapiens
  misc_RNA (1)...(19): siRNA sense strand
caaugaauggcuaacuaaa

SEQ ID NO: 749964 - RNA, 19 nt, Homo sapiens
  misc_RNA (1)...(19): siRNA sense strand
caaaucgacccaucaagca

SEQ ID NO: 749965 - RNA, 19 nt, Homo sapiens
  misc_RNA (1)...(19): siRNA sense strand
aaagguucaucucucaaga

SEQ ID NO: 749966 - RNA, 19 nt, Homo sapiens
  misc_RNA (1)...(19): siRNA sense strand
cagaagauggcuugucaga

SEQ ID NO: 749967 - RNA, 19 nt, Homo sapiens
  misc_RNA (1)...(19): siRNA sense strand
gagauagaggaaacagaaa

SEQ ID NO: 749968 - RNA, 19 nt, Homo sapiens
  misc_RNA (1)...(19): siRNA sense strand
caggagacguauccagcaa

SEQ ID NO: 749969 - RNA, 19 nt, Homo sapiens
  misc_RNA (1)...(19): siRNA sense strand
gcagcaauagucuccaaga

SEQ ID NO: 749970 - RNA, 19 nt, Homo sapiens
  misc_RNA (1)...(19): siRNA sense strand
agaagagcgagcagaauuu

SEQ ID NO: 749971 - RNA, 19 nt, Homo sapiens
  misc_RNA (1)...(19): siRNA sense strand
ugaaagucgccaagaaaga

SEQ ID NO: 749972 - RNA, 19 nt, Homo sapiens
  misc_RNA (1)...(19): siRNA sense strand
uuggagggaugcugaagaa

SEQ ID NO: 749973 - RNA, 19 nt, Homo sapiens
  misc_RNA (1)...(19): siRNA sense strand
gaggaaacagaaacaguca

SEQ ID NO: 749974 - RNA, 19 nt, Homo sapiens
  misc_RNA (1)...(19): siRNA sense strand
gauagaggaaacagaaaca

SEQ ID NO: 749975 - RNA, 19 nt, Homo sapiens
  misc_RNA (1)...(19): siRNA sense strand
aagugaaagucgccaagaa

SEQ ID NO: 749976 - RNA, 19 nt, Homo sapiens
  misc_RNA (1)...(19): siRNA sense strand
aaagcaaucuguggauaag

SEQ ID NO: 749977 - RNA, 19 nt, Homo sapiens
  misc_RNA (1)...(19): siRNA sense strand
aagauggcuugucagauga

SEQ ID NO: 749978 - RNA, 19 nt, Homo sapiens
  misc_RNA (1)...(19): siRNA sense strand
gaggcuaaaggaagagauu

SEQ ID NO: 749979 - RNA, 19 nt, Homo sapiens
  misc_RNA (1)...(19): siRNA sense strand
cccacaaacuuaaacauac

SEQ ID NO: 749980 - RNA, 19 nt, Homo sapiens
  misc_RNA (1)...(19): siRNA sense strand
aaacagucaccaaguccua

SEQ ID NO: 749981 - RNA, 19 nt, Homo sapiens
  misc_RNA (1)...(19): siRNA sense strand
gcagaagcaggaggaagaa

SEQ ID NO: 749982 - RNA, 19 nt, Homo sapiens
  misc_RNA (1)...(19): siRNA sense strand
cagaugacaagaaaccauu

SEQ ID NO: 749983 - RNA, 19 nt, Homo sapiens
  misc_RNA (1)...(19): siRNA sense strand
gcuaaaggaagagauugaa

SEQ ID NO: 749984 - RNA, 19 nt, Homo sapiens
  misc_RNA (1)...(19): siRNA sense strand
gacaaagaacccaaagaag

SEQ ID NO: 749985 - RNA, 19 nt, Homo sapiens
  misc_RNA (1)...(19): siRNA sense strand
aagcggaaccucugggaaa

SEQ ID NO: 749986 - RNA, 19 nt, Homo sapiens
  misc_RNA (1)...(19): siRNA sense strand
gaaaggcgaagagcagaag

SEQ ID NO: 749987 - RNA, 19 nt, Homo sapiens
  misc_RNA (1)...(19): siRNA sense strand
gcuggaggaacucaagaaa

SEQ ID NO: 749988 - RNA, 19 nt, Homo sapiens
  misc_RNA (1)...(19): siRNA sense strand
cgaaagaagggauuuacag

SEQ ID NO: 749989 - RNA, 19 nt, Homo sapiens
  misc_RNA (1)...(19): siRNA sense strand
gaaggaguucgacccaaca

SEQ ID NO: 749990 - RNA, 19 nt, Homo sapiens
  misc_RNA (1)...(19): siRNA sense strand
gaagagcgagcagaauuuu

SEQ ID NO: 749991 - RNA, 19 nt, Homo sapiens
  misc_RNA (1)...(19): siRNA sense strand
cuaaaggaagagauugaaa

SEQ ID NO: 749992 - RNA, 19 nt, Homo sapiens
  misc_RNA (1)...(19): siRNA sense strand
uucaugacccacaaacuua

SEQ ID NO: 749993 - RNA, 19 nt, Homo sapiens
  misc_RNA (1)...(19): siRNA sense strand
ccaaagaagaaguuaagag

SEQ ID NO: 749994 - RNA, 19 nt, Homo sapiens
  misc_RNA (1)...(19): siRNA sense strand
aucaaugaauggcuaacua

SEQ ID NO: 749995 - RNA, 19 nt, Homo sapiens
  misc_RNA (1)...(19): siRNA sense strand
gaacaucccugagcuauug

SEQ ID NO: 749996 - RNA, 19 nt, Homo sapiens
  misc_RNA (1)...(19): siRNA sense strand
gaaaugaauugaagucuga

SEQ ID NO: 749997 - RNA, 19 nt, Homo sapiens
  misc_RNA (1)...(19): siRNA sense strand
cgagaucgcauucauguua

SEQ ID NO: 749998 - RNA, 19 nt, Homo sapiens
  misc_RNA (1)...(19): siRNA sense strand
caacaguacuaugcaauuu

SEQ ID NO: 749999 - RNA, 19 nt, Homo sapiens
  misc_RNA (1)...(19): siRNA sense strand
ugaaggcugucaacuauaa

SEQ ID NO: 750000 - RNA, 19 nt, Homo sapiens
  misc_RNA (1)...(19): siRNA sense strand
cgaacgauuucccaaguua

SEQ ID NO: 750001 - RNA, 19 nt, Homo sapiens
  misc_RNA (1)...(19): siRNA sense strand
gaugacaugucuagcauug

SEQ ID NO: 750002 - RNA, 19 nt, Homo sapiens
  misc_RNA (1)...(19): siRNA sense strand
ggaaauauggugaaggaaa

SEQ ID NO: 750003 - RNA, 19 nt, Homo sapiens
  misc_RNA (1)...(19): siRNA sense strand
ggaagaggcgguucuggua

SEQ ID NO: 750004 - RNA, 19 nt, Homo sapiens
  misc_RNA (1)...(19): siRNA sense strand
gcugucaacuauaagauuu

SEQ ID NO: 750005 - RNA, 19 nt, Homo sapiens
  misc_RNA (1)...(19): siRNA sense strand
gaaauauggugaaggaaac

SEQ ID NO: 750006 - RNA, 19 nt, Homo sapiens
  misc_RNA (1)...(19): siRNA sense strand
ccaaagagccuucgcuaug

SEQ ID NO: 750007 - RNA, 19 nt, Homo sapiens
  misc_RNA (1)...(19): siRNA sense strand
gcagaaaugugaagaagcu

SEQ ID NO: 750008 - RNA, 19 nt, Homo sapiens
  misc_RNA (1)...(19): siRNA sense strand
gaacaaguagaacagcuaa

SEQ ID NO: 750009 - RNA, 19 nt, Homo sapiens
  misc_RNA (1)...(19): siRNA sense strand
gaaguggcauucaugaagu

SEQ ID NO: 750010 - RNA, 19 nt, Homo sapiens
  misc_RNA (1)...(19): siRNA sense strand
gaaaugugaagaagcuuaa

SEQ ID NO: 750011 - RNA, 19 nt, Homo sapiens
  misc_RNA (1)...(19): siRNA sense strand
ugacaugucuagcauuguu

SEQ ID NO: 750012 - RNA, 19 nt, Homo sapiens
  misc_RNA (1)...(19): siRNA sense strand
gcacacgcgucucaacguu

SEQ ID NO: 750013 - RNA, 19 nt, Homo sapiens
  misc_RNA (1)...(19): siRNA sense strand
ccaauugccuuugauguug

SEQ ID NO: 750014 - RNA, 19 nt, Homo sapiens
  misc_RNA (1)...(19): siRNA sense strand
ggaagaugauggagaugug

SEQ ID NO: 750015 - RNA, 19 nt, Homo sapiens
  misc_RNA (1)...(19): siRNA sense strand
ucagggcuauguauuguaa

SEQ ID NO: 750016 - RNA, 19 nt, Homo sapiens
  misc_RNA (1)...(19): siRNA sense strand
cuauugaguuucacuauga

SEQ ID NO: 750017 - RNA, 19 nt, Homo sapiens
  misc_RNA (1)...(19): siRNA sense strand
ucaaggaaguggacggaaa

SEQ ID NO: 750018 - RNA, 19 nt, Homo sapiens
  misc_RNA (1)...(19): siRNA sense strand
guggaaauauggugaagga

SEQ ID NO: 750019 - RNA, 19 nt, Homo sapiens
  misc_RNA (1)...(19): siRNA sense strand
ggcuauguauuguaaauga

SEQ ID NO: 750020 - RNA, 19 nt, Homo sapiens
  misc_RNA (1)...(19): siRNA sense strand
gaguuucacuaugagaaua

SEQ ID NO: 750021 - RNA, 19 nt, Homo sapiens
  misc_RNA (1)...(19): siRNA sense strand
gaugggaccucaaagaacu

SEQ ID NO: 750022 - RNA, 19 nt, Homo sapiens
  misc_RNA (1)...(19): siRNA sense strand
gcaacaguacuaugcaauu

SEQ ID NO: 750023 - RNA, 19 nt, Homo sapiens
  misc_RNA (1)...(19): siRNA sense strand
ugaggaagaugauggagau

SEQ ID NO: 750024 - RNA, 19 nt, Homo sapiens
  misc_RNA (1)...(19): siRNA sense strand
ucaauggagucuucaagga

SEQ ID NO: 750025 - RNA, 19 nt, Homo sapiens
  misc_RNA (1)...(19): siRNA sense strand
gaagccagaacaaguagaa

SEQ ID NO: 750026 - RNA, 19 nt, Homo sapiens
  misc_RNA (1)...(19): siRNA sense strand
ucaaaggccuccguucaga

SEQ ID NO: 750027 - RNA, 19 nt, Homo sapiens
  misc_RNA (1)...(19): siRNA sense strand
cugaagauccuaaaccuuu

SEQ ID NO: 750028 - RNA, 19 nt, Homo sapiens
  misc_RNA (1)...(19): siRNA sense strand
gcaauucagggcuauguau

SEQ ID NO: 750029 - RNA, 19 nt, Homo sapiens
  misc_RNA (1)...(19): siRNA sense strand
aaggauagcagaaauguga

SEQ ID NO: 750030 - RNA, 19 nt, Homo sapiens
  misc_RNA (1)...(19): siRNA sense strand
gcagcuacccugaggauca

SEQ ID NO: 750031 - RNA, 19 nt, Homo sapiens
  misc_RNA (1)...(19): siRNA sense strand
caaagagccuucgcuaugc

SEQ ID NO: 750032 - RNA, 19 nt, Homo sapiens
  misc_RNA (1)...(19): siRNA sense strand
gcgaacgauuucccaaguu

SEQ ID NO: 750033 - RNA, 19 nt, Homo sapiens
  misc_RNA (1)...(19): siRNA sense strand
ggugauacuuggcaugauc

SEQ ID NO: 750034 - RNA, 19 nt, Homo sapiens
  misc_RNA (1)...(19): siRNA sense strand
gacggaaagucccgggauu

SEQ ID NO: 750035 - RNA, 19 nt, Homo sapiens
  misc_RNA (1)...(19): siRNA sense strand
gaagaggcgguucugguau

SEQ ID NO: 750036 - RNA, 19 nt, Homo sapiens
  misc_RNA (1)...(19): siRNA sense strand
gcccaggccuucacucauc

SEQ ID NO: 750037 - RNA, 19 nt, Homo sapiens
  misc_RNA (1)...(19): siRNA sense strand
guuaauuucccucaaagaa

SEQ ID NO: 750038 - RNA, 19 nt, Homo sapiens
  misc_RNA (1)...(19): siRNA sense strand
gaugaugaacgcguuaauu

SEQ ID NO: 750039 - RNA, 19 nt, Homo sapiens
  misc_RNA (1)...(19): siRNA sense strand
gaacugaagccagaacaag

SEQ ID NO: 750040 - RNA, 19 nt, Homo sapiens
  misc_RNA (1)...(19): siRNA sense strand
gagaaccgaaggauaucua

SEQ ID NO: 750041 - RNA, 19 nt, Homo sapiens
  misc_RNA (1)...(19): siRNA sense strand
gagcgggaauuggacaaga

SEQ ID NO: 750042 - RNA, 19 nt, Homo sapiens
  misc_RNA (1)...(19): siRNA sense strand
ggaaugccaguucugaaga

SEQ ID NO: 750043 - RNA, 19 nt, Homo sapiens
  misc_RNA (1)...(19): siRNA sense strand
gacauaagcgcccagacaa

SEQ ID NO: 750044 - RNA, 19 nt, Homo sapiens
  misc_RNA (1)...(19): siRNA sense strand
guuguugccuuccucaaug

SEQ ID NO: 750045 - RNA, 19 nt, Homo sapiens
  misc_RNA (1)...(19): siRNA sense strand
uaaagcugaucaugagcaa

SEQ ID NO: 750046 - RNA, 19 nt, Homo sapiens
  misc_RNA (1)...(19): siRNA sense strand
caauugccuuugauguuga

SEQ ID NO: 750047 - RNA, 19 nt, Homo sapiens
  misc_RNA (1)...(19): siRNA sense strand
gagaacaucccugagcuau

SEQ ID NO: 750048 - RNA, 19 nt, Homo sapiens
  misc_RNA (1)...(19): siRNA sense strand
gggaauuggacaagauaaa

SEQ ID NO: 750049 - RNA, 19 nt, Homo sapiens
  misc_RNA (1)...(19): siRNA sense strand
caggaaauguugcaagcau

SEQ ID NO: 750050 - RNA, 19 nt, Homo sapiens
  misc_RNA (1)...(19): siRNA sense strand
cagcuuagccgaguauuuc

SEQ ID NO: 750051 - RNA, 19 nt, Homo sapiens
  misc_RNA (1)...(19): siRNA sense strand
cagauuugguggcccagaa

SEQ ID NO: 750052 - RNA, 19 nt, Homo sapiens
  misc_RNA (1)...(19): siRNA sense strand
ggccuucacucaucucaag

SEQ ID NO: 750053 - RNA, 19 nt, Homo sapiens
  misc_RNA (1)...(19): siRNA sense strand
aagaggcgguucugguauu

SEQ ID NO: 750054 - RNA, 19 nt, Homo sapiens
  misc_RNA (1)...(19): siRNA sense strand
gacaacaacugggacuaca

SEQ ID NO: 750055 - RNA, 19 nt, Homo sapiens
  misc_RNA (1)...(19): siRNA sense strand
gaaugccaguucugaagag

SEQ ID NO: 750056 - RNA, 19 nt, Homo sapiens
  misc_RNA (1)...(19): siRNA sense strand
caauggagucuucaaggaa

SEQ ID NO: 750057 - RNA, 19 nt, Homo sapiens
  misc_RNA (1)...(19): siRNA sense strand
gcagcuuagccgaguauuu

SEQ ID NO: 750058 - RNA, 19 nt, Homo sapiens
  misc_RNA (1)...(19): siRNA sense strand
uaaaggggcugaagcuaga

SEQ ID NO: 750059 - RNA, 19 nt, Homo sapiens
  misc_RNA (1)...(19): siRNA sense strand
gcuauuguccuugaacuug

SEQ ID NO: 750060 - RNA, 19 nt, Homo sapiens
  misc_RNA (1)...(19): siRNA sense strand
cgggagaaccgaaggauau

SEQ ID NO: 750061 - RNA, 19 nt, Homo sapiens
  misc_RNA (1)...(19): siRNA sense strand
agaaaugugaagaagcuua

SEQ ID NO: 750062 - RNA, 19 nt, Homo sapiens
  misc_RNA (1)...(19): siRNA sense strand
ccugagcuauuguccuuga

SEQ ID NO: 750063 - RNA, 19 nt, Homo sapiens
  misc_RNA (1)...(19): siRNA sense strand
uagcagaaaugugaagaag

SEQ ID NO: 750064 - RNA, 19 nt, Homo sapiens
  misc_RNA (1)...(19): siRNA sense strand
ccgaguauuucaaggauag

SEQ ID NO: 750065 - RNA, 19 nt, Homo sapiens
  misc_RNA (1)...(19): siRNA sense strand
ggaauuggacaagauaaag

SEQ ID NO: 750066 - RNA, 19 nt, Homo sapiens
  misc_RNA (1)...(19): siRNA sense strand
ggaaaccguaggucuggaa

SEQ ID NO: 750067 - RNA, 19 nt, Homo sapiens
  misc_RNA (1)...(19): siRNA sense strand
gggcccaguucuucguuga

SEQ ID NO: 750068 - RNA, 19 nt, Homo sapiens
  misc_RNA (1)...(19): siRNA sense strand
gagcauuccuuucauuccu

SEQ ID NO: 750069 - RNA, 19 nt, Homo sapiens
  misc_RNA (1)...(19): siRNA sense strand
ccugagcauuccuuucauu

SEQ ID NO: 750070 - RNA, 19 nt, Homo sapiens
  misc_RNA (1)...(19): siRNA sense strand
ggaaacucccugugugaca

SEQ ID NO: 750071 - RNA, 19 nt, Homo sapiens
  misc_RNA (1)...(19): siRNA sense strand
ugucuagcauuguucagaa

SEQ ID NO: 750072 - RNA, 19 nt, Homo sapiens
  misc_RNA (1)...(19): siRNA sense strand
gaggaucauugaagagaac

SEQ ID NO: 750073 - RNA, 19 nt, Homo sapiens
  misc_RNA (1)...(19): siRNA sense strand
guacagcgaacacgaugau

SEQ ID NO: 750074 - RNA, 19 nt, Homo sapiens
  misc_RNA (1)...(19): siRNA sense strand
gagaucgcauucauguuac

SEQ ID NO: 750075 - RNA, 19 nt, Homo sapiens
  misc_RNA (1)...(19): siRNA sense strand
ccagaaguggcauucauga

SEQ ID NO: 750076 - RNA, 19 nt, Homo sapiens
  misc_RNA (1)...(19): siRNA sense strand
cagagcagcaggaaauguu

SEQ ID NO: 750077 - RNA, 19 nt, Homo sapiens
  misc_RNA (1)...(19): siRNA sense strand
ucaauuccuucgugguaga

SEQ ID NO: 750078 - RNA, 19 nt, Homo sapiens
  misc_RNA (1)...(19): siRNA sense strand
cgucaauuccuucguggua

SEQ ID NO: 750079 - RNA, 19 nt, Homo sapiens
  misc_RNA (1)...(19): siRNA sense strand
gagauguggcaaugaguga

SEQ ID NO: 750080 - RNA, 19 nt, Homo sapiens
  misc_RNA (1)...(19): siRNA sense strand
ugaagauccuaaaccuuuc

SEQ ID NO: 750081 - RNA, 19 nt, Homo sapiens
  misc_RNA (1)...(19): siRNA sense strand
gaaggcacccaaccugaag

SEQ ID NO: 750082 - RNA, 19 nt, Homo sapiens
  misc_RNA (1)...(19): siRNA sense strand
cagcgaacacgaugaugaa

SEQ ID NO: 750083 - RNA, 19 nt, Homo sapiens
  misc_RNA (1)...(19): siRNA sense strand
ccuauugaguuucacuaug

SEQ ID NO: 750084 - RNA, 19 nt, Homo sapiens
  misc_RNA (1)...(19): siRNA sense strand
uacgauggcucccaacaag

SEQ ID NO: 750085 - RNA, 19 nt, Homo sapiens
  misc_RNA (1)...(19): siRNA sense strand
ugauggagauguggcaaug

SEQ ID NO: 750086 - RNA, 19 nt, Homo sapiens
  misc_RNA (1)...(19): siRNA sense strand
gccgaguauuucaaggaua

SEQ ID NO: 750087 - RNA, 19 nt, Homo sapiens
  misc_RNA (1)...(19): siRNA sense strand
gcgggaauuggacaagaua

SEQ ID NO: 750088 - RNA, 19 nt, Homo sapiens
  misc_RNA (1)...(19): siRNA sense strand
ugaggaucauugaagagaa

SEQ ID NO: 750089 - RNA, 19 nt, Homo sapiens
  misc_RNA (1)...(19): siRNA sense strand
augaugaacgcguuaauuu

SEQ ID NO: 750090 - RNA, 19 nt, Homo sapiens
  misc_RNA (1)...(19): siRNA sense strand
gaacagaaaacuugaagag

SEQ ID NO: 750091 - RNA, 19 nt, Homo sapiens
  misc_RNA (1)...(19): siRNA sense strand
ucccugagcuauuguccuu

SEQ ID NO: 750092 - RNA, 19 nt, Homo sapiens
  misc_RNA (1)...(19): siRNA sense strand
ggaaagucccgggauucuu

SEQ ID NO: 750093 - RNA, 19 nt, Homo sapiens
  misc_RNA (1)...(19): siRNA sense strand
caauucagggcuauguauu

SEQ ID NO: 750094 - RNA, 19 nt, Homo sapiens
  misc_RNA (1)...(19): siRNA sense strand
ggacaacaacugggacuac

SEQ ID NO: 750095 - RNA, 19 nt, Homo sapiens
  misc_RNA (1)...(19): siRNA sense strand
gaugagauuuccauacaga

SEQ ID NO: 750096 - RNA, 19 nt, Homo sapiens
  misc_RNA (1)...(19): siRNA sense strand
gcacuuugguggcacagaa

SEQ ID NO: 750097 - RNA, 19 nt, Homo sapiens
  misc_RNA (1)...(19): siRNA sense strand
aaauugaccugccggagua

SEQ ID NO: 750098 - RNA, 19 nt, Homo sapiens
  misc_RNA (1)...(19): siRNA sense strand
ggaggcaguucgccaggua

SEQ ID NO: 750099 - RNA, 19 nt, Homo sapiens
  misc_RNA (1)...(19): siRNA sense strand
cggaugagauuuccauaca

SEQ ID NO: 750100 - RNA, 19 nt, Homo sapiens
  misc_RNA (1)...(19): siRNA sense strand
gagcagacguacgcagaga

SEQ ID NO: 750101 - RNA, 19 nt, Homo sapiens
  misc_RNA (1)...(19): siRNA sense strand
gauucuaggagauaaguuu

SEQ ID NO: 750102 - RNA, 19 nt, Homo sapiens
  misc_RNA (1)...(19): siRNA sense strand
guucagauucuaggagaua

SEQ ID NO: 750103 - RNA, 19 nt, Homo sapiens
  misc_RNA (1)...(19): siRNA sense strand
ccuaugcgcucugcacguu

SEQ ID NO: 750104 - RNA, 19 nt, Homo sapiens
  misc_RNA (1)...(19): siRNA sense strand
gaggacaagucagccuaug

SEQ ID NO: 750105 - RNA, 19 nt, Homo sapiens
  misc_RNA (1)...(19): siRNA sense strand
acacuugucugugcuucaa

SEQ ID NO: 750106 - RNA, 19 nt, Homo sapiens
  misc_RNA (1)...(19): siRNA sense strand
gcagacguacgcagagaug

SEQ ID NO: 750107 - RNA, 19 nt, Homo sapiens
  misc_RNA (1)...(19): siRNA sense strand
gugcuucaaugcccuugga

SEQ ID NO: 750108 - RNA, 19 nt, Homo sapiens
  misc_RNA (1)...(19): siRNA sense strand
ggaugagauuuccauacag

SEQ ID NO: 750109 - RNA, 19 nt, Homo sapiens
  misc_RNA (1)...(19): siRNA sense strand
uaugcgcucugcacguuug

SEQ ID NO: 750110 - RNA, 19 nt, Homo sapiens
  misc_RNA (1)...(19): siRNA sense strand
gaaaugucaggaggcaguu

SEQ ID NO: 750111 - RNA, 19 nt, Homo sapiens
  misc_RNA (1)...(19): siRNA sense strand
cagaggcugccaggacuuu

SEQ ID NO: 750112 - RNA, 19 nt, Homo sapiens
  misc_RNA (1)...(19): siRNA sense strand
gaugagauuuccauacaga

SEQ ID NO: 750113 - RNA, 19 nt, Homo sapiens
  misc_RNA (1)...(19): siRNA sense strand
gcacuuugguggcacagaa

SEQ ID NO: 750114 - RNA, 19 nt, Homo sapiens
  misc_RNA (1)...(19): siRNA sense strand
aaauugaccugccggagua

SEQ ID NO: 750115 - RNA, 19 nt, Homo sapiens
  misc_RNA (1)...(19): siRNA sense strand
ggaggcaguucgccaggua

SEQ ID NO: 750116 - RNA, 19 nt, Homo sapiens
  misc_RNA (1)...(19): siRNA sense strand
cggaugagauuuccauaca

SEQ ID NO: 750117 - RNA, 19 nt, Homo sapiens
  misc_RNA (1)...(19): siRNA sense strand
gagcagacguacgcagaga

SEQ ID NO: 750118 - RNA, 19 nt, Homo sapiens
  misc_RNA (1)...(19): siRNA sense strand
gauucuaggagauaaguuu

SEQ ID NO: 750119 - RNA, 19 nt, Homo sapiens
  misc_RNA (1)...(19): siRNA sense strand
guucagauucuaggagaua

SEQ ID NO: 750120 - RNA, 19 nt, Homo sapiens
  misc_RNA (1)...(19): siRNA sense strand
ccuaugcgcucugcacguu

SEQ ID NO: 750121 - RNA, 19 nt, Homo sapiens
  misc_RNA (1)...(19): siRNA sense strand
gaggacaagucagccuaug

SEQ ID NO: 750122 - RNA, 19 nt, Homo sapiens
  misc_RNA (1)...(19): siRNA sense strand
acacuugucugugcuucaa

SEQ ID NO: 750123 - RNA, 19 nt, Homo sapiens
  misc_RNA (1)...(19): siRNA sense strand
gcagacguacgcagagaug

SEQ ID NO: 750124 - RNA, 19 nt, Homo sapiens
  misc_RNA (1)...(19): siRNA sense strand
gugcuucaaugcccuugga

SEQ ID NO: 750125 - RNA, 19 nt, Homo sapiens
  misc_RNA (1)...(19): siRNA sense strand
ggaugagauuuccauacag

SEQ ID NO: 750126 - RNA, 19 nt, Homo sapiens
  misc_RNA (1)...(19): siRNA sense strand
uaugcgcucugcacguuug

SEQ ID NO: 750127 - RNA, 19 nt, Homo sapiens
  misc_RNA (1)...(19): siRNA sense strand
gaaaugucaggaggcaguu

SEQ ID NO: 750128 - RNA, 19 nt, Homo sapiens
  misc_RNA (1)...(19): siRNA sense strand
cagaggcugccaggacuuu

SEQ ID NO: 750129 - RNA, 19 nt, Homo sapiens
  misc_RNA (1)...(19): siRNA sense strand
gcucucagcugucaaugug

SEQ ID NO: 750130 - RNA, 19 nt, Homo sapiens
  misc_RNA (1)...(19): siRNA sense strand
cgucaacaccaccaucugu

SEQ ID NO: 750131 - RNA, 19 nt, Homo sapiens
  misc_RNA (1)...(19): siRNA sense strand
ggacagaacagacacuaga

SEQ ID NO: 750132 - RNA, 19 nt, Homo sapiens
  misc_RNA (1)...(19): siRNA sense strand
gagaccgacuucuaucuuc

SEQ ID NO: 750133 - RNA, 19 nt, Homo sapiens
  misc_RNA (1)...(19): siRNA sense strand
ggucggacgcgucuucuuu

SEQ ID NO: 750134 - RNA, 19 nt, Homo sapiens
  misc_RNA (1)...(19): siRNA sense strand
gcaggaggaauccgaagaa

SEQ ID NO: 750135 - RNA, 19 nt, Homo sapiens
  misc_RNA (1)...(19): siRNA sense strand
gauggcuccuggacauuug

SEQ ID NO: 750136 - RNA, 19 nt, Homo sapiens
  misc_RNA (1)...(19): siRNA sense strand
ggaagggacagaacagaca

SEQ ID NO: 750137 - RNA, 19 nt, Homo sapiens
  misc_RNA (1)...(19): siRNA sense strand
uuuggaaccucaaguacuu

SEQ ID NO: 750138 - RNA, 19 nt, Homo sapiens
  misc_RNA (1)...(19): siRNA sense strand
cuacacaacacgccuaugg

SEQ ID NO: 750139 - RNA, 19 nt, Homo sapiens
  misc_RNA (1)...(19): siRNA sense strand
guuaugaucuuuggaaccu

SEQ ID NO: 750140 - RNA, 19 nt, Homo sapiens
  misc_RNA (1)...(19): siRNA sense strand
agaccgacuucuaucuuca

SEQ ID NO: 750141 - RNA, 19 nt, Homo sapiens
  misc_RNA (1)...(19): siRNA sense strand
gcgugagaccgacuucuau

SEQ ID NO: 750142 - RNA, 19 nt, Homo sapiens
  misc_RNA (1)...(19): siRNA sense strand
gguagugccagguauugug

SEQ ID NO: 750143 - RNA, 19 nt, Homo sapiens
  misc_RNA (1)...(19): siRNA sense strand
ugagaccgacuucuaucuu

SEQ ID NO: 750144 - RNA, 19 nt, Homo sapiens
  misc_RNA (1)...(19): siRNA sense strand
gacagaacagacacuagau

SEQ ID NO: 750145 - RNA, 19 nt, Homo sapiens
  misc_RNA (1)...(19): siRNA sense strand
ggagcaagagccgcuggaa

SEQ ID NO: 750146 - RNA, 19 nt, Homo sapiens
  misc_RNA (1)...(19): siRNA sense strand
ggaggaggagcaggaggaa

SEQ ID NO: 750147 - RNA, 19 nt, Homo sapiens
  misc_RNA (1)...(19): siRNA sense strand
guagugccagguauugugu

SEQ ID NO: 750148 - RNA, 19 nt, Homo sapiens
  misc_RNA (1)...(19): siRNA sense strand
gcggguagugccagguauu

SEQ ID NO: 750149 - RNA, 19 nt, Homo sapiens
  misc_RNA (1)...(19): siRNA sense strand
cucgauaucuccucuacua

SEQ ID NO: 750150 - RNA, 19 nt, Homo sapiens
  misc_RNA (1)...(19): siRNA sense strand
ggaccuuccugucaguuuc

SEQ ID NO: 750151 - RNA, 19 nt, Homo sapiens
  misc_RNA (1)...(19): siRNA sense strand
gauuacuacugcucuguug

SEQ ID NO: 750152 - RNA, 19 nt, Homo sapiens
  misc_RNA (1)...(19): siRNA sense strand
gccuguguccucaccauua

SEQ ID NO: 750153 - RNA, 19 nt, Homo sapiens
  misc_RNA (1)...(19): siRNA sense strand
cugaagacgacgcggauua

SEQ ID NO: 750154 - RNA, 19 nt, Homo sapiens
  misc_RNA (1)...(19): siRNA sense strand
ucuguuggcuacggcuuua

SEQ ID NO: 750155 - RNA, 19 nt, Homo sapiens
  misc_RNA (1)...(19): siRNA sense strand
ggauuacuacugcucuguu

SEQ ID NO: 750156 - RNA, 19 nt, Homo sapiens
  misc_RNA (1)...(19): siRNA sense strand
ggucuucccaggccaagug

SEQ ID NO: 750157 - RNA, 19 nt, Homo sapiens
  misc_RNA (1)...(19): siRNA sense strand
ccaaggaugaggcccacaa

SEQ ID NO: 750158 - RNA, 19 nt, Homo sapiens
  misc_RNA (1)...(19): siRNA sense strand
uggaugcacugcuggucuu

SEQ ID NO: 750159 - RNA, 19 nt, Homo sapiens
  misc_RNA (1)...(19): siRNA sense strand
aagacgacgcggauuacua

SEQ ID NO: 750160 - RNA, 19 nt, Homo sapiens
  misc_RNA (1)...(19): siRNA sense strand
acuacgguguguccuggua

SEQ ID NO: 750161 - RNA, 19 nt, Homo sapiens
  misc_RNA (1)...(19): siRNA sense strand
agacgacgcggauuacuac

SEQ ID NO: 750162 - RNA, 19 nt, Homo sapiens
  misc_RNA (1)...(19): siRNA sense strand
gggaccuuccugucaguuu

SEQ ID NO: 750163 - RNA, 19 nt, Homo sapiens
  misc_RNA (1)...(19): siRNA sense strand
ccuguguccucaccauuag

SEQ ID NO: 750164 - RNA, 19 nt, Homo sapiens
  misc_RNA (1)...(19): siRNA sense strand
ccacgaagccaauauguua

SEQ ID NO: 750165 - RNA, 19 nt, Homo sapiens
  misc_RNA (1)...(19): siRNA sense strand
gaacuuucuuucacgguua

SEQ ID NO: 750166 - RNA, 19 nt, Homo sapiens
  misc_RNA (1)...(19): siRNA sense strand
cagcauaucucuacccauu

SEQ ID NO: 750167 - RNA, 19 nt, Homo sapiens
  misc_RNA (1)...(19): siRNA sense strand
gaaauacagacucaaguuu

SEQ ID NO: 750168 - RNA, 19 nt, Homo sapiens
  misc_RNA (1)...(19): siRNA sense strand
gggcaucgguuuccaucug

SEQ ID NO: 750169 - RNA, 19 nt, Homo sapiens
  misc_RNA (1)...(19): siRNA sense strand
gcauaucucuacccauuuu

SEQ ID NO: 750170 - RNA, 19 nt, Homo sapiens
  misc_RNA (1)...(19): siRNA sense strand
gcaauacauagaacugaaa

SEQ ID NO: 750171 - RNA, 19 nt, Homo sapiens
  misc_RNA (1)...(19): siRNA sense strand
acagaugacugcaaguuca

SEQ ID NO: 750172 - RNA, 19 nt, Homo sapiens
  misc_RNA (1)...(19): siRNA sense strand
gagcagcaguagcgcuaug

SEQ ID NO: 750173 - RNA, 19 nt, Homo sapiens
  misc_RNA (1)...(19): siRNA sense strand
agacucaaguuucgcuuug

SEQ ID NO: 750174 - RNA, 19 nt, Homo sapiens
  misc_RNA (1)...(19): siRNA sense strand
ucagugaaauacagacuca

SEQ ID NO: 750175 - RNA, 19 nt, Homo sapiens
  misc_RNA (1)...(19): siRNA sense strand
ugaaauacagacucaaguu

SEQ ID NO: 750176 - RNA, 19 nt, Homo sapiens
  misc_RNA (1)...(19): siRNA sense strand
caaguuucgcuuuggauaa

SEQ ID NO: 750177 - RNA, 19 nt, Homo sapiens
  misc_RNA (1)...(19): siRNA sense strand
gaucuacccggauggcaaa

SEQ ID NO: 750178 - RNA, 19 nt, Homo sapiens
  misc_RNA (1)...(19): siRNA sense strand
gcagagugggcaucgguuu

SEQ ID NO: 750179 - RNA, 19 nt, Homo sapiens
  misc_RNA (1)...(19): siRNA sense strand
gcaguagcgcuaugucuuc

SEQ ID NO: 750180 - RNA, 19 nt, Homo sapiens
  misc_RNA (1)...(19): siRNA sense strand
uaccuaugccucagcaaua

SEQ ID NO: 750181 - RNA, 19 nt, Homo sapiens
  misc_RNA (1)...(19): siRNA sense strand
ucaaguuucgcuuuggaua

SEQ ID NO: 750182 - RNA, 19 nt, Homo sapiens
  misc_RNA (1)...(19): siRNA sense strand
gcaaguucagggagcguuu

SEQ ID NO: 750183 - RNA, 19 nt, Homo sapiens
  misc_RNA (1)...(19): siRNA sense strand
ucacagaugacugcaaguu

SEQ ID NO: 750184 - RNA, 19 nt, Homo sapiens
  misc_RNA (1)...(19): siRNA sense strand
caacucagugaaauacaga

SEQ ID NO: 750185 - RNA, 19 nt, Homo sapiens
  misc_RNA (1)...(19): siRNA sense strand
gcuuggagcagagcaguuu

SEQ ID NO: 750186 - RNA, 19 nt, Homo sapiens
  misc_RNA (1)...(19): siRNA sense strand
aaauacagacucaaguuuc

SEQ ID NO: 750187 - RNA, 19 nt, Homo sapiens
  misc_RNA (1)...(19): siRNA sense strand
ccaacucagugaaauacag

SEQ ID NO: 750188 - RNA, 19 nt, Homo sapiens
  misc_RNA (1)...(19): siRNA sense strand
gcagacagagcagcaguag

SEQ ID NO: 750189 - RNA, 19 nt, Homo sapiens
  misc_RNA (1)...(19): siRNA sense strand
aaauaccaacucagugaaa

SEQ ID NO: 750190 - RNA, 19 nt, Homo sapiens
  misc_RNA (1)...(19): siRNA sense strand
agcaauacauagaacugaa

SEQ ID NO: 750191 - RNA, 19 nt, Homo sapiens
  misc_RNA (1)...(19): siRNA sense strand
auaccaacucagugaaaua

SEQ ID NO: 750192 - RNA, 19 nt, Homo sapiens
  misc_RNA (1)...(19): siRNA sense strand
uaaaagaggaaaagccaaa

SEQ ID NO: 750193 - RNA, 19 nt, Homo sapiens
  misc_RNA (1)...(19): siRNA sense strand
cagcaauacauagaacuga

SEQ ID NO: 750194 - RNA, 19 nt, Homo sapiens
  misc_RNA (1)...(19): siRNA sense strand
aauaccaacucagugaaau

SEQ ID NO: 750195 - RNA, 19 nt, Homo sapiens
  misc_RNA (1)...(19): siRNA sense strand
ggacccgcugccacugaua

SEQ ID NO: 750196 - RNA, 19 nt, Homo sapiens
  misc_RNA (1)...(19): siRNA sense strand
gaucccacgaagccaauau

SEQ ID NO: 750197 - RNA, 19 nt, Homo sapiens
  misc_RNA (1)...(19): siRNA sense strand
ccucagcaauacauagaac

SEQ ID NO: 750198 - RNA, 19 nt, Homo sapiens
  misc_RNA (1)...(19): siRNA sense strand
cacgaagccaauauguuaa

SEQ ID NO: 750199 - RNA, 19 nt, Homo sapiens
  misc_RNA (1)...(19): siRNA sense strand
cuacccggauggcaaaguc

SEQ ID NO: 750200 - RNA, 19 nt, Homo sapiens
  misc_RNA (1)...(19): siRNA sense strand
acucaaguuucgcuuugga

SEQ ID NO: 750201 - RNA, 19 nt, Homo sapiens
  misc_RNA (1)...(19): siRNA sense strand
aauacagacucaaguuucg

SEQ ID NO: 750202 - RNA, 19 nt, Homo sapiens
  misc_RNA (1)...(19): siRNA sense strand
cacgguuacuguuccugaa

SEQ ID NO: 750203 - RNA, 19 nt, Homo sapiens
  misc_RNA (1)...(19): siRNA sense strand
ccacgaagccaauauguua

SEQ ID NO: 750204 - RNA, 19 nt, Homo sapiens
  misc_RNA (1)...(19): siRNA sense strand
gggcaucgguuuccaucug

SEQ ID NO: 750205 - RNA, 19 nt, Homo sapiens
  misc_RNA (1)...(19): siRNA sense strand
gagcagcaguagcgcuaug

SEQ ID NO: 750206 - RNA, 19 nt, Homo sapiens
  misc_RNA (1)...(19): siRNA sense strand
gaucuacccggauggcaaa

SEQ ID NO: 750207 - RNA, 19 nt, Homo sapiens
  misc_RNA (1)...(19): siRNA sense strand
gcagagugggcaucgguuu

SEQ ID NO: 750208 - RNA, 19 nt, Homo sapiens
  misc_RNA (1)...(19): siRNA sense strand
gcaguagcgcuaugucuuc

SEQ ID NO: 750209 - RNA, 19 nt, Homo sapiens
  misc_RNA (1)...(19): siRNA sense strand
gcuuggagcagagcaguuu

SEQ ID NO: 750210 - RNA, 19 nt, Homo sapiens
  misc_RNA (1)...(19): siRNA sense strand
gcagacagagcagcaguag

SEQ ID NO: 750211 - RNA, 19 nt, Homo sapiens
  misc_RNA (1)...(19): siRNA sense strand
ggacccgcugccacugaua

SEQ ID NO: 750212 - RNA, 19 nt, Homo sapiens
  misc_RNA (1)...(19): siRNA sense strand
gaucccacgaagccaauau

SEQ ID NO: 750213 - RNA, 19 nt, Homo sapiens
  misc_RNA (1)...(19): siRNA sense strand
cacgaagccaauauguuaa

SEQ ID NO: 750214 - RNA, 19 nt, Homo sapiens
  misc_RNA (1)...(19): siRNA sense strand
cuacccggauggcaaaguc

SEQ ID NO: 750215 - RNA, 19 nt, Homo sapiens
  misc_RNA (1)...(19): siRNA sense strand
caaaugaggucuaaacuaa

SEQ ID NO: 750216 - RNA, 19 nt, Homo sapiens
  misc_RNA (1)...(19): siRNA sense strand
gaacaaagagacaguuaua

SEQ ID NO: 750217 - RNA, 19 nt, Homo sapiens
  misc_RNA (1)...(19): siRNA sense strand
gagaagaucccacauuuaa

SEQ ID NO: 750218 - RNA, 19 nt, Homo sapiens
  misc_RNA (1)...(19): siRNA sense strand
ggaagcagguuaauuggaa

SEQ ID NO: 750219 - RNA, 19 nt, Homo sapiens
  misc_RNA (1)...(19): siRNA sense strand
gaacuaugcuauucucaau

SEQ ID NO: 750220 - RNA, 19 nt, Homo sapiens
  misc_RNA (1)...(19): siRNA sense strand
gaguauggcuguccuugua

SEQ ID NO: 750221 - RNA, 19 nt, Homo sapiens
  misc_RNA (1)...(19): siRNA sense strand
gaucaaauauuccaaagca

SEQ ID NO: 750222 - RNA, 19 nt, Homo sapiens
  misc_RNA (1)...(19): siRNA sense strand
caagaagacgucauuaaua

SEQ ID NO: 750223 - RNA, 19 nt, Homo sapiens
  misc_RNA (1)...(19): siRNA sense strand
ggacuacacuaaauuggaa

SEQ ID NO: 750224 - RNA, 19 nt, Homo sapiens
  misc_RNA (1)...(19): siRNA sense strand
guggaaagaugucaauauu

SEQ ID NO: 750225 - RNA, 19 nt, Homo sapiens
  misc_RNA (1)...(19): siRNA sense strand
ggagguaggucgauuugga

SEQ ID NO: 750226 - RNA, 19 nt, Homo sapiens
  misc_RNA (1)...(19): siRNA sense strand
gaaacauucggaucaaaua

SEQ ID NO: 750227 - RNA, 19 nt, Homo sapiens
  misc_RNA (1)...(19): siRNA sense strand
uaacagaacgaguccuuua

SEQ ID NO: 750228 - RNA, 19 nt, Homo sapiens
  misc_RNA (1)...(19): siRNA sense strand
aagagaagaucccacauuu

SEQ ID NO: 750229 - RNA, 19 nt, Homo sapiens
  misc_RNA (1)...(19): siRNA sense strand
agacaucugugcauuguuu

SEQ ID NO: 750230 - RNA, 19 nt, Homo sapiens
  misc_RNA (1)...(19): siRNA sense strand
gcagaugucccucuaaaug

SEQ ID NO: 750231 - RNA, 19 nt, Homo sapiens
  misc_RNA (1)...(19): siRNA sense strand
gcagguaucagccauguuu

SEQ ID NO: 750232 - RNA, 19 nt, Homo sapiens
  misc_RNA (1)...(19): siRNA sense strand
gcaaaugaggucuaaacua

SEQ ID NO: 750233 - RNA, 19 nt, Homo sapiens
  misc_RNA (1)...(19): siRNA sense strand
gagaauacacaauggagua

SEQ ID NO: 750234 - RNA, 19 nt, Homo sapiens
  misc_RNA (1)...(19): siRNA sense strand
ggagacaucugugcauugu

SEQ ID NO: 750235 - RNA, 19 nt, Homo sapiens
  misc_RNA (1)...(19): siRNA sense strand
gaagaucccacauuuaaag

SEQ ID NO: 750236 - RNA, 19 nt, Homo sapiens
  misc_RNA (1)...(19): siRNA sense strand
ggcaggagcuaauugaaug

SEQ ID NO: 750237 - RNA, 19 nt, Homo sapiens
  misc_RNA (1)...(19): siRNA sense strand
ccacugaacuuaggucaug

SEQ ID NO: 750238 - RNA, 19 nt, Homo sapiens
  misc_RNA (1)...(19): siRNA sense strand
gaucccacauuuaaaguau

SEQ ID NO: 750239 - RNA, 19 nt, Homo sapiens
  misc_RNA (1)...(19): siRNA sense strand
ggagacacauucacagaca

SEQ ID NO: 750240 - RNA, 19 nt, Homo sapiens
  misc_RNA (1)...(19): siRNA sense strand
gauggaggauguugaggaa

SEQ ID NO: 750241 - RNA, 19 nt, Homo sapiens
  misc_RNA (1)...(19): siRNA sense strand
gaaagggcccugagagugu

SEQ ID NO: 750242 - RNA, 19 nt, Homo sapiens
  misc_RNA (1)...(19): siRNA sense strand
ccagaggacuacacuaaau

SEQ ID NO: 750243 - RNA, 19 nt, Homo sapiens
  misc_RNA (1)...(19): siRNA sense strand
gagaacaaagagacaguua

SEQ ID NO: 750244 - RNA, 19 nt, Homo sapiens
  misc_RNA (1)...(19): siRNA sense strand
ucacauugauucugggaaa

SEQ ID NO: 750245 - RNA, 19 nt, Homo sapiens
  misc_RNA (1)...(19): siRNA sense strand
ggaagcgccuugaagaaca

SEQ ID NO: 750246 - RNA, 19 nt, Homo sapiens
  misc_RNA (1)...(19): siRNA sense strand
uuacuacacuggcagaauu

SEQ ID NO: 750247 - RNA, 19 nt, Homo sapiens
  misc_RNA (1)...(19): siRNA sense strand
gaacgaguccuuuacuaca

SEQ ID NO: 750248 - RNA, 19 nt, Homo sapiens
  misc_RNA (1)...(19): siRNA sense strand
ccacaugguugauucuaau

SEQ ID NO: 750249 - RNA, 19 nt, Homo sapiens
  misc_RNA (1)...(19): siRNA sense strand
cuaaugaacuccaguagag

SEQ ID NO: 750250 - RNA, 19 nt, Homo sapiens
  misc_RNA (1)...(19): siRNA sense strand
ggugaaagguaaagaugga

SEQ ID NO: 750251 - RNA, 19 nt, Homo sapiens
  misc_RNA (1)...(19): siRNA sense strand
gaacuccaguagagacaau

SEQ ID NO: 750252 - RNA, 19 nt, Homo sapiens
  misc_RNA (1)...(19): siRNA sense strand
cagaacgaguccuuuacua

SEQ ID NO: 750253 - RNA, 19 nt, Homo sapiens
  misc_RNA (1)...(19): siRNA sense strand
gaagacgucauuaauaagu

SEQ ID NO: 750254 - RNA, 19 nt, Homo sapiens
  misc_RNA (1)...(19): siRNA sense strand
agaaggugcucuuaaacaa

SEQ ID NO: 750255 - RNA, 19 nt, Homo sapiens
  misc_RNA (1)...(19): siRNA sense strand
gaugaaacauucggaucaa

SEQ ID NO: 750256 - RNA, 19 nt, Homo sapiens
  misc_RNA (1)...(19): siRNA sense strand
caagagaagaucccacauu

SEQ ID NO: 750257 - RNA, 19 nt, Homo sapiens
  misc_RNA (1)...(19): siRNA sense strand
ggaggauguugaggaagua

SEQ ID NO: 750258 - RNA, 19 nt, Homo sapiens
  misc_RNA (1)...(19): siRNA sense strand
gguaaucacugggcaagau

SEQ ID NO: 750259 - RNA, 19 nt, Homo sapiens
  misc_RNA (1)...(19): siRNA sense strand
gaauuucagggacaaguaa

SEQ ID NO: 750260 - RNA, 19 nt, Homo sapiens
  misc_RNA (1)...(19): siRNA sense strand
ccguuugacuuuacacaua

SEQ ID NO: 750261 - RNA, 19 nt, Homo sapiens
  misc_RNA (1)...(19): siRNA sense strand
ggaacuagagagacaaaga

SEQ ID NO: 750262 - RNA, 19 nt, Homo sapiens
  misc_RNA (1)...(19): siRNA sense strand
gaaguuguagcuccaaaug

SEQ ID NO: 750263 - RNA, 19 nt, Homo sapiens
  misc_RNA (1)...(19): siRNA sense strand
aggagaaggugcucuuaaa

SEQ ID NO: 750264 - RNA, 19 nt, Homo sapiens
  misc_RNA (1)...(19): siRNA sense strand
agaggaagcagguuaauug

SEQ ID NO: 750265 - RNA, 19 nt, Homo sapiens
  misc_RNA (1)...(19): siRNA sense strand
uaacaagaacgaucuggaa

SEQ ID NO: 750266 - RNA, 19 nt, Homo sapiens
  misc_RNA (1)...(19): siRNA sense strand
gaaagaaaguacgguugca

SEQ ID NO: 750267 - RNA, 19 nt, Homo sapiens
  misc_RNA (1)...(19): siRNA sense strand
ggagcuaauugaauguguu

SEQ ID NO: 750268 - RNA, 19 nt, Homo sapiens
  misc_RNA (1)...(19): siRNA sense strand
agacaaagaggaaucacua

SEQ ID NO: 750269 - RNA, 19 nt, Homo sapiens
  misc_RNA (1)...(19): siRNA sense strand
guacagugccagaccauga

SEQ ID NO: 750270 - RNA, 19 nt, Homo sapiens
  misc_RNA (1)...(19): siRNA sense strand
caacagcggccuuucuaug

SEQ ID NO: 750271 - RNA, 19 nt, Homo sapiens
  misc_RNA (1)...(19): siRNA sense strand
uaaagaggaugacucaaaa

SEQ ID NO: 750272 - RNA, 19 nt, Homo sapiens
  misc_RNA (1)...(19): siRNA sense strand
uagaauaccucccaaaucc

SEQ ID NO: 750273 - RNA, 19 nt, Homo sapiens
  misc_RNA (1)...(19): siRNA sense strand
gaagcgccuugaagaacaa

SEQ ID NO: 750274 - RNA, 19 nt, Homo sapiens
  misc_RNA (1)...(19): siRNA sense strand
ugcaugaggugaaagguaa

SEQ ID NO: 750275 - RNA, 19 nt, Homo sapiens
  misc_RNA (1)...(19): siRNA sense strand
gagaaggugcucuuaaaca

SEQ ID NO: 750276 - RNA, 19 nt, Homo sapiens
  misc_RNA (1)...(19): siRNA sense strand
caauaaagaggaugacuca

SEQ ID NO: 750277 - RNA, 19 nt, Homo sapiens
  misc_RNA (1)...(19): siRNA sense strand
gauggagacuuuggucaga

SEQ ID NO: 750278 - RNA, 19 nt, Homo sapiens
  misc_RNA (1)...(19): siRNA sense strand
aaagaugcaugaggugaaa

SEQ ID NO: 750279 - RNA, 19 nt, Homo sapiens
  misc_RNA (1)...(19): siRNA sense strand
caaagagacaguuauaucu

SEQ ID NO: 750280 - RNA, 19 nt, Homo sapiens
  misc_RNA (1)...(19): siRNA sense strand
aaucucagcucacauugau

SEQ ID NO: 750281 - RNA, 19 nt, Homo sapiens
  misc_RNA (1)...(19): siRNA sense strand
ggaaagggagaauacacaa

SEQ ID NO: 750282 - RNA, 19 nt, Homo sapiens
  misc_RNA (1)...(19): siRNA sense strand
guaugcagaugucccucua

SEQ ID NO: 750283 - RNA, 19 nt, Homo sapiens
  misc_RNA (1)...(19): siRNA sense strand
gguauuggcagguuuacaa

SEQ ID NO: 750284 - RNA, 19 nt, Homo sapiens
  misc_RNA (1)...(19): siRNA sense strand
ggacaauuaacuuauguuc

SEQ ID NO: 750285 - RNA, 19 nt, Homo sapiens
  misc_RNA (1)...(19): siRNA sense strand
ggaacgagccaucuauuuu

SEQ ID NO: 750286 - RNA, 19 nt, Homo sapiens
  misc_RNA (1)...(19): siRNA sense strand
acaagaagacgucauuaau

SEQ ID NO: 750287 - RNA, 19 nt, Homo sapiens
  misc_RNA (1)...(19): siRNA sense strand
uauuauggcuguggaaguu

SEQ ID NO: 750288 - RNA, 19 nt, Homo sapiens
  misc_RNA (1)...(19): siRNA sense strand
agacaauucccacccauuu

SEQ ID NO: 750289 - RNA, 19 nt, Homo sapiens
  misc_RNA (1)...(19): siRNA sense strand
auaaagaggaugacucaaa

SEQ ID NO: 750290 - RNA, 19 nt, Homo sapiens
  misc_RNA (1)...(19): siRNA sense strand
gaucauuuacuccuguauu

SEQ ID NO: 750291 - RNA, 19 nt, Homo sapiens
  misc_RNA (1)...(19): siRNA sense strand
aauuacaccuggaaaucua

SEQ ID NO: 750292 - RNA, 19 nt, Homo sapiens
  misc_RNA (1)...(19): siRNA sense strand
guaggucgauuuggacaau

SEQ ID NO: 750293 - RNA, 19 nt, Homo sapiens
  misc_RNA (1)...(19): siRNA sense strand
gaggaugacucaaaagaga

SEQ ID NO: 750294 - RNA, 19 nt, Homo sapiens
  misc_RNA (1)...(19): siRNA sense strand
guccagaacuaugcuauuc

SEQ ID NO: 750295 - RNA, 19 nt, Homo sapiens
  misc_RNA (1)...(19): siRNA sense strand
caaaggaguucagccucuu

SEQ ID NO: 750296 - RNA, 19 nt, Homo sapiens
  misc_RNA (1)...(19): siRNA sense strand
gaaagguaaagauggaguu

SEQ ID NO: 750297 - RNA, 19 nt, Homo sapiens
  misc_RNA (1)...(19): siRNA sense strand
cacaagaagacgucauuaa

SEQ ID NO: 750298 - RNA, 19 nt, Homo sapiens
  misc_RNA (1)...(19): siRNA sense strand
uaacaaauuggaccgaaug

SEQ ID NO: 750299 - RNA, 19 nt, Homo sapiens
  misc_RNA (1)...(19): siRNA sense strand
gaacuagagagacaaagag

SEQ ID NO: 750300 - RNA, 19 nt, Homo sapiens
  misc_RNA (1)...(19): siRNA sense strand
caugguugauucuaaugaa

SEQ ID NO: 750301 - RNA, 19 nt, Homo sapiens
  misc_RNA (1)...(19): siRNA sense strand
cguuugacuuuacacauaa

SEQ ID NO: 750302 - RNA, 19 nt, Homo sapiens
  misc_RNA (1)...(19): siRNA sense strand
agagaagaucccacauuua

SEQ ID NO: 750303 - RNA, 19 nt, Homo sapiens
  misc_RNA (1)...(19): siRNA sense strand
gaggguaauuuuaaaggua

SEQ ID NO: 750304 - RNA, 19 nt, Homo sapiens
  misc_RNA (1)...(19): siRNA sense strand
gauccugucauuucaauag

SEQ ID NO: 750305 - RNA, 19 nt, Homo sapiens
  misc_RNA (1)...(19): siRNA sense strand
uggcagaauugcaaagaug

SEQ ID NO: 750306 - RNA, 19 nt, Homo sapiens
  misc_RNA (1)...(19): siRNA sense strand
gaaagggagaauacacaau

SEQ ID NO: 750307 - RNA, 19 nt, Homo sapiens
  misc_RNA (1)...(19): siRNA sense strand
cagaugucccucuaaauga

SEQ ID NO: 750308 - RNA, 19 nt, Homo sapiens
  misc_RNA (1)...(19): siRNA sense strand
gacaaguaauugcaggaau

SEQ ID NO: 750309 - RNA, 19 nt, Homo sapiens
  misc_RNA (1)...(19): siRNA sense strand
aguuguagcuccaaaugaa

SEQ ID NO: 750310 - RNA, 19 nt, Homo sapiens
  misc_RNA (1)...(19): siRNA sense strand
gcaggagaaggugcucuua

SEQ ID NO: 750311 - RNA, 19 nt, Homo sapiens
  misc_RNA (1)...(19): siRNA sense strand
caaauauuccaaagcaguu

SEQ ID NO: 750312 - RNA, 19 nt, Homo sapiens
  misc_RNA (1)...(19): siRNA sense strand
acaaagagacaguuauauc

SEQ ID NO: 750313 - RNA, 19 nt, Homo sapiens
  misc_RNA (1)...(19): siRNA sense strand
guuugugccugcuguagaa

SEQ ID NO: 750314 - RNA, 19 nt, Homo sapiens
  misc_RNA (1)...(19): siRNA sense strand
gagaauuacaccuggaaau

SEQ ID NO: 750315 - RNA, 19 nt, Homo sapiens
  misc_RNA (1)...(19): siRNA sense strand
gcaagacuguuaucgagua

SEQ ID NO: 750316 - RNA, 19 nt, Homo sapiens
  misc_RNA (1)...(19): siRNA sense strand
ggaauucgguguggacaua

SEQ ID NO: 750317 - RNA, 19 nt, Homo sapiens
  misc_RNA (1)...(19): siRNA sense strand
gcacgaaacauaccgguaa

SEQ ID NO: 750318 - RNA, 19 nt, Homo sapiens
  misc_RNA (1)...(19): siRNA sense strand
cagcaaacguucccaagaa

SEQ ID NO: 750319 - RNA, 19 nt, Homo sapiens
  misc_RNA (1)...(19): siRNA sense strand
gaacagcauugccuaucug

SEQ ID NO: 750320 - RNA, 19 nt, Homo sapiens
  misc_RNA (1)...(19): siRNA sense strand
caucaaggauauuguagga

SEQ ID NO: 750321 - RNA, 19 nt, Homo sapiens
  misc_RNA (1)...(19): siRNA sense strand
aaacuuugcugcccagaug

SEQ ID NO: 750322 - RNA, 19 nt, Homo sapiens
  misc_RNA (1)...(19): siRNA sense strand
gcaaagauggugcuaaugg

SEQ ID NO: 750323 - RNA, 19 nt, Homo sapiens
  misc_RNA (1)...(19): siRNA sense strand
gcaaggagacagaggagaa

SEQ ID NO: 750324 - RNA, 19 nt, Homo sapiens
  misc_RNA (1)...(19): siRNA sense strand
caaagauggugcuaaugga

SEQ ID NO: 750325 - RNA, 19 nt, Homo sapiens
  misc_RNA (1)...(19): siRNA sense strand
uggcaaagcuggugagaag

SEQ ID NO: 750326 - RNA, 19 nt, Homo sapiens
  misc_RNA (1)...(19): siRNA sense strand
gcaauagcagguucacgua

SEQ ID NO: 750327 - RNA, 19 nt, Homo sapiens
  misc_RNA (1)...(19): siRNA sense strand
gcuggaggauuugaugaaa

SEQ ID NO: 750328 - RNA, 19 nt, Homo sapiens
  misc_RNA (1)...(19): siRNA sense strand
gcaagagcaaggagaagaa

SEQ ID NO: 750329 - RNA, 19 nt, Homo sapiens
  misc_RNA (1)...(19): siRNA sense strand
uggcaaagauggugcuaau

SEQ ID NO: 750330 - RNA, 19 nt, Homo sapiens
  misc_RNA (1)...(19): siRNA sense strand
uggcaaagauggugagaca

SEQ ID NO: 750331 - RNA, 19 nt, Homo sapiens
  misc_RNA (1)...(19): siRNA sense strand
gcaaggagaagaaacacau

SEQ ID NO: 750332 - RNA, 19 nt, Homo sapiens
  misc_RNA (1)...(19): siRNA sense strand
gaguaccggucacagaaga

SEQ ID NO: 750333 - RNA, 19 nt, Homo sapiens
  misc_RNA (1)...(19): siRNA sense strand
ucaaaggucacagagguua

SEQ ID NO: 750334 - RNA, 19 nt, Homo sapiens
  misc_RNA (1)...(19): siRNA sense strand
gaaggauggcugcacgaaa

SEQ ID NO: 750335 - RNA, 19 nt, Homo sapiens
  misc_RNA (1)...(19): siRNA sense strand
gaagggagagccuggagau

SEQ ID NO: 750336 - RNA, 19 nt, Homo sapiens
  misc_RNA (1)...(19): siRNA sense strand
ggagacaucaaggauauug

SEQ ID NO: 750337 - RNA, 19 nt, Homo sapiens
  misc_RNA (1)...(19): siRNA sense strand
aggagaagcuggugcacaa

SEQ ID NO: 750338 - RNA, 19 nt, Homo sapiens
  misc_RNA (1)...(19): siRNA sense strand
ucaaggauuucaaggcaau

SEQ ID NO: 750339 - RNA, 19 nt, Homo sapiens
  misc_RNA (1)...(19): siRNA sense strand
ucaagucccucaacaacca

SEQ ID NO: 750340 - RNA, 19 nt, Homo sapiens
  misc_RNA (1)...(19): siRNA sense strand
caaacguucccaagaagaa

SEQ ID NO: 750341 - RNA, 19 nt, Homo sapiens
  misc_RNA (1)...(19): siRNA sense strand
cuggagacaucaaggauau

SEQ ID NO: 750342 - RNA, 19 nt, Homo sapiens
  misc_RNA (1)...(19): siRNA sense strand
gcagcaagagcaaggagaa

SEQ ID NO: 750343 - RNA, 19 nt, Homo sapiens
  misc_RNA (1)...(19): siRNA sense strand
agacaucaaggauauugua

SEQ ID NO: 750344 - RNA, 19 nt, Homo sapiens
  misc_RNA (1)...(19): siRNA sense strand
gaguggagacuacuggauu

SEQ ID NO: 750345 - RNA, 19 nt, Homo sapiens
  misc_RNA (1)...(19): siRNA sense strand
ucaaggcaauccuggugaa

SEQ ID NO: 750346 - RNA, 19 nt, Homo sapiens
  misc_RNA (1)...(19): siRNA sense strand
uggagugacugguccuaaa

SEQ ID NO: 750347 - RNA, 19 nt, Homo sapiens
  misc_RNA (1)...(19): siRNA sense strand
agaagaaacacaucugguu

SEQ ID NO: 750348 - RNA, 19 nt, Homo sapiens
  misc_RNA (1)...(19): siRNA sense strand
gcaaacguucccaagaaga

SEQ ID NO: 750349 - RNA, 19 nt, Homo sapiens
  misc_RNA (1)...(19): siRNA sense strand
gauggcugcacgaaacaua

SEQ ID NO: 750350 - RNA, 19 nt, Homo sapiens
  misc_RNA (1)...(19): siRNA sense strand
uggaaagccuggugaugau

SEQ ID NO: 750351 - RNA, 19 nt, Homo sapiens
  misc_RNA (1)...(19): siRNA sense strand
gggugacguuggugagaaa

SEQ ID NO: 750352 - RNA, 19 nt, Homo sapiens
  misc_RNA (1)...(19): siRNA sense strand
ugguauugcuggcuucaaa

SEQ ID NO: 750353 - RNA, 19 nt, Homo sapiens
  misc_RNA (1)...(19): siRNA sense strand
uggaauuccuggagccaaa

SEQ ID NO: 750354 - RNA, 19 nt, Homo sapiens
  misc_RNA (1)...(19): siRNA sense strand
gcacugauggucccaaagg

SEQ ID NO: 750355 - RNA, 19 nt, Homo sapiens
  misc_RNA (1)...(19): siRNA sense strand
caagaaggcccugcucauc

SEQ ID NO: 750356 - RNA, 19 nt, Homo sapiens
  misc_RNA (1)...(19): siRNA sense strand
ggccaagggugagcaagga

SEQ ID NO: 750357 - RNA, 19 nt, Homo sapiens
  misc_RNA (1)...(19): siRNA sense strand
aggagaaccuggagacauc

SEQ ID NO: 750358 - RNA, 19 nt, Homo sapiens
  misc_RNA (1)...(19): siRNA sense strand
ggaaggcucccagaacauc

SEQ ID NO: 750359 - RNA, 19 nt, Homo sapiens
  misc_RNA (1)...(19): siRNA sense strand
ucaagguccucgcggugaa

SEQ ID NO: 750360 - RNA, 19 nt, Homo sapiens
  misc_RNA (1)...(19): siRNA sense strand
ucagggugcucgugguuuc

SEQ ID NO: 750361 - RNA, 19 nt, Homo sapiens
  misc_RNA (1)...(19): siRNA sense strand
acacucaagucccucaaca

SEQ ID NO: 750362 - RNA, 19 nt, Homo sapiens
  misc_RNA (1)...(19): siRNA sense strand
caagaacagcauugccuau

SEQ ID NO: 750363 - RNA, 19 nt, Homo sapiens
  misc_RNA (1)...(19): siRNA sense strand
uggagagccuggcgagaga

SEQ ID NO: 750364 - RNA, 19 nt, Homo sapiens
  misc_RNA (1)...(19): siRNA sense strand
caaucuggcucccaacacu

SEQ ID NO: 750365 - RNA, 19 nt, Homo sapiens
  misc_RNA (1)...(19): siRNA sense strand
uggccugccuggugaaaga

SEQ ID NO: 750366 - RNA, 19 nt, Homo sapiens
  misc_RNA (1)...(19): siRNA sense strand
aaggauggcugcacgaaac

SEQ ID NO: 750367 - RNA, 19 nt, Homo sapiens
  misc_RNA (1)...(19): siRNA sense strand
caagagcaaggagaagaaa

SEQ ID NO: 750368 - RNA, 19 nt, Homo sapiens
  misc_RNA (1)...(19): siRNA sense strand
uggacccgcuggugaagaa

SEQ ID NO: 750369 - RNA, 19 nt, Homo sapiens
  misc_RNA (1)...(19): siRNA sense strand
uggaaaagauggucccaaa

SEQ ID NO: 750370 - RNA, 19 nt, Homo sapiens
  misc_RNA (1)...(19): siRNA sense strand
gggagagccuggagaugac

SEQ ID NO: 750371 - RNA, 19 nt, Homo sapiens
  misc_RNA (1)...(19): siRNA sense strand
cgaaacauaccgguaagug

SEQ ID NO: 750372 - RNA, 19 nt, Homo sapiens
  misc_RNA (1)...(19): siRNA sense strand
ucacguacacugcccugaa

SEQ ID NO: 750373 - RNA, 19 nt, Homo sapiens
  misc_RNA (1)...(19): siRNA sense strand
acggaaggcucccagaaca

SEQ ID NO: 750374 - RNA, 19 nt, Homo sapiens
  misc_RNA (1)...(19): siRNA sense strand
ccacggaaggcucccagaa

SEQ ID NO: 750375 - RNA, 19 nt, Homo sapiens
  misc_RNA (1)...(19): siRNA sense strand
uggcuuccauuucagcuau

SEQ ID NO: 750376 - RNA, 19 nt, Homo sapiens
  misc_RNA (1)...(19): siRNA sense strand
aaagauggugcuaauggaa

SEQ ID NO: 750377 - RNA, 19 nt, Homo sapiens
  misc_RNA (1)...(19): siRNA sense strand
ggaccaaagggacagaaag

SEQ ID NO: 750378 - RNA, 19 nt, Homo sapiens
  misc_RNA (1)...(19): siRNA sense strand
guaaugcaaggaccaaugg

SEQ ID NO: 750379 - RNA, 19 nt, Homo sapiens
  misc_RNA (1)...(19): siRNA sense strand
aauagcagguucacguaca

SEQ ID NO: 750380 - RNA, 19 nt, Homo sapiens
  misc_RNA (1)...(19): siRNA sense strand
agaacagcauugccuaucu

SEQ ID NO: 750381 - RNA, 19 nt, Homo sapiens
  misc_RNA (1)...(19): siRNA sense strand
ccagcaaacguucccaaga

SEQ ID NO: 750382 - RNA, 19 nt, Homo sapiens
  misc_RNA (1)...(19): siRNA sense strand
gaaaagauggucccaaagg

SEQ ID NO: 750383 - RNA, 19 nt, Homo sapiens
  misc_RNA (1)...(19): siRNA sense strand
ggagugacugguccuaaag

SEQ ID NO: 750384 - RNA, 19 nt, Homo sapiens
  misc_RNA (1)...(19): siRNA sense strand
aaagaggugcucccggaaa

SEQ ID NO: 750385 - RNA, 19 nt, Homo sapiens
  misc_RNA (1)...(19): siRNA sense strand
cuggaaagccuggugauga

SEQ ID NO: 750386 - RNA, 19 nt, Homo sapiens
  misc_RNA (1)...(19): siRNA sense strand
guggaagaguggagacuac

SEQ ID NO: 750387 - RNA, 19 nt, Homo sapiens
  misc_RNA (1)...(19): siRNA sense strand
uggcagagauggagaaccu

SEQ ID NO: 750388 - RNA, 19 nt, Homo sapiens
  misc_RNA (1)...(19): siRNA sense strand
caacggugagccuggcaaa

SEQ ID NO: 750389 - RNA, 19 nt, Homo sapiens
  misc_RNA (1)...(19): siRNA sense strand
uggaaaagcuggugaaagg

SEQ ID NO: 750390 - RNA, 19 nt, Homo sapiens
  misc_RNA (1)...(19): siRNA sense strand
cgagaagggagaaguugga

SEQ ID NO: 750391 - RNA, 19 nt, Homo sapiens
  misc_RNA (1)...(19): siRNA sense strand
gaccaaagggacagaaagg

SEQ ID NO: 750392 - RNA, 19 nt, Homo sapiens
  misc_RNA (1)...(19): siRNA sense strand
acacaucugguuuggagaa

SEQ ID NO: 750393 - RNA, 19 nt, Homo sapiens
  misc_RNA (1)...(19): siRNA sense strand
acaaccagauugagagcau

SEQ ID NO: 750394 - RNA, 19 nt, Homo sapiens
  misc_RNA (1)...(19): siRNA sense strand
gaaacuuugcugcccagau

SEQ ID NO: 750395 - RNA, 19 nt, Homo sapiens
  misc_RNA (1)...(19): siRNA sense strand
gauauuguaggacccaaag

SEQ ID NO: 750396 - RNA, 19 nt, Homo sapiens
  misc_RNA (1)...(19): siRNA sense strand
gccggucugcuucuuguaa

SEQ ID NO: 750397 - RNA, 19 nt, Homo sapiens
  misc_RNA (1)...(19): siRNA sense strand
gaaggcucccagaacauca

SEQ ID NO: 750398 - RNA, 19 nt, Homo sapiens
  misc_RNA (1)...(19): siRNA sense strand
cauuucagcuauggagaug

SEQ ID NO: 750399 - RNA, 19 nt, Homo sapiens
  misc_RNA (1)...(19): siRNA sense strand
gacggguccugcaggugaa

SEQ ID NO: 750400 - RNA, 19 nt, Homo sapiens
  misc_RNA (1)...(19): siRNA sense strand
gggugaaccugguauugcu

SEQ ID NO: 750401 - RNA, 19 nt, Homo sapiens
  misc_RNA (1)...(19): siRNA sense strand
ggaucguggugacaaaggu

SEQ ID NO: 750402 - RNA, 19 nt, Homo sapiens
  misc_RNA (1)...(19): siRNA sense strand
ggaaagccuggugaugaug

SEQ ID NO: 750403 - RNA, 19 nt, Homo sapiens
  misc_RNA (1)...(19): siRNA sense strand
agaaggcccugcucaucca

SEQ ID NO: 750404 - RNA, 19 nt, Homo sapiens
  misc_RNA (1)...(19): siRNA sense strand
ggucuugguggaaacuuug

SEQ ID NO: 750405 - RNA, 19 nt, Homo sapiens
  misc_RNA (1)...(19): siRNA sense strand
cgguaacccuggaacagau

SEQ ID NO: 750406 - RNA, 19 nt, Homo sapiens
  misc_RNA (1)...(19): siRNA sense strand
ggauauuguaggacccaaa

SEQ ID NO: 750407 - RNA, 19 nt, Homo sapiens
  misc_RNA (1)...(19): siRNA sense strand
caagacuguuaucgaguac

SEQ ID NO: 750408 - RNA, 19 nt, Homo sapiens
  misc_RNA (1)...(19): siRNA sense strand
ucaccuaccacugcaagaa

SEQ ID NO: 750409 - RNA, 19 nt, Homo sapiens
  misc_RNA (1)...(19): siRNA sense strand
gcucccagaacaucaccua

SEQ ID NO: 750410 - RNA, 19 nt, Homo sapiens
  misc_RNA (1)...(19): siRNA sense strand
aguggagacuacuggauug

SEQ ID NO: 750411 - RNA, 19 nt, Homo sapiens
  misc_RNA (1)...(19): siRNA sense strand
ggaccucguggcagagaug

SEQ ID NO: 750412 - RNA, 19 nt, Homo sapiens
  misc_RNA (1)...(19): siRNA sense strand
ccaugaagguuuucugcaa

SEQ ID NO: 750413 - RNA, 19 nt, Homo sapiens
  misc_RNA (1)...(19): siRNA sense strand
ggaguaaugcaaggaccaa

SEQ ID NO: 750414 - RNA, 19 nt, Homo sapiens
  misc_RNA (1)...(19): siRNA sense strand
cauggagacuggcgagacu

SEQ ID NO: 750415 - RNA, 19 nt, Homo sapiens
  misc_RNA (1)...(19): siRNA sense strand
gcaagacuguuaucgagua

SEQ ID NO: 750416 - RNA, 19 nt, Homo sapiens
  misc_RNA (1)...(19): siRNA sense strand
ggaauucgguguggacaua

SEQ ID NO: 750417 - RNA, 19 nt, Homo sapiens
  misc_RNA (1)...(19): siRNA sense strand
gcacgaaacauaccgguaa

SEQ ID NO: 750418 - RNA, 19 nt, Homo sapiens
  misc_RNA (1)...(19): siRNA sense strand
cagcaaacguucccaagaa

SEQ ID NO: 750419 - RNA, 19 nt, Homo sapiens
  misc_RNA (1)...(19): siRNA sense strand
gaacagcauugccuaucug

SEQ ID NO: 750420 - RNA, 19 nt, Homo sapiens
  misc_RNA (1)...(19): siRNA sense strand
caucaaggauauuguagga

SEQ ID NO: 750421 - RNA, 19 nt, Homo sapiens
  misc_RNA (1)...(19): siRNA sense strand
aaacuuugcugcccagaug

SEQ ID NO: 750422 - RNA, 19 nt, Homo sapiens
  misc_RNA (1)...(19): siRNA sense strand
gcaaagauggugcuaaugg

SEQ ID NO: 750423 - RNA, 19 nt, Homo sapiens
  misc_RNA (1)...(19): siRNA sense strand
gcaaggagacagaggagaa

SEQ ID NO: 750424 - RNA, 19 nt, Homo sapiens
  misc_RNA (1)...(19): siRNA sense strand
caaagauggugcuaaugga

SEQ ID NO: 750425 - RNA, 19 nt, Homo sapiens
  misc_RNA (1)...(19): siRNA sense strand
uggcaaagcuggugagaag

SEQ ID NO: 750426 - RNA, 19 nt, Homo sapiens
  misc_RNA (1)...(19): siRNA sense strand
gcaauagcagguucacgua

SEQ ID NO: 750427 - RNA, 19 nt, Homo sapiens
  misc_RNA (1)...(19): siRNA sense strand
gcuggaggauuugaugaaa

SEQ ID NO: 750428 - RNA, 19 nt, Homo sapiens
  misc_RNA (1)...(19): siRNA sense strand
gcaagagcaaggagaagaa

SEQ ID NO: 750429 - RNA, 19 nt, Homo sapiens
  misc_RNA (1)...(19): siRNA sense strand
uggcaaagauggugcuaau

SEQ ID NO: 750430 - RNA, 19 nt, Homo sapiens
  misc_RNA (1)...(19): siRNA sense strand
uggcaaagauggugagaca

SEQ ID NO: 750431 - RNA, 19 nt, Homo sapiens
  misc_RNA (1)...(19): siRNA sense strand
gcaaggagaagaaacacau

SEQ ID NO: 750432 - RNA, 19 nt, Homo sapiens
  misc_RNA (1)...(19): siRNA sense strand
gaguaccggucacagaaga

SEQ ID NO: 750433 - RNA, 19 nt, Homo sapiens
  misc_RNA (1)...(19): siRNA sense strand
ucaaaggucacagagguua

SEQ ID NO: 750434 - RNA, 19 nt, Homo sapiens
  misc_RNA (1)...(19): siRNA sense strand
gaaggauggcugcacgaaa

SEQ ID NO: 750435 - RNA, 19 nt, Homo sapiens
  misc_RNA (1)...(19): siRNA sense strand
gaagggagagccuggagau

SEQ ID NO: 750436 - RNA, 19 nt, Homo sapiens
  misc_RNA (1)...(19): siRNA sense strand
ggagacaucaaggauauug

SEQ ID NO: 750437 - RNA, 19 nt, Homo sapiens
  misc_RNA (1)...(19): siRNA sense strand
aggagaagcuggugcacaa

SEQ ID NO: 750438 - RNA, 19 nt, Homo sapiens
  misc_RNA (1)...(19): siRNA sense strand
ucaaggauuucaaggcaau

SEQ ID NO: 750439 - RNA, 19 nt, Homo sapiens
  misc_RNA (1)...(19): siRNA sense strand
ucaagucccucaacaacca

SEQ ID NO: 750440 - RNA, 19 nt, Homo sapiens
  misc_RNA (1)...(19): siRNA sense strand
caaacguucccaagaagaa

SEQ ID NO: 750441 - RNA, 19 nt, Homo sapiens
  misc_RNA (1)...(19): siRNA sense strand
cuggagacaucaaggauau

SEQ ID NO: 750442 - RNA, 19 nt, Homo sapiens
  misc_RNA (1)...(19): siRNA sense strand
gcagcaagagcaaggagaa

SEQ ID NO: 750443 - RNA, 19 nt, Homo sapiens
  misc_RNA (1)...(19): siRNA sense strand
agacaucaaggauauugua

SEQ ID NO: 750444 - RNA, 19 nt, Homo sapiens
  misc_RNA (1)...(19): siRNA sense strand
gaguggagacuacuggauu

SEQ ID NO: 750445 - RNA, 19 nt, Homo sapiens
  misc_RNA (1)...(19): siRNA sense strand
ucaaggcaauccuggugaa

SEQ ID NO: 750446 - RNA, 19 nt, Homo sapiens
  misc_RNA (1)...(19): siRNA sense strand
uggagugacugguccuaaa

SEQ ID NO: 750447 - RNA, 19 nt, Homo sapiens
  misc_RNA (1)...(19): siRNA sense strand
agaagaaacacaucugguu

SEQ ID NO: 750448 - RNA, 19 nt, Homo sapiens
  misc_RNA (1)...(19): siRNA sense strand
gcaaacguucccaagaaga

SEQ ID NO: 750449 - RNA, 19 nt, Homo sapiens
  misc_RNA (1)...(19): siRNA sense strand
gauggcugcacgaaacaua

SEQ ID NO: 750450 - RNA, 19 nt, Homo sapiens
  misc_RNA (1)...(19): siRNA sense strand
uggaaagccuggugaugau

SEQ ID NO: 750451 - RNA, 19 nt, Homo sapiens
  misc_RNA (1)...(19): siRNA sense strand
gggugacguuggugagaaa

SEQ ID NO: 750452 - RNA, 19 nt, Homo sapiens
  misc_RNA (1)...(19): siRNA sense strand
ugguauugcuggcuucaaa

SEQ ID NO: 750453 - RNA, 19 nt, Homo sapiens
  misc_RNA (1)...(19): siRNA sense strand
uggaauuccuggagccaaa

SEQ ID NO: 750454 - RNA, 19 nt, Homo sapiens
  misc_RNA (1)...(19): siRNA sense strand
gcacugauggucccaaagg

SEQ ID NO: 750455 - RNA, 19 nt, Homo sapiens
  misc_RNA (1)...(19): siRNA sense strand
caagaaggcccugcucauc

SEQ ID NO: 750456 - RNA, 19 nt, Homo sapiens
  misc_RNA (1)...(19): siRNA sense strand
ggccaagggugagcaagga

SEQ ID NO: 750457 - RNA, 19 nt, Homo sapiens
  misc_RNA (1)...(19): siRNA sense strand
aggagaaccuggagacauc

SEQ ID NO: 750458 - RNA, 19 nt, Homo sapiens
  misc_RNA (1)...(19): siRNA sense strand
ggaaggcucccagaacauc

SEQ ID NO: 750459 - RNA, 19 nt, Homo sapiens
  misc_RNA (1)...(19): siRNA sense strand
ucaagguccucgcggugaa

SEQ ID NO: 750460 - RNA, 19 nt, Homo sapiens
  misc_RNA (1)...(19): siRNA sense strand
ucagggugcucgugguuuc

SEQ ID NO: 750461 - RNA, 19 nt, Homo sapiens
  misc_RNA (1)...(19): siRNA sense strand
acacucaagucccucaaca

SEQ ID NO: 750462 - RNA, 19 nt, Homo sapiens
  misc_RNA (1)...(19): siRNA sense strand
caagaacagcauugccuau

SEQ ID NO: 750463 - RNA, 19 nt, Homo sapiens
  misc_RNA (1)...(19): siRNA sense strand
uggagagccuggcgagaga

SEQ ID NO: 750464 - RNA, 19 nt, Homo sapiens
  misc_RNA (1)...(19): siRNA sense strand
caaucuggcucccaacacu

SEQ ID NO: 750465 - RNA, 19 nt, Homo sapiens
  misc_RNA (1)...(19): siRNA sense strand
uggccugccuggugaaaga

SEQ ID NO: 750466 - RNA, 19 nt, Homo sapiens
  misc_RNA (1)...(19): siRNA sense strand
aaggauggcugcacgaaac

SEQ ID NO: 750467 - RNA, 19 nt, Homo sapiens
  misc_RNA (1)...(19): siRNA sense strand
caagagcaaggagaagaaa

SEQ ID NO: 750468 - RNA, 19 nt, Homo sapiens
  misc_RNA (1)...(19): siRNA sense strand
uggacccgcuggugaagaa

SEQ ID NO: 750469 - RNA, 19 nt, Homo sapiens
  misc_RNA (1)...(19): siRNA sense strand
uggaaaagauggucccaaa

SEQ ID NO: 750470 - RNA, 19 nt, Homo sapiens
  misc_RNA (1)...(19): siRNA sense strand
gggagagccuggagaugac

SEQ ID NO: 750471 - RNA, 19 nt, Homo sapiens
  misc_RNA (1)...(19): siRNA sense strand
cgaaacauaccgguaagug

SEQ ID NO: 750472 - RNA, 19 nt, Homo sapiens
  misc_RNA (1)...(19): siRNA sense strand
ucacguacacugcccugaa

SEQ ID NO: 750473 - RNA, 19 nt, Homo sapiens
  misc_RNA (1)...(19): siRNA sense strand
acggaaggcucccagaaca

SEQ ID NO: 750474 - RNA, 19 nt, Homo sapiens
  misc_RNA (1)...(19): siRNA sense strand
ccacggaaggcucccagaa

SEQ ID NO: 750475 - RNA, 19 nt, Homo sapiens
  misc_RNA (1)...(19): siRNA sense strand
uggcuuccauuucagcuau

SEQ ID NO: 750476 - RNA, 19 nt, Homo sapiens
  misc_RNA (1)...(19): siRNA sense strand
aaagauggugcuaauggaa

SEQ ID NO: 750477 - RNA, 19 nt, Homo sapiens
  misc_RNA (1)...(19): siRNA sense strand
ggaccaaagggacagaaag

SEQ ID NO: 750478 - RNA, 19 nt, Homo sapiens
  misc_RNA (1)...(19): siRNA sense strand
guaaugcaaggaccaaugg

SEQ ID NO: 750479 - RNA, 19 nt, Homo sapiens
  misc_RNA (1)...(19): siRNA sense strand
aauagcagguucacguaca

SEQ ID NO: 750480 - RNA, 19 nt, Homo sapiens
  misc_RNA (1)...(19): siRNA sense strand
agaacagcauugccuaucu

SEQ ID NO: 750481 - RNA, 19 nt, Homo sapiens
  misc_RNA (1)...(19): siRNA sense strand
ccagcaaacguucccaaga

SEQ ID NO: 750482 - RNA, 19 nt, Homo sapiens
  misc_RNA (1)...(19): siRNA sense strand
gaaaagauggucccaaagg

SEQ ID NO: 750483 - RNA, 19 nt, Homo sapiens
  misc_RNA (1)...(19): siRNA sense strand
ggagugacugguccuaaag

SEQ ID NO: 750484 - RNA, 19 nt, Homo sapiens
  misc_RNA (1)...(19): siRNA sense strand
aaagaggugcucccggaaa

SEQ ID NO: 750485 - RNA, 19 nt, Homo sapiens
  misc_RNA (1)...(19): siRNA sense strand
cuggaaagccuggugauga

SEQ ID NO: 750486 - RNA, 19 nt, Homo sapiens
  misc_RNA (1)...(19): siRNA sense strand
guggaagaguggagacuac

SEQ ID NO: 750487 - RNA, 19 nt, Homo sapiens
  misc_RNA (1)...(19): siRNA sense strand
uggcagagauggagaaccu

SEQ ID NO: 750488 - RNA, 19 nt, Homo sapiens
  misc_RNA (1)...(19): siRNA sense strand
caacggugagccuggcaaa

SEQ ID NO: 750489 - RNA, 19 nt, Homo sapiens
  misc_RNA (1)...(19): siRNA sense strand
uggaaaagcuggugaaagg

SEQ ID NO: 750490 - RNA, 19 nt, Homo sapiens
  misc_RNA (1)...(19): siRNA sense strand
cgagaagggagaaguugga

SEQ ID NO: 750491 - RNA, 19 nt, Homo sapiens
  misc_RNA (1)...(19): siRNA sense strand
gaccaaagggacagaaagg

SEQ ID NO: 750492 - RNA, 19 nt, Homo sapiens
  misc_RNA (1)...(19): siRNA sense strand
acacaucugguuuggagaa

SEQ ID NO: 750493 - RNA, 19 nt, Homo sapiens
  misc_RNA (1)...(19): siRNA sense strand
acaaccagauugagagcau

SEQ ID NO: 750494 - RNA, 19 nt, Homo sapiens
  misc_RNA (1)...(19): siRNA sense strand
gaaacuuugcugcccagau

SEQ ID NO: 750495 - RNA, 19 nt, Homo sapiens
  misc_RNA (1)...(19): siRNA sense strand
gauauuguaggacccaaag

SEQ ID NO: 750496 - RNA, 19 nt, Homo sapiens
  misc_RNA (1)...(19): siRNA sense strand
gccggucugcuucuuguaa

SEQ ID NO: 750497 - RNA, 19 nt, Homo sapiens
  misc_RNA (1)...(19): siRNA sense strand
gaaggcucccagaacauca

SEQ ID NO: 750498 - RNA, 19 nt, Homo sapiens
  misc_RNA (1)...(19): siRNA sense strand
cauuucagcuauggagaug

SEQ ID NO: 750499 - RNA, 19 nt, Homo sapiens
  misc_RNA (1)...(19): siRNA sense strand
gacggguccugcaggugaa

SEQ ID NO: 750500 - RNA, 19 nt, Homo sapiens
  misc_RNA (1)...(19): siRNA sense strand
gggugaaccugguauugcu

SEQ ID NO: 750501 - RNA, 19 nt, Homo sapiens
  misc_RNA (1)...(19): siRNA sense strand
ggaucguggugacaaaggu

SEQ ID NO: 750502 - RNA, 19 nt, Homo sapiens
  misc_RNA (1)...(19): siRNA sense strand
ggaaagccuggugaugaug

SEQ ID NO: 750503 - RNA, 19 nt, Homo sapiens
  misc_RNA (1)...(19): siRNA sense strand
agaaggcccugcucaucca

SEQ ID NO: 750504 - RNA, 19 nt, Homo sapiens
  misc_RNA (1)...(19): siRNA sense strand
ggucuugguggaaacuuug

SEQ ID NO: 750505 - RNA, 19 nt, Homo sapiens
  misc_RNA (1)...(19): siRNA sense strand
cgguaacccuggaacagau

SEQ ID NO: 750506 - RNA, 19 nt, Homo sapiens
  misc_RNA (1)...(19): siRNA sense strand
ggauauuguaggacccaaa

SEQ ID NO: 750507 - RNA, 19 nt, Homo sapiens
  misc_RNA (1)...(19): siRNA sense strand
caagacuguuaucgaguac

SEQ ID NO: 750508 - RNA, 19 nt, Homo sapiens
  misc_RNA (1)...(19): siRNA sense strand
ucaccuaccacugcaagaa

SEQ ID NO: 750509 - RNA, 19 nt, Homo sapiens
  misc_RNA (1)...(19): siRNA sense strand
gcucccagaacaucaccua

SEQ ID NO: 750510 - RNA, 19 nt, Homo sapiens
  misc_RNA (1)...(19): siRNA sense strand
aguggagacuacuggauug

SEQ ID NO: 750511 - RNA, 19 nt, Homo sapiens
  misc_RNA (1)...(19): siRNA sense strand
ggaccucguggcagagaug

SEQ ID NO: 750512 - RNA, 19 nt, Homo sapiens
  misc_RNA (1)...(19): siRNA sense strand
ccaugaagguuuucugcaa

SEQ ID NO: 750513 - RNA, 19 nt, Homo sapiens
  misc_RNA (1)...(19): siRNA sense strand
ggaguaaugcaaggaccaa

SEQ ID NO: 750514 - RNA, 19 nt, Homo sapiens
  misc_RNA (1)...(19): siRNA sense strand
cauggagacuggcgagacu

SEQ ID NO: 750515 - RNA, 19 nt, Homo sapiens
  misc_RNA (1)...(19): siRNA sense strand
gaucgaggaugaccggaua

SEQ ID NO: 750516 - RNA, 19 nt, Homo sapiens
  misc_RNA (1)...(19): siRNA sense strand
ggacaccaacuccuucuuc

SEQ ID NO: 750517 - RNA, 19 nt, Homo sapiens
  misc_RNA (1)...(19): siRNA sense strand
gaguggugaucgaggauga

SEQ ID NO: 750518 - RNA, 19 nt, Homo sapiens
  misc_RNA (1)...(19): siRNA sense strand
cuacagcgaagacaagaug

SEQ ID NO: 750519 - RNA, 19 nt, Homo sapiens
  misc_RNA (1)...(19): siRNA sense strand
ggauagacgacgugcugaa

SEQ ID NO: 750520 - RNA, 19 nt, Homo sapiens
  misc_RNA (1)...(19): siRNA sense strand
gcuccgaccucuccuucag

SEQ ID NO: 750521 - RNA, 19 nt, Homo sapiens
  misc_RNA (1)...(19): siRNA sense strand
ccaagcgaguggugaucga

SEQ ID NO: 750522 - RNA, 19 nt, Homo sapiens
  misc_RNA (1)...(19): siRNA sense strand
gauagacgacgugcugaag

SEQ ID NO: 750523 - RNA, 19 nt, Homo sapiens
  misc_RNA (1)...(19): siRNA sense strand
gagccaagcgaguggugau

SEQ ID NO: 750524 - RNA, 19 nt, Homo sapiens
  misc_RNA (1)...(19): siRNA sense strand
gaagaucacugaaagaaau

SEQ ID NO: 750525 - RNA, 19 nt, Homo sapiens
  misc_RNA (1)...(19): siRNA sense strand
ggaccagucugccuaugua

SEQ ID NO: 750526 - RNA, 19 nt, Homo sapiens
  misc_RNA (1)...(19): siRNA sense strand
gauauaauccugaaucgaa

SEQ ID NO: 750527 - RNA, 19 nt, Homo sapiens
  misc_RNA (1)...(19): siRNA sense strand
gcaaguacuucaaggauag

SEQ ID NO: 750528 - RNA, 19 nt, Homo sapiens
  misc_RNA (1)...(19): siRNA sense strand
gaagagcuauggcuagaag

SEQ ID NO: 750529 - RNA, 19 nt, Homo sapiens
  misc_RNA (1)...(19): siRNA sense strand
aaggauagcaggaauauaa

SEQ ID NO: 750530 - RNA, 19 nt, Homo sapiens
  misc_RNA (1)...(19): siRNA sense strand
gaacaaacgguacaauguc

SEQ ID NO: 750531 - RNA, 19 nt, Homo sapiens
  misc_RNA (1)...(19): siRNA sense strand
ccuacucugugaagaauaa

SEQ ID NO: 750532 - RNA, 19 nt, Homo sapiens
  misc_RNA (1)...(19): siRNA sense strand
ugacagcucugagacaaug

SEQ ID NO: 750533 - RNA, 19 nt, Homo sapiens
  misc_RNA (1)...(19): siRNA sense strand
agagaaggcucccaaaguc

SEQ ID NO: 750534 - RNA, 19 nt, Homo sapiens
  misc_RNA (1)...(19): siRNA sense strand
gaucugagacccuaaagca

SEQ ID NO: 750535 - RNA, 19 nt, Homo sapiens
  misc_RNA (1)...(19): siRNA sense strand
guucugaucuugccuucau

SEQ ID NO: 750536 - RNA, 19 nt, Homo sapiens
  misc_RNA (1)...(19): siRNA sense strand
gccgugacauugauauaau

SEQ ID NO: 750537 - RNA, 19 nt, Homo sapiens
  misc_RNA (1)...(19): siRNA sense strand
ugcaaguacuucaaggaua

SEQ ID NO: 750538 - RNA, 19 nt, Homo sapiens
  misc_RNA (1)...(19): siRNA sense strand
ugcuaaagcugaccaugaa

SEQ ID NO: 750539 - RNA, 19 nt, Homo sapiens
  misc_RNA (1)...(19): siRNA sense strand
cugagacccuaaagcauuu

SEQ ID NO: 750540 - RNA, 19 nt, Homo sapiens
  misc_RNA (1)...(19): siRNA sense strand
ugaacaaacgguacaaugu

SEQ ID NO: 750541 - RNA, 19 nt, Homo sapiens
  misc_RNA (1)...(19): siRNA sense strand
gacccugaaucucuccaaa

SEQ ID NO: 750542 - RNA, 19 nt, Homo sapiens
  misc_RNA (1)...(19): siRNA sense strand
aaauggagaugcuaaagcu

SEQ ID NO: 750543 - RNA, 19 nt, Homo sapiens
  misc_RNA (1)...(19): siRNA sense strand
gcauuuaguccugcaauuc

SEQ ID NO: 750544 - RNA, 19 nt, Homo sapiens
  misc_RNA (1)...(19): siRNA sense strand
aaugaaacccugcaaggaa

SEQ ID NO: 750545 - RNA, 19 nt, Homo sapiens
  misc_RNA (1)...(19): siRNA sense strand
ucgaagagcuauggcuaga

SEQ ID NO: 750546 - RNA, 19 nt, Homo sapiens
  misc_RNA (1)...(19): siRNA sense strand
gaugggccgugacauugau

SEQ ID NO: 750547 - RNA, 19 nt, Homo sapiens
  misc_RNA (1)...(19): siRNA sense strand
gugcauugccugaaacuca

SEQ ID NO: 750548 - RNA, 19 nt, Homo sapiens
  misc_RNA (1)...(19): siRNA sense strand
gagaaggcucccaaaguca

SEQ ID NO: 750549 - RNA, 19 nt, Homo sapiens
  misc_RNA (1)...(19): siRNA sense strand
augaaacccugcaaggaaa

SEQ ID NO: 750550 - RNA, 19 nt, Homo sapiens
  misc_RNA (1)...(19): siRNA sense strand
gcccuacucugugaagaau

SEQ ID NO: 750551 - RNA, 19 nt, Homo sapiens
  misc_RNA (1)...(19): siRNA sense strand
gcggaacacacaagaugaa

SEQ ID NO: 750552 - RNA, 19 nt, Homo sapiens
  misc_RNA (1)...(19): siRNA sense strand
ucugagacccuaaagcauu

SEQ ID NO: 750553 - RNA, 19 nt, Homo sapiens
  misc_RNA (1)...(19): siRNA sense strand
uccagaaucuccgcuuuga

SEQ ID NO: 750554 - RNA, 19 nt, Homo sapiens
  misc_RNA (1)...(19): siRNA sense strand
caaugaaacccugcaagga

SEQ ID NO: 750555 - RNA, 19 nt, Homo sapiens
  misc_RNA (1)...(19): siRNA sense strand
gacauugacagcucugaga

SEQ ID NO: 750556 - RNA, 19 nt, Homo sapiens
  misc_RNA (1)...(19): siRNA sense strand
ccuggacggccgagaguua

SEQ ID NO: 750557 - RNA, 19 nt, Homo sapiens
  misc_RNA (1)...(19): siRNA sense strand
ggccgugacauugauauaa

SEQ ID NO: 750558 - RNA, 19 nt, Homo sapiens
  misc_RNA (1)...(19): siRNA sense strand
ugaagaucacugaaagaaa

SEQ ID NO: 750559 - RNA, 19 nt, Homo sapiens
  misc_RNA (1)...(19): siRNA sense strand
ccgcaccagugauuguuga

SEQ ID NO: 750560 - RNA, 19 nt, Homo sapiens
  misc_RNA (1)...(19): siRNA sense strand
ggaguugggcaaggugaaa

SEQ ID NO: 750561 - RNA, 19 nt, Homo sapiens
  misc_RNA (1)...(19): siRNA sense strand
ucaaggauagcaggaauau

SEQ ID NO: 750562 - RNA, 19 nt, Homo sapiens
  misc_RNA (1)...(19): siRNA sense strand
uuacugcgcccuacucugu

SEQ ID NO: 750563 - RNA, 19 nt, Homo sapiens
  misc_RNA (1)...(19): siRNA sense strand
ggccaaauggagaugcuaa

SEQ ID NO: 750564 - RNA, 19 nt, Homo sapiens
  misc_RNA (1)...(19): siRNA sense strand
uaaagcugaccaugaacaa

SEQ ID NO: 750565 - RNA, 19 nt, Homo sapiens
  misc_RNA (1)...(19): siRNA sense strand
guacaaugucucccagcaa

SEQ ID NO: 750566 - RNA, 19 nt, Homo sapiens
  misc_RNA (1)...(19): siRNA sense strand
gucaagacccugaaucucu

SEQ ID NO: 750567 - RNA, 19 nt, Homo sapiens
  misc_RNA (1)...(19): siRNA sense strand
guuauccgcaccagugauu

SEQ ID NO: 750568 - RNA, 19 nt, Homo sapiens
  misc_RNA (1)...(19): siRNA sense strand
cagugauuguugacauuga

SEQ ID NO: 750569 - RNA, 19 nt, Homo sapiens
  misc_RNA (1)...(19): siRNA sense strand
uccagucugugcaucauga

SEQ ID NO: 750570 - RNA, 19 nt, Homo sapiens
  misc_RNA (1)...(19): siRNA sense strand
gaugaaaacaugaggaaau

SEQ ID NO: 750571 - RNA, 19 nt, Homo sapiens
  misc_RNA (1)...(19): siRNA sense strand
ucuccagaaucuccgcuuu

SEQ ID NO: 750572 - RNA, 19 nt, Homo sapiens
  misc_RNA (1)...(19): siRNA sense strand
aaacguggacucccucagu

SEQ ID NO: 750573 - RNA, 19 nt, Homo sapiens
  misc_RNA (1)...(19): siRNA sense strand
guugaagccaggccaaaug

SEQ ID NO: 750574 - RNA, 19 nt, Homo sapiens
  misc_RNA (1)...(19): siRNA sense strand
gggccgugacauugauaua

SEQ ID NO: 750575 - RNA, 19 nt, Homo sapiens
  misc_RNA (1)...(19): siRNA sense strand
gcaauuccagucugugcau

SEQ ID NO: 750576 - RNA, 19 nt, Homo sapiens
  misc_RNA (1)...(19): siRNA sense strand
cuucaaggauagcaggaau

SEQ ID NO: 750577 - RNA, 19 nt, Homo sapiens
  misc_RNA (1)...(19): siRNA sense strand
caccagugauuguugacau

SEQ ID NO: 750578 - RNA, 19 nt, Homo sapiens
  misc_RNA (1)...(19): siRNA sense strand
cugaagaucacugaaagaa

SEQ ID NO: 750579 - RNA, 19 nt, Homo sapiens
  misc_RNA (1)...(19): siRNA sense strand
caaagucaagacccugaau

SEQ ID NO: 750580 - RNA, 19 nt, Homo sapiens
  misc_RNA (1)...(19): siRNA sense strand
gaccagucugccuauguaa

SEQ ID NO: 750581 - RNA, 19 nt, Homo sapiens
  misc_RNA (1)...(19): siRNA sense strand
ggccgcaauuccagucugu

SEQ ID NO: 750582 - RNA, 19 nt, Homo sapiens
  misc_RNA (1)...(19): siRNA sense strand
gaacacacaagaugaaaac

SEQ ID NO: 750583 - RNA, 19 nt, Homo sapiens
  misc_RNA (1)...(19): siRNA sense strand
auguggaccuucaucacua

SEQ ID NO: 750584 - RNA, 19 nt, Homo sapiens
  misc_RNA (1)...(19): siRNA sense strand
ggacucccucagugcauug

SEQ ID NO: 750585 - RNA, 19 nt, Homo sapiens
  misc_RNA (1)...(19): siRNA sense strand
gugcaaguacuucaaggau

SEQ ID NO: 750586 - RNA, 19 nt, Homo sapiens
  misc_RNA (1)...(19): siRNA sense strand
ggaaaacuuuacuggaucu

SEQ ID NO: 750587 - RNA, 19 nt, Homo sapiens
  misc_RNA (1)...(19): siRNA sense strand
aacaaacgguacaaugucu

SEQ ID NO: 750588 - RNA, 19 nt, Homo sapiens
  misc_RNA (1)...(19): siRNA sense strand
gccaaauggagaugcuaaa

SEQ ID NO: 750589 - RNA, 19 nt, Homo sapiens
  misc_RNA (1)...(19): siRNA sense strand
caaggauagcaggaauaua

SEQ ID NO: 750590 - RNA, 19 nt, Homo sapiens
  misc_RNA (1)...(19): siRNA sense strand
aaggaaaacuuuacuggau

SEQ ID NO: 750591 - RNA, 19 nt, Homo sapiens
  misc_RNA (1)...(19): siRNA sense strand
ccagucugccuauguaagu

SEQ ID NO: 750592 - RNA, 19 nt, Homo sapiens
  misc_RNA (1)...(19): siRNA sense strand
agaaggcucccaaagucaa

SEQ ID NO: 750593 - RNA, 19 nt, Homo sapiens
  misc_RNA (1)...(19): siRNA sense strand
gaaaugguucaaggucaca

SEQ ID NO: 750594 - RNA, 19 nt, Homo sapiens
  misc_RNA (1)...(19): siRNA sense strand
caaauggagaugcuaaagc

SEQ ID NO: 750595 - RNA, 19 nt, Homo sapiens
  misc_RNA (1)...(19): siRNA sense strand
ggcggaacacacaagauga

SEQ ID NO: 750596 - RNA, 19 nt, Homo sapiens
  misc_RNA (1)...(19): siRNA sense strand
ccaaauggagaugcuaaag

SEQ ID NO: 750597 - RNA, 19 nt, Homo sapiens
  misc_RNA (1)...(19): siRNA sense strand
gaaacucagcaugacuuca

SEQ ID NO: 750598 - RNA, 19 nt, Homo sapiens
  misc_RNA (1)...(19): siRNA sense strand
cacacaagaugaaaacaug

SEQ ID NO: 750599 - RNA, 19 nt, Homo sapiens
  misc_RNA (1)...(19): siRNA sense strand
cuugaugggccgugacauu

SEQ ID NO: 750600 - RNA, 19 nt, Homo sapiens
  misc_RNA (1)...(19): siRNA sense strand
cuaaagcugaccaugaaca

SEQ ID NO: 750601 - RNA, 19 nt, Homo sapiens
  misc_RNA (1)...(19): siRNA sense strand
gaguuauccgcaccaguga

SEQ ID NO: 750602 - RNA, 19 nt, Homo sapiens
  misc_RNA (1)...(19): siRNA sense strand
gcugccacccugaagauca

SEQ ID NO: 750603 - RNA, 19 nt, Homo sapiens
  misc_RNA (1)...(19): siRNA sense strand
gaagaucacugaaagaaau

SEQ ID NO: 750604 - RNA, 19 nt, Homo sapiens
  misc_RNA (1)...(19): siRNA sense strand
ggaccagucugccuaugua

SEQ ID NO: 750605 - RNA, 19 nt, Homo sapiens
  misc_RNA (1)...(19): siRNA sense strand
gauauaauccugaaucgaa

SEQ ID NO: 750606 - RNA, 19 nt, Homo sapiens
  misc_RNA (1)...(19): siRNA sense strand
gcaaguacuucaaggauag

SEQ ID NO: 750607 - RNA, 19 nt, Homo sapiens
  misc_RNA (1)...(19): siRNA sense strand
gaagagcuauggcuagaag

SEQ ID NO: 750608 - RNA, 19 nt, Homo sapiens
  misc_RNA (1)...(19): siRNA sense strand
aaggauagcaggaauauaa

SEQ ID NO: 750609 - RNA, 19 nt, Homo sapiens
  misc_RNA (1)...(19): siRNA sense strand
gaacaaacgguacaauguc

SEQ ID NO: 750610 - RNA, 19 nt, Homo sapiens
  misc_RNA (1)...(19): siRNA sense strand
ccuacucugugaagaauaa

SEQ ID NO: 750611 - RNA, 19 nt, Homo sapiens
  misc_RNA (1)...(19): siRNA sense strand
ugacagcucugagacaaug

SEQ ID NO: 750612 - RNA, 19 nt, Homo sapiens
  misc_RNA (1)...(19): siRNA sense strand
agagaaggcucccaaaguc

SEQ ID NO: 750613 - RNA, 19 nt, Homo sapiens
  misc_RNA (1)...(19): siRNA sense strand
gaucugagacccuaaagca

SEQ ID NO: 750614 - RNA, 19 nt, Homo sapiens
  misc_RNA (1)...(19): siRNA sense strand
gccgugacauugauauaau

SEQ ID NO: 750615 - RNA, 19 nt, Homo sapiens
  misc_RNA (1)...(19): siRNA sense strand
ugcaaguacuucaaggaua

SEQ ID NO: 750616 - RNA, 19 nt, Homo sapiens
  misc_RNA (1)...(19): siRNA sense strand
ugcuaaagcugaccaugaa

SEQ ID NO: 750617 - RNA, 19 nt, Homo sapiens
  misc_RNA (1)...(19): siRNA sense strand
cugagacccuaaagcauuu

SEQ ID NO: 750618 - RNA, 19 nt, Homo sapiens
  misc_RNA (1)...(19): siRNA sense strand
ugaacaaacgguacaaugu

SEQ ID NO: 750619 - RNA, 19 nt, Homo sapiens
  misc_RNA (1)...(19): siRNA sense strand
gacccugaaucucuccaaa

SEQ ID NO: 750620 - RNA, 19 nt, Homo sapiens
  misc_RNA (1)...(19): siRNA sense strand
aaauggagaugcuaaagcu

SEQ ID NO: 750621 - RNA, 19 nt, Homo sapiens
  misc_RNA (1)...(19): siRNA sense strand
gcauuuaguccugcaauuc

SEQ ID NO: 750622 - RNA, 19 nt, Homo sapiens
  misc_RNA (1)...(19): siRNA sense strand
aaugaaacccugcaaggaa

SEQ ID NO: 750623 - RNA, 19 nt, Homo sapiens
  misc_RNA (1)...(19): siRNA sense strand
ucgaagagcuauggcuaga

SEQ ID NO: 750624 - RNA, 19 nt, Homo sapiens
  misc_RNA (1)...(19): siRNA sense strand
gaugggccgugacauugau

SEQ ID NO: 750625 - RNA, 19 nt, Homo sapiens
  misc_RNA (1)...(19): siRNA sense strand
gugcauugccugaaacuca

SEQ ID NO: 750626 - RNA, 19 nt, Homo sapiens
  misc_RNA (1)...(19): siRNA sense strand
gagaaggcucccaaaguca

SEQ ID NO: 750627 - RNA, 19 nt, Homo sapiens
  misc_RNA (1)...(19): siRNA sense strand
augaaacccugcaaggaaa

SEQ ID NO: 750628 - RNA, 19 nt, Homo sapiens
  misc_RNA (1)...(19): siRNA sense strand
gcccuacucugugaagaau

SEQ ID NO: 750629 - RNA, 19 nt, Homo sapiens
  misc_RNA (1)...(19): siRNA sense strand
gcggaacacacaagaugaa

SEQ ID NO: 750630 - RNA, 19 nt, Homo sapiens
  misc_RNA (1)...(19): siRNA sense strand
ucugagacccuaaagcauu

SEQ ID NO: 750631 - RNA, 19 nt, Homo sapiens
  misc_RNA (1)...(19): siRNA sense strand
uccagaaucuccgcuuuga

SEQ ID NO: 750632 - RNA, 19 nt, Homo sapiens
  misc_RNA (1)...(19): siRNA sense strand
caaugaaacccugcaagga

SEQ ID NO: 750633 - RNA, 19 nt, Homo sapiens
  misc_RNA (1)...(19): siRNA sense strand
gacauugacagcucugaga

SEQ ID NO: 750634 - RNA, 19 nt, Homo sapiens
  misc_RNA (1)...(19): siRNA sense strand
ccuggacggccgagaguua

SEQ ID NO: 750635 - RNA, 19 nt, Homo sapiens
  misc_RNA (1)...(19): siRNA sense strand
ggccgugacauugauauaa

SEQ ID NO: 750636 - RNA, 19 nt, Homo sapiens
  misc_RNA (1)...(19): siRNA sense strand
ugaagaucacugaaagaaa

SEQ ID NO: 750637 - RNA, 19 nt, Homo sapiens
  misc_RNA (1)...(19): siRNA sense strand
ccgcaccagugauuguuga

SEQ ID NO: 750638 - RNA, 19 nt, Homo sapiens
  misc_RNA (1)...(19): siRNA sense strand
ggaguugggcaaggugaaa

SEQ ID NO: 750639 - RNA, 19 nt, Homo sapiens
  misc_RNA (1)...(19): siRNA sense strand
ucaaggauagcaggaauau

SEQ ID NO: 750640 - RNA, 19 nt, Homo sapiens
  misc_RNA (1)...(19): siRNA sense strand
uuacugcgcccuacucugu

SEQ ID NO: 750641 - RNA, 19 nt, Homo sapiens
  misc_RNA (1)...(19): siRNA sense strand
ggccaaauggagaugcuaa

SEQ ID NO: 750642 - RNA, 19 nt, Homo sapiens
  misc_RNA (1)...(19): siRNA sense strand
uaaagcugaccaugaacaa

SEQ ID NO: 750643 - RNA, 19 nt, Homo sapiens
  misc_RNA (1)...(19): siRNA sense strand
guacaaugucucccagcaa

SEQ ID NO: 750644 - RNA, 19 nt, Homo sapiens
  misc_RNA (1)...(19): siRNA sense strand
gucaagacccugaaucucu

SEQ ID NO: 750645 - RNA, 19 nt, Homo sapiens
  misc_RNA (1)...(19): siRNA sense strand
guuauccgcaccagugauu

SEQ ID NO: 750646 - RNA, 19 nt, Homo sapiens
  misc_RNA (1)...(19): siRNA sense strand
gaugaaaacaugaggaaau

SEQ ID NO: 750647 - RNA, 19 nt, Homo sapiens
  misc_RNA (1)...(19): siRNA sense strand
cagugauuguugacauuga

SEQ ID NO: 750648 - RNA, 19 nt, Homo sapiens
  misc_RNA (1)...(19): siRNA sense strand
guugaagccaggccaaaug

SEQ ID NO: 750649 - RNA, 19 nt, Homo sapiens
  misc_RNA (1)...(19): siRNA sense strand
aaacguggacucccucagu

SEQ ID NO: 750650 - RNA, 19 nt, Homo sapiens
  misc_RNA (1)...(19): siRNA sense strand
ucuccagaaucuccgcuuu

SEQ ID NO: 750651 - RNA, 19 nt, Homo sapiens
  misc_RNA (1)...(19): siRNA sense strand
gggccgugacauugauaua

SEQ ID NO: 750652 - RNA, 19 nt, Homo sapiens
  misc_RNA (1)...(19): siRNA sense strand
cuucaaggauagcaggaau

SEQ ID NO: 750653 - RNA, 19 nt, Homo sapiens
  misc_RNA (1)...(19): siRNA sense strand
caccagugauuguugacau

SEQ ID NO: 750654 - RNA, 19 nt, Homo sapiens
  misc_RNA (1)...(19): siRNA sense strand
cugaagaucacugaaagaa

SEQ ID NO: 750655 - RNA, 19 nt, Homo sapiens
  misc_RNA (1)...(19): siRNA sense strand
caaagucaagacccugaau

SEQ ID NO: 750656 - RNA, 19 nt, Homo sapiens
  misc_RNA (1)...(19): siRNA sense strand
gaccagucugccuauguaa

SEQ ID NO: 750657 - RNA, 19 nt, Homo sapiens
  misc_RNA (1)...(19): siRNA sense strand
gaacacacaagaugaaaac

SEQ ID NO: 750658 - RNA, 19 nt, Homo sapiens
  misc_RNA (1)...(19): siRNA sense strand
ggacucccucagugcauug

SEQ ID NO: 750659 - RNA, 19 nt, Homo sapiens
  misc_RNA (1)...(19): siRNA sense strand
gugcaaguacuucaaggau

SEQ ID NO: 750660 - RNA, 19 nt, Homo sapiens
  misc_RNA (1)...(19): siRNA sense strand
ggaaaacuuuacuggaucu

SEQ ID NO: 750661 - RNA, 19 nt, Homo sapiens
  misc_RNA (1)...(19): siRNA sense strand
aacaaacgguacaaugucu

SEQ ID NO: 750662 - RNA, 19 nt, Homo sapiens
  misc_RNA (1)...(19): siRNA sense strand
ccagucugccuauguaagu

SEQ ID NO: 750663 - RNA, 19 nt, Homo sapiens
  misc_RNA (1)...(19): siRNA sense strand
caaggauagcaggaauaua

SEQ ID NO: 750664 - RNA, 19 nt, Homo sapiens
  misc_RNA (1)...(19): siRNA sense strand
gccaaauggagaugcuaaa

SEQ ID NO: 750665 - RNA, 19 nt, Homo sapiens
  misc_RNA (1)...(19): siRNA sense strand
aaggaaaacuuuacuggau

SEQ ID NO: 750666 - RNA, 19 nt, Homo sapiens
  misc_RNA (1)...(19): siRNA sense strand
caaauggagaugcuaaagc

SEQ ID NO: 750667 - RNA, 19 nt, Homo sapiens
  misc_RNA (1)...(19): siRNA sense strand
gaaaugguucaaggucaca

SEQ ID NO: 750668 - RNA, 19 nt, Homo sapiens
  misc_RNA (1)...(19): siRNA sense strand
agaaggcucccaaagucaa

SEQ ID NO: 750669 - RNA, 19 nt, Homo sapiens
  misc_RNA (1)...(19): siRNA sense strand
ggcggaacacacaagauga

SEQ ID NO: 750670 - RNA, 19 nt, Homo sapiens
  misc_RNA (1)...(19): siRNA sense strand
gaaacucagcaugacuuca

SEQ ID NO: 750671 - RNA, 19 nt, Homo sapiens
  misc_RNA (1)...(19): siRNA sense strand
cacacaagaugaaaacaug

SEQ ID NO: 750672 - RNA, 19 nt, Homo sapiens
  misc_RNA (1)...(19): siRNA sense strand
ccaaauggagaugcuaaag

SEQ ID NO: 750673 - RNA, 19 nt, Homo sapiens
  misc_RNA (1)...(19): siRNA sense strand
cuugaugggccgugacauu

SEQ ID NO: 750674 - RNA, 19 nt, Homo sapiens
  misc_RNA (1)...(19): siRNA sense strand
cuaaagcugaccaugaaca

SEQ ID NO: 750675 - RNA, 19 nt, Homo sapiens
  misc_RNA (1)...(19): siRNA sense strand
gaguuauccgcaccaguga

SEQ ID NO: 750676 - RNA, 19 nt, Homo sapiens
  misc_RNA (1)...(19): siRNA sense strand
gcugccacccugaagauca

SEQ ID NO: 750677 - RNA, 19 nt, Homo sapiens
  misc_RNA (1)...(19): siRNA sense strand
gaagaucacugaaagaaau

SEQ ID NO: 750678 - RNA, 19 nt, Homo sapiens
  misc_RNA (1)...(19): siRNA sense strand
gauauaauccugaaucgaa

SEQ ID NO: 750679 - RNA, 19 nt, Homo sapiens
  misc_RNA (1)...(19): siRNA sense strand
gaacaaacgguacaauguc

SEQ ID NO: 750680 - RNA, 19 nt, Homo sapiens
  misc_RNA (1)...(19): siRNA sense strand
ccuacucugugaagaauaa

SEQ ID NO: 750681 - RNA, 19 nt, Homo sapiens
  misc_RNA (1)...(19): siRNA sense strand
agagaaggcucccaaaguc

SEQ ID NO: 750682 - RNA, 19 nt, Homo sapiens
  misc_RNA (1)...(19): siRNA sense strand
gccgugacauugauauaau

SEQ ID NO: 750683 - RNA, 19 nt, Homo sapiens
  misc_RNA (1)...(19): siRNA sense strand
ugcuaaagcugaccaugaa

SEQ ID NO: 750684 - RNA, 19 nt, Homo sapiens
  misc_RNA (1)...(19): siRNA sense strand
ugaacaaacgguacaaugu

SEQ ID NO: 750685 - RNA, 19 nt, Homo sapiens
  misc_RNA (1)...(19): siRNA sense strand
aaauggagaugcuaaagcu

SEQ ID NO: 750686 - RNA, 19 nt, Homo sapiens
  misc_RNA (1)...(19): siRNA sense strand
gaugggccgugacauugau

SEQ ID NO: 750687 - RNA, 19 nt, Homo sapiens
  misc_RNA (1)...(19): siRNA sense strand
gagaaggcucccaaaguca

SEQ ID NO: 750688 - RNA, 19 nt, Homo sapiens
  misc_RNA (1)...(19): siRNA sense strand
gcccuacucugugaagaau

SEQ ID NO: 750689 - RNA, 19 nt, Homo sapiens
  misc_RNA (1)...(19): siRNA sense strand
gcggaacacacaagaugaa

SEQ ID NO: 750690 - RNA, 19 nt, Homo sapiens
  misc_RNA (1)...(19): siRNA sense strand
uccagaaucuccgcuuuga

SEQ ID NO: 750691 - RNA, 19 nt, Homo sapiens
  misc_RNA (1)...(19): siRNA sense strand
ggccgugacauugauauaa

SEQ ID NO: 750692 - RNA, 19 nt, Homo sapiens
  misc_RNA (1)...(19): siRNA sense strand
ugaagaucacugaaagaaa

SEQ ID NO: 750693 - RNA, 19 nt, Homo sapiens
  misc_RNA (1)...(19): siRNA sense strand
uuacugcgcccuacucugu

SEQ ID NO: 750694 - RNA, 19 nt, Homo sapiens
  misc_RNA (1)...(19): siRNA sense strand
ggccaaauggagaugcuaa

SEQ ID NO: 750695 - RNA, 19 nt, Homo sapiens
  misc_RNA (1)...(19): siRNA sense strand
uaaagcugaccaugaacaa

SEQ ID NO: 750696 - RNA, 19 nt, Homo sapiens
  misc_RNA (1)...(19): siRNA sense strand
guacaaugucucccagcaa

SEQ ID NO: 750697 - RNA, 19 nt, Homo sapiens
  misc_RNA (1)...(19): siRNA sense strand
gaugaaaacaugaggaaau

SEQ ID NO: 750698 - RNA, 19 nt, Homo sapiens
  misc_RNA (1)...(19): siRNA sense strand
guugaagccaggccaaaug

SEQ ID NO: 750699 - RNA, 19 nt, Homo sapiens
  misc_RNA (1)...(19): siRNA sense strand
ucuccagaaucuccgcuuu

SEQ ID NO: 750700 - RNA, 19 nt, Homo sapiens
  misc_RNA (1)...(19): siRNA sense strand
gggccgugacauugauaua

SEQ ID NO: 750701 - RNA, 19 nt, Homo sapiens
  misc_RNA (1)...(19): siRNA sense strand
cugaagaucacugaaagaa

SEQ ID NO: 750702 - RNA, 19 nt, Homo sapiens
  misc_RNA (1)...(19): siRNA sense strand
gaacacacaagaugaaaac

SEQ ID NO: 750703 - RNA, 19 nt, Homo sapiens
  misc_RNA (1)...(19): siRNA sense strand
aacaaacgguacaaugucu

SEQ ID NO: 750704 - RNA, 19 nt, Homo sapiens
  misc_RNA (1)...(19): siRNA sense strand
gccaaauggagaugcuaaa

SEQ ID NO: 750705 - RNA, 19 nt, Homo sapiens
  misc_RNA (1)...(19): siRNA sense strand
caaauggagaugcuaaagc

SEQ ID NO: 750706 - RNA, 19 nt, Homo sapiens
  misc_RNA (1)...(19): siRNA sense strand
agaaggcucccaaagucaa

SEQ ID NO: 750707 - RNA, 19 nt, Homo sapiens
  misc_RNA (1)...(19): siRNA sense strand
gaaaugguucaaggucaca

SEQ ID NO: 750708 - RNA, 19 nt, Homo sapiens
  misc_RNA (1)...(19): siRNA sense strand
ccaaauggagaugcuaaag

SEQ ID NO: 750709 - RNA, 19 nt, Homo sapiens
  misc_RNA (1)...(19): siRNA sense strand
ggcggaacacacaagauga

SEQ ID NO: 750710 - RNA, 19 nt, Homo sapiens
  misc_RNA (1)...(19): siRNA sense strand
cacacaagaugaaaacaug

SEQ ID NO: 750711 - RNA, 19 nt, Homo sapiens
  misc_RNA (1)...(19): siRNA sense strand
cuaaagcugaccaugaaca

SEQ ID NO: 750712 - RNA, 19 nt, Homo sapiens
  misc_RNA (1)...(19): siRNA sense strand
gcugccacccugaagauca

SEQ ID NO: 750713 - RNA, 19 nt, Homo sapiens
  misc_RNA (1)...(19): siRNA sense strand
cuugaugggccgugacauu

SEQ ID NO: 750714 - RNA, 19 nt, Homo sapiens
  misc_RNA (1)...(19): siRNA sense strand
gaagaucacugaaagaaau

SEQ ID NO: 750715 - RNA, 19 nt, Homo sapiens
  misc_RNA (1)...(19): siRNA sense strand
ggaccagucugccuaugua

SEQ ID NO: 750716 - RNA, 19 nt, Homo sapiens
  misc_RNA (1)...(19): siRNA sense strand
gauauaauccugaaucgaa

SEQ ID NO: 750717 - RNA, 19 nt, Homo sapiens
  misc_RNA (1)...(19): siRNA sense strand
gcaaguacuucaaggauag

SEQ ID NO: 750718 - RNA, 19 nt, Homo sapiens
  misc_RNA (1)...(19): siRNA sense strand
gaagagcuauggcuagaag

SEQ ID NO: 750719 - RNA, 19 nt, Homo sapiens
  misc_RNA (1)...(19): siRNA sense strand
aaggauagcaggaauauaa

SEQ ID NO: 750720 - RNA, 19 nt, Homo sapiens
  misc_RNA (1)...(19): siRNA sense strand
gaacaaacgguacaauguc

SEQ ID NO: 750721 - RNA, 19 nt, Homo sapiens
  misc_RNA (1)...(19): siRNA sense strand
ccuacucugugaagaauaa

SEQ ID NO: 750722 - RNA, 19 nt, Homo sapiens
  misc_RNA (1)...(19): siRNA sense strand
ugacagcucugagacaaug

SEQ ID NO: 750723 - RNA, 19 nt, Homo sapiens
  misc_RNA (1)...(19): siRNA sense strand
agagaaggcucccaaaguc

SEQ ID NO: 750724 - RNA, 19 nt, Homo sapiens
  misc_RNA (1)...(19): siRNA sense strand
gaucugagacccuaaagca

SEQ ID NO: 750725 - RNA, 19 nt, Homo sapiens
  misc_RNA (1)...(19): siRNA sense strand
gccgugacauugauauaau

SEQ ID NO: 750726 - RNA, 19 nt, Homo sapiens
  misc_RNA (1)...(19): siRNA sense strand
ugcaaguacuucaaggaua

SEQ ID NO: 750727 - RNA, 19 nt, Homo sapiens
  misc_RNA (1)...(19): siRNA sense strand
ugcuaaagcugaccaugaa

SEQ ID NO: 750728 - RNA, 19 nt, Homo sapiens
  misc_RNA (1)...(19): siRNA sense strand
cugagacccuaaagcauuu

SEQ ID NO: 750729 - RNA, 19 nt, Homo sapiens
  misc_RNA (1)...(19): siRNA sense strand
ugaacaaacgguacaaugu

SEQ ID NO: 750730 - RNA, 19 nt, Homo sapiens
  misc_RNA (1)...(19): siRNA sense strand
gacccugaaucucuccaaa

SEQ ID NO: 750731 - RNA, 19 nt, Homo sapiens
  misc_RNA (1)...(19): siRNA sense strand
aaauggagaugcuaaagcu

SEQ ID NO: 750732 - RNA, 19 nt, Homo sapiens
  misc_RNA (1)...(19): siRNA sense strand
gcauuuaguccugcaauuc

SEQ ID NO: 750733 - RNA, 19 nt, Homo sapiens
  misc_RNA (1)...(19): siRNA sense strand
aaugaaacccugcaaggaa

SEQ ID NO: 750734 - RNA, 19 nt, Homo sapiens
  misc_RNA (1)...(19): siRNA sense strand
ucgaagagcuauggcuaga

SEQ ID NO: 750735 - RNA, 19 nt, Homo sapiens
  misc_RNA (1)...(19): siRNA sense strand
gaugggccgugacauugau

SEQ ID NO: 750736 - RNA, 19 nt, Homo sapiens
  misc_RNA (1)...(19): siRNA sense strand
gugcauugccugaaacuca

SEQ ID NO: 750737 - RNA, 19 nt, Homo sapiens
  misc_RNA (1)...(19): siRNA sense strand
gagaaggcucccaaaguca

SEQ ID NO: 750738 - RNA, 19 nt, Homo sapiens
  misc_RNA (1)...(19): siRNA sense strand
augaaacccugcaaggaaa

SEQ ID NO: 750739 - RNA, 19 nt, Homo sapiens
  misc_RNA (1)...(19): siRNA sense strand
gcccuacucugugaagaau

SEQ ID NO: 750740 - RNA, 19 nt, Homo sapiens
  misc_RNA (1)...(19): siRNA sense strand
gcggaacacacaagaugaa

SEQ ID NO: 750741 - RNA, 19 nt, Homo sapiens
  misc_RNA (1)...(19): siRNA sense strand
ucugagacccuaaagcauu

SEQ ID NO: 750742 - RNA, 19 nt, Homo sapiens
  misc_RNA (1)...(19): siRNA sense strand
uccagaaucuccgcuuuga

SEQ ID NO: 750743 - RNA, 19 nt, Homo sapiens
  misc_RNA (1)...(19): siRNA sense strand
caaugaaacccugcaagga

SEQ ID NO: 750744 - RNA, 19 nt, Homo sapiens
  misc_RNA (1)...(19): siRNA sense strand
gacauugacagcucugaga

SEQ ID NO: 750745 - RNA, 19 nt, Homo sapiens
  misc_RNA (1)...(19): siRNA sense strand
ccuggacggccgagaguua

SEQ ID NO: 750746 - RNA, 19 nt, Homo sapiens
  misc_RNA (1)...(19): siRNA sense strand
ggccgugacauugauauaa

SEQ ID NO: 750747 - RNA, 19 nt, Homo sapiens
  misc_RNA (1)...(19): siRNA sense strand
ugaagaucacugaaagaaa

SEQ ID NO: 750748 - RNA, 19 nt, Homo sapiens
  misc_RNA (1)...(19): siRNA sense strand
ccgcaccagugauuguuga

SEQ ID NO: 750749 - RNA, 19 nt, Homo sapiens
  misc_RNA (1)...(19): siRNA sense strand
ggaguugggcaaggugaaa

SEQ ID NO: 750750 - RNA, 19 nt, Homo sapiens
  misc_RNA (1)...(19): siRNA sense strand
ucaaggauagcaggaauau

SEQ ID NO: 750751 - RNA, 19 nt, Homo sapiens
  misc_RNA (1)...(19): siRNA sense strand
uuacugcgcccuacucugu

SEQ ID NO: 750752 - RNA, 19 nt, Homo sapiens
  misc_RNA (1)...(19): siRNA sense strand
ggccaaauggagaugcuaa

SEQ ID NO: 750753 - RNA, 19 nt, Homo sapiens
  misc_RNA (1)...(19): siRNA sense strand
uaaagcugaccaugaacaa

SEQ ID NO: 750754 - RNA, 19 nt, Homo sapiens
  misc_RNA (1)...(19): siRNA sense strand
guacaaugucucccagcaa

SEQ ID NO: 750755 - RNA, 19 nt, Homo sapiens
  misc_RNA (1)...(19): siRNA sense strand
gucaagacccugaaucucu

SEQ ID NO: 750756 - RNA, 19 nt, Homo sapiens
  misc_RNA (1)...(19): siRNA sense strand
guuauccgcaccagugauu

SEQ ID NO: 750757 - RNA, 19 nt, Homo sapiens
  misc_RNA (1)...(19): siRNA sense strand
gaugaaaacaugaggaaau

SEQ ID NO: 750758 - RNA, 19 nt, Homo sapiens
  misc_RNA (1)...(19): siRNA sense strand
cagugauuguugacauuga

SEQ ID NO: 750759 - RNA, 19 nt, Homo sapiens
  misc_RNA (1)...(19): siRNA sense strand
guugaagccaggccaaaug

SEQ ID NO: 750760 - RNA, 19 nt, Homo sapiens
  misc_RNA (1)...(19): siRNA sense strand
aaacguggacucccucagu

SEQ ID NO: 750761 - RNA, 19 nt, Homo sapiens
  misc_RNA (1)...(19): siRNA sense strand
ucuccagaaucuccgcuuu

SEQ ID NO: 750762 - RNA, 19 nt, Homo sapiens
  misc_RNA (1)...(19): siRNA sense strand
gggccgugacauugauaua

SEQ ID NO: 750763 - RNA, 19 nt, Homo sapiens
  misc_RNA (1)...(19): siRNA sense strand
cuucaaggauagcaggaau

SEQ ID NO: 750764 - RNA, 19 nt, Homo sapiens
  misc_RNA (1)...(19): siRNA sense strand
caccagugauuguugacau

SEQ ID NO: 750765 - RNA, 19 nt, Homo sapiens
  misc_RNA (1)...(19): siRNA sense strand
cugaagaucacugaaagaa

SEQ ID NO: 750766 - RNA, 19 nt, Homo sapiens
  misc_RNA (1)...(19): siRNA sense strand
caaagucaagacccugaau

SEQ ID NO: 750767 - RNA, 19 nt, Homo sapiens
  misc_RNA (1)...(19): siRNA sense strand
gaccagucugccuauguaa

SEQ ID NO: 750768 - RNA, 19 nt, Homo sapiens
  misc_RNA (1)...(19): siRNA sense strand
gaacacacaagaugaaaac

SEQ ID NO: 750769 - RNA, 19 nt, Homo sapiens
  misc_RNA (1)...(19): siRNA sense strand
ggacucccucagugcauug

SEQ ID NO: 750770 - RNA, 19 nt, Homo sapiens
  misc_RNA (1)...(19): siRNA sense strand
gugcaaguacuucaaggau

SEQ ID NO: 750771 - RNA, 19 nt, Homo sapiens
  misc_RNA (1)...(19): siRNA sense strand
ggaaaacuuuacuggaucu

SEQ ID NO: 750772 - RNA, 19 nt, Homo sapiens
  misc_RNA (1)...(19): siRNA sense strand
aacaaacgguacaaugucu

SEQ ID NO: 750773 - RNA, 19 nt, Homo sapiens
  misc_RNA (1)...(19): siRNA sense strand
ccagucugccuauguaagu

SEQ ID NO: 750774 - RNA, 19 nt, Homo sapiens
  misc_RNA (1)...(19): siRNA sense strand
caaggauagcaggaauaua

SEQ ID NO: 750775 - RNA, 19 nt, Homo sapiens
  misc_RNA (1)...(19): siRNA sense strand
gccaaauggagaugcuaaa

SEQ ID NO: 750776 - RNA, 19 nt, Homo sapiens
  misc_RNA (1)...(19): siRNA sense strand
aaggaaaacuuuacuggau

SEQ ID NO: 750777 - RNA, 19 nt, Homo sapiens
  misc_RNA (1)...(19): siRNA sense strand
caaauggagaugcuaaagc

SEQ ID NO: 750778 - RNA, 19 nt, Homo sapiens
  misc_RNA (1)...(19): siRNA sense strand
gaaaugguucaaggucaca

SEQ ID NO: 750779 - RNA, 19 nt, Homo sapiens
  misc_RNA (1)...(19): siRNA sense strand
agaaggcucccaaagucaa

SEQ ID NO: 750780 - RNA, 19 nt, Homo sapiens
  misc_RNA (1)...(19): siRNA sense strand
ggcggaacacacaagauga

SEQ ID NO: 750781 - RNA, 19 nt, Homo sapiens
  misc_RNA (1)...(19): siRNA sense strand
gaaacucagcaugacuuca

SEQ ID NO: 750782 - RNA, 19 nt, Homo sapiens
  misc_RNA (1)...(19): siRNA sense strand
cacacaagaugaaaacaug

SEQ ID NO: 750783 - RNA, 19 nt, Homo sapiens
  misc_RNA (1)...(19): siRNA sense strand
ccaaauggagaugcuaaag

SEQ ID NO: 750784 - RNA, 19 nt, Homo sapiens
  misc_RNA (1)...(19): siRNA sense strand
cuugaugggccgugacauu

SEQ ID NO: 750785 - RNA, 19 nt, Homo sapiens
  misc_RNA (1)...(19): siRNA sense strand
cuaaagcugaccaugaaca

SEQ ID NO: 750786 - RNA, 19 nt, Homo sapiens
  misc_RNA (1)...(19): siRNA sense strand
gaguuauccgcaccaguga

SEQ ID NO: 750787 - RNA, 19 nt, Homo sapiens
  misc_RNA (1)...(19): siRNA sense strand
gcugccacccugaagauca

SEQ ID NO: 750788 - RNA, 19 nt, Homo sapiens
  misc_RNA (1)...(19): siRNA sense strand
gaagaucacugaaagaaau

SEQ ID NO: 750789 - RNA, 19 nt, Homo sapiens
  misc_RNA (1)...(19): siRNA sense strand
ggaccagucugccuaugua

SEQ ID NO: 750790 - RNA, 19 nt, Homo sapiens
  misc_RNA (1)...(19): siRNA sense strand
gauauaauccugaaucgaa

SEQ ID NO: 750791 - RNA, 19 nt, Homo sapiens
  misc_RNA (1)...(19): siRNA sense strand
gcaaguacuucaaggauag

SEQ ID NO: 750792 - RNA, 19 nt, Homo sapiens
  misc_RNA (1)...(19): siRNA sense strand
gaagagcuauggcuagaag

SEQ ID NO: 750793 - RNA, 19 nt, Homo sapiens
  misc_RNA (1)...(19): siRNA sense strand
aaggauagcaggaauauaa

SEQ ID NO: 750794 - RNA, 19 nt, Homo sapiens
  misc_RNA (1)...(19): siRNA sense strand
gaacaaacgguacaauguc

SEQ ID NO: 750795 - RNA, 19 nt, Homo sapiens
  misc_RNA (1)...(19): siRNA sense strand
ccuacucugugaagaauaa

SEQ ID NO: 750796 - RNA, 19 nt, Homo sapiens
  misc_RNA (1)...(19): siRNA sense strand
ugacagcucugagacaaug

SEQ ID NO: 750797 - RNA, 19 nt, Homo sapiens
  misc_RNA (1)...(19): siRNA sense strand
agagaaggcucccaaaguc

SEQ ID NO: 750798 - RNA, 19 nt, Homo sapiens
  misc_RNA (1)...(19): siRNA sense strand
gaucugagacccuaaagca

SEQ ID NO: 750799 - RNA, 19 nt, Homo sapiens
  misc_RNA (1)...(19): siRNA sense strand
gccgugacauugauauaau

SEQ ID NO: 750800 - RNA, 19 nt, Homo sapiens
  misc_RNA (1)...(19): siRNA sense strand
ugcaaguacuucaaggaua

SEQ ID NO: 750801 - RNA, 19 nt, Homo sapiens
  misc_RNA (1)...(19): siRNA sense strand
ugcuaaagcugaccaugaa

SEQ ID NO: 750802 - RNA, 19 nt, Homo sapiens
  misc_RNA (1)...(19): siRNA sense strand
cugagacccuaaagcauuu

SEQ ID NO: 750803 - RNA, 19 nt, Homo sapiens
  misc_RNA (1)...(19): siRNA sense strand
ugaacaaacgguacaaugu

SEQ ID NO: 750804 - RNA, 19 nt, Homo sapiens
  misc_RNA (1)...(19): siRNA sense strand
gacccugaaucucuccaaa

SEQ ID NO: 750805 - RNA, 19 nt, Homo sapiens
  misc_RNA (1)...(19): siRNA sense strand
aaauggagaugcuaaagcu

SEQ ID NO: 750806 - RNA, 19 nt, Homo sapiens
  misc_RNA (1)...(19): siRNA sense strand
gcauuuaguccugcaauuc

SEQ ID NO: 750807 - RNA, 19 nt, Homo sapiens
  misc_RNA (1)...(19): siRNA sense strand
aaugaaacccugcaaggaa

SEQ ID NO: 750808 - RNA, 19 nt, Homo sapiens
  misc_RNA (1)...(19): siRNA sense strand
ucgaagagcuauggcuaga

SEQ ID NO: 750809 - RNA, 19 nt, Homo sapiens
  misc_RNA (1)...(19): siRNA sense strand
gaugggccgugacauugau

SEQ ID NO: 750810 - RNA, 19 nt, Homo sapiens
  misc_RNA (1)...(19): siRNA sense strand
gugcauugccugaaacuca

SEQ ID NO: 750811 - RNA, 19 nt, Homo sapiens
  misc_RNA (1)...(19): siRNA sense strand
gagaaggcucccaaaguca

SEQ ID NO: 750812 - RNA, 19 nt, Homo sapiens
  misc_RNA (1)...(19): siRNA sense strand
augaaacccugcaaggaaa

SEQ ID NO: 750813 - RNA, 19 nt, Homo sapiens
  misc_RNA (1)...(19): siRNA sense strand
gcccuacucugugaagaau

SEQ ID NO: 750814 - RNA, 19 nt, Homo sapiens
  misc_RNA (1)...(19): siRNA sense strand
gcggaacacacaagaugaa

SEQ ID NO: 750815 - RNA, 19 nt, Homo sapiens
  misc_RNA (1)...(19): siRNA sense strand
ucugagacccuaaagcauu

SEQ ID NO: 750816 - RNA, 19 nt, Homo sapiens
  misc_RNA (1)...(19): siRNA sense strand
uccagaaucuccgcuuuga

SEQ ID NO: 750817 - RNA, 19 nt, Homo sapiens
  misc_RNA (1)...(19): siRNA sense strand
caaugaaacccugcaagga

SEQ ID NO: 750818 - RNA, 19 nt, Homo sapiens
  misc_RNA (1)...(19): siRNA sense strand
gacauugacagcucugaga

SEQ ID NO: 750819 - RNA, 19 nt, Homo sapiens
  misc_RNA (1)...(19): siRNA sense strand
ccuggacggccgagaguua

SEQ ID NO: 750820 - RNA, 19 nt, Homo sapiens
  misc_RNA (1)...(19): siRNA sense strand
ggccgugacauugauauaa

SEQ ID NO: 750821 - RNA, 19 nt, Homo sapiens
  misc_RNA (1)...(19): siRNA sense strand
ugaagaucacugaaagaaa

SEQ ID NO: 750822 - RNA, 19 nt, Homo sapiens
  misc_RNA (1)...(19): siRNA sense strand
ccgcaccagugauuguuga

SEQ ID NO: 750823 - RNA, 19 nt, Homo sapiens
  misc_RNA (1)...(19): siRNA sense strand
ggaguugggcaaggugaaa

SEQ ID NO: 750824 - RNA, 19 nt, Homo sapiens
  misc_RNA (1)...(19): siRNA sense strand
ucaaggauagcaggaauau

SEQ ID NO: 750825 - RNA, 19 nt, Homo sapiens
  misc_RNA (1)...(19): siRNA sense strand
uuacugcgcccuacucugu

SEQ ID NO: 750826 - RNA, 19 nt, Homo sapiens
  misc_RNA (1)...(19): siRNA sense strand
ggccaaauggagaugcuaa

SEQ ID NO: 750827 - RNA, 19 nt, Homo sapiens
  misc_RNA (1)...(19): siRNA sense strand
uaaagcugaccaugaacaa

SEQ ID NO: 750828 - RNA, 19 nt, Homo sapiens
  misc_RNA (1)...(19): siRNA sense strand
guacaaugucucccagcaa

SEQ ID NO: 750829 - RNA, 19 nt, Homo sapiens
  misc_RNA (1)...(19): siRNA sense strand
gucaagacccugaaucucu

SEQ ID NO: 750830 - RNA, 19 nt, Homo sapiens
  misc_RNA (1)...(19): siRNA sense strand
guuauccgcaccagugauu

SEQ ID NO: 750831 - RNA, 19 nt, Homo sapiens
  misc_RNA (1)...(19): siRNA sense strand
gaugaaaacaugaggaaau

SEQ ID NO: 750832 - RNA, 19 nt, Homo sapiens
  misc_RNA (1)...(19): siRNA sense strand
cagugauuguugacauuga

SEQ ID NO: 750833 - RNA, 19 nt, Homo sapiens
  misc_RNA (1)...(19): siRNA sense strand
guugaagccaggccaaaug

SEQ ID NO: 750834 - RNA, 19 nt, Homo sapiens
  misc_RNA (1)...(19): siRNA sense strand
aaacguggacucccucagu

SEQ ID NO: 750835 - RNA, 19 nt, Homo sapiens
  misc_RNA (1)...(19): siRNA sense strand
ucuccagaaucuccgcuuu

SEQ ID NO: 750836 - RNA, 19 nt, Homo sapiens
  misc_RNA (1)...(19): siRNA sense strand
gggccgugacauugauaua

SEQ ID NO: 750837 - RNA, 19 nt, Homo sapiens
  misc_RNA (1)...(19): siRNA sense strand
cuucaaggauagcaggaau

SEQ ID NO: 750838 - RNA, 19 nt, Homo sapiens
  misc_RNA (1)...(19): siRNA sense strand
caccagugauuguugacau

SEQ ID NO: 750839 - RNA, 19 nt, Homo sapiens
  misc_RNA (1)...(19): siRNA sense strand
cugaagaucacugaaagaa

SEQ ID NO: 750840 - RNA, 19 nt, Homo sapiens
  misc_RNA (1)...(19): siRNA sense strand
caaagucaagacccugaau

SEQ ID NO: 750841 - RNA, 19 nt, Homo sapiens
  misc_RNA (1)...(19): siRNA sense strand
gaccagucugccuauguaa

SEQ ID NO: 750842 - RNA, 19 nt, Homo sapiens
  misc_RNA (1)...(19): siRNA sense strand
gaacacacaagaugaaaac

SEQ ID NO: 750843 - RNA, 19 nt, Homo sapiens
  misc_RNA (1)...(19): siRNA sense strand
ggacucccucagugcauug

SEQ ID NO: 750844 - RNA, 19 nt, Homo sapiens
  misc_RNA (1)...(19): siRNA sense strand
gugcaaguacuucaaggau

SEQ ID NO: 750845 - RNA, 19 nt, Homo sapiens
  misc_RNA (1)...(19): siRNA sense strand
ggaaaacuuuacuggaucu

SEQ ID NO: 750846 - RNA, 19 nt, Homo sapiens
  misc_RNA (1)...(19): siRNA sense strand
aacaaacgguacaaugucu

SEQ ID NO: 750847 - RNA, 19 nt, Homo sapiens
  misc_RNA (1)...(19): siRNA sense strand
ccagucugccuauguaagu

SEQ ID NO: 750848 - RNA, 19 nt, Homo sapiens
  misc_RNA (1)...(19): siRNA sense strand
caaggauagcaggaauaua

SEQ ID NO: 750849 - RNA, 19 nt, Homo sapiens
  misc_RNA (1)...(19): siRNA sense strand
gccaaauggagaugcuaaa

SEQ ID NO: 750850 - RNA, 19 nt, Homo sapiens
  misc_RNA (1)...(19): siRNA sense strand
aaggaaaacuuuacuggau

SEQ ID NO: 750851 - RNA, 19 nt, Homo sapiens
  misc_RNA (1)...(19): siRNA sense strand
caaauggagaugcuaaagc

SEQ ID NO: 750852 - RNA, 19 nt, Homo sapiens
  misc_RNA (1)...(19): siRNA sense strand
gaaaugguucaaggucaca

SEQ ID NO: 750853 - RNA, 19 nt, Homo sapiens
  misc_RNA (1)...(19): siRNA sense strand
agaaggcucccaaagucaa

SEQ ID NO: 750854 - RNA, 19 nt, Homo sapiens
  misc_RNA (1)...(19): siRNA sense strand
ggcggaacacacaagauga

SEQ ID NO: 750855 - RNA, 19 nt, Homo sapiens
  misc_RNA (1)...(19): siRNA sense strand
gaaacucagcaugacuuca

SEQ ID NO: 750856 - RNA, 19 nt, Homo sapiens
  misc_RNA (1)...(19): siRNA sense strand
cacacaagaugaaaacaug

SEQ ID NO: 750857 - RNA, 19 nt, Homo sapiens
  misc_RNA (1)...(19): siRNA sense strand
ccaaauggagaugcuaaag

SEQ ID NO: 750858 - RNA, 19 nt, Homo sapiens
  misc_RNA (1)...(19): siRNA sense strand
cuugaugggccgugacauu

SEQ ID NO: 750859 - RNA, 19 nt, Homo sapiens
  misc_RNA (1)...(19): siRNA sense strand
cuaaagcugaccaugaaca

SEQ ID NO: 750860 - RNA, 19 nt, Homo sapiens
  misc_RNA (1)...(19): siRNA sense strand
gaguuauccgcaccaguga

SEQ ID NO: 750861 - RNA, 19 nt, Homo sapiens
  misc_RNA (1)...(19): siRNA sense strand
gcugccacccugaagauca

SEQ ID NO: 750862 - RNA, 19 nt, Homo sapiens
  misc_RNA (1)...(19): siRNA sense strand
gcaagaaguucaacaugga

SEQ ID NO: 750863 - RNA, 19 nt, Homo sapiens
  misc_RNA (1)...(19): siRNA sense strand
ccaaggguauccaguauuu

SEQ ID NO: 750864 - RNA, 19 nt, Homo sapiens
  misc_RNA (1)...(19): siRNA sense strand
ggaauuauaccucuugaga

SEQ ID NO: 750865 - RNA, 19 nt, Homo sapiens
  misc_RNA (1)...(19): siRNA sense strand
gaagauagaccggaugaug

SEQ ID NO: 750866 - RNA, 19 nt, Homo sapiens
  misc_RNA (1)...(19): siRNA sense strand
gagaaggagcuguguauug

SEQ ID NO: 750867 - RNA, 19 nt, Homo sapiens
  misc_RNA (1)...(19): siRNA sense strand
uccagaagcugaaggauga

SEQ ID NO: 750868 - RNA, 19 nt, Homo sapiens
  misc_RNA (1)...(19): siRNA sense strand
ggagagggaucccaucaac

SEQ ID NO: 750869 - RNA, 19 nt, Homo sapiens
  misc_RNA (1)...(19): siRNA sense strand
gaauuauaccucuugagaa

SEQ ID NO: 750870 - RNA, 19 nt, Homo sapiens
  misc_RNA (1)...(19): siRNA sense strand
agaaggagcuguguauugg

SEQ ID NO: 750871 - RNA, 19 nt, Homo sapiens
  misc_RNA (1)...(19): siRNA sense strand
ugagauugcagauguguuu

SEQ ID NO: 750872 - RNA, 19 nt, Homo sapiens
  misc_RNA (1)...(19): siRNA sense strand
gcacgguuccuguauaaag

SEQ ID NO: 750873 - RNA, 19 nt, Homo sapiens
  misc_RNA (1)...(19): siRNA sense strand
gguauccaguauuucauug

SEQ ID NO: 750874 - RNA, 19 nt, Homo sapiens
  misc_RNA (1)...(19): siRNA sense strand
acaacugccucuacuacuu

SEQ ID NO: 750875 - RNA, 19 nt, Homo sapiens
  misc_RNA (1)...(19): siRNA sense strand
aggaugagauugcagaugu

SEQ ID NO: 750876 - RNA, 19 nt, Homo sapiens
  misc_RNA (1)...(19): siRNA sense strand
gaagcugaaggaugagauu

SEQ ID NO: 750877 - RNA, 19 nt, Homo sapiens
  misc_RNA (1)...(19): siRNA sense strand
guauugggcgcaagaaguu

SEQ ID NO: 750878 - RNA, 19 nt, Homo sapiens
  misc_RNA (1)...(19): siRNA sense strand
agacagccauugguaccua

SEQ ID NO: 750879 - RNA, 19 nt, Homo sapiens
  misc_RNA (1)...(19): siRNA sense strand
uugcacgguuccuguauaa

SEQ ID NO: 750880 - RNA, 19 nt, Homo sapiens
  misc_RNA (1)...(19): siRNA sense strand
gaagaguuacagaggauca

SEQ ID NO: 750881 - RNA, 19 nt, Homo sapiens
  misc_RNA (1)...(19): siRNA sense strand
acucacaccuucuucaauc

SEQ ID NO: 750882 - RNA, 19 nt, Homo sapiens
  misc_RNA (1)...(19): siRNA sense strand
caucaagagugagccauuc

SEQ ID NO: 750883 - RNA, 19 nt, Homo sapiens
  misc_RNA (1)...(19): siRNA sense strand
ggagaaggagcuguguauu

SEQ ID NO: 750884 - RNA, 19 nt, Homo sapiens
  misc_RNA (1)...(19): siRNA sense strand
caacaagacagccauuggu

SEQ ID NO: 750885 - RNA, 19 nt, Homo sapiens
  misc_RNA (1)...(19): siRNA sense strand
ggaugagauugcagaugug

SEQ ID NO: 750886 - RNA, 19 nt, Homo sapiens
  misc_RNA (1)...(19): siRNA sense strand
caacaccagccuccacaau

SEQ ID NO: 750887 - RNA, 19 nt, Homo sapiens
  misc_RNA (1)...(19): siRNA sense strand
aauuauaccucuugagaac

SEQ ID NO: 750888 - RNA, 19 nt, Homo sapiens
  misc_RNA (1)...(19): siRNA sense strand
cggaagaguuacagaggau

SEQ ID NO: 750889 - RNA, 19 nt, Homo sapiens
  misc_RNA (1)...(19): siRNA sense strand
caacugccucuacuacuuc

SEQ ID NO: 750890 - RNA, 19 nt, Homo sapiens
  misc_RNA (1)...(19): siRNA sense strand
cgccaaggguauccaguau

SEQ ID NO: 750891 - RNA, 19 nt, Homo sapiens
  misc_RNA (1)...(19): siRNA sense strand
gcaucaagagugagccauu

SEQ ID NO: 750892 - RNA, 19 nt, Homo sapiens
  misc_RNA (1)...(19): siRNA sense strand
cagaagauagaccggauga

SEQ ID NO: 750893 - RNA, 19 nt, Homo sapiens
  misc_RNA (1)...(19): siRNA sense strand
gcgcaagaaguucaacaug

SEQ ID NO: 750894 - RNA, 19 nt, Homo sapiens
  misc_RNA (1)...(19): siRNA sense strand
gcugaaggaugagauugca

SEQ ID NO: 750895 - RNA, 19 nt, Homo sapiens
  misc_RNA (1)...(19): siRNA sense strand
ggcaaugaccucacucaca

SEQ ID NO: 750896 - RNA, 19 nt, Homo sapiens
  misc_RNA (1)...(19): siRNA sense strand
cgacaacugccucuacuac

SEQ ID NO: 750897 - RNA, 19 nt, Homo sapiens
  misc_RNA (1)...(19): siRNA sense strand
ggauggcccagaaggagaa

SEQ ID NO: 750898 - RNA, 19 nt, Homo sapiens
  misc_RNA (1)...(19): siRNA sense strand
cgacggcaaugaccucacu

SEQ ID NO: 750899 - RNA, 19 nt, Homo sapiens
  misc_RNA (1)...(19): siRNA sense strand
gcgaggcccagaagauaga

SEQ ID NO: 750900 - RNA, 19 nt, Homo sapiens
  misc_RNA (1)...(19): siRNA sense strand
ucgacagcaucaagaguga

SEQ ID NO: 750901 - RNA, 19 nt, Homo sapiens
  misc_RNA (1)...(19): siRNA sense strand
gaucaaguggcaccgaaag

SEQ ID NO: 750902 - RNA, 19 nt, Homo sapiens
  misc_RNA (1)...(19): siRNA sense strand
ggguauccaguauuucauu

SEQ ID NO: 750903 - RNA, 19 nt, Homo sapiens
  misc_RNA (1)...(19): siRNA sense strand
aacaagacagccauuggua

SEQ ID NO: 750904 - RNA, 19 nt, Homo sapiens
  misc_RNA (1)...(19): siRNA sense strand
ucacucacaccuucuucaa

SEQ ID NO: 750905 - RNA, 19 nt, Homo sapiens
  misc_RNA (1)...(19): siRNA sense strand
ccgccaaggguauccagua

SEQ ID NO: 750906 - RNA, 19 nt, Homo sapiens
  misc_RNA (1)...(19): siRNA sense strand
ucucuacucggaagaagaa

SEQ ID NO: 750907 - RNA, 19 nt, Homo sapiens
  misc_RNA (1)...(19): siRNA sense strand
ggaucaaguggcaccgaaa

SEQ ID NO: 750908 - RNA, 19 nt, Homo sapiens
  misc_RNA (1)...(19): siRNA sense strand
ggaaacggcgcugguucau

SEQ ID NO: 750909 - RNA, 19 nt, Homo sapiens
  misc_RNA (1)...(19): siRNA sense strand
gaaggagaaggagcugugu

SEQ ID NO: 750910 - RNA, 19 nt, Homo sapiens
  misc_RNA (1)...(19): siRNA sense strand
gaaggaugagauugcagau

SEQ ID NO: 750911 - RNA, 19 nt, Homo sapiens
  misc_RNA (1)...(19): siRNA sense strand
gaaacggcgcugguucauc

SEQ ID NO: 750912 - RNA, 19 nt, Homo sapiens
  misc_RNA (1)...(19): siRNA sense strand
cgaaucguaccgcaucuca

SEQ ID NO: 750913 - RNA, 19 nt, Homo sapiens
  misc_RNA (1)...(19): siRNA sense strand
cauucugccuggagcucua

SEQ ID NO: 750914 - RNA, 19 nt, Homo sapiens
  misc_RNA (1)...(19): siRNA sense strand
gaaccucucggugcagaag

SEQ ID NO: 750915 - RNA, 19 nt, Homo sapiens
  misc_RNA (1)...(19): siRNA sense strand
gccaaggguauccaguauu

SEQ ID NO: 750916 - RNA, 19 nt, Homo sapiens
  misc_RNA (1)...(19): siRNA sense strand
guguuguccuucuccauca

SEQ ID NO: 750917 - RNA, 19 nt, Homo sapiens
  misc_RNA (1)...(19): siRNA sense strand
aaggguauccaguauuuca

SEQ ID NO: 750918 - RNA, 19 nt, Homo sapiens
  misc_RNA (1)...(19): siRNA sense strand
gaugagauugcagaugugu

SEQ ID NO: 750919 - RNA, 19 nt, Homo sapiens
  misc_RNA (1)...(19): siRNA sense strand
agauagaccggaugaugga

SEQ ID NO: 750920 - RNA, 19 nt, Homo sapiens
  misc_RNA (1)...(19): siRNA sense strand
uauccaguauuucauugag

SEQ ID NO: 750921 - RNA, 19 nt, Homo sapiens
  misc_RNA (1)...(19): siRNA sense strand
guauccaguauuucauuga

SEQ ID NO: 750922 - RNA, 19 nt, Homo sapiens
  misc_RNA (1)...(19): siRNA sense strand
ccugcuacguguuguccuu

SEQ ID NO: 750923 - RNA, 19 nt, Homo sapiens
  misc_RNA (1)...(19): siRNA sense strand
gaaauuaugugcugguauc

SEQ ID NO: 750924 - RNA, 19 nt, Homo sapiens
  misc_RNA (1)...(19): siRNA sense strand
caagagaucuguuugcaau

SEQ ID NO: 750925 - RNA, 19 nt, Homo sapiens
  misc_RNA (1)...(19): siRNA sense strand
gaugguggcuuuccucaaa

SEQ ID NO: 750926 - RNA, 19 nt, Homo sapiens
  misc_RNA (1)...(19): siRNA sense strand
ggagaaaugugauguuaca

SEQ ID NO: 750927 - RNA, 19 nt, Homo sapiens
  misc_RNA (1)...(19): siRNA sense strand
caccauaacugucguugua

SEQ ID NO: 750928 - RNA, 19 nt, Homo sapiens
  misc_RNA (1)...(19): siRNA sense strand
gcaaugcucuucaucaaag

SEQ ID NO: 750929 - RNA, 19 nt, Homo sapiens
  misc_RNA (1)...(19): siRNA sense strand
ggagacaauucugcaguua

SEQ ID NO: 750930 - RNA, 19 nt, Homo sapiens
  misc_RNA (1)...(19): siRNA sense strand
uaacuacaccuacuacuuu

SEQ ID NO: 750931 - RNA, 19 nt, Homo sapiens
  misc_RNA (1)...(19): siRNA sense strand
ugaaagaccuuaacuuguc

SEQ ID NO: 750932 - RNA, 19 nt, Homo sapiens
  misc_RNA (1)...(19): siRNA sense strand
ugaagaaacuagauagaga

SEQ ID NO: 750933 - RNA, 19 nt, Homo sapiens
  misc_RNA (1)...(19): siRNA sense strand
ccaagaaacaggcaacaua

SEQ ID NO: 750934 - RNA, 19 nt, Homo sapiens
  misc_RNA (1)...(19): siRNA sense strand
gaaaguaaagguugaagau

SEQ ID NO: 750935 - RNA, 19 nt, Homo sapiens
  misc_RNA (1)...(19): siRNA sense strand
cagaugauguugacaguga

SEQ ID NO: 750936 - RNA, 19 nt, Homo sapiens
  misc_RNA (1)...(19): siRNA sense strand
caagaaacaggcaacauaa

SEQ ID NO: 750937 - RNA, 19 nt, Homo sapiens
  misc_RNA (1)...(19): siRNA sense strand
gcaguuacgcucuccauuu

SEQ ID NO: 750938 - RNA, 19 nt, Homo sapiens
  misc_RNA (1)...(19): siRNA sense strand
gagauuauuucaccucaau

SEQ ID NO: 750939 - RNA, 19 nt, Homo sapiens
  misc_RNA (1)...(19): siRNA sense strand
ccacuggacuuaucacaau

SEQ ID NO: 750940 - RNA, 19 nt, Homo sapiens
  misc_RNA (1)...(19): siRNA sense strand
gaaacagagucacacuaga

SEQ ID NO: 750941 - RNA, 19 nt, Homo sapiens
  misc_RNA (1)...(19): siRNA sense strand
gaccaaugcuacacugauu

SEQ ID NO: 750942 - RNA, 19 nt, Homo sapiens
  misc_RNA (1)...(19): siRNA sense strand
gcauugaucgugagaaauu

SEQ ID NO: 750943 - RNA, 19 nt, Homo sapiens
  misc_RNA (1)...(19): siRNA sense strand
gauguauccucaccaacua

SEQ ID NO: 750944 - RNA, 19 nt, Homo sapiens
  misc_RNA (1)...(19): siRNA sense strand
ggaauaaacggaguucaaa

SEQ ID NO: 750945 - RNA, 19 nt, Homo sapiens
  misc_RNA (1)...(19): siRNA sense strand
caacauugccaggagauua

SEQ ID NO: 750946 - RNA, 19 nt, Homo sapiens
  misc_RNA (1)...(19): siRNA sense strand
gaagaaacuagauagagaa

SEQ ID NO: 750947 - RNA, 19 nt, Homo sapiens
  misc_RNA (1)...(19): siRNA sense strand
caucacugcuguaguaaga

SEQ ID NO: 750948 - RNA, 19 nt, Homo sapiens
  misc_RNA (1)...(19): siRNA sense strand
uuucaucacugcuguagua

SEQ ID NO: 750949 - RNA, 19 nt, Homo sapiens
  misc_RNA (1)...(19): siRNA sense strand
uaacugauccugauuaugg

SEQ ID NO: 750950 - RNA, 19 nt, Homo sapiens
  misc_RNA (1)...(19): siRNA sense strand
caacaguuaucaacauauc

SEQ ID NO: 750951 - RNA, 19 nt, Homo sapiens
  misc_RNA (1)...(19): siRNA sense strand
ugacacaguuguucuuuca

SEQ ID NO: 750952 - RNA, 19 nt, Homo sapiens
  misc_RNA (1)...(19): siRNA sense strand
gguugaagaugguggcuuu

SEQ ID NO: 750953 - RNA, 19 nt, Homo sapiens
  misc_RNA (1)...(19): siRNA sense strand
gagaaauuaugugcuggua

SEQ ID NO: 750954 - RNA, 19 nt, Homo sapiens
  misc_RNA (1)...(19): siRNA sense strand
ggugucauccgaccaaaua

SEQ ID NO: 750955 - RNA, 19 nt, Homo sapiens
  misc_RNA (1)...(19): siRNA sense strand
caauggugcugguaaaugu

SEQ ID NO: 750956 - RNA, 19 nt, Homo sapiens
  misc_RNA (1)...(19): siRNA sense strand
ggacuuaucacaaucaaag

SEQ ID NO: 750957 - RNA, 19 nt, Homo sapiens
  misc_RNA (1)...(19): siRNA sense strand
ccacuucucuuucagcaau

SEQ ID NO: 750958 - RNA, 19 nt, Homo sapiens
  misc_RNA (1)...(19): siRNA sense strand
ucauaacugugacggauaa

SEQ ID NO: 750959 - RNA, 19 nt, Homo sapiens
  misc_RNA (1)...(19): siRNA sense strand
ccauaaaugugguugaugu

SEQ ID NO: 750960 - RNA, 19 nt, Homo sapiens
  misc_RNA (1)...(19): siRNA sense strand
gacaagaugccacaacuga

SEQ ID NO: 750961 - RNA, 19 nt, Homo sapiens
  misc_RNA (1)...(19): siRNA sense strand
ggaaacagagucacacuag

SEQ ID NO: 750962 - RNA, 19 nt, Homo sapiens
  misc_RNA (1)...(19): siRNA sense strand
ugacagugauggaaacaga

SEQ ID NO: 750963 - RNA, 19 nt, Homo sapiens
  misc_RNA (1)...(19): siRNA sense strand
caaaguaaccauaaaugug

SEQ ID NO: 750964 - RNA, 19 nt, Homo sapiens
  misc_RNA (1)...(19): siRNA sense strand
ccucaaagauccaguacug

SEQ ID NO: 750965 - RNA, 19 nt, Homo sapiens
  misc_RNA (1)...(19): siRNA sense strand
acaguggucuuucagguaa

SEQ ID NO: 750966 - RNA, 19 nt, Homo sapiens
  misc_RNA (1)...(19): siRNA sense strand
ucagaucccuacagcguuu

SEQ ID NO: 750967 - RNA, 19 nt, Homo sapiens
  misc_RNA (1)...(19): siRNA sense strand
cacuagaccuuccuauuga

SEQ ID NO: 750968 - RNA, 19 nt, Homo sapiens
  misc_RNA (1)...(19): siRNA sense strand
gaaaacaggcagaugauaa

SEQ ID NO: 750969 - RNA, 19 nt, Homo sapiens
  misc_RNA (1)...(19): siRNA sense strand
caagaugccacaacugauu

SEQ ID NO: 750970 - RNA, 19 nt, Homo sapiens
  misc_RNA (1)...(19): siRNA sense strand
caagaacugccucucgaua

SEQ ID NO: 750971 - RNA, 19 nt, Homo sapiens
  misc_RNA (1)...(19): siRNA sense strand
caaugacacuggcaugaau

SEQ ID NO: 750972 - RNA, 19 nt, Homo sapiens
  misc_RNA (1)...(19): siRNA sense strand
gaagucaguauaccagaaa

SEQ ID NO: 750973 - RNA, 19 nt, Homo sapiens
  misc_RNA (1)...(19): siRNA sense strand
gggaagagaaggauaccua

SEQ ID NO: 750974 - RNA, 19 nt, Homo sapiens
  misc_RNA (1)...(19): siRNA sense strand
ugccacagaugcugacaua

SEQ ID NO: 750975 - RNA, 19 nt, Homo sapiens
  misc_RNA (1)...(19): siRNA sense strand
ccuuaaggcugcucagaaa

SEQ ID NO: 750976 - RNA, 19 nt, Homo sapiens
  misc_RNA (1)...(19): siRNA sense strand
guugaaagaccuuaacuug

SEQ ID NO: 750977 - RNA, 19 nt, Homo sapiens
  misc_RNA (1)...(19): siRNA sense strand
uaagauacaucgucaaucc

SEQ ID NO: 750978 - RNA, 19 nt, Homo sapiens
  misc_RNA (1)...(19): siRNA sense strand
ggaaaguacaauuggguaa

SEQ ID NO: 750979 - RNA, 19 nt, Homo sapiens
  misc_RNA (1)...(19): siRNA sense strand
gauucucucuucaguguug

SEQ ID NO: 750980 - RNA, 19 nt, Homo sapiens
  misc_RNA (1)...(19): siRNA sense strand
gaaugacaauagcccaguu

SEQ ID NO: 750981 - RNA, 19 nt, Homo sapiens
  misc_RNA (1)...(19): siRNA sense strand
ggcaagugaugguggauug

SEQ ID NO: 750982 - RNA, 19 nt, Homo sapiens
  misc_RNA (1)...(19): siRNA sense strand
ucucuucaguguuguaauu

SEQ ID NO: 750983 - RNA, 19 nt, Homo sapiens
  misc_RNA (1)...(19): siRNA sense strand
gagacaagaugccacaacu

SEQ ID NO: 750984 - RNA, 19 nt, Homo sapiens
  misc_RNA (1)...(19): siRNA sense strand
acacuagaccuuccuauug

SEQ ID NO: 750985 - RNA, 19 nt, Homo sapiens
  misc_RNA (1)...(19): siRNA sense strand
gaguguuggucaaagcuaa

SEQ ID NO: 750986 - RNA, 19 nt, Homo sapiens
  misc_RNA (1)...(19): siRNA sense strand
ugacaaccacccagucuuu

SEQ ID NO: 750987 - RNA, 19 nt, Homo sapiens
  misc_RNA (1)...(19): siRNA sense strand
guacaagaccggagaugug

SEQ ID NO: 750988 - RNA, 19 nt, Homo sapiens
  misc_RNA (1)...(19): siRNA sense strand
cagccugccuuccaaauuc

SEQ ID NO: 750989 - RNA, 19 nt, Homo sapiens
  misc_RNA (1)...(19): siRNA sense strand
uuacagaccuugguuuaca

SEQ ID NO: 750990 - RNA, 19 nt, Homo sapiens
  misc_RNA (1)...(19): siRNA sense strand
gagguucguuacagcauug

SEQ ID NO: 750991 - RNA, 19 nt, Homo sapiens
  misc_RNA (1)...(19): siRNA sense strand
ugacaugcuucacagauca

SEQ ID NO: 750992 - RNA, 19 nt, Homo sapiens
  misc_RNA (1)...(19): siRNA sense strand
aaauugcucucauaacugu

SEQ ID NO: 750993 - RNA, 19 nt, Homo sapiens
  misc_RNA (1)...(19): siRNA sense strand
cagcaacaguuaucaacau

SEQ ID NO: 750994 - RNA, 19 nt, Homo sapiens
  misc_RNA (1)...(19): siRNA sense strand
ggaggaaacacaagagauc

SEQ ID NO: 750995 - RNA, 19 nt, Homo sapiens
  misc_RNA (1)...(19): siRNA sense strand
ugaggauggugguagagua

SEQ ID NO: 750996 - RNA, 19 nt, Homo sapiens
  misc_RNA (1)...(19): siRNA sense strand
uaaggccaguauucaguaa

SEQ ID NO: 750997 - RNA, 19 nt, Homo sapiens
  misc_RNA (1)...(19): siRNA sense strand
ggagaugugccacugauuc

SEQ ID NO: 750998 - RNA, 19 nt, Homo sapiens
  misc_RNA (1)...(19): siRNA sense strand
ucaaagaaccacuggauag

SEQ ID NO: 750999 - RNA, 19 nt, Homo sapiens
  misc_RNA (1)...(19): siRNA sense strand
ggaguuagauagggaagag

SEQ ID NO: 751000 - RNA, 19 nt, Homo sapiens
  misc_RNA (1)...(19): siRNA sense strand
augcuacacugauuaauga

SEQ ID NO: 751001 - RNA, 19 nt, Homo sapiens
  misc_RNA (1)...(19): siRNA sense strand
gguagaguaucacguucuu

SEQ ID NO: 751002 - RNA, 19 nt, Homo sapiens
  misc_RNA (1)...(19): siRNA sense strand
gauaggcgacuuguugaaa

SEQ ID NO: 751003 - RNA, 19 nt, Homo sapiens
  misc_RNA (1)...(19): siRNA sense strand
gcugauguauccucaccaa

SEQ ID NO: 751004 - RNA, 19 nt, Homo sapiens
  misc_RNA (1)...(19): siRNA sense strand
ucaaucuguucgugaauga

SEQ ID NO: 751005 - RNA, 19 nt, Homo sapiens
  misc_RNA (1)...(19): siRNA sense strand
ucgcauugaucgugagaaa

SEQ ID NO: 751006 - RNA, 19 nt, Homo sapiens
  misc_RNA (1)...(19): siRNA sense strand
guaacuacaccuacuacuu

SEQ ID NO: 751007 - RNA, 19 nt, Homo sapiens
  misc_RNA (1)...(19): siRNA sense strand
ccaaugcuacacugauuaa

SEQ ID NO: 751008 - RNA, 19 nt, Homo sapiens
  misc_RNA (1)...(19): siRNA sense strand
aaacaggcaacauaacauu

SEQ ID NO: 751009 - RNA, 19 nt, Homo sapiens
  misc_RNA (1)...(19): siRNA sense strand
gaaacaggcaacauaacau

SEQ ID NO: 751010 - RNA, 19 nt, Homo sapiens
  misc_RNA (1)...(19): siRNA sense strand
ggacuaaucacuguaacug

SEQ ID NO: 751011 - RNA, 19 nt, Homo sapiens
  misc_RNA (1)...(19): siRNA sense strand
caaaauugcucucauaacu

SEQ ID NO: 751012 - RNA, 19 nt, Homo sapiens
  misc_RNA (1)...(19): siRNA sense strand
acacaguuguucuuucaga

SEQ ID NO: 751013 - RNA, 19 nt, Homo sapiens
  misc_RNA (1)...(19): siRNA sense strand
ugaagucaguauaccagaa

SEQ ID NO: 751014 - RNA, 19 nt, Homo sapiens
  misc_RNA (1)...(19): siRNA sense strand
caucgucaauccugucaau

SEQ ID NO: 751015 - RNA, 19 nt, Homo sapiens
  misc_RNA (1)...(19): siRNA sense strand
ccaaaguaaccauaaaugu

SEQ ID NO: 751016 - RNA, 19 nt, Homo sapiens
  misc_RNA (1)...(19): siRNA sense strand
ggauggugguagaguauca

SEQ ID NO: 751017 - RNA, 19 nt, Homo sapiens
  misc_RNA (1)...(19): siRNA sense strand
caaugucacagucuuugua

SEQ ID NO: 751018 - RNA, 19 nt, Homo sapiens
  misc_RNA (1)...(19): siRNA sense strand
gcagacagugggccuaaug

SEQ ID NO: 751019 - RNA, 19 nt, Homo sapiens
  misc_RNA (1)...(19): siRNA sense strand
aaacuaaggcagaugaugu

SEQ ID NO: 751020 - RNA, 19 nt, Homo sapiens
  misc_RNA (1)...(19): siRNA sense strand
auacugagauagcugaugu

SEQ ID NO: 751021 - RNA, 19 nt, Homo sapiens
  misc_RNA (1)...(19): siRNA sense strand
gugccaaaguaaccauaaa

SEQ ID NO: 751022 - RNA, 19 nt, Homo sapiens
  misc_RNA (1)...(19): siRNA sense strand
guaggacuaaucacuguaa

SEQ ID NO: 751023 - RNA, 19 nt, Homo sapiens
  misc_RNA (1)...(19): siRNA sense strand
gaaauuaugugcugguauc

SEQ ID NO: 751024 - RNA, 19 nt, Homo sapiens
  misc_RNA (1)...(19): siRNA sense strand
caagagaucuguuugcaau

SEQ ID NO: 751025 - RNA, 19 nt, Homo sapiens
  misc_RNA (1)...(19): siRNA sense strand
gaugguggcuuuccucaaa

SEQ ID NO: 751026 - RNA, 19 nt, Homo sapiens
  misc_RNA (1)...(19): siRNA sense strand
ggagaaaugugauguuaca

SEQ ID NO: 751027 - RNA, 19 nt, Homo sapiens
  misc_RNA (1)...(19): siRNA sense strand
caccauaacugucguugua

SEQ ID NO: 751028 - RNA, 19 nt, Homo sapiens
  misc_RNA (1)...(19): siRNA sense strand
gcaaugcucuucaucaaag

SEQ ID NO: 751029 - RNA, 19 nt, Homo sapiens
  misc_RNA (1)...(19): siRNA sense strand
ggagacaauucugcaguua

SEQ ID NO: 751030 - RNA, 19 nt, Homo sapiens
  misc_RNA (1)...(19): siRNA sense strand
uaacuacaccuacuacuuu

SEQ ID NO: 751031 - RNA, 19 nt, Homo sapiens
  misc_RNA (1)...(19): siRNA sense strand
ugaaagaccuuaacuuguc

SEQ ID NO: 751032 - RNA, 19 nt, Homo sapiens
  misc_RNA (1)...(19): siRNA sense strand
ugaagaaacuagauagaga

SEQ ID NO: 751033 - RNA, 19 nt, Homo sapiens
  misc_RNA (1)...(19): siRNA sense strand
ccaagaaacaggcaacaua

SEQ ID NO: 751034 - RNA, 19 nt, Homo sapiens
  misc_RNA (1)...(19): siRNA sense strand
gaaaguaaagguugaagau

SEQ ID NO: 751035 - RNA, 19 nt, Homo sapiens
  misc_RNA (1)...(19): siRNA sense strand
cagaugauguugacaguga

SEQ ID NO: 751036 - RNA, 19 nt, Homo sapiens
  misc_RNA (1)...(19): siRNA sense strand
caagaaacaggcaacauaa

SEQ ID NO: 751037 - RNA, 19 nt, Homo sapiens
  misc_RNA (1)...(19): siRNA sense strand
gcaguuacgcucuccauuu

SEQ ID NO: 751038 - RNA, 19 nt, Homo sapiens
  misc_RNA (1)...(19): siRNA sense strand
gagauuauuucaccucaau

SEQ ID NO: 751039 - RNA, 19 nt, Homo sapiens
  misc_RNA (1)...(19): siRNA sense strand
ccacuggacuuaucacaau

SEQ ID NO: 751040 - RNA, 19 nt, Homo sapiens
  misc_RNA (1)...(19): siRNA sense strand
gaaacagagucacacuaga

SEQ ID NO: 751041 - RNA, 19 nt, Homo sapiens
  misc_RNA (1)...(19): siRNA sense strand
gaccaaugcuacacugauu

SEQ ID NO: 751042 - RNA, 19 nt, Homo sapiens
  misc_RNA (1)...(19): siRNA sense strand
gcauugaucgugagaaauu

SEQ ID NO: 751043 - RNA, 19 nt, Homo sapiens
  misc_RNA (1)...(19): siRNA sense strand
gauguauccucaccaacua

SEQ ID NO: 751044 - RNA, 19 nt, Homo sapiens
  misc_RNA (1)...(19): siRNA sense strand
ggaauaaacggaguucaaa

SEQ ID NO: 751045 - RNA, 19 nt, Homo sapiens
  misc_RNA (1)...(19): siRNA sense strand
caacauugccaggagauua

SEQ ID NO: 751046 - RNA, 19 nt, Homo sapiens
  misc_RNA (1)...(19): siRNA sense strand
gaagaaacuagauagagaa

SEQ ID NO: 751047 - RNA, 19 nt, Homo sapiens
  misc_RNA (1)...(19): siRNA sense strand
caucacugcuguaguaaga

SEQ ID NO: 751048 - RNA, 19 nt, Homo sapiens
  misc_RNA (1)...(19): siRNA sense strand
uuucaucacugcuguagua

SEQ ID NO: 751049 - RNA, 19 nt, Homo sapiens
  misc_RNA (1)...(19): siRNA sense strand
uaacugauccugauuaugg

SEQ ID NO: 751050 - RNA, 19 nt, Homo sapiens
  misc_RNA (1)...(19): siRNA sense strand
caacaguuaucaacauauc

SEQ ID NO: 751051 - RNA, 19 nt, Homo sapiens
  misc_RNA (1)...(19): siRNA sense strand
ugacacaguuguucuuuca

SEQ ID NO: 751052 - RNA, 19 nt, Homo sapiens
  misc_RNA (1)...(19): siRNA sense strand
gguugaagaugguggcuuu

SEQ ID NO: 751053 - RNA, 19 nt, Homo sapiens
  misc_RNA (1)...(19): siRNA sense strand
gagaaauuaugugcuggua

SEQ ID NO: 751054 - RNA, 19 nt, Homo sapiens
  misc_RNA (1)...(19): siRNA sense strand
ggugucauccgaccaaaua

SEQ ID NO: 751055 - RNA, 19 nt, Homo sapiens
  misc_RNA (1)...(19): siRNA sense strand
caauggugcugguaaaugu

SEQ ID NO: 751056 - RNA, 19 nt, Homo sapiens
  misc_RNA (1)...(19): siRNA sense strand
ggacuuaucacaaucaaag

SEQ ID NO: 751057 - RNA, 19 nt, Homo sapiens
  misc_RNA (1)...(19): siRNA sense strand
ccacuucucuuucagcaau

SEQ ID NO: 751058 - RNA, 19 nt, Homo sapiens
  misc_RNA (1)...(19): siRNA sense strand
ucauaacugugacggauaa

SEQ ID NO: 751059 - RNA, 19 nt, Homo sapiens
  misc_RNA (1)...(19): siRNA sense strand
ccauaaaugugguugaugu

SEQ ID NO: 751060 - RNA, 19 nt, Homo sapiens
  misc_RNA (1)...(19): siRNA sense strand
gacaagaugccacaacuga

SEQ ID NO: 751061 - RNA, 19 nt, Homo sapiens
  misc_RNA (1)...(19): siRNA sense strand
ggaaacagagucacacuag

SEQ ID NO: 751062 - RNA, 19 nt, Homo sapiens
  misc_RNA (1)...(19): siRNA sense strand
ugacagugauggaaacaga

SEQ ID NO: 751063 - RNA, 19 nt, Homo sapiens
  misc_RNA (1)...(19): siRNA sense strand
caaaguaaccauaaaugug

SEQ ID NO: 751064 - RNA, 19 nt, Homo sapiens
  misc_RNA (1)...(19): siRNA sense strand
ccucaaagauccaguacug

SEQ ID NO: 751065 - RNA, 19 nt, Homo sapiens
  misc_RNA (1)...(19): siRNA sense strand
acaguggucuuucagguaa

SEQ ID NO: 751066 - RNA, 19 nt, Homo sapiens
  misc_RNA (1)...(19): siRNA sense strand
ucagaucccuacagcguuu

SEQ ID NO: 751067 - RNA, 19 nt, Homo sapiens
  misc_RNA (1)...(19): siRNA sense strand
cacuagaccuuccuauuga

SEQ ID NO: 751068 - RNA, 19 nt, Homo sapiens
  misc_RNA (1)...(19): siRNA sense strand
gaaaacaggcagaugauaa

SEQ ID NO: 751069 - RNA, 19 nt, Homo sapiens
  misc_RNA (1)...(19): siRNA sense strand
caagaugccacaacugauu

SEQ ID NO: 751070 - RNA, 19 nt, Homo sapiens
  misc_RNA (1)...(19): siRNA sense strand
caagaacugccucucgaua

SEQ ID NO: 751071 - RNA, 19 nt, Homo sapiens
  misc_RNA (1)...(19): siRNA sense strand
caaugacacuggcaugaau

SEQ ID NO: 751072 - RNA, 19 nt, Homo sapiens
  misc_RNA (1)...(19): siRNA sense strand
gaagucaguauaccagaaa

SEQ ID NO: 751073 - RNA, 19 nt, Homo sapiens
  misc_RNA (1)...(19): siRNA sense strand
gggaagagaaggauaccua

SEQ ID NO: 751074 - RNA, 19 nt, Homo sapiens
  misc_RNA (1)...(19): siRNA sense strand
ugccacagaugcugacaua

SEQ ID NO: 751075 - RNA, 19 nt, Homo sapiens
  misc_RNA (1)...(19): siRNA sense strand
ccuuaaggcugcucagaaa

SEQ ID NO: 751076 - RNA, 19 nt, Homo sapiens
  misc_RNA (1)...(19): siRNA sense strand
guugaaagaccuuaacuug

SEQ ID NO: 751077 - RNA, 19 nt, Homo sapiens
  misc_RNA (1)...(19): siRNA sense strand
uaagauacaucgucaaucc

SEQ ID NO: 751078 - RNA, 19 nt, Homo sapiens
  misc_RNA (1)...(19): siRNA sense strand
ggaaaguacaauuggguaa

SEQ ID NO: 751079 - RNA, 19 nt, Homo sapiens
  misc_RNA (1)...(19): siRNA sense strand
gauucucucuucaguguug

SEQ ID NO: 751080 - RNA, 19 nt, Homo sapiens
  misc_RNA (1)...(19): siRNA sense strand
gaaugacaauagcccaguu

SEQ ID NO: 751081 - RNA, 19 nt, Homo sapiens
  misc_RNA (1)...(19): siRNA sense strand
ggcaagugaugguggauug

SEQ ID NO: 751082 - RNA, 19 nt, Homo sapiens
  misc_RNA (1)...(19): siRNA sense strand
ucucuucaguguuguaauu

SEQ ID NO: 751083 - RNA, 19 nt, Homo sapiens
  misc_RNA (1)...(19): siRNA sense strand
gagacaagaugccacaacu

SEQ ID NO: 751084 - RNA, 19 nt, Homo sapiens
  misc_RNA (1)...(19): siRNA sense strand
acacuagaccuuccuauug

SEQ ID NO: 751085 - RNA, 19 nt, Homo sapiens
  misc_RNA (1)...(19): siRNA sense strand
gaguguuggucaaagcuaa

SEQ ID NO: 751086 - RNA, 19 nt, Homo sapiens
  misc_RNA (1)...(19): siRNA sense strand
ugacaaccacccagucuuu

SEQ ID NO: 751087 - RNA, 19 nt, Homo sapiens
  misc_RNA (1)...(19): siRNA sense strand
guacaagaccggagaugug

SEQ ID NO: 751088 - RNA, 19 nt, Homo sapiens
  misc_RNA (1)...(19): siRNA sense strand
cagccugccuuccaaauuc

SEQ ID NO: 751089 - RNA, 19 nt, Homo sapiens
  misc_RNA (1)...(19): siRNA sense strand
uuacagaccuugguuuaca

SEQ ID NO: 751090 - RNA, 19 nt, Homo sapiens
  misc_RNA (1)...(19): siRNA sense strand
gagguucguuacagcauug

SEQ ID NO: 751091 - RNA, 19 nt, Homo sapiens
  misc_RNA (1)...(19): siRNA sense strand
ugacaugcuucacagauca

SEQ ID NO: 751092 - RNA, 19 nt, Homo sapiens
  misc_RNA (1)...(19): siRNA sense strand
aaauugcucucauaacugu

SEQ ID NO: 751093 - RNA, 19 nt, Homo sapiens
  misc_RNA (1)...(19): siRNA sense strand
cagcaacaguuaucaacau

SEQ ID NO: 751094 - RNA, 19 nt, Homo sapiens
  misc_RNA (1)...(19): siRNA sense strand
ggaggaaacacaagagauc

SEQ ID NO: 751095 - RNA, 19 nt, Homo sapiens
  misc_RNA (1)...(19): siRNA sense strand
ugaggauggugguagagua

SEQ ID NO: 751096 - RNA, 19 nt, Homo sapiens
  misc_RNA (1)...(19): siRNA sense strand
uaaggccaguauucaguaa

SEQ ID NO: 751097 - RNA, 19 nt, Homo sapiens
  misc_RNA (1)...(19): siRNA sense strand
ggagaugugccacugauuc

SEQ ID NO: 751098 - RNA, 19 nt, Homo sapiens
  misc_RNA (1)...(19): siRNA sense strand
ucaaagaaccacuggauag

SEQ ID NO: 751099 - RNA, 19 nt, Homo sapiens
  misc_RNA (1)...(19): siRNA sense strand
ggaguuagauagggaagag

SEQ ID NO: 751100 - RNA, 19 nt, Homo sapiens
  misc_RNA (1)...(19): siRNA sense strand
augcuacacugauuaauga

SEQ ID NO: 751101 - RNA, 19 nt, Homo sapiens
  misc_RNA (1)...(19): siRNA sense strand
gguagaguaucacguucuu

SEQ ID NO: 751102 - RNA, 19 nt, Homo sapiens
  misc_RNA (1)...(19): siRNA sense strand
gauaggcgacuuguugaaa

SEQ ID NO: 751103 - RNA, 19 nt, Homo sapiens
  misc_RNA (1)...(19): siRNA sense strand
gcugauguauccucaccaa

SEQ ID NO: 751104 - RNA, 19 nt, Homo sapiens
  misc_RNA (1)...(19): siRNA sense strand
ucaaucuguucgugaauga

SEQ ID NO: 751105 - RNA, 19 nt, Homo sapiens
  misc_RNA (1)...(19): siRNA sense strand
ucgcauugaucgugagaaa

SEQ ID NO: 751106 - RNA, 19 nt, Homo sapiens
  misc_RNA (1)...(19): siRNA sense strand
guaacuacaccuacuacuu

SEQ ID NO: 751107 - RNA, 19 nt, Homo sapiens
  misc_RNA (1)...(19): siRNA sense strand
ccaaugcuacacugauuaa

SEQ ID NO: 751108 - RNA, 19 nt, Homo sapiens
  misc_RNA (1)...(19): siRNA sense strand
aaacaggcaacauaacauu

SEQ ID NO: 751109 - RNA, 19 nt, Homo sapiens
  misc_RNA (1)...(19): siRNA sense strand
gaaacaggcaacauaacau

SEQ ID NO: 751110 - RNA, 19 nt, Homo sapiens
  misc_RNA (1)...(19): siRNA sense strand
ggacuaaucacuguaacug

SEQ ID NO: 751111 - RNA, 19 nt, Homo sapiens
  misc_RNA (1)...(19): siRNA sense strand
caaaauugcucucauaacu

SEQ ID NO: 751112 - RNA, 19 nt, Homo sapiens
  misc_RNA (1)...(19): siRNA sense strand
acacaguuguucuuucaga

SEQ ID NO: 751113 - RNA, 19 nt, Homo sapiens
  misc_RNA (1)...(19): siRNA sense strand
ugaagucaguauaccagaa

SEQ ID NO: 751114 - RNA, 19 nt, Homo sapiens
  misc_RNA (1)...(19): siRNA sense strand
caucgucaauccugucaau

SEQ ID NO: 751115 - RNA, 19 nt, Homo sapiens
  misc_RNA (1)...(19): siRNA sense strand
ccaaaguaaccauaaaugu

SEQ ID NO: 751116 - RNA, 19 nt, Homo sapiens
  misc_RNA (1)...(19): siRNA sense strand
ggauggugguagaguauca

SEQ ID NO: 751117 - RNA, 19 nt, Homo sapiens
  misc_RNA (1)...(19): siRNA sense strand
caaugucacagucuuugua

SEQ ID NO: 751118 - RNA, 19 nt, Homo sapiens
  misc_RNA (1)...(19): siRNA sense strand
gcagacagugggccuaaug

SEQ ID NO: 751119 - RNA, 19 nt, Homo sapiens
  misc_RNA (1)...(19): siRNA sense strand
aaacuaaggcagaugaugu

SEQ ID NO: 751120 - RNA, 19 nt, Homo sapiens
  misc_RNA (1)...(19): siRNA sense strand
auacugagauagcugaugu

SEQ ID NO: 751121 - RNA, 19 nt, Homo sapiens
  misc_RNA (1)...(19): siRNA sense strand
gugccaaaguaaccauaaa

SEQ ID NO: 751122 - RNA, 19 nt, Homo sapiens
  misc_RNA (1)...(19): siRNA sense strand
guaggacuaaucacuguaa

SEQ ID NO: 751123 - RNA, 19 nt, Homo sapiens
  misc_RNA (1)...(19): siRNA sense strand
gaaauuaugugcugguauc

SEQ ID NO: 751124 - RNA, 19 nt, Homo sapiens
  misc_RNA (1)...(19): siRNA sense strand
caagagaucuguuugcaau

SEQ ID NO: 751125 - RNA, 19 nt, Homo sapiens
  misc_RNA (1)...(19): siRNA sense strand
gaugguggcuuuccucaaa

SEQ ID NO: 751126 - RNA, 19 nt, Homo sapiens
  misc_RNA (1)...(19): siRNA sense strand
ggagaaaugugauguuaca

SEQ ID NO: 751127 - RNA, 19 nt, Homo sapiens
  misc_RNA (1)...(19): siRNA sense strand
caccauaacugucguugua

SEQ ID NO: 751128 - RNA, 19 nt, Homo sapiens
  misc_RNA (1)...(19): siRNA sense strand
gcaaugcucuucaucaaag

SEQ ID NO: 751129 - RNA, 19 nt, Homo sapiens
  misc_RNA (1)...(19): siRNA sense strand
ggagacaauucugcaguua

SEQ ID NO: 751130 - RNA, 19 nt, Homo sapiens
  misc_RNA (1)...(19): siRNA sense strand
uaacuacaccuacuacuuu

SEQ ID NO: 751131 - RNA, 19 nt, Homo sapiens
  misc_RNA (1)...(19): siRNA sense strand
ugaaagaccuuaacuuguc

SEQ ID NO: 751132 - RNA, 19 nt, Homo sapiens
  misc_RNA (1)...(19): siRNA sense strand
ugaagaaacuagauagaga

SEQ ID NO: 751133 - RNA, 19 nt, Homo sapiens
  misc_RNA (1)...(19): siRNA sense strand
ccaagaaacaggcaacaua

SEQ ID NO: 751134 - RNA, 19 nt, Homo sapiens
  misc_RNA (1)...(19): siRNA sense strand
gaaaguaaagguugaagau

SEQ ID NO: 751135 - RNA, 19 nt, Homo sapiens
  misc_RNA (1)...(19): siRNA sense strand
cagaugauguugacaguga

SEQ ID NO: 751136 - RNA, 19 nt, Homo sapiens
  misc_RNA (1)...(19): siRNA sense strand
caagaaacaggcaacauaa

SEQ ID NO: 751137 - RNA, 19 nt, Homo sapiens
  misc_RNA (1)...(19): siRNA sense strand
gcaguuacgcucuccauuu

SEQ ID NO: 751138 - RNA, 19 nt, Homo sapiens
  misc_RNA (1)...(19): siRNA sense strand
gagauuauuucaccucaau

SEQ ID NO: 751139 - RNA, 19 nt, Homo sapiens
  misc_RNA (1)...(19): siRNA sense strand
ccacuggacuuaucacaau

SEQ ID NO: 751140 - RNA, 19 nt, Homo sapiens
  misc_RNA (1)...(19): siRNA sense strand
gaaacagagucacacuaga

SEQ ID NO: 751141 - RNA, 19 nt, Homo sapiens
  misc_RNA (1)...(19): siRNA sense strand
gaccaaugcuacacugauu

SEQ ID NO: 751142 - RNA, 19 nt, Homo sapiens
  misc_RNA (1)...(19): siRNA sense strand
gcauugaucgugagaaauu

SEQ ID NO: 751143 - RNA, 19 nt, Homo sapiens
  misc_RNA (1)...(19): siRNA sense strand
gauguauccucaccaacua

SEQ ID NO: 751144 - RNA, 19 nt, Homo sapiens
  misc_RNA (1)...(19): siRNA sense strand
ggaauaaacggaguucaaa

SEQ ID NO: 751145 - RNA, 19 nt, Homo sapiens
  misc_RNA (1)...(19): siRNA sense strand
caacauugccaggagauua

SEQ ID NO: 751146 - RNA, 19 nt, Homo sapiens
  misc_RNA (1)...(19): siRNA sense strand
gaagaaacuagauagagaa

SEQ ID NO: 751147 - RNA, 19 nt, Homo sapiens
  misc_RNA (1)...(19): siRNA sense strand
caucacugcuguaguaaga

SEQ ID NO: 751148 - RNA, 19 nt, Homo sapiens
  misc_RNA (1)...(19): siRNA sense strand
uuucaucacugcuguagua

SEQ ID NO: 751149 - RNA, 19 nt, Homo sapiens
  misc_RNA (1)...(19): siRNA sense strand
uaacugauccugauuaugg

SEQ ID NO: 751150 - RNA, 19 nt, Homo sapiens
  misc_RNA (1)...(19): siRNA sense strand
caacaguuaucaacauauc

SEQ ID NO: 751151 - RNA, 19 nt, Homo sapiens
  misc_RNA (1)...(19): siRNA sense strand
ugacacaguuguucuuuca

SEQ ID NO: 751152 - RNA, 19 nt, Homo sapiens
  misc_RNA (1)...(19): siRNA sense strand
gguugaagaugguggcuuu

SEQ ID NO: 751153 - RNA, 19 nt, Homo sapiens
  misc_RNA (1)...(19): siRNA sense strand
gagaaauuaugugcuggua

SEQ ID NO: 751154 - RNA, 19 nt, Homo sapiens
  misc_RNA (1)...(19): siRNA sense strand
ggugucauccgaccaaaua

SEQ ID NO: 751155 - RNA, 19 nt, Homo sapiens
  misc_RNA (1)...(19): siRNA sense strand
caauggugcugguaaaugu

SEQ ID NO: 751156 - RNA, 19 nt, Homo sapiens
  misc_RNA (1)...(19): siRNA sense strand
ggacuuaucacaaucaaag

SEQ ID NO: 751157 - RNA, 19 nt, Homo sapiens
  misc_RNA (1)...(19): siRNA sense strand
ccacuucucuuucagcaau

SEQ ID NO: 751158 - RNA, 19 nt, Homo sapiens
  misc_RNA (1)...(19): siRNA sense strand
ucauaacugugacggauaa

SEQ ID NO: 751159 - RNA, 19 nt, Homo sapiens
  misc_RNA (1)...(19): siRNA sense strand
ccauaaaugugguugaugu

SEQ ID NO: 751160 - RNA, 19 nt, Homo sapiens
  misc_RNA (1)...(19): siRNA sense strand
gacaagaugccacaacuga

SEQ ID NO: 751161 - RNA, 19 nt, Homo sapiens
  misc_RNA (1)...(19): siRNA sense strand
ggaaacagagucacacuag

SEQ ID NO: 751162 - RNA, 19 nt, Homo sapiens
  misc_RNA (1)...(19): siRNA sense strand
ugacagugauggaaacaga

SEQ ID NO: 751163 - RNA, 19 nt, Homo sapiens
  misc_RNA (1)...(19): siRNA sense strand
caaaguaaccauaaaugug

SEQ ID NO: 751164 - RNA, 19 nt, Homo sapiens
  misc_RNA (1)...(19): siRNA sense strand
ccucaaagauccaguacug

SEQ ID NO: 751165 - RNA, 19 nt, Homo sapiens
  misc_RNA (1)...(19): siRNA sense strand
acaguggucuuucagguaa

SEQ ID NO: 751166 - RNA, 19 nt, Homo sapiens
  misc_RNA (1)...(19): siRNA sense strand
ucagaucccuacagcguuu

SEQ ID NO: 751167 - RNA, 19 nt, Homo sapiens
  misc_RNA (1)...(19): siRNA sense strand
cacuagaccuuccuauuga

SEQ ID NO: 751168 - RNA, 19 nt, Homo sapiens
  misc_RNA (1)...(19): siRNA sense strand
gaaaacaggcagaugauaa

SEQ ID NO: 751169 - RNA, 19 nt, Homo sapiens
  misc_RNA (1)...(19): siRNA sense strand
caagaugccacaacugauu

SEQ ID NO: 751170 - RNA, 19 nt, Homo sapiens
  misc_RNA (1)...(19): siRNA sense strand
caagaacugccucucgaua

SEQ ID NO: 751171 - RNA, 19 nt, Homo sapiens
  misc_RNA (1)...(19): siRNA sense strand
caaugacacuggcaugaau

SEQ ID NO: 751172 - RNA, 19 nt, Homo sapiens
  misc_RNA (1)...(19): siRNA sense strand
gaagucaguauaccagaaa

SEQ ID NO: 751173 - RNA, 19 nt, Homo sapiens
  misc_RNA (1)...(19): siRNA sense strand
gggaagagaaggauaccua

SEQ ID NO: 751174 - RNA, 19 nt, Homo sapiens
  misc_RNA (1)...(19): siRNA sense strand
ugccacagaugcugacaua

SEQ ID NO: 751175 - RNA, 19 nt, Homo sapiens
  misc_RNA (1)...(19): siRNA sense strand
ccuuaaggcugcucagaaa

SEQ ID NO: 751176 - RNA, 19 nt, Homo sapiens
  misc_RNA (1)...(19): siRNA sense strand
guugaaagaccuuaacuug

SEQ ID NO: 751177 - RNA, 19 nt, Homo sapiens
  misc_RNA (1)...(19): siRNA sense strand
uaagauacaucgucaaucc

SEQ ID NO: 751178 - RNA, 19 nt, Homo sapiens
  misc_RNA (1)...(19): siRNA sense strand
ggaaaguacaauuggguaa

SEQ ID NO: 751179 - RNA, 19 nt, Homo sapiens
  misc_RNA (1)...(19): siRNA sense strand
gauucucucuucaguguug

SEQ ID NO: 751180 - RNA, 19 nt, Homo sapiens
  misc_RNA (1)...(19): siRNA sense strand
gaaugacaauagcccaguu

SEQ ID NO: 751181 - RNA, 19 nt, Homo sapiens
  misc_RNA (1)...(19): siRNA sense strand
ggcaagugaugguggauug

SEQ ID NO: 751182 - RNA, 19 nt, Homo sapiens
  misc_RNA (1)...(19): siRNA sense strand
ucucuucaguguuguaauu

SEQ ID NO: 751183 - RNA, 19 nt, Homo sapiens
  misc_RNA (1)...(19): siRNA sense strand
gagacaagaugccacaacu

SEQ ID NO: 751184 - RNA, 19 nt, Homo sapiens
  misc_RNA (1)...(19): siRNA sense strand
acacuagaccuuccuauug

SEQ ID NO: 751185 - RNA, 19 nt, Homo sapiens
  misc_RNA (1)...(19): siRNA sense strand
gaguguuggucaaagcuaa

SEQ ID NO: 751186 - RNA, 19 nt, Homo sapiens
  misc_RNA (1)...(19): siRNA sense strand
ugacaaccacccagucuuu

SEQ ID NO: 751187 - RNA, 19 nt, Homo sapiens
  misc_RNA (1)...(19): siRNA sense strand
guacaagaccggagaugug

SEQ ID NO: 751188 - RNA, 19 nt, Homo sapiens
  misc_RNA (1)...(19): siRNA sense strand
cagccugccuuccaaauuc

SEQ ID NO: 751189 - RNA, 19 nt, Homo sapiens
  misc_RNA (1)...(19): siRNA sense strand
uuacagaccuugguuuaca

SEQ ID NO: 751190 - RNA, 19 nt, Homo sapiens
  misc_RNA (1)...(19): siRNA sense strand
gagguucguuacagcauug

SEQ ID NO: 751191 - RNA, 19 nt, Homo sapiens
  misc_RNA (1)...(19): siRNA sense strand
ugacaugcuucacagauca

SEQ ID NO: 751192 - RNA, 19 nt, Homo sapiens
  misc_RNA (1)...(19): siRNA sense strand
aaauugcucucauaacugu

SEQ ID NO: 751193 - RNA, 19 nt, Homo sapiens
  misc_RNA (1)...(19): siRNA sense strand
cagcaacaguuaucaacau

SEQ ID NO: 751194 - RNA, 19 nt, Homo sapiens
  misc_RNA (1)...(19): siRNA sense strand
ggaggaaacacaagagauc

SEQ ID NO: 751195 - RNA, 19 nt, Homo sapiens
  misc_RNA (1)...(19): siRNA sense strand
ugaggauggugguagagua

SEQ ID NO: 751196 - RNA, 19 nt, Homo sapiens
  misc_RNA (1)...(19): siRNA sense strand
uaaggccaguauucaguaa

SEQ ID NO: 751197 - RNA, 19 nt, Homo sapiens
  misc_RNA (1)...(19): siRNA sense strand
ggagaugugccacugauuc

SEQ ID NO: 751198 - RNA, 19 nt, Homo sapiens
  misc_RNA (1)...(19): siRNA sense strand
ucaaagaaccacuggauag

SEQ ID NO: 751199 - RNA, 19 nt, Homo sapiens
  misc_RNA (1)...(19): siRNA sense strand
ggaguuagauagggaagag

SEQ ID NO: 751200 - RNA, 19 nt, Homo sapiens
  misc_RNA (1)...(19): siRNA sense strand
augcuacacugauuaauga

SEQ ID NO: 751201 - RNA, 19 nt, Homo sapiens
  misc_RNA (1)...(19): siRNA sense strand
gguagaguaucacguucuu

SEQ ID NO: 751202 - RNA, 19 nt, Homo sapiens
  misc_RNA (1)...(19): siRNA sense strand
gauaggcgacuuguugaaa

SEQ ID NO: 751203 - RNA, 19 nt, Homo sapiens
  misc_RNA (1)...(19): siRNA sense strand
gcugauguauccucaccaa

SEQ ID NO: 751204 - RNA, 19 nt, Homo sapiens
  misc_RNA (1)...(19): siRNA sense strand
ucaaucuguucgugaauga

SEQ ID NO: 751205 - RNA, 19 nt, Homo sapiens
  misc_RNA (1)...(19): siRNA sense strand
ucgcauugaucgugagaaa

SEQ ID NO: 751206 - RNA, 19 nt, Homo sapiens
  misc_RNA (1)...(19): siRNA sense strand
guaacuacaccuacuacuu

SEQ ID NO: 751207 - RNA, 19 nt, Homo sapiens
  misc_RNA (1)...(19): siRNA sense strand
ccaaugcuacacugauuaa

SEQ ID NO: 751208 - RNA, 19 nt, Homo sapiens
  misc_RNA (1)...(19): siRNA sense strand
aaacaggcaacauaacauu

SEQ ID NO: 751209 - RNA, 19 nt, Homo sapiens
  misc_RNA (1)...(19): siRNA sense strand
gaaacaggcaacauaacau

SEQ ID NO: 751210 - RNA, 19 nt, Homo sapiens
  misc_RNA (1)...(19): siRNA sense strand
ggacuaaucacuguaacug

SEQ ID NO: 751211 - RNA, 19 nt, Homo sapiens
  misc_RNA (1)...(19): siRNA sense strand
caaaauugcucucauaacu

SEQ ID NO: 751212 - RNA, 19 nt, Homo sapiens
  misc_RNA (1)...(19): siRNA sense strand
acacaguuguucuuucaga

SEQ ID NO: 751213 - RNA, 19 nt, Homo sapiens
  misc_RNA (1)...(19): siRNA sense strand
ugaagucaguauaccagaa

SEQ ID NO: 751214 - RNA, 19 nt, Homo sapiens
  misc_RNA (1)...(19): siRNA sense strand
caucgucaauccugucaau

SEQ ID NO: 751215 - RNA, 19 nt, Homo sapiens
  misc_RNA (1)...(19): siRNA sense strand
ccaaaguaaccauaaaugu

SEQ ID NO: 751216 - RNA, 19 nt, Homo sapiens
  misc_RNA (1)...(19): siRNA sense strand
ggauggugguagaguauca

SEQ ID NO: 751217 - RNA, 19 nt, Homo sapiens
  misc_RNA (1)...(19): siRNA sense strand
caaugucacagucuuugua

SEQ ID NO: 751218 - RNA, 19 nt, Homo sapiens
  misc_RNA (1)...(19): siRNA sense strand
gcagacagugggccuaaug

SEQ ID NO: 751219 - RNA, 19 nt, Homo sapiens
  misc_RNA (1)...(19): siRNA sense strand
aaacuaaggcagaugaugu

SEQ ID NO: 751220 - RNA, 19 nt, Homo sapiens
  misc_RNA (1)...(19): siRNA sense strand
auacugagauagcugaugu

SEQ ID NO: 751221 - RNA, 19 nt, Homo sapiens
  misc_RNA (1)...(19): siRNA sense strand
gugccaaaguaaccauaaa

SEQ ID NO: 751222 - RNA, 19 nt, Homo sapiens
  misc_RNA (1)...(19): siRNA sense strand
guaggacuaaucacuguaa

SEQ ID NO: 751223 - RNA, 19 nt, Homo sapiens
  misc_RNA (1)...(19): siRNA sense strand
gaaauuaugugcugguauc

SEQ ID NO: 751224 - RNA, 19 nt, Homo sapiens
  misc_RNA (1)...(19): siRNA sense strand
caagagaucuguuugcaau

SEQ ID NO: 751225 - RNA, 19 nt, Homo sapiens
  misc_RNA (1)...(19): siRNA sense strand
gaugguggcuuuccucaaa

SEQ ID NO: 751226 - RNA, 19 nt, Homo sapiens
  misc_RNA (1)...(19): siRNA sense strand
ggagaaaugugauguuaca

SEQ ID NO: 751227 - RNA, 19 nt, Homo sapiens
  misc_RNA (1)...(19): siRNA sense strand
caccauaacugucguugua

SEQ ID NO: 751228 - RNA, 19 nt, Homo sapiens
  misc_RNA (1)...(19): siRNA sense strand
gcaaugcucuucaucaaag

SEQ ID NO: 751229 - RNA, 19 nt, Homo sapiens
  misc_RNA (1)...(19): siRNA sense strand
ggagacaauucugcaguua

SEQ ID NO: 751230 - RNA, 19 nt, Homo sapiens
  misc_RNA (1)...(19): siRNA sense strand
uaacuacaccuacuacuuu

SEQ ID NO: 751231 - RNA, 19 nt, Homo sapiens
  misc_RNA (1)...(19): siRNA sense strand
ugaaagaccuuaacuuguc

SEQ ID NO: 751232 - RNA, 19 nt, Homo sapiens
  misc_RNA (1)...(19): siRNA sense strand
ugaagaaacuagauagaga

SEQ ID NO: 751233 - RNA, 19 nt, Homo sapiens
  misc_RNA (1)...(19): siRNA sense strand
ccaagaaacaggcaacaua

SEQ ID NO: 751234 - RNA, 19 nt, Homo sapiens
  misc_RNA (1)...(19): siRNA sense strand
gaaaguaaagguugaagau

SEQ ID NO: 751235 - RNA, 19 nt, Homo sapiens
  misc_RNA (1)...(19): siRNA sense strand
cagaugauguugacaguga

SEQ ID NO: 751236 - RNA, 19 nt, Homo sapiens
  misc_RNA (1)...(19): siRNA sense strand
caagaaacaggcaacauaa

SEQ ID NO: 751237 - RNA, 19 nt, Homo sapiens
  misc_RNA (1)...(19): siRNA sense strand
gcaguuacgcucuccauuu

SEQ ID NO: 751238 - RNA, 19 nt, Homo sapiens
  misc_RNA (1)...(19): siRNA sense strand
gagauuauuucaccucaau

SEQ ID NO: 751239 - RNA, 19 nt, Homo sapiens
  misc_RNA (1)...(19): siRNA sense strand
ccacuggacuuaucacaau

SEQ ID NO: 751240 - RNA, 19 nt, Homo sapiens
  misc_RNA (1)...(19): siRNA sense strand
gaaacagagucacacuaga

SEQ ID NO: 751241 - RNA, 19 nt, Homo sapiens
  misc_RNA (1)...(19): siRNA sense strand
gaccaaugcuacacugauu

SEQ ID NO: 751242 - RNA, 19 nt, Homo sapiens
  misc_RNA (1)...(19): siRNA sense strand
gcauugaucgugagaaauu

SEQ ID NO: 751243 - RNA, 19 nt, Homo sapiens
  misc_RNA (1)...(19): siRNA sense strand
gauguauccucaccaacua

SEQ ID NO: 751244 - RNA, 19 nt, Homo sapiens
  misc_RNA (1)...(19): siRNA sense strand
ggaauaaacggaguucaaa

SEQ ID NO: 751245 - RNA, 19 nt, Homo sapiens
  misc_RNA (1)...(19): siRNA sense strand
caacauugccaggagauua

SEQ ID NO: 751246 - RNA, 19 nt, Homo sapiens
  misc_RNA (1)...(19): siRNA sense strand
gaagaaacuagauagagaa

SEQ ID NO: 751247 - RNA, 19 nt, Homo sapiens
  misc_RNA (1)...(19): siRNA sense strand
caucacugcuguaguaaga

SEQ ID NO: 751248 - RNA, 19 nt, Homo sapiens
  misc_RNA (1)...(19): siRNA sense strand
uuucaucacugcuguagua

SEQ ID NO: 751249 - RNA, 19 nt, Homo sapiens
  misc_RNA (1)...(19): siRNA sense strand
uaacugauccugauuaugg

SEQ ID NO: 751250 - RNA, 19 nt, Homo sapiens
  misc_RNA (1)...(19): siRNA sense strand
caacaguuaucaacauauc

SEQ ID NO: 751251 - RNA, 19 nt, Homo sapiens
  misc_RNA (1)...(19): siRNA sense strand
ugacacaguuguucuuuca

SEQ ID NO: 751252 - RNA, 19 nt, Homo sapiens
  misc_RNA (1)...(19): siRNA sense strand
gguugaagaugguggcuuu

SEQ ID NO: 751253 - RNA, 19 nt, Homo sapiens
  misc_RNA (1)...(19): siRNA sense strand
gagaaauuaugugcuggua

SEQ ID NO: 751254 - RNA, 19 nt, Homo sapiens
  misc_RNA (1)...(19): siRNA sense strand
ggugucauccgaccaaaua

SEQ ID NO: 751255 - RNA, 19 nt, Homo sapiens
  misc_RNA (1)...(19): siRNA sense strand
caauggugcugguaaaugu

SEQ ID NO: 751256 - RNA, 19 nt, Homo sapiens
  misc_RNA (1)...(19): siRNA sense strand
ggacuuaucacaaucaaag

SEQ ID NO: 751257 - RNA, 19 nt, Homo sapiens
  misc_RNA (1)...(19): siRNA sense strand
ccacuucucuuucagcaau

SEQ ID NO: 751258 - RNA, 19 nt, Homo sapiens
  misc_RNA (1)...(19): siRNA sense strand
ucauaacugugacggauaa

SEQ ID NO: 751259 - RNA, 19 nt, Homo sapiens
  misc_RNA (1)...(19): siRNA sense strand
ccauaaaugugguugaugu

SEQ ID NO: 751260 - RNA, 19 nt, Homo sapiens
  misc_RNA (1)...(19): siRNA sense strand
gacaagaugccacaacuga

SEQ ID NO: 751261 - RNA, 19 nt, Homo sapiens
  misc_RNA (1)...(19): siRNA sense strand
ggaaacagagucacacuag

SEQ ID NO: 751262 - RNA, 19 nt, Homo sapiens
  misc_RNA (1)...(19): siRNA sense strand
ugacagugauggaaacaga

SEQ ID NO: 751263 - RNA, 19 nt, Homo sapiens
  misc_RNA (1)...(19): siRNA sense strand
caaaguaaccauaaaugug

SEQ ID NO: 751264 - RNA, 19 nt, Homo sapiens
  misc_RNA (1)...(19): siRNA sense strand
ccucaaagauccaguacug

SEQ ID NO: 751265 - RNA, 19 nt, Homo sapiens
  misc_RNA (1)...(19): siRNA sense strand
acaguggucuuucagguaa

SEQ ID NO: 751266 - RNA, 19 nt, Homo sapiens
  misc_RNA (1)...(19): siRNA sense strand
ucagaucccuacagcguuu

SEQ ID NO: 751267 - RNA, 19 nt, Homo sapiens
  misc_RNA (1)...(19): siRNA sense strand
cacuagaccuuccuauuga

SEQ ID NO: 751268 - RNA, 19 nt, Homo sapiens
  misc_RNA (1)...(19): siRNA sense strand
gaaaacaggcagaugauaa

SEQ ID NO: 751269 - RNA, 19 nt, Homo sapiens
  misc_RNA (1)...(19): siRNA sense strand
caagaugccacaacugauu

SEQ ID NO: 751270 - RNA, 19 nt, Homo sapiens
  misc_RNA (1)...(19): siRNA sense strand
caagaacugccucucgaua

SEQ ID NO: 751271 - RNA, 19 nt, Homo sapiens
  misc_RNA (1)...(19): siRNA sense strand
caaugacacuggcaugaau

SEQ ID NO: 751272 - RNA, 19 nt, Homo sapiens
  misc_RNA (1)...(19): siRNA sense strand
gaagucaguauaccagaaa

SEQ ID NO: 751273 - RNA, 19 nt, Homo sapiens
  misc_RNA (1)...(19): siRNA sense strand
gggaagagaaggauaccua

SEQ ID NO: 751274 - RNA, 19 nt, Homo sapiens
  misc_RNA (1)...(19): siRNA sense strand
ugccacagaugcugacaua

SEQ ID NO: 751275 - RNA, 19 nt, Homo sapiens
  misc_RNA (1)...(19): siRNA sense strand
ccuuaaggcugcucagaaa

SEQ ID NO: 751276 - RNA, 19 nt, Homo sapiens
  misc_RNA (1)...(19): siRNA sense strand
guugaaagaccuuaacuug

SEQ ID NO: 751277 - RNA, 19 nt, Homo sapiens
  misc_RNA (1)...(19): siRNA sense strand
uaagauacaucgucaaucc

SEQ ID NO: 751278 - RNA, 19 nt, Homo sapiens
  misc_RNA (1)...(19): siRNA sense strand
ggaaaguacaauuggguaa

SEQ ID NO: 751279 - RNA, 19 nt, Homo sapiens
  misc_RNA (1)...(19): siRNA sense strand
gauucucucuucaguguug

SEQ ID NO: 751280 - RNA, 19 nt, Homo sapiens
  misc_RNA (1)...(19): siRNA sense strand
gaaugacaauagcccaguu

SEQ ID NO: 751281 - RNA, 19 nt, Homo sapiens
  misc_RNA (1)...(19): siRNA sense strand
ggcaagugaugguggauug

SEQ ID NO: 751282 - RNA, 19 nt, Homo sapiens
  misc_RNA (1)...(19): siRNA sense strand
ucucuucaguguuguaauu

SEQ ID NO: 751283 - RNA, 19 nt, Homo sapiens
  misc_RNA (1)...(19): siRNA sense strand
gagacaagaugccacaacu

SEQ ID NO: 751284 - RNA, 19 nt, Homo sapiens
  misc_RNA (1)...(19): siRNA sense strand
acacuagaccuuccuauug

SEQ ID NO: 751285 - RNA, 19 nt, Homo sapiens
  misc_RNA (1)...(19): siRNA sense strand
gaguguuggucaaagcuaa

SEQ ID NO: 751286 - RNA, 19 nt, Homo sapiens
  misc_RNA (1)...(19): siRNA sense strand
ugacaaccacccagucuuu

SEQ ID NO: 751287 - RNA, 19 nt, Homo sapiens
  misc_RNA (1)...(19): siRNA sense strand
guacaagaccggagaugug

SEQ ID NO: 751288 - RNA, 19 nt, Homo sapiens
  misc_RNA (1)...(19): siRNA sense strand
cagccugccuuccaaauuc

SEQ ID NO: 751289 - RNA, 19 nt, Homo sapiens
  misc_RNA (1)...(19): siRNA sense strand
uuacagaccuugguuuaca

SEQ ID NO: 751290 - RNA, 19 nt, Homo sapiens
  misc_RNA (1)...(19): siRNA sense strand
gagguucguuacagcauug

SEQ ID NO: 751291 - RNA, 19 nt, Homo sapiens
  misc_RNA (1)...(19): siRNA sense strand
ugacaugcuucacagauca

SEQ ID NO: 751292 - RNA, 19 nt, Homo sapiens
  misc_RNA (1)...(19): siRNA sense strand
aaauugcucucauaacugu

SEQ ID NO: 751293 - RNA, 19 nt, Homo sapiens
  misc_RNA (1)...(19): siRNA sense strand
cagcaacaguuaucaacau

SEQ ID NO: 751294 - RNA, 19 nt, Homo sapiens
  misc_RNA (1)...(19): siRNA sense strand
ggaggaaacacaagagauc

SEQ ID NO: 751295 - RNA, 19 nt, Homo sapiens
  misc_RNA (1)...(19): siRNA sense strand
ugaggauggugguagagua

SEQ ID NO: 751296 - RNA, 19 nt, Homo sapiens
  misc_RNA (1)...(19): siRNA sense strand
uaaggccaguauucaguaa

SEQ ID NO: 751297 - RNA, 19 nt, Homo sapiens
  misc_RNA (1)...(19): siRNA sense strand
ggagaugugccacugauuc

SEQ ID NO: 751298 - RNA, 19 nt, Homo sapiens
  misc_RNA (1)...(19): siRNA sense strand
ucaaagaaccacuggauag

SEQ ID NO: 751299 - RNA, 19 nt, Homo sapiens
  misc_RNA (1)...(19): siRNA sense strand
ggaguuagauagggaagag

SEQ ID NO: 751300 - RNA, 19 nt, Homo sapiens
  misc_RNA (1)...(19): siRNA sense strand
augcuacacugauuaauga

SEQ ID NO: 751301 - RNA, 19 nt, Homo sapiens
  misc_RNA (1)...(19): siRNA sense strand
gguagaguaucacguucuu

SEQ ID NO: 751302 - RNA, 19 nt, Homo sapiens
  misc_RNA (1)...(19): siRNA sense strand
gauaggcgacuuguugaaa

SEQ ID NO: 751303 - RNA, 19 nt, Homo sapiens
  misc_RNA (1)...(19): siRNA sense strand
gcugauguauccucaccaa

SEQ ID NO: 751304 - RNA, 19 nt, Homo sapiens
  misc_RNA (1)...(19): siRNA sense strand
ucaaucuguucgugaauga

SEQ ID NO: 751305 - RNA, 19 nt, Homo sapiens
  misc_RNA (1)...(19): siRNA sense strand
ucgcauugaucgugagaaa

SEQ ID NO: 751306 - RNA, 19 nt, Homo sapiens
  misc_RNA (1)...(19): siRNA sense strand
guaacuacaccuacuacuu

SEQ ID NO: 751307 - RNA, 19 nt, Homo sapiens
  misc_RNA (1)...(19): siRNA sense strand
ccaaugcuacacugauuaa

SEQ ID NO: 751308 - RNA, 19 nt, Homo sapiens
  misc_RNA (1)...(19): siRNA sense strand
aaacaggcaacauaacauu

SEQ ID NO: 751309 - RNA, 19 nt, Homo sapiens
  misc_RNA (1)...(19): siRNA sense strand
gaaacaggcaacauaacau

SEQ ID NO: 751310 - RNA, 19 nt, Homo sapiens
  misc_RNA (1)...(19): siRNA sense strand
ggacuaaucacuguaacug

SEQ ID NO: 751311 - RNA, 19 nt, Homo sapiens
  misc_RNA (1)...(19): siRNA sense strand
caaaauugcucucauaacu

SEQ ID NO: 751312 - RNA, 19 nt, Homo sapiens
  misc_RNA (1)...(19): siRNA sense strand
acacaguuguucuuucaga

SEQ ID NO: 751313 - RNA, 19 nt, Homo sapiens
  misc_RNA (1)...(19): siRNA sense strand
ugaagucaguauaccagaa

SEQ ID NO: 751314 - RNA, 19 nt, Homo sapiens
  misc_RNA (1)...(19): siRNA sense strand
caucgucaauccugucaau

SEQ ID NO: 751315 - RNA, 19 nt, Homo sapiens
  misc_RNA (1)...(19): siRNA sense strand
ccaaaguaaccauaaaugu

SEQ ID NO: 751316 - RNA, 19 nt, Homo sapiens
  misc_RNA (1)...(19): siRNA sense strand
ggauggugguagaguauca

SEQ ID NO: 751317 - RNA, 19 nt, Homo sapiens
  misc_RNA (1)...(19): siRNA sense strand
caaugucacagucuuugua

SEQ ID NO: 751318 - RNA, 19 nt, Homo sapiens
  misc_RNA (1)...(19): siRNA sense strand
gcagacagugggccuaaug

SEQ ID NO: 751319 - RNA, 19 nt, Homo sapiens
  misc_RNA (1)...(19): siRNA sense strand
aaacuaaggcagaugaugu

SEQ ID NO: 751320 - RNA, 19 nt, Homo sapiens
  misc_RNA (1)...(19): siRNA sense strand
auacugagauagcugaugu

SEQ ID NO: 751321 - RNA, 19 nt, Homo sapiens
  misc_RNA (1)...(19): siRNA sense strand
gugccaaaguaaccauaaa

SEQ ID NO: 751322 - RNA, 19 nt, Homo sapiens
  misc_RNA (1)...(19): siRNA sense strand
guaggacuaaucacuguaa

SEQ ID NO: 751323 - RNA, 19 nt, Homo sapiens
  misc_RNA (1)...(19): siRNA sense strand
gaagaucacugaaagaaau

SEQ ID NO: 751324 - RNA, 19 nt, Homo sapiens
  misc_RNA (1)...(19): siRNA sense strand
ggaccagucugccuaugua

SEQ ID NO: 751325 - RNA, 19 nt, Homo sapiens
  misc_RNA (1)...(19): siRNA sense strand
gauauaauccugaaucgaa

SEQ ID NO: 751326 - RNA, 19 nt, Homo sapiens
  misc_RNA (1)...(19): siRNA sense strand
gcaaguacuucaaggauag

SEQ ID NO: 751327 - RNA, 19 nt, Homo sapiens
  misc_RNA (1)...(19): siRNA sense strand
gaagagcuauggcuagaag

SEQ ID NO: 751328 - RNA, 19 nt, Homo sapiens
  misc_RNA (1)...(19): siRNA sense strand
aaggauagcaggaauauaa

SEQ ID NO: 751329 - RNA, 19 nt, Homo sapiens
  misc_RNA (1)...(19): siRNA sense strand
gaacaaacgguacaauguc

SEQ ID NO: 751330 - RNA, 19 nt, Homo sapiens
  misc_RNA (1)...(19): siRNA sense strand
ccuacucugugaagaauaa

SEQ ID NO: 751331 - RNA, 19 nt, Homo sapiens
  misc_RNA (1)...(19): siRNA sense strand
ugacagcucugagacaaug

SEQ ID NO: 751332 - RNA, 19 nt, Homo sapiens
  misc_RNA (1)...(19): siRNA sense strand
agagaaggcucccaaaguc

SEQ ID NO: 751333 - RNA, 19 nt, Homo sapiens
  misc_RNA (1)...(19): siRNA sense strand
gaucugagacccuaaagca

SEQ ID NO: 751334 - RNA, 19 nt, Homo sapiens
  misc_RNA (1)...(19): siRNA sense strand
guucugaucuugccuucau

SEQ ID NO: 751335 - RNA, 19 nt, Homo sapiens
  misc_RNA (1)...(19): siRNA sense strand
gccgugacauugauauaau

SEQ ID NO: 751336 - RNA, 19 nt, Homo sapiens
  misc_RNA (1)...(19): siRNA sense strand
ugcaaguacuucaaggaua

SEQ ID NO: 751337 - RNA, 19 nt, Homo sapiens
  misc_RNA (1)...(19): siRNA sense strand
ugcuaaagcugaccaugaa

SEQ ID NO: 751338 - RNA, 19 nt, Homo sapiens
  misc_RNA (1)...(19): siRNA sense strand
cugagacccuaaagcauuu

SEQ ID NO: 751339 - RNA, 19 nt, Homo sapiens
  misc_RNA (1)...(19): siRNA sense strand
ugaacaaacgguacaaugu

SEQ ID NO: 751340 - RNA, 19 nt, Homo sapiens
  misc_RNA (1)...(19): siRNA sense strand
gacccugaaucucuccaaa

SEQ ID NO: 751341 - RNA, 19 nt, Homo sapiens
  misc_RNA (1)...(19): siRNA sense strand
aaauggagaugcuaaagcu

SEQ ID NO: 751342 - RNA, 19 nt, Homo sapiens
  misc_RNA (1)...(19): siRNA sense strand
gcauuuaguccugcaauuc

SEQ ID NO: 751343 - RNA, 19 nt, Homo sapiens
  misc_RNA (1)...(19): siRNA sense strand
aaugaaacccugcaaggaa

SEQ ID NO: 751344 - RNA, 19 nt, Homo sapiens
  misc_RNA (1)...(19): siRNA sense strand
ucgaagagcuauggcuaga

SEQ ID NO: 751345 - RNA, 19 nt, Homo sapiens
  misc_RNA (1)...(19): siRNA sense strand
gaugggccgugacauugau

SEQ ID NO: 751346 - RNA, 19 nt, Homo sapiens
  misc_RNA (1)...(19): siRNA sense strand
gugcauugccugaaacuca

SEQ ID NO: 751347 - RNA, 19 nt, Homo sapiens
  misc_RNA (1)...(19): siRNA sense strand
gagaaggcucccaaaguca

SEQ ID NO: 751348 - RNA, 19 nt, Homo sapiens
  misc_RNA (1)...(19): siRNA sense strand
augaaacccugcaaggaaa

SEQ ID NO: 751349 - RNA, 19 nt, Homo sapiens
  misc_RNA (1)...(19): siRNA sense strand
gcccuacucugugaagaau

SEQ ID NO: 751350 - RNA, 19 nt, Homo sapiens
  misc_RNA (1)...(19): siRNA sense strand
gcggaacacacaagaugaa

SEQ ID NO: 751351 - RNA, 19 nt, Homo sapiens
  misc_RNA (1)...(19): siRNA sense strand
ucugagacccuaaagcauu

SEQ ID NO: 751352 - RNA, 19 nt, Homo sapiens
  misc_RNA (1)...(19): siRNA sense strand
uccagaaucuccgcuuuga

SEQ ID NO: 751353 - RNA, 19 nt, Homo sapiens
  misc_RNA (1)...(19): siRNA sense strand
caaugaaacccugcaagga

SEQ ID NO: 751354 - RNA, 19 nt, Homo sapiens
  misc_RNA (1)...(19): siRNA sense strand
gacauugacagcucugaga

SEQ ID NO: 751355 - RNA, 19 nt, Homo sapiens
  misc_RNA (1)...(19): siRNA sense strand
ccuggacggccgagaguua

SEQ ID NO: 751356 - RNA, 19 nt, Homo sapiens
  misc_RNA (1)...(19): siRNA sense strand
ggccgugacauugauauaa

SEQ ID NO: 751357 - RNA, 19 nt, Homo sapiens
  misc_RNA (1)...(19): siRNA sense strand
ugaagaucacugaaagaaa

SEQ ID NO: 751358 - RNA, 19 nt, Homo sapiens
  misc_RNA (1)...(19): siRNA sense strand
ccgcaccagugauuguuga

SEQ ID NO: 751359 - RNA, 19 nt, Homo sapiens
  misc_RNA (1)...(19): siRNA sense strand
ggaguugggcaaggugaaa

SEQ ID NO: 751360 - RNA, 19 nt, Homo sapiens
  misc_RNA (1)...(19): siRNA sense strand
ucaaggauagcaggaauau

SEQ ID NO: 751361 - RNA, 19 nt, Homo sapiens
  misc_RNA (1)...(19): siRNA sense strand
uuacugcgcccuacucugu

SEQ ID NO: 751362 - RNA, 19 nt, Homo sapiens
  misc_RNA (1)...(19): siRNA sense strand
ggccaaauggagaugcuaa

SEQ ID NO: 751363 - RNA, 19 nt, Homo sapiens
  misc_RNA (1)...(19): siRNA sense strand
uaaagcugaccaugaacaa

SEQ ID NO: 751364 - RNA, 19 nt, Homo sapiens
  misc_RNA (1)...(19): siRNA sense strand
guacaaugucucccagcaa

SEQ ID NO: 751365 - RNA, 19 nt, Homo sapiens
  misc_RNA (1)...(19): siRNA sense strand
gucaagacccugaaucucu

SEQ ID NO: 751366 - RNA, 19 nt, Homo sapiens
  misc_RNA (1)...(19): siRNA sense strand
guuauccgcaccagugauu

SEQ ID NO: 751367 - RNA, 19 nt, Homo sapiens
  misc_RNA (1)...(19): siRNA sense strand
cagugauuguugacauuga

SEQ ID NO: 751368 - RNA, 19 nt, Homo sapiens
  misc_RNA (1)...(19): siRNA sense strand
uccagucugugcaucauga

SEQ ID NO: 751369 - RNA, 19 nt, Homo sapiens
  misc_RNA (1)...(19): siRNA sense strand
gaugaaaacaugaggaaau

SEQ ID NO: 751370 - RNA, 19 nt, Homo sapiens
  misc_RNA (1)...(19): siRNA sense strand
ucuccagaaucuccgcuuu

SEQ ID NO: 751371 - RNA, 19 nt, Homo sapiens
  misc_RNA (1)...(19): siRNA sense strand
aaacguggacucccucagu

SEQ ID NO: 751372 - RNA, 19 nt, Homo sapiens
  misc_RNA (1)...(19): siRNA sense strand
guugaagccaggccaaaug

SEQ ID NO: 751373 - RNA, 19 nt, Homo sapiens
  misc_RNA (1)...(19): siRNA sense strand
gggccgugacauugauaua

SEQ ID NO: 751374 - RNA, 19 nt, Homo sapiens
  misc_RNA (1)...(19): siRNA sense strand
gcaauuccagucugugcau

SEQ ID NO: 751375 - RNA, 19 nt, Homo sapiens
  misc_RNA (1)...(19): siRNA sense strand
cuucaaggauagcaggaau

SEQ ID NO: 751376 - RNA, 19 nt, Homo sapiens
  misc_RNA (1)...(19): siRNA sense strand
caccagugauuguugacau

SEQ ID NO: 751377 - RNA, 19 nt, Homo sapiens
  misc_RNA (1)...(19): siRNA sense strand
cugaagaucacugaaagaa

SEQ ID NO: 751378 - RNA, 19 nt, Homo sapiens
  misc_RNA (1)...(19): siRNA sense strand
caaagucaagacccugaau

SEQ ID NO: 751379 - RNA, 19 nt, Homo sapiens
  misc_RNA (1)...(19): siRNA sense strand
gaccagucugccuauguaa

SEQ ID NO: 751380 - RNA, 19 nt, Homo sapiens
  misc_RNA (1)...(19): siRNA sense strand
ggccgcaauuccagucugu

SEQ ID NO: 751381 - RNA, 19 nt, Homo sapiens
  misc_RNA (1)...(19): siRNA sense strand
gaacacacaagaugaaaac

SEQ ID NO: 751382 - RNA, 19 nt, Homo sapiens
  misc_RNA (1)...(19): siRNA sense strand
auguggaccuucaucacua

SEQ ID NO: 751383 - RNA, 19 nt, Homo sapiens
  misc_RNA (1)...(19): siRNA sense strand
ggacucccucagugcauug

SEQ ID NO: 751384 - RNA, 19 nt, Homo sapiens
  misc_RNA (1)...(19): siRNA sense strand
gugcaaguacuucaaggau

SEQ ID NO: 751385 - RNA, 19 nt, Homo sapiens
  misc_RNA (1)...(19): siRNA sense strand
ggaaaacuuuacuggaucu

SEQ ID NO: 751386 - RNA, 19 nt, Homo sapiens
  misc_RNA (1)...(19): siRNA sense strand
aacaaacgguacaaugucu

SEQ ID NO: 751387 - RNA, 19 nt, Homo sapiens
  misc_RNA (1)...(19): siRNA sense strand
gccaaauggagaugcuaaa

SEQ ID NO: 751388 - RNA, 19 nt, Homo sapiens
  misc_RNA (1)...(19): siRNA sense strand
caaggauagcaggaauaua

SEQ ID NO: 751389 - RNA, 19 nt, Homo sapiens
  misc_RNA (1)...(19): siRNA sense strand
aaggaaaacuuuacuggau

SEQ ID NO: 751390 - RNA, 19 nt, Homo sapiens
  misc_RNA (1)...(19): siRNA sense strand
ccagucugccuauguaagu

SEQ ID NO: 751391 - RNA, 19 nt, Homo sapiens
  misc_RNA (1)...(19): siRNA sense strand
agaaggcucccaaagucaa

SEQ ID NO: 751392 - RNA, 19 nt, Homo sapiens
  misc_RNA (1)...(19): siRNA sense strand
gaaaugguucaaggucaca

SEQ ID NO: 751393 - RNA, 19 nt, Homo sapiens
  misc_RNA (1)...(19): siRNA sense strand
caaauggagaugcuaaagc

SEQ ID NO: 751394 - RNA, 19 nt, Homo sapiens
  misc_RNA (1)...(19): siRNA sense strand
ggcggaacacacaagauga

SEQ ID NO: 751395 - RNA, 19 nt, Homo sapiens
  misc_RNA (1)...(19): siRNA sense strand
ccaaauggagaugcuaaag

SEQ ID NO: 751396 - RNA, 19 nt, Homo sapiens
  misc_RNA (1)...(19): siRNA sense strand
gaaacucagcaugacuuca

SEQ ID NO: 751397 - RNA, 19 nt, Homo sapiens
  misc_RNA (1)...(19): siRNA sense strand
cacacaagaugaaaacaug

SEQ ID NO: 751398 - RNA, 19 nt, Homo sapiens
  misc_RNA (1)...(19): siRNA sense strand
cuugaugggccgugacauu

SEQ ID NO: 751399 - RNA, 19 nt, Homo sapiens
  misc_RNA (1)...(19): siRNA sense strand
cuaaagcugaccaugaaca

SEQ ID NO: 751400 - RNA, 19 nt, Homo sapiens
  misc_RNA (1)...(19): siRNA sense strand
gaguuauccgcaccaguga

SEQ ID NO: 751401 - RNA, 19 nt, Homo sapiens
  misc_RNA (1)...(19): siRNA sense strand
gcugccacccugaagauca

SEQ ID NO: 751402 - RNA, 19 nt, Homo sapiens
  misc_RNA (1)...(19): siRNA sense strand
gaagaucacugaaagaaau

SEQ ID NO: 751403 - RNA, 19 nt, Homo sapiens
  misc_RNA (1)...(19): siRNA sense strand
ggaccagucugccuaugua

SEQ ID NO: 751404 - RNA, 19 nt, Homo sapiens
  misc_RNA (1)...(19): siRNA sense strand
gauauaauccugaaucgaa

SEQ ID NO: 751405 - RNA, 19 nt, Homo sapiens
  misc_RNA (1)...(19): siRNA sense strand
gcaaguacuucaaggauag

SEQ ID NO: 751406 - RNA, 19 nt, Homo sapiens
  misc_RNA (1)...(19): siRNA sense strand
gaagagcuauggcuagaag

SEQ ID NO: 751407 - RNA, 19 nt, Homo sapiens
  misc_RNA (1)...(19): siRNA sense strand
aaggauagcaggaauauaa

SEQ ID NO: 751408 - RNA, 19 nt, Homo sapiens
  misc_RNA (1)...(19): siRNA sense strand
gaacaaacgguacaauguc

SEQ ID NO: 751409 - RNA, 19 nt, Homo sapiens
  misc_RNA (1)...(19): siRNA sense strand
ccuacucugugaagaauaa

SEQ ID NO: 751410 - RNA, 19 nt, Homo sapiens
  misc_RNA (1)...(19): siRNA sense strand
ugacagcucugagacaaug

SEQ ID NO: 751411 - RNA, 19 nt, Homo sapiens
  misc_RNA (1)...(19): siRNA sense strand
agagaaggcucccaaaguc

SEQ ID NO: 751412 - RNA, 19 nt, Homo sapiens
  misc_RNA (1)...(19): siRNA sense strand
gaucugagacccuaaagca

SEQ ID NO: 751413 - RNA, 19 nt, Homo sapiens
  misc_RNA (1)...(19): siRNA sense strand
gccgugacauugauauaau

SEQ ID NO: 751414 - RNA, 19 nt, Homo sapiens
  misc_RNA (1)...(19): siRNA sense strand
ugcaaguacuucaaggaua

SEQ ID NO: 751415 - RNA, 19 nt, Homo sapiens
  misc_RNA (1)...(19): siRNA sense strand
ugcuaaagcugaccaugaa

SEQ ID NO: 751416 - RNA, 19 nt, Homo sapiens
  misc_RNA (1)...(19): siRNA sense strand
cugagacccuaaagcauuu

SEQ ID NO: 751417 - RNA, 19 nt, Homo sapiens
  misc_RNA (1)...(19): siRNA sense strand
ugaacaaacgguacaaugu

SEQ ID NO: 751418 - RNA, 19 nt, Homo sapiens
  misc_RNA (1)...(19): siRNA sense strand
gacccugaaucucuccaaa

SEQ ID NO: 751419 - RNA, 19 nt, Homo sapiens
  misc_RNA (1)...(19): siRNA sense strand
aaauggagaugcuaaagcu

SEQ ID NO: 751420 - RNA, 19 nt, Homo sapiens
  misc_RNA (1)...(19): siRNA sense strand
gcauuuaguccugcaauuc

SEQ ID NO: 751421 - RNA, 19 nt, Homo sapiens
  misc_RNA (1)...(19): siRNA sense strand
aaugaaacccugcaaggaa

SEQ ID NO: 751422 - RNA, 19 nt, Homo sapiens
  misc_RNA (1)...(19): siRNA sense strand
ucgaagagcuauggcuaga

SEQ ID NO: 751423 - RNA, 19 nt, Homo sapiens
  misc_RNA (1)...(19): siRNA sense strand
gaugggccgugacauugau

SEQ ID NO: 751424 - RNA, 19 nt, Homo sapiens
  misc_RNA (1)...(19): siRNA sense strand
gugcauugccugaaacuca

SEQ ID NO: 751425 - RNA, 19 nt, Homo sapiens
  misc_RNA (1)...(19): siRNA sense strand
gagaaggcucccaaaguca

SEQ ID NO: 751426 - RNA, 19 nt, Homo sapiens
  misc_RNA (1)...(19): siRNA sense strand
augaaacccugcaaggaaa

SEQ ID NO: 751427 - RNA, 19 nt, Homo sapiens
  misc_RNA (1)...(19): siRNA sense strand
gcccuacucugugaagaau

SEQ ID NO: 751428 - RNA, 19 nt, Homo sapiens
  misc_RNA (1)...(19): siRNA sense strand
gcggaacacacaagaugaa

SEQ ID NO: 751429 - RNA, 19 nt, Homo sapiens
  misc_RNA (1)...(19): siRNA sense strand
ucugagacccuaaagcauu

SEQ ID NO: 751430 - RNA, 19 nt, Homo sapiens
  misc_RNA (1)...(19): siRNA sense strand
uccagaaucuccgcuuuga

SEQ ID NO: 751431 - RNA, 19 nt, Homo sapiens
  misc_RNA (1)...(19): siRNA sense strand
caaugaaacccugcaagga

SEQ ID NO: 751432 - RNA, 19 nt, Homo sapiens
  misc_RNA (1)...(19): siRNA sense strand
gacauugacagcucugaga

SEQ ID NO: 751433 - RNA, 19 nt, Homo sapiens
  misc_RNA (1)...(19): siRNA sense strand
ccuggacggccgagaguua

SEQ ID NO: 751434 - RNA, 19 nt, Homo sapiens
  misc_RNA (1)...(19): siRNA sense strand
ggccgugacauugauauaa

SEQ ID NO: 751435 - RNA, 19 nt, Homo sapiens
  misc_RNA (1)...(19): siRNA sense strand
ugaagaucacugaaagaaa

SEQ ID NO: 751436 - RNA, 19 nt, Homo sapiens
  misc_RNA (1)...(19): siRNA sense strand
ccgcaccagugauuguuga

SEQ ID NO: 751437 - RNA, 19 nt, Homo sapiens
  misc_RNA (1)...(19): siRNA sense strand
ggaguugggcaaggugaaa

SEQ ID NO: 751438 - RNA, 19 nt, Homo sapiens
  misc_RNA (1)...(19): siRNA sense strand
ucaaggauagcaggaauau

SEQ ID NO: 751439 - RNA, 19 nt, Homo sapiens
  misc_RNA (1)...(19): siRNA sense strand
uuacugcgcccuacucugu

SEQ ID NO: 751440 - RNA, 19 nt, Homo sapiens
  misc_RNA (1)...(19): siRNA sense strand
ggccaaauggagaugcuaa

SEQ ID NO: 751441 - RNA, 19 nt, Homo sapiens
  misc_RNA (1)...(19): siRNA sense strand
uaaagcugaccaugaacaa

SEQ ID NO: 751442 - RNA, 19 nt, Homo sapiens
  misc_RNA (1)...(19): siRNA sense strand
guacaaugucucccagcaa

SEQ ID NO: 751443 - RNA, 19 nt, Homo sapiens
  misc_RNA (1)...(19): siRNA sense strand
gucaagacccugaaucucu

SEQ ID NO: 751444 - RNA, 19 nt, Homo sapiens
  misc_RNA (1)...(19): siRNA sense strand
guuauccgcaccagugauu

SEQ ID NO: 751445 - RNA, 19 nt, Homo sapiens
  misc_RNA (1)...(19): siRNA sense strand
gaugaaaacaugaggaaau

SEQ ID NO: 751446 - RNA, 19 nt, Homo sapiens
  misc_RNA (1)...(19): siRNA sense strand
cagugauuguugacauuga

SEQ ID NO: 751447 - RNA, 19 nt, Homo sapiens
  misc_RNA (1)...(19): siRNA sense strand
guugaagccaggccaaaug

SEQ ID NO: 751448 - RNA, 19 nt, Homo sapiens
  misc_RNA (1)...(19): siRNA sense strand
aaacguggacucccucagu

SEQ ID NO: 751449 - RNA, 19 nt, Homo sapiens
  misc_RNA (1)...(19): siRNA sense strand
ucuccagaaucuccgcuuu

SEQ ID NO: 751450 - RNA, 19 nt, Homo sapiens
  misc_RNA (1)...(19): siRNA sense strand
gggccgugacauugauaua

SEQ ID NO: 751451 - RNA, 19 nt, Homo sapiens
  misc_RNA (1)...(19): siRNA sense strand
cuucaaggauagcaggaau

SEQ ID NO: 751452 - RNA, 19 nt, Homo sapiens
  misc_RNA (1)...(19): siRNA sense strand
caccagugauuguugacau

SEQ ID NO: 751453 - RNA, 19 nt, Homo sapiens
  misc_RNA (1)...(19): siRNA sense strand
cugaagaucacugaaagaa

SEQ ID NO: 751454 - RNA, 19 nt, Homo sapiens
  misc_RNA (1)...(19): siRNA sense strand
caaagucaagacccugaau

SEQ ID NO: 751455 - RNA, 19 nt, Homo sapiens
  misc_RNA (1)...(19): siRNA sense strand
gaccagucugccuauguaa

SEQ ID NO: 751456 - RNA, 19 nt, Homo sapiens
  misc_RNA (1)...(19): siRNA sense strand
gaacacacaagaugaaaac

SEQ ID NO: 751457 - RNA, 19 nt, Homo sapiens
  misc_RNA (1)...(19): siRNA sense strand
ggacucccucagugcauug

SEQ ID NO: 751458 - RNA, 19 nt, Homo sapiens
  misc_RNA (1)...(19): siRNA sense strand
gugcaaguacuucaaggau

SEQ ID NO: 751459 - RNA, 19 nt, Homo sapiens
  misc_RNA (1)...(19): siRNA sense strand
ggaaaacuuuacuggaucu

SEQ ID NO: 751460 - RNA, 19 nt, Homo sapiens
  misc_RNA (1)...(19): siRNA sense strand
aacaaacgguacaaugucu

SEQ ID NO: 751461 - RNA, 19 nt, Homo sapiens
  misc_RNA (1)...(19): siRNA sense strand
ccagucugccuauguaagu

SEQ ID NO: 751462 - RNA, 19 nt, Homo sapiens
  misc_RNA (1)...(19): siRNA sense strand
caaggauagcaggaauaua

SEQ ID NO: 751463 - RNA, 19 nt, Homo sapiens
  misc_RNA (1)...(19): siRNA sense strand
gccaaauggagaugcuaaa

SEQ ID NO: 751464 - RNA, 19 nt, Homo sapiens
  misc_RNA (1)...(19): siRNA sense strand
aaggaaaacuuuacuggau

SEQ ID NO: 751465 - RNA, 19 nt, Homo sapiens
  misc_RNA (1)...(19): siRNA sense strand
caaauggagaugcuaaagc

SEQ ID NO: 751466 - RNA, 19 nt, Homo sapiens
  misc_RNA (1)...(19): siRNA sense strand
gaaaugguucaaggucaca

SEQ ID NO: 751467 - RNA, 19 nt, Homo sapiens
  misc_RNA (1)...(19): siRNA sense strand
agaaggcucccaaagucaa

SEQ ID NO: 751468 - RNA, 19 nt, Homo sapiens
  misc_RNA (1)...(19): siRNA sense strand
ggcggaacacacaagauga

SEQ ID NO: 751469 - RNA, 19 nt, Homo sapiens
  misc_RNA (1)...(19): siRNA sense strand
gaaacucagcaugacuuca

SEQ ID NO: 751470 - RNA, 19 nt, Homo sapiens
  misc_RNA (1)...(19): siRNA sense strand
cacacaagaugaaaacaug

SEQ ID NO: 751471 - RNA, 19 nt, Homo sapiens
  misc_RNA (1)...(19): siRNA sense strand
ccaaauggagaugcuaaag

SEQ ID NO: 751472 - RNA, 19 nt, Homo sapiens
  misc_RNA (1)...(19): siRNA sense strand
cuugaugggccgugacauu

SEQ ID NO: 751473 - RNA, 19 nt, Homo sapiens
  misc_RNA (1)...(19): siRNA sense strand
cuaaagcugaccaugaaca

SEQ ID NO: 751474 - RNA, 19 nt, Homo sapiens
  misc_RNA (1)...(19): siRNA sense strand
gaguuauccgcaccaguga

SEQ ID NO: 751475 - RNA, 19 nt, Homo sapiens
  misc_RNA (1)...(19): siRNA sense strand
gcugccacccugaagauca

SEQ ID NO: 751476 - RNA, 19 nt, Homo sapiens
  misc_RNA (1)...(19): siRNA sense strand
gaagaucacugaaagaaau

SEQ ID NO: 751477 - RNA, 19 nt, Homo sapiens
  misc_RNA (1)...(19): siRNA sense strand
gauauaauccugaaucgaa

SEQ ID NO: 751478 - RNA, 19 nt, Homo sapiens
  misc_RNA (1)...(19): siRNA sense strand
gaacaaacgguacaauguc

SEQ ID NO: 751479 - RNA, 19 nt, Homo sapiens
  misc_RNA (1)...(19): siRNA sense strand
ccuacucugugaagaauaa

SEQ ID NO: 751480 - RNA, 19 nt, Homo sapiens
  misc_RNA (1)...(19): siRNA sense strand
agagaaggcucccaaaguc

SEQ ID NO: 751481 - RNA, 19 nt, Homo sapiens
  misc_RNA (1)...(19): siRNA sense strand
gccgugacauugauauaau

SEQ ID NO: 751482 - RNA, 19 nt, Homo sapiens
  misc_RNA (1)...(19): siRNA sense strand
ugcuaaagcugaccaugaa

SEQ ID NO: 751483 - RNA, 19 nt, Homo sapiens
  misc_RNA (1)...(19): siRNA sense strand
ugaacaaacgguacaaugu

SEQ ID NO: 751484 - RNA, 19 nt, Homo sapiens
  misc_RNA (1)...(19): siRNA sense strand
aaauggagaugcuaaagcu

SEQ ID NO: 751485 - RNA, 19 nt, Homo sapiens
  misc_RNA (1)...(19): siRNA sense strand
gaugggccgugacauugau

SEQ ID NO: 751486 - RNA, 19 nt, Homo sapiens
  misc_RNA (1)...(19): siRNA sense strand
gagaaggcucccaaaguca

SEQ ID NO: 751487 - RNA, 19 nt, Homo sapiens
  misc_RNA (1)...(19): siRNA sense strand
gcccuacucugugaagaau

SEQ ID NO: 751488 - RNA, 19 nt, Homo sapiens
  misc_RNA (1)...(19): siRNA sense strand
gcggaacacacaagaugaa

SEQ ID NO: 751489 - RNA, 19 nt, Homo sapiens
  misc_RNA (1)...(19): siRNA sense strand
uccagaaucuccgcuuuga

SEQ ID NO: 751490 - RNA, 19 nt, Homo sapiens
  misc_RNA (1)...(19): siRNA sense strand
ggccgugacauugauauaa

SEQ ID NO: 751491 - RNA, 19 nt, Homo sapiens
  misc_RNA (1)...(19): siRNA sense strand
ugaagaucacugaaagaaa

SEQ ID NO: 751492 - RNA, 19 nt, Homo sapiens
  misc_RNA (1)...(19): siRNA sense strand
uuacugcgcccuacucugu

SEQ ID NO: 751493 - RNA, 19 nt, Homo sapiens
  misc_RNA (1)...(19): siRNA sense strand
ggccaaauggagaugcuaa

SEQ ID NO: 751494 - RNA, 19 nt, Homo sapiens
  misc_RNA (1)...(19): siRNA sense strand
uaaagcugaccaugaacaa

SEQ ID NO: 751495 - RNA, 19 nt, Homo sapiens
  misc_RNA (1)...(19): siRNA sense strand
guacaaugucucccagcaa

SEQ ID NO: 751496 - RNA, 19 nt, Homo sapiens
  misc_RNA (1)...(19): siRNA sense strand
gaugaaaacaugaggaaau

SEQ ID NO: 751497 - RNA, 19 nt, Homo sapiens
  misc_RNA (1)...(19): siRNA sense strand
guugaagccaggccaaaug

SEQ ID NO: 751498 - RNA, 19 nt, Homo sapiens
  misc_RNA (1)...(19): siRNA sense strand
ucuccagaaucuccgcuuu

SEQ ID NO: 751499 - RNA, 19 nt, Homo sapiens
  misc_RNA (1)...(19): siRNA sense strand
gggccgugacauugauaua

SEQ ID NO: 751500 - RNA, 19 nt, Homo sapiens
  misc_RNA (1)...(19): siRNA sense strand
cugaagaucacugaaagaa

SEQ ID NO: 751501 - RNA, 19 nt, Homo sapiens
  misc_RNA (1)...(19): siRNA sense strand
gaacacacaagaugaaaac

SEQ ID NO: 751502 - RNA, 19 nt, Homo sapiens
  misc_RNA (1)...(19): siRNA sense strand
aacaaacgguacaaugucu

SEQ ID NO: 751503 - RNA, 19 nt, Homo sapiens
  misc_RNA (1)...(19): siRNA sense strand
gccaaauggagaugcuaaa

SEQ ID NO: 751504 - RNA, 19 nt, Homo sapiens
  misc_RNA (1)...(19): siRNA sense strand
caaauggagaugcuaaagc

SEQ ID NO: 751505 - RNA, 19 nt, Homo sapiens
  misc_RNA (1)...(19): siRNA sense strand
agaaggcucccaaagucaa

SEQ ID NO: 751506 - RNA, 19 nt, Homo sapiens
  misc_RNA (1)...(19): siRNA sense strand
gaaaugguucaaggucaca

SEQ ID NO: 751507 - RNA, 19 nt, Homo sapiens
  misc_RNA (1)...(19): siRNA sense strand
ccaaauggagaugcuaaag

SEQ ID NO: 751508 - RNA, 19 nt, Homo sapiens
  misc_RNA (1)...(19): siRNA sense strand
ggcggaacacacaagauga

SEQ ID NO: 751509 - RNA, 19 nt, Homo sapiens
  misc_RNA (1)...(19): siRNA sense strand
cacacaagaugaaaacaug

SEQ ID NO: 751510 - RNA, 19 nt, Homo sapiens
  misc_RNA (1)...(19): siRNA sense strand
cuaaagcugaccaugaaca

SEQ ID NO: 751511 - RNA, 19 nt, Homo sapiens
  misc_RNA (1)...(19): siRNA sense strand
gcugccacccugaagauca

SEQ ID NO: 751512 - RNA, 19 nt, Homo sapiens
  misc_RNA (1)...(19): siRNA sense strand
cuugaugggccgugacauu

SEQ ID NO: 751513 - RNA, 19 nt, Homo sapiens
  misc_RNA (1)...(19): siRNA sense strand
gaagaucacugaaagaaau

SEQ ID NO: 751514 - RNA, 19 nt, Homo sapiens
  misc_RNA (1)...(19): siRNA sense strand
ggaccagucugccuaugua

SEQ ID NO: 751515 - RNA, 19 nt, Homo sapiens
  misc_RNA (1)...(19): siRNA sense strand
gauauaauccugaaucgaa

SEQ ID NO: 751516 - RNA, 19 nt, Homo sapiens
  misc_RNA (1)...(19): siRNA sense strand
gcaaguacuucaaggauag

SEQ ID NO: 751517 - RNA, 19 nt, Homo sapiens
  misc_RNA (1)...(19): siRNA sense strand
gaagagcuauggcuagaag

SEQ ID NO: 751518 - RNA, 19 nt, Homo sapiens
  misc_RNA (1)...(19): siRNA sense strand
aaggauagcaggaauauaa

SEQ ID NO: 751519 - RNA, 19 nt, Homo sapiens
  misc_RNA (1)...(19): siRNA sense strand
gaacaaacgguacaauguc

SEQ ID NO: 751520 - RNA, 19 nt, Homo sapiens
  misc_RNA (1)...(19): siRNA sense strand
ccuacucugugaagaauaa

SEQ ID NO: 751521 - RNA, 19 nt, Homo sapiens
  misc_RNA (1)...(19): siRNA sense strand
ugacagcucugagacaaug

SEQ ID NO: 751522 - RNA, 19 nt, Homo sapiens
  misc_RNA (1)...(19): siRNA sense strand
agagaaggcucccaaaguc

SEQ ID NO: 751523 - RNA, 19 nt, Homo sapiens
  misc_RNA (1)...(19): siRNA sense strand
gaucugagacccuaaagca

SEQ ID NO: 751524 - RNA, 19 nt, Homo sapiens
  misc_RNA (1)...(19): siRNA sense strand
gccgugacauugauauaau

SEQ ID NO: 751525 - RNA, 19 nt, Homo sapiens
  misc_RNA (1)...(19): siRNA sense strand
ugcaaguacuucaaggaua

SEQ ID NO: 751526 - RNA, 19 nt, Homo sapiens
  misc_RNA (1)...(19): siRNA sense strand
ugcuaaagcugaccaugaa

SEQ ID NO: 751527 - RNA, 19 nt, Homo sapiens
  misc_RNA (1)...(19): siRNA sense strand
cugagacccuaaagcauuu

SEQ ID NO: 751528 - RNA, 19 nt, Homo sapiens
  misc_RNA (1)...(19): siRNA sense strand
ugaacaaacgguacaaugu

SEQ ID NO: 751529 - RNA, 19 nt, Homo sapiens
  misc_RNA (1)...(19): siRNA sense strand
gacccugaaucucuccaaa

SEQ ID NO: 751530 - RNA, 19 nt, Homo sapiens
  misc_RNA (1)...(19): siRNA sense strand
aaauggagaugcuaaagcu

SEQ ID NO: 751531 - RNA, 19 nt, Homo sapiens
  misc_RNA (1)...(19): siRNA sense strand
gcauuuaguccugcaauuc

SEQ ID NO: 751532 - RNA, 19 nt, Homo sapiens
  misc_RNA (1)...(19): siRNA sense strand
aaugaaacccugcaaggaa

SEQ ID NO: 751533 - RNA, 19 nt, Homo sapiens
  misc_RNA (1)...(19): siRNA sense strand
ucgaagagcuauggcuaga

SEQ ID NO: 751534 - RNA, 19 nt, Homo sapiens
  misc_RNA (1)...(19): siRNA sense strand
gaugggccgugacauugau

SEQ ID NO: 751535 - RNA, 19 nt, Homo sapiens
  misc_RNA (1)...(19): siRNA sense strand
gugcauugccugaaacuca

SEQ ID NO: 751536 - RNA, 19 nt, Homo sapiens
  misc_RNA (1)...(19): siRNA sense strand
gagaaggcucccaaaguca

SEQ ID NO: 751537 - RNA, 19 nt, Homo sapiens
  misc_RNA (1)...(19): siRNA sense strand
augaaacccugcaaggaaa

SEQ ID NO: 751538 - RNA, 19 nt, Homo sapiens
  misc_RNA (1)...(19): siRNA sense strand
gcccuacucugugaagaau

SEQ ID NO: 751539 - RNA, 19 nt, Homo sapiens
  misc_RNA (1)...(19): siRNA sense strand
gcggaacacacaagaugaa

SEQ ID NO: 751540 - RNA, 19 nt, Homo sapiens
  misc_RNA (1)...(19): siRNA sense strand
ucugagacccuaaagcauu

SEQ ID NO: 751541 - RNA, 19 nt, Homo sapiens
  misc_RNA (1)...(19): siRNA sense strand
uccagaaucuccgcuuuga

SEQ ID NO: 751542 - RNA, 19 nt, Homo sapiens
  misc_RNA (1)...(19): siRNA sense strand
caaugaaacccugcaagga

SEQ ID NO: 751543 - RNA, 19 nt, Homo sapiens
  misc_RNA (1)...(19): siRNA sense strand
gacauugacagcucugaga

SEQ ID NO: 751544 - RNA, 19 nt, Homo sapiens
  misc_RNA (1)...(19): siRNA sense strand
ccuggacggccgagaguua

SEQ ID NO: 751545 - RNA, 19 nt, Homo sapiens
  misc_RNA (1)...(19): siRNA sense strand
ggccgugacauugauauaa

SEQ ID NO: 751546 - RNA, 19 nt, Homo sapiens
  misc_RNA (1)...(19): siRNA sense strand
ugaagaucacugaaagaaa

SEQ ID NO: 751547 - RNA, 19 nt, Homo sapiens
  misc_RNA (1)...(19): siRNA sense strand
ccgcaccagugauuguuga

SEQ ID NO: 751548 - RNA, 19 nt, Homo sapiens
  misc_RNA (1)...(19): siRNA sense strand
ggaguugggcaaggugaaa

SEQ ID NO: 751549 - RNA, 19 nt, Homo sapiens
  misc_RNA (1)...(19): siRNA sense strand
ucaaggauagcaggaauau

SEQ ID NO: 751550 - RNA, 19 nt, Homo sapiens
  misc_RNA (1)...(19): siRNA sense strand
uuacugcgcccuacucugu

SEQ ID NO: 751551 - RNA, 19 nt, Homo sapiens
  misc_RNA (1)...(19): siRNA sense strand
ggccaaauggagaugcuaa

SEQ ID NO: 751552 - RNA, 19 nt, Homo sapiens
  misc_RNA (1)...(19): siRNA sense strand
uaaagcugaccaugaacaa

SEQ ID NO: 751553 - RNA, 19 nt, Homo sapiens
  misc_RNA (1)...(19): siRNA sense strand
guacaaugucucccagcaa

SEQ ID NO: 751554 - RNA, 19 nt, Homo sapiens
  misc_RNA (1)...(19): siRNA sense strand
gucaagacccugaaucucu

SEQ ID NO: 751555 - RNA, 19 nt, Homo sapiens
  misc_RNA (1)...(19): siRNA sense strand
guuauccgcaccagugauu

SEQ ID NO: 751556 - RNA, 19 nt, Homo sapiens
  misc_RNA (1)...(19): siRNA sense strand
gaugaaaacaugaggaaau

SEQ ID NO: 751557 - RNA, 19 nt, Homo sapiens
  misc_RNA (1)...(19): siRNA sense strand
cagugauuguugacauuga

SEQ ID NO: 751558 - RNA, 19 nt, Homo sapiens
  misc_RNA (1)...(19): siRNA sense strand
guugaagccaggccaaaug

SEQ ID NO: 751559 - RNA, 19 nt, Homo sapiens
  misc_RNA (1)...(19): siRNA sense strand
aaacguggacucccucagu

SEQ ID NO: 751560 - RNA, 19 nt, Homo sapiens
  misc_RNA (1)...(19): siRNA sense strand
ucuccagaaucuccgcuuu

SEQ ID NO: 751561 - RNA, 19 nt, Homo sapiens
  misc_RNA (1)...(19): siRNA sense strand
gggccgugacauugauaua

SEQ ID NO: 751562 - RNA, 19 nt, Homo sapiens
  misc_RNA (1)...(19): siRNA sense strand
cuucaaggauagcaggaau

SEQ ID NO: 751563 - RNA, 19 nt, Homo sapiens
  misc_RNA (1)...(19): siRNA sense strand
caccagugauuguugacau

SEQ ID NO: 751564 - RNA, 19 nt, Homo sapiens
  misc_RNA (1)...(19): siRNA sense strand
cugaagaucacugaaagaa

SEQ ID NO: 751565 - RNA, 19 nt, Homo sapiens
  misc_RNA (1)...(19): siRNA sense strand
caaagucaagacccugaau

SEQ ID NO: 751566 - RNA, 19 nt, Homo sapiens
  misc_RNA (1)...(19): siRNA sense strand
gaccagucugccuauguaa

SEQ ID NO: 751567 - RNA, 19 nt, Homo sapiens
  misc_RNA (1)...(19): siRNA sense strand
gaacacacaagaugaaaac

SEQ ID NO: 751568 - RNA, 19 nt, Homo sapiens
  misc_RNA (1)...(19): siRNA sense strand
ggacucccucagugcauug

SEQ ID NO: 751569 - RNA, 19 nt, Homo sapiens
  misc_RNA (1)...(19): siRNA sense strand
gugcaaguacuucaaggau

SEQ ID NO: 751570 - RNA, 19 nt, Homo sapiens
  misc_RNA (1)...(19): siRNA sense strand
ggaaaacuuuacuggaucu

SEQ ID NO: 751571 - RNA, 19 nt, Homo sapiens
  misc_RNA (1)...(19): siRNA sense strand
aacaaacgguacaaugucu

SEQ ID NO: 751572 - RNA, 19 nt, Homo sapiens
  misc_RNA (1)...(19): siRNA sense strand
ccagucugccuauguaagu

SEQ ID NO: 751573 - RNA, 19 nt, Homo sapiens
  misc_RNA (1)...(19): siRNA sense strand
caaggauagcaggaauaua

SEQ ID NO: 751574 - RNA, 19 nt, Homo sapiens
  misc_RNA (1)...(19): siRNA sense strand
gccaaauggagaugcuaaa

SEQ ID NO: 751575 - RNA, 19 nt, Homo sapiens
  misc_RNA (1)...(19): siRNA sense strand
aaggaaaacuuuacuggau

SEQ ID NO: 751576 - RNA, 19 nt, Homo sapiens
  misc_RNA (1)...(19): siRNA sense strand
caaauggagaugcuaaagc

SEQ ID NO: 751577 - RNA, 19 nt, Homo sapiens
  misc_RNA (1)...(19): siRNA sense strand
gaaaugguucaaggucaca

SEQ ID NO: 751578 - RNA, 19 nt, Homo sapiens
  misc_RNA (1)...(19): siRNA sense strand
agaaggcucccaaagucaa

SEQ ID NO: 751579 - RNA, 19 nt, Homo sapiens
  misc_RNA (1)...(19): siRNA sense strand
ggcggaacacacaagauga

SEQ ID NO: 751580 - RNA, 19 nt, Homo sapiens
  misc_RNA (1)...(19): siRNA sense strand
gaaacucagcaugacuuca

SEQ ID NO: 751581 - RNA, 19 nt, Homo sapiens
  misc_RNA (1)...(19): siRNA sense strand
cacacaagaugaaaacaug

SEQ ID NO: 751582 - RNA, 19 nt, Homo sapiens
  misc_RNA (1)...(19): siRNA sense strand
ccaaauggagaugcuaaag

SEQ ID NO: 751583 - RNA, 19 nt, Homo sapiens
  misc_RNA (1)...(19): siRNA sense strand
cuugaugggccgugacauu

SEQ ID NO: 751584 - RNA, 19 nt, Homo sapiens
  misc_RNA (1)...(19): siRNA sense strand
cuaaagcugaccaugaaca

SEQ ID NO: 751585 - RNA, 19 nt, Homo sapiens
  misc_RNA (1)...(19): siRNA sense strand
gaguuauccgcaccaguga

SEQ ID NO: 751586 - RNA, 19 nt, Homo sapiens
  misc_RNA (1)...(19): siRNA sense strand
gcugccacccugaagauca

SEQ ID NO: 751587 - RNA, 19 nt, Homo sapiens
  misc_RNA (1)...(19): siRNA sense strand
gaagaucacugaaagaaau

SEQ ID NO: 751588 - RNA, 19 nt, Homo sapiens
  misc_RNA (1)...(19): siRNA sense strand
ggaccagucugccuaugua

SEQ ID NO: 751589 - RNA, 19 nt, Homo sapiens
  misc_RNA (1)...(19): siRNA sense strand
gauauaauccugaaucgaa

SEQ ID NO: 751590 - RNA, 19 nt, Homo sapiens
  misc_RNA (1)...(19): siRNA sense strand
gcaaguacuucaaggauag

SEQ ID NO: 751591 - RNA, 19 nt, Homo sapiens
  misc_RNA (1)...(19): siRNA sense strand
gaagagcuauggcuagaag

SEQ ID NO: 751592 - RNA, 19 nt, Homo sapiens
  misc_RNA (1)...(19): siRNA sense strand
aaggauagcaggaauauaa

SEQ ID NO: 751593 - RNA, 19 nt, Homo sapiens
  misc_RNA (1)...(19): siRNA sense strand
gaacaaacgguacaauguc

SEQ ID NO: 751594 - RNA, 19 nt, Homo sapiens
  misc_RNA (1)...(19): siRNA sense strand
ccuacucugugaagaauaa

SEQ ID NO: 751595 - RNA, 19 nt, Homo sapiens
  misc_RNA (1)...(19): siRNA sense strand
ugacagcucugagacaaug

SEQ ID NO: 751596 - RNA, 19 nt, Homo sapiens
  misc_RNA (1)...(19): siRNA sense strand
agagaaggcucccaaaguc

SEQ ID NO: 751597 - RNA, 19 nt, Homo sapiens
  misc_RNA (1)...(19): siRNA sense strand
gaucugagacccuaaagca

SEQ ID NO: 751598 - RNA, 19 nt, Homo sapiens
  misc_RNA (1)...(19): siRNA sense strand
gccgugacauugauauaau

SEQ ID NO: 751599 - RNA, 19 nt, Homo sapiens
  misc_RNA (1)...(19): siRNA sense strand
ugcaaguacuucaaggaua

SEQ ID NO: 751600 - RNA, 19 nt, Homo sapiens
  misc_RNA (1)...(19): siRNA sense strand
ugcuaaagcugaccaugaa

SEQ ID NO: 751601 - RNA, 19 nt, Homo sapiens
  misc_RNA (1)...(19): siRNA sense strand
cugagacccuaaagcauuu

SEQ ID NO: 751602 - RNA, 19 nt, Homo sapiens
  misc_RNA (1)...(19): siRNA sense strand
ugaacaaacgguacaaugu

SEQ ID NO: 751603 - RNA, 19 nt, Homo sapiens
  misc_RNA (1)...(19): siRNA sense strand
gacccugaaucucuccaaa

SEQ ID NO: 751604 - RNA, 19 nt, Homo sapiens
  misc_RNA (1)...(19): siRNA sense strand
aaauggagaugcuaaagcu

SEQ ID NO: 751605 - RNA, 19 nt, Homo sapiens
  misc_RNA (1)...(19): siRNA sense strand
gcauuuaguccugcaauuc

SEQ ID NO: 751606 - RNA, 19 nt, Homo sapiens
  misc_RNA (1)...(19): siRNA sense strand
aaugaaacccugcaaggaa

SEQ ID NO: 751607 - RNA, 19 nt, Homo sapiens
  misc_RNA (1)...(19): siRNA sense strand
ucgaagagcuauggcuaga

SEQ ID NO: 751608 - RNA, 19 nt, Homo sapiens
  misc_RNA (1)...(19): siRNA sense strand
gaugggccgugacauugau

SEQ ID NO: 751609 - RNA, 19 nt, Homo sapiens
  misc_RNA (1)...(19): siRNA sense strand
gugcauugccugaaacuca

SEQ ID NO: 751610 - RNA, 19 nt, Homo sapiens
  misc_RNA (1)...(19): siRNA sense strand
gagaaggcucccaaaguca

SEQ ID NO: 751611 - RNA, 19 nt, Homo sapiens
  misc_RNA (1)...(19): siRNA sense strand
augaaacccugcaaggaaa

SEQ ID NO: 751612 - RNA, 19 nt, Homo sapiens
  misc_RNA (1)...(19): siRNA sense strand
gcccuacucugugaagaau

SEQ ID NO: 751613 - RNA, 19 nt, Homo sapiens
  misc_RNA (1)...(19): siRNA sense strand
gcggaacacacaagaugaa

SEQ ID NO: 751614 - RNA, 19 nt, Homo sapiens
  misc_RNA (1)...(19): siRNA sense strand
ucugagacccuaaagcauu

SEQ ID NO: 751615 - RNA, 19 nt, Homo sapiens
  misc_RNA (1)...(19): siRNA sense strand
uccagaaucuccgcuuuga

SEQ ID NO: 751616 - RNA, 19 nt, Homo sapiens
  misc_RNA (1)...(19): siRNA sense strand
caaugaaacccugcaagga

SEQ ID NO: 751617 - RNA, 19 nt, Homo sapiens
  misc_RNA (1)...(19): siRNA sense strand
gacauugacagcucugaga

SEQ ID NO: 751618 - RNA, 19 nt, Homo sapiens
  misc_RNA (1)...(19): siRNA sense strand
ccuggacggccgagaguua

SEQ ID NO: 751619 - RNA, 19 nt, Homo sapiens
  misc_RNA (1)...(19): siRNA sense strand
ggccgugacauugauauaa

SEQ ID NO: 751620 - RNA, 19 nt, Homo sapiens
  misc_RNA (1)...(19): siRNA sense strand
ugaagaucacugaaagaaa

SEQ ID NO: 751621 - RNA, 19 nt, Homo sapiens
  misc_RNA (1)...(19): siRNA sense strand
ccgcaccagugauuguuga

SEQ ID NO: 751622 - RNA, 19 nt, Homo sapiens
  misc_RNA (1)...(19): siRNA sense strand
ggaguugggcaaggugaaa

SEQ ID NO: 751623 - RNA, 19 nt, Homo sapiens
  misc_RNA (1)...(19): siRNA sense strand
ucaaggauagcaggaauau

SEQ ID NO: 751624 - RNA, 19 nt, Homo sapiens
  misc_RNA (1)...(19): siRNA sense strand
uuacugcgcccuacucugu

SEQ ID NO: 751625 - RNA, 19 nt, Homo sapiens
  misc_RNA (1)...(19): siRNA sense strand
ggccaaauggagaugcuaa

SEQ ID NO: 751626 - RNA, 19 nt, Homo sapiens
  misc_RNA (1)...(19): siRNA sense strand
uaaagcugaccaugaacaa

SEQ ID NO: 751627 - RNA, 19 nt, Homo sapiens
  misc_RNA (1)...(19): siRNA sense strand
guacaaugucucccagcaa

SEQ ID NO: 751628 - RNA, 19 nt, Homo sapiens
  misc_RNA (1)...(19): siRNA sense strand
gucaagacccugaaucucu

SEQ ID NO: 751629 - RNA, 19 nt, Homo sapiens
  misc_RNA (1)...(19): siRNA sense strand
guuauccgcaccagugauu

SEQ ID NO: 751630 - RNA, 19 nt, Homo sapiens
  misc_RNA (1)...(19): siRNA sense strand
gaugaaaacaugaggaaau

SEQ ID NO: 751631 - RNA, 19 nt, Homo sapiens
  misc_RNA (1)...(19): siRNA sense strand
cagugauuguugacauuga

SEQ ID NO: 751632 - RNA, 19 nt, Homo sapiens
  misc_RNA (1)...(19): siRNA sense strand
guugaagccaggccaaaug

SEQ ID NO: 751633 - RNA, 19 nt, Homo sapiens
  misc_RNA (1)...(19): siRNA sense strand
aaacguggacucccucagu

SEQ ID NO: 751634 - RNA, 19 nt, Homo sapiens
  misc_RNA (1)...(19): siRNA sense strand
ucuccagaaucuccgcuuu

SEQ ID NO: 751635 - RNA, 19 nt, Homo sapiens
  misc_RNA (1)...(19): siRNA sense strand
gggccgugacauugauaua

SEQ ID NO: 751636 - RNA, 19 nt, Homo sapiens
  misc_RNA (1)...(19): siRNA sense strand
cuucaaggauagcaggaau

SEQ ID NO: 751637 - RNA, 19 nt, Homo sapiens
  misc_RNA (1)...(19): siRNA sense strand
caccagugauuguugacau

SEQ ID NO: 751638 - RNA, 19 nt, Homo sapiens
  misc_RNA (1)...(19): siRNA sense strand
cugaagaucacugaaagaa

SEQ ID NO: 751639 - RNA, 19 nt, Homo sapiens
  misc_RNA (1)...(19): siRNA sense strand
caaagucaagacccugaau

SEQ ID NO: 751640 - RNA, 19 nt, Homo sapiens
  misc_RNA (1)...(19): siRNA sense strand
gaccagucugccuauguaa

SEQ ID NO: 751641 - RNA, 19 nt, Homo sapiens
  misc_RNA (1)...(19): siRNA sense strand
gaacacacaagaugaaaac

SEQ ID NO: 751642 - RNA, 19 nt, Homo sapiens
  misc_RNA (1)...(19): siRNA sense strand
ggacucccucagugcauug

SEQ ID NO: 751643 - RNA, 19 nt, Homo sapiens
  misc_RNA (1)...(19): siRNA sense strand
gugcaaguacuucaaggau

SEQ ID NO: 751644 - RNA, 19 nt, Homo sapiens
  misc_RNA (1)...(19): siRNA sense strand
ggaaaacuuuacuggaucu

SEQ ID NO: 751645 - RNA, 19 nt, Homo sapiens
  misc_RNA (1)...(19): siRNA sense strand
aacaaacgguacaaugucu

SEQ ID NO: 751646 - RNA, 19 nt, Homo sapiens
  misc_RNA (1)...(19): siRNA sense strand
ccagucugccuauguaagu

SEQ ID NO: 751647 - RNA, 19 nt, Homo sapiens
  misc_RNA (1)...(19): siRNA sense strand
caaggauagcaggaauaua

SEQ ID NO: 751648 - RNA, 19 nt, Homo sapiens
  misc_RNA (1)...(19): siRNA sense strand
gccaaauggagaugcuaaa

SEQ ID NO: 751649 - RNA, 19 nt, Homo sapiens
  misc_RNA (1)...(19): siRNA sense strand
aaggaaaacuuuacuggau

SEQ ID NO: 751650 - RNA, 19 nt, Homo sapiens
  misc_RNA (1)...(19): siRNA sense strand
caaauggagaugcuaaagc

SEQ ID NO: 751651 - RNA, 19 nt, Homo sapiens
  misc_RNA (1)...(19): siRNA sense strand
gaaaugguucaaggucaca

SEQ ID NO: 751652 - RNA, 19 nt, Homo sapiens
  misc_RNA (1)...(19): siRNA sense strand
agaaggcucccaaagucaa

SEQ ID NO: 751653 - RNA, 19 nt, Homo sapiens
  misc_RNA (1)...(19): siRNA sense strand
ggcggaacacacaagauga

SEQ ID NO: 751654 - RNA, 19 nt, Homo sapiens
  misc_RNA (1)...(19): siRNA sense strand
gaaacucagcaugacuuca

SEQ ID NO: 751655 - RNA, 19 nt, Homo sapiens
  misc_RNA (1)...(19): siRNA sense strand
cacacaagaugaaaacaug

SEQ ID NO: 751656 - RNA, 19 nt, Homo sapiens
  misc_RNA (1)...(19): siRNA sense strand
ccaaauggagaugcuaaag

SEQ ID NO: 751657 - RNA, 19 nt, Homo sapiens
  misc_RNA (1)...(19): siRNA sense strand
cuugaugggccgugacauu

SEQ ID NO: 751658 - RNA, 19 nt, Homo sapiens
  misc_RNA (1)...(19): siRNA sense strand
cuaaagcugaccaugaaca

SEQ ID NO: 751659 - RNA, 19 nt, Homo sapiens
  misc_RNA (1)...(19): siRNA sense strand
gaguuauccgcaccaguga

SEQ ID NO: 751660 - RNA, 19 nt, Homo sapiens
  misc_RNA (1)...(19): siRNA sense strand
gcugccacccugaagauca

SEQ ID NO: 751661 - RNA, 19 nt, Homo sapiens
  misc_RNA (1)...(19): siRNA sense strand
gaagaucacugaaagaaau

SEQ ID NO: 751662 - RNA, 19 nt, Homo sapiens
  misc_RNA (1)...(19): siRNA sense strand
ggaccagucugccuaugua

SEQ ID NO: 751663 - RNA, 19 nt, Homo sapiens
  misc_RNA (1)...(19): siRNA sense strand
gauauaauccugaaucgaa

SEQ ID NO: 751664 - RNA, 19 nt, Homo sapiens
  misc_RNA (1)...(19): siRNA sense strand
gcaaguacuucaaggauag

SEQ ID NO: 751665 - RNA, 19 nt, Homo sapiens
  misc_RNA (1)...(19): siRNA sense strand
gaagagcuauggcuagaag

SEQ ID NO: 751666 - RNA, 19 nt, Homo sapiens
  misc_RNA (1)...(19): siRNA sense strand
aaggauagcaggaauauaa

SEQ ID NO: 751667 - RNA, 19 nt, Homo sapiens
  misc_RNA (1)...(19): siRNA sense strand
gaacaaacgguacaauguc

SEQ ID NO: 751668 - RNA, 19 nt, Homo sapiens
  misc_RNA (1)...(19): siRNA sense strand
ccuacucugugaagaauaa

SEQ ID NO: 751669 - RNA, 19 nt, Homo sapiens
  misc_RNA (1)...(19): siRNA sense strand
ugacagcucugagacaaug

SEQ ID NO: 751670 - RNA, 19 nt, Homo sapiens
  misc_RNA (1)...(19): siRNA sense strand
agagaaggcucccaaaguc

SEQ ID NO: 751671 - RNA, 19 nt, Homo sapiens
  misc_RNA (1)...(19): siRNA sense strand
gaucugagacccuaaagca

SEQ ID NO: 751672 - RNA, 19 nt, Homo sapiens
  misc_RNA (1)...(19): siRNA sense strand
guucugaucuugccuucau

SEQ ID NO: 751673 - RNA, 19 nt, Homo sapiens
  misc_RNA (1)...(19): siRNA sense strand
gccgugacauugauauaau

SEQ ID NO: 751674 - RNA, 19 nt, Homo sapiens
  misc_RNA (1)...(19): siRNA sense strand
ugcaaguacuucaaggaua

SEQ ID NO: 751675 - RNA, 19 nt, Homo sapiens
  misc_RNA (1)...(19): siRNA sense strand
ugcuaaagcugaccaugaa

SEQ ID NO: 751676 - RNA, 19 nt, Homo sapiens
  misc_RNA (1)...(19): siRNA sense strand
cugagacccuaaagcauuu

SEQ ID NO: 751677 - RNA, 19 nt, Homo sapiens
  misc_RNA (1)...(19): siRNA sense strand
ugaacaaacgguacaaugu

SEQ ID NO: 751678 - RNA, 19 nt, Homo sapiens
  misc_RNA (1)...(19): siRNA sense strand
gacccugaaucucuccaaa

SEQ ID NO: 751679 - RNA, 19 nt, Homo sapiens
  misc_RNA (1)...(19): siRNA sense strand
aaauggagaugcuaaagcu

SEQ ID NO: 751680 - RNA, 19 nt, Homo sapiens
  misc_RNA (1)...(19): siRNA sense strand
gcauuuaguccugcaauuc

SEQ ID NO: 751681 - RNA, 19 nt, Homo sapiens
  misc_RNA (1)...(19): siRNA sense strand
aaugaaacccugcaaggaa

SEQ ID NO: 751682 - RNA, 19 nt, Homo sapiens
  misc_RNA (1)...(19): siRNA sense strand
ucgaagagcuauggcuaga

SEQ ID NO: 751683 - RNA, 19 nt, Homo sapiens
  misc_RNA (1)...(19): siRNA sense strand
gaugggccgugacauugau

SEQ ID NO: 751684 - RNA, 19 nt, Homo sapiens
  misc_RNA (1)...(19): siRNA sense strand
gugcauugccugaaacuca

SEQ ID NO: 751685 - RNA, 19 nt, Homo sapiens
  misc_RNA (1)...(19): siRNA sense strand
gagaaggcucccaaaguca

SEQ ID NO: 751686 - RNA, 19 nt, Homo sapiens
  misc_RNA (1)...(19): siRNA sense strand
augaaacccugcaaggaaa

SEQ ID NO: 751687 - RNA, 19 nt, Homo sapiens
  misc_RNA (1)...(19): siRNA sense strand
gcccuacucugugaagaau

SEQ ID NO: 751688 - RNA, 19 nt, Homo sapiens
  misc_RNA (1)...(19): siRNA sense strand
gcggaacacacaagaugaa

SEQ ID NO: 751689 - RNA, 19 nt, Homo sapiens
  misc_RNA (1)...(19): siRNA sense strand
ucugagacccuaaagcauu

SEQ ID NO: 751690 - RNA, 19 nt, Homo sapiens
  misc_RNA (1)...(19): siRNA sense strand
uccagaaucuccgcuuuga

SEQ ID NO: 751691 - RNA, 19 nt, Homo sapiens
  misc_RNA (1)...(19): siRNA sense strand
caaugaaacccugcaagga

SEQ ID NO: 751692 - RNA, 19 nt, Homo sapiens
  misc_RNA (1)...(19): siRNA sense strand
gacauugacagcucugaga

SEQ ID NO: 751693 - RNA, 19 nt, Homo sapiens
  misc_RNA (1)...(19): siRNA sense strand
ccuggacggccgagaguua

SEQ ID NO: 751694 - RNA, 19 nt, Homo sapiens
  misc_RNA (1)...(19): siRNA sense strand
ggccgugacauugauauaa

SEQ ID NO: 751695 - RNA, 19 nt, Homo sapiens
  misc_RNA (1)...(19): siRNA sense strand
ugaagaucacugaaagaaa

SEQ ID NO: 751696 - RNA, 19 nt, Homo sapiens
  misc_RNA (1)...(19): siRNA sense strand
ccgcaccagugauuguuga

SEQ ID NO: 751697 - RNA, 19 nt, Homo sapiens
  misc_RNA (1)...(19): siRNA sense strand
ggaguugggcaaggugaaa

SEQ ID NO: 751698 - RNA, 19 nt, Homo sapiens
  misc_RNA (1)...(19): siRNA sense strand
ucaaggauagcaggaauau

SEQ ID NO: 751699 - RNA, 19 nt, Homo sapiens
  misc_RNA (1)...(19): siRNA sense strand
uuacugcgcccuacucugu

SEQ ID NO: 751700 - RNA, 19 nt, Homo sapiens
  misc_RNA (1)...(19): siRNA sense strand
ggccaaauggagaugcuaa

SEQ ID NO: 751701 - RNA, 19 nt, Homo sapiens
  misc_RNA (1)...(19): siRNA sense strand
uaaagcugaccaugaacaa

SEQ ID NO: 751702 - RNA, 19 nt, Homo sapiens
  misc_RNA (1)...(19): siRNA sense strand
guacaaugucucccagcaa

SEQ ID NO: 751703 - RNA, 19 nt, Homo sapiens
  misc_RNA (1)...(19): siRNA sense strand
gucaagacccugaaucucu

SEQ ID NO: 751704 - RNA, 19 nt, Homo sapiens
  misc_RNA (1)...(19): siRNA sense strand
guuauccgcaccagugauu

SEQ ID NO: 751705 - RNA, 19 nt, Homo sapiens
  misc_RNA (1)...(19): siRNA sense strand
cagugauuguugacauuga

SEQ ID NO: 751706 - RNA, 19 nt, Homo sapiens
  misc_RNA (1)...(19): siRNA sense strand
uccagucugugcaucauga

SEQ ID NO: 751707 - RNA, 19 nt, Homo sapiens
  misc_RNA (1)...(19): siRNA sense strand
gaugaaaacaugaggaaau

SEQ ID NO: 751708 - RNA, 19 nt, Homo sapiens
  misc_RNA (1)...(19): siRNA sense strand
ucuccagaaucuccgcuuu

SEQ ID NO: 751709 - RNA, 19 nt, Homo sapiens
  misc_RNA (1)...(19): siRNA sense strand
aaacguggacucccucagu

SEQ ID NO: 751710 - RNA, 19 nt, Homo sapiens
  misc_RNA (1)...(19): siRNA sense strand
guugaagccaggccaaaug

SEQ ID NO: 751711 - RNA, 19 nt, Homo sapiens
  misc_RNA (1)...(19): siRNA sense strand
gggccgugacauugauaua

SEQ ID NO: 751712 - RNA, 19 nt, Homo sapiens
  misc_RNA (1)...(19): siRNA sense strand
gcaauuccagucugugcau

SEQ ID NO: 751713 - RNA, 19 nt, Homo sapiens
  misc_RNA (1)...(19): siRNA sense strand
cuucaaggauagcaggaau

SEQ ID NO: 751714 - RNA, 19 nt, Homo sapiens
  misc_RNA (1)...(19): siRNA sense strand
caccagugauuguugacau

SEQ ID NO: 751715 - RNA, 19 nt, Homo sapiens
  misc_RNA (1)...(19): siRNA sense strand
cugaagaucacugaaagaa

SEQ ID NO: 751716 - RNA, 19 nt, Homo sapiens
  misc_RNA (1)...(19): siRNA sense strand
caaagucaagacccugaau

SEQ ID NO: 751717 - RNA, 19 nt, Homo sapiens
  misc_RNA (1)...(19): siRNA sense strand
gaccagucugccuauguaa

SEQ ID NO: 751718 - RNA, 19 nt, Homo sapiens
  misc_RNA (1)...(19): siRNA sense strand
ggccgcaauuccagucugu

SEQ ID NO: 751719 - RNA, 19 nt, Homo sapiens
  misc_RNA (1)...(19): siRNA sense strand
gaacacacaagaugaaaac

SEQ ID NO: 751720 - RNA, 19 nt, Homo sapiens
  misc_RNA (1)...(19): siRNA sense strand
auguggaccuucaucacua

SEQ ID NO: 751721 - RNA, 19 nt, Homo sapiens
  misc_RNA (1)...(19): siRNA sense strand
ggacucccucagugcauug

SEQ ID NO: 751722 - RNA, 19 nt, Homo sapiens
  misc_RNA (1)...(19): siRNA sense strand
gugcaaguacuucaaggau

SEQ ID NO: 751723 - RNA, 19 nt, Homo sapiens
  misc_RNA (1)...(19): siRNA sense strand
ggaaaacuuuacuggaucu

SEQ ID NO: 751724 - RNA, 19 nt, Homo sapiens
  misc_RNA (1)...(19): siRNA sense strand
aacaaacgguacaaugucu

SEQ ID NO: 751725 - RNA, 19 nt, Homo sapiens
  misc_RNA (1)...(19): siRNA sense strand
gccaaauggagaugcuaaa

SEQ ID NO: 751726 - RNA, 19 nt, Homo sapiens
  misc_RNA (1)...(19): siRNA sense strand
caaggauagcaggaauaua

SEQ ID NO: 751727 - RNA, 19 nt, Homo sapiens
  misc_RNA (1)...(19): siRNA sense strand
aaggaaaacuuuacuggau

SEQ ID NO: 751728 - RNA, 19 nt, Homo sapiens
  misc_RNA (1)...(19): siRNA sense strand
ccagucugccuauguaagu

SEQ ID NO: 751729 - RNA, 19 nt, Homo sapiens
  misc_RNA (1)...(19): siRNA sense strand
agaaggcucccaaagucaa

SEQ ID NO: 751730 - RNA, 19 nt, Homo sapiens
  misc_RNA (1)...(19): siRNA sense strand
gaaaugguucaaggucaca

SEQ ID NO: 751731 - RNA, 19 nt, Homo sapiens
  misc_RNA (1)...(19): siRNA sense strand
caaauggagaugcuaaagc

SEQ ID NO: 751732 - RNA, 19 nt, Homo sapiens
  misc_RNA (1)...(19): siRNA sense strand
ggcggaacacacaagauga

SEQ ID NO: 751733 - RNA, 19 nt, Homo sapiens
  misc_RNA (1)...(19): siRNA sense strand
ccaaauggagaugcuaaag

SEQ ID NO: 751734 - RNA, 19 nt, Homo sapiens
  misc_RNA (1)...(19): siRNA sense strand
gaaacucagcaugacuuca

SEQ ID NO: 751735 - RNA, 19 nt, Homo sapiens
  misc_RNA (1)...(19): siRNA sense strand
cacacaagaugaaaacaug

SEQ ID NO: 751736 - RNA, 19 nt, Homo sapiens
  misc_RNA (1)...(19): siRNA sense strand
cuugaugggccgugacauu

SEQ ID NO: 751737 - RNA, 19 nt, Homo sapiens
  misc_RNA (1)...(19): siRNA sense strand
cuaaagcugaccaugaaca

SEQ ID NO: 751738 - RNA, 19 nt, Homo sapiens
  misc_RNA (1)...(19): siRNA sense strand
gaguuauccgcaccaguga

SEQ ID NO: 751739 - RNA, 19 nt, Homo sapiens
  misc_RNA (1)...(19): siRNA sense strand
gcugccacccugaagauca

SEQ ID NO: 751740 - RNA, 19 nt, Homo sapiens
  misc_RNA (1)...(19): siRNA sense strand
gaagaucacugaaagaaau

SEQ ID NO: 751741 - RNA, 19 nt, Homo sapiens
  misc_RNA (1)...(19): siRNA sense strand
ggaccagucugccuaugua

SEQ ID NO: 751742 - RNA, 19 nt, Homo sapiens
  misc_RNA (1)...(19): siRNA sense strand
gauauaauccugaaucgaa

SEQ ID NO: 751743 - RNA, 19 nt, Homo sapiens
  misc_RNA (1)...(19): siRNA sense strand
gcaaguacuucaaggauag

SEQ ID NO: 751744 - RNA, 19 nt, Homo sapiens
  misc_RNA (1)...(19): siRNA sense strand
gaagagcuauggcuagaag

SEQ ID NO: 751745 - RNA, 19 nt, Homo sapiens
  misc_RNA (1)...(19): siRNA sense strand
aaggauagcaggaauauaa

SEQ ID NO: 751746 - RNA, 19 nt, Homo sapiens
  misc_RNA (1)...(19): siRNA sense strand
gaacaaacgguacaauguc

SEQ ID NO: 751747 - RNA, 19 nt, Homo sapiens
  misc_RNA (1)...(19): siRNA sense strand
ccuacucugugaagaauaa

SEQ ID NO: 751748 - RNA, 19 nt, Homo sapiens
  misc_RNA (1)...(19): siRNA sense strand
ugacagcucugagacaaug

SEQ ID NO: 751749 - RNA, 19 nt, Homo sapiens
  misc_RNA (1)...(19): siRNA sense strand
agagaaggcucccaaaguc

SEQ ID NO: 751750 - RNA, 19 nt, Homo sapiens
  misc_RNA (1)...(19): siRNA sense strand
gaucugagacccuaaagca

SEQ ID NO: 751751 - RNA, 19 nt, Homo sapiens
  misc_RNA (1)...(19): siRNA sense strand
gccgugacauugauauaau

SEQ ID NO: 751752 - RNA, 19 nt, Homo sapiens
  misc_RNA (1)...(19): siRNA sense strand
ugcaaguacuucaaggaua

SEQ ID NO: 751753 - RNA, 19 nt, Homo sapiens
  misc_RNA (1)...(19): siRNA sense strand
ugcuaaagcugaccaugaa

SEQ ID NO: 751754 - RNA, 19 nt, Homo sapiens
  misc_RNA (1)...(19): siRNA sense strand
cugagacccuaaagcauuu

SEQ ID NO: 751755 - RNA, 19 nt, Homo sapiens
  misc_RNA (1)...(19): siRNA sense strand
ugaacaaacgguacaaugu

SEQ ID NO: 751756 - RNA, 19 nt, Homo sapiens
  misc_RNA (1)...(19): siRNA sense strand
gacccugaaucucuccaaa

SEQ ID NO: 751757 - RNA, 19 nt, Homo sapiens
  misc_RNA (1)...(19): siRNA sense strand
aaauggagaugcuaaagcu

SEQ ID NO: 751758 - RNA, 19 nt, Homo sapiens
  misc_RNA (1)...(19): siRNA sense strand
gcauuuaguccugcaauuc

SEQ ID NO: 751759 - RNA, 19 nt, Homo sapiens
  misc_RNA (1)...(19): siRNA sense strand
aaugaaacccugcaaggaa

SEQ ID NO: 751760 - RNA, 19 nt, Homo sapiens
  misc_RNA (1)...(19): siRNA sense strand
ucgaagagcuauggcuaga

SEQ ID NO: 751761 - RNA, 19 nt, Homo sapiens
  misc_RNA (1)...(19): siRNA sense strand
gaugggccgugacauugau

SEQ ID NO: 751762 - RNA, 19 nt, Homo sapiens
  misc_RNA (1)...(19): siRNA sense strand
gugcauugccugaaacuca

SEQ ID NO: 751763 - RNA, 19 nt, Homo sapiens
  misc_RNA (1)...(19): siRNA sense strand
gagaaggcucccaaaguca

SEQ ID NO: 751764 - RNA, 19 nt, Homo sapiens
  misc_RNA (1)...(19): siRNA sense strand
augaaacccugcaaggaaa

SEQ ID NO: 751765 - RNA, 19 nt, Homo sapiens
  misc_RNA (1)...(19): siRNA sense strand
gcccuacucugugaagaau

SEQ ID NO: 751766 - RNA, 19 nt, Homo sapiens
  misc_RNA (1)...(19): siRNA sense strand
gcggaacacacaagaugaa

SEQ ID NO: 751767 - RNA, 19 nt, Homo sapiens
  misc_RNA (1)...(19): siRNA sense strand
ucugagacccuaaagcauu

SEQ ID NO: 751768 - RNA, 19 nt, Homo sapiens
  misc_RNA (1)...(19): siRNA sense strand
uccagaaucuccgcuuuga

SEQ ID NO: 751769 - RNA, 19 nt, Homo sapiens
  misc_RNA (1)...(19): siRNA sense strand
caaugaaacccugcaagga

SEQ ID NO: 751770 - RNA, 19 nt, Homo sapiens
  misc_RNA (1)...(19): siRNA sense strand
gacauugacagcucugaga

SEQ ID NO: 751771 - RNA, 19 nt, Homo sapiens
  misc_RNA (1)...(19): siRNA sense strand
ccuggacggccgagaguua

SEQ ID NO: 751772 - RNA, 19 nt, Homo sapiens
  misc_RNA (1)...(19): siRNA sense strand
ggccgugacauugauauaa

SEQ ID NO: 751773 - RNA, 19 nt, Homo sapiens
  misc_RNA (1)...(19): siRNA sense strand
ugaagaucacugaaagaaa

SEQ ID NO: 751774 - RNA, 19 nt, Homo sapiens
  misc_RNA (1)...(19): siRNA sense strand
ccgcaccagugauuguuga

SEQ ID NO: 751775 - RNA, 19 nt, Homo sapiens
  misc_RNA (1)...(19): siRNA sense strand
ggaguugggcaaggugaaa

SEQ ID NO: 751776 - RNA, 19 nt, Homo sapiens
  misc_RNA (1)...(19): siRNA sense strand
ucaaggauagcaggaauau

SEQ ID NO: 751777 - RNA, 19 nt, Homo sapiens
  misc_RNA (1)...(19): siRNA sense strand
uuacugcgcccuacucugu

SEQ ID NO: 751778 - RNA, 19 nt, Homo sapiens
  misc_RNA (1)...(19): siRNA sense strand
ggccaaauggagaugcuaa

SEQ ID NO: 751779 - RNA, 19 nt, Homo sapiens
  misc_RNA (1)...(19): siRNA sense strand
uaaagcugaccaugaacaa

SEQ ID NO: 751780 - RNA, 19 nt, Homo sapiens
  misc_RNA (1)...(19): siRNA sense strand
guacaaugucucccagcaa

SEQ ID NO: 751781 - RNA, 19 nt, Homo sapiens
  misc_RNA (1)...(19): siRNA sense strand
gucaagacccugaaucucu

SEQ ID NO: 751782 - RNA, 19 nt, Homo sapiens
  misc_RNA (1)...(19): siRNA sense strand
guuauccgcaccagugauu

SEQ ID NO: 751783 - RNA, 19 nt, Homo sapiens
  misc_RNA (1)...(19): siRNA sense strand
gaugaaaacaugaggaaau

SEQ ID NO: 751784 - RNA, 19 nt, Homo sapiens
  misc_RNA (1)...(19): siRNA sense strand
cagugauuguugacauuga

SEQ ID NO: 751785 - RNA, 19 nt, Homo sapiens
  misc_RNA (1)...(19): siRNA sense strand
guugaagccaggccaaaug

SEQ ID NO: 751786 - RNA, 19 nt, Homo sapiens
  misc_RNA (1)...(19): siRNA sense strand
aaacguggacucccucagu

SEQ ID NO: 751787 - RNA, 19 nt, Homo sapiens
  misc_RNA (1)...(19): siRNA sense strand
ucuccagaaucuccgcuuu

SEQ ID NO: 751788 - RNA, 19 nt, Homo sapiens
  misc_RNA (1)...(19): siRNA sense strand
gggccgugacauugauaua

SEQ ID NO: 751789 - RNA, 19 nt, Homo sapiens
  misc_RNA (1)...(19): siRNA sense strand
cuucaaggauagcaggaau

SEQ ID NO: 751790 - RNA, 19 nt, Homo sapiens
  misc_RNA (1)...(19): siRNA sense strand
caccagugauuguugacau

SEQ ID NO: 751791 - RNA, 19 nt, Homo sapiens
  misc_RNA (1)...(19): siRNA sense strand
cugaagaucacugaaagaa

SEQ ID NO: 751792 - RNA, 19 nt, Homo sapiens
  misc_RNA (1)...(19): siRNA sense strand
caaagucaagacccugaau

SEQ ID NO: 751793 - RNA, 19 nt, Homo sapiens
  misc_RNA (1)...(19): siRNA sense strand
gaccagucugccuauguaa

SEQ ID NO: 751794 - RNA, 19 nt, Homo sapiens
  misc_RNA (1)...(19): siRNA sense strand
gaacacacaagaugaaaac

SEQ ID NO: 751795 - RNA, 19 nt, Homo sapiens
  misc_RNA (1)...(19): siRNA sense strand
ggacucccucagugcauug

SEQ ID NO: 751796 - RNA, 19 nt, Homo sapiens
  misc_RNA (1)...(19): siRNA sense strand
gugcaaguacuucaaggau

SEQ ID NO: 751797 - RNA, 19 nt, Homo sapiens
  misc_RNA (1)...(19): siRNA sense strand
ggaaaacuuuacuggaucu

SEQ ID NO: 751798 - RNA, 19 nt, Homo sapiens
  misc_RNA (1)...(19): siRNA sense strand
aacaaacgguacaaugucu

SEQ ID NO: 751799 - RNA, 19 nt, Homo sapiens
  misc_RNA (1)...(19): siRNA sense strand
ccagucugccuauguaagu

SEQ ID NO: 751800 - RNA, 19 nt, Homo sapiens
  misc_RNA (1)...(19): siRNA sense strand
caaggauagcaggaauaua

SEQ ID NO: 751801 - RNA, 19 nt, Homo sapiens
  misc_RNA (1)...(19): siRNA sense strand
gccaaauggagaugcuaaa

SEQ ID NO: 751802 - RNA, 19 nt, Homo sapiens
  misc_RNA (1)...(19): siRNA sense strand
aaggaaaacuuuacuggau

SEQ ID NO: 751803 - RNA, 19 nt, Homo sapiens
  misc_RNA (1)...(19): siRNA sense strand
caaauggagaugcuaaagc

SEQ ID NO: 751804 - RNA, 19 nt, Homo sapiens
  misc_RNA (1)...(19): siRNA sense strand
gaaaugguucaaggucaca

SEQ ID NO: 751805 - RNA, 19 nt, Homo sapiens
  misc_RNA (1)...(19): siRNA sense strand
agaaggcucccaaagucaa

SEQ ID NO: 751806 - RNA, 19 nt, Homo sapiens
  misc_RNA (1)...(19): siRNA sense strand
ggcggaacacacaagauga

SEQ ID NO: 751807 - RNA, 19 nt, Homo sapiens
  misc_RNA (1)...(19): siRNA sense strand
gaaacucagcaugacuuca

SEQ ID NO: 751808 - RNA, 19 nt, Homo sapiens
  misc_RNA (1)...(19): siRNA sense strand
cacacaagaugaaaacaug

SEQ ID NO: 751809 - RNA, 19 nt, Homo sapiens
  misc_RNA (1)...(19): siRNA sense strand
ccaaauggagaugcuaaag

SEQ ID NO: 751810 - RNA, 19 nt, Homo sapiens
  misc_RNA (1)...(19): siRNA sense strand
cuugaugggccgugacauu

SEQ ID NO: 751811 - RNA, 19 nt, Homo sapiens
  misc_RNA (1)...(19): siRNA sense strand
cuaaagcugaccaugaaca

SEQ ID NO: 751812 - RNA, 19 nt, Homo sapiens
  misc_RNA (1)...(19): siRNA sense strand
gaguuauccgcaccaguga

SEQ ID NO: 751813 - RNA, 19 nt, Homo sapiens
  misc_RNA (1)...(19): siRNA sense strand
gcugccacccugaagauca

SEQ ID NO: 751814 - RNA, 19 nt, Homo sapiens
  misc_RNA (1)...(19): siRNA sense strand
gaagaucacugaaagaaau

SEQ ID NO: 751815 - RNA, 19 nt, Homo sapiens
  misc_RNA (1)...(19): siRNA sense strand
gauauaauccugaaucgaa

SEQ ID NO: 751816 - RNA, 19 nt, Homo sapiens
  misc_RNA (1)...(19): siRNA sense strand
gaacaaacgguacaauguc

SEQ ID NO: 751817 - RNA, 19 nt, Homo sapiens
  misc_RNA (1)...(19): siRNA sense strand
ccuacucugugaagaauaa

SEQ ID NO: 751818 - RNA, 19 nt, Homo sapiens
  misc_RNA (1)...(19): siRNA sense strand
agagaaggcucccaaaguc

SEQ ID NO: 751819 - RNA, 19 nt, Homo sapiens
  misc_RNA (1)...(19): siRNA sense strand
gccgugacauugauauaau

SEQ ID NO: 751820 - RNA, 19 nt, Homo sapiens
  misc_RNA (1)...(19): siRNA sense strand
ugcuaaagcugaccaugaa

SEQ ID NO: 751821 - RNA, 19 nt, Homo sapiens
  misc_RNA (1)...(19): siRNA sense strand
ugaacaaacgguacaaugu

SEQ ID NO: 751822 - RNA, 19 nt, Homo sapiens
  misc_RNA (1)...(19): siRNA sense strand
aaauggagaugcuaaagcu

SEQ ID NO: 751823 - RNA, 19 nt, Homo sapiens
  misc_RNA (1)...(19): siRNA sense strand
gaugggccgugacauugau

SEQ ID NO: 751824 - RNA, 19 nt, Homo sapiens
  misc_RNA (1)...(19): siRNA sense strand
gagaaggcucccaaaguca

SEQ ID NO: 751825 - RNA, 19 nt, Homo sapiens
  misc_RNA (1)...(19): siRNA sense strand
gcccuacucugugaagaau

SEQ ID NO: 751826 - RNA, 19 nt, Homo sapiens
  misc_RNA (1)...(19): siRNA sense strand
gcggaacacacaagaugaa

SEQ ID NO: 751827 - RNA, 19 nt, Homo sapiens
  misc_RNA (1)...(19): siRNA sense strand
uccagaaucuccgcuuuga

SEQ ID NO: 751828 - RNA, 19 nt, Homo sapiens
  misc_RNA (1)...(19): siRNA sense strand
ggccgugacauugauauaa

SEQ ID NO: 751829 - RNA, 19 nt, Homo sapiens
  misc_RNA (1)...(19): siRNA sense strand
ugaagaucacugaaagaaa

SEQ ID NO: 751830 - RNA, 19 nt, Homo sapiens
  misc_RNA (1)...(19): siRNA sense strand
uuacugcgcccuacucugu

SEQ ID NO: 751831 - RNA, 19 nt, Homo sapiens
  misc_RNA (1)...(19): siRNA sense strand
ggccaaauggagaugcuaa

SEQ ID NO: 751832 - RNA, 19 nt, Homo sapiens
  misc_RNA (1)...(19): siRNA sense strand
uaaagcugaccaugaacaa

SEQ ID NO: 751833 - RNA, 19 nt, Homo sapiens
  misc_RNA (1)...(19): siRNA sense strand
guacaaugucucccagcaa

SEQ ID NO: 751834 - RNA, 19 nt, Homo sapiens
  misc_RNA (1)...(19): siRNA sense strand
gaugaaaacaugaggaaau

SEQ ID NO: 751835 - RNA, 19 nt, Homo sapiens
  misc_RNA (1)...(19): siRNA sense strand
guugaagccaggccaaaug

SEQ ID NO: 751836 - RNA, 19 nt, Homo sapiens
  misc_RNA (1)...(19): siRNA sense strand
ucuccagaaucuccgcuuu

SEQ ID NO: 751837 - RNA, 19 nt, Homo sapiens
  misc_RNA (1)...(19): siRNA sense strand
gggccgugacauugauaua

SEQ ID NO: 751838 - RNA, 19 nt, Homo sapiens
  misc_RNA (1)...(19): siRNA sense strand
cugaagaucacugaaagaa

SEQ ID NO: 751839 - RNA, 19 nt, Homo sapiens
  misc_RNA (1)...(19): siRNA sense strand
gaacacacaagaugaaaac

SEQ ID NO: 751840 - RNA, 19 nt, Homo sapiens
  misc_RNA (1)...(19): siRNA sense strand
aacaaacgguacaaugucu

SEQ ID NO: 751841 - RNA, 19 nt, Homo sapiens
  misc_RNA (1)...(19): siRNA sense strand
gccaaauggagaugcuaaa

SEQ ID NO: 751842 - RNA, 19 nt, Homo sapiens
  misc_RNA (1)...(19): siRNA sense strand
caaauggagaugcuaaagc

SEQ ID NO: 751843 - RNA, 19 nt, Homo sapiens
  misc_RNA (1)...(19): siRNA sense strand
agaaggcucccaaagucaa

SEQ ID NO: 751844 - RNA, 19 nt, Homo sapiens
  misc_RNA (1)...(19): siRNA sense strand
gaaaugguucaaggucaca

SEQ ID NO: 751845 - RNA, 19 nt, Homo sapiens
  misc_RNA (1)...(19): siRNA sense strand
ccaaauggagaugcuaaag

SEQ ID NO: 751846 - RNA, 19 nt, Homo sapiens
  misc_RNA (1)...(19): siRNA sense strand
ggcggaacacacaagauga

SEQ ID NO: 751847 - RNA, 19 nt, Homo sapiens
  misc_RNA (1)...(19): siRNA sense strand
cacacaagaugaaaacaug

SEQ ID NO: 751848 - RNA, 19 nt, Homo sapiens
  misc_RNA (1)...(19): siRNA sense strand
cuaaagcugaccaugaaca

SEQ ID NO: 751849 - RNA, 19 nt, Homo sapiens
  misc_RNA (1)...(19): siRNA sense strand
gcugccacccugaagauca

SEQ ID NO: 751850 - RNA, 19 nt, Homo sapiens
  misc_RNA (1)...(19): siRNA sense strand
cuugaugggccgugacauu

SEQ ID NO: 751851 - RNA, 19 nt, Homo sapiens
  misc_RNA (1)...(19): siRNA sense strand
gaagaucacugaaagaaau

SEQ ID NO: 751852 - RNA, 19 nt, Homo sapiens
  misc_RNA (1)...(19): siRNA sense strand
ggaccagucugccuaugua

SEQ ID NO: 751853 - RNA, 19 nt, Homo sapiens
  misc_RNA (1)...(19): siRNA sense strand
gauauaauccugaaucgaa

SEQ ID NO: 751854 - RNA, 19 nt, Homo sapiens
  misc_RNA (1)...(19): siRNA sense strand
gcaaguacuucaaggauag

SEQ ID NO: 751855 - RNA, 19 nt, Homo sapiens
  misc_RNA (1)...(19): siRNA sense strand
gaagagcuauggcuagaag

SEQ ID NO: 751856 - RNA, 19 nt, Homo sapiens
  misc_RNA (1)...(19): siRNA sense strand
aaggauagcaggaauauaa

SEQ ID NO: 751857 - RNA, 19 nt, Homo sapiens
  misc_RNA (1)...(19): siRNA sense strand
gaacaaacgguacaauguc

SEQ ID NO: 751858 - RNA, 19 nt, Homo sapiens
  misc_RNA (1)...(19): siRNA sense strand
ccuacucugugaagaauaa

SEQ ID NO: 751859 - RNA, 19 nt, Homo sapiens
  misc_RNA (1)...(19): siRNA sense strand
ugacagcucugagacaaug

SEQ ID NO: 751860 - RNA, 19 nt, Homo sapiens
  misc_RNA (1)...(19): siRNA sense strand
agagaaggcucccaaaguc

SEQ ID NO: 751861 - RNA, 19 nt, Homo sapiens
  misc_RNA (1)...(19): siRNA sense strand
gaucugagacccuaaagca

SEQ ID NO: 751862 - RNA, 19 nt, Homo sapiens
  misc_RNA (1)...(19): siRNA sense strand
gccgugacauugauauaau

SEQ ID NO: 751863 - RNA, 19 nt, Homo sapiens
  misc_RNA (1)...(19): siRNA sense strand
ugcaaguacuucaaggaua

SEQ ID NO: 751864 - RNA, 19 nt, Homo sapiens
  misc_RNA (1)...(19): siRNA sense strand
ugcuaaagcugaccaugaa

SEQ ID NO: 751865 - RNA, 19 nt, Homo sapiens
  misc_RNA (1)...(19): siRNA sense strand
cugagacccuaaagcauuu

SEQ ID NO: 751866 - RNA, 19 nt, Homo sapiens
  misc_RNA (1)...(19): siRNA sense strand
ugaacaaacgguacaaugu

SEQ ID NO: 751867 - RNA, 19 nt, Homo sapiens
  misc_RNA (1)...(19): siRNA sense strand
gacccugaaucucuccaaa

SEQ ID NO: 751868 - RNA, 19 nt, Homo sapiens
  misc_RNA (1)...(19): siRNA sense strand
aaauggagaugcuaaagcu

SEQ ID NO: 751869 - RNA, 19 nt, Homo sapiens
  misc_RNA (1)...(19): siRNA sense strand
gcauuuaguccugcaauuc

SEQ ID NO: 751870 - RNA, 19 nt, Homo sapiens
  misc_RNA (1)...(19): siRNA sense strand
aaugaaacccugcaaggaa

SEQ ID NO: 751871 - RNA, 19 nt, Homo sapiens
  misc_RNA (1)...(19): siRNA sense strand
ucgaagagcuauggcuaga

SEQ ID NO: 751872 - RNA, 19 nt, Homo sapiens
  misc_RNA (1)...(19): siRNA sense strand
gaugggccgugacauugau

SEQ ID NO: 751873 - RNA, 19 nt, Homo sapiens
  misc_RNA (1)...(19): siRNA sense strand
gugcauugccugaaacuca

SEQ ID NO: 751874 - RNA, 19 nt, Homo sapiens
  misc_RNA (1)...(19): siRNA sense strand
gagaaggcucccaaaguca

SEQ ID NO: 751875 - RNA, 19 nt, Homo sapiens
  misc_RNA (1)...(19): siRNA sense strand
augaaacccugcaaggaaa

SEQ ID NO: 751876 - RNA, 19 nt, Homo sapiens
  misc_RNA (1)...(19): siRNA sense strand
gcccuacucugugaagaau

SEQ ID NO: 751877 - RNA, 19 nt, Homo sapiens
  misc_RNA (1)...(19): siRNA sense strand
gcggaacacacaagaugaa

SEQ ID NO: 751878 - RNA, 19 nt, Homo sapiens
  misc_RNA (1)...(19): siRNA sense strand
ucugagacccuaaagcauu

SEQ ID NO: 751879 - RNA, 19 nt, Homo sapiens
  misc_RNA (1)...(19): siRNA sense strand
uccagaaucuccgcuuuga

SEQ ID NO: 751880 - RNA, 19 nt, Homo sapiens
  misc_RNA (1)...(19): siRNA sense strand
caaugaaacccugcaagga

SEQ ID NO: 751881 - RNA, 19 nt, Homo sapiens
  misc_RNA (1)...(19): siRNA sense strand
gacauugacagcucugaga

SEQ ID NO: 751882 - RNA, 19 nt, Homo sapiens
  misc_RNA (1)...(19): siRNA sense strand
ccuggacggccgagaguua

SEQ ID NO: 751883 - RNA, 19 nt, Homo sapiens
  misc_RNA (1)...(19): siRNA sense strand
ggccgugacauugauauaa

SEQ ID NO: 751884 - RNA, 19 nt, Homo sapiens
  misc_RNA (1)...(19): siRNA sense strand
ugaagaucacugaaagaaa

SEQ ID NO: 751885 - RNA, 19 nt, Homo sapiens
  misc_RNA (1)...(19): siRNA sense strand
ccgcaccagugauuguuga

SEQ ID NO: 751886 - RNA, 19 nt, Homo sapiens
  misc_RNA (1)...(19): siRNA sense strand
ggaguugggcaaggugaaa

SEQ ID NO: 751887 - RNA, 19 nt, Homo sapiens
  misc_RNA (1)...(19): siRNA sense strand
ucaaggauagcaggaauau

SEQ ID NO: 751888 - RNA, 19 nt, Homo sapiens
  misc_RNA (1)...(19): siRNA sense strand
uuacugcgcccuacucugu

SEQ ID NO: 751889 - RNA, 19 nt, Homo sapiens
  misc_RNA (1)...(19): siRNA sense strand
ggccaaauggagaugcuaa

SEQ ID NO: 751890 - RNA, 19 nt, Homo sapiens
  misc_RNA (1)...(19): siRNA sense strand
uaaagcugaccaugaacaa

SEQ ID NO: 751891 - RNA, 19 nt, Homo sapiens
  misc_RNA (1)...(19): siRNA sense strand
guacaaugucucccagcaa

SEQ ID NO: 751892 - RNA, 19 nt, Homo sapiens
  misc_RNA (1)...(19): siRNA sense strand
gucaagacccugaaucucu

SEQ ID NO: 751893 - RNA, 19 nt, Homo sapiens
  misc_RNA (1)...(19): siRNA sense strand
guuauccgcaccagugauu

SEQ ID NO: 751894 - RNA, 19 nt, Homo sapiens
  misc_RNA (1)...(19): siRNA sense strand
gaugaaaacaugaggaaau

SEQ ID NO: 751895 - RNA, 19 nt, Homo sapiens
  misc_RNA (1)...(19): siRNA sense strand
cagugauuguugacauuga

SEQ ID NO: 751896 - RNA, 19 nt, Homo sapiens
  misc_RNA (1)...(19): siRNA sense strand
guugaagccaggccaaaug

SEQ ID NO: 751897 - RNA, 19 nt, Homo sapiens
  misc_RNA (1)...(19): siRNA sense strand
aaacguggacucccucagu

SEQ ID NO: 751898 - RNA, 19 nt, Homo sapiens
  misc_RNA (1)...(19): siRNA sense strand
ucuccagaaucuccgcuuu

SEQ ID NO: 751899 - RNA, 19 nt, Homo sapiens
  misc_RNA (1)...(19): siRNA sense strand
gggccgugacauugauaua

SEQ ID NO: 751900 - RNA, 19 nt, Homo sapiens
  misc_RNA (1)...(19): siRNA sense strand
cuucaaggauagcaggaau

SEQ ID NO: 751901 - RNA, 19 nt, Homo sapiens
  misc_RNA (1)...(19): siRNA sense strand
caccagugauuguugacau

SEQ ID NO: 751902 - RNA, 19 nt, Homo sapiens
  misc_RNA (1)...(19): siRNA sense strand
cugaagaucacugaaagaa

SEQ ID NO: 751903 - RNA, 19 nt, Homo sapiens
  misc_RNA (1)...(19): siRNA sense strand
caaagucaagacccugaau

SEQ ID NO: 751904 - RNA, 19 nt, Homo sapiens
  misc_RNA (1)...(19): siRNA sense strand
gaccagucugccuauguaa

SEQ ID NO: 751905 - RNA, 19 nt, Homo sapiens
  misc_RNA (1)...(19): siRNA sense strand
gaacacacaagaugaaaac

SEQ ID NO: 751906 - RNA, 19 nt, Homo sapiens
  misc_RNA (1)...(19): siRNA sense strand
ggacucccucagugcauug

SEQ ID NO: 751907 - RNA, 19 nt, Homo sapiens
  misc_RNA (1)...(19): siRNA sense strand
gugcaaguacuucaaggau

SEQ ID NO: 751908 - RNA, 19 nt, Homo sapiens
  misc_RNA (1)...(19): siRNA sense strand
ggaaaacuuuacuggaucu

SEQ ID NO: 751909 - RNA, 19 nt, Homo sapiens
  misc_RNA (1)...(19): siRNA sense strand
aacaaacgguacaaugucu

SEQ ID NO: 751910 - RNA, 19 nt, Homo sapiens
  misc_RNA (1)...(19): siRNA sense strand
ccagucugccuauguaagu

SEQ ID NO: 751911 - RNA, 19 nt, Homo sapiens
  misc_RNA (1)...(19): siRNA sense strand
caaggauagcaggaauaua

SEQ ID NO: 751912 - RNA, 19 nt, Homo sapiens
  misc_RNA (1)...(19): siRNA sense strand
gccaaauggagaugcuaaa

SEQ ID NO: 751913 - RNA, 19 nt, Homo sapiens
  misc_RNA (1)...(19): siRNA sense strand
aaggaaaacuuuacuggau

SEQ ID NO: 751914 - RNA, 19 nt, Homo sapiens
  misc_RNA (1)...(19): siRNA sense strand
caaauggagaugcuaaagc

SEQ ID NO: 751915 - RNA, 19 nt, Homo sapiens
  misc_RNA (1)...(19): siRNA sense strand
gaaaugguucaaggucaca

SEQ ID NO: 751916 - RNA, 19 nt, Homo sapiens
  misc_RNA (1)...(19): siRNA sense strand
agaaggcucccaaagucaa

SEQ ID NO: 751917 - RNA, 19 nt, Homo sapiens
  misc_RNA (1)...(19): siRNA sense strand
ggcggaacacacaagauga

SEQ ID NO: 751918 - RNA, 19 nt, Homo sapiens
  misc_RNA (1)...(19): siRNA sense strand
gaaacucagcaugacuuca

SEQ ID NO: 751919 - RNA, 19 nt, Homo sapiens
  misc_RNA (1)...(19): siRNA sense strand
cacacaagaugaaaacaug

SEQ ID NO: 751920 - RNA, 19 nt, Homo sapiens
  misc_RNA (1)...(19): siRNA sense strand
ccaaauggagaugcuaaag

SEQ ID NO: 751921 - RNA, 19 nt, Homo sapiens
  misc_RNA (1)...(19): siRNA sense strand
cuugaugggccgugacauu

SEQ ID NO: 751922 - RNA, 19 nt, Homo sapiens
  misc_RNA (1)...(19): siRNA sense strand
cuaaagcugaccaugaaca

SEQ ID NO: 751923 - RNA, 19 nt, Homo sapiens
  misc_RNA (1)...(19): siRNA sense strand
gaguuauccgcaccaguga

SEQ ID NO: 751924 - RNA, 19 nt, Homo sapiens
  misc_RNA (1)...(19): siRNA sense strand
gcugccacccugaagauca

SEQ ID NO: 751925 - RNA, 19 nt, Homo sapiens
  misc_RNA (1)...(19): siRNA sense strand
gaagaucacugaaagaaau

SEQ ID NO: 751926 - RNA, 19 nt, Homo sapiens
  misc_RNA (1)...(19): siRNA sense strand
ggaccagucugccuaugua

SEQ ID NO: 751927 - RNA, 19 nt, Homo sapiens
  misc_RNA (1)...(19): siRNA sense strand
gauauaauccugaaucgaa

SEQ ID NO: 751928 - RNA, 19 nt, Homo sapiens
  misc_RNA (1)...(19): siRNA sense strand
gcaaguacuucaaggauag

SEQ ID NO: 751929 - RNA, 19 nt, Homo sapiens
  misc_RNA (1)...(19): siRNA sense strand
gaagagcuauggcuagaag

SEQ ID NO: 751930 - RNA, 19 nt, Homo sapiens
  misc_RNA (1)...(19): siRNA sense strand
aaggauagcaggaauauaa

SEQ ID NO: 751931 - RNA, 19 nt, Homo sapiens
  misc_RNA (1)...(19): siRNA sense strand
gaacaaacgguacaauguc

SEQ ID NO: 751932 - RNA, 19 nt, Homo sapiens
  misc_RNA (1)...(19): siRNA sense strand
ccuacucugugaagaauaa

SEQ ID NO: 751933 - RNA, 19 nt, Homo sapiens
  misc_RNA (1)...(19): siRNA sense strand
ugacagcucugagacaaug

SEQ ID NO: 751934 - RNA, 19 nt, Homo sapiens
  misc_RNA (1)...(19): siRNA sense strand
agagaaggcucccaaaguc

SEQ ID NO: 751935 - RNA, 19 nt, Homo sapiens
  misc_RNA (1)...(19): siRNA sense strand
gaucugagacccuaaagca

SEQ ID NO: 751936 - RNA, 19 nt, Homo sapiens
  misc_RNA (1)...(19): siRNA sense strand
gccgugacauugauauaau

SEQ ID NO: 751937 - RNA, 19 nt, Homo sapiens
  misc_RNA (1)...(19): siRNA sense strand
ugcaaguacuucaaggaua

SEQ ID NO: 751938 - RNA, 19 nt, Homo sapiens
  misc_RNA (1)...(19): siRNA sense strand
ugcuaaagcugaccaugaa

SEQ ID NO: 751939 - RNA, 19 nt, Homo sapiens
  misc_RNA (1)...(19): siRNA sense strand
cugagacccuaaagcauuu

SEQ ID NO: 751940 - RNA, 19 nt, Homo sapiens
  misc_RNA (1)...(19): siRNA sense strand
ugaacaaacgguacaaugu

SEQ ID NO: 751941 - RNA, 19 nt, Homo sapiens
  misc_RNA (1)...(19): siRNA sense strand
gacccugaaucucuccaaa

SEQ ID NO: 751942 - RNA, 19 nt, Homo sapiens
  misc_RNA (1)...(19): siRNA sense strand
aaauggagaugcuaaagcu

SEQ ID NO: 751943 - RNA, 19 nt, Homo sapiens
  misc_RNA (1)...(19): siRNA sense strand
gcauuuaguccugcaauuc

SEQ ID NO: 751944 - RNA, 19 nt, Homo sapiens
  misc_RNA (1)...(19): siRNA sense strand
aaugaaacccugcaaggaa

SEQ ID NO: 751945 - RNA, 19 nt, Homo sapiens
  misc_RNA (1)...(19): siRNA sense strand
ucgaagagcuauggcuaga

SEQ ID NO: 751946 - RNA, 19 nt, Homo sapiens
  misc_RNA (1)...(19): siRNA sense strand
gaugggccgugacauugau

SEQ ID NO: 751947 - RNA, 19 nt, Homo sapiens
  misc_RNA (1)...(19): siRNA sense strand
gugcauugccugaaacuca

SEQ ID NO: 751948 - RNA, 19 nt, Homo sapiens
  misc_RNA (1)...(19): siRNA sense strand
gagaaggcucccaaaguca

SEQ ID NO: 751949 - RNA, 19 nt, Homo sapiens
  misc_RNA (1)...(19): siRNA sense strand
augaaacccugcaaggaaa

SEQ ID NO: 751950 - RNA, 19 nt, Homo sapiens
  misc_RNA (1)...(19): siRNA sense strand
gcccuacucugugaagaau

SEQ ID NO: 751951 - RNA, 19 nt, Homo sapiens
  misc_RNA (1)...(19): siRNA sense strand
gcggaacacacaagaugaa

SEQ ID NO: 751952 - RNA, 19 nt, Homo sapiens
  misc_RNA (1)...(19): siRNA sense strand
ucugagacccuaaagcauu

SEQ ID NO: 751953 - RNA, 19 nt, Homo sapiens
  misc_RNA (1)...(19): siRNA sense strand
uccagaaucuccgcuuuga

SEQ ID NO: 751954 - RNA, 19 nt, Homo sapiens
  misc_RNA (1)...(19): siRNA sense strand
caaugaaacccugcaagga

SEQ ID NO: 751955 - RNA, 19 nt, Homo sapiens
  misc_RNA (1)...(19): siRNA sense strand
gacauugacagcucugaga

SEQ ID NO: 751956 - RNA, 19 nt, Homo sapiens
  misc_RNA (1)...(19): siRNA sense strand
ccuggacggccgagaguua

SEQ ID NO: 751957 - RNA, 19 nt, Homo sapiens
  misc_RNA (1)...(19): siRNA sense strand
ggccgugacauugauauaa

SEQ ID NO: 751958 - RNA, 19 nt, Homo sapiens
  misc_RNA (1)...(19): siRNA sense strand
ugaagaucacugaaagaaa

SEQ ID NO: 751959 - RNA, 19 nt, Homo sapiens
  misc_RNA (1)...(19): siRNA sense strand
ccgcaccagugauuguuga

SEQ ID NO: 751960 - RNA, 19 nt, Homo sapiens
  misc_RNA (1)...(19): siRNA sense strand
ggaguugggcaaggugaaa

SEQ ID NO: 751961 - RNA, 19 nt, Homo sapiens
  misc_RNA (1)...(19): siRNA sense strand
ucaaggauagcaggaauau

SEQ ID NO: 751962 - RNA, 19 nt, Homo sapiens
  misc_RNA (1)...(19): siRNA sense strand
uuacugcgcccuacucugu

SEQ ID NO: 751963 - RNA, 19 nt, Homo sapiens
  misc_RNA (1)...(19): siRNA sense strand
ggccaaauggagaugcuaa

SEQ ID NO: 751964 - RNA, 19 nt, Homo sapiens
  misc_RNA (1)...(19): siRNA sense strand
uaaagcugaccaugaacaa

SEQ ID NO: 751965 - RNA, 19 nt, Homo sapiens
  misc_RNA (1)...(19): siRNA sense strand
guacaaugucucccagcaa

SEQ ID NO: 751966 - RNA, 19 nt, Homo sapiens
  misc_RNA (1)...(19): siRNA sense strand
gucaagacccugaaucucu

SEQ ID NO: 751967 - RNA, 19 nt, Homo sapiens
  misc_RNA (1)...(19): siRNA sense strand
guuauccgcaccagugauu

SEQ ID NO: 751968 - RNA, 19 nt, Homo sapiens
  misc_RNA (1)...(19): siRNA sense strand
gaugaaaacaugaggaaau

SEQ ID NO: 751969 - RNA, 19 nt, Homo sapiens
  misc_RNA (1)...(19): siRNA sense strand
cagugauuguugacauuga

SEQ ID NO: 751970 - RNA, 19 nt, Homo sapiens
  misc_RNA (1)...(19): siRNA sense strand
guugaagccaggccaaaug

SEQ ID NO: 751971 - RNA, 19 nt, Homo sapiens
  misc_RNA (1)...(19): siRNA sense strand
aaacguggacucccucagu

SEQ ID NO: 751972 - RNA, 19 nt, Homo sapiens
  misc_RNA (1)...(19): siRNA sense strand
ucuccagaaucuccgcuuu

SEQ ID NO: 751973 - RNA, 19 nt, Homo sapiens
  misc_RNA (1)...(19): siRNA sense strand
gggccgugacauugauaua

SEQ ID NO: 751974 - RNA, 19 nt, Homo sapiens
  misc_RNA (1)...(19): siRNA sense strand
cuucaaggauagcaggaau

SEQ ID NO: 751975 - RNA, 19 nt, Homo sapiens
  misc_RNA (1)...(19): siRNA sense strand
caccagugauuguugacau

SEQ ID NO: 751976 - RNA, 19 nt, Homo sapiens
  misc_RNA (1)...(19): siRNA sense strand
cugaagaucacugaaagaa

SEQ ID NO: 751977 - RNA, 19 nt, Homo sapiens
  misc_RNA (1)...(19): siRNA sense strand
caaagucaagacccugaau

SEQ ID NO: 751978 - RNA, 19 nt, Homo sapiens
  misc_RNA (1)...(19): siRNA sense strand
gaccagucugccuauguaa

SEQ ID NO: 751979 - RNA, 19 nt, Homo sapiens
  misc_RNA (1)...(19): siRNA sense strand
gaacacacaagaugaaaac

SEQ ID NO: 751980 - RNA, 19 nt, Homo sapiens
  misc_RNA (1)...(19): siRNA sense strand
ggacucccucagugcauug

SEQ ID NO: 751981 - RNA, 19 nt, Homo sapiens
  misc_RNA (1)...(19): siRNA sense strand
gugcaaguacuucaaggau

SEQ ID NO: 751982 - RNA, 19 nt, Homo sapiens
  misc_RNA (1)...(19): siRNA sense strand
ggaaaacuuuacuggaucu

SEQ ID NO: 751983 - RNA, 19 nt, Homo sapiens
  misc_RNA (1)...(19): siRNA sense strand
aacaaacgguacaaugucu

SEQ ID NO: 751984 - RNA, 19 nt, Homo sapiens
  misc_RNA (1)...(19): siRNA sense strand
ccagucugccuauguaagu

SEQ ID NO: 751985 - RNA, 19 nt, Homo sapiens
  misc_RNA (1)...(19): siRNA sense strand
caaggauagcaggaauaua

SEQ ID NO: 751986 - RNA, 19 nt, Homo sapiens
  misc_RNA (1)...(19): siRNA sense strand
gccaaauggagaugcuaaa

SEQ ID NO: 751987 - RNA, 19 nt, Homo sapiens
  misc_RNA (1)...(19): siRNA sense strand
aaggaaaacuuuacuggau

SEQ ID NO: 751988 - RNA, 19 nt, Homo sapiens
  misc_RNA (1)...(19): siRNA sense strand
caaauggagaugcuaaagc

SEQ ID NO: 751989 - RNA, 19 nt, Homo sapiens
  misc_RNA (1)...(19): siRNA sense strand
gaaaugguucaaggucaca

SEQ ID NO: 751990 - RNA, 19 nt, Homo sapiens
  misc_RNA (1)...(19): siRNA sense strand
agaaggcucccaaagucaa

SEQ ID NO: 751991 - RNA, 19 nt, Homo sapiens
  misc_RNA (1)...(19): siRNA sense strand
ggcggaacacacaagauga

SEQ ID NO: 751992 - RNA, 19 nt, Homo sapiens
  misc_RNA (1)...(19): siRNA sense strand
gaaacucagcaugacuuca

SEQ ID NO: 751993 - RNA, 19 nt, Homo sapiens
  misc_RNA (1)...(19): siRNA sense strand
cacacaagaugaaaacaug

SEQ ID NO: 751994 - RNA, 19 nt, Homo sapiens
  misc_RNA (1)...(19): siRNA sense strand
ccaaauggagaugcuaaag

SEQ ID NO: 751995 - RNA, 19 nt, Homo sapiens
  misc_RNA (1)...(19): siRNA sense strand
cuugaugggccgugacauu

SEQ ID NO: 751996 - RNA, 19 nt, Homo sapiens
  misc_RNA (1)...(19): siRNA sense strand
cuaaagcugaccaugaaca

SEQ ID NO: 751997 - RNA, 19 nt, Homo sapiens
  misc_RNA (1)...(19): siRNA sense strand
gaguuauccgcaccaguga

SEQ ID NO: 751998 - RNA, 19 nt, Homo sapiens
  misc_RNA (1)...(19): siRNA sense strand
gcugccacccugaagauca

SEQ ID NO: 751999 - RNA, 19 nt, Homo sapiens
  misc_RNA (1)...(19): siRNA sense strand
gaagaucacugaaagaaau

SEQ ID NO: 752000 - RNA, 19 nt, Homo sapiens
  misc_RNA (1)...(19): siRNA sense strand
ggaccagucugccuaugua

SEQ ID NO: 752001 - RNA, 19 nt, Homo sapiens
  misc_RNA (1)...(19): siRNA sense strand
gauauaauccugaaucgaa

SEQ ID NO: 752002 - RNA, 19 nt, Homo sapiens
  misc_RNA (1)...(19): siRNA sense strand
gcaaguacuucaaggauag

SEQ ID NO: 752003 - RNA, 19 nt, Homo sapiens
  misc_RNA (1)...(19): siRNA sense strand
gaagagcuauggcuagaag

SEQ ID NO: 752004 - RNA, 19 nt, Homo sapiens
  misc_RNA (1)...(19): siRNA sense strand
aaggauagcaggaauauaa

SEQ ID NO: 752005 - RNA, 19 nt, Homo sapiens
  misc_RNA (1)...(19): siRNA sense strand
gaacaaacgguacaauguc

SEQ ID NO: 752006 - RNA, 19 nt, Homo sapiens
  misc_RNA (1)...(19): siRNA sense strand
ccuacucugugaagaauaa

SEQ ID NO: 752007 - RNA, 19 nt, Homo sapiens
  misc_RNA (1)...(19): siRNA sense strand
ugacagcucugagacaaug

SEQ ID NO: 752008 - RNA, 19 nt, Homo sapiens
  misc_RNA (1)...(19): siRNA sense strand
agagaaggcucccaaaguc

SEQ ID NO: 752009 - RNA, 19 nt, Homo sapiens
  misc_RNA (1)...(19): siRNA sense strand
gaucugagacccuaaagca

SEQ ID NO: 752010 - RNA, 19 nt, Homo sapiens
  misc_RNA (1)...(19): siRNA sense strand
guucugaucuugccuucau

SEQ ID NO: 752011 - RNA, 19 nt, Homo sapiens
  misc_RNA (1)...(19): siRNA sense strand
gccgugacauugauauaau

SEQ ID NO: 752012 - RNA, 19 nt, Homo sapiens
  misc_RNA (1)...(19): siRNA sense strand
ugcaaguacuucaaggaua

SEQ ID NO: 752013 - RNA, 19 nt, Homo sapiens
  misc_RNA (1)...(19): siRNA sense strand
ugcuaaagcugaccaugaa

SEQ ID NO: 752014 - RNA, 19 nt, Homo sapiens
  misc_RNA (1)...(19): siRNA sense strand
cugagacccuaaagcauuu

SEQ ID NO: 752015 - RNA, 19 nt, Homo sapiens
  misc_RNA (1)...(19): siRNA sense strand
ugaacaaacgguacaaugu

SEQ ID NO: 752016 - RNA, 19 nt, Homo sapiens
  misc_RNA (1)...(19): siRNA sense strand
gacccugaaucucuccaaa

SEQ ID NO: 752017 - RNA, 19 nt, Homo sapiens
  misc_RNA (1)...(19): siRNA sense strand
aaauggagaugcuaaagcu

SEQ ID NO: 752018 - RNA, 19 nt, Homo sapiens
  misc_RNA (1)...(19): siRNA sense strand
gcauuuaguccugcaauuc

SEQ ID NO: 752019 - RNA, 19 nt, Homo sapiens
  misc_RNA (1)...(19): siRNA sense strand
aaugaaacccugcaaggaa

SEQ ID NO: 752020 - RNA, 19 nt, Homo sapiens
  misc_RNA (1)...(19): siRNA sense strand
ucgaagagcuauggcuaga

SEQ ID NO: 752021 - RNA, 19 nt, Homo sapiens
  misc_RNA (1)...(19): siRNA sense strand
gaugggccgugacauugau

SEQ ID NO: 752022 - RNA, 19 nt, Homo sapiens
  misc_RNA (1)...(19): siRNA sense strand
gugcauugccugaaacuca

SEQ ID NO: 752023 - RNA, 19 nt, Homo sapiens
  misc_RNA (1)...(19): siRNA sense strand
gagaaggcucccaaaguca

SEQ ID NO: 752024 - RNA, 19 nt, Homo sapiens
  misc_RNA (1)...(19): siRNA sense strand
augaaacccugcaaggaaa

SEQ ID NO: 752025 - RNA, 19 nt, Homo sapiens
  misc_RNA (1)...(19): siRNA sense strand
gcccuacucugugaagaau

SEQ ID NO: 752026 - RNA, 19 nt, Homo sapiens
  misc_RNA (1)...(19): siRNA sense strand
gcggaacacacaagaugaa

SEQ ID NO: 752027 - RNA, 19 nt, Homo sapiens
  misc_RNA (1)...(19): siRNA sense strand
ucugagacccuaaagcauu

SEQ ID NO: 752028 - RNA, 19 nt, Homo sapiens
  misc_RNA (1)...(19): siRNA sense strand
uccagaaucuccgcuuuga

SEQ ID NO: 752029 - RNA, 19 nt, Homo sapiens
  misc_RNA (1)...(19): siRNA sense strand
caaugaaacccugcaagga

SEQ ID NO: 752030 - RNA, 19 nt, Homo sapiens
  misc_RNA (1)...(19): siRNA sense strand
gacauugacagcucugaga

SEQ ID NO: 752031 - RNA, 19 nt, Homo sapiens
  misc_RNA (1)...(19): siRNA sense strand
ccuggacggccgagaguua

SEQ ID NO: 752032 - RNA, 19 nt, Homo sapiens
  misc_RNA (1)...(19): siRNA sense strand
ggccgugacauugauauaa

SEQ ID NO: 752033 - RNA, 19 nt, Homo sapiens
  misc_RNA (1)...(19): siRNA sense strand
ugaagaucacugaaagaaa

SEQ ID NO: 752034 - RNA, 19 nt, Homo sapiens
  misc_RNA (1)...(19): siRNA sense strand
ccgcaccagugauuguuga

SEQ ID NO: 752035 - RNA, 19 nt, Homo sapiens
  misc_RNA (1)...(19): siRNA sense strand
ggaguugggcaaggugaaa

SEQ ID NO: 752036 - RNA, 19 nt, Homo sapiens
  misc_RNA (1)...(19): siRNA sense strand
ucaaggauagcaggaauau

SEQ ID NO: 752037 - RNA, 19 nt, Homo sapiens
  misc_RNA (1)...(19): siRNA sense strand
uuacugcgcccuacucugu

SEQ ID NO: 752038 - RNA, 19 nt, Homo sapiens
  misc_RNA (1)...(19): siRNA sense strand
ggccaaauggagaugcuaa

SEQ ID NO: 752039 - RNA, 19 nt, Homo sapiens
  misc_RNA (1)...(19): siRNA sense strand
uaaagcugaccaugaacaa

SEQ ID NO: 752040 - RNA, 19 nt, Homo sapiens
  misc_RNA (1)...(19): siRNA sense strand
guacaaugucucccagcaa

SEQ ID NO: 752041 - RNA, 19 nt, Homo sapiens
  misc_RNA (1)...(19): siRNA sense strand
gucaagacccugaaucucu

SEQ ID NO: 752042 - RNA, 19 nt, Homo sapiens
  misc_RNA (1)...(19): siRNA sense strand
guuauccgcaccagugauu

SEQ ID NO: 752043 - RNA, 19 nt, Homo sapiens
  misc_RNA (1)...(19): siRNA sense strand
cagugauuguugacauuga

SEQ ID NO: 752044 - RNA, 19 nt, Homo sapiens
  misc_RNA (1)...(19): siRNA sense strand
uccagucugugcaucauga

SEQ ID NO: 752045 - RNA, 19 nt, Homo sapiens
  misc_RNA (1)...(19): siRNA sense strand
gaugaaaacaugaggaaau

SEQ ID NO: 752046 - RNA, 19 nt, Homo sapiens
  misc_RNA (1)...(19): siRNA sense strand
ucuccagaaucuccgcuuu

SEQ ID NO: 752047 - RNA, 19 nt, Homo sapiens
  misc_RNA (1)...(19): siRNA sense strand
aaacguggacucccucagu

SEQ ID NO: 752048 - RNA, 19 nt, Homo sapiens
  misc_RNA (1)...(19): siRNA sense strand
guugaagccaggccaaaug

SEQ ID NO: 752049 - RNA, 19 nt, Homo sapiens
  misc_RNA (1)...(19): siRNA sense strand
gggccgugacauugauaua

SEQ ID NO: 752050 - RNA, 19 nt, Homo sapiens
  misc_RNA (1)...(19): siRNA sense strand
gcaauuccagucugugcau

SEQ ID NO: 752051 - RNA, 19 nt, Homo sapiens
  misc_RNA (1)...(19): siRNA sense strand
cuucaaggauagcaggaau

SEQ ID NO: 752052 - RNA, 19 nt, Homo sapiens
  misc_RNA (1)...(19): siRNA sense strand
caccagugauuguugacau

SEQ ID NO: 752053 - RNA, 19 nt, Homo sapiens
  misc_RNA (1)...(19): siRNA sense strand
cugaagaucacugaaagaa

SEQ ID NO: 752054 - RNA, 19 nt, Homo sapiens
  misc_RNA (1)...(19): siRNA sense strand
caaagucaagacccugaau

SEQ ID NO: 752055 - RNA, 19 nt, Homo sapiens
  misc_RNA (1)...(19): siRNA sense strand
gaccagucugccuauguaa

SEQ ID NO: 752056 - RNA, 19 nt, Homo sapiens
  misc_RNA (1)...(19): siRNA sense strand
ggccgcaauuccagucugu

SEQ ID NO: 752057 - RNA, 19 nt, Homo sapiens
  misc_RNA (1)...(19): siRNA sense strand
gaacacacaagaugaaaac

SEQ ID NO: 752058 - RNA, 19 nt, Homo sapiens
  misc_RNA (1)...(19): siRNA sense strand
auguggaccuucaucacua

SEQ ID NO: 752059 - RNA, 19 nt, Homo sapiens
  misc_RNA (1)...(19): siRNA sense strand
ggacucccucagugcauug

SEQ ID NO: 752060 - RNA, 19 nt, Homo sapiens
  misc_RNA (1)...(19): siRNA sense strand
gugcaaguacuucaaggau

SEQ ID NO: 752061 - RNA, 19 nt, Homo sapiens
  misc_RNA (1)...(19): siRNA sense strand
ggaaaacuuuacuggaucu

SEQ ID NO: 752062 - RNA, 19 nt, Homo sapiens
  misc_RNA (1)...(19): siRNA sense strand
aacaaacgguacaaugucu

SEQ ID NO: 752063 - RNA, 19 nt, Homo sapiens
  misc_RNA (1)...(19): siRNA sense strand
gccaaauggagaugcuaaa

SEQ ID NO: 752064 - RNA, 19 nt, Homo sapiens
  misc_RNA (1)...(19): siRNA sense strand
caaggauagcaggaauaua

SEQ ID NO: 752065 - RNA, 19 nt, Homo sapiens
  misc_RNA (1)...(19): siRNA sense strand
aaggaaaacuuuacuggau

SEQ ID NO: 752066 - RNA, 19 nt, Homo sapiens
  misc_RNA (1)...(19): siRNA sense strand
ccagucugccuauguaagu

SEQ ID NO: 752067 - RNA, 19 nt, Homo sapiens
  misc_RNA (1)...(19): siRNA sense strand
agaaggcucccaaagucaa

SEQ ID NO: 752068 - RNA, 19 nt, Homo sapiens
  misc_RNA (1)...(19): siRNA sense strand
gaaaugguucaaggucaca

SEQ ID NO: 752069 - RNA, 19 nt, Homo sapiens
  misc_RNA (1)...(19): siRNA sense strand
caaauggagaugcuaaagc

SEQ ID NO: 752070 - RNA, 19 nt, Homo sapiens
  misc_RNA (1)...(19): siRNA sense strand
ggcggaacacacaagauga

SEQ ID NO: 752071 - RNA, 19 nt, Homo sapiens
  misc_RNA (1)...(19): siRNA sense strand
ccaaauggagaugcuaaag

SEQ ID NO: 752072 - RNA, 19 nt, Homo sapiens
  misc_RNA (1)...(19): siRNA sense strand
gaaacucagcaugacuuca

SEQ ID NO: 752073 - RNA, 19 nt, Homo sapiens
  misc_RNA (1)...(19): siRNA sense strand
cacacaagaugaaaacaug

SEQ ID NO: 752074 - RNA, 19 nt, Homo sapiens
  misc_RNA (1)...(19): siRNA sense strand
cuugaugggccgugacauu

SEQ ID NO: 752075 - RNA, 19 nt, Homo sapiens
  misc_RNA (1)...(19): siRNA sense strand
cuaaagcugaccaugaaca

SEQ ID NO: 752076 - RNA, 19 nt, Homo sapiens
  misc_RNA (1)...(19): siRNA sense strand
gaguuauccgcaccaguga

SEQ ID NO: 752077 - RNA, 19 nt, Homo sapiens
  misc_RNA (1)...(19): siRNA sense strand
gcugccacccugaagauca

SEQ ID NO: 752078 - RNA, 19 nt, Homo sapiens
  misc_RNA (1)...(19): siRNA sense strand
gaagaucacugaaagaaau

SEQ ID NO: 752079 - RNA, 19 nt, Homo sapiens
  misc_RNA (1)...(19): siRNA sense strand
ggaccagucugccuaugua

SEQ ID NO: 752080 - RNA, 19 nt, Homo sapiens
  misc_RNA (1)...(19): siRNA sense strand
gauauaauccugaaucgaa

SEQ ID NO: 752081 - RNA, 19 nt, Homo sapiens
  misc_RNA (1)...(19): siRNA sense strand
gcaaguacuucaaggauag

SEQ ID NO: 752082 - RNA, 19 nt, Homo sapiens
  misc_RNA (1)...(19): siRNA sense strand
gaagagcuauggcuagaag

SEQ ID NO: 752083 - RNA, 19 nt, Homo sapiens
  misc_RNA (1)...(19): siRNA sense strand
aaggauagcaggaauauaa

SEQ ID NO: 752084 - RNA, 19 nt, Homo sapiens
  misc_RNA (1)...(19): siRNA sense strand
gaacaaacgguacaauguc

SEQ ID NO: 752085 - RNA, 19 nt, Homo sapiens
  misc_RNA (1)...(19): siRNA sense strand
ccuacucugugaagaauaa

SEQ ID NO: 752086 - RNA, 19 nt, Homo sapiens
  misc_RNA (1)...(19): siRNA sense strand
ugacagcucugagacaaug

SEQ ID NO: 752087 - RNA, 19 nt, Homo sapiens
  misc_RNA (1)...(19): siRNA sense strand
agagaaggcucccaaaguc

SEQ ID NO: 752088 - RNA, 19 nt, Homo sapiens
  misc_RNA (1)...(19): siRNA sense strand
gaucugagacccuaaagca

SEQ ID NO: 752089 - RNA, 19 nt, Homo sapiens
  misc_RNA (1)...(19): siRNA sense strand
gccgugacauugauauaau

SEQ ID NO: 752090 - RNA, 19 nt, Homo sapiens
  misc_RNA (1)...(19): siRNA sense strand
ugcaaguacuucaaggaua

SEQ ID NO: 752091 - RNA, 19 nt, Homo sapiens
  misc_RNA (1)...(19): siRNA sense strand
ugcuaaagcugaccaugaa

SEQ ID NO: 752092 - RNA, 19 nt, Homo sapiens
  misc_RNA (1)...(19): siRNA sense strand
cugagacccuaaagcauuu

SEQ ID NO: 752093 - RNA, 19 nt, Homo sapiens
  misc_RNA (1)...(19): siRNA sense strand
ugaacaaacgguacaaugu

SEQ ID NO: 752094 - RNA, 19 nt, Homo sapiens
  misc_RNA (1)...(19): siRNA sense strand
gacccugaaucucuccaaa

SEQ ID NO: 752095 - RNA, 19 nt, Homo sapiens
  misc_RNA (1)...(19): siRNA sense strand
aaauggagaugcuaaagcu

SEQ ID NO: 752096 - RNA, 19 nt, Homo sapiens
  misc_RNA (1)...(19): siRNA sense strand
gcauuuaguccugcaauuc

SEQ ID NO: 752097 - RNA, 19 nt, Homo sapiens
  misc_RNA (1)...(19): siRNA sense strand
aaugaaacccugcaaggaa

SEQ ID NO: 752098 - RNA, 19 nt, Homo sapiens
  misc_RNA (1)...(19): siRNA sense strand
ucgaagagcuauggcuaga

SEQ ID NO: 752099 - RNA, 19 nt, Homo sapiens
  misc_RNA (1)...(19): siRNA sense strand
gaugggccgugacauugau

SEQ ID NO: 752100 - RNA, 19 nt, Homo sapiens
  misc_RNA (1)...(19): siRNA sense strand
gugcauugccugaaacuca

SEQ ID NO: 752101 - RNA, 19 nt, Homo sapiens
  misc_RNA (1)...(19): siRNA sense strand
gagaaggcucccaaaguca

SEQ ID NO: 752102 - RNA, 19 nt, Homo sapiens
  misc_RNA (1)...(19): siRNA sense strand
augaaacccugcaaggaaa

SEQ ID NO: 752103 - RNA, 19 nt, Homo sapiens
  misc_RNA (1)...(19): siRNA sense strand
gcccuacucugugaagaau

SEQ ID NO: 752104 - RNA, 19 nt, Homo sapiens
  misc_RNA (1)...(19): siRNA sense strand
gcggaacacacaagaugaa

SEQ ID NO: 752105 - RNA, 19 nt, Homo sapiens
  misc_RNA (1)...(19): siRNA sense strand
ucugagacccuaaagcauu

SEQ ID NO: 752106 - RNA, 19 nt, Homo sapiens
  misc_RNA (1)...(19): siRNA sense strand
uccagaaucuccgcuuuga

SEQ ID NO: 752107 - RNA, 19 nt, Homo sapiens
  misc_RNA (1)...(19): siRNA sense strand
caaugaaacccugcaagga

SEQ ID NO: 752108 - RNA, 19 nt, Homo sapiens
  misc_RNA (1)...(19): siRNA sense strand
gacauugacagcucugaga

SEQ ID NO: 752109 - RNA, 19 nt, Homo sapiens
  misc_RNA (1)...(19): siRNA sense strand
ccuggacggccgagaguua

SEQ ID NO: 752110 - RNA, 19 nt, Homo sapiens
  misc_RNA (1)...(19): siRNA sense strand
ggccgugacauugauauaa

SEQ ID NO: 752111 - RNA, 19 nt, Homo sapiens
  misc_RNA (1)...(19): siRNA sense strand
ugaagaucacugaaagaaa

SEQ ID NO: 752112 - RNA, 19 nt, Homo sapiens
  misc_RNA (1)...(19): siRNA sense strand
ccgcaccagugauuguuga

SEQ ID NO: 752113 - RNA, 19 nt, Homo sapiens
  misc_RNA (1)...(19): siRNA sense strand
ggaguugggcaaggugaaa

SEQ ID NO: 752114 - RNA, 19 nt, Homo sapiens
  misc_RNA (1)...(19): siRNA sense strand
ucaaggauagcaggaauau

SEQ ID NO: 752115 - RNA, 19 nt, Homo sapiens
  misc_RNA (1)...(19): siRNA sense strand
uuacugcgcccuacucugu

SEQ ID NO: 752116 - RNA, 19 nt, Homo sapiens
  misc_RNA (1)...(19): siRNA sense strand
ggccaaauggagaugcuaa

SEQ ID NO: 752117 - RNA, 19 nt, Homo sapiens
  misc_RNA (1)...(19): siRNA sense strand
uaaagcugaccaugaacaa

SEQ ID NO: 752118 - RNA, 19 nt, Homo sapiens
  misc_RNA (1)...(19): siRNA sense strand
guacaaugucucccagcaa

SEQ ID NO: 752119 - RNA, 19 nt, Homo sapiens
  misc_RNA (1)...(19): siRNA sense strand
gucaagacccugaaucucu

SEQ ID NO: 752120 - RNA, 19 nt, Homo sapiens
  misc_RNA (1)...(19): siRNA sense strand
guuauccgcaccagugauu

SEQ ID NO: 752121 - RNA, 19 nt, Homo sapiens
  misc_RNA (1)...(19): siRNA sense strand
gaugaaaacaugaggaaau

SEQ ID NO: 752122 - RNA, 19 nt, Homo sapiens
  misc_RNA (1)...(19): siRNA sense strand
cagugauuguugacauuga

SEQ ID NO: 752123 - RNA, 19 nt, Homo sapiens
  misc_RNA (1)...(19): siRNA sense strand
guugaagccaggccaaaug

SEQ ID NO: 752124 - RNA, 19 nt, Homo sapiens
  misc_RNA (1)...(19): siRNA sense strand
aaacguggacucccucagu

SEQ ID NO: 752125 - RNA, 19 nt, Homo sapiens
  misc_RNA (1)...(19): siRNA sense strand
ucuccagaaucuccgcuuu

SEQ ID NO: 752126 - RNA, 19 nt, Homo sapiens
  misc_RNA (1)...(19): siRNA sense strand
gggccgugacauugauaua

SEQ ID NO: 752127 - RNA, 19 nt, Homo sapiens
  misc_RNA (1)...(19): siRNA sense strand
cuucaaggauagcaggaau

SEQ ID NO: 752128 - RNA, 19 nt, Homo sapiens
  misc_RNA (1)...(19): siRNA sense strand
caccagugauuguugacau

SEQ ID NO: 752129 - RNA, 19 nt, Homo sapiens
  misc_RNA (1)...(19): siRNA sense strand
cugaagaucacugaaagaa

SEQ ID NO: 752130 - RNA, 19 nt, Homo sapiens
  misc_RNA (1)...(19): siRNA sense strand
caaagucaagacccugaau

SEQ ID NO: 752131 - RNA, 19 nt, Homo sapiens
  misc_RNA (1)...(19): siRNA sense strand
gaccagucugccuauguaa

SEQ ID NO: 752132 - RNA, 19 nt, Homo sapiens
  misc_RNA (1)...(19): siRNA sense strand
gaacacacaagaugaaaac

SEQ ID NO: 752133 - RNA, 19 nt, Homo sapiens
  misc_RNA (1)...(19): siRNA sense strand
ggacucccucagugcauug

SEQ ID NO: 752134 - RNA, 19 nt, Homo sapiens
  misc_RNA (1)...(19): siRNA sense strand
gugcaaguacuucaaggau

SEQ ID NO: 752135 - RNA, 19 nt, Homo sapiens
  misc_RNA (1)...(19): siRNA sense strand
ggaaaacuuuacuggaucu

SEQ ID NO: 752136 - RNA, 19 nt, Homo sapiens
  misc_RNA (1)...(19): siRNA sense strand
aacaaacgguacaaugucu

SEQ ID NO: 752137 - RNA, 19 nt, Homo sapiens
  misc_RNA (1)...(19): siRNA sense strand
ccagucugccuauguaagu

SEQ ID NO: 752138 - RNA, 19 nt, Homo sapiens
  misc_RNA (1)...(19): siRNA sense strand
caaggauagcaggaauaua

SEQ ID NO: 752139 - RNA, 19 nt, Homo sapiens
  misc_RNA (1)...(19): siRNA sense strand
gccaaauggagaugcuaaa

SEQ ID NO: 752140 - RNA, 19 nt, Homo sapiens
  misc_RNA (1)...(19): siRNA sense strand
aaggaaaacuuuacuggau

SEQ ID NO: 752141 - RNA, 19 nt, Homo sapiens
  misc_RNA (1)...(19): siRNA sense strand
caaauggagaugcuaaagc

SEQ ID NO: 752142 - RNA, 19 nt, Homo sapiens
  misc_RNA (1)...(19): siRNA sense strand
gaaaugguucaaggucaca

SEQ ID NO: 752143 - RNA, 19 nt, Homo sapiens
  misc_RNA (1)...(19): siRNA sense strand
agaaggcucccaaagucaa

SEQ ID NO: 752144 - RNA, 19 nt, Homo sapiens
  misc_RNA (1)...(19): siRNA sense strand
ggcggaacacacaagauga

SEQ ID NO: 752145 - RNA, 19 nt, Homo sapiens
  misc_RNA (1)...(19): siRNA sense strand
gaaacucagcaugacuuca

SEQ ID NO: 752146 - RNA, 19 nt, Homo sapiens
  misc_RNA (1)...(19): siRNA sense strand
cacacaagaugaaaacaug

SEQ ID NO: 752147 - RNA, 19 nt, Homo sapiens
  misc_RNA (1)...(19): siRNA sense strand
ccaaauggagaugcuaaag

SEQ ID NO: 752148 - RNA, 19 nt, Homo sapiens
  misc_RNA (1)...(19): siRNA sense strand
cuugaugggccgugacauu

SEQ ID NO: 752149 - RNA, 19 nt, Homo sapiens
  misc_RNA (1)...(19): siRNA sense strand
cuaaagcugaccaugaaca

SEQ ID NO: 752150 - RNA, 19 nt, Homo sapiens
  misc_RNA (1)...(19): siRNA sense strand
gaguuauccgcaccaguga

SEQ ID NO: 752151 - RNA, 19 nt, Homo sapiens
  misc_RNA (1)...(19): siRNA sense strand
gcugccacccugaagauca

SEQ ID NO: 752152 - RNA, 19 nt, Homo sapiens
  misc_RNA (1)...(19): siRNA sense strand
gaagaucacugaaagaaau

SEQ ID NO: 752153 - RNA, 19 nt, Homo sapiens
  misc_RNA (1)...(19): siRNA sense strand
gauauaauccugaaucgaa

SEQ ID NO: 752154 - RNA, 19 nt, Homo sapiens
  misc_RNA (1)...(19): siRNA sense strand
gaacaaacgguacaauguc

SEQ ID NO: 752155 - RNA, 19 nt, Homo sapiens
  misc_RNA (1)...(19): siRNA sense strand
ccuacucugugaagaauaa

SEQ ID NO: 752156 - RNA, 19 nt, Homo sapiens
  misc_RNA (1)...(19): siRNA sense strand
agagaaggcucccaaaguc

SEQ ID NO: 752157 - RNA, 19 nt, Homo sapiens
  misc_RNA (1)...(19): siRNA sense strand
gccgugacauugauauaau

SEQ ID NO: 752158 - RNA, 19 nt, Homo sapiens
  misc_RNA (1)...(19): siRNA sense strand
ugcuaaagcugaccaugaa

SEQ ID NO: 752159 - RNA, 19 nt, Homo sapiens
  misc_RNA (1)...(19): siRNA sense strand
ugaacaaacgguacaaugu

SEQ ID NO: 752160 - RNA, 19 nt, Homo sapiens
  misc_RNA (1)...(19): siRNA sense strand
aaauggagaugcuaaagcu

SEQ ID NO: 752161 - RNA, 19 nt, Homo sapiens
  misc_RNA (1)...(19): siRNA sense strand
gaugggccgugacauugau

SEQ ID NO: 752162 - RNA, 19 nt, Homo sapiens
  misc_RNA (1)...(19): siRNA sense strand
gagaaggcucccaaaguca

SEQ ID NO: 752163 - RNA, 19 nt, Homo sapiens
  misc_RNA (1)...(19): siRNA sense strand
gcccuacucugugaagaau

SEQ ID NO: 752164 - RNA, 19 nt, Homo sapiens
  misc_RNA (1)...(19): siRNA sense strand
gcggaacacacaagaugaa

SEQ ID NO: 752165 - RNA, 19 nt, Homo sapiens
  misc_RNA (1)...(19): siRNA sense strand
uccagaaucuccgcuuuga

SEQ ID NO: 752166 - RNA, 19 nt, Homo sapiens
  misc_RNA (1)...(19): siRNA sense strand
ggccgugacauugauauaa

SEQ ID NO: 752167 - RNA, 19 nt, Homo sapiens
  misc_RNA (1)...(19): siRNA sense strand
ugaagaucacugaaagaaa

SEQ ID NO: 752168 - RNA, 19 nt, Homo sapiens
  misc_RNA (1)...(19): siRNA sense strand
uuacugcgcccuacucugu

SEQ ID NO: 752169 - RNA, 19 nt, Homo sapiens
  misc_RNA (1)...(19): siRNA sense strand
ggccaaauggagaugcuaa

SEQ ID NO: 752170 - RNA, 19 nt, Homo sapiens
  misc_RNA (1)...(19): siRNA sense strand
uaaagcugaccaugaacaa

SEQ ID NO: 752171 - RNA, 19 nt, Homo sapiens
  misc_RNA (1)...(19): siRNA sense strand
guacaaugucucccagcaa

SEQ ID NO: 752172 - RNA, 19 nt, Homo sapiens
  misc_RNA (1)...(19): siRNA sense strand
gaugaaaacaugaggaaau

SEQ ID NO: 752173 - RNA, 19 nt, Homo sapiens
  misc_RNA (1)...(19): siRNA sense strand
guugaagccaggccaaaug

SEQ ID NO: 752174 - RNA, 19 nt, Homo sapiens
  misc_RNA (1)...(19): siRNA sense strand
ucuccagaaucuccgcuuu

SEQ ID NO: 752175 - RNA, 19 nt, Homo sapiens
  misc_RNA (1)...(19): siRNA sense strand
gggccgugacauugauaua

SEQ ID NO: 752176 - RNA, 19 nt, Homo sapiens
  misc_RNA (1)...(19): siRNA sense strand
cugaagaucacugaaagaa

SEQ ID NO: 752177 - RNA, 19 nt, Homo sapiens
  misc_RNA (1)...(19): siRNA sense strand
gaacacacaagaugaaaac

SEQ ID NO: 752178 - RNA, 19 nt, Homo sapiens
  misc_RNA (1)...(19): siRNA sense strand
aacaaacgguacaaugucu

SEQ ID NO: 752179 - RNA, 19 nt, Homo sapiens
  misc_RNA (1)...(19): siRNA sense strand
gccaaauggagaugcuaaa

SEQ ID NO: 752180 - RNA, 19 nt, Homo sapiens
  misc_RNA (1)...(19): siRNA sense strand
caaauggagaugcuaaagc

SEQ ID NO: 752181 - RNA, 19 nt, Homo sapiens
  misc_RNA (1)...(19): siRNA sense strand
agaaggcucccaaagucaa

SEQ ID NO: 752182 - RNA, 19 nt, Homo sapiens
  misc_RNA (1)...(19): siRNA sense strand
gaaaugguucaaggucaca

SEQ ID NO: 752183 - RNA, 19 nt, Homo sapiens
  misc_RNA (1)...(19): siRNA sense strand
ccaaauggagaugcuaaag

SEQ ID NO: 752184 - RNA, 19 nt, Homo sapiens
  misc_RNA (1)...(19): siRNA sense strand
ggcggaacacacaagauga

SEQ ID NO: 752185 - RNA, 19 nt, Homo sapiens
  misc_RNA (1)...(19): siRNA sense strand
cacacaagaugaaaacaug

SEQ ID NO: 752186 - RNA, 19 nt, Homo sapiens
  misc_RNA (1)...(19): siRNA sense strand
cuaaagcugaccaugaaca

SEQ ID NO: 752187 - RNA, 19 nt, Homo sapiens
  misc_RNA (1)...(19): siRNA sense strand
gcugccacccugaagauca

SEQ ID NO: 752188 - RNA, 19 nt, Homo sapiens
  misc_RNA (1)...(19): siRNA sense strand
cuugaugggccgugacauu

SEQ ID NO: 752189 - RNA, 19 nt, Homo sapiens
  misc_RNA (1)...(19): siRNA sense strand
gaagaucacugaaagaaau

SEQ ID NO: 752190 - RNA, 19 nt, Homo sapiens
  misc_RNA (1)...(19): siRNA sense strand
ggaccagucugccuaugua

SEQ ID NO: 752191 - RNA, 19 nt, Homo sapiens
  misc_RNA (1)...(19): siRNA sense strand
gauauaauccugaaucgaa

SEQ ID NO: 752192 - RNA, 19 nt, Homo sapiens
  misc_RNA (1)...(19): siRNA sense strand
gcaaguacuucaaggauag

SEQ ID NO: 752193 - RNA, 19 nt, Homo sapiens
  misc_RNA (1)...(19): siRNA sense strand
gaagagcuauggcuagaag

SEQ ID NO: 752194 - RNA, 19 nt, Homo sapiens
  misc_RNA (1)...(19): siRNA sense strand
aaggauagcaggaauauaa

SEQ ID NO: 752195 - RNA, 19 nt, Homo sapiens
  misc_RNA (1)...(19): siRNA sense strand
gaacaaacgguacaauguc

SEQ ID NO: 752196 - RNA, 19 nt, Homo sapiens
  misc_RNA (1)...(19): siRNA sense strand
ccuacucugugaagaauaa

SEQ ID NO: 752197 - RNA, 19 nt, Homo sapiens
  misc_RNA (1)...(19): siRNA sense strand
ugacagcucugagacaaug

SEQ ID NO: 752198 - RNA, 19 nt, Homo sapiens
  misc_RNA (1)...(19): siRNA sense strand
agagaaggcucccaaaguc

SEQ ID NO: 752199 - RNA, 19 nt, Homo sapiens
  misc_RNA (1)...(19): siRNA sense strand
gaucugagacccuaaagca

SEQ ID NO: 752200 - RNA, 19 nt, Homo sapiens
  misc_RNA (1)...(19): siRNA sense strand
gccgugacauugauauaau

SEQ ID NO: 752201 - RNA, 19 nt, Homo sapiens
  misc_RNA (1)...(19): siRNA sense strand
ugcaaguacuucaaggaua

SEQ ID NO: 752202 - RNA, 19 nt, Homo sapiens
  misc_RNA (1)...(19): siRNA sense strand
ugcuaaagcugaccaugaa

SEQ ID NO: 752203 - RNA, 19 nt, Homo sapiens
  misc_RNA (1)...(19): siRNA sense strand
cugagacccuaaagcauuu

SEQ ID NO: 752204 - RNA, 19 nt, Homo sapiens
  misc_RNA (1)...(19): siRNA sense strand
ugaacaaacgguacaaugu

SEQ ID NO: 752205 - RNA, 19 nt, Homo sapiens
  misc_RNA (1)...(19): siRNA sense strand
gacccugaaucucuccaaa

SEQ ID NO: 752206 - RNA, 19 nt, Homo sapiens
  misc_RNA (1)...(19): siRNA sense strand
aaauggagaugcuaaagcu

SEQ ID NO: 752207 - RNA, 19 nt, Homo sapiens
  misc_RNA (1)...(19): siRNA sense strand
gcauuuaguccugcaauuc

SEQ ID NO: 752208 - RNA, 19 nt, Homo sapiens
  misc_RNA (1)...(19): siRNA sense strand
aaugaaacccugcaaggaa

SEQ ID NO: 752209 - RNA, 19 nt, Homo sapiens
  misc_RNA (1)...(19): siRNA sense strand
ucgaagagcuauggcuaga

SEQ ID NO: 752210 - RNA, 19 nt, Homo sapiens
  misc_RNA (1)...(19): siRNA sense strand
gaugggccgugacauugau

SEQ ID NO: 752211 - RNA, 19 nt, Homo sapiens
  misc_RNA (1)...(19): siRNA sense strand
gugcauugccugaaacuca

SEQ ID NO: 752212 - RNA, 19 nt, Homo sapiens
  misc_RNA (1)...(19): siRNA sense strand
gagaaggcucccaaaguca

SEQ ID NO: 752213 - RNA, 19 nt, Homo sapiens
  misc_RNA (1)...(19): siRNA sense strand
augaaacccugcaaggaaa

SEQ ID NO: 752214 - RNA, 19 nt, Homo sapiens
  misc_RNA (1)...(19): siRNA sense strand
gcccuacucugugaagaau

SEQ ID NO: 752215 - RNA, 19 nt, Homo sapiens
  misc_RNA (1)...(19): siRNA sense strand
gcggaacacacaagaugaa

SEQ ID NO: 752216 - RNA, 19 nt, Homo sapiens
  misc_RNA (1)...(19): siRNA sense strand
ucugagacccuaaagcauu

SEQ ID NO: 752217 - RNA, 19 nt, Homo sapiens
  misc_RNA (1)...(19): siRNA sense strand
uccagaaucuccgcuuuga

SEQ ID NO: 752218 - RNA, 19 nt, Homo sapiens
  misc_RNA (1)...(19): siRNA sense strand
caaugaaacccugcaagga

SEQ ID NO: 752219 - RNA, 19 nt, Homo sapiens
  misc_RNA (1)...(19): siRNA sense strand
gacauugacagcucugaga

SEQ ID NO: 752220 - RNA, 19 nt, Homo sapiens
  misc_RNA (1)...(19): siRNA sense strand
ccuggacggccgagaguua

SEQ ID NO: 752221 - RNA, 19 nt, Homo sapiens
  misc_RNA (1)...(19): siRNA sense strand
ggccgugacauugauauaa

SEQ ID NO: 752222 - RNA, 19 nt, Homo sapiens
  misc_RNA (1)...(19): siRNA sense strand
ugaagaucacugaaagaaa

SEQ ID NO: 752223 - RNA, 19 nt, Homo sapiens
  misc_RNA (1)...(19): siRNA sense strand
ccgcaccagugauuguuga

SEQ ID NO: 752224 - RNA, 19 nt, Homo sapiens
  misc_RNA (1)...(19): siRNA sense strand
ggaguugggcaaggugaaa

SEQ ID NO: 752225 - RNA, 19 nt, Homo sapiens
  misc_RNA (1)...(19): siRNA sense strand
ucaaggauagcaggaauau

SEQ ID NO: 752226 - RNA, 19 nt, Homo sapiens
  misc_RNA (1)...(19): siRNA sense strand
uuacugcgcccuacucugu

SEQ ID NO: 752227 - RNA, 19 nt, Homo sapiens
  misc_RNA (1)...(19): siRNA sense strand
ggccaaauggagaugcuaa

SEQ ID NO: 752228 - RNA, 19 nt, Homo sapiens
  misc_RNA (1)...(19): siRNA sense strand
uaaagcugaccaugaacaa

SEQ ID NO: 752229 - RNA, 19 nt, Homo sapiens
  misc_RNA (1)...(19): siRNA sense strand
guacaaugucucccagcaa

SEQ ID NO: 752230 - RNA, 19 nt, Homo sapiens
  misc_RNA (1)...(19): siRNA sense strand
gucaagacccugaaucucu

SEQ ID NO: 752231 - RNA, 19 nt, Homo sapiens
  misc_RNA (1)...(19): siRNA sense strand
guuauccgcaccagugauu

SEQ ID NO: 752232 - RNA, 19 nt, Homo sapiens
  misc_RNA (1)...(19): siRNA sense strand
gaugaaaacaugaggaaau

SEQ ID NO: 752233 - RNA, 19 nt, Homo sapiens
  misc_RNA (1)...(19): siRNA sense strand
cagugauuguugacauuga

SEQ ID NO: 752234 - RNA, 19 nt, Homo sapiens
  misc_RNA (1)...(19): siRNA sense strand
guugaagccaggccaaaug

SEQ ID NO: 752235 - RNA, 19 nt, Homo sapiens
  misc_RNA (1)...(19): siRNA sense strand
aaacguggacucccucagu

SEQ ID NO: 752236 - RNA, 19 nt, Homo sapiens
  misc_RNA (1)...(19): siRNA sense strand
ucuccagaaucuccgcuuu

SEQ ID NO: 752237 - RNA, 19 nt, Homo sapiens
  misc_RNA (1)...(19): siRNA sense strand
gggccgugacauugauaua

SEQ ID NO: 752238 - RNA, 19 nt, Homo sapiens
  misc_RNA (1)...(19): siRNA sense strand
cuucaaggauagcaggaau

SEQ ID NO: 752239 - RNA, 19 nt, Homo sapiens
  misc_RNA (1)...(19): siRNA sense strand
caccagugauuguugacau

SEQ ID NO: 752240 - RNA, 19 nt, Homo sapiens
  misc_RNA (1)...(19): siRNA sense strand
cugaagaucacugaaagaa

SEQ ID NO: 752241 - RNA, 19 nt, Homo sapiens
  misc_RNA (1)...(19): siRNA sense strand
caaagucaagacccugaau

SEQ ID NO: 752242 - RNA, 19 nt, Homo sapiens
  misc_RNA (1)...(19): siRNA sense strand
gaccagucugccuauguaa

SEQ ID NO: 752243 - RNA, 19 nt, Homo sapiens
  misc_RNA (1)...(19): siRNA sense strand
gaacacacaagaugaaaac

SEQ ID NO: 752244 - RNA, 19 nt, Homo sapiens
  misc_RNA (1)...(19): siRNA sense strand
ggacucccucagugcauug

SEQ ID NO: 752245 - RNA, 19 nt, Homo sapiens
  misc_RNA (1)...(19): siRNA sense strand
gugcaaguacuucaaggau

SEQ ID NO: 752246 - RNA, 19 nt, Homo sapiens
  misc_RNA (1)...(19): siRNA sense strand
ggaaaacuuuacuggaucu

SEQ ID NO: 752247 - RNA, 19 nt, Homo sapiens
  misc_RNA (1)...(19): siRNA sense strand
aacaaacgguacaaugucu

SEQ ID NO: 752248 - RNA, 19 nt, Homo sapiens
  misc_RNA (1)...(19): siRNA sense strand
ccagucugccuauguaagu

SEQ ID NO: 752249 - RNA, 19 nt, Homo sapiens
  misc_RNA (1)...(19): siRNA sense strand
caaggauagcaggaauaua

SEQ ID NO: 752250 - RNA, 19 nt, Homo sapiens
  misc_RNA (1)...(19): siRNA sense strand
gccaaauggagaugcuaaa

SEQ ID NO: 752251 - RNA, 19 nt, Homo sapiens
  misc_RNA (1)...(19): siRNA sense strand
aaggaaaacuuuacuggau

SEQ ID NO: 752252 - RNA, 19 nt, Homo sapiens
  misc_RNA (1)...(19): siRNA sense strand
caaauggagaugcuaaagc

SEQ ID NO: 752253 - RNA, 19 nt, Homo sapiens
  misc_RNA (1)...(19): siRNA sense strand
gaaaugguucaaggucaca

SEQ ID NO: 752254 - RNA, 19 nt, Homo sapiens
  misc_RNA (1)...(19): siRNA sense strand
agaaggcucccaaagucaa

SEQ ID NO: 752255 - RNA, 19 nt, Homo sapiens
  misc_RNA (1)...(19): siRNA sense strand
ggcggaacacacaagauga

SEQ ID NO: 752256 - RNA, 19 nt, Homo sapiens
  misc_RNA (1)...(19): siRNA sense strand
gaaacucagcaugacuuca

SEQ ID NO: 752257 - RNA, 19 nt, Homo sapiens
  misc_RNA (1)...(19): siRNA sense strand
cacacaagaugaaaacaug

SEQ ID NO: 752258 - RNA, 19 nt, Homo sapiens
  misc_RNA (1)...(19): siRNA sense strand
ccaaauggagaugcuaaag

SEQ ID NO: 752259 - RNA, 19 nt, Homo sapiens
  misc_RNA (1)...(19): siRNA sense strand
cuugaugggccgugacauu

SEQ ID NO: 752260 - RNA, 19 nt, Homo sapiens
  misc_RNA (1)...(19): siRNA sense strand
cuaaagcugaccaugaaca

SEQ ID NO: 752261 - RNA, 19 nt, Homo sapiens
  misc_RNA (1)...(19): siRNA sense strand
gaguuauccgcaccaguga

SEQ ID NO: 752262 - RNA, 19 nt, Homo sapiens
  misc_RNA (1)...(19): siRNA sense strand
gcugccacccugaagauca

SEQ ID NO: 752263 - RNA, 19 nt, Homo sapiens
  misc_RNA (1)...(19): siRNA sense strand
gaagaucacugaaagaaau

SEQ ID NO: 752264 - RNA, 19 nt, Homo sapiens
  misc_RNA (1)...(19): siRNA sense strand
ggaccagucugccuaugua

SEQ ID NO: 752265 - RNA, 19 nt, Homo sapiens
  misc_RNA (1)...(19): siRNA sense strand
gauauaauccugaaucgaa

SEQ ID NO: 752266 - RNA, 19 nt, Homo sapiens
  misc_RNA (1)...(19): siRNA sense strand
gcaaguacuucaaggauag

SEQ ID NO: 752267 - RNA, 19 nt, Homo sapiens
  misc_RNA (1)...(19): siRNA sense strand
gaagagcuauggcuagaag

SEQ ID NO: 752268 - RNA, 19 nt, Homo sapiens
  misc_RNA (1)...(19): siRNA sense strand
aaggauagcaggaauauaa

SEQ ID NO: 752269 - RNA, 19 nt, Homo sapiens
  misc_RNA (1)...(19): siRNA sense strand
gaacaaacgguacaauguc

SEQ ID NO: 752270 - RNA, 19 nt, Homo sapiens
  misc_RNA (1)...(19): siRNA sense strand
ccuacucugugaagaauaa

SEQ ID NO: 752271 - RNA, 19 nt, Homo sapiens
  misc_RNA (1)...(19): siRNA sense strand
ugacagcucugagacaaug

SEQ ID NO: 752272 - RNA, 19 nt, Homo sapiens
  misc_RNA (1)...(19): siRNA sense strand
agagaaggcucccaaaguc

SEQ ID NO: 752273 - RNA, 19 nt, Homo sapiens
  misc_RNA (1)...(19): siRNA sense strand
gaucugagacccuaaagca

SEQ ID NO: 752274 - RNA, 19 nt, Homo sapiens
  misc_RNA (1)...(19): siRNA sense strand
gccgugacauugauauaau

SEQ ID NO: 752275 - RNA, 19 nt, Homo sapiens
  misc_RNA (1)...(19): siRNA sense strand
ugcaaguacuucaaggaua

SEQ ID NO: 752276 - RNA, 19 nt, Homo sapiens
  misc_RNA (1)...(19): siRNA sense strand
ugcuaaagcugaccaugaa

SEQ ID NO: 752277 - RNA, 19 nt, Homo sapiens
  misc_RNA (1)...(19): siRNA sense strand
cugagacccuaaagcauuu

SEQ ID NO: 752278 - RNA, 19 nt, Homo sapiens
  misc_RNA (1)...(19): siRNA sense strand
ugaacaaacgguacaaugu

SEQ ID NO: 752279 - RNA, 19 nt, Homo sapiens
  misc_RNA (1)...(19): siRNA sense strand
gacccugaaucucuccaaa

SEQ ID NO: 752280 - RNA, 19 nt, Homo sapiens
  misc_RNA (1)...(19): siRNA sense strand
aaauggagaugcuaaagcu

SEQ ID NO: 752281 - RNA, 19 nt, Homo sapiens
  misc_RNA (1)...(19): siRNA sense strand
gcauuuaguccugcaauuc

SEQ ID NO: 752282 - RNA, 19 nt, Homo sapiens
  misc_RNA (1)...(19): siRNA sense strand
aaugaaacccugcaaggaa

SEQ ID NO: 752283 - RNA, 19 nt, Homo sapiens
  misc_RNA (1)...(19): siRNA sense strand
ucgaagagcuauggcuaga

SEQ ID NO: 752284 - RNA, 19 nt, Homo sapiens
  misc_RNA (1)...(19): siRNA sense strand
gaugggccgugacauugau

SEQ ID NO: 752285 - RNA, 19 nt, Homo sapiens
  misc_RNA (1)...(19): siRNA sense strand
gugcauugccugaaacuca

SEQ ID NO: 752286 - RNA, 19 nt, Homo sapiens
  misc_RNA (1)...(19): siRNA sense strand
gagaaggcucccaaaguca

SEQ ID NO: 752287 - RNA, 19 nt, Homo sapiens
  misc_RNA (1)...(19): siRNA sense strand
augaaacccugcaaggaaa

SEQ ID NO: 752288 - RNA, 19 nt, Homo sapiens
  misc_RNA (1)...(19): siRNA sense strand
gcccuacucugugaagaau

SEQ ID NO: 752289 - RNA, 19 nt, Homo sapiens
  misc_RNA (1)...(19): siRNA sense strand
gcggaacacacaagaugaa

SEQ ID NO: 752290 - RNA, 19 nt, Homo sapiens
  misc_RNA (1)...(19): siRNA sense strand
ucugagacccuaaagcauu

SEQ ID NO: 752291 - RNA, 19 nt, Homo sapiens
  misc_RNA (1)...(19): siRNA sense strand
uccagaaucuccgcuuuga

SEQ ID NO: 752292 - RNA, 19 nt, Homo sapiens
  misc_RNA (1)...(19): siRNA sense strand
caaugaaacccugcaagga

SEQ ID NO: 752293 - RNA, 19 nt, Homo sapiens
  misc_RNA (1)...(19): siRNA sense strand
gacauugacagcucugaga

SEQ ID NO: 752294 - RNA, 19 nt, Homo sapiens
  misc_RNA (1)...(19): siRNA sense strand
ccuggacggccgagaguua

SEQ ID NO: 752295 - RNA, 19 nt, Homo sapiens
  misc_RNA (1)...(19): siRNA sense strand
ggccgugacauugauauaa

SEQ ID NO: 752296 - RNA, 19 nt, Homo sapiens
  misc_RNA (1)...(19): siRNA sense strand
ugaagaucacugaaagaaa

SEQ ID NO: 752297 - RNA, 19 nt, Homo sapiens
  misc_RNA (1)...(19): siRNA sense strand
ccgcaccagugauuguuga

SEQ ID NO: 752298 - RNA, 19 nt, Homo sapiens
  misc_RNA (1)...(19): siRNA sense strand
ggaguugggcaaggugaaa

SEQ ID NO: 752299 - RNA, 19 nt, Homo sapiens
  misc_RNA (1)...(19): siRNA sense strand
ucaaggauagcaggaauau

SEQ ID NO: 752300 - RNA, 19 nt, Homo sapiens
  misc_RNA (1)...(19): siRNA sense strand
uuacugcgcccuacucugu

SEQ ID NO: 752301 - RNA, 19 nt, Homo sapiens
  misc_RNA (1)...(19): siRNA sense strand
ggccaaauggagaugcuaa

SEQ ID NO: 752302 - RNA, 19 nt, Homo sapiens
  misc_RNA (1)...(19): siRNA sense strand
uaaagcugaccaugaacaa

SEQ ID NO: 752303 - RNA, 19 nt, Homo sapiens
  misc_RNA (1)...(19): siRNA sense strand
guacaaugucucccagcaa

SEQ ID NO: 752304 - RNA, 19 nt, Homo sapiens
  misc_RNA (1)...(19): siRNA sense strand
gucaagacccugaaucucu

SEQ ID NO: 752305 - RNA, 19 nt, Homo sapiens
  misc_RNA (1)...(19): siRNA sense strand
guuauccgcaccagugauu

SEQ ID NO: 752306 - RNA, 19 nt, Homo sapiens
  misc_RNA (1)...(19): siRNA sense strand
gaugaaaacaugaggaaau

SEQ ID NO: 752307 - RNA, 19 nt, Homo sapiens
  misc_RNA (1)...(19): siRNA sense strand
cagugauuguugacauuga

SEQ ID NO: 752308 - RNA, 19 nt, Homo sapiens
  misc_RNA (1)...(19): siRNA sense strand
guugaagccaggccaaaug

SEQ ID NO: 752309 - RNA, 19 nt, Homo sapiens
  misc_RNA (1)...(19): siRNA sense strand
aaacguggacucccucagu

SEQ ID NO: 752310 - RNA, 19 nt, Homo sapiens
  misc_RNA (1)...(19): siRNA sense strand
ucuccagaaucuccgcuuu

SEQ ID NO: 752311 - RNA, 19 nt, Homo sapiens
  misc_RNA (1)...(19): siRNA sense strand
gggccgugacauugauaua

SEQ ID NO: 752312 - RNA, 19 nt, Homo sapiens
  misc_RNA (1)...(19): siRNA sense strand
cuucaaggauagcaggaau

SEQ ID NO: 752313 - RNA, 19 nt, Homo sapiens
  misc_RNA (1)...(19): siRNA sense strand
caccagugauuguugacau

SEQ ID NO: 752314 - RNA, 19 nt, Homo sapiens
  misc_RNA (1)...(19): siRNA sense strand
cugaagaucacugaaagaa

SEQ ID NO: 752315 - RNA, 19 nt, Homo sapiens
  misc_RNA (1)...(19): siRNA sense strand
caaagucaagacccugaau

SEQ ID NO: 752316 - RNA, 19 nt, Homo sapiens
  misc_RNA (1)...(19): siRNA sense strand
gaccagucugccuauguaa

SEQ ID NO: 752317 - RNA, 19 nt, Homo sapiens
  misc_RNA (1)...(19): siRNA sense strand
gaacacacaagaugaaaac

SEQ ID NO: 752318 - RNA, 19 nt, Homo sapiens
  misc_RNA (1)...(19): siRNA sense strand
ggacucccucagugcauug

SEQ ID NO: 752319 - RNA, 19 nt, Homo sapiens
  misc_RNA (1)...(19): siRNA sense strand
gugcaaguacuucaaggau

SEQ ID NO: 752320 - RNA, 19 nt, Homo sapiens
  misc_RNA (1)...(19): siRNA sense strand
ggaaaacuuuacuggaucu

SEQ ID NO: 752321 - RNA, 19 nt, Homo sapiens
  misc_RNA (1)...(19): siRNA sense strand
aacaaacgguacaaugucu

SEQ ID NO: 752322 - RNA, 19 nt, Homo sapiens
  misc_RNA (1)...(19): siRNA sense strand
ccagucugccuauguaagu

SEQ ID NO: 752323 - RNA, 19 nt, Homo sapiens
  misc_RNA (1)...(19): siRNA sense strand
caaggauagcaggaauaua

SEQ ID NO: 752324 - RNA, 19 nt, Homo sapiens
  misc_RNA (1)...(19): siRNA sense strand
gccaaauggagaugcuaaa

SEQ ID NO: 752325 - RNA, 19 nt, Homo sapiens
  misc_RNA (1)...(19): siRNA sense strand
aaggaaaacuuuacuggau

SEQ ID NO: 752326 - RNA, 19 nt, Homo sapiens
  misc_RNA (1)...(19): siRNA sense strand
caaauggagaugcuaaagc

SEQ ID NO: 752327 - RNA, 19 nt, Homo sapiens
  misc_RNA (1)...(19): siRNA sense strand
gaaaugguucaaggucaca

SEQ ID NO: 752328 - RNA, 19 nt, Homo sapiens
  misc_RNA (1)...(19): siRNA sense strand
agaaggcucccaaagucaa

SEQ ID NO: 752329 - RNA, 19 nt, Homo sapiens
  misc_RNA (1)...(19): siRNA sense strand
ggcggaacacacaagauga

SEQ ID NO: 752330 - RNA, 19 nt, Homo sapiens
  misc_RNA (1)...(19): siRNA sense strand
gaaacucagcaugacuuca

SEQ ID NO: 752331 - RNA, 19 nt, Homo sapiens
  misc_RNA (1)...(19): siRNA sense strand
cacacaagaugaaaacaug

SEQ ID NO: 752332 - RNA, 19 nt, Homo sapiens
  misc_RNA (1)...(19): siRNA sense strand
ccaaauggagaugcuaaag

SEQ ID NO: 752333 - RNA, 19 nt, Homo sapiens
  misc_RNA (1)...(19): siRNA sense strand
cuugaugggccgugacauu

SEQ ID NO: 752334 - RNA, 19 nt, Homo sapiens
  misc_RNA (1)...(19): siRNA sense strand
cuaaagcugaccaugaaca

SEQ ID NO: 752335 - RNA, 19 nt, Homo sapiens
  misc_RNA (1)...(19): siRNA sense strand
gaguuauccgcaccaguga

SEQ ID NO: 752336 - RNA, 19 nt, Homo sapiens
  misc_RNA (1)...(19): siRNA sense strand
gcugccacccugaagauca

SEQ ID NO: 752337 - RNA, 19 nt, Homo sapiens
  misc_RNA (1)...(19): siRNA sense strand
aaagaaagcucccaauauu

SEQ ID NO: 752338 - RNA, 19 nt, Homo sapiens
  misc_RNA (1)...(19): siRNA sense strand
gaacacugcugccagaauu

SEQ ID NO: 752339 - RNA, 19 nt, Homo sapiens
  misc_RNA (1)...(19): siRNA sense strand
gaaagaaagcucccaauau

SEQ ID NO: 752340 - RNA, 19 nt, Homo sapiens
  misc_RNA (1)...(19): siRNA sense strand
ggcauuaccugacagcuua

SEQ ID NO: 752341 - RNA, 19 nt, Homo sapiens
  misc_RNA (1)...(19): siRNA sense strand
ccaauuauaucaggaguuu

SEQ ID NO: 752342 - RNA, 19 nt, Homo sapiens
  misc_RNA (1)...(19): siRNA sense strand
uaacucaggugauucgaaa

SEQ ID NO: 752343 - RNA, 19 nt, Homo sapiens
  misc_RNA (1)...(19): siRNA sense strand
gcaaacagacaguggcaua

SEQ ID NO: 752344 - RNA, 19 nt, Homo sapiens
  misc_RNA (1)...(19): siRNA sense strand
gaaacucaucacccaauua

SEQ ID NO: 752345 - RNA, 19 nt, Homo sapiens
  misc_RNA (1)...(19): siRNA sense strand
ggaaacucaucacccaauu

SEQ ID NO: 752346 - RNA, 19 nt, Homo sapiens
  misc_RNA (1)...(19): siRNA sense strand
ugaaagaaagcucccaaua

SEQ ID NO: 752347 - RNA, 19 nt, Homo sapiens
  misc_RNA (1)...(19): siRNA sense strand
cagcuuaacucaggugauu

SEQ ID NO: 752348 - RNA, 19 nt, Homo sapiens
  misc_RNA (1)...(19): siRNA sense strand
ggaggaacguggaccugaa

SEQ ID NO: 752349 - RNA, 19 nt, Homo sapiens
  misc_RNA (1)...(19): siRNA sense strand
gaugugauguauuccaaga

SEQ ID NO: 752350 - RNA, 19 nt, Homo sapiens
  misc_RNA (1)...(19): siRNA sense strand
uagaaucucugcacuguca

SEQ ID NO: 752351 - RNA, 19 nt, Homo sapiens
  misc_RNA (1)...(19): siRNA sense strand
gaaaguggcccagcaguuc

SEQ ID NO: 752352 - RNA, 19 nt, Homo sapiens
  misc_RNA (1)...(19): siRNA sense strand
ggaagacucucgcgaugag

SEQ ID NO: 752353 - RNA, 19 nt, Homo sapiens
  misc_RNA (1)...(19): siRNA sense strand
guaauaagagccaacuuug

SEQ ID NO: 752354 - RNA, 19 nt, Homo sapiens
  misc_RNA (1)...(19): siRNA sense strand
cggcaaacaucacuaaauc

SEQ ID NO: 752355 - RNA, 19 nt, Homo sapiens
  misc_RNA (1)...(19): siRNA sense strand
ccacugugcugcaggcauu

SEQ ID NO: 752356 - RNA, 19 nt, Homo sapiens
  misc_RNA (1)...(19): siRNA sense strand
gcagacaucacguuccaaa

SEQ ID NO: 752357 - RNA, 19 nt, Homo sapiens
  misc_RNA (1)...(19): siRNA sense strand
ucaccuaauucacuuaaug

SEQ ID NO: 752358 - RNA, 19 nt, Homo sapiens
  misc_RNA (1)...(19): siRNA sense strand
aaacaucaaguucgaauug

SEQ ID NO: 752359 - RNA, 19 nt, Homo sapiens
  misc_RNA (1)...(19): siRNA sense strand
agaaagcucccaauauuau

SEQ ID NO: 752360 - RNA, 19 nt, Homo sapiens
  misc_RNA (1)...(19): siRNA sense strand
ccaauauuaugaugugaug

SEQ ID NO: 752361 - RNA, 19 nt, Homo sapiens
  misc_RNA (1)...(19): siRNA sense strand
gcaaacaucacuaaaucau

SEQ ID NO: 752362 - RNA, 19 nt, Homo sapiens
  misc_RNA (1)...(19): siRNA sense strand
aagaaagcucccaauauua

SEQ ID NO: 752363 - RNA, 19 nt, Homo sapiens
  misc_RNA (1)...(19): siRNA sense strand
agaaagaagugagcaaaca

SEQ ID NO: 752364 - RNA, 19 nt, Homo sapiens
  misc_RNA (1)...(19): siRNA sense strand
ucaccaagcaaacccuuua

SEQ ID NO: 752365 - RNA, 19 nt, Homo sapiens
  misc_RNA (1)...(19): siRNA sense strand
ucaggugauucgaaaguuu

SEQ ID NO: 752366 - RNA, 19 nt, Homo sapiens
  misc_RNA (1)...(19): siRNA sense strand
gaacacacugucagagaau

SEQ ID NO: 752367 - RNA, 19 nt, Homo sapiens
  misc_RNA (1)...(19): siRNA sense strand
gaacauugucggcgugugu

SEQ ID NO: 752368 - RNA, 19 nt, Homo sapiens
  misc_RNA (1)...(19): siRNA sense strand
gagaauacuggacacugua

SEQ ID NO: 752369 - RNA, 19 nt, Homo sapiens
  misc_RNA (1)...(19): siRNA sense strand
guuagaaucucugcacugu

SEQ ID NO: 752370 - RNA, 19 nt, Homo sapiens
  misc_RNA (1)...(19): siRNA sense strand
caagaaagaagugagcaaa

SEQ ID NO: 752371 - RNA, 19 nt, Homo sapiens
  misc_RNA (1)...(19): siRNA sense strand
ggaguuugaccaucucuug

SEQ ID NO: 752372 - RNA, 19 nt, Homo sapiens
  misc_RNA (1)...(19): siRNA sense strand
ccagaaaacuugcgaaaca

SEQ ID NO: 752373 - RNA, 19 nt, Homo sapiens
  misc_RNA (1)...(19): siRNA sense strand
agaacacacugucagagaa

SEQ ID NO: 752374 - RNA, 19 nt, Homo sapiens
  misc_RNA (1)...(19): siRNA sense strand
ugugauguauuccaagaaa

SEQ ID NO: 752375 - RNA, 19 nt, Homo sapiens
  misc_RNA (1)...(19): siRNA sense strand
gcagaaguccgagaagaga

SEQ ID NO: 752376 - RNA, 19 nt, Homo sapiens
  misc_RNA (1)...(19): siRNA sense strand
gcauugcagugaaagaaag

SEQ ID NO: 752377 - RNA, 19 nt, Homo sapiens
  misc_RNA (1)...(19): siRNA sense strand
gaaggaagcacugcagaag

SEQ ID NO: 752378 - RNA, 19 nt, Homo sapiens
  misc_RNA (1)...(19): siRNA sense strand
gcccagcaguuccucuuga

SEQ ID NO: 752379 - RNA, 19 nt, Homo sapiens
  misc_RNA (1)...(19): siRNA sense strand
aaacucaucacccaauuau

SEQ ID NO: 752380 - RNA, 19 nt, Homo sapiens
  misc_RNA (1)...(19): siRNA sense strand
uaauaagagccaacuuuga

SEQ ID NO: 752381 - RNA, 19 nt, Homo sapiens
  misc_RNA (1)...(19): siRNA sense strand
agacaucacguuccaaaug

SEQ ID NO: 752382 - RNA, 19 nt, Homo sapiens
  misc_RNA (1)...(19): siRNA sense strand
gaaagcucccaauauuaug

SEQ ID NO: 752383 - RNA, 19 nt, Homo sapiens
  misc_RNA (1)...(19): siRNA sense strand
gaaacaucaaguucgaauu

SEQ ID NO: 752384 - RNA, 19 nt, Homo sapiens
  misc_RNA (1)...(19): siRNA sense strand
uguaauaagagccaacuuu

SEQ ID NO: 752385 - RNA, 19 nt, Homo sapiens
  misc_RNA (1)...(19): siRNA sense strand
guugaccgcuguguuguga

SEQ ID NO: 752386 - RNA, 19 nt, Homo sapiens
  misc_RNA (1)...(19): siRNA sense strand
uacauugaguggcuggaua

SEQ ID NO: 752387 - RNA, 19 nt, Homo sapiens
  misc_RNA (1)...(19): siRNA sense strand
acucaucacccaauuauau

SEQ ID NO: 752388 - RNA, 19 nt, Homo sapiens
  misc_RNA (1)...(19): siRNA sense strand
gaacagcaucaccaagcaa

SEQ ID NO: 752389 - RNA, 19 nt, Homo sapiens
  misc_RNA (1)...(19): siRNA sense strand
uaagagccaacuuugauga

SEQ ID NO: 752390 - RNA, 19 nt, Homo sapiens
  misc_RNA (1)...(19): siRNA sense strand
agagaauacuggacacugu

SEQ ID NO: 752391 - RNA, 19 nt, Homo sapiens
  misc_RNA (1)...(19): siRNA sense strand
acuggacacuguaauaaga

SEQ ID NO: 752392 - RNA, 19 nt, Homo sapiens
  misc_RNA (1)...(19): siRNA sense strand
cuacgugcucuaccuguua

SEQ ID NO: 752393 - RNA, 19 nt, Homo sapiens
  misc_RNA (1)...(19): siRNA sense strand
gacaucacguuccaaaugc

SEQ ID NO: 752394 - RNA, 19 nt, Homo sapiens
  misc_RNA (1)...(19): siRNA sense strand
gauccacagugcagacauc

SEQ ID NO: 752395 - RNA, 19 nt, Homo sapiens
  misc_RNA (1)...(19): siRNA sense strand
aauaagagccaacuuugau

SEQ ID NO: 752396 - RNA, 19 nt, Homo sapiens
  misc_RNA (1)...(19): siRNA sense strand
gcaagaaagaagugagcaa

SEQ ID NO: 752397 - RNA, 19 nt, Homo sapiens
  misc_RNA (1)...(19): siRNA sense strand
caaauucugagacggcaaa

SEQ ID NO: 752398 - RNA, 19 nt, Homo sapiens
  misc_RNA (1)...(19): siRNA sense strand
aaacagacaguggcauauu

SEQ ID NO: 752399 - RNA, 19 nt, Homo sapiens
  misc_RNA (1)...(19): siRNA sense strand
gaaagaagugagcaaacag

SEQ ID NO: 752400 - RNA, 19 nt, Homo sapiens
  misc_RNA (1)...(19): siRNA sense strand
ugccagaauuucccaaugu

SEQ ID NO: 752401 - RNA, 19 nt, Homo sapiens
  misc_RNA (1)...(19): siRNA sense strand
cagaacacacugucagaga

SEQ ID NO: 752402 - RNA, 19 nt, Homo sapiens
  misc_RNA (1)...(19): siRNA sense strand
ggaacacugcugccagaau

SEQ ID NO: 752403 - RNA, 19 nt, Homo sapiens
  misc_RNA (1)...(19): siRNA sense strand
gugcagacaucacguucca

SEQ ID NO: 752404 - RNA, 19 nt, Homo sapiens
  misc_RNA (1)...(19): siRNA sense strand
aauacuggacacuguaaua

SEQ ID NO: 752405 - RNA, 19 nt, Homo sapiens
  misc_RNA (1)...(19): siRNA sense strand
aggaagcacugcagaaguc

SEQ ID NO: 752406 - RNA, 19 nt, Homo sapiens
  misc_RNA (1)...(19): siRNA sense strand
gugacuccauccucuacaa

SEQ ID NO: 752407 - RNA, 19 nt, Homo sapiens
  misc_RNA (1)...(19): siRNA sense strand
gaagugccaccucccucuu

SEQ ID NO: 752408 - RNA, 19 nt, Homo sapiens
  misc_RNA (1)...(19): siRNA sense strand
aacagacaguggcauauuc

SEQ ID NO: 752409 - RNA, 19 nt, Homo sapiens
  misc_RNA (1)...(19): siRNA sense strand
agacggcaaacaucacuaa

SEQ ID NO: 752410 - RNA, 19 nt, Homo sapiens
  misc_RNA (1)...(19): siRNA sense strand
ugagugagacgggcaagaa

SEQ ID NO: 752411 - RNA, 19 nt, Homo sapiens
  misc_RNA (1)...(19): siRNA sense strand
gagugagacgggcaagaaa

SEQ ID NO: 752412 - RNA, 19 nt, Homo sapiens
  misc_RNA (1)...(19): siRNA sense strand
cagcaguuccucuugaugu

SEQ ID NO: 752413 - RNA, 19 nt, Homo sapiens
  misc_RNA (1)...(19): siRNA sense strand
ugaacagcaucaccaagca

SEQ ID NO: 752414 - RNA, 19 nt, Homo sapiens
  misc_RNA (1)...(19): siRNA sense strand
auacuggacacuguaauaa

SEQ ID NO: 752415 - RNA, 19 nt, Homo sapiens
  misc_RNA (1)...(19): siRNA sense strand
ugaugagguucaaaguuuc

SEQ ID NO: 752416 - RNA, 19 nt, Homo sapiens
  misc_RNA (1)...(19): siRNA sense strand
aaagaagugagcaaacaga

SEQ ID NO: 752417 - RNA, 19 nt, Homo sapiens
  misc_RNA (1)...(19): siRNA sense strand
gccagaauuucccaauguc

SEQ ID NO: 752418 - RNA, 19 nt, Homo sapiens
  misc_RNA (1)...(19): siRNA sense strand
aaagcucccaauauuauga

SEQ ID NO: 752419 - RNA, 19 nt, Homo sapiens
  misc_RNA (1)...(19): siRNA sense strand
cugcagaaguccgagaaga

SEQ ID NO: 752420 - RNA, 19 nt, Homo sapiens
  misc_RNA (1)...(19): siRNA sense strand
agaauuucccaaugucaaa

SEQ ID NO: 752421 - RNA, 19 nt, Homo sapiens
  misc_RNA (1)...(19): siRNA sense strand
caaacagacaguggcauau

SEQ ID NO: 752422 - RNA, 19 nt, Homo sapiens
  misc_RNA (1)...(19): siRNA sense strand
gugagacgggcaagaaaga

SEQ ID NO: 752423 - RNA, 19 nt, Homo sapiens
  misc_RNA (1)...(19): siRNA sense strand
gguccaaacucggaacacu

SEQ ID NO: 752424 - RNA, 19 nt, Homo sapiens
  misc_RNA (1)...(19): siRNA sense strand
cuauggcauugcagugaaa

SEQ ID NO: 752425 - RNA, 19 nt, Homo sapiens
  misc_RNA (1)...(19): siRNA sense strand
cagaauuucccaaugucaa

SEQ ID NO: 752426 - RNA, 19 nt, Homo sapiens
  misc_RNA (1)...(19): siRNA sense strand
agaauacuggacacuguaa

SEQ ID NO: 752427 - RNA, 19 nt, Homo sapiens
  misc_RNA (1)...(19): siRNA sense strand
agaaaguggcccagcaguu

SEQ ID NO: 752428 - RNA, 19 nt, Homo sapiens
  misc_RNA (1)...(19): siRNA sense strand
ugaccgcuguguugugaag

SEQ ID NO: 752429 - RNA, 19 nt, Homo sapiens
  misc_RNA (1)...(19): siRNA sense strand
ccaucgaguccuacauuga

SEQ ID NO: 752430 - RNA, 19 nt, Homo sapiens
  misc_RNA (1)...(19): siRNA sense strand
gagcaccggaaacucauca

SEQ ID NO: 752431 - RNA, 19 nt, Homo sapiens
  misc_RNA (1)...(19): siRNA sense strand
ggcauugcagugaaagaaa

SEQ ID NO: 752432 - RNA, 19 nt, Homo sapiens
  misc_RNA (1)...(19): siRNA sense strand
caacuggaugaguggcuaa

SEQ ID NO: 752433 - RNA, 19 nt, Homo sapiens
  misc_RNA (1)...(19): siRNA sense strand
caaacaucacuaaaucauc

SEQ ID NO: 752434 - RNA, 19 nt, Homo sapiens
  misc_RNA (1)...(19): siRNA sense strand
agaaggaagcacugcagaa

SEQ ID NO: 752435 - RNA, 19 nt, Homo sapiens
  misc_RNA (1)...(19): siRNA sense strand
cuuaauguuugaugacuac

SEQ ID NO: 752436 - RNA, 19 nt, Homo sapiens
  misc_RNA (1)...(19): siRNA sense strand
acacuggccucagcacuac

SEQ ID NO: 752437 - RNA, 19 nt, Homo sapiens
  misc_RNA (1)...(19): siRNA sense strand
aaagaaagcucccaauauu

SEQ ID NO: 752438 - RNA, 19 nt, Homo sapiens
  misc_RNA (1)...(19): siRNA sense strand
gaacacugcugccagaauu

SEQ ID NO: 752439 - RNA, 19 nt, Homo sapiens
  misc_RNA (1)...(19): siRNA sense strand
gaaagaaagcucccaauau

SEQ ID NO: 752440 - RNA, 19 nt, Homo sapiens
  misc_RNA (1)...(19): siRNA sense strand
ggcauuaccugacagcuua

SEQ ID NO: 752441 - RNA, 19 nt, Homo sapiens
  misc_RNA (1)...(19): siRNA sense strand
ccaauuauaucaggaguuu

SEQ ID NO: 752442 - RNA, 19 nt, Homo sapiens
  misc_RNA (1)...(19): siRNA sense strand
uaacucaggugauucgaaa

SEQ ID NO: 752443 - RNA, 19 nt, Homo sapiens
  misc_RNA (1)...(19): siRNA sense strand
gcaaacagacaguggcaua

SEQ ID NO: 752444 - RNA, 19 nt, Homo sapiens
  misc_RNA (1)...(19): siRNA sense strand
gaaacucaucacccaauua

SEQ ID NO: 752445 - RNA, 19 nt, Homo sapiens
  misc_RNA (1)...(19): siRNA sense strand
ggaaacucaucacccaauu

SEQ ID NO: 752446 - RNA, 19 nt, Homo sapiens
  misc_RNA (1)...(19): siRNA sense strand
ugaaagaaagcucccaaua

SEQ ID NO: 752447 - RNA, 19 nt, Homo sapiens
  misc_RNA (1)...(19): siRNA sense strand
cagcuuaacucaggugauu

SEQ ID NO: 752448 - RNA, 19 nt, Homo sapiens
  misc_RNA (1)...(19): siRNA sense strand
ggaggaacguggaccugaa

SEQ ID NO: 752449 - RNA, 19 nt, Homo sapiens
  misc_RNA (1)...(19): siRNA sense strand
gaugugauguauuccaaga

SEQ ID NO: 752450 - RNA, 19 nt, Homo sapiens
  misc_RNA (1)...(19): siRNA sense strand
uagaaucucugcacuguca

SEQ ID NO: 752451 - RNA, 19 nt, Homo sapiens
  misc_RNA (1)...(19): siRNA sense strand
gaaaguggcccagcaguuc

SEQ ID NO: 752452 - RNA, 19 nt, Homo sapiens
  misc_RNA (1)...(19): siRNA sense strand
ggaagacucucgcgaugag

SEQ ID NO: 752453 - RNA, 19 nt, Homo sapiens
  misc_RNA (1)...(19): siRNA sense strand
guaauaagagccaacuuug

SEQ ID NO: 752454 - RNA, 19 nt, Homo sapiens
  misc_RNA (1)...(19): siRNA sense strand
cggcaaacaucacuaaauc

SEQ ID NO: 752455 - RNA, 19 nt, Homo sapiens
  misc_RNA (1)...(19): siRNA sense strand
ccacugugcugcaggcauu

SEQ ID NO: 752456 - RNA, 19 nt, Homo sapiens
  misc_RNA (1)...(19): siRNA sense strand
gcagacaucacguuccaaa

SEQ ID NO: 752457 - RNA, 19 nt, Homo sapiens
  misc_RNA (1)...(19): siRNA sense strand
ucaccuaauucacuuaaug

SEQ ID NO: 752458 - RNA, 19 nt, Homo sapiens
  misc_RNA (1)...(19): siRNA sense strand
aaacaucaaguucgaauug

SEQ ID NO: 752459 - RNA, 19 nt, Homo sapiens
  misc_RNA (1)...(19): siRNA sense strand
agaaagcucccaauauuau

SEQ ID NO: 752460 - RNA, 19 nt, Homo sapiens
  misc_RNA (1)...(19): siRNA sense strand
ccaauauuaugaugugaug

SEQ ID NO: 752461 - RNA, 19 nt, Homo sapiens
  misc_RNA (1)...(19): siRNA sense strand
gcaaacaucacuaaaucau

SEQ ID NO: 752462 - RNA, 19 nt, Homo sapiens
  misc_RNA (1)...(19): siRNA sense strand
aagaaagcucccaauauua

SEQ ID NO: 752463 - RNA, 19 nt, Homo sapiens
  misc_RNA (1)...(19): siRNA sense strand
agaaagaagugagcaaaca

SEQ ID NO: 752464 - RNA, 19 nt, Homo sapiens
  misc_RNA (1)...(19): siRNA sense strand
ucaccaagcaaacccuuua

SEQ ID NO: 752465 - RNA, 19 nt, Homo sapiens
  misc_RNA (1)...(19): siRNA sense strand
ucaggugauucgaaaguuu

SEQ ID NO: 752466 - RNA, 19 nt, Homo sapiens
  misc_RNA (1)...(19): siRNA sense strand
gaacacacugucagagaau

SEQ ID NO: 752467 - RNA, 19 nt, Homo sapiens
  misc_RNA (1)...(19): siRNA sense strand
gaacauugucggcgugugu

SEQ ID NO: 752468 - RNA, 19 nt, Homo sapiens
  misc_RNA (1)...(19): siRNA sense strand
gagaauacuggacacugua

SEQ ID NO: 752469 - RNA, 19 nt, Homo sapiens
  misc_RNA (1)...(19): siRNA sense strand
guuagaaucucugcacugu

SEQ ID NO: 752470 - RNA, 19 nt, Homo sapiens
  misc_RNA (1)...(19): siRNA sense strand
caagaaagaagugagcaaa

SEQ ID NO: 752471 - RNA, 19 nt, Homo sapiens
  misc_RNA (1)...(19): siRNA sense strand
ggaguuugaccaucucuug

SEQ ID NO: 752472 - RNA, 19 nt, Homo sapiens
  misc_RNA (1)...(19): siRNA sense strand
ccagaaaacuugcgaaaca

SEQ ID NO: 752473 - RNA, 19 nt, Homo sapiens
  misc_RNA (1)...(19): siRNA sense strand
agaacacacugucagagaa

SEQ ID NO: 752474 - RNA, 19 nt, Homo sapiens
  misc_RNA (1)...(19): siRNA sense strand
ugugauguauuccaagaaa

SEQ ID NO: 752475 - RNA, 19 nt, Homo sapiens
  misc_RNA (1)...(19): siRNA sense strand
gcagaaguccgagaagaga

SEQ ID NO: 752476 - RNA, 19 nt, Homo sapiens
  misc_RNA (1)...(19): siRNA sense strand
gcauugcagugaaagaaag

SEQ ID NO: 752477 - RNA, 19 nt, Homo sapiens
  misc_RNA (1)...(19): siRNA sense strand
gaaggaagcacugcagaag

SEQ ID NO: 752478 - RNA, 19 nt, Homo sapiens
  misc_RNA (1)...(19): siRNA sense strand
gcccagcaguuccucuuga

SEQ ID NO: 752479 - RNA, 19 nt, Homo sapiens
  misc_RNA (1)...(19): siRNA sense strand
aaacucaucacccaauuau

SEQ ID NO: 752480 - RNA, 19 nt, Homo sapiens
  misc_RNA (1)...(19): siRNA sense strand
uaauaagagccaacuuuga

SEQ ID NO: 752481 - RNA, 19 nt, Homo sapiens
  misc_RNA (1)...(19): siRNA sense strand
agacaucacguuccaaaug

SEQ ID NO: 752482 - RNA, 19 nt, Homo sapiens
  misc_RNA (1)...(19): siRNA sense strand
gaaagcucccaauauuaug

SEQ ID NO: 752483 - RNA, 19 nt, Homo sapiens
  misc_RNA (1)...(19): siRNA sense strand
gaaacaucaaguucgaauu

SEQ ID NO: 752484 - RNA, 19 nt, Homo sapiens
  misc_RNA (1)...(19): siRNA sense strand
uguaauaagagccaacuuu

SEQ ID NO: 752485 - RNA, 19 nt, Homo sapiens
  misc_RNA (1)...(19): siRNA sense strand
guugaccgcuguguuguga

SEQ ID NO: 752486 - RNA, 19 nt, Homo sapiens
  misc_RNA (1)...(19): siRNA sense strand
uacauugaguggcuggaua

SEQ ID NO: 752487 - RNA, 19 nt, Homo sapiens
  misc_RNA (1)...(19): siRNA sense strand
acucaucacccaauuauau

SEQ ID NO: 752488 - RNA, 19 nt, Homo sapiens
  misc_RNA (1)...(19): siRNA sense strand
gaacagcaucaccaagcaa

SEQ ID NO: 752489 - RNA, 19 nt, Homo sapiens
  misc_RNA (1)...(19): siRNA sense strand
uaagagccaacuuugauga

SEQ ID NO: 752490 - RNA, 19 nt, Homo sapiens
  misc_RNA (1)...(19): siRNA sense strand
agagaauacuggacacugu

SEQ ID NO: 752491 - RNA, 19 nt, Homo sapiens
  misc_RNA (1)...(19): siRNA sense strand
acuggacacuguaauaaga

SEQ ID NO: 752492 - RNA, 19 nt, Homo sapiens
  misc_RNA (1)...(19): siRNA sense strand
cuacgugcucuaccuguua

SEQ ID NO: 752493 - RNA, 19 nt, Homo sapiens
  misc_RNA (1)...(19): siRNA sense strand
gacaucacguuccaaaugc

SEQ ID NO: 752494 - RNA, 19 nt, Homo sapiens
  misc_RNA (1)...(19): siRNA sense strand
gauccacagugcagacauc

SEQ ID NO: 752495 - RNA, 19 nt, Homo sapiens
  misc_RNA (1)...(19): siRNA sense strand
aauaagagccaacuuugau

SEQ ID NO: 752496 - RNA, 19 nt, Homo sapiens
  misc_RNA (1)...(19): siRNA sense strand
gcaagaaagaagugagcaa

SEQ ID NO: 752497 - RNA, 19 nt, Homo sapiens
  misc_RNA (1)...(19): siRNA sense strand
caaauucugagacggcaaa

SEQ ID NO: 752498 - RNA, 19 nt, Homo sapiens
  misc_RNA (1)...(19): siRNA sense strand
aaacagacaguggcauauu

SEQ ID NO: 752499 - RNA, 19 nt, Homo sapiens
  misc_RNA (1)...(19): siRNA sense strand
gaaagaagugagcaaacag

SEQ ID NO: 752500 - RNA, 19 nt, Homo sapiens
  misc_RNA (1)...(19): siRNA sense strand
ugccagaauuucccaaugu

SEQ ID NO: 752501 - RNA, 19 nt, Homo sapiens
  misc_RNA (1)...(19): siRNA sense strand
cagaacacacugucagaga

SEQ ID NO: 752502 - RNA, 19 nt, Homo sapiens
  misc_RNA (1)...(19): siRNA sense strand
ggaacacugcugccagaau

SEQ ID NO: 752503 - RNA, 19 nt, Homo sapiens
  misc_RNA (1)...(19): siRNA sense strand
gugcagacaucacguucca

SEQ ID NO: 752504 - RNA, 19 nt, Homo sapiens
  misc_RNA (1)...(19): siRNA sense strand
aauacuggacacuguaaua

SEQ ID NO: 752505 - RNA, 19 nt, Homo sapiens
  misc_RNA (1)...(19): siRNA sense strand
aggaagcacugcagaaguc

SEQ ID NO: 752506 - RNA, 19 nt, Homo sapiens
  misc_RNA (1)...(19): siRNA sense strand
gugacuccauccucuacaa

SEQ ID NO: 752507 - RNA, 19 nt, Homo sapiens
  misc_RNA (1)...(19): siRNA sense strand
gaagugccaccucccucuu

SEQ ID NO: 752508 - RNA, 19 nt, Homo sapiens
  misc_RNA (1)...(19): siRNA sense strand
aacagacaguggcauauuc

SEQ ID NO: 752509 - RNA, 19 nt, Homo sapiens
  misc_RNA (1)...(19): siRNA sense strand
agacggcaaacaucacuaa

SEQ ID NO: 752510 - RNA, 19 nt, Homo sapiens
  misc_RNA (1)...(19): siRNA sense strand
ugagugagacgggcaagaa

SEQ ID NO: 752511 - RNA, 19 nt, Homo sapiens
  misc_RNA (1)...(19): siRNA sense strand
gagugagacgggcaagaaa

SEQ ID NO: 752512 - RNA, 19 nt, Homo sapiens
  misc_RNA (1)...(19): siRNA sense strand
cagcaguuccucuugaugu

SEQ ID NO: 752513 - RNA, 19 nt, Homo sapiens
  misc_RNA (1)...(19): siRNA sense strand
ugaacagcaucaccaagca

SEQ ID NO: 752514 - RNA, 19 nt, Homo sapiens
  misc_RNA (1)...(19): siRNA sense strand
auacuggacacuguaauaa

SEQ ID NO: 752515 - RNA, 19 nt, Homo sapiens
  misc_RNA (1)...(19): siRNA sense strand
ugaugagguucaaaguuuc

SEQ ID NO: 752516 - RNA, 19 nt, Homo sapiens
  misc_RNA (1)...(19): siRNA sense strand
aaagaagugagcaaacaga

SEQ ID NO: 752517 - RNA, 19 nt, Homo sapiens
  misc_RNA (1)...(19): siRNA sense strand
gccagaauuucccaauguc

SEQ ID NO: 752518 - RNA, 19 nt, Homo sapiens
  misc_RNA (1)...(19): siRNA sense strand
aaagcucccaauauuauga

SEQ ID NO: 752519 - RNA, 19 nt, Homo sapiens
  misc_RNA (1)...(19): siRNA sense strand
cugcagaaguccgagaaga

SEQ ID NO: 752520 - RNA, 19 nt, Homo sapiens
  misc_RNA (1)...(19): siRNA sense strand
agaauuucccaaugucaaa

SEQ ID NO: 752521 - RNA, 19 nt, Homo sapiens
  misc_RNA (1)...(19): siRNA sense strand
caaacagacaguggcauau

SEQ ID NO: 752522 - RNA, 19 nt, Homo sapiens
  misc_RNA (1)...(19): siRNA sense strand
gugagacgggcaagaaaga

SEQ ID NO: 752523 - RNA, 19 nt, Homo sapiens
  misc_RNA (1)...(19): siRNA sense strand
gguccaaacucggaacacu

SEQ ID NO: 752524 - RNA, 19 nt, Homo sapiens
  misc_RNA (1)...(19): siRNA sense strand
cuauggcauugcagugaaa

SEQ ID NO: 752525 - RNA, 19 nt, Homo sapiens
  misc_RNA (1)...(19): siRNA sense strand
cagaauuucccaaugucaa

SEQ ID NO: 752526 - RNA, 19 nt, Homo sapiens
  misc_RNA (1)...(19): siRNA sense strand
agaauacuggacacuguaa

SEQ ID NO: 752527 - RNA, 19 nt, Homo sapiens
  misc_RNA (1)...(19): siRNA sense strand
agaaaguggcccagcaguu

SEQ ID NO: 752528 - RNA, 19 nt, Homo sapiens
  misc_RNA (1)...(19): siRNA sense strand
ugaccgcuguguugugaag

SEQ ID NO: 752529 - RNA, 19 nt, Homo sapiens
  misc_RNA (1)...(19): siRNA sense strand
ccaucgaguccuacauuga

SEQ ID NO: 752530 - RNA, 19 nt, Homo sapiens
  misc_RNA (1)...(19): siRNA sense strand
gagcaccggaaacucauca

SEQ ID NO: 752531 - RNA, 19 nt, Homo sapiens
  misc_RNA (1)...(19): siRNA sense strand
ggcauugcagugaaagaaa

SEQ ID NO: 752532 - RNA, 19 nt, Homo sapiens
  misc_RNA (1)...(19): siRNA sense strand
caacuggaugaguggcuaa

SEQ ID NO: 752533 - RNA, 19 nt, Homo sapiens
  misc_RNA (1)...(19): siRNA sense strand
caaacaucacuaaaucauc

SEQ ID NO: 752534 - RNA, 19 nt, Homo sapiens
  misc_RNA (1)...(19): siRNA sense strand
agaaggaagcacugcagaa

SEQ ID NO: 752535 - RNA, 19 nt, Homo sapiens
  misc_RNA (1)...(19): siRNA sense strand
cuuaauguuugaugacuac

SEQ ID NO: 752536 - RNA, 19 nt, Homo sapiens
  misc_RNA (1)...(19): siRNA sense strand
acacuggccucagcacuac

SEQ ID NO: 752537 - RNA, 19 nt, Homo sapiens
  misc_RNA (1)...(19): siRNA sense strand
gaagauggcuugucagaug

SEQ ID NO: 752538 - RNA, 19 nt, Homo sapiens
  misc_RNA (1)...(19): siRNA sense strand
gaaguuaagucgcagaaug

SEQ ID NO: 752539 - RNA, 19 nt, Homo sapiens
  misc_RNA (1)...(19): siRNA sense strand
ggacaaagaacccaaagaa

SEQ ID NO: 752540 - RNA, 19 nt, Homo sapiens
  misc_RNA (1)...(19): siRNA sense strand
gaagggauuuacagaaguu

SEQ ID NO: 752541 - RNA, 19 nt, Homo sapiens
  misc_RNA (1)...(19): siRNA sense strand
ggaguucgacccaacaaua

SEQ ID NO: 752542 - RNA, 19 nt, Homo sapiens
  misc_RNA (1)...(19): siRNA sense strand
caaagaacccaaagaagaa

SEQ ID NO: 752543 - RNA, 19 nt, Homo sapiens
  misc_RNA (1)...(19): siRNA sense strand
ggagaaagggaauguguuu

SEQ ID NO: 752544 - RNA, 19 nt, Homo sapiens
  misc_RNA (1)...(19): siRNA sense strand
gaagagaagaggaggcuaa

SEQ ID NO: 752545 - RNA, 19 nt, Homo sapiens
  misc_RNA (1)...(19): siRNA sense strand
gaaagaagggauuuacaga

SEQ ID NO: 752546 - RNA, 19 nt, Homo sapiens
  misc_RNA (1)...(19): siRNA sense strand
gaaaagcaguggugucaaa

SEQ ID NO: 752547 - RNA, 19 nt, Homo sapiens
  misc_RNA (1)...(19): siRNA sense strand
ucgagaagcucaaacagaa

SEQ ID NO: 752548 - RNA, 19 nt, Homo sapiens
  misc_RNA (1)...(19): siRNA sense strand
caagucaccugcucccaaa

SEQ ID NO: 752549 - RNA, 19 nt, Homo sapiens
  misc_RNA (1)...(19): siRNA sense strand
gcagcaggcacaccaaaua

SEQ ID NO: 752550 - RNA, 19 nt, Homo sapiens
  misc_RNA (1)...(19): siRNA sense strand
ggaaacugcuggcuugaag

SEQ ID NO: 752551 - RNA, 19 nt, Homo sapiens
  misc_RNA (1)...(19): siRNA sense strand
gaaugacgaugaugaagag

SEQ ID NO: 752552 - RNA, 19 nt, Homo sapiens
  misc_RNA (1)...(19): siRNA sense strand
caagaaagauacgagauag

SEQ ID NO: 752553 - RNA, 19 nt, Homo sapiens
  misc_RNA (1)...(19): siRNA sense strand
caagaaagaagacaaggaa

SEQ ID NO: 752554 - RNA, 19 nt, Homo sapiens
  misc_RNA (1)...(19): siRNA sense strand
gcagaagaaugcaaaauga

SEQ ID NO: 752555 - RNA, 19 nt, Homo sapiens
  misc_RNA (1)...(19): siRNA sense strand
ccaagaaagauacgagaua

SEQ ID NO: 752556 - RNA, 19 nt, Homo sapiens
  misc_RNA (1)...(19): siRNA sense strand
acaaagaacccaaagaaga

SEQ ID NO: 752557 - RNA, 19 nt, Homo sapiens
  misc_RNA (1)...(19): siRNA sense strand
gaaaagcaaucuguggaua

SEQ ID NO: 752558 - RNA, 19 nt, Homo sapiens
  misc_RNA (1)...(19): siRNA sense strand
caagaaaccauucaagugu

SEQ ID NO: 752559 - RNA, 19 nt, Homo sapiens
  misc_RNA (1)...(19): siRNA sense strand
gccagaagaugccagaaga

SEQ ID NO: 752560 - RNA, 19 nt, Homo sapiens
  misc_RNA (1)...(19): siRNA sense strand
guacgcaacaucaagagua

SEQ ID NO: 752561 - RNA, 19 nt, Homo sapiens
  misc_RNA (1)...(19): siRNA sense strand
ucccaaaccuucugacuug

SEQ ID NO: 752562 - RNA, 19 nt, Homo sapiens
  misc_RNA (1)...(19): siRNA sense strand
ggaaugacgaugaugaaga

SEQ ID NO: 752563 - RNA, 19 nt, Homo sapiens
  misc_RNA (1)...(19): siRNA sense strand
gaaagucgccaagaaagau

SEQ ID NO: 752564 - RNA, 19 nt, Homo sapiens
  misc_RNA (1)...(19): siRNA sense strand
gagaauucaugacccacaa

SEQ ID NO: 752565 - RNA, 19 nt, Homo sapiens
  misc_RNA (1)...(19): siRNA sense strand
gauagaagagcgagcagaa

SEQ ID NO: 752566 - RNA, 19 nt, Homo sapiens
  misc_RNA (1)...(19): siRNA sense strand
aagaagaaguuaagagcuu

SEQ ID NO: 752567 - RNA, 19 nt, Homo sapiens
  misc_RNA (1)...(19): siRNA sense strand
gaagaggaggcuaaaggaa

SEQ ID NO: 752568 - RNA, 19 nt, Homo sapiens
  misc_RNA (1)...(19): siRNA sense strand
cgagauagaggaaacagaa

SEQ ID NO: 752569 - RNA, 19 nt, Homo sapiens
  misc_RNA (1)...(19): siRNA sense strand
gaagguguacgcaacauca

SEQ ID NO: 752570 - RNA, 19 nt, Homo sapiens
  misc_RNA (1)...(19): siRNA sense strand
uagaagagcgagcagaauu

SEQ ID NO: 752571 - RNA, 19 nt, Homo sapiens
  misc_RNA (1)...(19): siRNA sense strand
gaguucgacccaacaauaa

SEQ ID NO: 752572 - RNA, 19 nt, Homo sapiens
  misc_RNA (1)...(19): siRNA sense strand
ccuaaagguucaucucuca

SEQ ID NO: 752573 - RNA, 19 nt, Homo sapiens
  misc_RNA (1)...(19): siRNA sense strand
ggaggaagccgaucgaaaa

SEQ ID NO: 752574 - RNA, 19 nt, Homo sapiens
  misc_RNA (1)...(19): siRNA sense strand
gaucgaaagaagggauuua

SEQ ID NO: 752575 - RNA, 19 nt, Homo sapiens
  misc_RNA (1)...(19): siRNA sense strand
gaacccaaagaagaaguua

SEQ ID NO: 752576 - RNA, 19 nt, Homo sapiens
  misc_RNA (1)...(19): siRNA sense strand
cagaaacagucaccaaguc

SEQ ID NO: 752577 - RNA, 19 nt, Homo sapiens
  misc_RNA (1)...(19): siRNA sense strand
caaaccuucugacuugaga

SEQ ID NO: 752578 - RNA, 19 nt, Homo sapiens
  misc_RNA (1)...(19): siRNA sense strand
gagaagaggaggcuaaagg

SEQ ID NO: 752579 - RNA, 19 nt, Homo sapiens
  misc_RNA (1)...(19): siRNA sense strand
ccaaagcgagggagcauug

SEQ ID NO: 752580 - RNA, 19 nt, Homo sapiens
  misc_RNA (1)...(19): siRNA sense strand
gauacgagauagaggaaac

SEQ ID NO: 752581 - RNA, 19 nt, Homo sapiens
  misc_RNA (1)...(19): siRNA sense strand
ucaaugaauggcuaacuaa

SEQ ID NO: 752582 - RNA, 19 nt, Homo sapiens
  misc_RNA (1)...(19): siRNA sense strand
gacaagaaaccauucaagu

SEQ ID NO: 752583 - RNA, 19 nt, Homo sapiens
  misc_RNA (1)...(19): siRNA sense strand
agaggaggcuaaaggaaga

SEQ ID NO: 752584 - RNA, 19 nt, Homo sapiens
  misc_RNA (1)...(19): siRNA sense strand
aagaagggauuuacagaag

SEQ ID NO: 752585 - RNA, 19 nt, Homo sapiens
  misc_RNA (1)...(19): siRNA sense strand
ccagaggaaugacgaugau

SEQ ID NO: 752586 - RNA, 19 nt, Homo sapiens
  misc_RNA (1)...(19): siRNA sense strand
cagcaggcacaccaaauaa

SEQ ID NO: 752587 - RNA, 19 nt, Homo sapiens
  misc_RNA (1)...(19): siRNA sense strand
ccaagacaaccaccacaaa

SEQ ID NO: 752588 - RNA, 19 nt, Homo sapiens
  misc_RNA (1)...(19): siRNA sense strand
ccacaaacuuaaacauacu

SEQ ID NO: 752589 - RNA, 19 nt, Homo sapiens
  misc_RNA (1)...(19): siRNA sense strand
aagaaaccauucaaguguu

SEQ ID NO: 752590 - RNA, 19 nt, Homo sapiens
  misc_RNA (1)...(19): siRNA sense strand
aaagaagggauuuacagaa

SEQ ID NO: 752591 - RNA, 19 nt, Homo sapiens
  misc_RNA (1)...(19): siRNA sense strand
gcaguauaccagugcaauu

SEQ ID NO: 752592 - RNA, 19 nt, Homo sapiens
  misc_RNA (1)...(19): siRNA sense strand
gaggaaugacgaugaugaa

SEQ ID NO: 752593 - RNA, 19 nt, Homo sapiens
  misc_RNA (1)...(19): siRNA sense strand
gcugagaaacgccagaaga

SEQ ID NO: 752594 - RNA, 19 nt, Homo sapiens
  misc_RNA (1)...(19): siRNA sense strand
ccaagcagaagaaugcaaa

SEQ ID NO: 752595 - RNA, 19 nt, Homo sapiens
  misc_RNA (1)...(19): siRNA sense strand
cagcaauagucuccaagau

SEQ ID NO: 752596 - RNA, 19 nt, Homo sapiens
  misc_RNA (1)...(19): siRNA sense strand
acaagaaaccauucaagug

SEQ ID NO: 752597 - RNA, 19 nt, Homo sapiens
  misc_RNA (1)...(19): siRNA sense strand
ucagagaggaggaagagaa

SEQ ID NO: 752598 - RNA, 19 nt, Homo sapiens
  misc_RNA (1)...(19): siRNA sense strand
aaaugaaacuaccgagaag

SEQ ID NO: 752599 - RNA, 19 nt, Homo sapiens
  misc_RNA (1)...(19): siRNA sense strand
ggaggugaaugcccagaac

SEQ ID NO: 752600 - RNA, 19 nt, Homo sapiens
  misc_RNA (1)...(19): siRNA sense strand
ggcagaagcaggaggaaga

SEQ ID NO: 752601 - RNA, 19 nt, Homo sapiens
  misc_RNA (1)...(19): siRNA sense strand
cgagggagcauuggagaaa

SEQ ID NO: 752602 - RNA, 19 nt, Homo sapiens
  misc_RNA (1)...(19): siRNA sense strand
aaacagaaacagucaccaa

SEQ ID NO: 752603 - RNA, 19 nt, Homo sapiens
  misc_RNA (1)...(19): siRNA sense strand
ucaagaguaugugggagaa

SEQ ID NO: 752604 - RNA, 19 nt, Homo sapiens
  misc_RNA (1)...(19): siRNA sense strand
uaaaggaagagauugaaag

SEQ ID NO: 752605 - RNA, 19 nt, Homo sapiens
  misc_RNA (1)...(19): siRNA sense strand
caaugaauggcuaacuaaa

SEQ ID NO: 752606 - RNA, 19 nt, Homo sapiens
  misc_RNA (1)...(19): siRNA sense strand
caaaucgacccaucaagca

SEQ ID NO: 752607 - RNA, 19 nt, Homo sapiens
  misc_RNA (1)...(19): siRNA sense strand
aaagguucaucucucaaga

SEQ ID NO: 752608 - RNA, 19 nt, Homo sapiens
  misc_RNA (1)...(19): siRNA sense strand
cagaagauggcuugucaga

SEQ ID NO: 752609 - RNA, 19 nt, Homo sapiens
  misc_RNA (1)...(19): siRNA sense strand
gagauagaggaaacagaaa

SEQ ID NO: 752610 - RNA, 19 nt, Homo sapiens
  misc_RNA (1)...(19): siRNA sense strand
caggagacguauccagcaa

SEQ ID NO: 752611 - RNA, 19 nt, Homo sapiens
  misc_RNA (1)...(19): siRNA sense strand
gcagcaauagucuccaaga

SEQ ID NO: 752612 - RNA, 19 nt, Homo sapiens
  misc_RNA (1)...(19): siRNA sense strand
agaagagcgagcagaauuu

SEQ ID NO: 752613 - RNA, 19 nt, Homo sapiens
  misc_RNA (1)...(19): siRNA sense strand
ugaaagucgccaagaaaga

SEQ ID NO: 752614 - RNA, 19 nt, Homo sapiens
  misc_RNA (1)...(19): siRNA sense strand
uuggagggaugcugaagaa

SEQ ID NO: 752615 - RNA, 19 nt, Homo sapiens
  misc_RNA (1)...(19): siRNA sense strand
gaggaaacagaaacaguca

SEQ ID NO: 752616 - RNA, 19 nt, Homo sapiens
  misc_RNA (1)...(19): siRNA sense strand
gauagaggaaacagaaaca

SEQ ID NO: 752617 - RNA, 19 nt, Homo sapiens
  misc_RNA (1)...(19): siRNA sense strand
aagugaaagucgccaagaa

SEQ ID NO: 752618 - RNA, 19 nt, Homo sapiens
  misc_RNA (1)...(19): siRNA sense strand
aaagcaaucuguggauaag

SEQ ID NO: 752619 - RNA, 19 nt, Homo sapiens
  misc_RNA (1)...(19): siRNA sense strand
aagauggcuugucagauga

SEQ ID NO: 752620 - RNA, 19 nt, Homo sapiens
  misc_RNA (1)...(19): siRNA sense strand
gaggcuaaaggaagagauu

SEQ ID NO: 752621 - RNA, 19 nt, Homo sapiens
  misc_RNA (1)...(19): siRNA sense strand
cccacaaacuuaaacauac

SEQ ID NO: 752622 - RNA, 19 nt, Homo sapiens
  misc_RNA (1)...(19): siRNA sense strand
aaacagucaccaaguccua

SEQ ID NO: 752623 - RNA, 19 nt, Homo sapiens
  misc_RNA (1)...(19): siRNA sense strand
gcagaagcaggaggaagaa

SEQ ID NO: 752624 - RNA, 19 nt, Homo sapiens
  misc_RNA (1)...(19): siRNA sense strand
cagaugacaagaaaccauu

SEQ ID NO: 752625 - RNA, 19 nt, Homo sapiens
  misc_RNA (1)...(19): siRNA sense strand
gcuaaaggaagagauugaa

SEQ ID NO: 752626 - RNA, 19 nt, Homo sapiens
  misc_RNA (1)...(19): siRNA sense strand
gacaaagaacccaaagaag

SEQ ID NO: 752627 - RNA, 19 nt, Homo sapiens
  misc_RNA (1)...(19): siRNA sense strand
aagcggaaccucugggaaa

SEQ ID NO: 752628 - RNA, 19 nt, Homo sapiens
  misc_RNA (1)...(19): siRNA sense strand
gaaaggcgaagagcagaag

SEQ ID NO: 752629 - RNA, 19 nt, Homo sapiens
  misc_RNA (1)...(19): siRNA sense strand
gcuggaggaacucaagaaa

SEQ ID NO: 752630 - RNA, 19 nt, Homo sapiens
  misc_RNA (1)...(19): siRNA sense strand
cgaaagaagggauuuacag

SEQ ID NO: 752631 - RNA, 19 nt, Homo sapiens
  misc_RNA (1)...(19): siRNA sense strand
gaaggaguucgacccaaca

SEQ ID NO: 752632 - RNA, 19 nt, Homo sapiens
  misc_RNA (1)...(19): siRNA sense strand
gaagagcgagcagaauuuu

SEQ ID NO: 752633 - RNA, 19 nt, Homo sapiens
  misc_RNA (1)...(19): siRNA sense strand
cuaaaggaagagauugaaa

SEQ ID NO: 752634 - RNA, 19 nt, Homo sapiens
  misc_RNA (1)...(19): siRNA sense strand
uucaugacccacaaacuua

SEQ ID NO: 752635 - RNA, 19 nt, Homo sapiens
  misc_RNA (1)...(19): siRNA sense strand
ccaaagaagaaguuaagag

SEQ ID NO: 752636 - RNA, 19 nt, Homo sapiens
  misc_RNA (1)...(19): siRNA sense strand
aucaaugaauggcuaacua

SEQ ID NO: 752637 - RNA, 19 nt, Homo sapiens
  misc_RNA (1)...(19): siRNA sense strand
gaagauggcuugucagaug

SEQ ID NO: 752638 - RNA, 19 nt, Homo sapiens
  misc_RNA (1)...(19): siRNA sense strand
gaaguuaagucgcagaaug

SEQ ID NO: 752639 - RNA, 19 nt, Homo sapiens
  misc_RNA (1)...(19): siRNA sense strand
ggacaaagaacccaaagaa

SEQ ID NO: 752640 - RNA, 19 nt, Homo sapiens
  misc_RNA (1)...(19): siRNA sense strand
gaagggauuuacagaaguu

SEQ ID NO: 752641 - RNA, 19 nt, Homo sapiens
  misc_RNA (1)...(19): siRNA sense strand
ggaguucgacccaacaaua

SEQ ID NO: 752642 - RNA, 19 nt, Homo sapiens
  misc_RNA (1)...(19): siRNA sense strand
caaagaacccaaagaagaa

SEQ ID NO: 752643 - RNA, 19 nt, Homo sapiens
  misc_RNA (1)...(19): siRNA sense strand
ggagaaagggaauguguuu

SEQ ID NO: 752644 - RNA, 19 nt, Homo sapiens
  misc_RNA (1)...(19): siRNA sense strand
gaagagaagaggaggcuaa

SEQ ID NO: 752645 - RNA, 19 nt, Homo sapiens
  misc_RNA (1)...(19): siRNA sense strand
gaaagaagggauuuacaga

SEQ ID NO: 752646 - RNA, 19 nt, Homo sapiens
  misc_RNA (1)...(19): siRNA sense strand
gaaaagcaguggugucaaa

SEQ ID NO: 752647 - RNA, 19 nt, Homo sapiens
  misc_RNA (1)...(19): siRNA sense strand
ucgagaagcucaaacagaa

SEQ ID NO: 752648 - RNA, 19 nt, Homo sapiens
  misc_RNA (1)...(19): siRNA sense strand
caagucaccugcucccaaa

SEQ ID NO: 752649 - RNA, 19 nt, Homo sapiens
  misc_RNA (1)...(19): siRNA sense strand
gcagcaggcacaccaaaua

SEQ ID NO: 752650 - RNA, 19 nt, Homo sapiens
  misc_RNA (1)...(19): siRNA sense strand
ggaaacugcuggcuugaag

SEQ ID NO: 752651 - RNA, 19 nt, Homo sapiens
  misc_RNA (1)...(19): siRNA sense strand
gaaugacgaugaugaagag

SEQ ID NO: 752652 - RNA, 19 nt, Homo sapiens
  misc_RNA (1)...(19): siRNA sense strand
caagaaagauacgagauag

SEQ ID NO: 752653 - RNA, 19 nt, Homo sapiens
  misc_RNA (1)...(19): siRNA sense strand
caagaaagaagacaaggaa

SEQ ID NO: 752654 - RNA, 19 nt, Homo sapiens
  misc_RNA (1)...(19): siRNA sense strand
gcagaagaaugcaaaauga

SEQ ID NO: 752655 - RNA, 19 nt, Homo sapiens
  misc_RNA (1)...(19): siRNA sense strand
ccaagaaagauacgagaua

SEQ ID NO: 752656 - RNA, 19 nt, Homo sapiens
  misc_RNA (1)...(19): siRNA sense strand
acaaagaacccaaagaaga

SEQ ID NO: 752657 - RNA, 19 nt, Homo sapiens
  misc_RNA (1)...(19): siRNA sense strand
gaaaagcaaucuguggaua

SEQ ID NO: 752658 - RNA, 19 nt, Homo sapiens
  misc_RNA (1)...(19): siRNA sense strand
caagaaaccauucaagugu

SEQ ID NO: 752659 - RNA, 19 nt, Homo sapiens
  misc_RNA (1)...(19): siRNA sense strand
gccagaagaugccagaaga

SEQ ID NO: 752660 - RNA, 19 nt, Homo sapiens
  misc_RNA (1)...(19): siRNA sense strand
guacgcaacaucaagagua

SEQ ID NO: 752661 - RNA, 19 nt, Homo sapiens
  misc_RNA (1)...(19): siRNA sense strand
ucccaaaccuucugacuug

SEQ ID NO: 752662 - RNA, 19 nt, Homo sapiens
  misc_RNA (1)...(19): siRNA sense strand
ggaaugacgaugaugaaga

SEQ ID NO: 752663 - RNA, 19 nt, Homo sapiens
  misc_RNA (1)...(19): siRNA sense strand
gaaagucgccaagaaagau

SEQ ID NO: 752664 - RNA, 19 nt, Homo sapiens
  misc_RNA (1)...(19): siRNA sense strand
gagaauucaugacccacaa

SEQ ID NO: 752665 - RNA, 19 nt, Homo sapiens
  misc_RNA (1)...(19): siRNA sense strand
gauagaagagcgagcagaa

SEQ ID NO: 752666 - RNA, 19 nt, Homo sapiens
  misc_RNA (1)...(19): siRNA sense strand
aagaagaaguuaagagcuu

SEQ ID NO: 752667 - RNA, 19 nt, Homo sapiens
  misc_RNA (1)...(19): siRNA sense strand
gaagaggaggcuaaaggaa

SEQ ID NO: 752668 - RNA, 19 nt, Homo sapiens
  misc_RNA (1)...(19): siRNA sense strand
cgagauagaggaaacagaa

SEQ ID NO: 752669 - RNA, 19 nt, Homo sapiens
  misc_RNA (1)...(19): siRNA sense strand
gaagguguacgcaacauca

SEQ ID NO: 752670 - RNA, 19 nt, Homo sapiens
  misc_RNA (1)...(19): siRNA sense strand
uagaagagcgagcagaauu

SEQ ID NO: 752671 - RNA, 19 nt, Homo sapiens
  misc_RNA (1)...(19): siRNA sense strand
gaguucgacccaacaauaa

SEQ ID NO: 752672 - RNA, 19 nt, Homo sapiens
  misc_RNA (1)...(19): siRNA sense strand
ccuaaagguucaucucuca

SEQ ID NO: 752673 - RNA, 19 nt, Homo sapiens
  misc_RNA (1)...(19): siRNA sense strand
ggaggaagccgaucgaaaa

SEQ ID NO: 752674 - RNA, 19 nt, Homo sapiens
  misc_RNA (1)...(19): siRNA sense strand
gaucgaaagaagggauuua

SEQ ID NO: 752675 - RNA, 19 nt, Homo sapiens
  misc_RNA (1)...(19): siRNA sense strand
gaacccaaagaagaaguua

SEQ ID NO: 752676 - RNA, 19 nt, Homo sapiens
  misc_RNA (1)...(19): siRNA sense strand
cagaaacagucaccaaguc

SEQ ID NO: 752677 - RNA, 19 nt, Homo sapiens
  misc_RNA (1)...(19): siRNA sense strand
caaaccuucugacuugaga

SEQ ID NO: 752678 - RNA, 19 nt, Homo sapiens
  misc_RNA (1)...(19): siRNA sense strand
gagaagaggaggcuaaagg

SEQ ID NO: 752679 - RNA, 19 nt, Homo sapiens
  misc_RNA (1)...(19): siRNA sense strand
ccaaagcgagggagcauug

SEQ ID NO: 752680 - RNA, 19 nt, Homo sapiens
  misc_RNA (1)...(19): siRNA sense strand
gauacgagauagaggaaac

SEQ ID NO: 752681 - RNA, 19 nt, Homo sapiens
  misc_RNA (1)...(19): siRNA sense strand
ucaaugaauggcuaacuaa

SEQ ID NO: 752682 - RNA, 19 nt, Homo sapiens
  misc_RNA (1)...(19): siRNA sense strand
gacaagaaaccauucaagu

SEQ ID NO: 752683 - RNA, 19 nt, Homo sapiens
  misc_RNA (1)...(19): siRNA sense strand
agaggaggcuaaaggaaga

SEQ ID NO: 752684 - RNA, 19 nt, Homo sapiens
  misc_RNA (1)...(19): siRNA sense strand
aagaagggauuuacagaag

SEQ ID NO: 752685 - RNA, 19 nt, Homo sapiens
  misc_RNA (1)...(19): siRNA sense strand
ccagaggaaugacgaugau

SEQ ID NO: 752686 - RNA, 19 nt, Homo sapiens
  misc_RNA (1)...(19): siRNA sense strand
cagcaggcacaccaaauaa

SEQ ID NO: 752687 - RNA, 19 nt, Homo sapiens
  misc_RNA (1)...(19): siRNA sense strand
ccaagacaaccaccacaaa

SEQ ID NO: 752688 - RNA, 19 nt, Homo sapiens
  misc_RNA (1)...(19): siRNA sense strand
ccacaaacuuaaacauacu

SEQ ID NO: 752689 - RNA, 19 nt, Homo sapiens
  misc_RNA (1)...(19): siRNA sense strand
aagaaaccauucaaguguu

SEQ ID NO: 752690 - RNA, 19 nt, Homo sapiens
  misc_RNA (1)...(19): siRNA sense strand
aaagaagggauuuacagaa

SEQ ID NO: 752691 - RNA, 19 nt, Homo sapiens
  misc_RNA (1)...(19): siRNA sense strand
gcaguauaccagugcaauu

SEQ ID NO: 752692 - RNA, 19 nt, Homo sapiens
  misc_RNA (1)...(19): siRNA sense strand
gaggaaugacgaugaugaa

SEQ ID NO: 752693 - RNA, 19 nt, Homo sapiens
  misc_RNA (1)...(19): siRNA sense strand
gcugagaaacgccagaaga

SEQ ID NO: 752694 - RNA, 19 nt, Homo sapiens
  misc_RNA (1)...(19): siRNA sense strand
ccaagcagaagaaugcaaa

SEQ ID NO: 752695 - RNA, 19 nt, Homo sapiens
  misc_RNA (1)...(19): siRNA sense strand
cagcaauagucuccaagau

SEQ ID NO: 752696 - RNA, 19 nt, Homo sapiens
  misc_RNA (1)...(19): siRNA sense strand
acaagaaaccauucaagug

SEQ ID NO: 752697 - RNA, 19 nt, Homo sapiens
  misc_RNA (1)...(19): siRNA sense strand
ucagagaggaggaagagaa

SEQ ID NO: 752698 - RNA, 19 nt, Homo sapiens
  misc_RNA (1)...(19): siRNA sense strand
aaaugaaacuaccgagaag

SEQ ID NO: 752699 - RNA, 19 nt, Homo sapiens
  misc_RNA (1)...(19): siRNA sense strand
ggaggugaaugcccagaac

SEQ ID NO: 752700 - RNA, 19 nt, Homo sapiens
  misc_RNA (1)...(19): siRNA sense strand
ggcagaagcaggaggaaga

SEQ ID NO: 752701 - RNA, 19 nt, Homo sapiens
  misc_RNA (1)...(19): siRNA sense strand
cgagggagcauuggagaaa

SEQ ID NO: 752702 - RNA, 19 nt, Homo sapiens
  misc_RNA (1)...(19): siRNA sense strand
aaacagaaacagucaccaa

SEQ ID NO: 752703 - RNA, 19 nt, Homo sapiens
  misc_RNA (1)...(19): siRNA sense strand
ucaagaguaugugggagaa

SEQ ID NO: 752704 - RNA, 19 nt, Homo sapiens
  misc_RNA (1)...(19): siRNA sense strand
uaaaggaagagauugaaag

SEQ ID NO: 752705 - RNA, 19 nt, Homo sapiens
  misc_RNA (1)...(19): siRNA sense strand
caaugaauggcuaacuaaa

SEQ ID NO: 752706 - RNA, 19 nt, Homo sapiens
  misc_RNA (1)...(19): siRNA sense strand
caaaucgacccaucaagca

SEQ ID NO: 752707 - RNA, 19 nt, Homo sapiens
  misc_RNA (1)...(19): siRNA sense strand
aaagguucaucucucaaga

SEQ ID NO: 752708 - RNA, 19 nt, Homo sapiens
  misc_RNA (1)...(19): siRNA sense strand
cagaagauggcuugucaga

SEQ ID NO: 752709 - RNA, 19 nt, Homo sapiens
  misc_RNA (1)...(19): siRNA sense strand
gagauagaggaaacagaaa

SEQ ID NO: 752710 - RNA, 19 nt, Homo sapiens
  misc_RNA (1)...(19): siRNA sense strand
caggagacguauccagcaa

SEQ ID NO: 752711 - RNA, 19 nt, Homo sapiens
  misc_RNA (1)...(19): siRNA sense strand
gcagcaauagucuccaaga

SEQ ID NO: 752712 - RNA, 19 nt, Homo sapiens
  misc_RNA (1)...(19): siRNA sense strand
agaagagcgagcagaauuu

SEQ ID NO: 752713 - RNA, 19 nt, Homo sapiens
  misc_RNA (1)...(19): siRNA sense strand
ugaaagucgccaagaaaga

SEQ ID NO: 752714 - RNA, 19 nt, Homo sapiens
  misc_RNA (1)...(19): siRNA sense strand
uuggagggaugcugaagaa

SEQ ID NO: 752715 - RNA, 19 nt, Homo sapiens
  misc_RNA (1)...(19): siRNA sense strand
gaggaaacagaaacaguca

SEQ ID NO: 752716 - RNA, 19 nt, Homo sapiens
  misc_RNA (1)...(19): siRNA sense strand
gauagaggaaacagaaaca

SEQ ID NO: 752717 - RNA, 19 nt, Homo sapiens
  misc_RNA (1)...(19): siRNA sense strand
aagugaaagucgccaagaa

SEQ ID NO: 752718 - RNA, 19 nt, Homo sapiens
  misc_RNA (1)...(19): siRNA sense strand
aaagcaaucuguggauaag

SEQ ID NO: 752719 - RNA, 19 nt, Homo sapiens
  misc_RNA (1)...(19): siRNA sense strand
aagauggcuugucagauga

SEQ ID NO: 752720 - RNA, 19 nt, Homo sapiens
  misc_RNA (1)...(19): siRNA sense strand
gaggcuaaaggaagagauu

SEQ ID NO: 752721 - RNA, 19 nt, Homo sapiens
  misc_RNA (1)...(19): siRNA sense strand
cccacaaacuuaaacauac

SEQ ID NO: 752722 - RNA, 19 nt, Homo sapiens
  misc_RNA (1)...(19): siRNA sense strand
aaacagucaccaaguccua

SEQ ID NO: 752723 - RNA, 19 nt, Homo sapiens
  misc_RNA (1)...(19): siRNA sense strand
gcagaagcaggaggaagaa

SEQ ID NO: 752724 - RNA, 19 nt, Homo sapiens
  misc_RNA (1)...(19): siRNA sense strand
cagaugacaagaaaccauu

SEQ ID NO: 752725 - RNA, 19 nt, Homo sapiens
  misc_RNA (1)...(19): siRNA sense strand
gcuaaaggaagagauugaa

SEQ ID NO: 752726 - RNA, 19 nt, Homo sapiens
  misc_RNA (1)...(19): siRNA sense strand
gacaaagaacccaaagaag

SEQ ID NO: 752727 - RNA, 19 nt, Homo sapiens
  misc_RNA (1)...(19): siRNA sense strand
aagcggaaccucugggaaa

SEQ ID NO: 752728 - RNA, 19 nt, Homo sapiens
  misc_RNA (1)...(19): siRNA sense strand
gaaaggcgaagagcagaag

SEQ ID NO: 752729 - RNA, 19 nt, Homo sapiens
  misc_RNA (1)...(19): siRNA sense strand
gcuggaggaacucaagaaa

SEQ ID NO: 752730 - RNA, 19 nt, Homo sapiens
  misc_RNA (1)...(19): siRNA sense strand
cgaaagaagggauuuacag

SEQ ID NO: 752731 - RNA, 19 nt, Homo sapiens
  misc_RNA (1)...(19): siRNA sense strand
gaaggaguucgacccaaca

SEQ ID NO: 752732 - RNA, 19 nt, Homo sapiens
  misc_RNA (1)...(19): siRNA sense strand
gaagagcgagcagaauuuu

SEQ ID NO: 752733 - RNA, 19 nt, Homo sapiens
  misc_RNA (1)...(19): siRNA sense strand
cuaaaggaagagauugaaa

SEQ ID NO: 752734 - RNA, 19 nt, Homo sapiens
  misc_RNA (1)...(19): siRNA sense strand
uucaugacccacaaacuua

SEQ ID NO: 752735 - RNA, 19 nt, Homo sapiens
  misc_RNA (1)...(19): siRNA sense strand
ccaaagaagaaguuaagag

SEQ ID NO: 752736 - RNA, 19 nt, Homo sapiens
  misc_RNA (1)...(19): siRNA sense strand
aucaaugaauggcuaacua

SEQ ID NO: 752737 - RNA, 19 nt, Homo sapiens
  misc_RNA (1)...(19): siRNA sense strand
gaagauggcuugucagaug

SEQ ID NO: 752738 - RNA, 19 nt, Homo sapiens
  misc_RNA (1)...(19): siRNA sense strand
gaaguuaagucgcagaaug

SEQ ID NO: 752739 - RNA, 19 nt, Homo sapiens
  misc_RNA (1)...(19): siRNA sense strand
ggacaaagaacccaaagaa

SEQ ID NO: 752740 - RNA, 19 nt, Homo sapiens
  misc_RNA (1)...(19): siRNA sense strand
gaagggauuuacagaaguu

SEQ ID NO: 752741 - RNA, 19 nt, Homo sapiens
  misc_RNA (1)...(19): siRNA sense strand
ggaguucgacccaacaaua

SEQ ID NO: 752742 - RNA, 19 nt, Homo sapiens
  misc_RNA (1)...(19): siRNA sense strand
caaagaacccaaagaagaa

SEQ ID NO: 752743 - RNA, 19 nt, Homo sapiens
  misc_RNA (1)...(19): siRNA sense strand
ggagaaagggaauguguuu

SEQ ID NO: 752744 - RNA, 19 nt, Homo sapiens
  misc_RNA (1)...(19): siRNA sense strand
gaagagaagaggaggcuaa

SEQ ID NO: 752745 - RNA, 19 nt, Homo sapiens
  misc_RNA (1)...(19): siRNA sense strand
gaaagaagggauuuacaga

SEQ ID NO: 752746 - RNA, 19 nt, Homo sapiens
  misc_RNA (1)...(19): siRNA sense strand
gaaaagcaguggugucaaa

SEQ ID NO: 752747 - RNA, 19 nt, Homo sapiens
  misc_RNA (1)...(19): siRNA sense strand
ucgagaagcucaaacagaa

SEQ ID NO: 752748 - RNA, 19 nt, Homo sapiens
  misc_RNA (1)...(19): siRNA sense strand
caagucaccugcucccaaa

SEQ ID NO: 752749 - RNA, 19 nt, Homo sapiens
  misc_RNA (1)...(19): siRNA sense strand
gcagcaggcacaccaaaua

SEQ ID NO: 752750 - RNA, 19 nt, Homo sapiens
  misc_RNA (1)...(19): siRNA sense strand
ggaaacugcuggcuugaag

SEQ ID NO: 752751 - RNA, 19 nt, Homo sapiens
  misc_RNA (1)...(19): siRNA sense strand
gaaugacgaugaugaagag

SEQ ID NO: 752752 - RNA, 19 nt, Homo sapiens
  misc_RNA (1)...(19): siRNA sense strand
caagaaagauacgagauag

SEQ ID NO: 752753 - RNA, 19 nt, Homo sapiens
  misc_RNA (1)...(19): siRNA sense strand
caagaaagaagacaaggaa

SEQ ID NO: 752754 - RNA, 19 nt, Homo sapiens
  misc_RNA (1)...(19): siRNA sense strand
gcagaagaaugcaaaauga

SEQ ID NO: 752755 - RNA, 19 nt, Homo sapiens
  misc_RNA (1)...(19): siRNA sense strand
ccaagaaagauacgagaua

SEQ ID NO: 752756 - RNA, 19 nt, Homo sapiens
  misc_RNA (1)...(19): siRNA sense strand
acaaagaacccaaagaaga

SEQ ID NO: 752757 - RNA, 19 nt, Homo sapiens
  misc_RNA (1)...(19): siRNA sense strand
gaaaagcaaucuguggaua

SEQ ID NO: 752758 - RNA, 19 nt, Homo sapiens
  misc_RNA (1)...(19): siRNA sense strand
caagaaaccauucaagugu

SEQ ID NO: 752759 - RNA, 19 nt, Homo sapiens
  misc_RNA (1)...(19): siRNA sense strand
gccagaagaugccagaaga

SEQ ID NO: 752760 - RNA, 19 nt, Homo sapiens
  misc_RNA (1)...(19): siRNA sense strand
guacgcaacaucaagagua

SEQ ID NO: 752761 - RNA, 19 nt, Homo sapiens
  misc_RNA (1)...(19): siRNA sense strand
ucccaaaccuucugacuug

SEQ ID NO: 752762 - RNA, 19 nt, Homo sapiens
  misc_RNA (1)...(19): siRNA sense strand
ggaaugacgaugaugaaga

SEQ ID NO: 752763 - RNA, 19 nt, Homo sapiens
  misc_RNA (1)...(19): siRNA sense strand
gaaagucgccaagaaagau

SEQ ID NO: 752764 - RNA, 19 nt, Homo sapiens
  misc_RNA (1)...(19): siRNA sense strand
gagaauucaugacccacaa

SEQ ID NO: 752765 - RNA, 19 nt, Homo sapiens
  misc_RNA (1)...(19): siRNA sense strand
gauagaagagcgagcagaa

SEQ ID NO: 752766 - RNA, 19 nt, Homo sapiens
  misc_RNA (1)...(19): siRNA sense strand
aagaagaaguuaagagcuu

SEQ ID NO: 752767 - RNA, 19 nt, Homo sapiens
  misc_RNA (1)...(19): siRNA sense strand
gaagaggaggcuaaaggaa

SEQ ID NO: 752768 - RNA, 19 nt, Homo sapiens
  misc_RNA (1)...(19): siRNA sense strand
cgagauagaggaaacagaa

SEQ ID NO: 752769 - RNA, 19 nt, Homo sapiens
  misc_RNA (1)...(19): siRNA sense strand
gaagguguacgcaacauca

SEQ ID NO: 752770 - RNA, 19 nt, Homo sapiens
  misc_RNA (1)...(19): siRNA sense strand
uagaagagcgagcagaauu

SEQ ID NO: 752771 - RNA, 19 nt, Homo sapiens
  misc_RNA (1)...(19): siRNA sense strand
gaguucgacccaacaauaa

SEQ ID NO: 752772 - RNA, 19 nt, Homo sapiens
  misc_RNA (1)...(19): siRNA sense strand
ccuaaagguucaucucuca

SEQ ID NO: 752773 - RNA, 19 nt, Homo sapiens
  misc_RNA (1)...(19): siRNA sense strand
ggaggaagccgaucgaaaa

SEQ ID NO: 752774 - RNA, 19 nt, Homo sapiens
  misc_RNA (1)...(19): siRNA sense strand
gaucgaaagaagggauuua

SEQ ID NO: 752775 - RNA, 19 nt, Homo sapiens
  misc_RNA (1)...(19): siRNA sense strand
gaacccaaagaagaaguua

SEQ ID NO: 752776 - RNA, 19 nt, Homo sapiens
  misc_RNA (1)...(19): siRNA sense strand
cagaaacagucaccaaguc

SEQ ID NO: 752777 - RNA, 19 nt, Homo sapiens
  misc_RNA (1)...(19): siRNA sense strand
caaaccuucugacuugaga

SEQ ID NO: 752778 - RNA, 19 nt, Homo sapiens
  misc_RNA (1)...(19): siRNA sense strand
gagaagaggaggcuaaagg

SEQ ID NO: 752779 - RNA, 19 nt, Homo sapiens
  misc_RNA (1)...(19): siRNA sense strand
ccaaagcgagggagcauug

SEQ ID NO: 752780 - RNA, 19 nt, Homo sapiens
  misc_RNA (1)...(19): siRNA sense strand
gauacgagauagaggaaac

SEQ ID NO: 752781 - RNA, 19 nt, Homo sapiens
  misc_RNA (1)...(19): siRNA sense strand
ucaaugaauggcuaacuaa

SEQ ID NO: 752782 - RNA, 19 nt, Homo sapiens
  misc_RNA (1)...(19): siRNA sense strand
gacaagaaaccauucaagu

SEQ ID NO: 752783 - RNA, 19 nt, Homo sapiens
  misc_RNA (1)...(19): siRNA sense strand
agaggaggcuaaaggaaga

SEQ ID NO: 752784 - RNA, 19 nt, Homo sapiens
  misc_RNA (1)...(19): siRNA sense strand
aagaagggauuuacagaag

SEQ ID NO: 752785 - RNA, 19 nt, Homo sapiens
  misc_RNA (1)...(19): siRNA sense strand
ccagaggaaugacgaugau

SEQ ID NO: 752786 - RNA, 19 nt, Homo sapiens
  misc_RNA (1)...(19): siRNA sense strand
cagcaggcacaccaaauaa

SEQ ID NO: 752787 - RNA, 19 nt, Homo sapiens
  misc_RNA (1)...(19): siRNA sense strand
ccaagacaaccaccacaaa

SEQ ID NO: 752788 - RNA, 19 nt, Homo sapiens
  misc_RNA (1)...(19): siRNA sense strand
ccacaaacuuaaacauacu

SEQ ID NO: 752789 - RNA, 19 nt, Homo sapiens
  misc_RNA (1)...(19): siRNA sense strand
aagaaaccauucaaguguu

SEQ ID NO: 752790 - RNA, 19 nt, Homo sapiens
  misc_RNA (1)...(19): siRNA sense strand
aaagaagggauuuacagaa

SEQ ID NO: 752791 - RNA, 19 nt, Homo sapiens
  misc_RNA (1)...(19): siRNA sense strand
gcaguauaccagugcaauu

SEQ ID NO: 752792 - RNA, 19 nt, Homo sapiens
  misc_RNA (1)...(19): siRNA sense strand
gaggaaugacgaugaugaa

SEQ ID NO: 752793 - RNA, 19 nt, Homo sapiens
  misc_RNA (1)...(19): siRNA sense strand
gcugagaaacgccagaaga

SEQ ID NO: 752794 - RNA, 19 nt, Homo sapiens
  misc_RNA (1)...(19): siRNA sense strand
ccaagcagaagaaugcaaa

SEQ ID NO: 752795 - RNA, 19 nt, Homo sapiens
  misc_RNA (1)...(19): siRNA sense strand
cagcaauagucuccaagau

SEQ ID NO: 752796 - RNA, 19 nt, Homo sapiens
  misc_RNA (1)...(19): siRNA sense strand
acaagaaaccauucaagug

SEQ ID NO: 752797 - RNA, 19 nt, Homo sapiens
  misc_RNA (1)...(19): siRNA sense strand
ucagagaggaggaagagaa

SEQ ID NO: 752798 - RNA, 19 nt, Homo sapiens
  misc_RNA (1)...(19): siRNA sense strand
aaaugaaacuaccgagaag

SEQ ID NO: 752799 - RNA, 19 nt, Homo sapiens
  misc_RNA (1)...(19): siRNA sense strand
ggaggugaaugcccagaac

SEQ ID NO: 752800 - RNA, 19 nt, Homo sapiens
  misc_RNA (1)...(19): siRNA sense strand
ggcagaagcaggaggaaga

SEQ ID NO: 752801 - RNA, 19 nt, Homo sapiens
  misc_RNA (1)...(19): siRNA sense strand
cgagggagcauuggagaaa

SEQ ID NO: 752802 - RNA, 19 nt, Homo sapiens
  misc_RNA (1)...(19): siRNA sense strand
aaacagaaacagucaccaa

SEQ ID NO: 752803 - RNA, 19 nt, Homo sapiens
  misc_RNA (1)...(19): siRNA sense strand
ucaagaguaugugggagaa

SEQ ID NO: 752804 - RNA, 19 nt, Homo sapiens
  misc_RNA (1)...(19): siRNA sense strand
uaaaggaagagauugaaag

SEQ ID NO: 752805 - RNA, 19 nt, Homo sapiens
  misc_RNA (1)...(19): siRNA sense strand
caaugaauggcuaacuaaa

SEQ ID NO: 752806 - RNA, 19 nt, Homo sapiens
  misc_RNA (1)...(19): siRNA sense strand
caaaucgacccaucaagca

SEQ ID NO: 752807 - RNA, 19 nt, Homo sapiens
  misc_RNA (1)...(19): siRNA sense strand
aaagguucaucucucaaga

SEQ ID NO: 752808 - RNA, 19 nt, Homo sapiens
  misc_RNA (1)...(19): siRNA sense strand
cagaagauggcuugucaga

SEQ ID NO: 752809 - RNA, 19 nt, Homo sapiens
  misc_RNA (1)...(19): siRNA sense strand
gagauagaggaaacagaaa

SEQ ID NO: 752810 - RNA, 19 nt, Homo sapiens
  misc_RNA (1)...(19): siRNA sense strand
caggagacguauccagcaa

SEQ ID NO: 752811 - RNA, 19 nt, Homo sapiens
  misc_RNA (1)...(19): siRNA sense strand
gcagcaauagucuccaaga

SEQ ID NO: 752812 - RNA, 19 nt, Homo sapiens
  misc_RNA (1)...(19): siRNA sense strand
agaagagcgagcagaauuu

SEQ ID NO: 752813 - RNA, 19 nt, Homo sapiens
  misc_RNA (1)...(19): siRNA sense strand
ugaaagucgccaagaaaga

SEQ ID NO: 752814 - RNA, 19 nt, Homo sapiens
  misc_RNA (1)...(19): siRNA sense strand
uuggagggaugcugaagaa

SEQ ID NO: 752815 - RNA, 19 nt, Homo sapiens
  misc_RNA (1)...(19): siRNA sense strand
gaggaaacagaaacaguca

SEQ ID NO: 752816 - RNA, 19 nt, Homo sapiens
  misc_RNA (1)...(19): siRNA sense strand
gauagaggaaacagaaaca

SEQ ID NO: 752817 - RNA, 19 nt, Homo sapiens
  misc_RNA (1)...(19): siRNA sense strand
aagugaaagucgccaagaa

SEQ ID NO: 752818 - RNA, 19 nt, Homo sapiens
  misc_RNA (1)...(19): siRNA sense strand
aaagcaaucuguggauaag

SEQ ID NO: 752819 - RNA, 19 nt, Homo sapiens
  misc_RNA (1)...(19): siRNA sense strand
aagauggcuugucagauga

SEQ ID NO: 752820 - RNA, 19 nt, Homo sapiens
  misc_RNA (1)...(19): siRNA sense strand
gaggcuaaaggaagagauu

SEQ ID NO: 752821 - RNA, 19 nt, Homo sapiens
  misc_RNA (1)...(19): siRNA sense strand
cccacaaacuuaaacauac

SEQ ID NO: 752822 - RNA, 19 nt, Homo sapiens
  misc_RNA (1)...(19): siRNA sense strand
aaacagucaccaaguccua

SEQ ID NO: 752823 - RNA, 19 nt, Homo sapiens
  misc_RNA (1)...(19): siRNA sense strand
gcagaagcaggaggaagaa

SEQ ID NO: 752824 - RNA, 19 nt, Homo sapiens
  misc_RNA (1)...(19): siRNA sense strand
cagaugacaagaaaccauu

SEQ ID NO: 752825 - RNA, 19 nt, Homo sapiens
  misc_RNA (1)...(19): siRNA sense strand
gcuaaaggaagagauugaa

SEQ ID NO: 752826 - RNA, 19 nt, Homo sapiens
  misc_RNA (1)...(19): siRNA sense strand
gacaaagaacccaaagaag

SEQ ID NO: 752827 - RNA, 19 nt, Homo sapiens
  misc_RNA (1)...(19): siRNA sense strand
aagcggaaccucugggaaa

SEQ ID NO: 752828 - RNA, 19 nt, Homo sapiens
  misc_RNA (1)...(19): siRNA sense strand
gaaaggcgaagagcagaag

SEQ ID NO: 752829 - RNA, 19 nt, Homo sapiens
  misc_RNA (1)...(19): siRNA sense strand
gcuggaggaacucaagaaa

SEQ ID NO: 752830 - RNA, 19 nt, Homo sapiens
  misc_RNA (1)...(19): siRNA sense strand
cgaaagaagggauuuacag

SEQ ID NO: 752831 - RNA, 19 nt, Homo sapiens
  misc_RNA (1)...(19): siRNA sense strand
gaaggaguucgacccaaca

SEQ ID NO: 752832 - RNA, 19 nt, Homo sapiens
  misc_RNA (1)...(19): siRNA sense strand
gaagagcgagcagaauuuu

SEQ ID NO: 752833 - RNA, 19 nt, Homo sapiens
  misc_RNA (1)...(19): siRNA sense strand
cuaaaggaagagauugaaa

SEQ ID NO: 752834 - RNA, 19 nt, Homo sapiens
  misc_RNA (1)...(19): siRNA sense strand
uucaugacccacaaacuua

SEQ ID NO: 752835 - RNA, 19 nt, Homo sapiens
  misc_RNA (1)...(19): siRNA sense strand
ccaaagaagaaguuaagag

SEQ ID NO: 752836 - RNA, 19 nt, Homo sapiens
  misc_RNA (1)...(19): siRNA sense strand
aucaaugaauggcuaacua

SEQ ID NO: 752837 - RNA, 19 nt, Homo sapiens
  misc_RNA (1)...(19): siRNA sense strand
gaagauggcuugucagaug

SEQ ID NO: 752838 - RNA, 19 nt, Homo sapiens
  misc_RNA (1)...(19): siRNA sense strand
gaaguuaagucgcagaaug

SEQ ID NO: 752839 - RNA, 19 nt, Homo sapiens
  misc_RNA (1)...(19): siRNA sense strand
ggacaaagaacccaaagaa

SEQ ID NO: 752840 - RNA, 19 nt, Homo sapiens
  misc_RNA (1)...(19): siRNA sense strand
gaagggauuuacagaaguu

SEQ ID NO: 752841 - RNA, 19 nt, Homo sapiens
  misc_RNA (1)...(19): siRNA sense strand
ggaguucgacccaacaaua

SEQ ID NO: 752842 - RNA, 19 nt, Homo sapiens
  misc_RNA (1)...(19): siRNA sense strand
caaagaacccaaagaagaa

SEQ ID NO: 752843 - RNA, 19 nt, Homo sapiens
  misc_RNA (1)...(19): siRNA sense strand
ggagaaagggaauguguuu

SEQ ID NO: 752844 - RNA, 19 nt, Homo sapiens
  misc_RNA (1)...(19): siRNA sense strand
gaagagaagaggaggcuaa

SEQ ID NO: 752845 - RNA, 19 nt, Homo sapiens
  misc_RNA (1)...(19): siRNA sense strand
gaaagaagggauuuacaga

SEQ ID NO: 752846 - RNA, 19 nt, Homo sapiens
  misc_RNA (1)...(19): siRNA sense strand
gaaaagcaguggugucaaa

SEQ ID NO: 752847 - RNA, 19 nt, Homo sapiens
  misc_RNA (1)...(19): siRNA sense strand
ucgagaagcucaaacagaa

SEQ ID NO: 752848 - RNA, 19 nt, Homo sapiens
  misc_RNA (1)...(19): siRNA sense strand
caagucaccugcucccaaa

SEQ ID NO: 752849 - RNA, 19 nt, Homo sapiens
  misc_RNA (1)...(19): siRNA sense strand
gcagcaggcacaccaaaua

SEQ ID NO: 752850 - RNA, 19 nt, Homo sapiens
  misc_RNA (1)...(19): siRNA sense strand
ggaaacugcuggcuugaag

SEQ ID NO: 752851 - RNA, 19 nt, Homo sapiens
  misc_RNA (1)...(19): siRNA sense strand
gaaugacgaugaugaagag

SEQ ID NO: 752852 - RNA, 19 nt, Homo sapiens
  misc_RNA (1)...(19): siRNA sense strand
caagaaagauacgagauag

SEQ ID NO: 752853 - RNA, 19 nt, Homo sapiens
  misc_RNA (1)...(19): siRNA sense strand
caagaaagaagacaaggaa

SEQ ID NO: 752854 - RNA, 19 nt, Homo sapiens
  misc_RNA (1)...(19): siRNA sense strand
gcagaagaaugcaaaauga

SEQ ID NO: 752855 - RNA, 19 nt, Homo sapiens
  misc_RNA (1)...(19): siRNA sense strand
ccaagaaagauacgagaua

SEQ ID NO: 752856 - RNA, 19 nt, Homo sapiens
  misc_RNA (1)...(19): siRNA sense strand
acaaagaacccaaagaaga

SEQ ID NO: 752857 - RNA, 19 nt, Homo sapiens
  misc_RNA (1)...(19): siRNA sense strand
gaaaagcaaucuguggaua

SEQ ID NO: 752858 - RNA, 19 nt, Homo sapiens
  misc_RNA (1)...(19): siRNA sense strand
caagaaaccauucaagugu

SEQ ID NO: 752859 - RNA, 19 nt, Homo sapiens
  misc_RNA (1)...(19): siRNA sense strand
gccagaagaugccagaaga

SEQ ID NO: 752860 - RNA, 19 nt, Homo sapiens
  misc_RNA (1)...(19): siRNA sense strand
guacgcaacaucaagagua

SEQ ID NO: 752861 - RNA, 19 nt, Homo sapiens
  misc_RNA (1)...(19): siRNA sense strand
ucccaaaccuucugacuug

SEQ ID NO: 752862 - RNA, 19 nt, Homo sapiens
  misc_RNA (1)...(19): siRNA sense strand
ggaaugacgaugaugaaga

SEQ ID NO: 752863 - RNA, 19 nt, Homo sapiens
  misc_RNA (1)...(19): siRNA sense strand
gaaagucgccaagaaagau

SEQ ID NO: 752864 - RNA, 19 nt, Homo sapiens
  misc_RNA (1)...(19): siRNA sense strand
gagaauucaugacccacaa

SEQ ID NO: 752865 - RNA, 19 nt, Homo sapiens
  misc_RNA (1)...(19): siRNA sense strand
gauagaagagcgagcagaa

SEQ ID NO: 752866 - RNA, 19 nt, Homo sapiens
  misc_RNA (1)...(19): siRNA sense strand
aagaagaaguuaagagcuu

SEQ ID NO: 752867 - RNA, 19 nt, Homo sapiens
  misc_RNA (1)...(19): siRNA sense strand
gaagaggaggcuaaaggaa

SEQ ID NO: 752868 - RNA, 19 nt, Homo sapiens
  misc_RNA (1)...(19): siRNA sense strand
cgagauagaggaaacagaa

SEQ ID NO: 752869 - RNA, 19 nt, Homo sapiens
  misc_RNA (1)...(19): siRNA sense strand
gaagguguacgcaacauca

SEQ ID NO: 752870 - RNA, 19 nt, Homo sapiens
  misc_RNA (1)...(19): siRNA sense strand
uagaagagcgagcagaauu

SEQ ID NO: 752871 - RNA, 19 nt, Homo sapiens
  misc_RNA (1)...(19): siRNA sense strand
gaguucgacccaacaauaa

SEQ ID NO: 752872 - RNA, 19 nt, Homo sapiens
  misc_RNA (1)...(19): siRNA sense strand
ccuaaagguucaucucuca

SEQ ID NO: 752873 - RNA, 19 nt, Homo sapiens
  misc_RNA (1)...(19): siRNA sense strand
ggaggaagccgaucgaaaa

SEQ ID NO: 752874 - RNA, 19 nt, Homo sapiens
  misc_RNA (1)...(19): siRNA sense strand
gaucgaaagaagggauuua

SEQ ID NO: 752875 - RNA, 19 nt, Homo sapiens
  misc_RNA (1)...(19): siRNA sense strand
gaacccaaagaagaaguua

SEQ ID NO: 752876 - RNA, 19 nt, Homo sapiens
  misc_RNA (1)...(19): siRNA sense strand
cagaaacagucaccaaguc

SEQ ID NO: 752877 - RNA, 19 nt, Homo sapiens
  misc_RNA (1)...(19): siRNA sense strand
caaaccuucugacuugaga

SEQ ID NO: 752878 - RNA, 19 nt, Homo sapiens
  misc_RNA (1)...(19): siRNA sense strand
gagaagaggaggcuaaagg

SEQ ID NO: 752879 - RNA, 19 nt, Homo sapiens
  misc_RNA (1)...(19): siRNA sense strand
ccaaagcgagggagcauug

SEQ ID NO: 752880 - RNA, 19 nt, Homo sapiens
  misc_RNA (1)...(19): siRNA sense strand
gauacgagauagaggaaac

SEQ ID NO: 752881 - RNA, 19 nt, Homo sapiens
  misc_RNA (1)...(19): siRNA sense strand
ucaaugaauggcuaacuaa

SEQ ID NO: 752882 - RNA, 19 nt, Homo sapiens
  misc_RNA (1)...(19): siRNA sense strand
gacaagaaaccauucaagu

SEQ ID NO: 752883 - RNA, 19 nt, Homo sapiens
  misc_RNA (1)...(19): siRNA sense strand
agaggaggcuaaaggaaga

SEQ ID NO: 752884 - RNA, 19 nt, Homo sapiens
  misc_RNA (1)...(19): siRNA sense strand
aagaagggauuuacagaag

SEQ ID NO: 752885 - RNA, 19 nt, Homo sapiens
  misc_RNA (1)...(19): siRNA sense strand
ccagaggaaugacgaugau

SEQ ID NO: 752886 - RNA, 19 nt, Homo sapiens
  misc_RNA (1)...(19): siRNA sense strand
cagcaggcacaccaaauaa

SEQ ID NO: 752887 - RNA, 19 nt, Homo sapiens
  misc_RNA (1)...(19): siRNA sense strand
ccaagacaaccaccacaaa

SEQ ID NO: 752888 - RNA, 19 nt, Homo sapiens
  misc_RNA (1)...(19): siRNA sense strand
ccacaaacuuaaacauacu

SEQ ID NO: 752889 - RNA, 19 nt, Homo sapiens
  misc_RNA (1)...(19): siRNA sense strand
aagaaaccauucaaguguu

SEQ ID NO: 752890 - RNA, 19 nt, Homo sapiens
  misc_RNA (1)...(19): siRNA sense strand
aaagaagggauuuacagaa

SEQ ID NO: 752891 - RNA, 19 nt, Homo sapiens
  misc_RNA (1)...(19): siRNA sense strand
gcaguauaccagugcaauu

SEQ ID NO: 752892 - RNA, 19 nt, Homo sapiens
  misc_RNA (1)...(19): siRNA sense strand
gaggaaugacgaugaugaa

SEQ ID NO: 752893 - RNA, 19 nt, Homo sapiens
  misc_RNA (1)...(19): siRNA sense strand
gcugagaaacgccagaaga

SEQ ID NO: 752894 - RNA, 19 nt, Homo sapiens
  misc_RNA (1)...(19): siRNA sense strand
ccaagcagaagaaugcaaa

SEQ ID NO: 752895 - RNA, 19 nt, Homo sapiens
  misc_RNA (1)...(19): siRNA sense strand
cagcaauagucuccaagau

SEQ ID NO: 752896 - RNA, 19 nt, Homo sapiens
  misc_RNA (1)...(19): siRNA sense strand
acaagaaaccauucaagug

SEQ ID NO: 752897 - RNA, 19 nt, Homo sapiens
  misc_RNA (1)...(19): siRNA sense strand
ucagagaggaggaagagaa

SEQ ID NO: 752898 - RNA, 19 nt, Homo sapiens
  misc_RNA (1)...(19): siRNA sense strand
aaaugaaacuaccgagaag

SEQ ID NO: 752899 - RNA, 19 nt, Homo sapiens
  misc_RNA (1)...(19): siRNA sense strand
ggaggugaaugcccagaac

SEQ ID NO: 752900 - RNA, 19 nt, Homo sapiens
  misc_RNA (1)...(19): siRNA sense strand
ggcagaagcaggaggaaga

SEQ ID NO: 752901 - RNA, 19 nt, Homo sapiens
  misc_RNA (1)...(19): siRNA sense strand
cgagggagcauuggagaaa

SEQ ID NO: 752902 - RNA, 19 nt, Homo sapiens
  misc_RNA (1)...(19): siRNA sense strand
aaacagaaacagucaccaa

SEQ ID NO: 752903 - RNA, 19 nt, Homo sapiens
  misc_RNA (1)...(19): siRNA sense strand
ucaagaguaugugggagaa

SEQ ID NO: 752904 - RNA, 19 nt, Homo sapiens
  misc_RNA (1)...(19): siRNA sense strand
uaaaggaagagauugaaag

SEQ ID NO: 752905 - RNA, 19 nt, Homo sapiens
  misc_RNA (1)...(19): siRNA sense strand
caaugaauggcuaacuaaa

SEQ ID NO: 752906 - RNA, 19 nt, Homo sapiens
  misc_RNA (1)...(19): siRNA sense strand
caaaucgacccaucaagca

SEQ ID NO: 752907 - RNA, 19 nt, Homo sapiens
  misc_RNA (1)...(19): siRNA sense strand
aaagguucaucucucaaga

SEQ ID NO: 752908 - RNA, 19 nt, Homo sapiens
  misc_RNA (1)...(19): siRNA sense strand
cagaagauggcuugucaga

SEQ ID NO: 752909 - RNA, 19 nt, Homo sapiens
  misc_RNA (1)...(19): siRNA sense strand
gagauagaggaaacagaaa

SEQ ID NO: 752910 - RNA, 19 nt, Homo sapiens
  misc_RNA (1)...(19): siRNA sense strand
caggagacguauccagcaa

SEQ ID NO: 752911 - RNA, 19 nt, Homo sapiens
  misc_RNA (1)...(19): siRNA sense strand
gcagcaauagucuccaaga

SEQ ID NO: 752912 - RNA, 19 nt, Homo sapiens
  misc_RNA (1)...(19): siRNA sense strand
agaagagcgagcagaauuu

SEQ ID NO: 752913 - RNA, 19 nt, Homo sapiens
  misc_RNA (1)...(19): siRNA sense strand
ugaaagucgccaagaaaga

SEQ ID NO: 752914 - RNA, 19 nt, Homo sapiens
  misc_RNA (1)...(19): siRNA sense strand
uuggagggaugcugaagaa

SEQ ID NO: 752915 - RNA, 19 nt, Homo sapiens
  misc_RNA (1)...(19): siRNA sense strand
gaggaaacagaaacaguca

SEQ ID NO: 752916 - RNA, 19 nt, Homo sapiens
  misc_RNA (1)...(19): siRNA sense strand
gauagaggaaacagaaaca

SEQ ID NO: 752917 - RNA, 19 nt, Homo sapiens
  misc_RNA (1)...(19): siRNA sense strand
aagugaaagucgccaagaa

SEQ ID NO: 752918 - RNA, 19 nt, Homo sapiens
  misc_RNA (1)...(19): siRNA sense strand
aaagcaaucuguggauaag

SEQ ID NO: 752919 - RNA, 19 nt, Homo sapiens
  misc_RNA (1)...(19): siRNA sense strand
aagauggcuugucagauga

SEQ ID NO: 752920 - RNA, 19 nt, Homo sapiens
  misc_RNA (1)...(19): siRNA sense strand
gaggcuaaaggaagagauu

SEQ ID NO: 752921 - RNA, 19 nt, Homo sapiens
  misc_RNA (1)...(19): siRNA sense strand
cccacaaacuuaaacauac

SEQ ID NO: 752922 - RNA, 19 nt, Homo sapiens
  misc_RNA (1)...(19): siRNA sense strand
aaacagucaccaaguccua

SEQ ID NO: 752923 - RNA, 19 nt, Homo sapiens
  misc_RNA (1)...(19): siRNA sense strand
gcagaagcaggaggaagaa

SEQ ID NO: 752924 - RNA, 19 nt, Homo sapiens
  misc_RNA (1)...(19): siRNA sense strand
cagaugacaagaaaccauu

SEQ ID NO: 752925 - RNA, 19 nt, Homo sapiens
  misc_RNA (1)...(19): siRNA sense strand
gcuaaaggaagagauugaa

SEQ ID NO: 752926 - RNA, 19 nt, Homo sapiens
  misc_RNA (1)...(19): siRNA sense strand
gacaaagaacccaaagaag

SEQ ID NO: 752927 - RNA, 19 nt, Homo sapiens
  misc_RNA (1)...(19): siRNA sense strand
aagcggaaccucugggaaa

SEQ ID NO: 752928 - RNA, 19 nt, Homo sapiens
  misc_RNA (1)...(19): siRNA sense strand
gaaaggcgaagagcagaag

SEQ ID NO: 752929 - RNA, 19 nt, Homo sapiens
  misc_RNA (1)...(19): siRNA sense strand
gcuggaggaacucaagaaa

SEQ ID NO: 752930 - RNA, 19 nt, Homo sapiens
  misc_RNA (1)...(19): siRNA sense strand
cgaaagaagggauuuacag

SEQ ID NO: 752931 - RNA, 19 nt, Homo sapiens
  misc_RNA (1)...(19): siRNA sense strand
gaaggaguucgacccaaca

SEQ ID NO: 752932 - RNA, 19 nt, Homo sapiens
  misc_RNA (1)...(19): siRNA sense strand
gaagagcgagcagaauuuu

SEQ ID NO: 752933 - RNA, 19 nt, Homo sapiens
  misc_RNA (1)...(19): siRNA sense strand
cuaaaggaagagauugaaa

SEQ ID NO: 752934 - RNA, 19 nt, Homo sapiens
  misc_RNA (1)...(19): siRNA sense strand
uucaugacccacaaacuua

SEQ ID NO: 752935 - RNA, 19 nt, Homo sapiens
  misc_RNA (1)...(19): siRNA sense strand
ccaaagaagaaguuaagag

SEQ ID NO: 752936 - RNA, 19 nt, Homo sapiens
  misc_RNA (1)...(19): siRNA sense strand
aucaaugaauggcuaacua

SEQ ID NO: 752937 - RNA, 19 nt, Homo sapiens
  misc_RNA (1)...(19): siRNA sense strand
gaagauggcuugucagaug

SEQ ID NO: 752938 - RNA, 19 nt, Homo sapiens
  misc_RNA (1)...(19): siRNA sense strand
gaaguuaagucgcagaaug

SEQ ID NO: 752939 - RNA, 19 nt, Homo sapiens
  misc_RNA (1)...(19): siRNA sense strand
ggacaaagaacccaaagaa

SEQ ID NO: 752940 - RNA, 19 nt, Homo sapiens
  misc_RNA (1)...(19): siRNA sense strand
gaagggauuuacagaaguu

SEQ ID NO: 752941 - RNA, 19 nt, Homo sapiens
  misc_RNA (1)...(19): siRNA sense strand
ggaguucgacccaacaaua

SEQ ID NO: 752942 - RNA, 19 nt, Homo sapiens
  misc_RNA (1)...(19): siRNA sense strand
caaagaacccaaagaagaa

SEQ ID NO: 752943 - RNA, 19 nt, Homo sapiens
  misc_RNA (1)...(19): siRNA sense strand
ggagaaagggaauguguuu

SEQ ID NO: 752944 - RNA, 19 nt, Homo sapiens
  misc_RNA (1)...(19): siRNA sense strand
gaagagaagaggaggcuaa

SEQ ID NO: 752945 - RNA, 19 nt, Homo sapiens
  misc_RNA (1)...(19): siRNA sense strand
gaaagaagggauuuacaga

SEQ ID NO: 752946 - RNA, 19 nt, Homo sapiens
  misc_RNA (1)...(19): siRNA sense strand
gaaaagcaguggugucaaa

SEQ ID NO: 752947 - RNA, 19 nt, Homo sapiens
  misc_RNA (1)...(19): siRNA sense strand
ucgagaagcucaaacagaa

SEQ ID NO: 752948 - RNA, 19 nt, Homo sapiens
  misc_RNA (1)...(19): siRNA sense strand
caagucaccugcucccaaa

SEQ ID NO: 752949 - RNA, 19 nt, Homo sapiens
  misc_RNA (1)...(19): siRNA sense strand
gcagcaggcacaccaaaua

SEQ ID NO: 752950 - RNA, 19 nt, Homo sapiens
  misc_RNA (1)...(19): siRNA sense strand
ggaaacugcuggcuugaag

SEQ ID NO: 752951 - RNA, 19 nt, Homo sapiens
  misc_RNA (1)...(19): siRNA sense strand
gaaugacgaugaugaagag

SEQ ID NO: 752952 - RNA, 19 nt, Homo sapiens
  misc_RNA (1)...(19): siRNA sense strand
caagaaagauacgagauag

SEQ ID NO: 752953 - RNA, 19 nt, Homo sapiens
  misc_RNA (1)...(19): siRNA sense strand
caagaaagaagacaaggaa

SEQ ID NO: 752954 - RNA, 19 nt, Homo sapiens
  misc_RNA (1)...(19): siRNA sense strand
gcagaagaaugcaaaauga

SEQ ID NO: 752955 - RNA, 19 nt, Homo sapiens
  misc_RNA (1)...(19): siRNA sense strand
ccaagaaagauacgagaua

SEQ ID NO: 752956 - RNA, 19 nt, Homo sapiens
  misc_RNA (1)...(19): siRNA sense strand
acaaagaacccaaagaaga

SEQ ID NO: 752957 - RNA, 19 nt, Homo sapiens
  misc_RNA (1)...(19): siRNA sense strand
gaaaagcaaucuguggaua

SEQ ID NO: 752958 - RNA, 19 nt, Homo sapiens
  misc_RNA (1)...(19): siRNA sense strand
caagaaaccauucaagugu

SEQ ID NO: 752959 - RNA, 19 nt, Homo sapiens
  misc_RNA (1)...(19): siRNA sense strand
gccagaagaugccagaaga

SEQ ID NO: 752960 - RNA, 19 nt, Homo sapiens
  misc_RNA (1)...(19): siRNA sense strand
guacgcaacaucaagagua

SEQ ID NO: 752961 - RNA, 19 nt, Homo sapiens
  misc_RNA (1)...(19): siRNA sense strand
ucccaaaccuucugacuug

SEQ ID NO: 752962 - RNA, 19 nt, Homo sapiens
  misc_RNA (1)...(19): siRNA sense strand
ggaaugacgaugaugaaga

SEQ ID NO: 752963 - RNA, 19 nt, Homo sapiens
  misc_RNA (1)...(19): siRNA sense strand
gaaagucgccaagaaagau

SEQ ID NO: 752964 - RNA, 19 nt, Homo sapiens
  misc_RNA (1)...(19): siRNA sense strand
gagaauucaugacccacaa

SEQ ID NO: 752965 - RNA, 19 nt, Homo sapiens
  misc_RNA (1)...(19): siRNA sense strand
gauagaagagcgagcagaa

SEQ ID NO: 752966 - RNA, 19 nt, Homo sapiens
  misc_RNA (1)...(19): siRNA sense strand
aagaagaaguuaagagcuu

SEQ ID NO: 752967 - RNA, 19 nt, Homo sapiens
  misc_RNA (1)...(19): siRNA sense strand
gaagaggaggcuaaaggaa

SEQ ID NO: 752968 - RNA, 19 nt, Homo sapiens
  misc_RNA (1)...(19): siRNA sense strand
cgagauagaggaaacagaa

SEQ ID NO: 752969 - RNA, 19 nt, Homo sapiens
  misc_RNA (1)...(19): siRNA sense strand
gaagguguacgcaacauca

SEQ ID NO: 752970 - RNA, 19 nt, Homo sapiens
  misc_RNA (1)...(19): siRNA sense strand
uagaagagcgagcagaauu

SEQ ID NO: 752971 - RNA, 19 nt, Homo sapiens
  misc_RNA (1)...(19): siRNA sense strand
gaguucgacccaacaauaa

SEQ ID NO: 752972 - RNA, 19 nt, Homo sapiens
  misc_RNA (1)...(19): siRNA sense strand
ccuaaagguucaucucuca

SEQ ID NO: 752973 - RNA, 19 nt, Homo sapiens
  misc_RNA (1)...(19): siRNA sense strand
ggaggaagccgaucgaaaa

SEQ ID NO: 752974 - RNA, 19 nt, Homo sapiens
  misc_RNA (1)...(19): siRNA sense strand
gaucgaaagaagggauuua

SEQ ID NO: 752975 - RNA, 19 nt, Homo sapiens
  misc_RNA (1)...(19): siRNA sense strand
gaacccaaagaagaaguua

SEQ ID NO: 752976 - RNA, 19 nt, Homo sapiens
  misc_RNA (1)...(19): siRNA sense strand
cagaaacagucaccaaguc

SEQ ID NO: 752977 - RNA, 19 nt, Homo sapiens
  misc_RNA (1)...(19): siRNA sense strand
caaaccuucugacuugaga

SEQ ID NO: 752978 - RNA, 19 nt, Homo sapiens
  misc_RNA (1)...(19): siRNA sense strand
gagaagaggaggcuaaagg

SEQ ID NO: 752979 - RNA, 19 nt, Homo sapiens
  misc_RNA (1)...(19): siRNA sense strand
ccaaagcgagggagcauug

SEQ ID NO: 752980 - RNA, 19 nt, Homo sapiens
  misc_RNA (1)...(19): siRNA sense strand
gauacgagauagaggaaac

SEQ ID NO: 752981 - RNA, 19 nt, Homo sapiens
  misc_RNA (1)...(19): siRNA sense strand
ucaaugaauggcuaacuaa

SEQ ID NO: 752982 - RNA, 19 nt, Homo sapiens
  misc_RNA (1)...(19): siRNA sense strand
gacaagaaaccauucaagu

SEQ ID NO: 752983 - RNA, 19 nt, Homo sapiens
  misc_RNA (1)...(19): siRNA sense strand
agaggaggcuaaaggaaga

SEQ ID NO: 752984 - RNA, 19 nt, Homo sapiens
  misc_RNA (1)...(19): siRNA sense strand
aagaagggauuuacagaag

SEQ ID NO: 752985 - RNA, 19 nt, Homo sapiens
  misc_RNA (1)...(19): siRNA sense strand
ccagaggaaugacgaugau

SEQ ID NO: 752986 - RNA, 19 nt, Homo sapiens
  misc_RNA (1)...(19): siRNA sense strand
cagcaggcacaccaaauaa

SEQ ID NO: 752987 - RNA, 19 nt, Homo sapiens
  misc_RNA (1)...(19): siRNA sense strand
ccaagacaaccaccacaaa

SEQ ID NO: 752988 - RNA, 19 nt, Homo sapiens
  misc_RNA (1)...(19): siRNA sense strand
ccacaaacuuaaacauacu

SEQ ID NO: 752989 - RNA, 19 nt, Homo sapiens
  misc_RNA (1)...(19): siRNA sense strand
aagaaaccauucaaguguu

SEQ ID NO: 752990 - RNA, 19 nt, Homo sapiens
  misc_RNA (1)...(19): siRNA sense strand
aaagaagggauuuacagaa

SEQ ID NO: 752991 - RNA, 19 nt, Homo sapiens
  misc_RNA (1)...(19): siRNA sense strand
gcaguauaccagugcaauu

SEQ ID NO: 752992 - RNA, 19 nt, Homo sapiens
  misc_RNA (1)...(19): siRNA sense strand
gaggaaugacgaugaugaa

SEQ ID NO: 752993 - RNA, 19 nt, Homo sapiens
  misc_RNA (1)...(19): siRNA sense strand
gcugagaaacgccagaaga

SEQ ID NO: 752994 - RNA, 19 nt, Homo sapiens
  misc_RNA (1)...(19): siRNA sense strand
ccaagcagaagaaugcaaa

SEQ ID NO: 752995 - RNA, 19 nt, Homo sapiens
  misc_RNA (1)...(19): siRNA sense strand
cagcaauagucuccaagau

SEQ ID NO: 752996 - RNA, 19 nt, Homo sapiens
  misc_RNA (1)...(19): siRNA sense strand
acaagaaaccauucaagug

SEQ ID NO: 752997 - RNA, 19 nt, Homo sapiens
  misc_RNA (1)...(19): siRNA sense strand
ucagagaggaggaagagaa

SEQ ID NO: 752998 - RNA, 19 nt, Homo sapiens
  misc_RNA (1)...(19): siRNA sense strand
aaaugaaacuaccgagaag

SEQ ID NO: 752999 - RNA, 19 nt, Homo sapiens
  misc_RNA (1)...(19): siRNA sense strand
ggaggugaaugcccagaac

SEQ ID NO: 753000 - RNA, 19 nt, Homo sapiens
  misc_RNA (1)...(19): siRNA sense strand
ggcagaagcaggaggaaga

SEQ ID NO: 753001 - RNA, 19 nt, Homo sapiens
  misc_RNA (1)...(19): siRNA sense strand
cgagggagcauuggagaaa

SEQ ID NO: 753002 - RNA, 19 nt, Homo sapiens
  misc_RNA (1)...(19): siRNA sense strand
aaacagaaacagucaccaa

SEQ ID NO: 753003 - RNA, 19 nt, Homo sapiens
  misc_RNA (1)...(19): siRNA sense strand
ucaagaguaugugggagaa

SEQ ID NO: 753004 - RNA, 19 nt, Homo sapiens
  misc_RNA (1)...(19): siRNA sense strand
uaaaggaagagauugaaag

SEQ ID NO: 753005 - RNA, 19 nt, Homo sapiens
  misc_RNA (1)...(19): siRNA sense strand
caaugaauggcuaacuaaa

SEQ ID NO: 753006 - RNA, 19 nt, Homo sapiens
  misc_RNA (1)...(19): siRNA sense strand
caaaucgacccaucaagca

SEQ ID NO: 753007 - RNA, 19 nt, Homo sapiens
  misc_RNA (1)...(19): siRNA sense strand
aaagguucaucucucaaga

SEQ ID NO: 753008 - RNA, 19 nt, Homo sapiens
  misc_RNA (1)...(19): siRNA sense strand
cagaagauggcuugucaga

SEQ ID NO: 753009 - RNA, 19 nt, Homo sapiens
  misc_RNA (1)...(19): siRNA sense strand
gagauagaggaaacagaaa

SEQ ID NO: 753010 - RNA, 19 nt, Homo sapiens
  misc_RNA (1)...(19): siRNA sense strand
caggagacguauccagcaa

SEQ ID NO: 753011 - RNA, 19 nt, Homo sapiens
  misc_RNA (1)...(19): siRNA sense strand
gcagcaauagucuccaaga

SEQ ID NO: 753012 - RNA, 19 nt, Homo sapiens
  misc_RNA (1)...(19): siRNA sense strand
agaagagcgagcagaauuu

SEQ ID NO: 753013 - RNA, 19 nt, Homo sapiens
  misc_RNA (1)...(19): siRNA sense strand
ugaaagucgccaagaaaga

SEQ ID NO: 753014 - RNA, 19 nt, Homo sapiens
  misc_RNA (1)...(19): siRNA sense strand
uuggagggaugcugaagaa

SEQ ID NO: 753015 - RNA, 19 nt, Homo sapiens
  misc_RNA (1)...(19): siRNA sense strand
gaggaaacagaaacaguca

SEQ ID NO: 753016 - RNA, 19 nt, Homo sapiens
  misc_RNA (1)...(19): siRNA sense strand
gauagaggaaacagaaaca

SEQ ID NO: 753017 - RNA, 19 nt, Homo sapiens
  misc_RNA (1)...(19): siRNA sense strand
aagugaaagucgccaagaa

SEQ ID NO: 753018 - RNA, 19 nt, Homo sapiens
  misc_RNA (1)...(19): siRNA sense strand
aaagcaaucuguggauaag

SEQ ID NO: 753019 - RNA, 19 nt, Homo sapiens
  misc_RNA (1)...(19): siRNA sense strand
aagauggcuugucagauga

SEQ ID NO: 753020 - RNA, 19 nt, Homo sapiens
  misc_RNA (1)...(19): siRNA sense strand
gaggcuaaaggaagagauu

SEQ ID NO: 753021 - RNA, 19 nt, Homo sapiens
  misc_RNA (1)...(19): siRNA sense strand
cccacaaacuuaaacauac

SEQ ID NO: 753022 - RNA, 19 nt, Homo sapiens
  misc_RNA (1)...(19): siRNA sense strand
aaacagucaccaaguccua

SEQ ID NO: 753023 - RNA, 19 nt, Homo sapiens
  misc_RNA (1)...(19): siRNA sense strand
gcagaagcaggaggaagaa

SEQ ID NO: 753024 - RNA, 19 nt, Homo sapiens
  misc_RNA (1)...(19): siRNA sense strand
cagaugacaagaaaccauu

SEQ ID NO: 753025 - RNA, 19 nt, Homo sapiens
  misc_RNA (1)...(19): siRNA sense strand
gcuaaaggaagagauugaa

SEQ ID NO: 753026 - RNA, 19 nt, Homo sapiens
  misc_RNA (1)...(19): siRNA sense strand
gacaaagaacccaaagaag

SEQ ID NO: 753027 - RNA, 19 nt, Homo sapiens
  misc_RNA (1)...(19): siRNA sense strand
aagcggaaccucugggaaa

SEQ ID NO: 753028 - RNA, 19 nt, Homo sapiens
  misc_RNA (1)...(19): siRNA sense strand
gaaaggcgaagagcagaag

SEQ ID NO: 753029 - RNA, 19 nt, Homo sapiens
  misc_RNA (1)...(19): siRNA sense strand
gcuggaggaacucaagaaa

SEQ ID NO: 753030 - RNA, 19 nt, Homo sapiens
  misc_RNA (1)...(19): siRNA sense strand
cgaaagaagggauuuacag

SEQ ID NO: 753031 - RNA, 19 nt, Homo sapiens
  misc_RNA (1)...(19): siRNA sense strand
gaaggaguucgacccaaca

SEQ ID NO: 753032 - RNA, 19 nt, Homo sapiens
  misc_RNA (1)...(19): siRNA sense strand
gaagagcgagcagaauuuu

SEQ ID NO: 753033 - RNA, 19 nt, Homo sapiens
  misc_RNA (1)...(19): siRNA sense strand
cuaaaggaagagauugaaa

SEQ ID NO: 753034 - RNA, 19 nt, Homo sapiens
  misc_RNA (1)...(19): siRNA sense strand
uucaugacccacaaacuua

SEQ ID NO: 753035 - RNA, 19 nt, Homo sapiens
  misc_RNA (1)...(19): siRNA sense strand
ccaaagaagaaguuaagag

SEQ ID NO: 753036 - RNA, 19 nt, Homo sapiens
  misc_RNA (1)...(19): siRNA sense strand
aucaaugaauggcuaacua

SEQ ID NO: 753037 - RNA, 19 nt, Homo sapiens
  misc_RNA (1)...(19): siRNA sense strand
gccaguaccucaaagauua

SEQ ID NO: 753038 - RNA, 19 nt, Homo sapiens
  misc_RNA (1)...(19): siRNA sense strand
gaccucaucucuaccauug

SEQ ID NO: 753039 - RNA, 19 nt, Homo sapiens
  misc_RNA (1)...(19): siRNA sense strand
gugcaggccucaccuaaug

SEQ ID NO: 753040 - RNA, 19 nt, Homo sapiens
  misc_RNA (1)...(19): siRNA sense strand
ccucaaagauuaccugaca

SEQ ID NO: 753041 - RNA, 19 nt, Homo sapiens
  misc_RNA (1)...(19): siRNA sense strand
gcacggagaccugccagua

SEQ ID NO: 753042 - RNA, 19 nt, Homo sapiens
  misc_RNA (1)...(19): siRNA sense strand
ggaagaugcugcagaaacg

SEQ ID NO: 753043 - RNA, 19 nt, Homo sapiens
  misc_RNA (1)...(19): siRNA sense strand
ucaaacaggcacaauauga

SEQ ID NO: 753044 - RNA, 19 nt, Homo sapiens
  misc_RNA (1)...(19): siRNA sense strand
gcaacuggcaggacaaaga

SEQ ID NO: 753045 - RNA, 19 nt, Homo sapiens
  misc_RNA (1)...(19): siRNA sense strand
ggaccugaaugccuuugau

SEQ ID NO: 753046 - RNA, 19 nt, Homo sapiens
  misc_RNA (1)...(19): siRNA sense strand
ccacagaaugucagccuuu

SEQ ID NO: 753047 - RNA, 19 nt, Homo sapiens
  misc_RNA (1)...(19): siRNA sense strand
agaaacguguggagcacua

SEQ ID NO: 753048 - RNA, 19 nt, Homo sapiens
  misc_RNA (1)...(19): siRNA sense strand
agauguguaucgccgguua

SEQ ID NO: 753049 - RNA, 19 nt, Homo sapiens
  misc_RNA (1)...(19): siRNA sense strand
uuugugagcuuccguguuc

SEQ ID NO: 753050 - RNA, 19 nt, Homo sapiens
  misc_RNA (1)...(19): siRNA sense strand
gcaggacaaagauguguau

SEQ ID NO: 753051 - RNA, 19 nt, Homo sapiens
  misc_RNA (1)...(19): siRNA sense strand
gaacugggagagcuacaca

SEQ ID NO: 753052 - RNA, 19 nt, Homo sapiens
  misc_RNA (1)...(19): siRNA sense strand
gaauauuaccaucuucuac

SEQ ID NO: 753053 - RNA, 19 nt, Homo sapiens
  misc_RNA (1)...(19): siRNA sense strand
gggcuggaguggugagcaa

SEQ ID NO: 753054 - RNA, 19 nt, Homo sapiens
  misc_RNA (1)...(19): siRNA sense strand
caucucagcaccaacaguu

SEQ ID NO: 753055 - RNA, 19 nt, Homo sapiens
  misc_RNA (1)...(19): siRNA sense strand
cacaauaugaguuugaguu

SEQ ID NO: 753056 - RNA, 19 nt, Homo sapiens
  misc_RNA (1)...(19): siRNA sense strand
ucaguugggccgacauuga

SEQ ID NO: 753057 - RNA, 19 nt, Homo sapiens
  misc_RNA (1)...(19): siRNA sense strand
caacuggcaggacaaagau

SEQ ID NO: 753058 - RNA, 19 nt, Homo sapiens
  misc_RNA (1)...(19): siRNA sense strand
gccuuuaccuggaccuugu

SEQ ID NO: 753059 - RNA, 19 nt, Homo sapiens
  misc_RNA (1)...(19): siRNA sense strand
ggucccaccucaccagucu

SEQ ID NO: 753060 - RNA, 19 nt, Homo sapiens
  misc_RNA (1)...(19): siRNA sense strand
ggaccucaucucuaccauu

SEQ ID NO: 753061 - RNA, 19 nt, Homo sapiens
  misc_RNA (1)...(19): siRNA sense strand
cacagaaugucagccuuug

SEQ ID NO: 753062 - RNA, 19 nt, Homo sapiens
  misc_RNA (1)...(19): siRNA sense strand
caaacaggcacaauaugag

SEQ ID NO: 753063 - RNA, 19 nt, Homo sapiens
  misc_RNA (1)...(19): siRNA sense strand
ccacagcaccacccaucuu

SEQ ID NO: 753064 - RNA, 19 nt, Homo sapiens
  misc_RNA (1)...(19): siRNA sense strand
ccagaauauuaccaucuuc

SEQ ID NO: 753065 - RNA, 19 nt, Homo sapiens
  misc_RNA (1)...(19): siRNA sense strand
uggagacacugcguuaugu

SEQ ID NO: 753066 - RNA, 19 nt, Homo sapiens
  misc_RNA (1)...(19): siRNA sense strand
agucaaacaggcacaauau

SEQ ID NO: 753067 - RNA, 19 nt, Homo sapiens
  misc_RNA (1)...(19): siRNA sense strand
caaugccagugggaccaua

SEQ ID NO: 753068 - RNA, 19 nt, Homo sapiens
  misc_RNA (1)...(19): siRNA sense strand
uggcagcccuggccuuuac

SEQ ID NO: 753069 - RNA, 19 nt, Homo sapiens
  misc_RNA (1)...(19): siRNA sense strand
caacaguuuccgccuagug

SEQ ID NO: 753070 - RNA, 19 nt, Homo sapiens
  misc_RNA (1)...(19): siRNA sense strand
gaccugccaguaccucaaa

SEQ ID NO: 753071 - RNA, 19 nt, Homo sapiens
  misc_RNA (1)...(19): siRNA sense strand
uagucaaacaggcacaaua

SEQ ID NO: 753072 - RNA, 19 nt, Homo sapiens
  misc_RNA (1)...(19): siRNA sense strand
accagaauauuaccaucuu

SEQ ID NO: 753073 - RNA, 19 nt, Homo sapiens
  misc_RNA (1)...(19): siRNA sense strand
ccugacugcuacaaucaug

SEQ ID NO: 753074 - RNA, 19 nt, Homo sapiens
  misc_RNA (1)...(19): siRNA sense strand
acaggcacaauaugaguuu

SEQ ID NO: 753075 - RNA, 19 nt, Homo sapiens
  misc_RNA (1)...(19): siRNA sense strand
aaacaggcacaauaugagu

SEQ ID NO: 753076 - RNA, 19 nt, Homo sapiens
  misc_RNA (1)...(19): siRNA sense strand
gaccugaaugccuuugaug

SEQ ID NO: 753077 - RNA, 19 nt, Homo sapiens
  misc_RNA (1)...(19): siRNA sense strand
ccuagugccuggccaugca

SEQ ID NO: 753078 - RNA, 19 nt, Homo sapiens
  misc_RNA (1)...(19): siRNA sense strand
accggaagaugcugcagaa

SEQ ID NO: 753079 - RNA, 19 nt, Homo sapiens
  misc_RNA (1)...(19): siRNA sense strand
ccaguaccuuccugcaucu

SEQ ID NO: 753080 - RNA, 19 nt, Homo sapiens
  misc_RNA (1)...(19): siRNA sense strand
gaugugcaggccucaccua

SEQ ID NO: 753081 - RNA, 19 nt, Homo sapiens
  misc_RNA (1)...(19): siRNA sense strand
augauuaugugcagaacug

SEQ ID NO: 753082 - RNA, 19 nt, Homo sapiens
  misc_RNA (1)...(19): siRNA sense strand
ccgcugcccugauguugag

SEQ ID NO: 753083 - RNA, 19 nt, Homo sapiens
  misc_RNA (1)...(19): siRNA sense strand
acaauaugaguuugaguuc

SEQ ID NO: 753084 - RNA, 19 nt, Homo sapiens
  misc_RNA (1)...(19): siRNA sense strand
gcucaguugggccgacauu

SEQ ID NO: 753085 - RNA, 19 nt, Homo sapiens
  misc_RNA (1)...(19): siRNA sense strand
uauccacgcuucgauucug

SEQ ID NO: 753086 - RNA, 19 nt, Homo sapiens
  misc_RNA (1)...(19): siRNA sense strand
ccgguuaucacgccagcua

SEQ ID NO: 753087 - RNA, 19 nt, Homo sapiens
  misc_RNA (1)...(19): siRNA sense strand
gcgcaacuggcaggacaaa

SEQ ID NO: 753088 - RNA, 19 nt, Homo sapiens
  misc_RNA (1)...(19): siRNA sense strand
cggaaggucugugcauggu

SEQ ID NO: 753089 - RNA, 19 nt, Homo sapiens
  misc_RNA (1)...(19): siRNA sense strand
ccugaaugccuuugaugug

SEQ ID NO: 753090 - RNA, 19 nt, Homo sapiens
  misc_RNA (1)...(19): siRNA sense strand
accaugcacucccagucua

SEQ ID NO: 753091 - RNA, 19 nt, Homo sapiens
  misc_RNA (1)...(19): siRNA sense strand
gcacccaccaugccaacca

SEQ ID NO: 753092 - RNA, 19 nt, Homo sapiens
  misc_RNA (1)...(19): siRNA sense strand
gccaguaccucaaagauua

SEQ ID NO: 753093 - RNA, 19 nt, Homo sapiens
  misc_RNA (1)...(19): siRNA sense strand
gaccucaucucuaccauug

SEQ ID NO: 753094 - RNA, 19 nt, Homo sapiens
  misc_RNA (1)...(19): siRNA sense strand
gugcaggccucaccuaaug

SEQ ID NO: 753095 - RNA, 19 nt, Homo sapiens
  misc_RNA (1)...(19): siRNA sense strand
ccucaaagauuaccugaca

SEQ ID NO: 753096 - RNA, 19 nt, Homo sapiens
  misc_RNA (1)...(19): siRNA sense strand
gcacggagaccugccagua

SEQ ID NO: 753097 - RNA, 19 nt, Homo sapiens
  misc_RNA (1)...(19): siRNA sense strand
ggaagaugcugcagaaacg

SEQ ID NO: 753098 - RNA, 19 nt, Homo sapiens
  misc_RNA (1)...(19): siRNA sense strand
ucaaacaggcacaauauga

SEQ ID NO: 753099 - RNA, 19 nt, Homo sapiens
  misc_RNA (1)...(19): siRNA sense strand
gcaacuggcaggacaaaga

SEQ ID NO: 753100 - RNA, 19 nt, Homo sapiens
  misc_RNA (1)...(19): siRNA sense strand
ggaccugaaugccuuugau

SEQ ID NO: 753101 - RNA, 19 nt, Homo sapiens
  misc_RNA (1)...(19): siRNA sense strand
ccacagaaugucagccuuu

SEQ ID NO: 753102 - RNA, 19 nt, Homo sapiens
  misc_RNA (1)...(19): siRNA sense strand
agaaacguguggagcacua

SEQ ID NO: 753103 - RNA, 19 nt, Homo sapiens
  misc_RNA (1)...(19): siRNA sense strand
agauguguaucgccgguua

SEQ ID NO: 753104 - RNA, 19 nt, Homo sapiens
  misc_RNA (1)...(19): siRNA sense strand
uuugugagcuuccguguuc

SEQ ID NO: 753105 - RNA, 19 nt, Homo sapiens
  misc_RNA (1)...(19): siRNA sense strand
gcaggacaaagauguguau

SEQ ID NO: 753106 - RNA, 19 nt, Homo sapiens
  misc_RNA (1)...(19): siRNA sense strand
gaacugggagagcuacaca

SEQ ID NO: 753107 - RNA, 19 nt, Homo sapiens
  misc_RNA (1)...(19): siRNA sense strand
gaauauuaccaucuucuac

SEQ ID NO: 753108 - RNA, 19 nt, Homo sapiens
  misc_RNA (1)...(19): siRNA sense strand
gggcuggaguggugagcaa

SEQ ID NO: 753109 - RNA, 19 nt, Homo sapiens
  misc_RNA (1)...(19): siRNA sense strand
caucucagcaccaacaguu

SEQ ID NO: 753110 - RNA, 19 nt, Homo sapiens
  misc_RNA (1)...(19): siRNA sense strand
cacaauaugaguuugaguu

SEQ ID NO: 753111 - RNA, 19 nt, Homo sapiens
  misc_RNA (1)...(19): siRNA sense strand
ucaguugggccgacauuga

SEQ ID NO: 753112 - RNA, 19 nt, Homo sapiens
  misc_RNA (1)...(19): siRNA sense strand
caacuggcaggacaaagau

SEQ ID NO: 753113 - RNA, 19 nt, Homo sapiens
  misc_RNA (1)...(19): siRNA sense strand
gccuuuaccuggaccuugu

SEQ ID NO: 753114 - RNA, 19 nt, Homo sapiens
  misc_RNA (1)...(19): siRNA sense strand
ggucccaccucaccagucu

SEQ ID NO: 753115 - RNA, 19 nt, Homo sapiens
  misc_RNA (1)...(19): siRNA sense strand
ggaccucaucucuaccauu

SEQ ID NO: 753116 - RNA, 19 nt, Homo sapiens
  misc_RNA (1)...(19): siRNA sense strand
cacagaaugucagccuuug

SEQ ID NO: 753117 - RNA, 19 nt, Homo sapiens
  misc_RNA (1)...(19): siRNA sense strand
caaacaggcacaauaugag

SEQ ID NO: 753118 - RNA, 19 nt, Homo sapiens
  misc_RNA (1)...(19): siRNA sense strand
ccacagcaccacccaucuu

SEQ ID NO: 753119 - RNA, 19 nt, Homo sapiens
  misc_RNA (1)...(19): siRNA sense strand
ccagaauauuaccaucuuc

SEQ ID NO: 753120 - RNA, 19 nt, Homo sapiens
  misc_RNA (1)...(19): siRNA sense strand
uggagacacugcguuaugu

SEQ ID NO: 753121 - RNA, 19 nt, Homo sapiens
  misc_RNA (1)...(19): siRNA sense strand
agucaaacaggcacaauau

SEQ ID NO: 753122 - RNA, 19 nt, Homo sapiens
  misc_RNA (1)...(19): siRNA sense strand
caaugccagugggaccaua

SEQ ID NO: 753123 - RNA, 19 nt, Homo sapiens
  misc_RNA (1)...(19): siRNA sense strand
uggcagcccuggccuuuac

SEQ ID NO: 753124 - RNA, 19 nt, Homo sapiens
  misc_RNA (1)...(19): siRNA sense strand
caacaguuuccgccuagug

SEQ ID NO: 753125 - RNA, 19 nt, Homo sapiens
  misc_RNA (1)...(19): siRNA sense strand
gaccugccaguaccucaaa

SEQ ID NO: 753126 - RNA, 19 nt, Homo sapiens
  misc_RNA (1)...(19): siRNA sense strand
uagucaaacaggcacaaua

SEQ ID NO: 753127 - RNA, 19 nt, Homo sapiens
  misc_RNA (1)...(19): siRNA sense strand
accagaauauuaccaucuu

SEQ ID NO: 753128 - RNA, 19 nt, Homo sapiens
  misc_RNA (1)...(19): siRNA sense strand
ccugacugcuacaaucaug

SEQ ID NO: 753129 - RNA, 19 nt, Homo sapiens
  misc_RNA (1)...(19): siRNA sense strand
acaggcacaauaugaguuu

SEQ ID NO: 753130 - RNA, 19 nt, Homo sapiens
  misc_RNA (1)...(19): siRNA sense strand
aaacaggcacaauaugagu

SEQ ID NO: 753131 - RNA, 19 nt, Homo sapiens
  misc_RNA (1)...(19): siRNA sense strand
gaccugaaugccuuugaug

SEQ ID NO: 753132 - RNA, 19 nt, Homo sapiens
  misc_RNA (1)...(19): siRNA sense strand
ccuagugccuggccaugca

SEQ ID NO: 753133 - RNA, 19 nt, Homo sapiens
  misc_RNA (1)...(19): siRNA sense strand
accggaagaugcugcagaa

SEQ ID NO: 753134 - RNA, 19 nt, Homo sapiens
  misc_RNA (1)...(19): siRNA sense strand
ccaguaccuuccugcaucu

SEQ ID NO: 753135 - RNA, 19 nt, Homo sapiens
  misc_RNA (1)...(19): siRNA sense strand
gaugugcaggccucaccua

SEQ ID NO: 753136 - RNA, 19 nt, Homo sapiens
  misc_RNA (1)...(19): siRNA sense strand
augauuaugugcagaacug

SEQ ID NO: 753137 - RNA, 19 nt, Homo sapiens
  misc_RNA (1)...(19): siRNA sense strand
ccgcugcccugauguugag

SEQ ID NO: 753138 - RNA, 19 nt, Homo sapiens
  misc_RNA (1)...(19): siRNA sense strand
acaauaugaguuugaguuc

SEQ ID NO: 753139 - RNA, 19 nt, Homo sapiens
  misc_RNA (1)...(19): siRNA sense strand
gcucaguugggccgacauu

SEQ ID NO: 753140 - RNA, 19 nt, Homo sapiens
  misc_RNA (1)...(19): siRNA sense strand
uauccacgcuucgauucug

SEQ ID NO: 753141 - RNA, 19 nt, Homo sapiens
  misc_RNA (1)...(19): siRNA sense strand
ccgguuaucacgccagcua

SEQ ID NO: 753142 - RNA, 19 nt, Homo sapiens
  misc_RNA (1)...(19): siRNA sense strand
gcgcaacuggcaggacaaa

SEQ ID NO: 753143 - RNA, 19 nt, Homo sapiens
  misc_RNA (1)...(19): siRNA sense strand
cggaaggucugugcauggu

SEQ ID NO: 753144 - RNA, 19 nt, Homo sapiens
  misc_RNA (1)...(19): siRNA sense strand
ccugaaugccuuugaugug

SEQ ID NO: 753145 - RNA, 19 nt, Homo sapiens
  misc_RNA (1)...(19): siRNA sense strand
accaugcacucccagucua

SEQ ID NO: 753146 - RNA, 19 nt, Homo sapiens
  misc_RNA (1)...(19): siRNA sense strand
gcacccaccaugccaacca

SEQ ID NO: 753147 - RNA, 19 nt, Homo sapiens
  misc_RNA (1)...(19): siRNA sense strand
gccaguaccucaaagauua

SEQ ID NO: 753148 - RNA, 19 nt, Homo sapiens
  misc_RNA (1)...(19): siRNA sense strand
gaccucaucucuaccauug

SEQ ID NO: 753149 - RNA, 19 nt, Homo sapiens
  misc_RNA (1)...(19): siRNA sense strand
gugcaggccucaccuaaug

SEQ ID NO: 753150 - RNA, 19 nt, Homo sapiens
  misc_RNA (1)...(19): siRNA sense strand
ccucaaagauuaccugaca

SEQ ID NO: 753151 - RNA, 19 nt, Homo sapiens
  misc_RNA (1)...(19): siRNA sense strand
gcacggagaccugccagua

SEQ ID NO: 753152 - RNA, 19 nt, Homo sapiens
  misc_RNA (1)...(19): siRNA sense strand
ggaagaugcugcagaaacg

SEQ ID NO: 753153 - RNA, 19 nt, Homo sapiens
  misc_RNA (1)...(19): siRNA sense strand
ucaaacaggcacaauauga

SEQ ID NO: 753154 - RNA, 19 nt, Homo sapiens
  misc_RNA (1)...(19): siRNA sense strand
gcaacuggcaggacaaaga

SEQ ID NO: 753155 - RNA, 19 nt, Homo sapiens
  misc_RNA (1)...(19): siRNA sense strand
ggaccugaaugccuuugau

SEQ ID NO: 753156 - RNA, 19 nt, Homo sapiens
  misc_RNA (1)...(19): siRNA sense strand
ccacagaaugucagccuuu

SEQ ID NO: 753157 - RNA, 19 nt, Homo sapiens
  misc_RNA (1)...(19): siRNA sense strand
agaaacguguggagcacua

SEQ ID NO: 753158 - RNA, 19 nt, Homo sapiens
  misc_RNA (1)...(19): siRNA sense strand
agauguguaucgccgguua

SEQ ID NO: 753159 - RNA, 19 nt, Homo sapiens
  misc_RNA (1)...(19): siRNA sense strand
uuugugagcuuccguguuc

SEQ ID NO: 753160 - RNA, 19 nt, Homo sapiens
  misc_RNA (1)...(19): siRNA sense strand
gcaggacaaagauguguau

SEQ ID NO: 753161 - RNA, 19 nt, Homo sapiens
  misc_RNA (1)...(19): siRNA sense strand
gaacugggagagcuacaca

SEQ ID NO: 753162 - RNA, 19 nt, Homo sapiens
  misc_RNA (1)...(19): siRNA sense strand
gaauauuaccaucuucuac

SEQ ID NO: 753163 - RNA, 19 nt, Homo sapiens
  misc_RNA (1)...(19): siRNA sense strand
gggcuggaguggugagcaa

SEQ ID NO: 753164 - RNA, 19 nt, Homo sapiens
  misc_RNA (1)...(19): siRNA sense strand
caucucagcaccaacaguu

SEQ ID NO: 753165 - RNA, 19 nt, Homo sapiens
  misc_RNA (1)...(19): siRNA sense strand
cacaauaugaguuugaguu

SEQ ID NO: 753166 - RNA, 19 nt, Homo sapiens
  misc_RNA (1)...(19): siRNA sense strand
ucaguugggccgacauuga

SEQ ID NO: 753167 - RNA, 19 nt, Homo sapiens
  misc_RNA (1)...(19): siRNA sense strand
caacuggcaggacaaagau

SEQ ID NO: 753168 - RNA, 19 nt, Homo sapiens
  misc_RNA (1)...(19): siRNA sense strand
gccuuuaccuggaccuugu

SEQ ID NO: 753169 - RNA, 19 nt, Homo sapiens
  misc_RNA (1)...(19): siRNA sense strand
ggucccaccucaccagucu

SEQ ID NO: 753170 - RNA, 19 nt, Homo sapiens
  misc_RNA (1)...(19): siRNA sense strand
ggaccucaucucuaccauu

SEQ ID NO: 753171 - RNA, 19 nt, Homo sapiens
  misc_RNA (1)...(19): siRNA sense strand
cacagaaugucagccuuug

SEQ ID NO: 753172 - RNA, 19 nt, Homo sapiens
  misc_RNA (1)...(19): siRNA sense strand
caaacaggcacaauaugag

SEQ ID NO: 753173 - RNA, 19 nt, Homo sapiens
  misc_RNA (1)...(19): siRNA sense strand
ccacagcaccacccaucuu

SEQ ID NO: 753174 - RNA, 19 nt, Homo sapiens
  misc_RNA (1)...(19): siRNA sense strand
ccagaauauuaccaucuuc

SEQ ID NO: 753175 - RNA, 19 nt, Homo sapiens
  misc_RNA (1)...(19): siRNA sense strand
uggagacacugcguuaugu

SEQ ID NO: 753176 - RNA, 19 nt, Homo sapiens
  misc_RNA (1)...(19): siRNA sense strand
agucaaacaggcacaauau

SEQ ID NO: 753177 - RNA, 19 nt, Homo sapiens
  misc_RNA (1)...(19): siRNA sense strand
caaugccagugggaccaua

SEQ ID NO: 753178 - RNA, 19 nt, Homo sapiens
  misc_RNA (1)...(19): siRNA sense strand
uggcagcccuggccuuuac

SEQ ID NO: 753179 - RNA, 19 nt, Homo sapiens
  misc_RNA (1)...(19): siRNA sense strand
caacaguuuccgccuagug

SEQ ID NO: 753180 - RNA, 19 nt, Homo sapiens
  misc_RNA (1)...(19): siRNA sense strand
gaccugccaguaccucaaa

SEQ ID NO: 753181 - RNA, 19 nt, Homo sapiens
  misc_RNA (1)...(19): siRNA sense strand
uagucaaacaggcacaaua

SEQ ID NO: 753182 - RNA, 19 nt, Homo sapiens
  misc_RNA (1)...(19): siRNA sense strand
accagaauauuaccaucuu

SEQ ID NO: 753183 - RNA, 19 nt, Homo sapiens
  misc_RNA (1)...(19): siRNA sense strand
ccugacugcuacaaucaug

SEQ ID NO: 753184 - RNA, 19 nt, Homo sapiens
  misc_RNA (1)...(19): siRNA sense strand
acaggcacaauaugaguuu

SEQ ID NO: 753185 - RNA, 19 nt, Homo sapiens
  misc_RNA (1)...(19): siRNA sense strand
aaacaggcacaauaugagu

SEQ ID NO: 753186 - RNA, 19 nt, Homo sapiens
  misc_RNA (1)...(19): siRNA sense strand
gaccugaaugccuuugaug

SEQ ID NO: 753187 - RNA, 19 nt, Homo sapiens
  misc_RNA (1)...(19): siRNA sense strand
ccuagugccuggccaugca

SEQ ID NO: 753188 - RNA, 19 nt, Homo sapiens
  misc_RNA (1)...(19): siRNA sense strand
accggaagaugcugcagaa

SEQ ID NO: 753189 - RNA, 19 nt, Homo sapiens
  misc_RNA (1)...(19): siRNA sense strand
ccaguaccuuccugcaucu

SEQ ID NO: 753190 - RNA, 19 nt, Homo sapiens
  misc_RNA (1)...(19): siRNA sense strand
gaugugcaggccucaccua

SEQ ID NO: 753191 - RNA, 19 nt, Homo sapiens
  misc_RNA (1)...(19): siRNA sense strand
augauuaugugcagaacug

SEQ ID NO: 753192 - RNA, 19 nt, Homo sapiens
  misc_RNA (1)...(19): siRNA sense strand
ccgcugcccugauguugag

SEQ ID NO: 753193 - RNA, 19 nt, Homo sapiens
  misc_RNA (1)...(19): siRNA sense strand
acaauaugaguuugaguuc

SEQ ID NO: 753194 - RNA, 19 nt, Homo sapiens
  misc_RNA (1)...(19): siRNA sense strand
gcucaguugggccgacauu

SEQ ID NO: 753195 - RNA, 19 nt, Homo sapiens
  misc_RNA (1)...(19): siRNA sense strand
uauccacgcuucgauucug

SEQ ID NO: 753196 - RNA, 19 nt, Homo sapiens
  misc_RNA (1)...(19): siRNA sense strand
ccgguuaucacgccagcua

SEQ ID NO: 753197 - RNA, 19 nt, Homo sapiens
  misc_RNA (1)...(19): siRNA sense strand
gcgcaacuggcaggacaaa

SEQ ID NO: 753198 - RNA, 19 nt, Homo sapiens
  misc_RNA (1)...(19): siRNA sense strand
cggaaggucugugcauggu

SEQ ID NO: 753199 - RNA, 19 nt, Homo sapiens
  misc_RNA (1)...(19): siRNA sense strand
ccugaaugccuuugaugug

SEQ ID NO: 753200 - RNA, 19 nt, Homo sapiens
  misc_RNA (1)...(19): siRNA sense strand
accaugcacucccagucua

SEQ ID NO: 753201 - RNA, 19 nt, Homo sapiens
  misc_RNA (1)...(19): siRNA sense strand
gcacccaccaugccaacca

SEQ ID NO: 753202 - RNA, 19 nt, Homo sapiens
  misc_RNA (1)...(19): siRNA sense strand
gccaguaccucaaagauua

SEQ ID NO: 753203 - RNA, 19 nt, Homo sapiens
  misc_RNA (1)...(19): siRNA sense strand
gaccucaucucuaccauug

SEQ ID NO: 753204 - RNA, 19 nt, Homo sapiens
  misc_RNA (1)...(19): siRNA sense strand
gugcaggccucaccuaaug

SEQ ID NO: 753205 - RNA, 19 nt, Homo sapiens
  misc_RNA (1)...(19): siRNA sense strand
ccucaaagauuaccugaca

SEQ ID NO: 753206 - RNA, 19 nt, Homo sapiens
  misc_RNA (1)...(19): siRNA sense strand
gcacggagaccugccagua

SEQ ID NO: 753207 - RNA, 19 nt, Homo sapiens
  misc_RNA (1)...(19): siRNA sense strand
ggaagaugcugcagaaacg

SEQ ID NO: 753208 - RNA, 19 nt, Homo sapiens
  misc_RNA (1)...(19): siRNA sense strand
ucaaacaggcacaauauga

SEQ ID NO: 753209 - RNA, 19 nt, Homo sapiens
  misc_RNA (1)...(19): siRNA sense strand
gcaacuggcaggacaaaga

SEQ ID NO: 753210 - RNA, 19 nt, Homo sapiens
  misc_RNA (1)...(19): siRNA sense strand
ggaccugaaugccuuugau

SEQ ID NO: 753211 - RNA, 19 nt, Homo sapiens
  misc_RNA (1)...(19): siRNA sense strand
ccacagaaugucagccuuu

SEQ ID NO: 753212 - RNA, 19 nt, Homo sapiens
  misc_RNA (1)...(19): siRNA sense strand
agaaacguguggagcacua

SEQ ID NO: 753213 - RNA, 19 nt, Homo sapiens
  misc_RNA (1)...(19): siRNA sense strand
agauguguaucgccgguua

SEQ ID NO: 753214 - RNA, 19 nt, Homo sapiens
  misc_RNA (1)...(19): siRNA sense strand
uuugugagcuuccguguuc

SEQ ID NO: 753215 - RNA, 19 nt, Homo sapiens
  misc_RNA (1)...(19): siRNA sense strand
gcaggacaaagauguguau

SEQ ID NO: 753216 - RNA, 19 nt, Homo sapiens
  misc_RNA (1)...(19): siRNA sense strand
gaacugggagagcuacaca

SEQ ID NO: 753217 - RNA, 19 nt, Homo sapiens
  misc_RNA (1)...(19): siRNA sense strand
gaauauuaccaucuucuac

SEQ ID NO: 753218 - RNA, 19 nt, Homo sapiens
  misc_RNA (1)...(19): siRNA sense strand
gggcuggaguggugagcaa

SEQ ID NO: 753219 - RNA, 19 nt, Homo sapiens
  misc_RNA (1)...(19): siRNA sense strand
caucucagcaccaacaguu

SEQ ID NO: 753220 - RNA, 19 nt, Homo sapiens
  misc_RNA (1)...(19): siRNA sense strand
cacaauaugaguuugaguu

SEQ ID NO: 753221 - RNA, 19 nt, Homo sapiens
  misc_RNA (1)...(19): siRNA sense strand
ucaguugggccgacauuga

SEQ ID NO: 753222 - RNA, 19 nt, Homo sapiens
  misc_RNA (1)...(19): siRNA sense strand
caacuggcaggacaaagau

SEQ ID NO: 753223 - RNA, 19 nt, Homo sapiens
  misc_RNA (1)...(19): siRNA sense strand
gccuuuaccuggaccuugu

SEQ ID NO: 753224 - RNA, 19 nt, Homo sapiens
  misc_RNA (1)...(19): siRNA sense strand
ggucccaccucaccagucu

SEQ ID NO: 753225 - RNA, 19 nt, Homo sapiens
  misc_RNA (1)...(19): siRNA sense strand
ggaccucaucucuaccauu

SEQ ID NO: 753226 - RNA, 19 nt, Homo sapiens
  misc_RNA (1)...(19): siRNA sense strand
cacagaaugucagccuuug

SEQ ID NO: 753227 - RNA, 19 nt, Homo sapiens
  misc_RNA (1)...(19): siRNA sense strand
caaacaggcacaauaugag

SEQ ID NO: 753228 - RNA, 19 nt, Homo sapiens
  misc_RNA (1)...(19): siRNA sense strand
ccacagcaccacccaucuu

SEQ ID NO: 753229 - RNA, 19 nt, Homo sapiens
  misc_RNA (1)...(19): siRNA sense strand
ccagaauauuaccaucuuc

SEQ ID NO: 753230 - RNA, 19 nt, Homo sapiens
  misc_RNA (1)...(19): siRNA sense strand
uggagacacugcguuaugu

SEQ ID NO: 753231 - RNA, 19 nt, Homo sapiens
  misc_RNA (1)...(19): siRNA sense strand
agucaaacaggcacaauau

SEQ ID NO: 753232 - RNA, 19 nt, Homo sapiens
  misc_RNA (1)...(19): siRNA sense strand
caaugccagugggaccaua

SEQ ID NO: 753233 - RNA, 19 nt, Homo sapiens
  misc_RNA (1)...(19): siRNA sense strand
uggcagcccuggccuuuac

SEQ ID NO: 753234 - RNA, 19 nt, Homo sapiens
  misc_RNA (1)...(19): siRNA sense strand
caacaguuuccgccuagug

SEQ ID NO: 753235 - RNA, 19 nt, Homo sapiens
  misc_RNA (1)...(19): siRNA sense strand
gaccugccaguaccucaaa

SEQ ID NO: 753236 - RNA, 19 nt, Homo sapiens
  misc_RNA (1)...(19): siRNA sense strand
uagucaaacaggcacaaua

SEQ ID NO: 753237 - RNA, 19 nt, Homo sapiens
  misc_RNA (1)...(19): siRNA sense strand
accagaauauuaccaucuu

SEQ ID NO: 753238 - RNA, 19 nt, Homo sapiens
  misc_RNA (1)...(19): siRNA sense strand
ccugacugcuacaaucaug

SEQ ID NO: 753239 - RNA, 19 nt, Homo sapiens
  misc_RNA (1)...(19): siRNA sense strand
acaggcacaauaugaguuu

SEQ ID NO: 753240 - RNA, 19 nt, Homo sapiens
  misc_RNA (1)...(19): siRNA sense strand
aaacaggcacaauaugagu

SEQ ID NO: 753241 - RNA, 19 nt, Homo sapiens
  misc_RNA (1)...(19): siRNA sense strand
gaccugaaugccuuugaug

SEQ ID NO: 753242 - RNA, 19 nt, Homo sapiens
  misc_RNA (1)...(19): siRNA sense strand
ccuagugccuggccaugca

SEQ ID NO: 753243 - RNA, 19 nt, Homo sapiens
  misc_RNA (1)...(19): siRNA sense strand
accggaagaugcugcagaa

SEQ ID NO: 753244 - RNA, 19 nt, Homo sapiens
  misc_RNA (1)...(19): siRNA sense strand
ccaguaccuuccugcaucu

SEQ ID NO: 753245 - RNA, 19 nt, Homo sapiens
  misc_RNA (1)...(19): siRNA sense strand
gaugugcaggccucaccua

SEQ ID NO: 753246 - RNA, 19 nt, Homo sapiens
  misc_RNA (1)...(19): siRNA sense strand
augauuaugugcagaacug

SEQ ID NO: 753247 - RNA, 19 nt, Homo sapiens
  misc_RNA (1)...(19): siRNA sense strand
ccgcugcccugauguugag

SEQ ID NO: 753248 - RNA, 19 nt, Homo sapiens
  misc_RNA (1)...(19): siRNA sense strand
acaauaugaguuugaguuc

SEQ ID NO: 753249 - RNA, 19 nt, Homo sapiens
  misc_RNA (1)...(19): siRNA sense strand
gcucaguugggccgacauu

SEQ ID NO: 753250 - RNA, 19 nt, Homo sapiens
  misc_RNA (1)...(19): siRNA sense strand
uauccacgcuucgauucug

SEQ ID NO: 753251 - RNA, 19 nt, Homo sapiens
  misc_RNA (1)...(19): siRNA sense strand
ccgguuaucacgccagcua

SEQ ID NO: 753252 - RNA, 19 nt, Homo sapiens
  misc_RNA (1)...(19): siRNA sense strand
gcgcaacuggcaggacaaa

SEQ ID NO: 753253 - RNA, 19 nt, Homo sapiens
  misc_RNA (1)...(19): siRNA sense strand
cggaaggucugugcauggu

SEQ ID NO: 753254 - RNA, 19 nt, Homo sapiens
  misc_RNA (1)...(19): siRNA sense strand
ccugaaugccuuugaugug

SEQ ID NO: 753255 - RNA, 19 nt, Homo sapiens
  misc_RNA (1)...(19): siRNA sense strand
accaugcacucccagucua

SEQ ID NO: 753256 - RNA, 19 nt, Homo sapiens
  misc_RNA (1)...(19): siRNA sense strand
gcacccaccaugccaacca

SEQ ID NO: 753257 - RNA, 19 nt, Homo sapiens
  misc_RNA (1)...(19): siRNA sense strand
ucaaggacaugaagaucaa

SEQ ID NO: 753258 - RNA, 19 nt, Homo sapiens
  misc_RNA (1)...(19): siRNA sense strand
gcaccagguucaaggcauu

SEQ ID NO: 753259 - RNA, 19 nt, Homo sapiens
  misc_RNA (1)...(19): siRNA sense strand
gggccucucucaaggauga

SEQ ID NO: 753260 - RNA, 19 nt, Homo sapiens
  misc_RNA (1)...(19): siRNA sense strand
gaugagguuuugaagauua

SEQ ID NO: 753261 - RNA, 19 nt, Homo sapiens
  misc_RNA (1)...(19): siRNA sense strand
ucaagucccuggaggagau

SEQ ID NO: 753262 - RNA, 19 nt, Homo sapiens
  misc_RNA (1)...(19): siRNA sense strand
gagacuguauucaccaagu

SEQ ID NO: 753263 - RNA, 19 nt, Homo sapiens
  misc_RNA (1)...(19): siRNA sense strand
ggaugcccgucaccaaguu

SEQ ID NO: 753264 - RNA, 19 nt, Homo sapiens
  misc_RNA (1)...(19): siRNA sense strand
ucaaggcauuuguugcuau

SEQ ID NO: 753265 - RNA, 19 nt, Homo sapiens
  misc_RNA (1)...(19): siRNA sense strand
uaaggaaucagagaucauu

SEQ ID NO: 753266 - RNA, 19 nt, Homo sapiens
  misc_RNA (1)...(19): siRNA sense strand
cagcuguggcuacaacaua

SEQ ID NO: 753267 - RNA, 19 nt, Homo sapiens
  misc_RNA (1)...(19): siRNA sense strand
ggaaggagacuguauucac

SEQ ID NO: 753268 - RNA, 19 nt, Homo sapiens
  misc_RNA (1)...(19): siRNA sense strand
caaggcauuuguugcuauc

SEQ ID NO: 753269 - RNA, 19 nt, Homo sapiens
  misc_RNA (1)...(19): siRNA sense strand
ccacgucggucuggguguu

SEQ ID NO: 753270 - RNA, 19 nt, Homo sapiens
  misc_RNA (1)...(19): siRNA sense strand
ucaccaagucucccuauca

SEQ ID NO: 753271 - RNA, 19 nt, Homo sapiens
  misc_RNA (1)...(19): siRNA sense strand
uuucuaagaccuacagcua

SEQ ID NO: 753272 - RNA, 19 nt, Homo sapiens
  misc_RNA (1)...(19): siRNA sense strand
caccaagucucccuaucag

SEQ ID NO: 753273 - RNA, 19 nt, Homo sapiens
  misc_RNA (1)...(19): siRNA sense strand
cugcggcucugugcuggua

SEQ ID NO: 753274 - RNA, 19 nt, Homo sapiens
  misc_RNA (1)...(19): siRNA sense strand
gucaaggacaugaagauca

SEQ ID NO: 753275 - RNA, 19 nt, Homo sapiens
  misc_RNA (1)...(19): siRNA sense strand
ggaugagguuuugaagauu

SEQ ID NO: 753276 - RNA, 19 nt, Homo sapiens
  misc_RNA (1)...(19): siRNA sense strand
uggccaagcucuccaucgu

SEQ ID NO: 753277 - RNA, 19 nt, Homo sapiens
  misc_RNA (1)...(19): siRNA sense strand
ggucaaggacaugaagauc

SEQ ID NO: 753278 - RNA, 19 nt, Homo sapiens
  misc_RNA (1)...(19): siRNA sense strand
cgauguagcugaacucauu

SEQ ID NO: 753279 - RNA, 19 nt, Homo sapiens
  misc_RNA (1)...(19): siRNA sense strand
cuucaaaggucuccuguuu

SEQ ID NO: 753280 - RNA, 19 nt, Homo sapiens
  misc_RNA (1)...(19): siRNA sense strand
ucagaucucuccagaagaa

SEQ ID NO: 753281 - RNA, 19 nt, Homo sapiens
  misc_RNA (1)...(19): siRNA sense strand
uagcugaacucauuuacaa

SEQ ID NO: 753282 - RNA, 19 nt, Homo sapiens
  misc_RNA (1)...(19): siRNA sense strand
caagaaugcugauccuguu

SEQ ID NO: 753283 - RNA, 19 nt, Homo sapiens
  misc_RNA (1)...(19): siRNA sense strand
ugagauggguggccacuuu

SEQ ID NO: 753284 - RNA, 19 nt, Homo sapiens
  misc_RNA (1)...(19): siRNA sense strand
agccaaaucuuccaugaua

SEQ ID NO: 753285 - RNA, 19 nt, Homo sapiens
  misc_RNA (1)...(19): siRNA sense strand
cagaagaaaugcacagaau

SEQ ID NO: 753286 - RNA, 19 nt, Homo sapiens
  misc_RNA (1)...(19): siRNA sense strand
caucagaucucuccagaag

SEQ ID NO: 753287 - RNA, 19 nt, Homo sapiens
  misc_RNA (1)...(19): siRNA sense strand
cauaagaacucgaccuauc

SEQ ID NO: 753288 - RNA, 19 nt, Homo sapiens
  misc_RNA (1)...(19): siRNA sense strand
guaaacauggacaaucuua

SEQ ID NO: 753289 - RNA, 19 nt, Homo sapiens
  misc_RNA (1)...(19): siRNA sense strand
gggaugagaacaacuuuaa

SEQ ID NO: 753290 - RNA, 19 nt, Homo sapiens
  misc_RNA (1)...(19): siRNA sense strand
caagauagccacccuguuc

SEQ ID NO: 753291 - RNA, 19 nt, Homo sapiens
  misc_RNA (1)...(19): siRNA sense strand
gaaaauggccuacaguuug

SEQ ID NO: 753292 - RNA, 19 nt, Homo sapiens
  misc_RNA (1)...(19): siRNA sense strand
gaagaaaugcacagaaucu

SEQ ID NO: 753293 - RNA, 19 nt, Homo sapiens
  misc_RNA (1)...(19): siRNA sense strand
ucaacgagcccaauaaaug

SEQ ID NO: 753294 - RNA, 19 nt, Homo sapiens
  misc_RNA (1)...(19): siRNA sense strand
gcauacauccuuuccagaa

SEQ ID NO: 753295 - RNA, 19 nt, Homo sapiens
  misc_RNA (1)...(19): siRNA sense strand
gacaguaacuacccaccuu

SEQ ID NO: 753296 - RNA, 19 nt, Homo sapiens
  misc_RNA (1)...(19): siRNA sense strand
cagcaccacucacaaggaa

SEQ ID NO: 753297 - RNA, 19 nt, Homo sapiens
  misc_RNA (1)...(19): siRNA sense strand
caacgagcccaauaaaugu

SEQ ID NO: 753298 - RNA, 19 nt, Homo sapiens
  misc_RNA (1)...(19): siRNA sense strand
ccagaacaguggcuucaau

SEQ ID NO: 753299 - RNA, 19 nt, Homo sapiens
  misc_RNA (1)...(19): siRNA sense strand
uuuauugacuccuaccaua

SEQ ID NO: 753300 - RNA, 19 nt, Homo sapiens
  misc_RNA (1)...(19): siRNA sense strand
gcaccacucacaaggaauu

SEQ ID NO: 753301 - RNA, 19 nt, Homo sapiens
  misc_RNA (1)...(19): siRNA sense strand
ccuaacaguugccaggaaa

SEQ ID NO: 753302 - RNA, 19 nt, Homo sapiens
  misc_RNA (1)...(19): siRNA sense strand
gaaaacagacagcgacauu

SEQ ID NO: 753303 - RNA, 19 nt, Homo sapiens
  misc_RNA (1)...(19): siRNA sense strand
ccacgaagaagguauuuua

SEQ ID NO: 753304 - RNA, 19 nt, Homo sapiens
  misc_RNA (1)...(19): siRNA sense strand
aaaggucuccuguuuguau

SEQ ID NO: 753305 - RNA, 19 nt, Homo sapiens
  misc_RNA (1)...(19): siRNA sense strand
gcugaacucauuuacaaga

SEQ ID NO: 753306 - RNA, 19 nt, Homo sapiens
  misc_RNA (1)...(19): siRNA sense strand
ggaaaauggccuacaguuu

SEQ ID NO: 753307 - RNA, 19 nt, Homo sapiens
  misc_RNA (1)...(19): siRNA sense strand
uaucaacgagcccaauaaa

SEQ ID NO: 753308 - RNA, 19 nt, Homo sapiens
  misc_RNA (1)...(19): siRNA sense strand
gguauaugcccagggauuu

SEQ ID NO: 753309 - RNA, 19 nt, Homo sapiens
  misc_RNA (1)...(19): siRNA sense strand
gaugagaacaacuuuaagg

SEQ ID NO: 753310 - RNA, 19 nt, Homo sapiens
  misc_RNA (1)...(19): siRNA sense strand
uaacuacccaccuuucugu

SEQ ID NO: 753311 - RNA, 19 nt, Homo sapiens
  misc_RNA (1)...(19): siRNA sense strand
gccaaaucuuccaugauau

SEQ ID NO: 753312 - RNA, 19 nt, Homo sapiens
  misc_RNA (1)...(19): siRNA sense strand
uuuacuggcuaugucauua

SEQ ID NO: 753313 - RNA, 19 nt, Homo sapiens
  misc_RNA (1)...(19): siRNA sense strand
uaacucgcccuacuucuuc

SEQ ID NO: 753314 - RNA, 19 nt, Homo sapiens
  misc_RNA (1)...(19): siRNA sense strand
ccacucacaaggaauuuga

SEQ ID NO: 753315 - RNA, 19 nt, Homo sapiens
  misc_RNA (1)...(19): siRNA sense strand
guggaggacuuuauugacu

SEQ ID NO: 753316 - RNA, 19 nt, Homo sapiens
  misc_RNA (1)...(19): siRNA sense strand
ccauaaccuuacccucaaa

SEQ ID NO: 753317 - RNA, 19 nt, Homo sapiens
  misc_RNA (1)...(19): siRNA sense strand
cuucaccuuuggcaacaua

SEQ ID NO: 753318 - RNA, 19 nt, Homo sapiens
  misc_RNA (1)...(19): siRNA sense strand
agccaaguaugucaugaaa

SEQ ID NO: 753319 - RNA, 19 nt, Homo sapiens
  misc_RNA (1)...(19): siRNA sense strand
caucguggaggacuuuauu

SEQ ID NO: 753320 - RNA, 19 nt, Homo sapiens
  misc_RNA (1)...(19): siRNA sense strand
agagccaaaucuuccauga

SEQ ID NO: 753321 - RNA, 19 nt, Homo sapiens
  misc_RNA (1)...(19): siRNA sense strand
cgaccuaucaacccacauu

SEQ ID NO: 753322 - RNA, 19 nt, Homo sapiens
  misc_RNA (1)...(19): siRNA sense strand
uggcuucaaucacuggaaa

SEQ ID NO: 753323 - RNA, 19 nt, Homo sapiens
  misc_RNA (1)...(19): siRNA sense strand
gagcaagagagccaaaucu

SEQ ID NO: 753324 - RNA, 19 nt, Homo sapiens
  misc_RNA (1)...(19): siRNA sense strand
ccaaaucuuccaugauauc

SEQ ID NO: 753325 - RNA, 19 nt, Homo sapiens
  misc_RNA (1)...(19): siRNA sense strand
gaacaguggcuucaaucac

SEQ ID NO: 753326 - RNA, 19 nt, Homo sapiens
  misc_RNA (1)...(19): siRNA sense strand
cgaagaagguauuuuacug

SEQ ID NO: 753327 - RNA, 19 nt, Homo sapiens
  misc_RNA (1)...(19): siRNA sense strand
guauaacucgcccuacuuc

SEQ ID NO: 753328 - RNA, 19 nt, Homo sapiens
  misc_RNA (1)...(19): siRNA sense strand
gugggacugugucuucgaa

SEQ ID NO: 753329 - RNA, 19 nt, Homo sapiens
  misc_RNA (1)...(19): siRNA sense strand
ccagaagaaaugcacagaa

SEQ ID NO: 753330 - RNA, 19 nt, Homo sapiens
  misc_RNA (1)...(19): siRNA sense strand
ggucuccuguuuguauguu

SEQ ID NO: 753331 - RNA, 19 nt, Homo sapiens
  misc_RNA (1)...(19): siRNA sense strand
gaucucuccagaagaaaug

SEQ ID NO: 753332 - RNA, 19 nt, Homo sapiens
  misc_RNA (1)...(19): siRNA sense strand
agaccucacuccacacaag

SEQ ID NO: 753333 - RNA, 19 nt, Homo sapiens
  misc_RNA (1)...(19): siRNA sense strand
cgcaguaaaugguauaugc

SEQ ID NO: 753334 - RNA, 19 nt, Homo sapiens
  misc_RNA (1)...(19): siRNA sense strand
ccaaguaugucaugaaaac

SEQ ID NO: 753335 - RNA, 19 nt, Homo sapiens
  misc_RNA (1)...(19): siRNA sense strand
ggagcaagagagccaaauc

SEQ ID NO: 753336 - RNA, 19 nt, Homo sapiens
  misc_RNA (1)...(19): siRNA sense strand
uaagaacucgaccuaucaa

SEQ ID NO: 753337 - RNA, 19 nt, Homo sapiens
  misc_RNA (1)...(19): siRNA sense strand
gggacugugucuucgaaag

SEQ ID NO: 753338 - RNA, 19 nt, Homo sapiens
  misc_RNA (1)...(19): siRNA sense strand
aaacagacagcgacauuuu

SEQ ID NO: 753339 - RNA, 19 nt, Homo sapiens
  misc_RNA (1)...(19): siRNA sense strand
caacccacauucuuuugaa

SEQ ID NO: 753340 - RNA, 19 nt, Homo sapiens
  misc_RNA (1)...(19): siRNA sense strand
cgggauguccgcaguaaau

SEQ ID NO: 753341 - RNA, 19 nt, Homo sapiens
  misc_RNA (1)...(19): siRNA sense strand
guguagguaucgccgaguu

SEQ ID NO: 753342 - RNA, 19 nt, Homo sapiens
  misc_RNA (1)...(19): siRNA sense strand
auacauccuuuccagaaca

SEQ ID NO: 753343 - RNA, 19 nt, Homo sapiens
  misc_RNA (1)...(19): siRNA sense strand
gggacuggcuacaucuuuu

SEQ ID NO: 753344 - RNA, 19 nt, Homo sapiens
  misc_RNA (1)...(19): siRNA sense strand
cuaucaacccacauucuuu

SEQ ID NO: 753345 - RNA, 19 nt, Homo sapiens
  misc_RNA (1)...(19): siRNA sense strand
guagguaucgccgaguuau

SEQ ID NO: 753346 - RNA, 19 nt, Homo sapiens
  misc_RNA (1)...(19): siRNA sense strand
guaacuacccaccuuucug

SEQ ID NO: 753347 - RNA, 19 nt, Homo sapiens
  misc_RNA (1)...(19): siRNA sense strand
gaaugcugauccuguucuc

SEQ ID NO: 753348 - RNA, 19 nt, Homo sapiens
  misc_RNA (1)...(19): siRNA sense strand
cgaaagcugggcauacauc

SEQ ID NO: 753349 - RNA, 19 nt, Homo sapiens
  misc_RNA (1)...(19): siRNA sense strand
gauccuguucucaaucaga

SEQ ID NO: 753350 - RNA, 19 nt, Homo sapiens
  misc_RNA (1)...(19): siRNA sense strand
accauaaccuuacccucaa

SEQ ID NO: 753351 - RNA, 19 nt, Homo sapiens
  misc_RNA (1)...(19): siRNA sense strand
caagaccucacuccacaca

SEQ ID NO: 753352 - RNA, 19 nt, Homo sapiens
  misc_RNA (1)...(19): siRNA sense strand
gauguagcugaacucauuu

SEQ ID NO: 753353 - RNA, 19 nt, Homo sapiens
  misc_RNA (1)...(19): siRNA sense strand
gggcaagaaugcugauccu

SEQ ID NO: 753354 - RNA, 19 nt, Homo sapiens
  misc_RNA (1)...(19): siRNA sense strand
auaagaacucgaccuauca

SEQ ID NO: 753355 - RNA, 19 nt, Homo sapiens
  misc_RNA (1)...(19): siRNA sense strand
ccuaucaacccacauucuu

SEQ ID NO: 753356 - RNA, 19 nt, Homo sapiens
  misc_RNA (1)...(19): siRNA sense strand
gagccaaaucuuccaugau

SEQ ID NO: 753357 - RNA, 19 nt, Homo sapiens
  misc_RNA (1)...(19): siRNA sense strand
gcccaauaaaugugagaaa

SEQ ID NO: 753358 - RNA, 19 nt, Homo sapiens
  misc_RNA (1)...(19): siRNA sense strand
aaaauggccuacaguuugu

SEQ ID NO: 753359 - RNA, 19 nt, Homo sapiens
  misc_RNA (1)...(19): siRNA sense strand
aacauaagaacucgaccua

SEQ ID NO: 753360 - RNA, 19 nt, Homo sapiens
  misc_RNA (1)...(19): siRNA sense strand
ggauuuguacccagacagu

SEQ ID NO: 753361 - RNA, 19 nt, Homo sapiens
  misc_RNA (1)...(19): siRNA sense strand
guauaugcccagggauuug

SEQ ID NO: 753362 - RNA, 19 nt, Homo sapiens
  misc_RNA (1)...(19): siRNA sense strand
caaaucuuccaugauauca

SEQ ID NO: 753363 - RNA, 19 nt, Homo sapiens
  misc_RNA (1)...(19): siRNA sense strand
caucagcaccacucacaag

SEQ ID NO: 753364 - RNA, 19 nt, Homo sapiens
  misc_RNA (1)...(19): siRNA sense strand
aaaccauucagccaccuaa

SEQ ID NO: 753365 - RNA, 19 nt, Homo sapiens
  misc_RNA (1)...(19): siRNA sense strand
ucaccuugaagacguauau

SEQ ID NO: 753366 - RNA, 19 nt, Homo sapiens
  misc_RNA (1)...(19): siRNA sense strand
gauuuguacccagacagua

SEQ ID NO: 753367 - RNA, 19 nt, Homo sapiens
  misc_RNA (1)...(19): siRNA sense strand
uuacuggcuaugucauuaa

SEQ ID NO: 753368 - RNA, 19 nt, Homo sapiens
  misc_RNA (1)...(19): siRNA sense strand
aaagccaaguaugucauga

SEQ ID NO: 753369 - RNA, 19 nt, Homo sapiens
  misc_RNA (1)...(19): siRNA sense strand
uaucaucguggaggacuuu

SEQ ID NO: 753370 - RNA, 19 nt, Homo sapiens
  misc_RNA (1)...(19): siRNA sense strand
uacacuggcuccaaaccau

SEQ ID NO: 753371 - RNA, 19 nt, Homo sapiens
  misc_RNA (1)...(19): siRNA sense strand
uaugugggacugugucuuc

SEQ ID NO: 753372 - RNA, 19 nt, Homo sapiens
  misc_RNA (1)...(19): siRNA sense strand
gaaucuggaaugacauguc

SEQ ID NO: 753373 - RNA, 19 nt, Homo sapiens
  misc_RNA (1)...(19): siRNA sense strand
cuuaucaacgagcccaaua

SEQ ID NO: 753374 - RNA, 19 nt, Homo sapiens
  misc_RNA (1)...(19): siRNA sense strand
cauacauccuuuccagaac

SEQ ID NO: 753375 - RNA, 19 nt, Homo sapiens
  misc_RNA (1)...(19): siRNA sense strand
ggacugugucuucgaaagc

SEQ ID NO: 753376 - RNA, 19 nt, Homo sapiens
  misc_RNA (1)...(19): siRNA sense strand
aagcaagaaacaucucaga

SEQ ID NO: 753377 - RNA, 19 nt, Homo sapiens
  misc_RNA (1)...(19): siRNA sense strand
cagaacaguggcuucaauc

SEQ ID NO: 753378 - RNA, 19 nt, Homo sapiens
  misc_RNA (1)...(19): siRNA sense strand
gcaacuaacucuaauaaca

SEQ ID NO: 753379 - RNA, 19 nt, Homo sapiens
  misc_RNA (1)...(19): siRNA sense strand
caacaggaauacuuagaua

SEQ ID NO: 753380 - RNA, 19 nt, Homo sapiens
  misc_RNA (1)...(19): siRNA sense strand
gcaacauacuguccacaua

SEQ ID NO: 753381 - RNA, 19 nt, Homo sapiens
  misc_RNA (1)...(19): siRNA sense strand
gaagaaagcagacaauauc

SEQ ID NO: 753382 - RNA, 19 nt, Homo sapiens
  misc_RNA (1)...(19): siRNA sense strand
aaauacagccaccuaauua

SEQ ID NO: 753383 - RNA, 19 nt, Homo sapiens
  misc_RNA (1)...(19): siRNA sense strand
aggcagagcuggauucaaa

SEQ ID NO: 753384 - RNA, 19 nt, Homo sapiens
  misc_RNA (1)...(19): siRNA sense strand
gaacuggguugcaacauac

SEQ ID NO: 753385 - RNA, 19 nt, Homo sapiens
  misc_RNA (1)...(19): siRNA sense strand
ugaacuggguugcaacaua

SEQ ID NO: 753386 - RNA, 19 nt, Homo sapiens
  misc_RNA (1)...(19): siRNA sense strand
ggaagaaagcagacaauau

SEQ ID NO: 753387 - RNA, 19 nt, Homo sapiens
  misc_RNA (1)...(19): siRNA sense strand
gcacuuggaagauguauau

SEQ ID NO: 753388 - RNA, 19 nt, Homo sapiens
  misc_RNA (1)...(19): siRNA sense strand
gagaagacacugcugcuuu

SEQ ID NO: 753389 - RNA, 19 nt, Homo sapiens
  misc_RNA (1)...(19): siRNA sense strand
gaaagcagacaauaucaug

SEQ ID NO: 753390 - RNA, 19 nt, Homo sapiens
  misc_RNA (1)...(19): siRNA sense strand
ccaaugaguuuguguucaa

SEQ ID NO: 753391 - RNA, 19 nt, Homo sapiens
  misc_RNA (1)...(19): siRNA sense strand
aaacagcaacuaacucuaa

SEQ ID NO: 753392 - RNA, 19 nt, Homo sapiens
  misc_RNA (1)...(19): siRNA sense strand
gaaagucuagcaccuggua

SEQ ID NO: 753393 - RNA, 19 nt, Homo sapiens
  misc_RNA (1)...(19): siRNA sense strand
gaaagaaacagucccucaa

SEQ ID NO: 753394 - RNA, 19 nt, Homo sapiens
  misc_RNA (1)...(19): siRNA sense strand
cuaauuaccucucaucagu

SEQ ID NO: 753395 - RNA, 19 nt, Homo sapiens
  misc_RNA (1)...(19): siRNA sense strand
uuguugggcuuaaguauua

SEQ ID NO: 753396 - RNA, 19 nt, Homo sapiens
  misc_RNA (1)...(19): siRNA sense strand
gcaaagaugaccuggaaug

SEQ ID NO: 753397 - RNA, 19 nt, Homo sapiens
  misc_RNA (1)...(19): siRNA sense strand
uaaauacagccaccuaauu

SEQ ID NO: 753398 - RNA, 19 nt, Homo sapiens
  misc_RNA (1)...(19): siRNA sense strand
gcagguaucgccaccguaa

SEQ ID NO: 753399 - RNA, 19 nt, Homo sapiens
  misc_RNA (1)...(19): siRNA sense strand
gauaugcacccaaucgaaa

SEQ ID NO: 753400 - RNA, 19 nt, Homo sapiens
  misc_RNA (1)...(19): siRNA sense strand
cuuggaagauguauaugua

SEQ ID NO: 753401 - RNA, 19 nt, Homo sapiens
  misc_RNA (1)...(19): siRNA sense strand
cagcaacuaacucuaauaa

SEQ ID NO: 753402 - RNA, 19 nt, Homo sapiens
  misc_RNA (1)...(19): siRNA sense strand
caacauacuguccacauau

SEQ ID NO: 753403 - RNA, 19 nt, Homo sapiens
  misc_RNA (1)...(19): siRNA sense strand
ugcagagccuggacaaaua

SEQ ID NO: 753404 - RNA, 19 nt, Homo sapiens
  misc_RNA (1)...(19): siRNA sense strand
ggaguacuuucucuagugu

SEQ ID NO: 753405 - RNA, 19 nt, Homo sapiens
  misc_RNA (1)...(19): siRNA sense strand
agaagacacugcugcuuug

SEQ ID NO: 753406 - RNA, 19 nt, Homo sapiens
  misc_RNA (1)...(19): siRNA sense strand
uuacaggccuggagaauac

SEQ ID NO: 753407 - RNA, 19 nt, Homo sapiens
  misc_RNA (1)...(19): siRNA sense strand
guugagaauugauccugua

SEQ ID NO: 753408 - RNA, 19 nt, Homo sapiens
  misc_RNA (1)...(19): siRNA sense strand
acaaauagaagcuagaaga

SEQ ID NO: 753409 - RNA, 19 nt, Homo sapiens
  misc_RNA (1)...(19): siRNA sense strand
guuccgcacucaucuuauu

SEQ ID NO: 753410 - RNA, 19 nt, Homo sapiens
  misc_RNA (1)...(19): siRNA sense strand
uugcaaagaugaccuggaa

SEQ ID NO: 753411 - RNA, 19 nt, Homo sapiens
  misc_RNA (1)...(19): siRNA sense strand
acaaagauagcaaguggua

SEQ ID NO: 753412 - RNA, 19 nt, Homo sapiens
  misc_RNA (1)...(19): siRNA sense strand
ggacaaauagaagcuagaa

SEQ ID NO: 753413 - RNA, 19 nt, Homo sapiens
  misc_RNA (1)...(19): siRNA sense strand
cggaacauuuggaaagaaa

SEQ ID NO: 753414 - RNA, 19 nt, Homo sapiens
  misc_RNA (1)...(19): siRNA sense strand
gcgaggauaugcacccaau

SEQ ID NO: 753415 - RNA, 19 nt, Homo sapiens
  misc_RNA (1)...(19): siRNA sense strand
cuaaauggcuaccuucaac

SEQ ID NO: 753416 - RNA, 19 nt, Homo sapiens
  misc_RNA (1)...(19): siRNA sense strand
gaagagcuauucggcaaac

SEQ ID NO: 753417 - RNA, 19 nt, Homo sapiens
  misc_RNA (1)...(19): siRNA sense strand
cuauuucacugguuaccua

SEQ ID NO: 753418 - RNA, 19 nt, Homo sapiens
  misc_RNA (1)...(19): siRNA sense strand
uaagcuaaauggcuaccuu

SEQ ID NO: 753419 - RNA, 19 nt, Homo sapiens
  misc_RNA (1)...(19): siRNA sense strand
agagcuggauucaaagaaa

SEQ ID NO: 753420 - RNA, 19 nt, Homo sapiens
  misc_RNA (1)...(19): siRNA sense strand
aaagaaacagucccucaaa

SEQ ID NO: 753421 - RNA, 19 nt, Homo sapiens
  misc_RNA (1)...(19): siRNA sense strand
cauccaaauucuuaccauu

SEQ ID NO: 753422 - RNA, 19 nt, Homo sapiens
  misc_RNA (1)...(19): siRNA sense strand
guaaauacagccaccuaau

SEQ ID NO: 753423 - RNA, 19 nt, Homo sapiens
  misc_RNA (1)...(19): siRNA sense strand
gaacauuuggaaagaaaca

SEQ ID NO: 753424 - RNA, 19 nt, Homo sapiens
  misc_RNA (1)...(19): siRNA sense strand
aggaauacuuagauacgua

SEQ ID NO: 753425 - RNA, 19 nt, Homo sapiens
  misc_RNA (1)...(19): siRNA sense strand
gaggauuucggucaacaaa

SEQ ID NO: 753426 - RNA, 19 nt, Homo sapiens
  misc_RNA (1)...(19): siRNA sense strand
gaaacaaagauagcaagug

SEQ ID NO: 753427 - RNA, 19 nt, Homo sapiens
  misc_RNA (1)...(19): siRNA sense strand
ggauaugcacccaaucgaa

SEQ ID NO: 753428 - RNA, 19 nt, Homo sapiens
  misc_RNA (1)...(19): siRNA sense strand
agacacugcugcuuugcaa

SEQ ID NO: 753429 - RNA, 19 nt, Homo sapiens
  misc_RNA (1)...(19): siRNA sense strand
gugcaauacuggaagaaag

SEQ ID NO: 753430 - RNA, 19 nt, Homo sapiens
  misc_RNA (1)...(19): siRNA sense strand
gcaccugguauucaaauca

SEQ ID NO: 753431 - RNA, 19 nt, Homo sapiens
  misc_RNA (1)...(19): siRNA sense strand
ccagaccucuacccaagug

SEQ ID NO: 753432 - RNA, 19 nt, Homo sapiens
  misc_RNA (1)...(19): siRNA sense strand
gcagagcuggauucaaaga

SEQ ID NO: 753433 - RNA, 19 nt, Homo sapiens
  misc_RNA (1)...(19): siRNA sense strand
ggcaugaacuggguugcaa

SEQ ID NO: 753434 - RNA, 19 nt, Homo sapiens
  misc_RNA (1)...(19): siRNA sense strand
gguauucaaaucacaagaa

SEQ ID NO: 753435 - RNA, 19 nt, Homo sapiens
  misc_RNA (1)...(19): siRNA sense strand
gagcuauucggcaaacuug

SEQ ID NO: 753436 - RNA, 19 nt, Homo sapiens
  misc_RNA (1)...(19): siRNA sense strand
ccaauggaaguauuuacaa

SEQ ID NO: 753437 - RNA, 19 nt, Homo sapiens
  misc_RNA (1)...(19): siRNA sense strand
ucuagcaccugguauucaa

SEQ ID NO: 753438 - RNA, 19 nt, Homo sapiens
  misc_RNA (1)...(19): siRNA sense strand
aacauacuguccacauauu

SEQ ID NO: 753439 - RNA, 19 nt, Homo sapiens
  misc_RNA (1)...(19): siRNA sense strand
guuacaggccuggagaaua

SEQ ID NO: 753440 - RNA, 19 nt, Homo sapiens
  misc_RNA (1)...(19): siRNA sense strand
uggaaccauuuacaacaaa

SEQ ID NO: 753441 - RNA, 19 nt, Homo sapiens
  misc_RNA (1)...(19): siRNA sense strand
aagaaaacccugugacaua

SEQ ID NO: 753442 - RNA, 19 nt, Homo sapiens
  misc_RNA (1)...(19): siRNA sense strand
aguacuuucucuaguguuu

SEQ ID NO: 753443 - RNA, 19 nt, Homo sapiens
  misc_RNA (1)...(19): siRNA sense strand
uggaguacuuucucuagug

SEQ ID NO: 753444 - RNA, 19 nt, Homo sapiens
  misc_RNA (1)...(19): siRNA sense strand
guuauccugucuucuguuc

SEQ ID NO: 753445 - RNA, 19 nt, Homo sapiens
  misc_RNA (1)...(19): siRNA sense strand
gcuaaauggcuaccuucaa

SEQ ID NO: 753446 - RNA, 19 nt, Homo sapiens
  misc_RNA (1)...(19): siRNA sense strand
gagcuggauucaaagaaaa

SEQ ID NO: 753447 - RNA, 19 nt, Homo sapiens
  misc_RNA (1)...(19): siRNA sense strand
gcagagccuggacaaauag

SEQ ID NO: 753448 - RNA, 19 nt, Homo sapiens
  misc_RNA (1)...(19): siRNA sense strand
ucccagacauaacuauuuc

SEQ ID NO: 753449 - RNA, 19 nt, Homo sapiens
  misc_RNA (1)...(19): siRNA sense strand
aaagauagcaagugguaca

SEQ ID NO: 753450 - RNA, 19 nt, Homo sapiens
  misc_RNA (1)...(19): siRNA sense strand
ucaaacagcaacuaacucu

SEQ ID NO: 753451 - RNA, 19 nt, Homo sapiens
  misc_RNA (1)...(19): siRNA sense strand
cuggaaccauuuacaacaa

SEQ ID NO: 753452 - RNA, 19 nt, Homo sapiens
  misc_RNA (1)...(19): siRNA sense strand
ccagccuagugaacugaua

SEQ ID NO: 753453 - RNA, 19 nt, Homo sapiens
  misc_RNA (1)...(19): siRNA sense strand
caaauagaagcuagaagag

SEQ ID NO: 753454 - RNA, 19 nt, Homo sapiens
  misc_RNA (1)...(19): siRNA sense strand
cauaacuauuucacugguu

SEQ ID NO: 753455 - RNA, 19 nt, Homo sapiens
  misc_RNA (1)...(19): siRNA sense strand
caacuaacucuaauaacac

SEQ ID NO: 753456 - RNA, 19 nt, Homo sapiens
  misc_RNA (1)...(19): siRNA sense strand
gcguuauccugucuucugu

SEQ ID NO: 753457 - RNA, 19 nt, Homo sapiens
  misc_RNA (1)...(19): siRNA sense strand
uggaagaaagcagacaaua

SEQ ID NO: 753458 - RNA, 19 nt, Homo sapiens
  misc_RNA (1)...(19): siRNA sense strand
ggagaagacacugcugcuu

SEQ ID NO: 753459 - RNA, 19 nt, Homo sapiens
  misc_RNA (1)...(19): siRNA sense strand
aauuaccucucaucaguuc

SEQ ID NO: 753460 - RNA, 19 nt, Homo sapiens
  misc_RNA (1)...(19): siRNA sense strand
gaguuuguguucaaucacu

SEQ ID NO: 753461 - RNA, 19 nt, Homo sapiens
  misc_RNA (1)...(19): siRNA sense strand
cccaaucgaaacaaagaua

SEQ ID NO: 753462 - RNA, 19 nt, Homo sapiens
  misc_RNA (1)...(19): siRNA sense strand
caaacagcaacuaacucua

SEQ ID NO: 753463 - RNA, 19 nt, Homo sapiens
  misc_RNA (1)...(19): siRNA sense strand
uggcgagucucuuauucga

SEQ ID NO: 753464 - RNA, 19 nt, Homo sapiens
  misc_RNA (1)...(19): siRNA sense strand
uauccugucuucuguucug

SEQ ID NO: 753465 - RNA, 19 nt, Homo sapiens
  misc_RNA (1)...(19): siRNA sense strand
aaacacuaaugggcaugaa

SEQ ID NO: 753466 - RNA, 19 nt, Homo sapiens
  misc_RNA (1)...(19): siRNA sense strand
gccaauggaaguauuuaca

SEQ ID NO: 753467 - RNA, 19 nt, Homo sapiens
  misc_RNA (1)...(19): siRNA sense strand
ggccuggagaauacacuua

SEQ ID NO: 753468 - RNA, 19 nt, Homo sapiens
  misc_RNA (1)...(19): siRNA sense strand
ggccucaaacagcaacuaa

SEQ ID NO: 753469 - RNA, 19 nt, Homo sapiens
  misc_RNA (1)...(19): siRNA sense strand
ggaaccauuuacaacaaaa

SEQ ID NO: 753470 - RNA, 19 nt, Homo sapiens
  misc_RNA (1)...(19): siRNA sense strand
caaugaguuuguguucaau

SEQ ID NO: 753471 - RNA, 19 nt, Homo sapiens
  misc_RNA (1)...(19): siRNA sense strand
caucuuauuggaguacuuu

SEQ ID NO: 753472 - RNA, 19 nt, Homo sapiens
  misc_RNA (1)...(19): siRNA sense strand
aagaaacagucccucaaac

SEQ ID NO: 753473 - RNA, 19 nt, Homo sapiens
  misc_RNA (1)...(19): siRNA sense strand
gaggauaugcacccaaucg

SEQ ID NO: 753474 - RNA, 19 nt, Homo sapiens
  misc_RNA (1)...(19): siRNA sense strand
uuucacugguuaccuaaug

SEQ ID NO: 753475 - RNA, 19 nt, Homo sapiens
  misc_RNA (1)...(19): siRNA sense strand
cagccuagugaacugauaa

SEQ ID NO: 753476 - RNA, 19 nt, Homo sapiens
  misc_RNA (1)...(19): siRNA sense strand
cugcagagccuggacaaau

SEQ ID NO: 753477 - RNA, 19 nt, Homo sapiens
  misc_RNA (1)...(19): siRNA sense strand
ucaacaggaauacuuagau

SEQ ID NO: 753478 - RNA, 19 nt, Homo sapiens
  misc_RNA (1)...(19): siRNA sense strand
acacagcgcugcagaaugc

SEQ ID NO: 753479 - RNA, 19 nt, Homo sapiens
  misc_RNA (1)...(19): siRNA sense strand
ggaagcugaucgccaagag

SEQ ID NO: 753480 - RNA, 19 nt, Homo sapiens
  misc_RNA (1)...(19): siRNA sense strand
gagacgggccucuacaucu

SEQ ID NO: 753481 - RNA, 19 nt, Homo sapiens
  misc_RNA (1)...(19): siRNA sense strand
ggcaaggacugcgucuuca

SEQ ID NO: 753482 - RNA, 19 nt, Homo sapiens
  misc_RNA (1)...(19): siRNA sense strand
agacgggccucuacaucug

SEQ ID NO: 753483 - RNA, 19 nt, Homo sapiens
  misc_RNA (1)...(19): siRNA sense strand
gagacggacaccuuuggaa

SEQ ID NO: 753484 - RNA, 19 nt, Homo sapiens
  misc_RNA (1)...(19): siRNA sense strand
ggagacggacaccuuugga

SEQ ID NO: 753485 - RNA, 19 nt, Homo sapiens
  misc_RNA (1)...(19): siRNA sense strand
ccaaguacgagggcuggua

SEQ ID NO: 753486 - RNA, 19 nt, Homo sapiens
  misc_RNA (1)...(19): siRNA sense strand
acaucugcaugaacaagaa

SEQ ID NO: 753487 - RNA, 19 nt, Homo sapiens
  misc_RNA (1)...(19): siRNA sense strand
cuacacagcgcugcagaau

SEQ ID NO: 753488 - RNA, 19 nt, Homo sapiens
  misc_RNA (1)...(19): siRNA sense strand
cgugagguccacuucauga

SEQ ID NO: 753489 - RNA, 19 nt, Homo sapiens
  misc_RNA (1)...(19): siRNA sense strand
ggaccuaccaacucuacag

SEQ ID NO: 753490 - RNA, 19 nt, Homo sapiens
  misc_RNA (1)...(19): siRNA sense strand
cggagauugugcuggagaa

SEQ ID NO: 753491 - RNA, 19 nt, Homo sapiens
  misc_RNA (1)...(19): siRNA sense strand
gagccugcgcuucgaguuc

SEQ ID NO: 753492 - RNA, 19 nt, Homo sapiens
  misc_RNA (1)...(19): siRNA sense strand
gcugcagaaugccaaguac

SEQ ID NO: 753493 - RNA, 19 nt, Homo sapiens
  misc_RNA (1)...(19): siRNA sense strand
ugagcugccugcuguugca

SEQ ID NO: 753494 - RNA, 19 nt, Homo sapiens
  misc_RNA (1)...(19): siRNA sense strand
cgagacgggccucuacauc

SEQ ID NO: 753495 - RNA, 19 nt, Homo sapiens
  misc_RNA (1)...(19): siRNA sense strand
gagauugugcuggagaaca

SEQ ID NO: 753496 - RNA, 19 nt, Homo sapiens
  misc_RNA (1)...(19): siRNA sense strand
gcugccugcuguugcacuu

SEQ ID NO: 753497 - RNA, 19 nt, Homo sapiens
  misc_RNA (1)...(19): siRNA sense strand
acacagcgcugcagaaugc

SEQ ID NO: 753498 - RNA, 19 nt, Homo sapiens
  misc_RNA (1)...(19): siRNA sense strand
ggaagcugaucgccaagag

SEQ ID NO: 753499 - RNA, 19 nt, Homo sapiens
  misc_RNA (1)...(19): siRNA sense strand
gagacgggccucuacaucu

SEQ ID NO: 753500 - RNA, 19 nt, Homo sapiens
  misc_RNA (1)...(19): siRNA sense strand
ggcaaggacugcgucuuca

SEQ ID NO: 753501 - RNA, 19 nt, Homo sapiens
  misc_RNA (1)...(19): siRNA sense strand
agacgggccucuacaucug

SEQ ID NO: 753502 - RNA, 19 nt, Homo sapiens
  misc_RNA (1)...(19): siRNA sense strand
gagacggacaccuuuggaa

SEQ ID NO: 753503 - RNA, 19 nt, Homo sapiens
  misc_RNA (1)...(19): siRNA sense strand
ggagacggacaccuuugga

SEQ ID NO: 753504 - RNA, 19 nt, Homo sapiens
  misc_RNA (1)...(19): siRNA sense strand
ccaaguacgagggcuggua

SEQ ID NO: 753505 - RNA, 19 nt, Homo sapiens
  misc_RNA (1)...(19): siRNA sense strand
acaucugcaugaacaagaa

SEQ ID NO: 753506 - RNA, 19 nt, Homo sapiens
  misc_RNA (1)...(19): siRNA sense strand
cuacacagcgcugcagaau

SEQ ID NO: 753507 - RNA, 19 nt, Homo sapiens
  misc_RNA (1)...(19): siRNA sense strand
cgugagguccacuucauga

SEQ ID NO: 753508 - RNA, 19 nt, Homo sapiens
  misc_RNA (1)...(19): siRNA sense strand
ggaccuaccaacucuacag

SEQ ID NO: 753509 - RNA, 19 nt, Homo sapiens
  misc_RNA (1)...(19): siRNA sense strand
cggagauugugcuggagaa

SEQ ID NO: 753510 - RNA, 19 nt, Homo sapiens
  misc_RNA (1)...(19): siRNA sense strand
gagccugcgcuucgaguuc

SEQ ID NO: 753511 - RNA, 19 nt, Homo sapiens
  misc_RNA (1)...(19): siRNA sense strand
gcugcagaaugccaaguac

SEQ ID NO: 753512 - RNA, 19 nt, Homo sapiens
  misc_RNA (1)...(19): siRNA sense strand
ugagcugccugcuguugca

SEQ ID NO: 753513 - RNA, 19 nt, Homo sapiens
  misc_RNA (1)...(19): siRNA sense strand
cgagacgggccucuacauc

SEQ ID NO: 753514 - RNA, 19 nt, Homo sapiens
  misc_RNA (1)...(19): siRNA sense strand
gagauugugcuggagaaca

SEQ ID NO: 753515 - RNA, 19 nt, Homo sapiens
  misc_RNA (1)...(19): siRNA sense strand
gcugccugcuguugcacuu

SEQ ID NO: 753516 - RNA, 19 nt, Homo sapiens
  misc_RNA (1)...(19): siRNA sense strand
acacagcgcugcagaaugc

SEQ ID NO: 753517 - RNA, 19 nt, Homo sapiens
  misc_RNA (1)...(19): siRNA sense strand
ggaagcugaucgccaagag

SEQ ID NO: 753518 - RNA, 19 nt, Homo sapiens
  misc_RNA (1)...(19): siRNA sense strand
gagacgggccucuacaucu

SEQ ID NO: 753519 - RNA, 19 nt, Homo sapiens
  misc_RNA (1)...(19): siRNA sense strand
ggcaaggacugcgucuuca

SEQ ID NO: 753520 - RNA, 19 nt, Homo sapiens
  misc_RNA (1)...(19): siRNA sense strand
agacgggccucuacaucug

SEQ ID NO: 753521 - RNA, 19 nt, Homo sapiens
  misc_RNA (1)...(19): siRNA sense strand
gagacggacaccuuuggaa

SEQ ID NO: 753522 - RNA, 19 nt, Homo sapiens
  misc_RNA (1)...(19): siRNA sense strand
ggagacggacaccuuugga

SEQ ID NO: 753523 - RNA, 19 nt, Homo sapiens
  misc_RNA (1)...(19): siRNA sense strand
ccaaguacgagggcuggua

SEQ ID NO: 753524 - RNA, 19 nt, Homo sapiens
  misc_RNA (1)...(19): siRNA sense strand
acaucugcaugaacaagaa

SEQ ID NO: 753525 - RNA, 19 nt, Homo sapiens
  misc_RNA (1)...(19): siRNA sense strand
cuacacagcgcugcagaau

SEQ ID NO: 753526 - RNA, 19 nt, Homo sapiens
  misc_RNA (1)...(19): siRNA sense strand
cgugagguccacuucauga

SEQ ID NO: 753527 - RNA, 19 nt, Homo sapiens
  misc_RNA (1)...(19): siRNA sense strand
ggaccuaccaacucuacag

SEQ ID NO: 753528 - RNA, 19 nt, Homo sapiens
  misc_RNA (1)...(19): siRNA sense strand
cggagauugugcuggagaa

SEQ ID NO: 753529 - RNA, 19 nt, Homo sapiens
  misc_RNA (1)...(19): siRNA sense strand
gagccugcgcuucgaguuc

SEQ ID NO: 753530 - RNA, 19 nt, Homo sapiens
  misc_RNA (1)...(19): siRNA sense strand
gcugcagaaugccaaguac

SEQ ID NO: 753531 - RNA, 19 nt, Homo sapiens
  misc_RNA (1)...(19): siRNA sense strand
ugagcugccugcuguugca

SEQ ID NO: 753532 - RNA, 19 nt, Homo sapiens
  misc_RNA (1)...(19): siRNA sense strand
cgagacgggccucuacauc

SEQ ID NO: 753533 - RNA, 19 nt, Homo sapiens
  misc_RNA (1)...(19): siRNA sense strand
gagauugugcuggagaaca

SEQ ID NO: 753534 - RNA, 19 nt, Homo sapiens
  misc_RNA (1)...(19): siRNA sense strand
gcugccugcuguugcacuu

SEQ ID NO: 753535 - RNA, 19 nt, Homo sapiens
  misc_RNA (1)...(19): siRNA sense strand
acacagcgcugcagaaugc

SEQ ID NO: 753536 - RNA, 19 nt, Homo sapiens
  misc_RNA (1)...(19): siRNA sense strand
ggaagcugaucgccaagag

SEQ ID NO: 753537 - RNA, 19 nt, Homo sapiens
  misc_RNA (1)...(19): siRNA sense strand
gagacgggccucuacaucu

SEQ ID NO: 753538 - RNA, 19 nt, Homo sapiens
  misc_RNA (1)...(19): siRNA sense strand
ggcaaggacugcgucuuca

SEQ ID NO: 753539 - RNA, 19 nt, Homo sapiens
  misc_RNA (1)...(19): siRNA sense strand
agacgggccucuacaucug

SEQ ID NO: 753540 - RNA, 19 nt, Homo sapiens
  misc_RNA (1)...(19): siRNA sense strand
gagacggacaccuuuggaa

SEQ ID NO: 753541 - RNA, 19 nt, Homo sapiens
  misc_RNA (1)...(19): siRNA sense strand
ggagacggacaccuuugga

SEQ ID NO: 753542 - RNA, 19 nt, Homo sapiens
  misc_RNA (1)...(19): siRNA sense strand
ccaaguacgagggcuggua

SEQ ID NO: 753543 - RNA, 19 nt, Homo sapiens
  misc_RNA (1)...(19): siRNA sense strand
acaucugcaugaacaagaa

SEQ ID NO: 753544 - RNA, 19 nt, Homo sapiens
  misc_RNA (1)...(19): siRNA sense strand
cuacacagcgcugcagaau

SEQ ID NO: 753545 - RNA, 19 nt, Homo sapiens
  misc_RNA (1)...(19): siRNA sense strand
cgugagguccacuucauga

SEQ ID NO: 753546 - RNA, 19 nt, Homo sapiens
  misc_RNA (1)...(19): siRNA sense strand
ggaccuaccaacucuacag

SEQ ID NO: 753547 - RNA, 19 nt, Homo sapiens
  misc_RNA (1)...(19): siRNA sense strand
cggagauugugcuggagaa

SEQ ID NO: 753548 - RNA, 19 nt, Homo sapiens
  misc_RNA (1)...(19): siRNA sense strand
gagccugcgcuucgaguuc

SEQ ID NO: 753549 - RNA, 19 nt, Homo sapiens
  misc_RNA (1)...(19): siRNA sense strand
gcugcagaaugccaaguac

SEQ ID NO: 753550 - RNA, 19 nt, Homo sapiens
  misc_RNA (1)...(19): siRNA sense strand
ugagcugccugcuguugca

SEQ ID NO: 753551 - RNA, 19 nt, Homo sapiens
  misc_RNA (1)...(19): siRNA sense strand
cgagacgggccucuacauc

SEQ ID NO: 753552 - RNA, 19 nt, Homo sapiens
  misc_RNA (1)...(19): siRNA sense strand
gagauugugcuggagaaca

SEQ ID NO: 753553 - RNA, 19 nt, Homo sapiens
  misc_RNA (1)...(19): siRNA sense strand
gcugccugcuguugcacuu

SEQ ID NO: 753554 - RNA, 19 nt, Homo sapiens
  misc_RNA (1)...(19): siRNA sense strand
acacagcgcugcagaaugc

SEQ ID NO: 753555 - RNA, 19 nt, Homo sapiens
  misc_RNA (1)...(19): siRNA sense strand
ggaagcugaucgccaagag

SEQ ID NO: 753556 - RNA, 19 nt, Homo sapiens
  misc_RNA (1)...(19): siRNA sense strand
gagacgggccucuacaucu

SEQ ID NO: 753557 - RNA, 19 nt, Homo sapiens
  misc_RNA (1)...(19): siRNA sense strand
ggcaaggacugcgucuuca

SEQ ID NO: 753558 - RNA, 19 nt, Homo sapiens
  misc_RNA (1)...(19): siRNA sense strand
agacgggccucuacaucug

SEQ ID NO: 753559 - RNA, 19 nt, Homo sapiens
  misc_RNA (1)...(19): siRNA sense strand
gagacggacaccuuuggaa

SEQ ID NO: 753560 - RNA, 19 nt, Homo sapiens
  misc_RNA (1)...(19): siRNA sense strand
ggagacggacaccuuugga

SEQ ID NO: 753561 - RNA, 19 nt, Homo sapiens
  misc_RNA (1)...(19): siRNA sense strand
ccaaguacgagggcuggua

SEQ ID NO: 753562 - RNA, 19 nt, Homo sapiens
  misc_RNA (1)...(19): siRNA sense strand
acaucugcaugaacaagaa

SEQ ID NO: 753563 - RNA, 19 nt, Homo sapiens
  misc_RNA (1)...(19): siRNA sense strand
cuacacagcgcugcagaau

SEQ ID NO: 753564 - RNA, 19 nt, Homo sapiens
  misc_RNA (1)...(19): siRNA sense strand
cgugagguccacuucauga

SEQ ID NO: 753565 - RNA, 19 nt, Homo sapiens
  misc_RNA (1)...(19): siRNA sense strand
ggaccuaccaacucuacag

SEQ ID NO: 753566 - RNA, 19 nt, Homo sapiens
  misc_RNA (1)...(19): siRNA sense strand
cggagauugugcuggagaa

SEQ ID NO: 753567 - RNA, 19 nt, Homo sapiens
  misc_RNA (1)...(19): siRNA sense strand
gagccugcgcuucgaguuc

SEQ ID NO: 753568 - RNA, 19 nt, Homo sapiens
  misc_RNA (1)...(19): siRNA sense strand
gcugcagaaugccaaguac

SEQ ID NO: 753569 - RNA, 19 nt, Homo sapiens
  misc_RNA (1)...(19): siRNA sense strand
ugagcugccugcuguugca

SEQ ID NO: 753570 - RNA, 19 nt, Homo sapiens
  misc_RNA (1)...(19): siRNA sense strand
cgagacgggccucuacauc

SEQ ID NO: 753571 - RNA, 19 nt, Homo sapiens
  misc_RNA (1)...(19): siRNA sense strand
gagauugugcuggagaaca

SEQ ID NO: 753572 - RNA, 19 nt, Homo sapiens
  misc_RNA (1)...(19): siRNA sense strand
gcugccugcuguugcacuu

SEQ ID NO: 753573 - RNA, 19 nt, Homo sapiens
  misc_RNA (1)...(19): siRNA sense strand
acacagcgcugcagaaugc

SEQ ID NO: 753574 - RNA, 19 nt, Homo sapiens
  misc_RNA (1)...(19): siRNA sense strand
ggaagcugaucgccaagag

SEQ ID NO: 753575 - RNA, 19 nt, Homo sapiens
  misc_RNA (1)...(19): siRNA sense strand
gagacgggccucuacaucu

SEQ ID NO: 753576 - RNA, 19 nt, Homo sapiens
  misc_RNA (1)...(19): siRNA sense strand
ggcaaggacugcgucuuca

SEQ ID NO: 753577 - RNA, 19 nt, Homo sapiens
  misc_RNA (1)...(19): siRNA sense strand
agacgggccucuacaucug

SEQ ID NO: 753578 - RNA, 19 nt, Homo sapiens
  misc_RNA (1)...(19): siRNA sense strand
gagacggacaccuuuggaa

SEQ ID NO: 753579 - RNA, 19 nt, Homo sapiens
  misc_RNA (1)...(19): siRNA sense strand
ggagacggacaccuuugga

SEQ ID NO: 753580 - RNA, 19 nt, Homo sapiens
  misc_RNA (1)...(19): siRNA sense strand
ccaaguacgagggcuggua

SEQ ID NO: 753581 - RNA, 19 nt, Homo sapiens
  misc_RNA (1)...(19): siRNA sense strand
acaucugcaugaacaagaa

SEQ ID NO: 753582 - RNA, 19 nt, Homo sapiens
  misc_RNA (1)...(19): siRNA sense strand
cuacacagcgcugcagaau

SEQ ID NO: 753583 - RNA, 19 nt, Homo sapiens
  misc_RNA (1)...(19): siRNA sense strand
cgugagguccacuucauga

SEQ ID NO: 753584 - RNA, 19 nt, Homo sapiens
  misc_RNA (1)...(19): siRNA sense strand
ggaccuaccaacucuacag

SEQ ID NO: 753585 - RNA, 19 nt, Homo sapiens
  misc_RNA (1)...(19): siRNA sense strand
cggagauugugcuggagaa

SEQ ID NO: 753586 - RNA, 19 nt, Homo sapiens
  misc_RNA (1)...(19): siRNA sense strand
gagccugcgcuucgaguuc

SEQ ID NO: 753587 - RNA, 19 nt, Homo sapiens
  misc_RNA (1)...(19): siRNA sense strand
gcugcagaaugccaaguac

SEQ ID NO: 753588 - RNA, 19 nt, Homo sapiens
  misc_RNA (1)...(19): siRNA sense strand
ugagcugccugcuguugca

SEQ ID NO: 753589 - RNA, 19 nt, Homo sapiens
  misc_RNA (1)...(19): siRNA sense strand
cgagacgggccucuacauc

SEQ ID NO: 753590 - RNA, 19 nt, Homo sapiens
  misc_RNA (1)...(19): siRNA sense strand
gagauugugcuggagaaca

SEQ ID NO: 753591 - RNA, 19 nt, Homo sapiens
  misc_RNA (1)...(19): siRNA sense strand
gcugccugcuguugcacuu

SEQ ID NO: 753592 - RNA, 19 nt, Homo sapiens
  misc_RNA (1)...(19): siRNA sense strand
acacagcgcugcagaaugc

SEQ ID NO: 753593 - RNA, 19 nt, Homo sapiens
  misc_RNA (1)...(19): siRNA sense strand
ggaagcugaucgccaagag

SEQ ID NO: 753594 - RNA, 19 nt, Homo sapiens
  misc_RNA (1)...(19): siRNA sense strand
gagacgggccucuacaucu

SEQ ID NO: 753595 - RNA, 19 nt, Homo sapiens
  misc_RNA (1)...(19): siRNA sense strand
ggcaaggacugcgucuuca

SEQ ID NO: 753596 - RNA, 19 nt, Homo sapiens
  misc_RNA (1)...(19): siRNA sense strand
agacgggccucuacaucug

SEQ ID NO: 753597 - RNA, 19 nt, Homo sapiens
  misc_RNA (1)...(19): siRNA sense strand
gagacggacaccuuuggaa

SEQ ID NO: 753598 - RNA, 19 nt, Homo sapiens
  misc_RNA (1)...(19): siRNA sense strand
ggagacggacaccuuugga

SEQ ID NO: 753599 - RNA, 19 nt, Homo sapiens
  misc_RNA (1)...(19): siRNA sense strand
ccaaguacgagggcuggua

SEQ ID NO: 753600 - RNA, 19 nt, Homo sapiens
  misc_RNA (1)...(19): siRNA sense strand
acaucugcaugaacaagaa

SEQ ID NO: 753601 - RNA, 19 nt, Homo sapiens
  misc_RNA (1)...(19): siRNA sense strand
cuacacagcgcugcagaau

SEQ ID NO: 753602 - RNA, 19 nt, Homo sapiens
  misc_RNA (1)...(19): siRNA sense strand
cgugagguccacuucauga

SEQ ID NO: 753603 - RNA, 19 nt, Homo sapiens
  misc_RNA (1)...(19): siRNA sense strand
ggaccuaccaacucuacag

SEQ ID NO: 753604 - RNA, 19 nt, Homo sapiens
  misc_RNA (1)...(19): siRNA sense strand
cggagauugugcuggagaa

SEQ ID NO: 753605 - RNA, 19 nt, Homo sapiens
  misc_RNA (1)...(19): siRNA sense strand
gagccugcgcuucgaguuc

SEQ ID NO: 753606 - RNA, 19 nt, Homo sapiens
  misc_RNA (1)...(19): siRNA sense strand
gcugcagaaugccaaguac

SEQ ID NO: 753607 - RNA, 19 nt, Homo sapiens
  misc_RNA (1)...(19): siRNA sense strand
ugagcugccugcuguugca

SEQ ID NO: 753608 - RNA, 19 nt, Homo sapiens
  misc_RNA (1)...(19): siRNA sense strand
cgagacgggccucuacauc

SEQ ID NO: 753609 - RNA, 19 nt, Homo sapiens
  misc_RNA (1)...(19): siRNA sense strand
gagauugugcuggagaaca

SEQ ID NO: 753610 - RNA, 19 nt, Homo sapiens
  misc_RNA (1)...(19): siRNA sense strand
gcugccugcuguugcacuu

SEQ ID NO: 753611 - RNA, 19 nt, Homo sapiens
  misc_RNA (1)...(19): siRNA sense strand
acacagcgcugcagaaugc

SEQ ID NO: 753612 - RNA, 19 nt, Homo sapiens
  misc_RNA (1)...(19): siRNA sense strand
ggaagcugaucgccaagag

SEQ ID NO: 753613 - RNA, 19 nt, Homo sapiens
  misc_RNA (1)...(19): siRNA sense strand
gagacgggccucuacaucu

SEQ ID NO: 753614 - RNA, 19 nt, Homo sapiens
  misc_RNA (1)...(19): siRNA sense strand
ggcaaggacugcgucuuca

SEQ ID NO: 753615 - RNA, 19 nt, Homo sapiens
  misc_RNA (1)...(19): siRNA sense strand
agacgggccucuacaucug

SEQ ID NO: 753616 - RNA, 19 nt, Homo sapiens
  misc_RNA (1)...(19): siRNA sense strand
gagacggacaccuuuggaa

SEQ ID NO: 753617 - RNA, 19 nt, Homo sapiens
  misc_RNA (1)...(19): siRNA sense strand
ggagacggacaccuuugga

SEQ ID NO: 753618 - RNA, 19 nt, Homo sapiens
  misc_RNA (1)...(19): siRNA sense strand
ccaaguacgagggcuggua

SEQ ID NO: 753619 - RNA, 19 nt, Homo sapiens
  misc_RNA (1)...(19): siRNA sense strand
acaucugcaugaacaagaa

SEQ ID NO: 753620 - RNA, 19 nt, Homo sapiens
  misc_RNA (1)...(19): siRNA sense strand
cuacacagcgcugcagaau

SEQ ID NO: 753621 - RNA, 19 nt, Homo sapiens
  misc_RNA (1)...(19): siRNA sense strand
cgugagguccacuucauga

SEQ ID NO: 753622 - RNA, 19 nt, Homo sapiens
  misc_RNA (1)...(19): siRNA sense strand
ggaccuaccaacucuacag

SEQ ID NO: 753623 - RNA, 19 nt, Homo sapiens
  misc_RNA (1)...(19): siRNA sense strand
cggagauugugcuggagaa

SEQ ID NO: 753624 - RNA, 19 nt, Homo sapiens
  misc_RNA (1)...(19): siRNA sense strand
gagccugcgcuucgaguuc

SEQ ID NO: 753625 - RNA, 19 nt, Homo sapiens
  misc_RNA (1)...(19): siRNA sense strand
gcugcagaaugccaaguac

SEQ ID NO: 753626 - RNA, 19 nt, Homo sapiens
  misc_RNA (1)...(19): siRNA sense strand
ugagcugccugcuguugca

SEQ ID NO: 753627 - RNA, 19 nt, Homo sapiens
  misc_RNA (1)...(19): siRNA sense strand
cgagacgggccucuacauc

SEQ ID NO: 753628 - RNA, 19 nt, Homo sapiens
  misc_RNA (1)...(19): siRNA sense strand
gagauugugcuggagaaca

SEQ ID NO: 753629 - RNA, 19 nt, Homo sapiens
  misc_RNA (1)...(19): siRNA sense strand
gcugccugcuguugcacuu

SEQ ID NO: 753630 - RNA, 19 nt, Homo sapiens
  misc_RNA (1)...(19): siRNA sense strand
acacagcgcugcagaaugc

SEQ ID NO: 753631 - RNA, 19 nt, Homo sapiens
  misc_RNA (1)...(19): siRNA sense strand
ggaagcugaucgccaagag

SEQ ID NO: 753632 - RNA, 19 nt, Homo sapiens
  misc_RNA (1)...(19): siRNA sense strand
gagacgggccucuacaucu

SEQ ID NO: 753633 - RNA, 19 nt, Homo sapiens
  misc_RNA (1)...(19): siRNA sense strand
ggcaaggacugcgucuuca

SEQ ID NO: 753634 - RNA, 19 nt, Homo sapiens
  misc_RNA (1)...(19): siRNA sense strand
agacgggccucuacaucug

SEQ ID NO: 753635 - RNA, 19 nt, Homo sapiens
  misc_RNA (1)...(19): siRNA sense strand
gagacggacaccuuuggaa

SEQ ID NO: 753636 - RNA, 19 nt, Homo sapiens
  misc_RNA (1)...(19): siRNA sense strand
ggagacggacaccuuugga

SEQ ID NO: 753637 - RNA, 19 nt, Homo sapiens
  misc_RNA (1)...(19): siRNA sense strand
ccaaguacgagggcuggua

SEQ ID NO: 753638 - RNA, 19 nt, Homo sapiens
  misc_RNA (1)...(19): siRNA sense strand
acaucugcaugaacaagaa

SEQ ID NO: 753639 - RNA, 19 nt, Homo sapiens
  misc_RNA (1)...(19): siRNA sense strand
cuacacagcgcugcagaau

SEQ ID NO: 753640 - RNA, 19 nt, Homo sapiens
  misc_RNA (1)...(19): siRNA sense strand
cgugagguccacuucauga

SEQ ID NO: 753641 - RNA, 19 nt, Homo sapiens
  misc_RNA (1)...(19): siRNA sense strand
ggaccuaccaacucuacag

SEQ ID NO: 753642 - RNA, 19 nt, Homo sapiens
  misc_RNA (1)...(19): siRNA sense strand
cggagauugugcuggagaa

SEQ ID NO: 753643 - RNA, 19 nt, Homo sapiens
  misc_RNA (1)...(19): siRNA sense strand
gagccugcgcuucgaguuc

SEQ ID NO: 753644 - RNA, 19 nt, Homo sapiens
  misc_RNA (1)...(19): siRNA sense strand
gcugcagaaugccaaguac

SEQ ID NO: 753645 - RNA, 19 nt, Homo sapiens
  misc_RNA (1)...(19): siRNA sense strand
ugagcugccugcuguugca

SEQ ID NO: 753646 - RNA, 19 nt, Homo sapiens
  misc_RNA (1)...(19): siRNA sense strand
cgagacgggccucuacauc

SEQ ID NO: 753647 - RNA, 19 nt, Homo sapiens
  misc_RNA (1)...(19): siRNA sense strand
gagauugugcuggagaaca

SEQ ID NO: 753648 - RNA, 19 nt, Homo sapiens
  misc_RNA (1)...(19): siRNA sense strand
gcugccugcuguugcacuu

SEQ ID NO: 753649 - RNA, 19 nt, Homo sapiens
  misc_RNA (1)...(19): siRNA sense strand
acacagcgcugcagaaugc

SEQ ID NO: 753650 - RNA, 19 nt, Homo sapiens
  misc_RNA (1)...(19): siRNA sense strand
ggaagcugaucgccaagag

SEQ ID NO: 753651 - RNA, 19 nt, Homo sapiens
  misc_RNA (1)...(19): siRNA sense strand
gagacgggccucuacaucu

SEQ ID NO: 753652 - RNA, 19 nt, Homo sapiens
  misc_RNA (1)...(19): siRNA sense strand
ggcaaggacugcgucuuca

SEQ ID NO: 753653 - RNA, 19 nt, Homo sapiens
  misc_RNA (1)...(19): siRNA sense strand
agacgggccucuacaucug

SEQ ID NO: 753654 - RNA, 19 nt, Homo sapiens
  misc_RNA (1)...(19): siRNA sense strand
gagacggacaccuuuggaa

SEQ ID NO: 753655 - RNA, 19 nt, Homo sapiens
  misc_RNA (1)...(19): siRNA sense strand
ggagacggacaccuuugga

SEQ ID NO: 753656 - RNA, 19 nt, Homo sapiens
  misc_RNA (1)...(19): siRNA sense strand
ccaaguacgagggcuggua

SEQ ID NO: 753657 - RNA, 19 nt, Homo sapiens
  misc_RNA (1)...(19): siRNA sense strand
acaucugcaugaacaagaa

SEQ ID NO: 753658 - RNA, 19 nt, Homo sapiens
  misc_RNA (1)...(19): siRNA sense strand
cuacacagcgcugcagaau

SEQ ID NO: 753659 - RNA, 19 nt, Homo sapiens
  misc_RNA (1)...(19): siRNA sense strand
cgugagguccacuucauga

SEQ ID NO: 753660 - RNA, 19 nt, Homo sapiens
  misc_RNA (1)...(19): siRNA sense strand
ggaccuaccaacucuacag

SEQ ID NO: 753661 - RNA, 19 nt, Homo sapiens
  misc_RNA (1)...(19): siRNA sense strand
cggagauugugcuggagaa

SEQ ID NO: 753662 - RNA, 19 nt, Homo sapiens
  misc_RNA (1)...(19): siRNA sense strand
gagccugcgcuucgaguuc

SEQ ID NO: 753663 - RNA, 19 nt, Homo sapiens
  misc_RNA (1)...(19): siRNA sense strand
gcugcagaaugccaaguac

SEQ ID NO: 753664 - RNA, 19 nt, Homo sapiens
  misc_RNA (1)...(19): siRNA sense strand
ugagcugccugcuguugca

SEQ ID NO: 753665 - RNA, 19 nt, Homo sapiens
  misc_RNA (1)...(19): siRNA sense strand
cgagacgggccucuacauc

SEQ ID NO: 753666 - RNA, 19 nt, Homo sapiens
  misc_RNA (1)...(19): siRNA sense strand
gagauugugcuggagaaca

SEQ ID NO: 753667 - RNA, 19 nt, Homo sapiens
  misc_RNA (1)...(19): siRNA sense strand
gcugccugcuguugcacuu

SEQ ID NO: 753668 - RNA, 19 nt, Homo sapiens
  misc_RNA (1)...(19): siRNA sense strand
acacagcgcugcagaaugc

SEQ ID NO: 753669 - RNA, 19 nt, Homo sapiens
  misc_RNA (1)...(19): siRNA sense strand
ggaagcugaucgccaagag

SEQ ID NO: 753670 - RNA, 19 nt, Homo sapiens
  misc_RNA (1)...(19): siRNA sense strand
gagacgggccucuacaucu

SEQ ID NO: 753671 - RNA, 19 nt, Homo sapiens
  misc_RNA (1)...(19): siRNA sense strand
ggcaaggacugcgucuuca

SEQ ID NO: 753672 - RNA, 19 nt, Homo sapiens
  misc_RNA (1)...(19): siRNA sense strand
agacgggccucuacaucug

SEQ ID NO: 753673 - RNA, 19 nt, Homo sapiens
  misc_RNA (1)...(19): siRNA sense strand
gagacggacaccuuuggaa

SEQ ID NO: 753674 - RNA, 19 nt, Homo sapiens
  misc_RNA (1)...(19): siRNA sense strand
ggagacggacaccuuugga

SEQ ID NO: 753675 - RNA, 19 nt, Homo sapiens
  misc_RNA (1)...(19): siRNA sense strand
ccaaguacgagggcuggua

SEQ ID NO: 753676 - RNA, 19 nt, Homo sapiens
  misc_RNA (1)...(19): siRNA sense strand
acaucugcaugaacaagaa

SEQ ID NO: 753677 - RNA, 19 nt, Homo sapiens
  misc_RNA (1)...(19): siRNA sense strand
cuacacagcgcugcagaau

SEQ ID NO: 753678 - RNA, 19 nt, Homo sapiens
  misc_RNA (1)...(19): siRNA sense strand
cgugagguccacuucauga

SEQ ID NO: 753679 - RNA, 19 nt, Homo sapiens
  misc_RNA (1)...(19): siRNA sense strand
ggaccuaccaacucuacag

SEQ ID NO: 753680 - RNA, 19 nt, Homo sapiens
  misc_RNA (1)...(19): siRNA sense strand
cggagauugugcuggagaa

SEQ ID NO: 753681 - RNA, 19 nt, Homo sapiens
  misc_RNA (1)...(19): siRNA sense strand
gagccugcgcuucgaguuc

SEQ ID NO: 753682 - RNA, 19 nt, Homo sapiens
  misc_RNA (1)...(19): siRNA sense strand
gcugcagaaugccaaguac

SEQ ID NO: 753683 - RNA, 19 nt, Homo sapiens
  misc_RNA (1)...(19): siRNA sense strand
ugagcugccugcuguugca

SEQ ID NO: 753684 - RNA, 19 nt, Homo sapiens
  misc_RNA (1)...(19): siRNA sense strand
cgagacgggccucuacauc

SEQ ID NO: 753685 - RNA, 19 nt, Homo sapiens
  misc_RNA (1)...(19): siRNA sense strand
gagauugugcuggagaaca

SEQ ID NO: 753686 - RNA, 19 nt, Homo sapiens
  misc_RNA (1)...(19): siRNA sense strand
gcugccugcuguugcacuu

SEQ ID NO: 753687 - RNA, 19 nt, Homo sapiens
  misc_RNA (1)...(19): siRNA sense strand
acacagcgcugcagaaugc

SEQ ID NO: 753688 - RNA, 19 nt, Homo sapiens
  misc_RNA (1)...(19): siRNA sense strand
ggaagcugaucgccaagag

SEQ ID NO: 753689 - RNA, 19 nt, Homo sapiens
  misc_RNA (1)...(19): siRNA sense strand
gagacgggccucuacaucu

SEQ ID NO: 753690 - RNA, 19 nt, Homo sapiens
  misc_RNA (1)...(19): siRNA sense strand
ggcaaggacugcgucuuca

SEQ ID NO: 753691 - RNA, 19 nt, Homo sapiens
  misc_RNA (1)...(19): siRNA sense strand
agacgggccucuacaucug

SEQ ID NO: 753692 - RNA, 19 nt, Homo sapiens
  misc_RNA (1)...(19): siRNA sense strand
gagacggacaccuuuggaa

SEQ ID NO: 753693 - RNA, 19 nt, Homo sapiens
  misc_RNA (1)...(19): siRNA sense strand
ggagacggacaccuuugga

SEQ ID NO: 753694 - RNA, 19 nt, Homo sapiens
  misc_RNA (1)...(19): siRNA sense strand
ccaaguacgagggcuggua

SEQ ID NO: 753695 - RNA, 19 nt, Homo sapiens
  misc_RNA (1)...(19): siRNA sense strand
acaucugcaugaacaagaa

SEQ ID NO: 753696 - RNA, 19 nt, Homo sapiens
  misc_RNA (1)...(19): siRNA sense strand
cuacacagcgcugcagaau

SEQ ID NO: 753697 - RNA, 19 nt, Homo sapiens
  misc_RNA (1)...(19): siRNA sense strand
cgugagguccacuucauga

SEQ ID NO: 753698 - RNA, 19 nt, Homo sapiens
  misc_RNA (1)...(19): siRNA sense strand
ggaccuaccaacucuacag

SEQ ID NO: 753699 - RNA, 19 nt, Homo sapiens
  misc_RNA (1)...(19): siRNA sense strand
cggagauugugcuggagaa

SEQ ID NO: 753700 - RNA, 19 nt, Homo sapiens
  misc_RNA (1)...(19): siRNA sense strand
gagccugcgcuucgaguuc

SEQ ID NO: 753701 - RNA, 19 nt, Homo sapiens
  misc_RNA (1)...(19): siRNA sense strand
gcugcagaaugccaaguac

SEQ ID NO: 753702 - RNA, 19 nt, Homo sapiens
  misc_RNA (1)...(19): siRNA sense strand
ugagcugccugcuguugca

SEQ ID NO: 753703 - RNA, 19 nt, Homo sapiens
  misc_RNA (1)...(19): siRNA sense strand
cgagacgggccucuacauc

SEQ ID NO: 753704 - RNA, 19 nt, Homo sapiens
  misc_RNA (1)...(19): siRNA sense strand
gagauugugcuggagaaca

SEQ ID NO: 753705 - RNA, 19 nt, Homo sapiens
  misc_RNA (1)...(19): siRNA sense strand
gcugccugcuguugcacuu

SEQ ID NO: 753706 - RNA, 19 nt, Homo sapiens
  misc_RNA (1)...(19): siRNA sense strand
acacagcgcugcagaaugc

SEQ ID NO: 753707 - RNA, 19 nt, Homo sapiens
  misc_RNA (1)...(19): siRNA sense strand
ggaagcugaucgccaagag

SEQ ID NO: 753708 - RNA, 19 nt, Homo sapiens
  misc_RNA (1)...(19): siRNA sense strand
gagacgggccucuacaucu

SEQ ID NO: 753709 - RNA, 19 nt, Homo sapiens
  misc_RNA (1)...(19): siRNA sense strand
ggcaaggacugcgucuuca

SEQ ID NO: 753710 - RNA, 19 nt, Homo sapiens
  misc_RNA (1)...(19): siRNA sense strand
agacgggccucuacaucug

SEQ ID NO: 753711 - RNA, 19 nt, Homo sapiens
  misc_RNA (1)...(19): siRNA sense strand
gagacggacaccuuuggaa

SEQ ID NO: 753712 - RNA, 19 nt, Homo sapiens
  misc_RNA (1)...(19): siRNA sense strand
ggagacggacaccuuugga

SEQ ID NO: 753713 - RNA, 19 nt, Homo sapiens
  misc_RNA (1)...(19): siRNA sense strand
ccaaguacgagggcuggua

SEQ ID NO: 753714 - RNA, 19 nt, Homo sapiens
  misc_RNA (1)...(19): siRNA sense strand
acaucugcaugaacaagaa

SEQ ID NO: 753715 - RNA, 19 nt, Homo sapiens
  misc_RNA (1)...(19): siRNA sense strand
cuacacagcgcugcagaau

SEQ ID NO: 753716 - RNA, 19 nt, Homo sapiens
  misc_RNA (1)...(19): siRNA sense strand
cgugagguccacuucauga

SEQ ID NO: 753717 - RNA, 19 nt, Homo sapiens
  misc_RNA (1)...(19): siRNA sense strand
ggaccuaccaacucuacag

SEQ ID NO: 753718 - RNA, 19 nt, Homo sapiens
  misc_RNA (1)...(19): siRNA sense strand
cggagauugugcuggagaa

SEQ ID NO: 753719 - RNA, 19 nt, Homo sapiens
  misc_RNA (1)...(19): siRNA sense strand
gagccugcgcuucgaguuc

SEQ ID NO: 753720 - RNA, 19 nt, Homo sapiens
  misc_RNA (1)...(19): siRNA sense strand
gcugcagaaugccaaguac

SEQ ID NO: 753721 - RNA, 19 nt, Homo sapiens
  misc_RNA (1)...(19): siRNA sense strand
ugagcugccugcuguugca

SEQ ID NO: 753722 - RNA, 19 nt, Homo sapiens
  misc_RNA (1)...(19): siRNA sense strand
cgagacgggccucuacauc

SEQ ID NO: 753723 - RNA, 19 nt, Homo sapiens
  misc_RNA (1)...(19): siRNA sense strand
gagauugugcuggagaaca

SEQ ID NO: 753724 - RNA, 19 nt, Homo sapiens
  misc_RNA (1)...(19): siRNA sense strand
gcugccugcuguugcacuu

SEQ ID NO: 753725 - RNA, 19 nt, Homo sapiens
  misc_RNA (1)...(19): siRNA sense strand
acacagcgcugcagaaugc

SEQ ID NO: 753726 - RNA, 19 nt, Homo sapiens
  misc_RNA (1)...(19): siRNA sense strand
ggaagcugaucgccaagag

SEQ ID NO: 753727 - RNA, 19 nt, Homo sapiens
  misc_RNA (1)...(19): siRNA sense strand
gagacgggccucuacaucu

SEQ ID NO: 753728 - RNA, 19 nt, Homo sapiens
  misc_RNA (1)...(19): siRNA sense strand
ggcaaggacugcgucuuca

SEQ ID NO: 753729 - RNA, 19 nt, Homo sapiens
  misc_RNA (1)...(19): siRNA sense strand
agacgggccucuacaucug

SEQ ID NO: 753730 - RNA, 19 nt, Homo sapiens
  misc_RNA (1)...(19): siRNA sense strand
gagacggacaccuuuggaa

SEQ ID NO: 753731 - RNA, 19 nt, Homo sapiens
  misc_RNA (1)...(19): siRNA sense strand
ggagacggacaccuuugga

SEQ ID NO: 753732 - RNA, 19 nt, Homo sapiens
  misc_RNA (1)...(19): siRNA sense strand
ccaaguacgagggcuggua

SEQ ID NO: 753733 - RNA, 19 nt, Homo sapiens
  misc_RNA (1)...(19): siRNA sense strand
acaucugcaugaacaagaa

SEQ ID NO: 753734 - RNA, 19 nt, Homo sapiens
  misc_RNA (1)...(19): siRNA sense strand
cuacacagcgcugcagaau

SEQ ID NO: 753735 - RNA, 19 nt, Homo sapiens
  misc_RNA (1)...(19): siRNA sense strand
cgugagguccacuucauga

SEQ ID NO: 753736 - RNA, 19 nt, Homo sapiens
  misc_RNA (1)...(19): siRNA sense strand
ggaccuaccaacucuacag

SEQ ID NO: 753737 - RNA, 19 nt, Homo sapiens
  misc_RNA (1)...(19): siRNA sense strand
cggagauugugcuggagaa

SEQ ID NO: 753738 - RNA, 19 nt, Homo sapiens
  misc_RNA (1)...(19): siRNA sense strand
gagccugcgcuucgaguuc

SEQ ID NO: 753739 - RNA, 19 nt, Homo sapiens
  misc_RNA (1)...(19): siRNA sense strand
gcugcagaaugccaaguac

SEQ ID NO: 753740 - RNA, 19 nt, Homo sapiens
  misc_RNA (1)...(19): siRNA sense strand
ugagcugccugcuguugca

SEQ ID NO: 753741 - RNA, 19 nt, Homo sapiens
  misc_RNA (1)...(19): siRNA sense strand
cgagacgggccucuacauc

SEQ ID NO: 753742 - RNA, 19 nt, Homo sapiens
  misc_RNA (1)...(19): siRNA sense strand
gagauugugcuggagaaca

SEQ ID NO: 753743 - RNA, 19 nt, Homo sapiens
  misc_RNA (1)...(19): siRNA sense strand
gcugccugcuguugcacuu

SEQ ID NO: 753744 - RNA, 19 nt, Homo sapiens
  misc_RNA (1)...(19): siRNA sense strand
acacagcgcugcagaaugc

SEQ ID NO: 753745 - RNA, 19 nt, Homo sapiens
  misc_RNA (1)...(19): siRNA sense strand
ggaagcugaucgccaagag

SEQ ID NO: 753746 - RNA, 19 nt, Homo sapiens
  misc_RNA (1)...(19): siRNA sense strand
gagacgggccucuacaucu

SEQ ID NO: 753747 - RNA, 19 nt, Homo sapiens
  misc_RNA (1)...(19): siRNA sense strand
ggcaaggacugcgucuuca

SEQ ID NO: 753748 - RNA, 19 nt, Homo sapiens
  misc_RNA (1)...(19): siRNA sense strand
agacgggccucuacaucug

SEQ ID NO: 753749 - RNA, 19 nt, Homo sapiens
  misc_RNA (1)...(19): siRNA sense strand
gagacggacaccuuuggaa

SEQ ID NO: 753750 - RNA, 19 nt, Homo sapiens
  misc_RNA (1)...(19): siRNA sense strand
ggagacggacaccuuugga

SEQ ID NO: 753751 - RNA, 19 nt, Homo sapiens
  misc_RNA (1)...(19): siRNA sense strand
ccaaguacgagggcuggua

SEQ ID NO: 753752 - RNA, 19 nt, Homo sapiens
  misc_RNA (1)...(19): siRNA sense strand
acaucugcaugaacaagaa

SEQ ID NO: 753753 - RNA, 19 nt, Homo sapiens
  misc_RNA (1)...(19): siRNA sense strand
cuacacagcgcugcagaau

SEQ ID NO: 753754 - RNA, 19 nt, Homo sapiens
  misc_RNA (1)...(19): siRNA sense strand
cgugagguccacuucauga

SEQ ID NO: 753755 - RNA, 19 nt, Homo sapiens
  misc_RNA (1)...(19): siRNA sense strand
ggaccuaccaacucuacag

SEQ ID NO: 753756 - RNA, 19 nt, Homo sapiens
  misc_RNA (1)...(19): siRNA sense strand
cggagauugugcuggagaa

SEQ ID NO: 753757 - RNA, 19 nt, Homo sapiens
  misc_RNA (1)...(19): siRNA sense strand
gagccugcgcuucgaguuc

SEQ ID NO: 753758 - RNA, 19 nt, Homo sapiens
  misc_RNA (1)...(19): siRNA sense strand
gcugcagaaugccaaguac

SEQ ID NO: 753759 - RNA, 19 nt, Homo sapiens
  misc_RNA (1)...(19): siRNA sense strand
ugagcugccugcuguugca

SEQ ID NO: 753760 - RNA, 19 nt, Homo sapiens
  misc_RNA (1)...(19): siRNA sense strand
cgagacgggccucuacauc

SEQ ID NO: 753761 - RNA, 19 nt, Homo sapiens
  misc_RNA (1)...(19): siRNA sense strand
gagauugugcuggagaaca

SEQ ID NO: 753762 - RNA, 19 nt, Homo sapiens
  misc_RNA (1)...(19): siRNA sense strand
gcugccugcuguugcacuu

SEQ ID NO: 753763 - RNA, 19 nt, Homo sapiens
  misc_RNA (1)...(19): siRNA sense strand
acacagcgcugcagaaugc

SEQ ID NO: 753764 - RNA, 19 nt, Homo sapiens
  misc_RNA (1)...(19): siRNA sense strand
ggaagcugaucgccaagag

SEQ ID NO: 753765 - RNA, 19 nt, Homo sapiens
  misc_RNA (1)...(19): siRNA sense strand
gagacgggccucuacaucu

SEQ ID NO: 753766 - RNA, 19 nt, Homo sapiens
  misc_RNA (1)...(19): siRNA sense strand
ggcaaggacugcgucuuca

SEQ ID NO: 753767 - RNA, 19 nt, Homo sapiens
  misc_RNA (1)...(19): siRNA sense strand
agacgggccucuacaucug

SEQ ID NO: 753768 - RNA, 19 nt, Homo sapiens
  misc_RNA (1)...(19): siRNA sense strand
gagacggacaccuuuggaa

SEQ ID NO: 753769 - RNA, 19 nt, Homo sapiens
  misc_RNA (1)...(19): siRNA sense strand
ggagacggacaccuuugga

SEQ ID NO: 753770 - RNA, 19 nt, Homo sapiens
  misc_RNA (1)...(19): siRNA sense strand
ccaaguacgagggcuggua

SEQ ID NO: 753771 - RNA, 19 nt, Homo sapiens
  misc_RNA (1)...(19): siRNA sense strand
acaucugcaugaacaagaa

SEQ ID NO: 753772 - RNA, 19 nt, Homo sapiens
  misc_RNA (1)...(19): siRNA sense strand
cuacacagcgcugcagaau

SEQ ID NO: 753773 - RNA, 19 nt, Homo sapiens
  misc_RNA (1)...(19): siRNA sense strand
cgugagguccacuucauga

SEQ ID NO: 753774 - RNA, 19 nt, Homo sapiens
  misc_RNA (1)...(19): siRNA sense strand
ggaccuaccaacucuacag

SEQ ID NO: 753775 - RNA, 19 nt, Homo sapiens
  misc_RNA (1)...(19): siRNA sense strand
cggagauugugcuggagaa

SEQ ID NO: 753776 - RNA, 19 nt, Homo sapiens
  misc_RNA (1)...(19): siRNA sense strand
gagccugcgcuucgaguuc

SEQ ID NO: 753777 - RNA, 19 nt, Homo sapiens
  misc_RNA (1)...(19): siRNA sense strand
gcugcagaaugccaaguac

SEQ ID NO: 753778 - RNA, 19 nt, Homo sapiens
  misc_RNA (1)...(19): siRNA sense strand
ugagcugccugcuguugca

SEQ ID NO: 753779 - RNA, 19 nt, Homo sapiens
  misc_RNA (1)...(19): siRNA sense strand
cgagacgggccucuacauc

SEQ ID NO: 753780 - RNA, 19 nt, Homo sapiens
  misc_RNA (1)...(19): siRNA sense strand
gagauugugcuggagaaca

SEQ ID NO: 753781 - RNA, 19 nt, Homo sapiens
  misc_RNA (1)...(19): siRNA sense strand
gcugccugcuguugcacuu

SEQ ID NO: 753782 - RNA, 19 nt, Homo sapiens
  misc_RNA (1)...(19): siRNA sense strand
gaagaaauuuggagaagaa

SEQ ID NO: 753783 - RNA, 19 nt, Homo sapiens
  misc_RNA (1)...(19): siRNA sense strand
ccaagaaucucuaaagaaa

SEQ ID NO: 753784 - RNA, 19 nt, Homo sapiens
  misc_RNA (1)...(19): siRNA sense strand
gaacaaaugcagugauaua

SEQ ID NO: 753785 - RNA, 19 nt, Homo sapiens
  misc_RNA (1)...(19): siRNA sense strand
gaauuuagcuacugcauau

SEQ ID NO: 753786 - RNA, 19 nt, Homo sapiens
  misc_RNA (1)...(19): siRNA sense strand
gaucagauuuguucuauug

SEQ ID NO: 753787 - RNA, 19 nt, Homo sapiens
  misc_RNA (1)...(19): siRNA sense strand
gaaggaugcuuucgauaaa

SEQ ID NO: 753788 - RNA, 19 nt, Homo sapiens
  misc_RNA (1)...(19): siRNA sense strand
gagaugaacucuuaaagga

SEQ ID NO: 753789 - RNA, 19 nt, Homo sapiens
  misc_RNA (1)...(19): siRNA sense strand
gcagugagguuguaaaugu

SEQ ID NO: 753790 - RNA, 19 nt, Homo sapiens
  misc_RNA (1)...(19): siRNA sense strand
gagaagaaauugcaagguu

SEQ ID NO: 753791 - RNA, 19 nt, Homo sapiens
  misc_RNA (1)...(19): siRNA sense strand
gaacagaaccuggauaaug

SEQ ID NO: 753792 - RNA, 19 nt, Homo sapiens
  misc_RNA (1)...(19): siRNA sense strand
gaaagaauguuaccagucu

SEQ ID NO: 753793 - RNA, 19 nt, Homo sapiens
  misc_RNA (1)...(19): siRNA sense strand
gagagggucuggagaauga

SEQ ID NO: 753794 - RNA, 19 nt, Homo sapiens
  misc_RNA (1)...(19): siRNA sense strand
uuaaagaacugccugaauu

SEQ ID NO: 753795 - RNA, 19 nt, Homo sapiens
  misc_RNA (1)...(19): siRNA sense strand
gcacaaaguuuuacaauga

SEQ ID NO: 753796 - RNA, 19 nt, Homo sapiens
  misc_RNA (1)...(19): siRNA sense strand
ggaaggaugcuuucgauaa

SEQ ID NO: 753797 - RNA, 19 nt, Homo sapiens
  misc_RNA (1)...(19): siRNA sense strand
caaaugcagugauauaguu

SEQ ID NO: 753798 - RNA, 19 nt, Homo sapiens
  misc_RNA (1)...(19): siRNA sense strand
gaagcuaacuuaagagaag

SEQ ID NO: 753799 - RNA, 19 nt, Homo sapiens
  misc_RNA (1)...(19): siRNA sense strand
gaaggaaggcacaaaguuu

SEQ ID NO: 753800 - RNA, 19 nt, Homo sapiens
  misc_RNA (1)...(19): siRNA sense strand
cagaacaaaugcagugaua

SEQ ID NO: 753801 - RNA, 19 nt, Homo sapiens
  misc_RNA (1)...(19): siRNA sense strand
gaagaugguucccguguca

SEQ ID NO: 753802 - RNA, 19 nt, Homo sapiens
  misc_RNA (1)...(19): siRNA sense strand
gaaccuggauaaugaugaa

SEQ ID NO: 753803 - RNA, 19 nt, Homo sapiens
  misc_RNA (1)...(19): siRNA sense strand
cagaucugcuugacauuua

SEQ ID NO: 753804 - RNA, 19 nt, Homo sapiens
  misc_RNA (1)...(19): siRNA sense strand
uuaaaggacuugcaacaaa

SEQ ID NO: 753805 - RNA, 19 nt, Homo sapiens
  misc_RNA (1)...(19): siRNA sense strand
caacuaaaguccaagaauc

SEQ ID NO: 753806 - RNA, 19 nt, Homo sapiens
  misc_RNA (1)...(19): siRNA sense strand
gaaaaucgcugcuaaacau

SEQ ID NO: 753807 - RNA, 19 nt, Homo sapiens
  misc_RNA (1)...(19): siRNA sense strand
gagaaugacuugaaaucug

SEQ ID NO: 753808 - RNA, 19 nt, Homo sapiens
  misc_RNA (1)...(19): siRNA sense strand
gaggaaagccgauuugguu

SEQ ID NO: 753809 - RNA, 19 nt, Homo sapiens
  misc_RNA (1)...(19): siRNA sense strand
ggauaaugaugaaggauug

SEQ ID NO: 753810 - RNA, 19 nt, Homo sapiens
  misc_RNA (1)...(19): siRNA sense strand
agaagaaauugcaagguua

SEQ ID NO: 753811 - RNA, 19 nt, Homo sapiens
  misc_RNA (1)...(19): siRNA sense strand
caaacagugucaauacaaa

SEQ ID NO: 753812 - RNA, 19 nt, Homo sapiens
  misc_RNA (1)...(19): siRNA sense strand
uaaagaacugccugaauua

SEQ ID NO: 753813 - RNA, 19 nt, Homo sapiens
  misc_RNA (1)...(19): siRNA sense strand
uuacugaucuguuugagaa

SEQ ID NO: 753814 - RNA, 19 nt, Homo sapiens
  misc_RNA (1)...(19): siRNA sense strand
gaaccaugccgccuacuaa

SEQ ID NO: 753815 - RNA, 19 nt, Homo sapiens
  misc_RNA (1)...(19): siRNA sense strand
gaacuuguagcuaauuuga

SEQ ID NO: 753816 - RNA, 19 nt, Homo sapiens
  misc_RNA (1)...(19): siRNA sense strand
ggcacaggcucaagaagua

SEQ ID NO: 753817 - RNA, 19 nt, Homo sapiens
  misc_RNA (1)...(19): siRNA sense strand
ccaagccgcuggugaaguu

SEQ ID NO: 753818 - RNA, 19 nt, Homo sapiens
  misc_RNA (1)...(19): siRNA sense strand
gcaggcagauggacaagug

SEQ ID NO: 753819 - RNA, 19 nt, Homo sapiens
  misc_RNA (1)...(19): siRNA sense strand
gaagaagaagcaaccgaua

SEQ ID NO: 753820 - RNA, 19 nt, Homo sapiens
  misc_RNA (1)...(19): siRNA sense strand
gcaacgaaauagagaaauc

SEQ ID NO: 753821 - RNA, 19 nt, Homo sapiens
  misc_RNA (1)...(19): siRNA sense strand
gaaaagagcuguguguugu

SEQ ID NO: 753822 - RNA, 19 nt, Homo sapiens
  misc_RNA (1)...(19): siRNA sense strand
cagcaaagaaggauaauga

SEQ ID NO: 753823 - RNA, 19 nt, Homo sapiens
  misc_RNA (1)...(19): siRNA sense strand
ucgagacgcuccugagaua

SEQ ID NO: 753824 - RNA, 19 nt, Homo sapiens
  misc_RNA (1)...(19): siRNA sense strand
gagaagaaguuuugaagaa

SEQ ID NO: 753825 - RNA, 19 nt, Homo sapiens
  misc_RNA (1)...(19): siRNA sense strand
gggaagagcaggcccagua

SEQ ID NO: 753826 - RNA, 19 nt, Homo sapiens
  misc_RNA (1)...(19): siRNA sense strand
aacagaaccuggauaauga

SEQ ID NO: 753827 - RNA, 19 nt, Homo sapiens
  misc_RNA (1)...(19): siRNA sense strand
gaauuacugcaacgaaaua

SEQ ID NO: 753828 - RNA, 19 nt, Homo sapiens
  misc_RNA (1)...(19): siRNA sense strand
guaccucagucuauauuga

SEQ ID NO: 753829 - RNA, 19 nt, Homo sapiens
  misc_RNA (1)...(19): siRNA sense strand
ggaaagccgauuugguuaa

SEQ ID NO: 753830 - RNA, 19 nt, Homo sapiens
  misc_RNA (1)...(19): siRNA sense strand
ggucucacaucaggaauuu

SEQ ID NO: 753831 - RNA, 19 nt, Homo sapiens
  misc_RNA (1)...(19): siRNA sense strand
ggugcuagcuucccuuaau

SEQ ID NO: 753832 - RNA, 19 nt, Homo sapiens
  misc_RNA (1)...(19): siRNA sense strand
gcguauggccaguauaaua

SEQ ID NO: 753833 - RNA, 19 nt, Homo sapiens
  misc_RNA (1)...(19): siRNA sense strand
guucaauugugcagccuua

SEQ ID NO: 753834 - RNA, 19 nt, Homo sapiens
  misc_RNA (1)...(19): siRNA sense strand
aaacaggagggacuucuua

SEQ ID NO: 753835 - RNA, 19 nt, Homo sapiens
  misc_RNA (1)...(19): siRNA sense strand
auagagaaauccuagauga

SEQ ID NO: 753836 - RNA, 19 nt, Homo sapiens
  misc_RNA (1)...(19): siRNA sense strand
gagagaagccaccacuuug

SEQ ID NO: 753837 - RNA, 19 nt, Homo sapiens
  misc_RNA (1)...(19): siRNA sense strand
acaaugaguugacugaaau

SEQ ID NO: 753838 - RNA, 19 nt, Homo sapiens
  misc_RNA (1)...(19): siRNA sense strand
guugggacccucagucuua

SEQ ID NO: 753839 - RNA, 19 nt, Homo sapiens
  misc_RNA (1)...(19): siRNA sense strand
gaagcaaccgauaaugauu

SEQ ID NO: 753840 - RNA, 19 nt, Homo sapiens
  misc_RNA (1)...(19): siRNA sense strand
caaagaaggauaaugacuu

SEQ ID NO: 753841 - RNA, 19 nt, Homo sapiens
  misc_RNA (1)...(19): siRNA sense strand
guuguuggaugaagaagaa

SEQ ID NO: 753842 - RNA, 19 nt, Homo sapiens
  misc_RNA (1)...(19): siRNA sense strand
gaagacagaaagagaugaa

SEQ ID NO: 753843 - RNA, 19 nt, Homo sapiens
  misc_RNA (1)...(19): siRNA sense strand
aagauggugugauaaauga

SEQ ID NO: 753844 - RNA, 19 nt, Homo sapiens
  misc_RNA (1)...(19): siRNA sense strand
caaaacagcagaagaaauu

SEQ ID NO: 753845 - RNA, 19 nt, Homo sapiens
  misc_RNA (1)...(19): siRNA sense strand
ggaaccaacuucagaacag

SEQ ID NO: 753846 - RNA, 19 nt, Homo sapiens
  misc_RNA (1)...(19): siRNA sense strand
caaaggacaccauccaaug

SEQ ID NO: 753847 - RNA, 19 nt, Homo sapiens
  misc_RNA (1)...(19): siRNA sense strand
cagcagcaauugaagaugu

SEQ ID NO: 753848 - RNA, 19 nt, Homo sapiens
  misc_RNA (1)...(19): siRNA sense strand
uaaaggacuugcaacaaag

SEQ ID NO: 753849 - RNA, 19 nt, Homo sapiens
  misc_RNA (1)...(19): siRNA sense strand
ugagagaagccaccacuuu

SEQ ID NO: 753850 - RNA, 19 nt, Homo sapiens
  misc_RNA (1)...(19): siRNA sense strand
uacaaugaguugacugaaa

SEQ ID NO: 753851 - RNA, 19 nt, Homo sapiens
  misc_RNA (1)...(19): siRNA sense strand
guccaagaaucucuaaaga

SEQ ID NO: 753852 - RNA, 19 nt, Homo sapiens
  misc_RNA (1)...(19): siRNA sense strand
gcagggcagugagguugua

SEQ ID NO: 753853 - RNA, 19 nt, Homo sapiens
  misc_RNA (1)...(19): siRNA sense strand
cagaacagaaccuggauaa

SEQ ID NO: 753854 - RNA, 19 nt, Homo sapiens
  misc_RNA (1)...(19): siRNA sense strand
gcaaaggacaccauccaau

SEQ ID NO: 753855 - RNA, 19 nt, Homo sapiens
  misc_RNA (1)...(19): siRNA sense strand
agacgcuccugagauauua

SEQ ID NO: 753856 - RNA, 19 nt, Homo sapiens
  misc_RNA (1)...(19): siRNA sense strand
ggcucaagauggugugaua

SEQ ID NO: 753857 - RNA, 19 nt, Homo sapiens
  misc_RNA (1)...(19): siRNA sense strand
gacaagugaaagaauguua

SEQ ID NO: 753858 - RNA, 19 nt, Homo sapiens
  misc_RNA (1)...(19): siRNA sense strand
ccagaucugugauugaaca

SEQ ID NO: 753859 - RNA, 19 nt, Homo sapiens
  misc_RNA (1)...(19): siRNA sense strand
gcaugcagcagaacugauu

SEQ ID NO: 753860 - RNA, 19 nt, Homo sapiens
  misc_RNA (1)...(19): siRNA sense strand
aaucagaucugcuugacau

SEQ ID NO: 753861 - RNA, 19 nt, Homo sapiens
  misc_RNA (1)...(19): siRNA sense strand
agccuuagcuagccaaauu

SEQ ID NO: 753862 - RNA, 19 nt, Homo sapiens
  misc_RNA (1)...(19): siRNA sense strand
ccacagcagucuuacuauc

SEQ ID NO: 753863 - RNA, 19 nt, Homo sapiens
  misc_RNA (1)...(19): siRNA sense strand
agaaugacuugaaaucugu

SEQ ID NO: 753864 - RNA, 19 nt, Homo sapiens
  misc_RNA (1)...(19): siRNA sense strand
cauuaagguuguuggauga

SEQ ID NO: 753865 - RNA, 19 nt, Homo sapiens
  misc_RNA (1)...(19): siRNA sense strand
gcagaagaaauuuggagaa

SEQ ID NO: 753866 - RNA, 19 nt, Homo sapiens
  misc_RNA (1)...(19): siRNA sense strand
gcuguguguuguucaauug

SEQ ID NO: 753867 - RNA, 19 nt, Homo sapiens
  misc_RNA (1)...(19): siRNA sense strand
caagauggugugauaaaug

SEQ ID NO: 753868 - RNA, 19 nt, Homo sapiens
  misc_RNA (1)...(19): siRNA sense strand
ugacaugacaagcaaguuu

SEQ ID NO: 753869 - RNA, 19 nt, Homo sapiens
  misc_RNA (1)...(19): siRNA sense strand
gaaccaacuucagaacagu

SEQ ID NO: 753870 - RNA, 19 nt, Homo sapiens
  misc_RNA (1)...(19): siRNA sense strand
gaaagccgauuugguuaac

SEQ ID NO: 753871 - RNA, 19 nt, Homo sapiens
  misc_RNA (1)...(19): siRNA sense strand
gagacgcuccugagauauu

SEQ ID NO: 753872 - RNA, 19 nt, Homo sapiens
  misc_RNA (1)...(19): siRNA sense strand
gagcagagggaaccaacuu

SEQ ID NO: 753873 - RNA, 19 nt, Homo sapiens
  misc_RNA (1)...(19): siRNA sense strand
gggacccucagucuuauua

SEQ ID NO: 753874 - RNA, 19 nt, Homo sapiens
  misc_RNA (1)...(19): siRNA sense strand
acaaagcauugccagagaa

SEQ ID NO: 753875 - RNA, 19 nt, Homo sapiens
  misc_RNA (1)...(19): siRNA sense strand
ggacuugcaacaaagcauu

SEQ ID NO: 753876 - RNA, 19 nt, Homo sapiens
  misc_RNA (1)...(19): siRNA sense strand
gaagaagcaaccgauaaug

SEQ ID NO: 753877 - RNA, 19 nt, Homo sapiens
  misc_RNA (1)...(19): siRNA sense strand
ggaggcauccagacuguug

SEQ ID NO: 753878 - RNA, 19 nt, Homo sapiens
  misc_RNA (1)...(19): siRNA sense strand
cagaagaaauuuggagaag

SEQ ID NO: 753879 - RNA, 19 nt, Homo sapiens
  misc_RNA (1)...(19): siRNA sense strand
auggaggucuuacaacuaa

SEQ ID NO: 753880 - RNA, 19 nt, Homo sapiens
  misc_RNA (1)...(19): siRNA sense strand
gaaccuagugcuccuucaa

SEQ ID NO: 753881 - RNA, 19 nt, Homo sapiens
  misc_RNA (1)...(19): siRNA sense strand
gcaaaucgagcuccuucug

SEQ ID NO: 753882 - RNA, 19 nt, Homo sapiens
  misc_RNA (1)...(19): siRNA sense strand
ccaauaagcucaucaaaga

SEQ ID NO: 753883 - RNA, 19 nt, Homo sapiens
  misc_RNA (1)...(19): siRNA sense strand
ggacaaugaugaggccuua

SEQ ID NO: 753884 - RNA, 19 nt, Homo sapiens
  misc_RNA (1)...(19): siRNA sense strand
gaacaacaaugugaaacug

SEQ ID NO: 753885 - RNA, 19 nt, Homo sapiens
  misc_RNA (1)...(19): siRNA sense strand
ggucgugucucccaaguau

SEQ ID NO: 753886 - RNA, 19 nt, Homo sapiens
  misc_RNA (1)...(19): siRNA sense strand
ucaacgagcucaucaaggu

SEQ ID NO: 753887 - RNA, 19 nt, Homo sapiens
  misc_RNA (1)...(19): siRNA sense strand
cggagaaggugaagaacaa

SEQ ID NO: 753888 - RNA, 19 nt, Homo sapiens
  misc_RNA (1)...(19): siRNA sense strand
ugacggugcuggaaacaug

SEQ ID NO: 753889 - RNA, 19 nt, Homo sapiens
  misc_RNA (1)...(19): siRNA sense strand
acacagaggacaaugauga

SEQ ID NO: 753890 - RNA, 19 nt, Homo sapiens
  misc_RNA (1)...(19): siRNA sense strand
ggacaucggagaaggugaa

SEQ ID NO: 753891 - RNA, 19 nt, Homo sapiens
  misc_RNA (1)...(19): siRNA sense strand
uccgggaccugcagaauaa

SEQ ID NO: 753892 - RNA, 19 nt, Homo sapiens
  misc_RNA (1)...(19): siRNA sense strand
ucgaggaggugaacaacaa

SEQ ID NO: 753893 - RNA, 19 nt, Homo sapiens
  misc_RNA (1)...(19): siRNA sense strand
ccuaccagaugcuaaagaa

SEQ ID NO: 753894 - RNA, 19 nt, Homo sapiens
  misc_RNA (1)...(19): siRNA sense strand
gaggugaacaacaauguga

SEQ ID NO: 753895 - RNA, 19 nt, Homo sapiens
  misc_RNA (1)...(19): siRNA sense strand
ugaaacugcucacggagau

SEQ ID NO: 753896 - RNA, 19 nt, Homo sapiens
  misc_RNA (1)...(19): siRNA sense strand
caucggagaaggugaagaa

SEQ ID NO: 753897 - RNA, 19 nt, Homo sapiens
  misc_RNA (1)...(19): siRNA sense strand
cuggaaacaugcaugaaga

SEQ ID NO: 753898 - RNA, 19 nt, Homo sapiens
  misc_RNA (1)...(19): siRNA sense strand
ccaagguuaugaaggugaa

SEQ ID NO: 753899 - RNA, 19 nt, Homo sapiens
  misc_RNA (1)...(19): siRNA sense strand
ugaucaaccuguauaagca

SEQ ID NO: 753900 - RNA, 19 nt, Homo sapiens
  misc_RNA (1)...(19): siRNA sense strand
uaucugggcucucggacau

SEQ ID NO: 753901 - RNA, 19 nt, Homo sapiens
  misc_RNA (1)...(19): siRNA sense strand
gcuacaagcucaccuucac

SEQ ID NO: 753902 - RNA, 19 nt, Homo sapiens
  misc_RNA (1)...(19): siRNA sense strand
caucaaacccagcaacauc

SEQ ID NO: 753903 - RNA, 19 nt, Homo sapiens
  misc_RNA (1)...(19): siRNA sense strand
agaagcggauggagaagau

SEQ ID NO: 753904 - RNA, 19 nt, Homo sapiens
  misc_RNA (1)...(19): siRNA sense strand
ggugaacaacaaugugaaa

SEQ ID NO: 753905 - RNA, 19 nt, Homo sapiens
  misc_RNA (1)...(19): siRNA sense strand
gaugguaccggauggaaca

SEQ ID NO: 753906 - RNA, 19 nt, Homo sapiens
  misc_RNA (1)...(19): siRNA sense strand
gagaaggugaagaacaaga

SEQ ID NO: 753907 - RNA, 19 nt, Homo sapiens
  misc_RNA (1)...(19): siRNA sense strand
gccaauaagcucaucaaag

SEQ ID NO: 753908 - RNA, 19 nt, Homo sapiens
  misc_RNA (1)...(19): siRNA sense strand
aauaagcucaucaaagaga

SEQ ID NO: 753909 - RNA, 19 nt, Homo sapiens
  misc_RNA (1)...(19): siRNA sense strand
cgacgaagugggcaaguuc

SEQ ID NO: 753910 - RNA, 19 nt, Homo sapiens
  misc_RNA (1)...(19): siRNA sense strand
ccagaugacacuaccuuuc

SEQ ID NO: 753911 - RNA, 19 nt, Homo sapiens
  misc_RNA (1)...(19): siRNA sense strand
ggcccaagccuggauggua

SEQ ID NO: 753912 - RNA, 19 nt, Homo sapiens
  misc_RNA (1)...(19): siRNA sense strand
ugacacagaggacaaugau

SEQ ID NO: 753913 - RNA, 19 nt, Homo sapiens
  misc_RNA (1)...(19): siRNA sense strand
gcaaguuccgcuuucucaa

SEQ ID NO: 753914 - RNA, 19 nt, Homo sapiens
  misc_RNA (1)...(19): siRNA sense strand
acgacgagcucaugucucu

SEQ ID NO: 753915 - RNA, 19 nt, Homo sapiens
  misc_RNA (1)...(19): siRNA sense strand
gaucuuggagcuccucuac

SEQ ID NO: 753916 - RNA, 19 nt, Homo sapiens
  misc_RNA (1)...(19): siRNA sense strand
gaaggugaagaacaagauc

SEQ ID NO: 753917 - RNA, 19 nt, Homo sapiens
  misc_RNA (1)...(19): siRNA sense strand
gcagcucaacgaggacuuu

SEQ ID NO: 753918 - RNA, 19 nt, Homo sapiens
  misc_RNA (1)...(19): siRNA sense strand
ggcaccaccuacccagcua

SEQ ID NO: 753919 - RNA, 19 nt, Homo sapiens
  misc_RNA (1)...(19): siRNA sense strand
gaccuccgcgcagccaaua

SEQ ID NO: 753920 - RNA, 19 nt, Homo sapiens
  misc_RNA (1)...(19): siRNA sense strand
gcuggaaacaugcaugaag

SEQ ID NO: 753921 - RNA, 19 nt, Homo sapiens
  misc_RNA (1)...(19): siRNA sense strand
gaaucaauagagccacgaa

SEQ ID NO: 753922 - RNA, 19 nt, Homo sapiens
  misc_RNA (1)...(19): siRNA sense strand
cgauggagccggagacucu

SEQ ID NO: 753923 - RNA, 19 nt, Homo sapiens
  misc_RNA (1)...(19): siRNA sense strand
ggcaaguuccgcuuucuca

SEQ ID NO: 753924 - RNA, 19 nt, Homo sapiens
  misc_RNA (1)...(19): siRNA sense strand
ggaggugaacaacaaugug

SEQ ID NO: 753925 - RNA, 19 nt, Homo sapiens
  misc_RNA (1)...(19): siRNA sense strand
gaugaggagaaauccaaga

SEQ ID NO: 753926 - RNA, 19 nt, Homo sapiens
  misc_RNA (1)...(19): siRNA sense strand
cuuugaagaugaggagaaa

SEQ ID NO: 753927 - RNA, 19 nt, Homo sapiens
  misc_RNA (1)...(19): siRNA sense strand
gagcucccaucccgaagac

SEQ ID NO: 753928 - RNA, 19 nt, Homo sapiens
  misc_RNA (1)...(19): siRNA sense strand
aagaugaggagaaauccaa

SEQ ID NO: 753929 - RNA, 19 nt, Homo sapiens
  misc_RNA (1)...(19): siRNA sense strand
ucuuggagcuccucuacag

SEQ ID NO: 753930 - RNA, 19 nt, Homo sapiens
  misc_RNA (1)...(19): siRNA sense strand
gaggaggugaacaacaaug

SEQ ID NO: 753931 - RNA, 19 nt, Homo sapiens
  misc_RNA (1)...(19): siRNA sense strand
gaagaugaggagaaaucca

SEQ ID NO: 753932 - RNA, 19 nt, Homo sapiens
  misc_RNA (1)...(19): siRNA sense strand
ucgcagaggccuaccagau

SEQ ID NO: 753933 - RNA, 19 nt, Homo sapiens
  misc_RNA (1)...(19): siRNA sense strand
cuggaggcgcgaaucaaua

SEQ ID NO: 753934 - RNA, 19 nt, Homo sapiens
  misc_RNA (1)...(19): siRNA sense strand
gugcuggaaacaugcauga

SEQ ID NO: 753935 - RNA, 19 nt, Homo sapiens
  misc_RNA (1)...(19): siRNA sense strand
gugggcaaguuccgcuuuc

SEQ ID NO: 753936 - RNA, 19 nt, Homo sapiens
  misc_RNA (1)...(19): siRNA sense strand
cgcagaggccuaccagaug

SEQ ID NO: 753937 - RNA, 19 nt, Homo sapiens
  misc_RNA (1)...(19): siRNA sense strand
cuccgggaccugcagaaua

SEQ ID NO: 753938 - RNA, 19 nt, Homo sapiens
  misc_RNA (1)...(19): siRNA sense strand
gcugcuggcccacaagauc

SEQ ID NO: 753939 - RNA, 19 nt, Homo sapiens
  misc_RNA (1)...(19): siRNA sense strand
gugaucaaccuguauaagc

SEQ ID NO: 753940 - RNA, 19 nt, Homo sapiens
  misc_RNA (1)...(19): siRNA sense strand
cgagugacacagaggacaa

SEQ ID NO: 753941 - RNA, 19 nt, Homo sapiens
  misc_RNA (1)...(19): siRNA sense strand
caaguuccgcuuucucaac

SEQ ID NO: 753942 - RNA, 19 nt, Homo sapiens
  misc_RNA (1)...(19): siRNA sense strand
ccacggccgaagaauguga

SEQ ID NO: 753943 - RNA, 19 nt, Homo sapiens
  misc_RNA (1)...(19): siRNA sense strand
aaggagagaugguggauua

SEQ ID NO: 753944 - RNA, 19 nt, Homo sapiens
  misc_RNA (1)...(19): siRNA sense strand
cagcugggcuuccugguuu

SEQ ID NO: 753945 - RNA, 19 nt, Homo sapiens
  misc_RNA (1)...(19): siRNA sense strand
ccaaagacaucuccaggau

SEQ ID NO: 753946 - RNA, 19 nt, Homo sapiens
  misc_RNA (1)...(19): siRNA sense strand
gagagaugguggauuacaa

SEQ ID NO: 753947 - RNA, 19 nt, Homo sapiens
  misc_RNA (1)...(19): siRNA sense strand
aaagggaccucgcgguaaa

SEQ ID NO: 753948 - RNA, 19 nt, Homo sapiens
  misc_RNA (1)...(19): siRNA sense strand
gaugguggauuacaaugga

SEQ ID NO: 753949 - RNA, 19 nt, Homo sapiens
  misc_RNA (1)...(19): siRNA sense strand
ggauuacaauggaaacauc

SEQ ID NO: 753950 - RNA, 19 nt, Homo sapiens
  misc_RNA (1)...(19): siRNA sense strand
caagggagaaccagggaaa

SEQ ID NO: 753951 - RNA, 19 nt, Homo sapiens
  misc_RNA (1)...(19): siRNA sense strand
ggaagcaggacuagaugga

SEQ ID NO: 753952 - RNA, 19 nt, Homo sapiens
  misc_RNA (1)...(19): siRNA sense strand
caaggcugcuggaacaagu

SEQ ID NO: 753953 - RNA, 19 nt, Homo sapiens
  misc_RNA (1)...(19): siRNA sense strand
gggagaagcaggugucgau

SEQ ID NO: 753954 - RNA, 19 nt, Homo sapiens
  misc_RNA (1)...(19): siRNA sense strand
ggagaacagggaccagaug

SEQ ID NO: 753955 - RNA, 19 nt, Homo sapiens
  misc_RNA (1)...(19): siRNA sense strand
acaauggaaacaucaauga

SEQ ID NO: 753956 - RNA, 19 nt, Homo sapiens
  misc_RNA (1)...(19): siRNA sense strand
gaaaggagagaugguggau

SEQ ID NO: 753957 - RNA, 19 nt, Homo sapiens
  misc_RNA (1)...(19): siRNA sense strand
cuagagguuucccuggauu

SEQ ID NO: 753958 - RNA, 19 nt, Homo sapiens
  misc_RNA (1)...(19): siRNA sense strand
gcaaauggagacggcuauu

SEQ ID NO: 753959 - RNA, 19 nt, Homo sapiens
  misc_RNA (1)...(19): siRNA sense strand
gaaaggcuuccagggagaa

SEQ ID NO: 753960 - RNA, 19 nt, Homo sapiens
  misc_RNA (1)...(19): siRNA sense strand
gcagcugggcuuccugguu

SEQ ID NO: 753961 - RNA, 19 nt, Homo sapiens
  misc_RNA (1)...(19): siRNA sense strand
ggagagaugguggauuaca

SEQ ID NO: 753962 - RNA, 19 nt, Homo sapiens
  misc_RNA (1)...(19): siRNA sense strand
gaugcuggcaacuccauug

SEQ ID NO: 753963 - RNA, 19 nt, Homo sapiens
  misc_RNA (1)...(19): siRNA sense strand
gcguggagcagcuggagaa

SEQ ID NO: 753964 - RNA, 19 nt, Homo sapiens
  misc_RNA (1)...(19): siRNA sense strand
uggagcagcuggagaacag

SEQ ID NO: 753965 - RNA, 19 nt, Homo sapiens
  misc_RNA (1)...(19): siRNA sense strand
ggauuuccgggucccauug

SEQ ID NO: 753966 - RNA, 19 nt, Homo sapiens
  misc_RNA (1)...(19): siRNA sense strand
gagaugguggauuacaaug

SEQ ID NO: 753967 - RNA, 19 nt, Homo sapiens
  misc_RNA (1)...(19): siRNA sense strand
uagcggagcgcacccacaa

SEQ ID NO: 753968 - RNA, 19 nt, Homo sapiens
  misc_RNA (1)...(19): siRNA sense strand
gggagaaccagggaaagga

SEQ ID NO: 753969 - RNA, 19 nt, Homo sapiens
  misc_RNA (1)...(19): siRNA sense strand
gagccaggccagcauccaa

SEQ ID NO: 753970 - RNA, 19 nt, Homo sapiens
  misc_RNA (1)...(19): siRNA sense strand
gguacuccaggaccaauug

SEQ ID NO: 753971 - RNA, 19 nt, Homo sapiens
  misc_RNA (1)...(19): siRNA sense strand
aaaggagacccugggauga

SEQ ID NO: 753972 - RNA, 19 nt, Homo sapiens
  misc_RNA (1)...(19): siRNA sense strand
gagccagggaucccaggaa

SEQ ID NO: 753973 - RNA, 19 nt, Homo sapiens
  misc_RNA (1)...(19): siRNA sense strand
gaaccagggaaaggagaga

SEQ ID NO: 753974 - RNA, 19 nt, Homo sapiens
  misc_RNA (1)...(19): siRNA sense strand
gauuacaauggaaacauca

SEQ ID NO: 753975 - RNA, 19 nt, Homo sapiens
  misc_RNA (1)...(19): siRNA sense strand
ggucaaccaggaacuagag

SEQ ID NO: 753976 - RNA, 19 nt, Homo sapiens
  misc_RNA (1)...(19): siRNA sense strand
aaggagagaugguggauua

SEQ ID NO: 753977 - RNA, 19 nt, Homo sapiens
  misc_RNA (1)...(19): siRNA sense strand
cagcugggcuuccugguuu

SEQ ID NO: 753978 - RNA, 19 nt, Homo sapiens
  misc_RNA (1)...(19): siRNA sense strand
ccaaagacaucuccaggau

SEQ ID NO: 753979 - RNA, 19 nt, Homo sapiens
  misc_RNA (1)...(19): siRNA sense strand
gagagaugguggauuacaa

SEQ ID NO: 753980 - RNA, 19 nt, Homo sapiens
  misc_RNA (1)...(19): siRNA sense strand
aaagggaccucgcgguaaa

SEQ ID NO: 753981 - RNA, 19 nt, Homo sapiens
  misc_RNA (1)...(19): siRNA sense strand
gaugguggauuacaaugga

SEQ ID NO: 753982 - RNA, 19 nt, Homo sapiens
  misc_RNA (1)...(19): siRNA sense strand
ggauuacaauggaaacauc

SEQ ID NO: 753983 - RNA, 19 nt, Homo sapiens
  misc_RNA (1)...(19): siRNA sense strand
caagggagaaccagggaaa

SEQ ID NO: 753984 - RNA, 19 nt, Homo sapiens
  misc_RNA (1)...(19): siRNA sense strand
ggaagcaggacuagaugga

SEQ ID NO: 753985 - RNA, 19 nt, Homo sapiens
  misc_RNA (1)...(19): siRNA sense strand
caaggcugcuggaacaagu

SEQ ID NO: 753986 - RNA, 19 nt, Homo sapiens
  misc_RNA (1)...(19): siRNA sense strand
gggagaagcaggugucgau

SEQ ID NO: 753987 - RNA, 19 nt, Homo sapiens
  misc_RNA (1)...(19): siRNA sense strand
ggagaacagggaccagaug

SEQ ID NO: 753988 - RNA, 19 nt, Homo sapiens
  misc_RNA (1)...(19): siRNA sense strand
acaauggaaacaucaauga

SEQ ID NO: 753989 - RNA, 19 nt, Homo sapiens
  misc_RNA (1)...(19): siRNA sense strand
gaaaggagagaugguggau

SEQ ID NO: 753990 - RNA, 19 nt, Homo sapiens
  misc_RNA (1)...(19): siRNA sense strand
cuagagguuucccuggauu

SEQ ID NO: 753991 - RNA, 19 nt, Homo sapiens
  misc_RNA (1)...(19): siRNA sense strand
gcaaauggagacggcuauu

SEQ ID NO: 753992 - RNA, 19 nt, Homo sapiens
  misc_RNA (1)...(19): siRNA sense strand
gaaaggcuuccagggagaa

SEQ ID NO: 753993 - RNA, 19 nt, Homo sapiens
  misc_RNA (1)...(19): siRNA sense strand
gcagcugggcuuccugguu

SEQ ID NO: 753994 - RNA, 19 nt, Homo sapiens
  misc_RNA (1)...(19): siRNA sense strand
ggagagaugguggauuaca

SEQ ID NO: 753995 - RNA, 19 nt, Homo sapiens
  misc_RNA (1)...(19): siRNA sense strand
gaugcuggcaacuccauug

SEQ ID NO: 753996 - RNA, 19 nt, Homo sapiens
  misc_RNA (1)...(19): siRNA sense strand
gcguggagcagcuggagaa

SEQ ID NO: 753997 - RNA, 19 nt, Homo sapiens
  misc_RNA (1)...(19): siRNA sense strand
uggagcagcuggagaacag

SEQ ID NO: 753998 - RNA, 19 nt, Homo sapiens
  misc_RNA (1)...(19): siRNA sense strand
ggauuuccgggucccauug

SEQ ID NO: 753999 - RNA, 19 nt, Homo sapiens
  misc_RNA (1)...(19): siRNA sense strand
gagaugguggauuacaaug

SEQ ID NO: 754000 - RNA, 19 nt, Homo sapiens
  misc_RNA (1)...(19): siRNA sense strand
uagcggagcgcacccacaa

SEQ ID NO: 754001 - RNA, 19 nt, Homo sapiens
  misc_RNA (1)...(19): siRNA sense strand
gggagaaccagggaaagga

SEQ ID NO: 754002 - RNA, 19 nt, Homo sapiens
  misc_RNA (1)...(19): siRNA sense strand
gagccaggccagcauccaa

SEQ ID NO: 754003 - RNA, 19 nt, Homo sapiens
  misc_RNA (1)...(19): siRNA sense strand
gguacuccaggaccaauug

SEQ ID NO: 754004 - RNA, 19 nt, Homo sapiens
  misc_RNA (1)...(19): siRNA sense strand
aaaggagacccugggauga

SEQ ID NO: 754005 - RNA, 19 nt, Homo sapiens
  misc_RNA (1)...(19): siRNA sense strand
gagccagggaucccaggaa

SEQ ID NO: 754006 - RNA, 19 nt, Homo sapiens
  misc_RNA (1)...(19): siRNA sense strand
gaaccagggaaaggagaga

SEQ ID NO: 754007 - RNA, 19 nt, Homo sapiens
  misc_RNA (1)...(19): siRNA sense strand
gauuacaauggaaacauca

SEQ ID NO: 754008 - RNA, 19 nt, Homo sapiens
  misc_RNA (1)...(19): siRNA sense strand
ggucaaccaggaacuagag

SEQ ID NO: 754009 - RNA, 19 nt, Homo sapiens
  misc_RNA (1)...(19): siRNA sense strand
aaggagagaugguggauua

SEQ ID NO: 754010 - RNA, 19 nt, Homo sapiens
  misc_RNA (1)...(19): siRNA sense strand
cagcugggcuuccugguuu

SEQ ID NO: 754011 - RNA, 19 nt, Homo sapiens
  misc_RNA (1)...(19): siRNA sense strand
ccaaagacaucuccaggau

SEQ ID NO: 754012 - RNA, 19 nt, Homo sapiens
  misc_RNA (1)...(19): siRNA sense strand
gagagaugguggauuacaa

SEQ ID NO: 754013 - RNA, 19 nt, Homo sapiens
  misc_RNA (1)...(19): siRNA sense strand
aaagggaccucgcgguaaa

SEQ ID NO: 754014 - RNA, 19 nt, Homo sapiens
  misc_RNA (1)...(19): siRNA sense strand
gaugguggauuacaaugga

SEQ ID NO: 754015 - RNA, 19 nt, Homo sapiens
  misc_RNA (1)...(19): siRNA sense strand
ggauuacaauggaaacauc

SEQ ID NO: 754016 - RNA, 19 nt, Homo sapiens
  misc_RNA (1)...(19): siRNA sense strand
caagggagaaccagggaaa

SEQ ID NO: 754017 - RNA, 19 nt, Homo sapiens
  misc_RNA (1)...(19): siRNA sense strand
ggaagcaggacuagaugga

SEQ ID NO: 754018 - RNA, 19 nt, Homo sapiens
  misc_RNA (1)...(19): siRNA sense strand
caaggcugcuggaacaagu

SEQ ID NO: 754019 - RNA, 19 nt, Homo sapiens
  misc_RNA (1)...(19): siRNA sense strand
gggagaagcaggugucgau

SEQ ID NO: 754020 - RNA, 19 nt, Homo sapiens
  misc_RNA (1)...(19): siRNA sense strand
ggagaacagggaccagaug

SEQ ID NO: 754021 - RNA, 19 nt, Homo sapiens
  misc_RNA (1)...(19): siRNA sense strand
acaauggaaacaucaauga

SEQ ID NO: 754022 - RNA, 19 nt, Homo sapiens
  misc_RNA (1)...(19): siRNA sense strand
gaaaggagagaugguggau

SEQ ID NO: 754023 - RNA, 19 nt, Homo sapiens
  misc_RNA (1)...(19): siRNA sense strand
cuagagguuucccuggauu

SEQ ID NO: 754024 - RNA, 19 nt, Homo sapiens
  misc_RNA (1)...(19): siRNA sense strand
gcaaauggagacggcuauu

SEQ ID NO: 754025 - RNA, 19 nt, Homo sapiens
  misc_RNA (1)...(19): siRNA sense strand
gaaaggcuuccagggagaa

SEQ ID NO: 754026 - RNA, 19 nt, Homo sapiens
  misc_RNA (1)...(19): siRNA sense strand
gcagcugggcuuccugguu

SEQ ID NO: 754027 - RNA, 19 nt, Homo sapiens
  misc_RNA (1)...(19): siRNA sense strand
ggagagaugguggauuaca

SEQ ID NO: 754028 - RNA, 19 nt, Homo sapiens
  misc_RNA (1)...(19): siRNA sense strand
gaugcuggcaacuccauug

SEQ ID NO: 754029 - RNA, 19 nt, Homo sapiens
  misc_RNA (1)...(19): siRNA sense strand
gcguggagcagcuggagaa

SEQ ID NO: 754030 - RNA, 19 nt, Homo sapiens
  misc_RNA (1)...(19): siRNA sense strand
uggagcagcuggagaacag

SEQ ID NO: 754031 - RNA, 19 nt, Homo sapiens
  misc_RNA (1)...(19): siRNA sense strand
ggauuuccgggucccauug

SEQ ID NO: 754032 - RNA, 19 nt, Homo sapiens
  misc_RNA (1)...(19): siRNA sense strand
gagaugguggauuacaaug

SEQ ID NO: 754033 - RNA, 19 nt, Homo sapiens
  misc_RNA (1)...(19): siRNA sense strand
uagcggagcgcacccacaa

SEQ ID NO: 754034 - RNA, 19 nt, Homo sapiens
  misc_RNA (1)...(19): siRNA sense strand
gggagaaccagggaaagga

SEQ ID NO: 754035 - RNA, 19 nt, Homo sapiens
  misc_RNA (1)...(19): siRNA sense strand
gagccaggccagcauccaa

SEQ ID NO: 754036 - RNA, 19 nt, Homo sapiens
  misc_RNA (1)...(19): siRNA sense strand
gguacuccaggaccaauug

SEQ ID NO: 754037 - RNA, 19 nt, Homo sapiens
  misc_RNA (1)...(19): siRNA sense strand
aaaggagacccugggauga

SEQ ID NO: 754038 - RNA, 19 nt, Homo sapiens
  misc_RNA (1)...(19): siRNA sense strand
gagccagggaucccaggaa

SEQ ID NO: 754039 - RNA, 19 nt, Homo sapiens
  misc_RNA (1)...(19): siRNA sense strand
gaaccagggaaaggagaga

SEQ ID NO: 754040 - RNA, 19 nt, Homo sapiens
  misc_RNA (1)...(19): siRNA sense strand
gauuacaauggaaacauca

SEQ ID NO: 754041 - RNA, 19 nt, Homo sapiens
  misc_RNA (1)...(19): siRNA sense strand
ggucaaccaggaacuagag

SEQ ID NO: 754042 - RNA, 19 nt, Homo sapiens
  misc_RNA (1)...(19): siRNA sense strand
aaggagagaugguggauua

SEQ ID NO: 754043 - RNA, 19 nt, Homo sapiens
  misc_RNA (1)...(19): siRNA sense strand
cagcugggcuuccugguuu

SEQ ID NO: 754044 - RNA, 19 nt, Homo sapiens
  misc_RNA (1)...(19): siRNA sense strand
ccaaagacaucuccaggau

SEQ ID NO: 754045 - RNA, 19 nt, Homo sapiens
  misc_RNA (1)...(19): siRNA sense strand
gagagaugguggauuacaa

SEQ ID NO: 754046 - RNA, 19 nt, Homo sapiens
  misc_RNA (1)...(19): siRNA sense strand
aaagggaccucgcgguaaa

SEQ ID NO: 754047 - RNA, 19 nt, Homo sapiens
  misc_RNA (1)...(19): siRNA sense strand
gaugguggauuacaaugga

SEQ ID NO: 754048 - RNA, 19 nt, Homo sapiens
  misc_RNA (1)...(19): siRNA sense strand
ggauuacaauggaaacauc

SEQ ID NO: 754049 - RNA, 19 nt, Homo sapiens
  misc_RNA (1)...(19): siRNA sense strand
caagggagaaccagggaaa

SEQ ID NO: 754050 - RNA, 19 nt, Homo sapiens
  misc_RNA (1)...(19): siRNA sense strand
ggaagcaggacuagaugga

SEQ ID NO: 754051 - RNA, 19 nt, Homo sapiens
  misc_RNA (1)...(19): siRNA sense strand
caaggcugcuggaacaagu

SEQ ID NO: 754052 - RNA, 19 nt, Homo sapiens
  misc_RNA (1)...(19): siRNA sense strand
gggagaagcaggugucgau

SEQ ID NO: 754053 - RNA, 19 nt, Homo sapiens
  misc_RNA (1)...(19): siRNA sense strand
ggagaacagggaccagaug

SEQ ID NO: 754054 - RNA, 19 nt, Homo sapiens
  misc_RNA (1)...(19): siRNA sense strand
acaauggaaacaucaauga

SEQ ID NO: 754055 - RNA, 19 nt, Homo sapiens
  misc_RNA (1)...(19): siRNA sense strand
gaaaggagagaugguggau

SEQ ID NO: 754056 - RNA, 19 nt, Homo sapiens
  misc_RNA (1)...(19): siRNA sense strand
cuagagguuucccuggauu

SEQ ID NO: 754057 - RNA, 19 nt, Homo sapiens
  misc_RNA (1)...(19): siRNA sense strand
gcaaauggagacggcuauu

SEQ ID NO: 754058 - RNA, 19 nt, Homo sapiens
  misc_RNA (1)...(19): siRNA sense strand
gaaaggcuuccagggagaa

SEQ ID NO: 754059 - RNA, 19 nt, Homo sapiens
  misc_RNA (1)...(19): siRNA sense strand
gcagcugggcuuccugguu

SEQ ID NO: 754060 - RNA, 19 nt, Homo sapiens
  misc_RNA (1)...(19): siRNA sense strand
ggagagaugguggauuaca

SEQ ID NO: 754061 - RNA, 19 nt, Homo sapiens
  misc_RNA (1)...(19): siRNA sense strand
gaugcuggcaacuccauug

SEQ ID NO: 754062 - RNA, 19 nt, Homo sapiens
  misc_RNA (1)...(19): siRNA sense strand
gcguggagcagcuggagaa

SEQ ID NO: 754063 - RNA, 19 nt, Homo sapiens
  misc_RNA (1)...(19): siRNA sense strand
uggagcagcuggagaacag

SEQ ID NO: 754064 - RNA, 19 nt, Homo sapiens
  misc_RNA (1)...(19): siRNA sense strand
ggauuuccgggucccauug

SEQ ID NO: 754065 - RNA, 19 nt, Homo sapiens
  misc_RNA (1)...(19): siRNA sense strand
gagaugguggauuacaaug

SEQ ID NO: 754066 - RNA, 19 nt, Homo sapiens
  misc_RNA (1)...(19): siRNA sense strand
uagcggagcgcacccacaa

SEQ ID NO: 754067 - RNA, 19 nt, Homo sapiens
  misc_RNA (1)...(19): siRNA sense strand
gggagaaccagggaaagga

SEQ ID NO: 754068 - RNA, 19 nt, Homo sapiens
  misc_RNA (1)...(19): siRNA sense strand
gagccaggccagcauccaa

SEQ ID NO: 754069 - RNA, 19 nt, Homo sapiens
  misc_RNA (1)...(19): siRNA sense strand
gguacuccaggaccaauug

SEQ ID NO: 754070 - RNA, 19 nt, Homo sapiens
  misc_RNA (1)...(19): siRNA sense strand
aaaggagacccugggauga

SEQ ID NO: 754071 - RNA, 19 nt, Homo sapiens
  misc_RNA (1)...(19): siRNA sense strand
gagccagggaucccaggaa

SEQ ID NO: 754072 - RNA, 19 nt, Homo sapiens
  misc_RNA (1)...(19): siRNA sense strand
gaaccagggaaaggagaga

SEQ ID NO: 754073 - RNA, 19 nt, Homo sapiens
  misc_RNA (1)...(19): siRNA sense strand
gauuacaauggaaacauca

SEQ ID NO: 754074 - RNA, 19 nt, Homo sapiens
  misc_RNA (1)...(19): siRNA sense strand
ggucaaccaggaacuagag

SEQ ID NO: 754075 - RNA, 19 nt, Homo sapiens
  misc_RNA (1)...(19): siRNA sense strand
aaggagagaugguggauua

SEQ ID NO: 754076 - RNA, 19 nt, Homo sapiens
  misc_RNA (1)...(19): siRNA sense strand
cagcugggcuuccugguuu

SEQ ID NO: 754077 - RNA, 19 nt, Homo sapiens
  misc_RNA (1)...(19): siRNA sense strand
ccaaagacaucuccaggau

SEQ ID NO: 754078 - RNA, 19 nt, Homo sapiens
  misc_RNA (1)...(19): siRNA sense strand
gagagaugguggauuacaa

SEQ ID NO: 754079 - RNA, 19 nt, Homo sapiens
  misc_RNA (1)...(19): siRNA sense strand
aaagggaccucgcgguaaa

SEQ ID NO: 754080 - RNA, 19 nt, Homo sapiens
  misc_RNA (1)...(19): siRNA sense strand
gaugguggauuacaaugga

SEQ ID NO: 754081 - RNA, 19 nt, Homo sapiens
  misc_RNA (1)...(19): siRNA sense strand
ggauuacaauggaaacauc

SEQ ID NO: 754082 - RNA, 19 nt, Homo sapiens
  misc_RNA (1)...(19): siRNA sense strand
caagggagaaccagggaaa

SEQ ID NO: 754083 - RNA, 19 nt, Homo sapiens
  misc_RNA (1)...(19): siRNA sense strand
ggaagcaggacuagaugga

SEQ ID NO: 754084 - RNA, 19 nt, Homo sapiens
  misc_RNA (1)...(19): siRNA sense strand
caaggcugcuggaacaagu

SEQ ID NO: 754085 - RNA, 19 nt, Homo sapiens
  misc_RNA (1)...(19): siRNA sense strand
gggagaagcaggugucgau

SEQ ID NO: 754086 - RNA, 19 nt, Homo sapiens
  misc_RNA (1)...(19): siRNA sense strand
ggagaacagggaccagaug

SEQ ID NO: 754087 - RNA, 19 nt, Homo sapiens
  misc_RNA (1)...(19): siRNA sense strand
acaauggaaacaucaauga

SEQ ID NO: 754088 - RNA, 19 nt, Homo sapiens
  misc_RNA (1)...(19): siRNA sense strand
gaaaggagagaugguggau

SEQ ID NO: 754089 - RNA, 19 nt, Homo sapiens
  misc_RNA (1)...(19): siRNA sense strand
cuagagguuucccuggauu

SEQ ID NO: 754090 - RNA, 19 nt, Homo sapiens
  misc_RNA (1)...(19): siRNA sense strand
gcaaauggagacggcuauu

SEQ ID NO: 754091 - RNA, 19 nt, Homo sapiens
  misc_RNA (1)...(19): siRNA sense strand
gaaaggcuuccagggagaa

SEQ ID NO: 754092 - RNA, 19 nt, Homo sapiens
  misc_RNA (1)...(19): siRNA sense strand
gcagcugggcuuccugguu

SEQ ID NO: 754093 - RNA, 19 nt, Homo sapiens
  misc_RNA (1)...(19): siRNA sense strand
ggagagaugguggauuaca

SEQ ID NO: 754094 - RNA, 19 nt, Homo sapiens
  misc_RNA (1)...(19): siRNA sense strand
gaugcuggcaacuccauug

SEQ ID NO: 754095 - RNA, 19 nt, Homo sapiens
  misc_RNA (1)...(19): siRNA sense strand
gcguggagcagcuggagaa

SEQ ID NO: 754096 - RNA, 19 nt, Homo sapiens
  misc_RNA (1)...(19): siRNA sense strand
uggagcagcuggagaacag

SEQ ID NO: 754097 - RNA, 19 nt, Homo sapiens
  misc_RNA (1)...(19): siRNA sense strand
ggauuuccgggucccauug

SEQ ID NO: 754098 - RNA, 19 nt, Homo sapiens
  misc_RNA (1)...(19): siRNA sense strand
gagaugguggauuacaaug

SEQ ID NO: 754099 - RNA, 19 nt, Homo sapiens
  misc_RNA (1)...(19): siRNA sense strand
uagcggagcgcacccacaa

SEQ ID NO: 754100 - RNA, 19 nt, Homo sapiens
  misc_RNA (1)...(19): siRNA sense strand
gggagaaccagggaaagga

SEQ ID NO: 754101 - RNA, 19 nt, Homo sapiens
  misc_RNA (1)...(19): siRNA sense strand
gagccaggccagcauccaa

SEQ ID NO: 754102 - RNA, 19 nt, Homo sapiens
  misc_RNA (1)...(19): siRNA sense strand
gguacuccaggaccaauug

SEQ ID NO: 754103 - RNA, 19 nt, Homo sapiens
  misc_RNA (1)...(19): siRNA sense strand
aaaggagacccugggauga

SEQ ID NO: 754104 - RNA, 19 nt, Homo sapiens
  misc_RNA (1)...(19): siRNA sense strand
gagccagggaucccaggaa

SEQ ID NO: 754105 - RNA, 19 nt, Homo sapiens
  misc_RNA (1)...(19): siRNA sense strand
gaaccagggaaaggagaga

SEQ ID NO: 754106 - RNA, 19 nt, Homo sapiens
  misc_RNA (1)...(19): siRNA sense strand
gauuacaauggaaacauca

SEQ ID NO: 754107 - RNA, 19 nt, Homo sapiens
  misc_RNA (1)...(19): siRNA sense strand
ggucaaccaggaacuagag

SEQ ID NO: 754108 - RNA, 19 nt, Homo sapiens
  misc_RNA (1)...(19): siRNA sense strand
aaggagagaugguggauua

SEQ ID NO: 754109 - RNA, 19 nt, Homo sapiens
  misc_RNA (1)...(19): siRNA sense strand
cagcugggcuuccugguuu

SEQ ID NO: 754110 - RNA, 19 nt, Homo sapiens
  misc_RNA (1)...(19): siRNA sense strand
ccaaagacaucuccaggau

SEQ ID NO: 754111 - RNA, 19 nt, Homo sapiens
  misc_RNA (1)...(19): siRNA sense strand
gagagaugguggauuacaa

SEQ ID NO: 754112 - RNA, 19 nt, Homo sapiens
  misc_RNA (1)...(19): siRNA sense strand
aaagggaccucgcgguaaa

SEQ ID NO: 754113 - RNA, 19 nt, Homo sapiens
  misc_RNA (1)...(19): siRNA sense strand
gaugguggauuacaaugga

SEQ ID NO: 754114 - RNA, 19 nt, Homo sapiens
  misc_RNA (1)...(19): siRNA sense strand
ggauuacaauggaaacauc

SEQ ID NO: 754115 - RNA, 19 nt, Homo sapiens
  misc_RNA (1)...(19): siRNA sense strand
caagggagaaccagggaaa

SEQ ID NO: 754116 - RNA, 19 nt, Homo sapiens
  misc_RNA (1)...(19): siRNA sense strand
ggaagcaggacuagaugga

SEQ ID NO: 754117 - RNA, 19 nt, Homo sapiens
  misc_RNA (1)...(19): siRNA sense strand
caaggcugcuggaacaagu

SEQ ID NO: 754118 - RNA, 19 nt, Homo sapiens
  misc_RNA (1)...(19): siRNA sense strand
gggagaagcaggugucgau

SEQ ID NO: 754119 - RNA, 19 nt, Homo sapiens
  misc_RNA (1)...(19): siRNA sense strand
ggagaacagggaccagaug

SEQ ID NO: 754120 - RNA, 19 nt, Homo sapiens
  misc_RNA (1)...(19): siRNA sense strand
acaauggaaacaucaauga

SEQ ID NO: 754121 - RNA, 19 nt, Homo sapiens
  misc_RNA (1)...(19): siRNA sense strand
gaaaggagagaugguggau

SEQ ID NO: 754122 - RNA, 19 nt, Homo sapiens
  misc_RNA (1)...(19): siRNA sense strand
cuagagguuucccuggauu

SEQ ID NO: 754123 - RNA, 19 nt, Homo sapiens
  misc_RNA (1)...(19): siRNA sense strand
gcaaauggagacggcuauu

SEQ ID NO: 754124 - RNA, 19 nt, Homo sapiens
  misc_RNA (1)...(19): siRNA sense strand
gaaaggcuuccagggagaa

SEQ ID NO: 754125 - RNA, 19 nt, Homo sapiens
  misc_RNA (1)...(19): siRNA sense strand
gcagcugggcuuccugguu

SEQ ID NO: 754126 - RNA, 19 nt, Homo sapiens
  misc_RNA (1)...(19): siRNA sense strand
ggagagaugguggauuaca

SEQ ID NO: 754127 - RNA, 19 nt, Homo sapiens
  misc_RNA (1)...(19): siRNA sense strand
gaugcuggcaacuccauug

SEQ ID NO: 754128 - RNA, 19 nt, Homo sapiens
  misc_RNA (1)...(19): siRNA sense strand
gcguggagcagcuggagaa

SEQ ID NO: 754129 - RNA, 19 nt, Homo sapiens
  misc_RNA (1)...(19): siRNA sense strand
uggagcagcuggagaacag

SEQ ID NO: 754130 - RNA, 19 nt, Homo sapiens
  misc_RNA (1)...(19): siRNA sense strand
ggauuuccgggucccauug

SEQ ID NO: 754131 - RNA, 19 nt, Homo sapiens
  misc_RNA (1)...(19): siRNA sense strand
gagaugguggauuacaaug

SEQ ID NO: 754132 - RNA, 19 nt, Homo sapiens
  misc_RNA (1)...(19): siRNA sense strand
uagcggagcgcacccacaa

SEQ ID NO: 754133 - RNA, 19 nt, Homo sapiens
  misc_RNA (1)...(19): siRNA sense strand
gggagaaccagggaaagga

SEQ ID NO: 754134 - RNA, 19 nt, Homo sapiens
  misc_RNA (1)...(19): siRNA sense strand
gagccaggccagcauccaa

SEQ ID NO: 754135 - RNA, 19 nt, Homo sapiens
  misc_RNA (1)...(19): siRNA sense strand
gguacuccaggaccaauug

SEQ ID NO: 754136 - RNA, 19 nt, Homo sapiens
  misc_RNA (1)...(19): siRNA sense strand
aaaggagacccugggauga

SEQ ID NO: 754137 - RNA, 19 nt, Homo sapiens
  misc_RNA (1)...(19): siRNA sense strand
gagccagggaucccaggaa

SEQ ID NO: 754138 - RNA, 19 nt, Homo sapiens
  misc_RNA (1)...(19): siRNA sense strand
gaaccagggaaaggagaga

SEQ ID NO: 754139 - RNA, 19 nt, Homo sapiens
  misc_RNA (1)...(19): siRNA sense strand
gauuacaauggaaacauca

SEQ ID NO: 754140 - RNA, 19 nt, Homo sapiens
  misc_RNA (1)...(19): siRNA sense strand
ggucaaccaggaacuagag

SEQ ID NO: 754141 - RNA, 19 nt, Homo sapiens
  misc_RNA (1)...(19): siRNA sense strand
aaggagagaugguggauua

SEQ ID NO: 754142 - RNA, 19 nt, Homo sapiens
  misc_RNA (1)...(19): siRNA sense strand
cagcugggcuuccugguuu

SEQ ID NO: 754143 - RNA, 19 nt, Homo sapiens
  misc_RNA (1)...(19): siRNA sense strand
ccaaagacaucuccaggau

SEQ ID NO: 754144 - RNA, 19 nt, Homo sapiens
  misc_RNA (1)...(19): siRNA sense strand
gagagaugguggauuacaa

SEQ ID NO: 754145 - RNA, 19 nt, Homo sapiens
  misc_RNA (1)...(19): siRNA sense strand
aaagggaccucgcgguaaa

SEQ ID NO: 754146 - RNA, 19 nt, Homo sapiens
  misc_RNA (1)...(19): siRNA sense strand
gaugguggauuacaaugga

SEQ ID NO: 754147 - RNA, 19 nt, Homo sapiens
  misc_RNA (1)...(19): siRNA sense strand
ggauuacaauggaaacauc

SEQ ID NO: 754148 - RNA, 19 nt, Homo sapiens
  misc_RNA (1)...(19): siRNA sense strand
caagggagaaccagggaaa

SEQ ID NO: 754149 - RNA, 19 nt, Homo sapiens
  misc_RNA (1)...(19): siRNA sense strand
ggaagcaggacuagaugga

SEQ ID NO: 754150 - RNA, 19 nt, Homo sapiens
  misc_RNA (1)...(19): siRNA sense strand
caaggcugcuggaacaagu

SEQ ID NO: 754151 - RNA, 19 nt, Homo sapiens
  misc_RNA (1)...(19): siRNA sense strand
gggagaagcaggugucgau

SEQ ID NO: 754152 - RNA, 19 nt, Homo sapiens
  misc_RNA (1)...(19): siRNA sense strand
ggagaacagggaccagaug

SEQ ID NO: 754153 - RNA, 19 nt, Homo sapiens
  misc_RNA (1)...(19): siRNA sense strand
acaauggaaacaucaauga

SEQ ID NO: 754154 - RNA, 19 nt, Homo sapiens
  misc_RNA (1)...(19): siRNA sense strand
gaaaggagagaugguggau

SEQ ID NO: 754155 - RNA, 19 nt, Homo sapiens
  misc_RNA (1)...(19): siRNA sense strand
cuagagguuucccuggauu

SEQ ID NO: 754156 - RNA, 19 nt, Homo sapiens
  misc_RNA (1)...(19): siRNA sense strand
gcaaauggagacggcuauu

SEQ ID NO: 754157 - RNA, 19 nt, Homo sapiens
  misc_RNA (1)...(19): siRNA sense strand
gaaaggcuuccagggagaa

SEQ ID NO: 754158 - RNA, 19 nt, Homo sapiens
  misc_RNA (1)...(19): siRNA sense strand
gcagcugggcuuccugguu

SEQ ID NO: 754159 - RNA, 19 nt, Homo sapiens
  misc_RNA (1)...(19): siRNA sense strand
ggagagaugguggauuaca

SEQ ID NO: 754160 - RNA, 19 nt, Homo sapiens
  misc_RNA (1)...(19): siRNA sense strand
gaugcuggcaacuccauug

SEQ ID NO: 754161 - RNA, 19 nt, Homo sapiens
  misc_RNA (1)...(19): siRNA sense strand
gcguggagcagcuggagaa

SEQ ID NO: 754162 - RNA, 19 nt, Homo sapiens
  misc_RNA (1)...(19): siRNA sense strand
uggagcagcuggagaacag

SEQ ID NO: 754163 - RNA, 19 nt, Homo sapiens
  misc_RNA (1)...(19): siRNA sense strand
ggauuuccgggucccauug

SEQ ID NO: 754164 - RNA, 19 nt, Homo sapiens
  misc_RNA (1)...(19): siRNA sense strand
gagaugguggauuacaaug

SEQ ID NO: 754165 - RNA, 19 nt, Homo sapiens
  misc_RNA (1)...(19): siRNA sense strand
uagcggagcgcacccacaa

SEQ ID NO: 754166 - RNA, 19 nt, Homo sapiens
  misc_RNA (1)...(19): siRNA sense strand
gggagaaccagggaaagga

SEQ ID NO: 754167 - RNA, 19 nt, Homo sapiens
  misc_RNA (1)...(19): siRNA sense strand
gagccaggccagcauccaa

SEQ ID NO: 754168 - RNA, 19 nt, Homo sapiens
  misc_RNA (1)...(19): siRNA sense strand
gguacuccaggaccaauug

SEQ ID NO: 754169 - RNA, 19 nt, Homo sapiens
  misc_RNA (1)...(19): siRNA sense strand
aaaggagacccugggauga

SEQ ID NO: 754170 - RNA, 19 nt, Homo sapiens
  misc_RNA (1)...(19): siRNA sense strand
gagccagggaucccaggaa

SEQ ID NO: 754171 - RNA, 19 nt, Homo sapiens
  misc_RNA (1)...(19): siRNA sense strand
gaaccagggaaaggagaga

SEQ ID NO: 754172 - RNA, 19 nt, Homo sapiens
  misc_RNA (1)...(19): siRNA sense strand
gauuacaauggaaacauca

SEQ ID NO: 754173 - RNA, 19 nt, Homo sapiens
  misc_RNA (1)...(19): siRNA sense strand
ggucaaccaggaacuagag

SEQ ID NO: 754174 - RNA, 19 nt, Homo sapiens
  misc_RNA (1)...(19): siRNA sense strand
aaggagagaugguggauua

SEQ ID NO: 754175 - RNA, 19 nt, Homo sapiens
  misc_RNA (1)...(19): siRNA sense strand
cagcugggcuuccugguuu

SEQ ID NO: 754176 - RNA, 19 nt, Homo sapiens
  misc_RNA (1)...(19): siRNA sense strand
ccaaagacaucuccaggau

SEQ ID NO: 754177 - RNA, 19 nt, Homo sapiens
  misc_RNA (1)...(19): siRNA sense strand
gagagaugguggauuacaa

SEQ ID NO: 754178 - RNA, 19 nt, Homo sapiens
  misc_RNA (1)...(19): siRNA sense strand
aaagggaccucgcgguaaa

SEQ ID NO: 754179 - RNA, 19 nt, Homo sapiens
  misc_RNA (1)...(19): siRNA sense strand
gaugguggauuacaaugga

SEQ ID NO: 754180 - RNA, 19 nt, Homo sapiens
  misc_RNA (1)...(19): siRNA sense strand
ggauuacaauggaaacauc

SEQ ID NO: 754181 - RNA, 19 nt, Homo sapiens
  misc_RNA (1)...(19): siRNA sense strand
caagggagaaccagggaaa

SEQ ID NO: 754182 - RNA, 19 nt, Homo sapiens
  misc_RNA (1)...(19): siRNA sense strand
ggaagcaggacuagaugga

SEQ ID NO: 754183 - RNA, 19 nt, Homo sapiens
  misc_RNA (1)...(19): siRNA sense strand
caaggcugcuggaacaagu

SEQ ID NO: 754184 - RNA, 19 nt, Homo sapiens
  misc_RNA (1)...(19): siRNA sense strand
gggagaagcaggugucgau

SEQ ID NO: 754185 - RNA, 19 nt, Homo sapiens
  misc_RNA (1)...(19): siRNA sense strand
ggagaacagggaccagaug

SEQ ID NO: 754186 - RNA, 19 nt, Homo sapiens
  misc_RNA (1)...(19): siRNA sense strand
acaauggaaacaucaauga

SEQ ID NO: 754187 - RNA, 19 nt, Homo sapiens
  misc_RNA (1)...(19): siRNA sense strand
gaaaggagagaugguggau

SEQ ID NO: 754188 - RNA, 19 nt, Homo sapiens
  misc_RNA (1)...(19): siRNA sense strand
cuagagguuucccuggauu

SEQ ID NO: 754189 - RNA, 19 nt, Homo sapiens
  misc_RNA (1)...(19): siRNA sense strand
gcaaauggagacggcuauu

SEQ ID NO: 754190 - RNA, 19 nt, Homo sapiens
  misc_RNA (1)...(19): siRNA sense strand
gaaaggcuuccagggagaa

SEQ ID NO: 754191 - RNA, 19 nt, Homo sapiens
  misc_RNA (1)...(19): siRNA sense strand
gcagcugggcuuccugguu

SEQ ID NO: 754192 - RNA, 19 nt, Homo sapiens
  misc_RNA (1)...(19): siRNA sense strand
ggagagaugguggauuaca

SEQ ID NO: 754193 - RNA, 19 nt, Homo sapiens
  misc_RNA (1)...(19): siRNA sense strand
gaugcuggcaacuccauug

SEQ ID NO: 754194 - RNA, 19 nt, Homo sapiens
  misc_RNA (1)...(19): siRNA sense strand
gcguggagcagcuggagaa

SEQ ID NO: 754195 - RNA, 19 nt, Homo sapiens
  misc_RNA (1)...(19): siRNA sense strand
uggagcagcuggagaacag

SEQ ID NO: 754196 - RNA, 19 nt, Homo sapiens
  misc_RNA (1)...(19): siRNA sense strand
ggauuuccgggucccauug

SEQ ID NO: 754197 - RNA, 19 nt, Homo sapiens
  misc_RNA (1)...(19): siRNA sense strand
gagaugguggauuacaaug

SEQ ID NO: 754198 - RNA, 19 nt, Homo sapiens
  misc_RNA (1)...(19): siRNA sense strand
uagcggagcgcacccacaa

SEQ ID NO: 754199 - RNA, 19 nt, Homo sapiens
  misc_RNA (1)...(19): siRNA sense strand
gggagaaccagggaaagga

SEQ ID NO: 754200 - RNA, 19 nt, Homo sapiens
  misc_RNA (1)...(19): siRNA sense strand
gagccaggccagcauccaa

SEQ ID NO: 754201 - RNA, 19 nt, Homo sapiens
  misc_RNA (1)...(19): siRNA sense strand
gguacuccaggaccaauug

SEQ ID NO: 754202 - RNA, 19 nt, Homo sapiens
  misc_RNA (1)...(19): siRNA sense strand
aaaggagacccugggauga

SEQ ID NO: 754203 - RNA, 19 nt, Homo sapiens
  misc_RNA (1)...(19): siRNA sense strand
gagccagggaucccaggaa

SEQ ID NO: 754204 - RNA, 19 nt, Homo sapiens
  misc_RNA (1)...(19): siRNA sense strand
gaaccagggaaaggagaga

SEQ ID NO: 754205 - RNA, 19 nt, Homo sapiens
  misc_RNA (1)...(19): siRNA sense strand
gauuacaauggaaacauca

SEQ ID NO: 754206 - RNA, 19 nt, Homo sapiens
  misc_RNA (1)...(19): siRNA sense strand
ggucaaccaggaacuagag

SEQ ID NO: 754207 - RNA, 19 nt, Homo sapiens
  misc_RNA (1)...(19): siRNA sense strand
aaggagagaugguggauua

SEQ ID NO: 754208 - RNA, 19 nt, Homo sapiens
  misc_RNA (1)...(19): siRNA sense strand
cagcugggcuuccugguuu

SEQ ID NO: 754209 - RNA, 19 nt, Homo sapiens
  misc_RNA (1)...(19): siRNA sense strand
ccaaagacaucuccaggau

SEQ ID NO: 754210 - RNA, 19 nt, Homo sapiens
  misc_RNA (1)...(19): siRNA sense strand
gagagaugguggauuacaa

SEQ ID NO: 754211 - RNA, 19 nt, Homo sapiens
  misc_RNA (1)...(19): siRNA sense strand
aaagggaccucgcgguaaa

SEQ ID NO: 754212 - RNA, 19 nt, Homo sapiens
  misc_RNA (1)...(19): siRNA sense strand
gaugguggauuacaaugga

SEQ ID NO: 754213 - RNA, 19 nt, Homo sapiens
  misc_RNA (1)...(19): siRNA sense strand
ggauuacaauggaaacauc

SEQ ID NO: 754214 - RNA, 19 nt, Homo sapiens
  misc_RNA (1)...(19): siRNA sense strand
caagggagaaccagggaaa

SEQ ID NO: 754215 - RNA, 19 nt, Homo sapiens
  misc_RNA (1)...(19): siRNA sense strand
ggaagcaggacuagaugga

SEQ ID NO: 754216 - RNA, 19 nt, Homo sapiens
  misc_RNA (1)...(19): siRNA sense strand
caaggcugcuggaacaagu

SEQ ID NO: 754217 - RNA, 19 nt, Homo sapiens
  misc_RNA (1)...(19): siRNA sense strand
gggagaagcaggugucgau

SEQ ID NO: 754218 - RNA, 19 nt, Homo sapiens
  misc_RNA (1)...(19): siRNA sense strand
ggagaacagggaccagaug

SEQ ID NO: 754219 - RNA, 19 nt, Homo sapiens
  misc_RNA (1)...(19): siRNA sense strand
acaauggaaacaucaauga

SEQ ID NO: 754220 - RNA, 19 nt, Homo sapiens
  misc_RNA (1)...(19): siRNA sense strand
gaaaggagagaugguggau

SEQ ID NO: 754221 - RNA, 19 nt, Homo sapiens
  misc_RNA (1)...(19): siRNA sense strand
cuagagguuucccuggauu

SEQ ID NO: 754222 - RNA, 19 nt, Homo sapiens
  misc_RNA (1)...(19): siRNA sense strand
gcaaauggagacggcuauu

SEQ ID NO: 754223 - RNA, 19 nt, Homo sapiens
  misc_RNA (1)...(19): siRNA sense strand
gaaaggcuuccagggagaa

SEQ ID NO: 754224 - RNA, 19 nt, Homo sapiens
  misc_RNA (1)...(19): siRNA sense strand
gcagcugggcuuccugguu

SEQ ID NO: 754225 - RNA, 19 nt, Homo sapiens
  misc_RNA (1)...(19): siRNA sense strand
ggagagaugguggauuaca

SEQ ID NO: 754226 - RNA, 19 nt, Homo sapiens
  misc_RNA (1)...(19): siRNA sense strand
gaugcuggcaacuccauug

SEQ ID NO: 754227 - RNA, 19 nt, Homo sapiens
  misc_RNA (1)...(19): siRNA sense strand
gcguggagcagcuggagaa

SEQ ID NO: 754228 - RNA, 19 nt, Homo sapiens
  misc_RNA (1)...(19): siRNA sense strand
uggagcagcuggagaacag

SEQ ID NO: 754229 - RNA, 19 nt, Homo sapiens
  misc_RNA (1)...(19): siRNA sense strand
ggauuuccgggucccauug

SEQ ID NO: 754230 - RNA, 19 nt, Homo sapiens
  misc_RNA (1)...(19): siRNA sense strand
gagaugguggauuacaaug

SEQ ID NO: 754231 - RNA, 19 nt, Homo sapiens
  misc_RNA (1)...(19): siRNA sense strand
uagcggagcgcacccacaa

SEQ ID NO: 754232 - RNA, 19 nt, Homo sapiens
  misc_RNA (1)...(19): siRNA sense strand
gggagaaccagggaaagga

SEQ ID NO: 754233 - RNA, 19 nt, Homo sapiens
  misc_RNA (1)...(19): siRNA sense strand
gagccaggccagcauccaa

SEQ ID NO: 754234 - RNA, 19 nt, Homo sapiens
  misc_RNA (1)...(19): siRNA sense strand
gguacuccaggaccaauug

SEQ ID NO: 754235 - RNA, 19 nt, Homo sapiens
  misc_RNA (1)...(19): siRNA sense strand
aaaggagacccugggauga

SEQ ID NO: 754236 - RNA, 19 nt, Homo sapiens
  misc_RNA (1)...(19): siRNA sense strand
gagccagggaucccaggaa

SEQ ID NO: 754237 - RNA, 19 nt, Homo sapiens
  misc_RNA (1)...(19): siRNA sense strand
gaaccagggaaaggagaga

SEQ ID NO: 754238 - RNA, 19 nt, Homo sapiens
  misc_RNA (1)...(19): siRNA sense strand
gauuacaauggaaacauca

SEQ ID NO: 754239 - RNA, 19 nt, Homo sapiens
  misc_RNA (1)...(19): siRNA sense strand
ggucaaccaggaacuagag

SEQ ID NO: 754240 - RNA, 19 nt, Homo sapiens
  misc_RNA (1)...(19): siRNA sense strand
aaggagagaugguggauua

SEQ ID NO: 754241 - RNA, 19 nt, Homo sapiens
  misc_RNA (1)...(19): siRNA sense strand
cagcugggcuuccugguuu

SEQ ID NO: 754242 - RNA, 19 nt, Homo sapiens
  misc_RNA (1)...(19): siRNA sense strand
ccaaagacaucuccaggau

SEQ ID NO: 754243 - RNA, 19 nt, Homo sapiens
  misc_RNA (1)...(19): siRNA sense strand
gagagaugguggauuacaa

SEQ ID NO: 754244 - RNA, 19 nt, Homo sapiens
  misc_RNA (1)...(19): siRNA sense strand
aaagggaccucgcgguaaa

SEQ ID NO: 754245 - RNA, 19 nt, Homo sapiens
  misc_RNA (1)...(19): siRNA sense strand
gaugguggauuacaaugga

SEQ ID NO: 754246 - RNA, 19 nt, Homo sapiens
  misc_RNA (1)...(19): siRNA sense strand
ggauuacaauggaaacauc

SEQ ID NO: 754247 - RNA, 19 nt, Homo sapiens
  misc_RNA (1)...(19): siRNA sense strand
caagggagaaccagggaaa

SEQ ID NO: 754248 - RNA, 19 nt, Homo sapiens
  misc_RNA (1)...(19): siRNA sense strand
ggaagcaggacuagaugga

SEQ ID NO: 754249 - RNA, 19 nt, Homo sapiens
  misc_RNA (1)...(19): siRNA sense strand
caaggcugcuggaacaagu

SEQ ID NO: 754250 - RNA, 19 nt, Homo sapiens
  misc_RNA (1)...(19): siRNA sense strand
gggagaagcaggugucgau

SEQ ID NO: 754251 - RNA, 19 nt, Homo sapiens
  misc_RNA (1)...(19): siRNA sense strand
ggagaacagggaccagaug

SEQ ID NO: 754252 - RNA, 19 nt, Homo sapiens
  misc_RNA (1)...(19): siRNA sense strand
acaauggaaacaucaauga

SEQ ID NO: 754253 - RNA, 19 nt, Homo sapiens
  misc_RNA (1)...(19): siRNA sense strand
gaaaggagagaugguggau

SEQ ID NO: 754254 - RNA, 19 nt, Homo sapiens
  misc_RNA (1)...(19): siRNA sense strand
cuagagguuucccuggauu

SEQ ID NO: 754255 - RNA, 19 nt, Homo sapiens
  misc_RNA (1)...(19): siRNA sense strand
gcaaauggagacggcuauu

SEQ ID NO: 754256 - RNA, 19 nt, Homo sapiens
  misc_RNA (1)...(19): siRNA sense strand
gaaaggcuuccagggagaa

SEQ ID NO: 754257 - RNA, 19 nt, Homo sapiens
  misc_RNA (1)...(19): siRNA sense strand
gcagcugggcuuccugguu

SEQ ID NO: 754258 - RNA, 19 nt, Homo sapiens
  misc_RNA (1)...(19): siRNA sense strand
ggagagaugguggauuaca

SEQ ID NO: 754259 - RNA, 19 nt, Homo sapiens
  misc_RNA (1)...(19): siRNA sense strand
gaugcuggcaacuccauug

SEQ ID NO: 754260 - RNA, 19 nt, Homo sapiens
  misc_RNA (1)...(19): siRNA sense strand
gcguggagcagcuggagaa

SEQ ID NO: 754261 - RNA, 19 nt, Homo sapiens
  misc_RNA (1)...(19): siRNA sense strand
uggagcagcuggagaacag

SEQ ID NO: 754262 - RNA, 19 nt, Homo sapiens
  misc_RNA (1)...(19): siRNA sense strand
ggauuuccgggucccauug

SEQ ID NO: 754263 - RNA, 19 nt, Homo sapiens
  misc_RNA (1)...(19): siRNA sense strand
gagaugguggauuacaaug

SEQ ID NO: 754264 - RNA, 19 nt, Homo sapiens
  misc_RNA (1)...(19): siRNA sense strand
uagcggagcgcacccacaa

SEQ ID NO: 754265 - RNA, 19 nt, Homo sapiens
  misc_RNA (1)...(19): siRNA sense strand
gggagaaccagggaaagga

SEQ ID NO: 754266 - RNA, 19 nt, Homo sapiens
  misc_RNA (1)...(19): siRNA sense strand
gagccaggccagcauccaa

SEQ ID NO: 754267 - RNA, 19 nt, Homo sapiens
  misc_RNA (1)...(19): siRNA sense strand
gguacuccaggaccaauug

SEQ ID NO: 754268 - RNA, 19 nt, Homo sapiens
  misc_RNA (1)...(19): siRNA sense strand
aaaggagacccugggauga

SEQ ID NO: 754269 - RNA, 19 nt, Homo sapiens
  misc_RNA (1)...(19): siRNA sense strand
gagccagggaucccaggaa

SEQ ID NO: 754270 - RNA, 19 nt, Homo sapiens
  misc_RNA (1)...(19): siRNA sense strand
gaaccagggaaaggagaga

SEQ ID NO: 754271 - RNA, 19 nt, Homo sapiens
  misc_RNA (1)...(19): siRNA sense strand
gauuacaauggaaacauca

SEQ ID NO: 754272 - RNA, 19 nt, Homo sapiens
  misc_RNA (1)...(19): siRNA sense strand
ggucaaccaggaacuagag

SEQ ID NO: 754273 - RNA, 19 nt, Homo sapiens
  misc_RNA (1)...(19): siRNA sense strand
aaggagagaugguggauua

SEQ ID NO: 754274 - RNA, 19 nt, Homo sapiens
  misc_RNA (1)...(19): siRNA sense strand
cagcugggcuuccugguuu

SEQ ID NO: 754275 - RNA, 19 nt, Homo sapiens
  misc_RNA (1)...(19): siRNA sense strand
ccaaagacaucuccaggau

SEQ ID NO: 754276 - RNA, 19 nt, Homo sapiens
  misc_RNA (1)...(19): siRNA sense strand
gagagaugguggauuacaa

SEQ ID NO: 754277 - RNA, 19 nt, Homo sapiens
  misc_RNA (1)...(19): siRNA sense strand
aaagggaccucgcgguaaa

SEQ ID NO: 754278 - RNA, 19 nt, Homo sapiens
  misc_RNA (1)...(19): siRNA sense strand
gaugguggauuacaaugga

SEQ ID NO: 754279 - RNA, 19 nt, Homo sapiens
  misc_RNA (1)...(19): siRNA sense strand
ggauuacaauggaaacauc

SEQ ID NO: 754280 - RNA, 19 nt, Homo sapiens
  misc_RNA (1)...(19): siRNA sense strand
caagggagaaccagggaaa

SEQ ID NO: 754281 - RNA, 19 nt, Homo sapiens
  misc_RNA (1)...(19): siRNA sense strand
ggaagcaggacuagaugga

SEQ ID NO: 754282 - RNA, 19 nt, Homo sapiens
  misc_RNA (1)...(19): siRNA sense strand
caaggcugcuggaacaagu

SEQ ID NO: 754283 - RNA, 19 nt, Homo sapiens
  misc_RNA (1)...(19): siRNA sense strand
gggagaagcaggugucgau

SEQ ID NO: 754284 - RNA, 19 nt, Homo sapiens
  misc_RNA (1)...(19): siRNA sense strand
ggagaacagggaccagaug

SEQ ID NO: 754285 - RNA, 19 nt, Homo sapiens
  misc_RNA (1)...(19): siRNA sense strand
acaauggaaacaucaauga

SEQ ID NO: 754286 - RNA, 19 nt, Homo sapiens
  misc_RNA (1)...(19): siRNA sense strand
gaaaggagagaugguggau

SEQ ID NO: 754287 - RNA, 19 nt, Homo sapiens
  misc_RNA (1)...(19): siRNA sense strand
cuagagguuucccuggauu

SEQ ID NO: 754288 - RNA, 19 nt, Homo sapiens
  misc_RNA (1)...(19): siRNA sense strand
gcaaauggagacggcuauu

SEQ ID NO: 754289 - RNA, 19 nt, Homo sapiens
  misc_RNA (1)...(19): siRNA sense strand
gaaaggcuuccagggagaa

SEQ ID NO: 754290 - RNA, 19 nt, Homo sapiens
  misc_RNA (1)...(19): siRNA sense strand
gcagcugggcuuccugguu

SEQ ID NO: 754291 - RNA, 19 nt, Homo sapiens
  misc_RNA (1)...(19): siRNA sense strand
ggagagaugguggauuaca

SEQ ID NO: 754292 - RNA, 19 nt, Homo sapiens
  misc_RNA (1)...(19): siRNA sense strand
gaugcuggcaacuccauug

SEQ ID NO: 754293 - RNA, 19 nt, Homo sapiens
  misc_RNA (1)...(19): siRNA sense strand
gcguggagcagcuggagaa

SEQ ID NO: 754294 - RNA, 19 nt, Homo sapiens
  misc_RNA (1)...(19): siRNA sense strand
uggagcagcuggagaacag

SEQ ID NO: 754295 - RNA, 19 nt, Homo sapiens
  misc_RNA (1)...(19): siRNA sense strand
ggauuuccgggucccauug

SEQ ID NO: 754296 - RNA, 19 nt, Homo sapiens
  misc_RNA (1)...(19): siRNA sense strand
gagaugguggauuacaaug

SEQ ID NO: 754297 - RNA, 19 nt, Homo sapiens
  misc_RNA (1)...(19): siRNA sense strand
uagcggagcgcacccacaa

SEQ ID NO: 754298 - RNA, 19 nt, Homo sapiens
  misc_RNA (1)...(19): siRNA sense strand
gggagaaccagggaaagga

SEQ ID NO: 754299 - RNA, 19 nt, Homo sapiens
  misc_RNA (1)...(19): siRNA sense strand
gagccaggccagcauccaa

SEQ ID NO: 754300 - RNA, 19 nt, Homo sapiens
  misc_RNA (1)...(19): siRNA sense strand
gguacuccaggaccaauug

SEQ ID NO: 754301 - RNA, 19 nt, Homo sapiens
  misc_RNA (1)...(19): siRNA sense strand
aaaggagacccugggauga

SEQ ID NO: 754302 - RNA, 19 nt, Homo sapiens
  misc_RNA (1)...(19): siRNA sense strand
gagccagggaucccaggaa

SEQ ID NO: 754303 - RNA, 19 nt, Homo sapiens
  misc_RNA (1)...(19): siRNA sense strand
gaaccagggaaaggagaga

SEQ ID NO: 754304 - RNA, 19 nt, Homo sapiens
  misc_RNA (1)...(19): siRNA sense strand
gauuacaauggaaacauca

SEQ ID NO: 754305 - RNA, 19 nt, Homo sapiens
  misc_RNA (1)...(19): siRNA sense strand
ggucaaccaggaacuagag

SEQ ID NO: 754306 - RNA, 19 nt, Homo sapiens
  misc_RNA (1)...(19): siRNA sense strand
aaggagagaugguggauua

SEQ ID NO: 754307 - RNA, 19 nt, Homo sapiens
  misc_RNA (1)...(19): siRNA sense strand
cagcugggcuuccugguuu

SEQ ID NO: 754308 - RNA, 19 nt, Homo sapiens
  misc_RNA (1)...(19): siRNA sense strand
ccaaagacaucuccaggau

SEQ ID NO: 754309 - RNA, 19 nt, Homo sapiens
  misc_RNA (1)...(19): siRNA sense strand
gagagaugguggauuacaa

SEQ ID NO: 754310 - RNA, 19 nt, Homo sapiens
  misc_RNA (1)...(19): siRNA sense strand
aaagggaccucgcgguaaa

SEQ ID NO: 754311 - RNA, 19 nt, Homo sapiens
  misc_RNA (1)...(19): siRNA sense strand
gaugguggauuacaaugga

SEQ ID NO: 754312 - RNA, 19 nt, Homo sapiens
  misc_RNA (1)...(19): siRNA sense strand
ggauuacaauggaaacauc

SEQ ID NO: 754313 - RNA, 19 nt, Homo sapiens
  misc_RNA (1)...(19): siRNA sense strand
caagggagaaccagggaaa

SEQ ID NO: 754314 - RNA, 19 nt, Homo sapiens
  misc_RNA (1)...(19): siRNA sense strand
ggaagcaggacuagaugga

SEQ ID NO: 754315 - RNA, 19 nt, Homo sapiens
  misc_RNA (1)...(19): siRNA sense strand
caaggcugcuggaacaagu

SEQ ID NO: 754316 - RNA, 19 nt, Homo sapiens
  misc_RNA (1)...(19): siRNA sense strand
gggagaagcaggugucgau

SEQ ID NO: 754317 - RNA, 19 nt, Homo sapiens
  misc_RNA (1)...(19): siRNA sense strand
ggagaacagggaccagaug

SEQ ID NO: 754318 - RNA, 19 nt, Homo sapiens
  misc_RNA (1)...(19): siRNA sense strand
acaauggaaacaucaauga

SEQ ID NO: 754319 - RNA, 19 nt, Homo sapiens
  misc_RNA (1)...(19): siRNA sense strand
gaaaggagagaugguggau

SEQ ID NO: 754320 - RNA, 19 nt, Homo sapiens
  misc_RNA (1)...(19): siRNA sense strand
cuagagguuucccuggauu

SEQ ID NO: 754321 - RNA, 19 nt, Homo sapiens
  misc_RNA (1)...(19): siRNA sense strand
gcaaauggagacggcuauu

SEQ ID NO: 754322 - RNA, 19 nt, Homo sapiens
  misc_RNA (1)...(19): siRNA sense strand
gaaaggcuuccagggagaa

SEQ ID NO: 754323 - RNA, 19 nt, Homo sapiens
  misc_RNA (1)...(19): siRNA sense strand
gcagcugggcuuccugguu

SEQ ID NO: 754324 - RNA, 19 nt, Homo sapiens
  misc_RNA (1)...(19): siRNA sense strand
ggagagaugguggauuaca

SEQ ID NO: 754325 - RNA, 19 nt, Homo sapiens
  misc_RNA (1)...(19): siRNA sense strand
gaugcuggcaacuccauug

SEQ ID NO: 754326 - RNA, 19 nt, Homo sapiens
  misc_RNA (1)...(19): siRNA sense strand
gcguggagcagcuggagaa

SEQ ID NO: 754327 - RNA, 19 nt, Homo sapiens
  misc_RNA (1)...(19): siRNA sense strand
uggagcagcuggagaacag

SEQ ID NO: 754328 - RNA, 19 nt, Homo sapiens
  misc_RNA (1)...(19): siRNA sense strand
ggauuuccgggucccauug

SEQ ID NO: 754329 - RNA, 19 nt, Homo sapiens
  misc_RNA (1)...(19): siRNA sense strand
gagaugguggauuacaaug

SEQ ID NO: 754330 - RNA, 19 nt, Homo sapiens
  misc_RNA (1)...(19): siRNA sense strand
uagcggagcgcacccacaa

SEQ ID NO: 754331 - RNA, 19 nt, Homo sapiens
  misc_RNA (1)...(19): siRNA sense strand
gggagaaccagggaaagga

SEQ ID NO: 754332 - RNA, 19 nt, Homo sapiens
  misc_RNA (1)...(19): siRNA sense strand
gagccaggccagcauccaa

SEQ ID NO: 754333 - RNA, 19 nt, Homo sapiens
  misc_RNA (1)...(19): siRNA sense strand
gguacuccaggaccaauug

SEQ ID NO: 754334 - RNA, 19 nt, Homo sapiens
  misc_RNA (1)...(19): siRNA sense strand
aaaggagacccugggauga

SEQ ID NO: 754335 - RNA, 19 nt, Homo sapiens
  misc_RNA (1)...(19): siRNA sense strand
gagccagggaucccaggaa

SEQ ID NO: 754336 - RNA, 19 nt, Homo sapiens
  misc_RNA (1)...(19): siRNA sense strand
gaaccagggaaaggagaga

SEQ ID NO: 754337 - RNA, 19 nt, Homo sapiens
  misc_RNA (1)...(19): siRNA sense strand
gauuacaauggaaacauca

SEQ ID NO: 754338 - RNA, 19 nt, Homo sapiens
  misc_RNA (1)...(19): siRNA sense strand
ggucaaccaggaacuagag

SEQ ID NO: 754339 - RNA, 19 nt, Homo sapiens
  misc_RNA (1)...(19): siRNA sense strand
aaggagagaugguggauua

SEQ ID NO: 754340 - RNA, 19 nt, Homo sapiens
  misc_RNA (1)...(19): siRNA sense strand
cagcugggcuuccugguuu

SEQ ID NO: 754341 - RNA, 19 nt, Homo sapiens
  misc_RNA (1)...(19): siRNA sense strand
ccaaagacaucuccaggau

SEQ ID NO: 754342 - RNA, 19 nt, Homo sapiens
  misc_RNA (1)...(19): siRNA sense strand
gagagaugguggauuacaa

SEQ ID NO: 754343 - RNA, 19 nt, Homo sapiens
  misc_RNA (1)...(19): siRNA sense strand
aaagggaccucgcgguaaa

SEQ ID NO: 754344 - RNA, 19 nt, Homo sapiens
  misc_RNA (1)...(19): siRNA sense strand
gaugguggauuacaaugga

SEQ ID NO: 754345 - RNA, 19 nt, Homo sapiens
  misc_RNA (1)...(19): siRNA sense strand
ggauuacaauggaaacauc

SEQ ID NO: 754346 - RNA, 19 nt, Homo sapiens
  misc_RNA (1)...(19): siRNA sense strand
caagggagaaccagggaaa

SEQ ID NO: 754347 - RNA, 19 nt, Homo sapiens
  misc_RNA (1)...(19): siRNA sense strand
ggaagcaggacuagaugga

SEQ ID NO: 754348 - RNA, 19 nt, Homo sapiens
  misc_RNA (1)...(19): siRNA sense strand
caaggcugcuggaacaagu

SEQ ID NO: 754349 - RNA, 19 nt, Homo sapiens
  misc_RNA (1)...(19): siRNA sense strand
gggagaagcaggugucgau

SEQ ID NO: 754350 - RNA, 19 nt, Homo sapiens
  misc_RNA (1)...(19): siRNA sense strand
ggagaacagggaccagaug

SEQ ID NO: 754351 - RNA, 19 nt, Homo sapiens
  misc_RNA (1)...(19): siRNA sense strand
acaauggaaacaucaauga

SEQ ID NO: 754352 - RNA, 19 nt, Homo sapiens
  misc_RNA (1)...(19): siRNA sense strand
gaaaggagagaugguggau

SEQ ID NO: 754353 - RNA, 19 nt, Homo sapiens
  misc_RNA (1)...(19): siRNA sense strand
cuagagguuucccuggauu

SEQ ID NO: 754354 - RNA, 19 nt, Homo sapiens
  misc_RNA (1)...(19): siRNA sense strand
gcaaauggagacggcuauu

SEQ ID NO: 754355 - RNA, 19 nt, Homo sapiens
  misc_RNA (1)...(19): siRNA sense strand
gaaaggcuuccagggagaa

SEQ ID NO: 754356 - RNA, 19 nt, Homo sapiens
  misc_RNA (1)...(19): siRNA sense strand
gcagcugggcuuccugguu

SEQ ID NO: 754357 - RNA, 19 nt, Homo sapiens
  misc_RNA (1)...(19): siRNA sense strand
ggagagaugguggauuaca

SEQ ID NO: 754358 - RNA, 19 nt, Homo sapiens
  misc_RNA (1)...(19): siRNA sense strand
gaugcuggcaacuccauug

SEQ ID NO: 754359 - RNA, 19 nt, Homo sapiens
  misc_RNA (1)...(19): siRNA sense strand
gcguggagcagcuggagaa

SEQ ID NO: 754360 - RNA, 19 nt, Homo sapiens
  misc_RNA (1)...(19): siRNA sense strand
uggagcagcuggagaacag

SEQ ID NO: 754361 - RNA, 19 nt, Homo sapiens
  misc_RNA (1)...(19): siRNA sense strand
ggauuuccgggucccauug

SEQ ID NO: 754362 - RNA, 19 nt, Homo sapiens
  misc_RNA (1)...(19): siRNA sense strand
gagaugguggauuacaaug

SEQ ID NO: 754363 - RNA, 19 nt, Homo sapiens
  misc_RNA (1)...(19): siRNA sense strand
uagcggagcgcacccacaa

SEQ ID NO: 754364 - RNA, 19 nt, Homo sapiens
  misc_RNA (1)...(19): siRNA sense strand
gggagaaccagggaaagga

SEQ ID NO: 754365 - RNA, 19 nt, Homo sapiens
  misc_RNA (1)...(19): siRNA sense strand
gagccaggccagcauccaa

SEQ ID NO: 754366 - RNA, 19 nt, Homo sapiens
  misc_RNA (1)...(19): siRNA sense strand
gguacuccaggaccaauug

SEQ ID NO: 754367 - RNA, 19 nt, Homo sapiens
  misc_RNA (1)...(19): siRNA sense strand
aaaggagacccugggauga

SEQ ID NO: 754368 - RNA, 19 nt, Homo sapiens
  misc_RNA (1)...(19): siRNA sense strand
gagccagggaucccaggaa

SEQ ID NO: 754369 - RNA, 19 nt, Homo sapiens
  misc_RNA (1)...(19): siRNA sense strand
gaaccagggaaaggagaga

SEQ ID NO: 754370 - RNA, 19 nt, Homo sapiens
  misc_RNA (1)...(19): siRNA sense strand
gauuacaauggaaacauca

SEQ ID NO: 754371 - RNA, 19 nt, Homo sapiens
  misc_RNA (1)...(19): siRNA sense strand
ggucaaccaggaacuagag

SEQ ID NO: 754372 - RNA, 19 nt, Homo sapiens
  misc_RNA (1)...(19): siRNA sense strand
aaggagagaugguggauua

SEQ ID NO: 754373 - RNA, 19 nt, Homo sapiens
  misc_RNA (1)...(19): siRNA sense strand
cagcugggcuuccugguuu

SEQ ID NO: 754374 - RNA, 19 nt, Homo sapiens
  misc_RNA (1)...(19): siRNA sense strand
ccaaagacaucuccaggau

SEQ ID NO: 754375 - RNA, 19 nt, Homo sapiens
  misc_RNA (1)...(19): siRNA sense strand
gagagaugguggauuacaa

SEQ ID NO: 754376 - RNA, 19 nt, Homo sapiens
  misc_RNA (1)...(19): siRNA sense strand
aaagggaccucgcgguaaa

SEQ ID NO: 754377 - RNA, 19 nt, Homo sapiens
  misc_RNA (1)...(19): siRNA sense strand
gaugguggauuacaaugga

SEQ ID NO: 754378 - RNA, 19 nt, Homo sapiens
  misc_RNA (1)...(19): siRNA sense strand
ggauuacaauggaaacauc

SEQ ID NO: 754379 - RNA, 19 nt, Homo sapiens
  misc_RNA (1)...(19): siRNA sense strand
caagggagaaccagggaaa

SEQ ID NO: 754380 - RNA, 19 nt, Homo sapiens
  misc_RNA (1)...(19): siRNA sense strand
ggaagcaggacuagaugga

SEQ ID NO: 754381 - RNA, 19 nt, Homo sapiens
  misc_RNA (1)...(19): siRNA sense strand
caaggcugcuggaacaagu

SEQ ID NO: 754382 - RNA, 19 nt, Homo sapiens
  misc_RNA (1)...(19): siRNA sense strand
gggagaagcaggugucgau

SEQ ID NO: 754383 - RNA, 19 nt, Homo sapiens
  misc_RNA (1)...(19): siRNA sense strand
ggagaacagggaccagaug

SEQ ID NO: 754384 - RNA, 19 nt, Homo sapiens
  misc_RNA (1)...(19): siRNA sense strand
acaauggaaacaucaauga

SEQ ID NO: 754385 - RNA, 19 nt, Homo sapiens
  misc_RNA (1)...(19): siRNA sense strand
gaaaggagagaugguggau

SEQ ID NO: 754386 - RNA, 19 nt, Homo sapiens
  misc_RNA (1)...(19): siRNA sense strand
cuagagguuucccuggauu

SEQ ID NO: 754387 - RNA, 19 nt, Homo sapiens
  misc_RNA (1)...(19): siRNA sense strand
gcaaauggagacggcuauu

SEQ ID NO: 754388 - RNA, 19 nt, Homo sapiens
  misc_RNA (1)...(19): siRNA sense strand
gaaaggcuuccagggagaa

SEQ ID NO: 754389 - RNA, 19 nt, Homo sapiens
  misc_RNA (1)...(19): siRNA sense strand
gcagcugggcuuccugguu

SEQ ID NO: 754390 - RNA, 19 nt, Homo sapiens
  misc_RNA (1)...(19): siRNA sense strand
ggagagaugguggauuaca

SEQ ID NO: 754391 - RNA, 19 nt, Homo sapiens
  misc_RNA (1)...(19): siRNA sense strand
gaugcuggcaacuccauug

SEQ ID NO: 754392 - RNA, 19 nt, Homo sapiens
  misc_RNA (1)...(19): siRNA sense strand
gcguggagcagcuggagaa

SEQ ID NO: 754393 - RNA, 19 nt, Homo sapiens
  misc_RNA (1)...(19): siRNA sense strand
uggagcagcuggagaacag

SEQ ID NO: 754394 - RNA, 19 nt, Homo sapiens
  misc_RNA (1)...(19): siRNA sense strand
ggauuuccgggucccauug

SEQ ID NO: 754395 - RNA, 19 nt, Homo sapiens
  misc_RNA (1)...(19): siRNA sense strand
gagaugguggauuacaaug

SEQ ID NO: 754396 - RNA, 19 nt, Homo sapiens
  misc_RNA (1)...(19): siRNA sense strand
uagcggagcgcacccacaa

SEQ ID NO: 754397 - RNA, 19 nt, Homo sapiens
  misc_RNA (1)...(19): siRNA sense strand
gggagaaccagggaaagga

SEQ ID NO: 754398 - RNA, 19 nt, Homo sapiens
  misc_RNA (1)...(19): siRNA sense strand
gagccaggccagcauccaa

SEQ ID NO: 754399 - RNA, 19 nt, Homo sapiens
  misc_RNA (1)...(19): siRNA sense strand
gguacuccaggaccaauug

SEQ ID NO: 754400 - RNA, 19 nt, Homo sapiens
  misc_RNA (1)...(19): siRNA sense strand
aaaggagacccugggauga

SEQ ID NO: 754401 - RNA, 19 nt, Homo sapiens
  misc_RNA (1)...(19): siRNA sense strand
gagccagggaucccaggaa

SEQ ID NO: 754402 - RNA, 19 nt, Homo sapiens
  misc_RNA (1)...(19): siRNA sense strand
gaaccagggaaaggagaga

SEQ ID NO: 754403 - RNA, 19 nt, Homo sapiens
  misc_RNA (1)...(19): siRNA sense strand
gauuacaauggaaacauca

SEQ ID NO: 754404 - RNA, 19 nt, Homo sapiens
  misc_RNA (1)...(19): siRNA sense strand
ggucaaccaggaacuagag

SEQ ID NO: 754405 - RNA, 19 nt, Homo sapiens
  misc_RNA (1)...(19): siRNA sense strand
aaggagagaugguggauua

SEQ ID NO: 754406 - RNA, 19 nt, Homo sapiens
  misc_RNA (1)...(19): siRNA sense strand
cagcugggcuuccugguuu

SEQ ID NO: 754407 - RNA, 19 nt, Homo sapiens
  misc_RNA (1)...(19): siRNA sense strand
ccaaagacaucuccaggau

SEQ ID NO: 754408 - RNA, 19 nt, Homo sapiens
  misc_RNA (1)...(19): siRNA sense strand
gagagaugguggauuacaa

SEQ ID NO: 754409 - RNA, 19 nt, Homo sapiens
  misc_RNA (1)...(19): siRNA sense strand
aaagggaccucgcgguaaa

SEQ ID NO: 754410 - RNA, 19 nt, Homo sapiens
  misc_RNA (1)...(19): siRNA sense strand
gaugguggauuacaaugga

SEQ ID NO: 754411 - RNA, 19 nt, Homo sapiens
  misc_RNA (1)...(19): siRNA sense strand
ggauuacaauggaaacauc

SEQ ID NO: 754412 - RNA, 19 nt, Homo sapiens
  misc_RNA (1)...(19): siRNA sense strand
caagggagaaccagggaaa

SEQ ID NO: 754413 - RNA, 19 nt, Homo sapiens
  misc_RNA (1)...(19): siRNA sense strand
ggaagcaggacuagaugga

SEQ ID NO: 754414 - RNA, 19 nt, Homo sapiens
  misc_RNA (1)...(19): siRNA sense strand
caaggcugcuggaacaagu

SEQ ID NO: 754415 - RNA, 19 nt, Homo sapiens
  misc_RNA (1)...(19): siRNA sense strand
gggagaagcaggugucgau

SEQ ID NO: 754416 - RNA, 19 nt, Homo sapiens
  misc_RNA (1)...(19): siRNA sense strand
ggagaacagggaccagaug

SEQ ID NO: 754417 - RNA, 19 nt, Homo sapiens
  misc_RNA (1)...(19): siRNA sense strand
acaauggaaacaucaauga

SEQ ID NO: 754418 - RNA, 19 nt, Homo sapiens
  misc_RNA (1)...(19): siRNA sense strand
gaaaggagagaugguggau

SEQ ID NO: 754419 - RNA, 19 nt, Homo sapiens
  misc_RNA (1)...(19): siRNA sense strand
cuagagguuucccuggauu

SEQ ID NO: 754420 - RNA, 19 nt, Homo sapiens
  misc_RNA (1)...(19): siRNA sense strand
gcaaauggagacggcuauu

SEQ ID NO: 754421 - RNA, 19 nt, Homo sapiens
  misc_RNA (1)...(19): siRNA sense strand
gaaaggcuuccagggagaa

SEQ ID NO: 754422 - RNA, 19 nt, Homo sapiens
  misc_RNA (1)...(19): siRNA sense strand
gcagcugggcuuccugguu

SEQ ID NO: 754423 - RNA, 19 nt, Homo sapiens
  misc_RNA (1)...(19): siRNA sense strand
ggagagaugguggauuaca

SEQ ID NO: 754424 - RNA, 19 nt, Homo sapiens
  misc_RNA (1)...(19): siRNA sense strand
gaugcuggcaacuccauug

SEQ ID NO: 754425 - RNA, 19 nt, Homo sapiens
  misc_RNA (1)...(19): siRNA sense strand
gcguggagcagcuggagaa

SEQ ID NO: 754426 - RNA, 19 nt, Homo sapiens
  misc_RNA (1)...(19): siRNA sense strand
uggagcagcuggagaacag

SEQ ID NO: 754427 - RNA, 19 nt, Homo sapiens
  misc_RNA (1)...(19): siRNA sense strand
ggauuuccgggucccauug

SEQ ID NO: 754428 - RNA, 19 nt, Homo sapiens
  misc_RNA (1)...(19): siRNA sense strand
gagaugguggauuacaaug

SEQ ID NO: 754429 - RNA, 19 nt, Homo sapiens
  misc_RNA (1)...(19): siRNA sense strand
uagcggagcgcacccacaa

SEQ ID NO: 754430 - RNA, 19 nt, Homo sapiens
  misc_RNA (1)...(19): siRNA sense strand
gggagaaccagggaaagga

SEQ ID NO: 754431 - RNA, 19 nt, Homo sapiens
  misc_RNA (1)...(19): siRNA sense strand
gagccaggccagcauccaa

SEQ ID NO: 754432 - RNA, 19 nt, Homo sapiens
  misc_RNA (1)...(19): siRNA sense strand
gguacuccaggaccaauug

SEQ ID NO: 754433 - RNA, 19 nt, Homo sapiens
  misc_RNA (1)...(19): siRNA sense strand
aaaggagacccugggauga

SEQ ID NO: 754434 - RNA, 19 nt, Homo sapiens
  misc_RNA (1)...(19): siRNA sense strand
gagccagggaucccaggaa

SEQ ID NO: 754435 - RNA, 19 nt, Homo sapiens
  misc_RNA (1)...(19): siRNA sense strand
gaaccagggaaaggagaga

SEQ ID NO: 754436 - RNA, 19 nt, Homo sapiens
  misc_RNA (1)...(19): siRNA sense strand
gauuacaauggaaacauca

SEQ ID NO: 754437 - RNA, 19 nt, Homo sapiens
  misc_RNA (1)...(19): siRNA sense strand
ggucaaccaggaacuagag

SEQ ID NO: 754438 - RNA, 19 nt, Homo sapiens
  misc_RNA (1)...(19): siRNA sense strand
aaggagagaugguggauua

SEQ ID NO: 754439 - RNA, 19 nt, Homo sapiens
  misc_RNA (1)...(19): siRNA sense strand
cagcugggcuuccugguuu

SEQ ID NO: 754440 - RNA, 19 nt, Homo sapiens
  misc_RNA (1)...(19): siRNA sense strand
ccaaagacaucuccaggau

SEQ ID NO: 754441 - RNA, 19 nt, Homo sapiens
  misc_RNA (1)...(19): siRNA sense strand
gagagaugguggauuacaa

SEQ ID NO: 754442 - RNA, 19 nt, Homo sapiens
  misc_RNA (1)...(19): siRNA sense strand
aaagggaccucgcgguaaa

SEQ ID NO: 754443 - RNA, 19 nt, Homo sapiens
  misc_RNA (1)...(19): siRNA sense strand
gaugguggauuacaaugga

SEQ ID NO: 754444 - RNA, 19 nt, Homo sapiens
  misc_RNA (1)...(19): siRNA sense strand
ggauuacaauggaaacauc

SEQ ID NO: 754445 - RNA, 19 nt, Homo sapiens
  misc_RNA (1)...(19): siRNA sense strand
caagggagaaccagggaaa

SEQ ID NO: 754446 - RNA, 19 nt, Homo sapiens
  misc_RNA (1)...(19): siRNA sense strand
ggaagcaggacuagaugga

SEQ ID NO: 754447 - RNA, 19 nt, Homo sapiens
  misc_RNA (1)...(19): siRNA sense strand
caaggcugcuggaacaagu

SEQ ID NO: 754448 - RNA, 19 nt, Homo sapiens
  misc_RNA (1)...(19): siRNA sense strand
gggagaagcaggugucgau

SEQ ID NO: 754449 - RNA, 19 nt, Homo sapiens
  misc_RNA (1)...(19): siRNA sense strand
ggagaacagggaccagaug

SEQ ID NO: 754450 - RNA, 19 nt, Homo sapiens
  misc_RNA (1)...(19): siRNA sense strand
acaauggaaacaucaauga

SEQ ID NO: 754451 - RNA, 19 nt, Homo sapiens
  misc_RNA (1)...(19): siRNA sense strand
gaaaggagagaugguggau

SEQ ID NO: 754452 - RNA, 19 nt, Homo sapiens
  misc_RNA (1)...(19): siRNA sense strand
cuagagguuucccuggauu

SEQ ID NO: 754453 - RNA, 19 nt, Homo sapiens
  misc_RNA (1)...(19): siRNA sense strand
gcaaauggagacggcuauu

SEQ ID NO: 754454 - RNA, 19 nt, Homo sapiens
  misc_RNA (1)...(19): siRNA sense strand
gaaaggcuuccagggagaa

SEQ ID NO: 754455 - RNA, 19 nt, Homo sapiens
  misc_RNA (1)...(19): siRNA sense strand
gcagcugggcuuccugguu

SEQ ID NO: 754456 - RNA, 19 nt, Homo sapiens
  misc_RNA (1)...(19): siRNA sense strand
ggagagaugguggauuaca

SEQ ID NO: 754457 - RNA, 19 nt, Homo sapiens
  misc_RNA (1)...(19): siRNA sense strand
gaugcuggcaacuccauug

SEQ ID NO: 754458 - RNA, 19 nt, Homo sapiens
  misc_RNA (1)...(19): siRNA sense strand
gcguggagcagcuggagaa

SEQ ID NO: 754459 - RNA, 19 nt, Homo sapiens
  misc_RNA (1)...(19): siRNA sense strand
uggagcagcuggagaacag

SEQ ID NO: 754460 - RNA, 19 nt, Homo sapiens
  misc_RNA (1)...(19): siRNA sense strand
ggauuuccgggucccauug

SEQ ID NO: 754461 - RNA, 19 nt, Homo sapiens
  misc_RNA (1)...(19): siRNA sense strand
gagaugguggauuacaaug

SEQ ID NO: 754462 - RNA, 19 nt, Homo sapiens
  misc_RNA (1)...(19): siRNA sense strand
uagcggagcgcacccacaa

SEQ ID NO: 754463 - RNA, 19 nt, Homo sapiens
  misc_RNA (1)...(19): siRNA sense strand
gggagaaccagggaaagga

SEQ ID NO: 754464 - RNA, 19 nt, Homo sapiens
  misc_RNA (1)...(19): siRNA sense strand
gagccaggccagcauccaa

SEQ ID NO: 754465 - RNA, 19 nt, Homo sapiens
  misc_RNA (1)...(19): siRNA sense strand
gguacuccaggaccaauug

SEQ ID NO: 754466 - RNA, 19 nt, Homo sapiens
  misc_RNA (1)...(19): siRNA sense strand
aaaggagacccugggauga

SEQ ID NO: 754467 - RNA, 19 nt, Homo sapiens
  misc_RNA (1)...(19): siRNA sense strand
gagccagggaucccaggaa

SEQ ID NO: 754468 - RNA, 19 nt, Homo sapiens
  misc_RNA (1)...(19): siRNA sense strand
gaaccagggaaaggagaga

SEQ ID NO: 754469 - RNA, 19 nt, Homo sapiens
  misc_RNA (1)...(19): siRNA sense strand
gauuacaauggaaacauca

SEQ ID NO: 754470 - RNA, 19 nt, Homo sapiens
  misc_RNA (1)...(19): siRNA sense strand
ggucaaccaggaacuagag

SEQ ID NO: 754471 - RNA, 19 nt, Homo sapiens
  misc_RNA (1)...(19): siRNA sense strand
aaggagagaugguggauua

SEQ ID NO: 754472 - RNA, 19 nt, Homo sapiens
  misc_RNA (1)...(19): siRNA sense strand
cagcugggcuuccugguuu

SEQ ID NO: 754473 - RNA, 19 nt, Homo sapiens
  misc_RNA (1)...(19): siRNA sense strand
ccaaagacaucuccaggau

SEQ ID NO: 754474 - RNA, 19 nt, Homo sapiens
  misc_RNA (1)...(19): siRNA sense strand
gagagaugguggauuacaa

SEQ ID NO: 754475 - RNA, 19 nt, Homo sapiens
  misc_RNA (1)...(19): siRNA sense strand
aaagggaccucgcgguaaa

SEQ ID NO: 754476 - RNA, 19 nt, Homo sapiens
  misc_RNA (1)...(19): siRNA sense strand
gaugguggauuacaaugga

SEQ ID NO: 754477 - RNA, 19 nt, Homo sapiens
  misc_RNA (1)...(19): siRNA sense strand
ggauuacaauggaaacauc

SEQ ID NO: 754478 - RNA, 19 nt, Homo sapiens
  misc_RNA (1)...(19): siRNA sense strand
caagggagaaccagggaaa

SEQ ID NO: 754479 - RNA, 19 nt, Homo sapiens
  misc_RNA (1)...(19): siRNA sense strand
ggaagcaggacuagaugga

SEQ ID NO: 754480 - RNA, 19 nt, Homo sapiens
  misc_RNA (1)...(19): siRNA sense strand
caaggcugcuggaacaagu

SEQ ID NO: 754481 - RNA, 19 nt, Homo sapiens
  misc_RNA (1)...(19): siRNA sense strand
gggagaagcaggugucgau

SEQ ID NO: 754482 - RNA, 19 nt, Homo sapiens
  misc_RNA (1)...(19): siRNA sense strand
ggagaacagggaccagaug

SEQ ID NO: 754483 - RNA, 19 nt, Homo sapiens
  misc_RNA (1)...(19): siRNA sense strand
acaauggaaacaucaauga

SEQ ID NO: 754484 - RNA, 19 nt, Homo sapiens
  misc_RNA (1)...(19): siRNA sense strand
gaaaggagagaugguggau

SEQ ID NO: 754485 - RNA, 19 nt, Homo sapiens
  misc_RNA (1)...(19): siRNA sense strand
cuagagguuucccuggauu

SEQ ID NO: 754486 - RNA, 19 nt, Homo sapiens
  misc_RNA (1)...(19): siRNA sense strand
gcaaauggagacggcuauu

SEQ ID NO: 754487 - RNA, 19 nt, Homo sapiens
  misc_RNA (1)...(19): siRNA sense strand
gaaaggcuuccagggagaa

SEQ ID NO: 754488 - RNA, 19 nt, Homo sapiens
  misc_RNA (1)...(19): siRNA sense strand
gcagcugggcuuccugguu

SEQ ID NO: 754489 - RNA, 19 nt, Homo sapiens
  misc_RNA (1)...(19): siRNA sense strand
ggagagaugguggauuaca

SEQ ID NO: 754490 - RNA, 19 nt, Homo sapiens
  misc_RNA (1)...(19): siRNA sense strand
gaugcuggcaacuccauug

SEQ ID NO: 754491 - RNA, 19 nt, Homo sapiens
  misc_RNA (1)...(19): siRNA sense strand
gcguggagcagcuggagaa

SEQ ID NO: 754492 - RNA, 19 nt, Homo sapiens
  misc_RNA (1)...(19): siRNA sense strand
uggagcagcuggagaacag

SEQ ID NO: 754493 - RNA, 19 nt, Homo sapiens
  misc_RNA (1)...(19): siRNA sense strand
ggauuuccgggucccauug

SEQ ID NO: 754494 - RNA, 19 nt, Homo sapiens
  misc_RNA (1)...(19): siRNA sense strand
gagaugguggauuacaaug

SEQ ID NO: 754495 - RNA, 19 nt, Homo sapiens
  misc_RNA (1)...(19): siRNA sense strand
uagcggagcgcacccacaa

SEQ ID NO: 754496 - RNA, 19 nt, Homo sapiens
  misc_RNA (1)...(19): siRNA sense strand
gggagaaccagggaaagga

SEQ ID NO: 754497 - RNA, 19 nt, Homo sapiens
  misc_RNA (1)...(19): siRNA sense strand
gagccaggccagcauccaa

SEQ ID NO: 754498 - RNA, 19 nt, Homo sapiens
  misc_RNA (1)...(19): siRNA sense strand
gguacuccaggaccaauug

SEQ ID NO: 754499 - RNA, 19 nt, Homo sapiens
  misc_RNA (1)...(19): siRNA sense strand
aaaggagacccugggauga

SEQ ID NO: 754500 - RNA, 19 nt, Homo sapiens
  misc_RNA (1)...(19): siRNA sense strand
gagccagggaucccaggaa

SEQ ID NO: 754501 - RNA, 19 nt, Homo sapiens
  misc_RNA (1)...(19): siRNA sense strand
gaaccagggaaaggagaga

SEQ ID NO: 754502 - RNA, 19 nt, Homo sapiens
  misc_RNA (1)...(19): siRNA sense strand
gauuacaauggaaacauca

SEQ ID NO: 754503 - RNA, 19 nt, Homo sapiens
  misc_RNA (1)...(19): siRNA sense strand
ggucaaccaggaacuagag

SEQ ID NO: 754504 - RNA, 19 nt, Homo sapiens
  misc_RNA (1)...(19): siRNA sense strand
aaggagagaugguggauua

SEQ ID NO: 754505 - RNA, 19 nt, Homo sapiens
  misc_RNA (1)...(19): siRNA sense strand
cagcugggcuuccugguuu

SEQ ID NO: 754506 - RNA, 19 nt, Homo sapiens
  misc_RNA (1)...(19): siRNA sense strand
ccaaagacaucuccaggau

SEQ ID NO: 754507 - RNA, 19 nt, Homo sapiens
  misc_RNA (1)...(19): siRNA sense strand
gagagaugguggauuacaa

SEQ ID NO: 754508 - RNA, 19 nt, Homo sapiens
  misc_RNA (1)...(19): siRNA sense strand
aaagggaccucgcgguaaa

SEQ ID NO: 754509 - RNA, 19 nt, Homo sapiens
  misc_RNA (1)...(19): siRNA sense strand
gaugguggauuacaaugga

SEQ ID NO: 754510 - RNA, 19 nt, Homo sapiens
  misc_RNA (1)...(19): siRNA sense strand
ggauuacaauggaaacauc

SEQ ID NO: 754511 - RNA, 19 nt, Homo sapiens
  misc_RNA (1)...(19): siRNA sense strand
caagggagaaccagggaaa

SEQ ID NO: 754512 - RNA, 19 nt, Homo sapiens
  misc_RNA (1)...(19): siRNA sense strand
ggaagcaggacuagaugga

SEQ ID NO: 754513 - RNA, 19 nt, Homo sapiens
  misc_RNA (1)...(19): siRNA sense strand
caaggcugcuggaacaagu

SEQ ID NO: 754514 - RNA, 19 nt, Homo sapiens
  misc_RNA (1)...(19): siRNA sense strand
gggagaagcaggugucgau

SEQ ID NO: 754515 - RNA, 19 nt, Homo sapiens
  misc_RNA (1)...(19): siRNA sense strand
ggagaacagggaccagaug

SEQ ID NO: 754516 - RNA, 19 nt, Homo sapiens
  misc_RNA (1)...(19): siRNA sense strand
acaauggaaacaucaauga

SEQ ID NO: 754517 - RNA, 19 nt, Homo sapiens
  misc_RNA (1)...(19): siRNA sense strand
gaaaggagagaugguggau

SEQ ID NO: 754518 - RNA, 19 nt, Homo sapiens
  misc_RNA (1)...(19): siRNA sense strand
cuagagguuucccuggauu

SEQ ID NO: 754519 - RNA, 19 nt, Homo sapiens
  misc_RNA (1)...(19): siRNA sense strand
gcaaauggagacggcuauu

SEQ ID NO: 754520 - RNA, 19 nt, Homo sapiens
  misc_RNA (1)...(19): siRNA sense strand
gaaaggcuuccagggagaa

SEQ ID NO: 754521 - RNA, 19 nt, Homo sapiens
  misc_RNA (1)...(19): siRNA sense strand
gcagcugggcuuccugguu

SEQ ID NO: 754522 - RNA, 19 nt, Homo sapiens
  misc_RNA (1)...(19): siRNA sense strand
ggagagaugguggauuaca

SEQ ID NO: 754523 - RNA, 19 nt, Homo sapiens
  misc_RNA (1)...(19): siRNA sense strand
gaugcuggcaacuccauug

SEQ ID NO: 754524 - RNA, 19 nt, Homo sapiens
  misc_RNA (1)...(19): siRNA sense strand
gcguggagcagcuggagaa

SEQ ID NO: 754525 - RNA, 19 nt, Homo sapiens
  misc_RNA (1)...(19): siRNA sense strand
uggagcagcuggagaacag

SEQ ID NO: 754526 - RNA, 19 nt, Homo sapiens
  misc_RNA (1)...(19): siRNA sense strand
ggauuuccgggucccauug

SEQ ID NO: 754527 - RNA, 19 nt, Homo sapiens
  misc_RNA (1)...(19): siRNA sense strand
gagaugguggauuacaaug

SEQ ID NO: 754528 - RNA, 19 nt, Homo sapiens
  misc_RNA (1)...(19): siRNA sense strand
uagcggagcgcacccacaa

SEQ ID NO: 754529 - RNA, 19 nt, Homo sapiens
  misc_RNA (1)...(19): siRNA sense strand
gggagaaccagggaaagga

SEQ ID NO: 754530 - RNA, 19 nt, Homo sapiens
  misc_RNA (1)...(19): siRNA sense strand
gagccaggccagcauccaa

SEQ ID NO: 754531 - RNA, 19 nt, Homo sapiens
  misc_RNA (1)...(19): siRNA sense strand
gguacuccaggaccaauug

SEQ ID NO: 754532 - RNA, 19 nt, Homo sapiens
  misc_RNA (1)...(19): siRNA sense strand
aaaggagacccugggauga

SEQ ID NO: 754533 - RNA, 19 nt, Homo sapiens
  misc_RNA (1)...(19): siRNA sense strand
gagccagggaucccaggaa

SEQ ID NO: 754534 - RNA, 19 nt, Homo sapiens
  misc_RNA (1)...(19): siRNA sense strand
gaaccagggaaaggagaga

SEQ ID NO: 754535 - RNA, 19 nt, Homo sapiens
  misc_RNA (1)...(19): siRNA sense strand
gauuacaauggaaacauca

SEQ ID NO: 754536 - RNA, 19 nt, Homo sapiens
  misc_RNA (1)...(19): siRNA sense strand
ggucaaccaggaacuagag

SEQ ID NO: 754537 - RNA, 19 nt, Homo sapiens
  misc_RNA (1)...(19): siRNA sense strand
aaggagagaugguggauua

SEQ ID NO: 754538 - RNA, 19 nt, Homo sapiens
  misc_RNA (1)...(19): siRNA sense strand
cagcugggcuuccugguuu

SEQ ID NO: 754539 - RNA, 19 nt, Homo sapiens
  misc_RNA (1)...(19): siRNA sense strand
ccaaagacaucuccaggau

SEQ ID NO: 754540 - RNA, 19 nt, Homo sapiens
  misc_RNA (1)...(19): siRNA sense strand
gagagaugguggauuacaa

SEQ ID NO: 754541 - RNA, 19 nt, Homo sapiens
  misc_RNA (1)...(19): siRNA sense strand
aaagggaccucgcgguaaa

SEQ ID NO: 754542 - RNA, 19 nt, Homo sapiens
  misc_RNA (1)...(19): siRNA sense strand
gaugguggauuacaaugga

SEQ ID NO: 754543 - RNA, 19 nt, Homo sapiens
  misc_RNA (1)...(19): siRNA sense strand
ggauuacaauggaaacauc

SEQ ID NO: 754544 - RNA, 19 nt, Homo sapiens
  misc_RNA (1)...(19): siRNA sense strand
gggcgaagauggcuuacca

SEQ ID NO: 754545 - RNA, 19 nt, Homo sapiens
  misc_RNA (1)...(19): siRNA sense strand
caagggagaaccagggaaa

SEQ ID NO: 754546 - RNA, 19 nt, Homo sapiens
  misc_RNA (1)...(19): siRNA sense strand
ggaagcaggacuagaugga

SEQ ID NO: 754547 - RNA, 19 nt, Homo sapiens
  misc_RNA (1)...(19): siRNA sense strand
caaggcugcuggaacaagu

SEQ ID NO: 754548 - RNA, 19 nt, Homo sapiens
  misc_RNA (1)...(19): siRNA sense strand
gggagaagcaggugucgau

SEQ ID NO: 754549 - RNA, 19 nt, Homo sapiens
  misc_RNA (1)...(19): siRNA sense strand
ggagaacagggaccagaug

SEQ ID NO: 754550 - RNA, 19 nt, Homo sapiens
  misc_RNA (1)...(19): siRNA sense strand
acaauggaaacaucaauga

SEQ ID NO: 754551 - RNA, 19 nt, Homo sapiens
  misc_RNA (1)...(19): siRNA sense strand
gaaaggagagaugguggau

SEQ ID NO: 754552 - RNA, 19 nt, Homo sapiens
  misc_RNA (1)...(19): siRNA sense strand
cuagagguuucccuggauu

SEQ ID NO: 754553 - RNA, 19 nt, Homo sapiens
  misc_RNA (1)...(19): siRNA sense strand
gcaaauggagacggcuauu

SEQ ID NO: 754554 - RNA, 19 nt, Homo sapiens
  misc_RNA (1)...(19): siRNA sense strand
gaaaggcuuccagggagaa

SEQ ID NO: 754555 - RNA, 19 nt, Homo sapiens
  misc_RNA (1)...(19): siRNA sense strand
gcagcugggcuuccugguu

SEQ ID NO: 754556 - RNA, 19 nt, Homo sapiens
  misc_RNA (1)...(19): siRNA sense strand
ggagagaugguggauuaca

SEQ ID NO: 754557 - RNA, 19 nt, Homo sapiens
  misc_RNA (1)...(19): siRNA sense strand
gaugcuggcaacuccauug

SEQ ID NO: 754558 - RNA, 19 nt, Homo sapiens
  misc_RNA (1)...(19): siRNA sense strand
gcguggagcagcuggagaa

SEQ ID NO: 754559 - RNA, 19 nt, Homo sapiens
  misc_RNA (1)...(19): siRNA sense strand
uggagcagcuggagaacag

SEQ ID NO: 754560 - RNA, 19 nt, Homo sapiens
  misc_RNA (1)...(19): siRNA sense strand
ggauuuccgggucccauug

SEQ ID NO: 754561 - RNA, 19 nt, Homo sapiens
  misc_RNA (1)...(19): siRNA sense strand
gagaugguggauuacaaug

SEQ ID NO: 754562 - RNA, 19 nt, Homo sapiens
  misc_RNA (1)...(19): siRNA sense strand
uagcggagcgcacccacaa

SEQ ID NO: 754563 - RNA, 19 nt, Homo sapiens
  misc_RNA (1)...(19): siRNA sense strand
gggagaaccagggaaagga

SEQ ID NO: 754564 - RNA, 19 nt, Homo sapiens
  misc_RNA (1)...(19): siRNA sense strand
gagccaggccagcauccaa

SEQ ID NO: 754565 - RNA, 19 nt, Homo sapiens
  misc_RNA (1)...(19): siRNA sense strand
gguacuccaggaccaauug

SEQ ID NO: 754566 - RNA, 19 nt, Homo sapiens
  misc_RNA (1)...(19): siRNA sense strand
aaaggagacccugggauga

SEQ ID NO: 754567 - RNA, 19 nt, Homo sapiens
  misc_RNA (1)...(19): siRNA sense strand
gagccagggaucccaggaa

SEQ ID NO: 754568 - RNA, 19 nt, Homo sapiens
  misc_RNA (1)...(19): siRNA sense strand
gaaccagggaaaggagaga

SEQ ID NO: 754569 - RNA, 19 nt, Homo sapiens
  misc_RNA (1)...(19): siRNA sense strand
gauuacaauggaaacauca

SEQ ID NO: 754570 - RNA, 19 nt, Homo sapiens
  misc_RNA (1)...(19): siRNA sense strand
ggucaaccaggaacuagag

SEQ ID NO: 754571 - RNA, 19 nt, Homo sapiens
  misc_RNA (1)...(19): siRNA sense strand
aaggagagaugguggauua

SEQ ID NO: 754572 - RNA, 19 nt, Homo sapiens
  misc_RNA (1)...(19): siRNA sense strand
cagcugggcuuccugguuu

SEQ ID NO: 754573 - RNA, 19 nt, Homo sapiens
  misc_RNA (1)...(19): siRNA sense strand
ccaaagacaucuccaggau

SEQ ID NO: 754574 - RNA, 19 nt, Homo sapiens
  misc_RNA (1)...(19): siRNA sense strand
gagagaugguggauuacaa

SEQ ID NO: 754575 - RNA, 19 nt, Homo sapiens
  misc_RNA (1)...(19): siRNA sense strand
aaagggaccucgcgguaaa

SEQ ID NO: 754576 - RNA, 19 nt, Homo sapiens
  misc_RNA (1)...(19): siRNA sense strand
gaugguggauuacaaugga

SEQ ID NO: 754577 - RNA, 19 nt, Homo sapiens
  misc_RNA (1)...(19): siRNA sense strand
ggauuacaauggaaacauc

SEQ ID NO: 754578 - RNA, 19 nt, Homo sapiens
  misc_RNA (1)...(19): siRNA sense strand
caagggagaaccagggaaa

SEQ ID NO: 754579 - RNA, 19 nt, Homo sapiens
  misc_RNA (1)...(19): siRNA sense strand
ggaagcaggacuagaugga

SEQ ID NO: 754580 - RNA, 19 nt, Homo sapiens
  misc_RNA (1)...(19): siRNA sense strand
caaggcugcuggaacaagu

SEQ ID NO: 754581 - RNA, 19 nt, Homo sapiens
  misc_RNA (1)...(19): siRNA sense strand
gggagaagcaggugucgau

SEQ ID NO: 754582 - RNA, 19 nt, Homo sapiens
  misc_RNA (1)...(19): siRNA sense strand
ggagaacagggaccagaug

SEQ ID NO: 754583 - RNA, 19 nt, Homo sapiens
  misc_RNA (1)...(19): siRNA sense strand
acaauggaaacaucaauga

SEQ ID NO: 754584 - RNA, 19 nt, Homo sapiens
  misc_RNA (1)...(19): siRNA sense strand
gaaaggagagaugguggau

SEQ ID NO: 754585 - RNA, 19 nt, Homo sapiens
  misc_RNA (1)...(19): siRNA sense strand
cuagagguuucccuggauu

SEQ ID NO: 754586 - RNA, 19 nt, Homo sapiens
  misc_RNA (1)...(19): siRNA sense strand
gcaaauggagacggcuauu

SEQ ID NO: 754587 - RNA, 19 nt, Homo sapiens
  misc_RNA (1)...(19): siRNA sense strand
gaaaggcuuccagggagaa

SEQ ID NO: 754588 - RNA, 19 nt, Homo sapiens
  misc_RNA (1)...(19): siRNA sense strand
gcagcugggcuuccugguu

SEQ ID NO: 754589 - RNA, 19 nt, Homo sapiens
  misc_RNA (1)...(19): siRNA sense strand
ggagagaugguggauuaca

SEQ ID NO: 754590 - RNA, 19 nt, Homo sapiens
  misc_RNA (1)...(19): siRNA sense strand
gaugcuggcaacuccauug

SEQ ID NO: 754591 - RNA, 19 nt, Homo sapiens
  misc_RNA (1)...(19): siRNA sense strand
gcguggagcagcuggagaa

SEQ ID NO: 754592 - RNA, 19 nt, Homo sapiens
  misc_RNA (1)...(19): siRNA sense strand
uggagcagcuggagaacag

SEQ ID NO: 754593 - RNA, 19 nt, Homo sapiens
  misc_RNA (1)...(19): siRNA sense strand
ggauuuccgggucccauug

SEQ ID NO: 754594 - RNA, 19 nt, Homo sapiens
  misc_RNA (1)...(19): siRNA sense strand
gagaugguggauuacaaug

SEQ ID NO: 754595 - RNA, 19 nt, Homo sapiens
  misc_RNA (1)...(19): siRNA sense strand
uagcggagcgcacccacaa

SEQ ID NO: 754596 - RNA, 19 nt, Homo sapiens
  misc_RNA (1)...(19): siRNA sense strand
gggagaaccagggaaagga

SEQ ID NO: 754597 - RNA, 19 nt, Homo sapiens
  misc_RNA (1)...(19): siRNA sense strand
gagccaggccagcauccaa

SEQ ID NO: 754598 - RNA, 19 nt, Homo sapiens
  misc_RNA (1)...(19): siRNA sense strand
gguacuccaggaccaauug

SEQ ID NO: 754599 - RNA, 19 nt, Homo sapiens
  misc_RNA (1)...(19): siRNA sense strand
aaaggagacccugggauga

SEQ ID NO: 754600 - RNA, 19 nt, Homo sapiens
  misc_RNA (1)...(19): siRNA sense strand
gagccagggaucccaggaa

SEQ ID NO: 754601 - RNA, 19 nt, Homo sapiens
  misc_RNA (1)...(19): siRNA sense strand
gaaccagggaaaggagaga

SEQ ID NO: 754602 - RNA, 19 nt, Homo sapiens
  misc_RNA (1)...(19): siRNA sense strand
gauuacaauggaaacauca

SEQ ID NO: 754603 - RNA, 19 nt, Homo sapiens
  misc_RNA (1)...(19): siRNA sense strand
ggucaaccaggaacuagag

SEQ ID NO: 754604 - RNA, 19 nt, Homo sapiens
  misc_RNA (1)...(19): siRNA sense strand
aaggagagaugguggauua

SEQ ID NO: 754605 - RNA, 19 nt, Homo sapiens
  misc_RNA (1)...(19): siRNA sense strand
cagcugggcuuccugguuu

SEQ ID NO: 754606 - RNA, 19 nt, Homo sapiens
  misc_RNA (1)...(19): siRNA sense strand
ccaaagacaucuccaggau

SEQ ID NO: 754607 - RNA, 19 nt, Homo sapiens
  misc_RNA (1)...(19): siRNA sense strand
gagagaugguggauuacaa

SEQ ID NO: 754608 - RNA, 19 nt, Homo sapiens
  misc_RNA (1)...(19): siRNA sense strand
aaagggaccucgcgguaaa

SEQ ID NO: 754609 - RNA, 19 nt, Homo sapiens
  misc_RNA (1)...(19): siRNA sense strand
gaugguggauuacaaugga

SEQ ID NO: 754610 - RNA, 19 nt, Homo sapiens
  misc_RNA (1)...(19): siRNA sense strand
ggauuacaauggaaacauc

SEQ ID NO: 754611 - RNA, 19 nt, Homo sapiens
  misc_RNA (1)...(19): siRNA sense strand
caagggagaaccagggaaa

SEQ ID NO: 754612 - RNA, 19 nt, Homo sapiens
  misc_RNA (1)...(19): siRNA sense strand
ggaagcaggacuagaugga

SEQ ID NO: 754613 - RNA, 19 nt, Homo sapiens
  misc_RNA (1)...(19): siRNA sense strand
caaggcugcuggaacaagu

SEQ ID NO: 754614 - RNA, 19 nt, Homo sapiens
  misc_RNA (1)...(19): siRNA sense strand
gggagaagcaggugucgau

SEQ ID NO: 754615 - RNA, 19 nt, Homo sapiens
  misc_RNA (1)...(19): siRNA sense strand
ggagaacagggaccagaug

SEQ ID NO: 754616 - RNA, 19 nt, Homo sapiens
  misc_RNA (1)...(19): siRNA sense strand
acaauggaaacaucaauga

SEQ ID NO: 754617 - RNA, 19 nt, Homo sapiens
  misc_RNA (1)...(19): siRNA sense strand
gaaaggagagaugguggau

SEQ ID NO: 754618 - RNA, 19 nt, Homo sapiens
  misc_RNA (1)...(19): siRNA sense strand
cuagagguuucccuggauu

SEQ ID NO: 754619 - RNA, 19 nt, Homo sapiens
  misc_RNA (1)...(19): siRNA sense strand
gcaaauggagacggcuauu

SEQ ID NO: 754620 - RNA, 19 nt, Homo sapiens
  misc_RNA (1)...(19): siRNA sense strand
gaaaggcuuccagggagaa

SEQ ID NO: 754621 - RNA, 19 nt, Homo sapiens
  misc_RNA (1)...(19): siRNA sense strand
gcagcugggcuuccugguu

SEQ ID NO: 754622 - RNA, 19 nt, Homo sapiens
  misc_RNA (1)...(19): siRNA sense strand
ggagagaugguggauuaca

SEQ ID NO: 754623 - RNA, 19 nt, Homo sapiens
  misc_RNA (1)...(19): siRNA sense strand
gaugcuggcaacuccauug

SEQ ID NO: 754624 - RNA, 19 nt, Homo sapiens
  misc_RNA (1)...(19): siRNA sense strand
gcguggagcagcuggagaa

SEQ ID NO: 754625 - RNA, 19 nt, Homo sapiens
  misc_RNA (1)...(19): siRNA sense strand
uggagcagcuggagaacag

SEQ ID NO: 754626 - RNA, 19 nt, Homo sapiens
  misc_RNA (1)...(19): siRNA sense strand
ggauuuccgggucccauug

SEQ ID NO: 754627 - RNA, 19 nt, Homo sapiens
  misc_RNA (1)...(19): siRNA sense strand
gagaugguggauuacaaug

SEQ ID NO: 754628 - RNA, 19 nt, Homo sapiens
  misc_RNA (1)...(19): siRNA sense strand
uagcggagcgcacccacaa

SEQ ID NO: 754629 - RNA, 19 nt, Homo sapiens
  misc_RNA (1)...(19): siRNA sense strand
gggagaaccagggaaagga

SEQ ID NO: 754630 - RNA, 19 nt, Homo sapiens
  misc_RNA (1)...(19): siRNA sense strand
gagccaggccagcauccaa

SEQ ID NO: 754631 - RNA, 19 nt, Homo sapiens
  misc_RNA (1)...(19): siRNA sense strand
gguacuccaggaccaauug

SEQ ID NO: 754632 - RNA, 19 nt, Homo sapiens
  misc_RNA (1)...(19): siRNA sense strand
aaaggagacccugggauga

SEQ ID NO: 754633 - RNA, 19 nt, Homo sapiens
  misc_RNA (1)...(19): siRNA sense strand
gagccagggaucccaggaa

SEQ ID NO: 754634 - RNA, 19 nt, Homo sapiens
  misc_RNA (1)...(19): siRNA sense strand
gaaccagggaaaggagaga

SEQ ID NO: 754635 - RNA, 19 nt, Homo sapiens
  misc_RNA (1)...(19): siRNA sense strand
gauuacaauggaaacauca

SEQ ID NO: 754636 - RNA, 19 nt, Homo sapiens
  misc_RNA (1)...(19): siRNA sense strand
ggucaaccaggaacuagag

SEQ ID NO: 754637 - RNA, 19 nt, Homo sapiens
  misc_RNA (1)...(19): siRNA sense strand
aaggagagaugguggauua

SEQ ID NO: 754638 - RNA, 19 nt, Homo sapiens
  misc_RNA (1)...(19): siRNA sense strand
cagcugggcuuccugguuu

SEQ ID NO: 754639 - RNA, 19 nt, Homo sapiens
  misc_RNA (1)...(19): siRNA sense strand
ccaaagacaucuccaggau

SEQ ID NO: 754640 - RNA, 19 nt, Homo sapiens
  misc_RNA (1)...(19): siRNA sense strand
gagagaugguggauuacaa

SEQ ID NO: 754641 - RNA, 19 nt, Homo sapiens
  misc_RNA (1)...(19): siRNA sense strand
aaagggaccucgcgguaaa

SEQ ID NO: 754642 - RNA, 19 nt, Homo sapiens
  misc_RNA (1)...(19): siRNA sense strand
gaugguggauuacaaugga

SEQ ID NO: 754643 - RNA, 19 nt, Homo sapiens
  misc_RNA (1)...(19): siRNA sense strand
ggauuacaauggaaacauc

SEQ ID NO: 754644 - RNA, 19 nt, Homo sapiens
  misc_RNA (1)...(19): siRNA sense strand
caagggagaaccagggaaa

SEQ ID NO: 754645 - RNA, 19 nt, Homo sapiens
  misc_RNA (1)...(19): siRNA sense strand
ggaagcaggacuagaugga

SEQ ID NO: 754646 - RNA, 19 nt, Homo sapiens
  misc_RNA (1)...(19): siRNA sense strand
caaggcugcuggaacaagu

SEQ ID NO: 754647 - RNA, 19 nt, Homo sapiens
  misc_RNA (1)...(19): siRNA sense strand
gggagaagcaggugucgau

SEQ ID NO: 754648 - RNA, 19 nt, Homo sapiens
  misc_RNA (1)...(19): siRNA sense strand
ggagaacagggaccagaug

SEQ ID NO: 754649 - RNA, 19 nt, Homo sapiens
  misc_RNA (1)...(19): siRNA sense strand
acaauggaaacaucaauga

SEQ ID NO: 754650 - RNA, 19 nt, Homo sapiens
  misc_RNA (1)...(19): siRNA sense strand
gaaaggagagaugguggau

SEQ ID NO: 754651 - RNA, 19 nt, Homo sapiens
  misc_RNA (1)...(19): siRNA sense strand
cuagagguuucccuggauu

SEQ ID NO: 754652 - RNA, 19 nt, Homo sapiens
  misc_RNA (1)...(19): siRNA sense strand
gcaaauggagacggcuauu

SEQ ID NO: 754653 - RNA, 19 nt, Homo sapiens
  misc_RNA (1)...(19): siRNA sense strand
gaaaggcuuccagggagaa

SEQ ID NO: 754654 - RNA, 19 nt, Homo sapiens
  misc_RNA (1)...(19): siRNA sense strand
gcagcugggcuuccugguu

SEQ ID NO: 754655 - RNA, 19 nt, Homo sapiens
  misc_RNA (1)...(19): siRNA sense strand
ggagagaugguggauuaca

SEQ ID NO: 754656 - RNA, 19 nt, Homo sapiens
  misc_RNA (1)...(19): siRNA sense strand
gaugcuggcaacuccauug

SEQ ID NO: 754657 - RNA, 19 nt, Homo sapiens
  misc_RNA (1)...(19): siRNA sense strand
gcguggagcagcuggagaa

SEQ ID NO: 754658 - RNA, 19 nt, Homo sapiens
  misc_RNA (1)...(19): siRNA sense strand
uggagcagcuggagaacag

SEQ ID NO: 754659 - RNA, 19 nt, Homo sapiens
  misc_RNA (1)...(19): siRNA sense strand
ggauuuccgggucccauug

SEQ ID NO: 754660 - RNA, 19 nt, Homo sapiens
  misc_RNA (1)...(19): siRNA sense strand
gagaugguggauuacaaug

SEQ ID NO: 754661 - RNA, 19 nt, Homo sapiens
  misc_RNA (1)...(19): siRNA sense strand
uagcggagcgcacccacaa

SEQ ID NO: 754662 - RNA, 19 nt, Homo sapiens
  misc_RNA (1)...(19): siRNA sense strand
gggagaaccagggaaagga

SEQ ID NO: 754663 - RNA, 19 nt, Homo sapiens
  misc_RNA (1)...(19): siRNA sense strand
gagccaggccagcauccaa

SEQ ID NO: 754664 - RNA, 19 nt, Homo sapiens
  misc_RNA (1)...(19): siRNA sense strand
gguacuccaggaccaauug

SEQ ID NO: 754665 - RNA, 19 nt, Homo sapiens
  misc_RNA (1)...(19): siRNA sense strand
aaaggagacccugggauga

SEQ ID NO: 754666 - RNA, 19 nt, Homo sapiens
  misc_RNA (1)...(19): siRNA sense strand
gagccagggaucccaggaa

SEQ ID NO: 754667 - RNA, 19 nt, Homo sapiens
  misc_RNA (1)...(19): siRNA sense strand
gaaccagggaaaggagaga

SEQ ID NO: 754668 - RNA, 19 nt, Homo sapiens
  misc_RNA (1)...(19): siRNA sense strand
gauuacaauggaaacauca

SEQ ID NO: 754669 - RNA, 19 nt, Homo sapiens
  misc_RNA (1)...(19): siRNA sense strand
ggucaaccaggaacuagag

SEQ ID NO: 754670 - RNA, 19 nt, Homo sapiens
  misc_RNA (1)...(19): siRNA sense strand
aaggagagaugguggauua

SEQ ID NO: 754671 - RNA, 19 nt, Homo sapiens
  misc_RNA (1)...(19): siRNA sense strand
cagcugggcuuccugguuu

SEQ ID NO: 754672 - RNA, 19 nt, Homo sapiens
  misc_RNA (1)...(19): siRNA sense strand
ccaaagacaucuccaggau

SEQ ID NO: 754673 - RNA, 19 nt, Homo sapiens
  misc_RNA (1)...(19): siRNA sense strand
gagagaugguggauuacaa

SEQ ID NO: 754674 - RNA, 19 nt, Homo sapiens
  misc_RNA (1)...(19): siRNA sense strand
aaagggaccucgcgguaaa

SEQ ID NO: 754675 - RNA, 19 nt, Homo sapiens
  misc_RNA (1)...(19): siRNA sense strand
gaugguggauuacaaugga

SEQ ID NO: 754676 - RNA, 19 nt, Homo sapiens
  misc_RNA (1)...(19): siRNA sense strand
ggauuacaauggaaacauc

SEQ ID NO: 754677 - RNA, 19 nt, Homo sapiens
  misc_RNA (1)...(19): siRNA sense strand
caagggagaaccagggaaa

SEQ ID NO: 754678 - RNA, 19 nt, Homo sapiens
  misc_RNA (1)...(19): siRNA sense strand
ggaagcaggacuagaugga

SEQ ID NO: 754679 - RNA, 19 nt, Homo sapiens
  misc_RNA (1)...(19): siRNA sense strand
caaggcugcuggaacaagu

SEQ ID NO: 754680 - RNA, 19 nt, Homo sapiens
  misc_RNA (1)...(19): siRNA sense strand
gggagaagcaggugucgau

SEQ ID NO: 754681 - RNA, 19 nt, Homo sapiens
  misc_RNA (1)...(19): siRNA sense strand
ggagaacagggaccagaug

SEQ ID NO: 754682 - RNA, 19 nt, Homo sapiens
  misc_RNA (1)...(19): siRNA sense strand
acaauggaaacaucaauga

SEQ ID NO: 754683 - RNA, 19 nt, Homo sapiens
  misc_RNA (1)...(19): siRNA sense strand
gaaaggagagaugguggau

SEQ ID NO: 754684 - RNA, 19 nt, Homo sapiens
  misc_RNA (1)...(19): siRNA sense strand
cuagagguuucccuggauu

SEQ ID NO: 754685 - RNA, 19 nt, Homo sapiens
  misc_RNA (1)...(19): siRNA sense strand
gcaaauggagacggcuauu

SEQ ID NO: 754686 - RNA, 19 nt, Homo sapiens
  misc_RNA (1)...(19): siRNA sense strand
gaaaggcuuccagggagaa

SEQ ID NO: 754687 - RNA, 19 nt, Homo sapiens
  misc_RNA (1)...(19): siRNA sense strand
gcagcugggcuuccugguu

SEQ ID NO: 754688 - RNA, 19 nt, Homo sapiens
  misc_RNA (1)...(19): siRNA sense strand
ggagagaugguggauuaca

SEQ ID NO: 754689 - RNA, 19 nt, Homo sapiens
  misc_RNA (1)...(19): siRNA sense strand
gaugcuggcaacuccauug

SEQ ID NO: 754690 - RNA, 19 nt, Homo sapiens
  misc_RNA (1)...(19): siRNA sense strand
gcguggagcagcuggagaa

SEQ ID NO: 754691 - RNA, 19 nt, Homo sapiens
  misc_RNA (1)...(19): siRNA sense strand
uggagcagcuggagaacag

SEQ ID NO: 754692 - RNA, 19 nt, Homo sapiens
  misc_RNA (1)...(19): siRNA sense strand
ggauuuccgggucccauug

SEQ ID NO: 754693 - RNA, 19 nt, Homo sapiens
  misc_RNA (1)...(19): siRNA sense strand
gagaugguggauuacaaug

SEQ ID NO: 754694 - RNA, 19 nt, Homo sapiens
  misc_RNA (1)...(19): siRNA sense strand
uagcggagcgcacccacaa

SEQ ID NO: 754695 - RNA, 19 nt, Homo sapiens
  misc_RNA (1)...(19): siRNA sense strand
gggagaaccagggaaagga

SEQ ID NO: 754696 - RNA, 19 nt, Homo sapiens
  misc_RNA (1)...(19): siRNA sense strand
gagccaggccagcauccaa

SEQ ID NO: 754697 - RNA, 19 nt, Homo sapiens
  misc_RNA (1)...(19): siRNA sense strand
gguacuccaggaccaauug

SEQ ID NO: 754698 - RNA, 19 nt, Homo sapiens
  misc_RNA (1)...(19): siRNA sense strand
aaaggagacccugggauga

SEQ ID NO: 754699 - RNA, 19 nt, Homo sapiens
  misc_RNA (1)...(19): siRNA sense strand
gagccagggaucccaggaa

SEQ ID NO: 754700 - RNA, 19 nt, Homo sapiens
  misc_RNA (1)...(19): siRNA sense strand
gaaccagggaaaggagaga

SEQ ID NO: 754701 - RNA, 19 nt, Homo sapiens
  misc_RNA (1)...(19): siRNA sense strand
gauuacaauggaaacauca

SEQ ID NO: 754702 - RNA, 19 nt, Homo sapiens
  misc_RNA (1)...(19): siRNA sense strand
ggucaaccaggaacuagag

SEQ ID NO: 754703 - RNA, 19 nt, Homo sapiens
  misc_RNA (1)...(19): siRNA sense strand
aaggagagaugguggauua

SEQ ID NO: 754704 - RNA, 19 nt, Homo sapiens
  misc_RNA (1)...(19): siRNA sense strand
cagcugggcuuccugguuu

SEQ ID NO: 754705 - RNA, 19 nt, Homo sapiens
  misc_RNA (1)...(19): siRNA sense strand
ccaaagacaucuccaggau

SEQ ID NO: 754706 - RNA, 19 nt, Homo sapiens
  misc_RNA (1)...(19): siRNA sense strand
gagagaugguggauuacaa

SEQ ID NO: 754707 - RNA, 19 nt, Homo sapiens
  misc_RNA (1)...(19): siRNA sense strand
aaagggaccucgcgguaaa

SEQ ID NO: 754708 - RNA, 19 nt, Homo sapiens
  misc_RNA (1)...(19): siRNA sense strand
gaugguggauuacaaugga

SEQ ID NO: 754709 - RNA, 19 nt, Homo sapiens
  misc_RNA (1)...(19): siRNA sense strand
ggauuacaauggaaacauc

SEQ ID NO: 754710 - RNA, 19 nt, Homo sapiens
  misc_RNA (1)...(19): siRNA sense strand
caagggagaaccagggaaa

SEQ ID NO: 754711 - RNA, 19 nt, Homo sapiens
  misc_RNA (1)...(19): siRNA sense strand
ggaagcaggacuagaugga

SEQ ID NO: 754712 - RNA, 19 nt, Homo sapiens
  misc_RNA (1)...(19): siRNA sense strand
caaggcugcuggaacaagu

SEQ ID NO: 754713 - RNA, 19 nt, Homo sapiens
  misc_RNA (1)...(19): siRNA sense strand
gggagaagcaggugucgau

SEQ ID NO: 754714 - RNA, 19 nt, Homo sapiens
  misc_RNA (1)...(19): siRNA sense strand
ggagaacagggaccagaug

SEQ ID NO: 754715 - RNA, 19 nt, Homo sapiens
  misc_RNA (1)...(19): siRNA sense strand
acaauggaaacaucaauga

SEQ ID NO: 754716 - RNA, 19 nt, Homo sapiens
  misc_RNA (1)...(19): siRNA sense strand
gaaaggagagaugguggau

SEQ ID NO: 754717 - RNA, 19 nt, Homo sapiens
  misc_RNA (1)...(19): siRNA sense strand
cuagagguuucccuggauu

SEQ ID NO: 754718 - RNA, 19 nt, Homo sapiens
  misc_RNA (1)...(19): siRNA sense strand
gcaaauggagacggcuauu

SEQ ID NO: 754719 - RNA, 19 nt, Homo sapiens
  misc_RNA (1)...(19): siRNA sense strand
gaaaggcuuccagggagaa

SEQ ID NO: 754720 - RNA, 19 nt, Homo sapiens
  misc_RNA (1)...(19): siRNA sense strand
gcagcugggcuuccugguu

SEQ ID NO: 754721 - RNA, 19 nt, Homo sapiens
  misc_RNA (1)...(19): siRNA sense strand
ggagagaugguggauuaca

SEQ ID NO: 754722 - RNA, 19 nt, Homo sapiens
  misc_RNA (1)...(19): siRNA sense strand
gaugcuggcaacuccauug

SEQ ID NO: 754723 - RNA, 19 nt, Homo sapiens
  misc_RNA (1)...(19): siRNA sense strand
gcguggagcagcuggagaa

SEQ ID NO: 754724 - RNA, 19 nt, Homo sapiens
  misc_RNA (1)...(19): siRNA sense strand
uggagcagcuggagaacag

SEQ ID NO: 754725 - RNA, 19 nt, Homo sapiens
  misc_RNA (1)...(19): siRNA sense strand
ggauuuccgggucccauug

SEQ ID NO: 754726 - RNA, 19 nt, Homo sapiens
  misc_RNA (1)...(19): siRNA sense strand
gagaugguggauuacaaug

SEQ ID NO: 754727 - RNA, 19 nt, Homo sapiens
  misc_RNA (1)...(19): siRNA sense strand
uagcggagcgcacccacaa

SEQ ID NO: 754728 - RNA, 19 nt, Homo sapiens
  misc_RNA (1)...(19): siRNA sense strand
gggagaaccagggaaagga

SEQ ID NO: 754729 - RNA, 19 nt, Homo sapiens
  misc_RNA (1)...(19): siRNA sense strand
gagccaggccagcauccaa

SEQ ID NO: 754730 - RNA, 19 nt, Homo sapiens
  misc_RNA (1)...(19): siRNA sense strand
gguacuccaggaccaauug

SEQ ID NO: 754731 - RNA, 19 nt, Homo sapiens
  misc_RNA (1)...(19): siRNA sense strand
aaaggagacccugggauga

SEQ ID NO: 754732 - RNA, 19 nt, Homo sapiens
  misc_RNA (1)...(19): siRNA sense strand
gagccagggaucccaggaa

SEQ ID NO: 754733 - RNA, 19 nt, Homo sapiens
  misc_RNA (1)...(19): siRNA sense strand
gaaccagggaaaggagaga

SEQ ID NO: 754734 - RNA, 19 nt, Homo sapiens
  misc_RNA (1)...(19): siRNA sense strand
gauuacaauggaaacauca

SEQ ID NO: 754735 - RNA, 19 nt, Homo sapiens
  misc_RNA (1)...(19): siRNA sense strand
ggucaaccaggaacuagag

SEQ ID NO: 754736 - RNA, 19 nt, Homo sapiens
  misc_RNA (1)...(19): siRNA sense strand
aaggagagaugguggauua

SEQ ID NO: 754737 - RNA, 19 nt, Homo sapiens
  misc_RNA (1)...(19): siRNA sense strand
cagcugggcuuccugguuu

SEQ ID NO: 754738 - RNA, 19 nt, Homo sapiens
  misc_RNA (1)...(19): siRNA sense strand
ccaaagacaucuccaggau

SEQ ID NO: 754739 - RNA, 19 nt, Homo sapiens
  misc_RNA (1)...(19): siRNA sense strand
gagagaugguggauuacaa

SEQ ID NO: 754740 - RNA, 19 nt, Homo sapiens
  misc_RNA (1)...(19): siRNA sense strand
aaagggaccucgcgguaaa

SEQ ID NO: 754741 - RNA, 19 nt, Homo sapiens
  misc_RNA (1)...(19): siRNA sense strand
gaugguggauuacaaugga

SEQ ID NO: 754742 - RNA, 19 nt, Homo sapiens
  misc_RNA (1)...(19): siRNA sense strand
ggauuacaauggaaacauc

SEQ ID NO: 754743 - RNA, 19 nt, Homo sapiens
  misc_RNA (1)...(19): siRNA sense strand
caagggagaaccagggaaa

SEQ ID NO: 754744 - RNA, 19 nt, Homo sapiens
  misc_RNA (1)...(19): siRNA sense strand
ggaagcaggacuagaugga

SEQ ID NO: 754745 - RNA, 19 nt, Homo sapiens
  misc_RNA (1)...(19): siRNA sense strand
caaggcugcuggaacaagu

SEQ ID NO: 754746 - RNA, 19 nt, Homo sapiens
  misc_RNA (1)...(19): siRNA sense strand
gggagaagcaggugucgau

SEQ ID NO: 754747 - RNA, 19 nt, Homo sapiens
  misc_RNA (1)...(19): siRNA sense strand
ggagaacagggaccagaug

SEQ ID NO: 754748 - RNA, 19 nt, Homo sapiens
  misc_RNA (1)...(19): siRNA sense strand
acaauggaaacaucaauga

SEQ ID NO: 754749 - RNA, 19 nt, Homo sapiens
  misc_RNA (1)...(19): siRNA sense strand
gaaaggagagaugguggau

SEQ ID NO: 754750 - RNA, 19 nt, Homo sapiens
  misc_RNA (1)...(19): siRNA sense strand
cuagagguuucccuggauu

SEQ ID NO: 754751 - RNA, 19 nt, Homo sapiens
  misc_RNA (1)...(19): siRNA sense strand
gcaaauggagacggcuauu

SEQ ID NO: 754752 - RNA, 19 nt, Homo sapiens
  misc_RNA (1)...(19): siRNA sense strand
gaaaggcuuccagggagaa

SEQ ID NO: 754753 - RNA, 19 nt, Homo sapiens
  misc_RNA (1)...(19): siRNA sense strand
gcagcugggcuuccugguu

SEQ ID NO: 754754 - RNA, 19 nt, Homo sapiens
  misc_RNA (1)...(19): siRNA sense strand
ggagagaugguggauuaca

SEQ ID NO: 754755 - RNA, 19 nt, Homo sapiens
  misc_RNA (1)...(19): siRNA sense strand
gaugcuggcaacuccauug

SEQ ID NO: 754756 - RNA, 19 nt, Homo sapiens
  misc_RNA (1)...(19): siRNA sense strand
gcguggagcagcuggagaa

SEQ ID NO: 754757 - RNA, 19 nt, Homo sapiens
  misc_RNA (1)...(19): siRNA sense strand
uggagcagcuggagaacag

SEQ ID NO: 754758 - RNA, 19 nt, Homo sapiens
  misc_RNA (1)...(19): siRNA sense strand
ggauuuccgggucccauug

SEQ ID NO: 754759 - RNA, 19 nt, Homo sapiens
  misc_RNA (1)...(19): siRNA sense strand
gagaugguggauuacaaug

SEQ ID NO: 754760 - RNA, 19 nt, Homo sapiens
  misc_RNA (1)...(19): siRNA sense strand
uagcggagcgcacccacaa

SEQ ID NO: 754761 - RNA, 19 nt, Homo sapiens
  misc_RNA (1)...(19): siRNA sense strand
gggagaaccagggaaagga

SEQ ID NO: 754762 - RNA, 19 nt, Homo sapiens
  misc_RNA (1)...(19): siRNA sense strand
gagccaggccagcauccaa

SEQ ID NO: 754763 - RNA, 19 nt, Homo sapiens
  misc_RNA (1)...(19): siRNA sense strand
gguacuccaggaccaauug

SEQ ID NO: 754764 - RNA, 19 nt, Homo sapiens
  misc_RNA (1)...(19): siRNA sense strand
aaaggagacccugggauga

SEQ ID NO: 754765 - RNA, 19 nt, Homo sapiens
  misc_RNA (1)...(19): siRNA sense strand
gagccagggaucccaggaa

SEQ ID NO: 754766 - RNA, 19 nt, Homo sapiens
  misc_RNA (1)...(19): siRNA sense strand
gaaccagggaaaggagaga

SEQ ID NO: 754767 - RNA, 19 nt, Homo sapiens
  misc_RNA (1)...(19): siRNA sense strand
gauuacaauggaaacauca

SEQ ID NO: 754768 - RNA, 19 nt, Homo sapiens
  misc_RNA (1)...(19): siRNA sense strand
ggucaaccaggaacuagag

SEQ ID NO: 754769 - RNA, 19 nt, Homo sapiens
  misc_RNA (1)...(19): siRNA sense strand
aaggagagaugguggauua

SEQ ID NO: 754770 - RNA, 19 nt, Homo sapiens
  misc_RNA (1)...(19): siRNA sense strand
cagcugggcuuccugguuu

SEQ ID NO: 754771 - RNA, 19 nt, Homo sapiens
  misc_RNA (1)...(19): siRNA sense strand
ccaaagacaucuccaggau

SEQ ID NO: 754772 - RNA, 19 nt, Homo sapiens
  misc_RNA (1)...(19): siRNA sense strand
gagagaugguggauuacaa

SEQ ID NO: 754773 - RNA, 19 nt, Homo sapiens
  misc_RNA (1)...(19): siRNA sense strand
aaagggaccucgcgguaaa

SEQ ID NO: 754774 - RNA, 19 nt, Homo sapiens
  misc_RNA (1)...(19): siRNA sense strand
gaugguggauuacaaugga

SEQ ID NO: 754775 - RNA, 19 nt, Homo sapiens
  misc_RNA (1)...(19): siRNA sense strand
ggauuacaauggaaacauc

SEQ ID NO: 754776 - RNA, 19 nt, Homo sapiens
  misc_RNA (1)...(19): siRNA sense strand
caagggagaaccagggaaa

SEQ ID NO: 754777 - RNA, 19 nt, Homo sapiens
  misc_RNA (1)...(19): siRNA sense strand
ggaagcaggacuagaugga

SEQ ID NO: 754778 - RNA, 19 nt, Homo sapiens
  misc_RNA (1)...(19): siRNA sense strand
caaggcugcuggaacaagu

SEQ ID NO: 754779 - RNA, 19 nt, Homo sapiens
  misc_RNA (1)...(19): siRNA sense strand
gggagaagcaggugucgau

SEQ ID NO: 754780 - RNA, 19 nt, Homo sapiens
  misc_RNA (1)...(19): siRNA sense strand
ggagaacagggaccagaug

SEQ ID NO: 754781 - RNA, 19 nt, Homo sapiens
  misc_RNA (1)...(19): siRNA sense strand
acaauggaaacaucaauga

SEQ ID NO: 754782 - RNA, 19 nt, Homo sapiens
  misc_RNA (1)...(19): siRNA sense strand
gaaaggagagaugguggau

SEQ ID NO: 754783 - RNA, 19 nt, Homo sapiens
  misc_RNA (1)...(19): siRNA sense strand
cuagagguuucccuggauu

SEQ ID NO: 754784 - RNA, 19 nt, Homo sapiens
  misc_RNA (1)...(19): siRNA sense strand
gcaaauggagacggcuauu

SEQ ID NO: 754785 - RNA, 19 nt, Homo sapiens
  misc_RNA (1)...(19): siRNA sense strand
gaaaggcuuccagggagaa

SEQ ID NO: 754786 - RNA, 19 nt, Homo sapiens
  misc_RNA (1)...(19): siRNA sense strand
gcagcugggcuuccugguu

SEQ ID NO: 754787 - RNA, 19 nt, Homo sapiens
  misc_RNA (1)...(19): siRNA sense strand
ggagagaugguggauuaca

SEQ ID NO: 754788 - RNA, 19 nt, Homo sapiens
  misc_RNA (1)...(19): siRNA sense strand
gaugcuggcaacuccauug

SEQ ID NO: 754789 - RNA, 19 nt, Homo sapiens
  misc_RNA (1)...(19): siRNA sense strand
gcguggagcagcuggagaa

SEQ ID NO: 754790 - RNA, 19 nt, Homo sapiens
  misc_RNA (1)...(19): siRNA sense strand
uggagcagcuggagaacag

SEQ ID NO: 754791 - RNA, 19 nt, Homo sapiens
  misc_RNA (1)...(19): siRNA sense strand
ggauuuccgggucccauug

SEQ ID NO: 754792 - RNA, 19 nt, Homo sapiens
  misc_RNA (1)...(19): siRNA sense strand
gagaugguggauuacaaug

SEQ ID NO: 754793 - RNA, 19 nt, Homo sapiens
  misc_RNA (1)...(19): siRNA sense strand
uagcggagcgcacccacaa

SEQ ID NO: 754794 - RNA, 19 nt, Homo sapiens
  misc_RNA (1)...(19): siRNA sense strand
gggagaaccagggaaagga

SEQ ID NO: 754795 - RNA, 19 nt, Homo sapiens
  misc_RNA (1)...(19): siRNA sense strand
gagccaggccagcauccaa

SEQ ID NO: 754796 - RNA, 19 nt, Homo sapiens
  misc_RNA (1)...(19): siRNA sense strand
gguacuccaggaccaauug

SEQ ID NO: 754797 - RNA, 19 nt, Homo sapiens
  misc_RNA (1)...(19): siRNA sense strand
aaaggagacccugggauga

SEQ ID NO: 754798 - RNA, 19 nt, Homo sapiens
  misc_RNA (1)...(19): siRNA sense strand
gagccagggaucccaggaa

SEQ ID NO: 754799 - RNA, 19 nt, Homo sapiens
  misc_RNA (1)...(19): siRNA sense strand
gaaccagggaaaggagaga

SEQ ID NO: 754800 - RNA, 19 nt, Homo sapiens
  misc_RNA (1)...(19): siRNA sense strand
gauuacaauggaaacauca

SEQ ID NO: 754801 - RNA, 19 nt, Homo sapiens
  misc_RNA (1)...(19): siRNA sense strand
ggucaaccaggaacuagag

SEQ ID NO: 754802 - RNA, 19 nt, Homo sapiens
  misc_RNA (1)...(19): siRNA sense strand
aaggagagaugguggauua

SEQ ID NO: 754803 - RNA, 19 nt, Homo sapiens
  misc_RNA (1)...(19): siRNA sense strand
cagcugggcuuccugguuu

SEQ ID NO: 754804 - RNA, 19 nt, Homo sapiens
  misc_RNA (1)...(19): siRNA sense strand
ccaaagacaucuccaggau

SEQ ID NO: 754805 - RNA, 19 nt, Homo sapiens
  misc_RNA (1)...(19): siRNA sense strand
gagagaugguggauuacaa

SEQ ID NO: 754806 - RNA, 19 nt, Homo sapiens
  misc_RNA (1)...(19): siRNA sense strand
aaagggaccucgcgguaaa

SEQ ID NO: 754807 - RNA, 19 nt, Homo sapiens
  misc_RNA (1)...(19): siRNA sense strand
gaugguggauuacaaugga

SEQ ID NO: 754808 - RNA, 19 nt, Homo sapiens
  misc_RNA (1)...(19): siRNA sense strand
ggauuacaauggaaacauc

SEQ ID NO: 754809 - RNA, 19 nt, Homo sapiens
  misc_RNA (1)...(19): siRNA sense strand
caagggagaaccagggaaa

SEQ ID NO: 754810 - RNA, 19 nt, Homo sapiens
  misc_RNA (1)...(19): siRNA sense strand
ggaagcaggacuagaugga

SEQ ID NO: 754811 - RNA, 19 nt, Homo sapiens
  misc_RNA (1)...(19): siRNA sense strand
caaggcugcuggaacaagu

SEQ ID NO: 754812 - RNA, 19 nt, Homo sapiens
  misc_RNA (1)...(19): siRNA sense strand
gggagaagcaggugucgau

SEQ ID NO: 754813 - RNA, 19 nt, Homo sapiens
  misc_RNA (1)...(19): siRNA sense strand
ggagaacagggaccagaug

SEQ ID NO: 754814 - RNA, 19 nt, Homo sapiens
  misc_RNA (1)...(19): siRNA sense strand
acaauggaaacaucaauga

SEQ ID NO: 754815 - RNA, 19 nt, Homo sapiens
  misc_RNA (1)...(19): siRNA sense strand
gaaaggagagaugguggau

SEQ ID NO: 754816 - RNA, 19 nt, Homo sapiens
  misc_RNA (1)...(19): siRNA sense strand
cuagagguuucccuggauu

SEQ ID NO: 754817 - RNA, 19 nt, Homo sapiens
  misc_RNA (1)...(19): siRNA sense strand
gcaaauggagacggcuauu

SEQ ID NO: 754818 - RNA, 19 nt, Homo sapiens
  misc_RNA (1)...(19): siRNA sense strand
gaaaggcuuccagggagaa

SEQ ID NO: 754819 - RNA, 19 nt, Homo sapiens
  misc_RNA (1)...(19): siRNA sense strand
gcagcugggcuuccugguu

SEQ ID NO: 754820 - RNA, 19 nt, Homo sapiens
  misc_RNA (1)...(19): siRNA sense strand
ggagagaugguggauuaca

SEQ ID NO: 754821 - RNA, 19 nt, Homo sapiens
  misc_RNA (1)...(19): siRNA sense strand
gaugcuggcaacuccauug

SEQ ID NO: 754822 - RNA, 19 nt, Homo sapiens
  misc_RNA (1)...(19): siRNA sense strand
gcguggagcagcuggagaa

SEQ ID NO: 754823 - RNA, 19 nt, Homo sapiens
  misc_RNA (1)...(19): siRNA sense strand
uggagcagcuggagaacag

SEQ ID NO: 754824 - RNA, 19 nt, Homo sapiens
  misc_RNA (1)...(19): siRNA sense strand
ggauuuccgggucccauug

SEQ ID NO: 754825 - RNA, 19 nt, Homo sapiens
  misc_RNA (1)...(19): siRNA sense strand
gagaugguggauuacaaug

SEQ ID NO: 754826 - RNA, 19 nt, Homo sapiens
  misc_RNA (1)...(19): siRNA sense strand
uagcggagcgcacccacaa

SEQ ID NO: 754827 - RNA, 19 nt, Homo sapiens
  misc_RNA (1)...(19): siRNA sense strand
gggagaaccagggaaagga

SEQ ID NO: 754828 - RNA, 19 nt, Homo sapiens
  misc_RNA (1)...(19): siRNA sense strand
gagccaggccagcauccaa

SEQ ID NO: 754829 - RNA, 19 nt, Homo sapiens
  misc_RNA (1)...(19): siRNA sense strand
gguacuccaggaccaauug

SEQ ID NO: 754830 - RNA, 19 nt, Homo sapiens
  misc_RNA (1)...(19): siRNA sense strand
aaaggagacccugggauga

SEQ ID NO: 754831 - RNA, 19 nt, Homo sapiens
  misc_RNA (1)...(19): siRNA sense strand
gagccagggaucccaggaa

SEQ ID NO: 754832 - RNA, 19 nt, Homo sapiens
  misc_RNA (1)...(19): siRNA sense strand
gaaccagggaaaggagaga

SEQ ID NO: 754833 - RNA, 19 nt, Homo sapiens
  misc_RNA (1)...(19): siRNA sense strand
gauuacaauggaaacauca

SEQ ID NO: 754834 - RNA, 19 nt, Homo sapiens
  misc_RNA (1)...(19): siRNA sense strand
ggucaaccaggaacuagag

SEQ ID NO: 754835 - RNA, 19 nt, Homo sapiens
  misc_RNA (1)...(19): siRNA sense strand
aaggagagaugguggauua

SEQ ID NO: 754836 - RNA, 19 nt, Homo sapiens
  misc_RNA (1)...(19): siRNA sense strand
cagcugggcuuccugguuu

SEQ ID NO: 754837 - RNA, 19 nt, Homo sapiens
  misc_RNA (1)...(19): siRNA sense strand
ccaaagacaucuccaggau

SEQ ID NO: 754838 - RNA, 19 nt, Homo sapiens
  misc_RNA (1)...(19): siRNA sense strand
gagagaugguggauuacaa

SEQ ID NO: 754839 - RNA, 19 nt, Homo sapiens
  misc_RNA (1)...(19): siRNA sense strand
aaagggaccucgcgguaaa

SEQ ID NO: 754840 - RNA, 19 nt, Homo sapiens
  misc_RNA (1)...(19): siRNA sense strand
gaugguggauuacaaugga

SEQ ID NO: 754841 - RNA, 19 nt, Homo sapiens
  misc_RNA (1)...(19): siRNA sense strand
ggauuacaauggaaacauc

SEQ ID NO: 754842 - RNA, 19 nt, Homo sapiens
  misc_RNA (1)...(19): siRNA sense strand
caagggagaaccagggaaa

SEQ ID NO: 754843 - RNA, 19 nt, Homo sapiens
  misc_RNA (1)...(19): siRNA sense strand
ggaagcaggacuagaugga

SEQ ID NO: 754844 - RNA, 19 nt, Homo sapiens
  misc_RNA (1)...(19): siRNA sense strand
caaggcugcuggaacaagu

SEQ ID NO: 754845 - RNA, 19 nt, Homo sapiens
  misc_RNA (1)...(19): siRNA sense strand
gggagaagcaggugucgau

SEQ ID NO: 754846 - RNA, 19 nt, Homo sapiens
  misc_RNA (1)...(19): siRNA sense strand
ggagaacagggaccagaug

SEQ ID NO: 754847 - RNA, 19 nt, Homo sapiens
  misc_RNA (1)...(19): siRNA sense strand
acaauggaaacaucaauga

SEQ ID NO: 754848 - RNA, 19 nt, Homo sapiens
  misc_RNA (1)...(19): siRNA sense strand
gaaaggagagaugguggau

SEQ ID NO: 754849 - RNA, 19 nt, Homo sapiens
  misc_RNA (1)...(19): siRNA sense strand
cuagagguuucccuggauu

SEQ ID NO: 754850 - RNA, 19 nt, Homo sapiens
  misc_RNA (1)...(19): siRNA sense strand
gcaaauggagacggcuauu

SEQ ID NO: 754851 - RNA, 19 nt, Homo sapiens
  misc_RNA (1)...(19): siRNA sense strand
gaaaggcuuccagggagaa

SEQ ID NO: 754852 - RNA, 19 nt, Homo sapiens
  misc_RNA (1)...(19): siRNA sense strand
gcagcugggcuuccugguu

SEQ ID NO: 754853 - RNA, 19 nt, Homo sapiens
  misc_RNA (1)...(19): siRNA sense strand
ggagagaugguggauuaca

SEQ ID NO: 754854 - RNA, 19 nt, Homo sapiens
  misc_RNA (1)...(19): siRNA sense strand
gaugcuggcaacuccauug

SEQ ID NO: 754855 - RNA, 19 nt, Homo sapiens
  misc_RNA (1)...(19): siRNA sense strand
gcguggagcagcuggagaa

SEQ ID NO: 754856 - RNA, 19 nt, Homo sapiens
  misc_RNA (1)...(19): siRNA sense strand
uggagcagcuggagaacag

SEQ ID NO: 754857 - RNA, 19 nt, Homo sapiens
  misc_RNA (1)...(19): siRNA sense strand
ggauuuccgggucccauug

SEQ ID NO: 754858 - RNA, 19 nt, Homo sapiens
  misc_RNA (1)...(19): siRNA sense strand
gagaugguggauuacaaug

SEQ ID NO: 754859 - RNA, 19 nt, Homo sapiens
  misc_RNA (1)...(19): siRNA sense strand
uagcggagcgcacccacaa

SEQ ID NO: 754860 - RNA, 19 nt, Homo sapiens
  misc_RNA (1)...(19): siRNA sense strand
gggagaaccagggaaagga

SEQ ID NO: 754861 - RNA, 19 nt, Homo sapiens
  misc_RNA (1)...(19): siRNA sense strand
gagccaggccagcauccaa

SEQ ID NO: 754862 - RNA, 19 nt, Homo sapiens
  misc_RNA (1)...(19): siRNA sense strand
gguacuccaggaccaauug

SEQ ID NO: 754863 - RNA, 19 nt, Homo sapiens
  misc_RNA (1)...(19): siRNA sense strand
aaaggagacccugggauga

SEQ ID NO: 754864 - RNA, 19 nt, Homo sapiens
  misc_RNA (1)...(19): siRNA sense strand
gagccagggaucccaggaa

SEQ ID NO: 754865 - RNA, 19 nt, Homo sapiens
  misc_RNA (1)...(19): siRNA sense strand
gaaccagggaaaggagaga

SEQ ID NO: 754866 - RNA, 19 nt, Homo sapiens
  misc_RNA (1)...(19): siRNA sense strand
gauuacaauggaaacauca

SEQ ID NO: 754867 - RNA, 19 nt, Homo sapiens
  misc_RNA (1)...(19): siRNA sense strand
ggucaaccaggaacuagag

SEQ ID NO: 754868 - RNA, 19 nt, Homo sapiens
  misc_RNA (1)...(19): siRNA sense strand
aaggagagaugguggauua

SEQ ID NO: 754869 - RNA, 19 nt, Homo sapiens
  misc_RNA (1)...(19): siRNA sense strand
cagcugggcuuccugguuu

SEQ ID NO: 754870 - RNA, 19 nt, Homo sapiens
  misc_RNA (1)...(19): siRNA sense strand
ccaaagacaucuccaggau

SEQ ID NO: 754871 - RNA, 19 nt, Homo sapiens
  misc_RNA (1)...(19): siRNA sense strand
gagagaugguggauuacaa

SEQ ID NO: 754872 - RNA, 19 nt, Homo sapiens
  misc_RNA (1)...(19): siRNA sense strand
aaagggaccucgcgguaaa

SEQ ID NO: 754873 - RNA, 19 nt, Homo sapiens
  misc_RNA (1)...(19): siRNA sense strand
gaugguggauuacaaugga

SEQ ID NO: 754874 - RNA, 19 nt, Homo sapiens
  misc_RNA (1)...(19): siRNA sense strand
ggauuacaauggaaacauc

SEQ ID NO: 754875 - RNA, 19 nt, Homo sapiens
  misc_RNA (1)...(19): siRNA sense strand
caagggagaaccagggaaa

SEQ ID NO: 754876 - RNA, 19 nt, Homo sapiens
  misc_RNA (1)...(19): siRNA sense strand
ggaagcaggacuagaugga

SEQ ID NO: 754877 - RNA, 19 nt, Homo sapiens
  misc_RNA (1)...(19): siRNA sense strand
caaggcugcuggaacaagu

SEQ ID NO: 754878 - RNA, 19 nt, Homo sapiens
  misc_RNA (1)...(19): siRNA sense strand
gggagaagcaggugucgau

SEQ ID NO: 754879 - RNA, 19 nt, Homo sapiens
  misc_RNA (1)...(19): siRNA sense strand
ggagaacagggaccagaug

SEQ ID NO: 754880 - RNA, 19 nt, Homo sapiens
  misc_RNA (1)...(19): siRNA sense strand
acaauggaaacaucaauga

SEQ ID NO: 754881 - RNA, 19 nt, Homo sapiens
  misc_RNA (1)...(19): siRNA sense strand
gaaaggagagaugguggau

SEQ ID NO: 754882 - RNA, 19 nt, Homo sapiens
  misc_RNA (1)...(19): siRNA sense strand
cuagagguuucccuggauu

SEQ ID NO: 754883 - RNA, 19 nt, Homo sapiens
  misc_RNA (1)...(19): siRNA sense strand
gcaaauggagacggcuauu

SEQ ID NO: 754884 - RNA, 19 nt, Homo sapiens
  misc_RNA (1)...(19): siRNA sense strand
gaaaggcuuccagggagaa

SEQ ID NO: 754885 - RNA, 19 nt, Homo sapiens
  misc_RNA (1)...(19): siRNA sense strand
gcagcugggcuuccugguu

SEQ ID NO: 754886 - RNA, 19 nt, Homo sapiens
  misc_RNA (1)...(19): siRNA sense strand
ggagagaugguggauuaca

SEQ ID NO: 754887 - RNA, 19 nt, Homo sapiens
  misc_RNA (1)...(19): siRNA sense strand
gaugcuggcaacuccauug

SEQ ID NO: 754888 - RNA, 19 nt, Homo sapiens
  misc_RNA (1)...(19): siRNA sense strand
gcguggagcagcuggagaa

SEQ ID NO: 754889 - RNA, 19 nt, Homo sapiens
  misc_RNA (1)...(19): siRNA sense strand
uggagcagcuggagaacag

SEQ ID NO: 754890 - RNA, 19 nt, Homo sapiens
  misc_RNA (1)...(19): siRNA sense strand
ggauuuccgggucccauug

SEQ ID NO: 754891 - RNA, 19 nt, Homo sapiens
  misc_RNA (1)...(19): siRNA sense strand
gagaugguggauuacaaug

SEQ ID NO: 754892 - RNA, 19 nt, Homo sapiens
  misc_RNA (1)...(19): siRNA sense strand
uagcggagcgcacccacaa

SEQ ID NO: 754893 - RNA, 19 nt, Homo sapiens
  misc_RNA (1)...(19): siRNA sense strand
gggagaaccagggaaagga

SEQ ID NO: 754894 - RNA, 19 nt, Homo sapiens
  misc_RNA (1)...(19): siRNA sense strand
gagccaggccagcauccaa

SEQ ID NO: 754895 - RNA, 19 nt, Homo sapiens
  misc_RNA (1)...(19): siRNA sense strand
gguacuccaggaccaauug

SEQ ID NO: 754896 - RNA, 19 nt, Homo sapiens
  misc_RNA (1)...(19): siRNA sense strand
aaaggagacccugggauga

SEQ ID NO: 754897 - RNA, 19 nt, Homo sapiens
  misc_RNA (1)...(19): siRNA sense strand
gagccagggaucccaggaa

SEQ ID NO: 754898 - RNA, 19 nt, Homo sapiens
  misc_RNA (1)...(19): siRNA sense strand
gaaccagggaaaggagaga

SEQ ID NO: 754899 - RNA, 19 nt, Homo sapiens
  misc_RNA (1)...(19): siRNA sense strand
gauuacaauggaaacauca

SEQ ID NO: 754900 - RNA, 19 nt, Homo sapiens
  misc_RNA (1)...(19): siRNA sense strand
ggucaaccaggaacuagag

SEQ ID NO: 754901 - RNA, 19 nt, Homo sapiens
  misc_RNA (1)...(19): siRNA sense strand
aaggagagaugguggauua

SEQ ID NO: 754902 - RNA, 19 nt, Homo sapiens
  misc_RNA (1)...(19): siRNA sense strand
cagcugggcuuccugguuu

SEQ ID NO: 754903 - RNA, 19 nt, Homo sapiens
  misc_RNA (1)...(19): siRNA sense strand
ccaaagacaucuccaggau

SEQ ID NO: 754904 - RNA, 19 nt, Homo sapiens
  misc_RNA (1)...(19): siRNA sense strand
gagagaugguggauuacaa

SEQ ID NO: 754905 - RNA, 19 nt, Homo sapiens
  misc_RNA (1)...(19): siRNA sense strand
aaagggaccucgcgguaaa

SEQ ID NO: 754906 - RNA, 19 nt, Homo sapiens
  misc_RNA (1)...(19): siRNA sense strand
gaugguggauuacaaugga

SEQ ID NO: 754907 - RNA, 19 nt, Homo sapiens
  misc_RNA (1)...(19): siRNA sense strand
ggauuacaauggaaacauc

SEQ ID NO: 754908 - RNA, 19 nt, Homo sapiens
  misc_RNA (1)...(19): siRNA sense strand
caagggagaaccagggaaa

SEQ ID NO: 754909 - RNA, 19 nt, Homo sapiens
  misc_RNA (1)...(19): siRNA sense strand
ggaagcaggacuagaugga

SEQ ID NO: 754910 - RNA, 19 nt, Homo sapiens
  misc_RNA (1)...(19): siRNA sense strand
caaggcugcuggaacaagu

SEQ ID NO: 754911 - RNA, 19 nt, Homo sapiens
  misc_RNA (1)...(19): siRNA sense strand
gggagaagcaggugucgau

SEQ ID NO: 754912 - RNA, 19 nt, Homo sapiens
  misc_RNA (1)...(19): siRNA sense strand
ggagaacagggaccagaug

SEQ ID NO: 754913 - RNA, 19 nt, Homo sapiens
  misc_RNA (1)...(19): siRNA sense strand
acaauggaaacaucaauga

SEQ ID NO: 754914 - RNA, 19 nt, Homo sapiens
  misc_RNA (1)...(19): siRNA sense strand
gaaaggagagaugguggau

SEQ ID NO: 754915 - RNA, 19 nt, Homo sapiens
  misc_RNA (1)...(19): siRNA sense strand
cuagagguuucccuggauu

SEQ ID NO: 754916 - RNA, 19 nt, Homo sapiens
  misc_RNA (1)...(19): siRNA sense strand
gcaaauggagacggcuauu

SEQ ID NO: 754917 - RNA, 19 nt, Homo sapiens
  misc_RNA (1)...(19): siRNA sense strand
gaaaggcuuccagggagaa

SEQ ID NO: 754918 - RNA, 19 nt, Homo sapiens
  misc_RNA (1)...(19): siRNA sense strand
gcagcugggcuuccugguu

SEQ ID NO: 754919 - RNA, 19 nt, Homo sapiens
  misc_RNA (1)...(19): siRNA sense strand
ggagagaugguggauuaca

SEQ ID NO: 754920 - RNA, 19 nt, Homo sapiens
  misc_RNA (1)...(19): siRNA sense strand
gaugcuggcaacuccauug

SEQ ID NO: 754921 - RNA, 19 nt, Homo sapiens
  misc_RNA (1)...(19): siRNA sense strand
gcguggagcagcuggagaa

SEQ ID NO: 754922 - RNA, 19 nt, Homo sapiens
  misc_RNA (1)...(19): siRNA sense strand
uggagcagcuggagaacag

SEQ ID NO: 754923 - RNA, 19 nt, Homo sapiens
  misc_RNA (1)...(19): siRNA sense strand
ggauuuccgggucccauug

SEQ ID NO: 754924 - RNA, 19 nt, Homo sapiens
  misc_RNA (1)...(19): siRNA sense strand
gagaugguggauuacaaug

SEQ ID NO: 754925 - RNA, 19 nt, Homo sapiens
  misc_RNA (1)...(19): siRNA sense strand
uagcggagcgcacccacaa

SEQ ID NO: 754926 - RNA, 19 nt, Homo sapiens
  misc_RNA (1)...(19): siRNA sense strand
gggagaaccagggaaagga

SEQ ID NO: 754927 - RNA, 19 nt, Homo sapiens
  misc_RNA (1)...(19): siRNA sense strand
gagccaggccagcauccaa

SEQ ID NO: 754928 - RNA, 19 nt, Homo sapiens
  misc_RNA (1)...(19): siRNA sense strand
gguacuccaggaccaauug

SEQ ID NO: 754929 - RNA, 19 nt, Homo sapiens
  misc_RNA (1)...(19): siRNA sense strand
aaaggagacccugggauga

SEQ ID NO: 754930 - RNA, 19 nt, Homo sapiens
  misc_RNA (1)...(19): siRNA sense strand
gagccagggaucccaggaa

SEQ ID NO: 754931 - RNA, 19 nt, Homo sapiens
  misc_RNA (1)...(19): siRNA sense strand
gaaccagggaaaggagaga

SEQ ID NO: 754932 - RNA, 19 nt, Homo sapiens
  misc_RNA (1)...(19): siRNA sense strand
gauuacaauggaaacauca

SEQ ID NO: 754933 - RNA, 19 nt, Homo sapiens
  misc_RNA (1)...(19): siRNA sense strand
ggucaaccaggaacuagag

SEQ ID NO: 754934 - RNA, 19 nt, Homo sapiens
  misc_RNA (1)...(19): siRNA sense strand
aaggagagaugguggauua

SEQ ID NO: 754935 - RNA, 19 nt, Homo sapiens
  misc_RNA (1)...(19): siRNA sense strand
cagcugggcuuccugguuu

SEQ ID NO: 754936 - RNA, 19 nt, Homo sapiens
  misc_RNA (1)...(19): siRNA sense strand
ccaaagacaucuccaggau

SEQ ID NO: 754937 - RNA, 19 nt, Homo sapiens
  misc_RNA (1)...(19): siRNA sense strand
gagagaugguggauuacaa

SEQ ID NO: 754938 - RNA, 19 nt, Homo sapiens
  misc_RNA (1)...(19): siRNA sense strand
aaagggaccucgcgguaaa

SEQ ID NO: 754939 - RNA, 19 nt, Homo sapiens
  misc_RNA (1)...(19): siRNA sense strand
gaugguggauuacaaugga

SEQ ID NO: 754940 - RNA, 19 nt, Homo sapiens
  misc_RNA (1)...(19): siRNA sense strand
ggauuacaauggaaacauc

SEQ ID NO: 754941 - RNA, 19 nt, Homo sapiens
  misc_RNA (1)...(19): siRNA sense strand
caagggagaaccagggaaa

SEQ ID NO: 754942 - RNA, 19 nt, Homo sapiens
  misc_RNA (1)...(19): siRNA sense strand
ggaagcaggacuagaugga

SEQ ID NO: 754943 - RNA, 19 nt, Homo sapiens
  misc_RNA (1)...(19): siRNA sense strand
caaggcugcuggaacaagu

SEQ ID NO: 754944 - RNA, 19 nt, Homo sapiens
  misc_RNA (1)...(19): siRNA sense strand
gggagaagcaggugucgau

SEQ ID NO: 754945 - RNA, 19 nt, Homo sapiens
  misc_RNA (1)...(19): siRNA sense strand
ggagaacagggaccagaug

SEQ ID NO: 754946 - RNA, 19 nt, Homo sapiens
  misc_RNA (1)...(19): siRNA sense strand
acaauggaaacaucaauga

SEQ ID NO: 754947 - RNA, 19 nt, Homo sapiens
  misc_RNA (1)...(19): siRNA sense strand
gaaaggagagaugguggau

SEQ ID NO: 754948 - RNA, 19 nt, Homo sapiens
  misc_RNA (1)...(19): siRNA sense strand
cuagagguuucccuggauu

SEQ ID NO: 754949 - RNA, 19 nt, Homo sapiens
  misc_RNA (1)...(19): siRNA sense strand
gcaaauggagacggcuauu

SEQ ID NO: 754950 - RNA, 19 nt, Homo sapiens
  misc_RNA (1)...(19): siRNA sense strand
gaaaggcuuccagggagaa

SEQ ID NO: 754951 - RNA, 19 nt, Homo sapiens
  misc_RNA (1)...(19): siRNA sense strand
gcagcugggcuuccugguu

SEQ ID NO: 754952 - RNA, 19 nt, Homo sapiens
  misc_RNA (1)...(19): siRNA sense strand
ggagagaugguggauuaca

SEQ ID NO: 754953 - RNA, 19 nt, Homo sapiens
  misc_RNA (1)...(19): siRNA sense strand
gaugcuggcaacuccauug

SEQ ID NO: 754954 - RNA, 19 nt, Homo sapiens
  misc_RNA (1)...(19): siRNA sense strand
gcguggagcagcuggagaa

SEQ ID NO: 754955 - RNA, 19 nt, Homo sapiens
  misc_RNA (1)...(19): siRNA sense strand
uggagcagcuggagaacag

SEQ ID NO: 754956 - RNA, 19 nt, Homo sapiens
  misc_RNA (1)...(19): siRNA sense strand
ggauuuccgggucccauug

SEQ ID NO: 754957 - RNA, 19 nt, Homo sapiens
  misc_RNA (1)...(19): siRNA sense strand
gagaugguggauuacaaug

SEQ ID NO: 754958 - RNA, 19 nt, Homo sapiens
  misc_RNA (1)...(19): siRNA sense strand
uagcggagcgcacccacaa

SEQ ID NO: 754959 - RNA, 19 nt, Homo sapiens
  misc_RNA (1)...(19): siRNA sense strand
gggagaaccagggaaagga

SEQ ID NO: 754960 - RNA, 19 nt, Homo sapiens
  misc_RNA (1)...(19): siRNA sense strand
gagccaggccagcauccaa

SEQ ID NO: 754961 - RNA, 19 nt, Homo sapiens
  misc_RNA (1)...(19): siRNA sense strand
gguacuccaggaccaauug

SEQ ID NO: 754962 - RNA, 19 nt, Homo sapiens
  misc_RNA (1)...(19): siRNA sense strand
aaaggagacccugggauga

SEQ ID NO: 754963 - RNA, 19 nt, Homo sapiens
  misc_RNA (1)...(19): siRNA sense strand
gagccagggaucccaggaa

SEQ ID NO: 754964 - RNA, 19 nt, Homo sapiens
  misc_RNA (1)...(19): siRNA sense strand
gaaccagggaaaggagaga

SEQ ID NO: 754965 - RNA, 19 nt, Homo sapiens
  misc_RNA (1)...(19): siRNA sense strand
gauuacaauggaaacauca

SEQ ID NO: 754966 - RNA, 19 nt, Homo sapiens
  misc_RNA (1)...(19): siRNA sense strand
ggucaaccaggaacuagag

SEQ ID NO: 754967 - RNA, 19 nt, Homo sapiens
  misc_RNA (1)...(19): siRNA sense strand
aaggagagaugguggauua

SEQ ID NO: 754968 - RNA, 19 nt, Homo sapiens
  misc_RNA (1)...(19): siRNA sense strand
cagcugggcuuccugguuu

SEQ ID NO: 754969 - RNA, 19 nt, Homo sapiens
  misc_RNA (1)...(19): siRNA sense strand
ccaaagacaucuccaggau

SEQ ID NO: 754970 - RNA, 19 nt, Homo sapiens
  misc_RNA (1)...(19): siRNA sense strand
gagagaugguggauuacaa

SEQ ID NO: 754971 - RNA, 19 nt, Homo sapiens
  misc_RNA (1)...(19): siRNA sense strand
aaagggaccucgcgguaaa

SEQ ID NO: 754972 - RNA, 19 nt, Homo sapiens
  misc_RNA (1)...(19): siRNA sense strand
gaugguggauuacaaugga

SEQ ID NO: 754973 - RNA, 19 nt, Homo sapiens
  misc_RNA (1)...(19): siRNA sense strand
ggauuacaauggaaacauc

SEQ ID NO: 754974 - RNA, 19 nt, Homo sapiens
  misc_RNA (1)...(19): siRNA sense strand
caagggagaaccagggaaa

SEQ ID NO: 754975 - RNA, 19 nt, Homo sapiens
  misc_RNA (1)...(19): siRNA sense strand
ggaagcaggacuagaugga

SEQ ID NO: 754976 - RNA, 19 nt, Homo sapiens
  misc_RNA (1)...(19): siRNA sense strand
caaggcugcuggaacaagu

SEQ ID NO: 754977 - RNA, 19 nt, Homo sapiens
  misc_RNA (1)...(19): siRNA sense strand
gggagaagcaggugucgau

SEQ ID NO: 754978 - RNA, 19 nt, Homo sapiens
  misc_RNA (1)...(19): siRNA sense strand
ggagaacagggaccagaug

SEQ ID NO: 754979 - RNA, 19 nt, Homo sapiens
  misc_RNA (1)...(19): siRNA sense strand
acaauggaaacaucaauga

SEQ ID NO: 754980 - RNA, 19 nt, Homo sapiens
  misc_RNA (1)...(19): siRNA sense strand
gaaaggagagaugguggau

SEQ ID NO: 754981 - RNA, 19 nt, Homo sapiens
  misc_RNA (1)...(19): siRNA sense strand
cuagagguuucccuggauu

SEQ ID NO: 754982 - RNA, 19 nt, Homo sapiens
  misc_RNA (1)...(19): siRNA sense strand
gcaaauggagacggcuauu

SEQ ID NO: 754983 - RNA, 19 nt, Homo sapiens
  misc_RNA (1)...(19): siRNA sense strand
gaaaggcuuccagggagaa

SEQ ID NO: 754984 - RNA, 19 nt, Homo sapiens
  misc_RNA (1)...(19): siRNA sense strand
gcagcugggcuuccugguu

SEQ ID NO: 754985 - RNA, 19 nt, Homo sapiens
  misc_RNA (1)...(19): siRNA sense strand
ggagagaugguggauuaca

SEQ ID NO: 754986 - RNA, 19 nt, Homo sapiens
  misc_RNA (1)...(19): siRNA sense strand
gaugcuggcaacuccauug

SEQ ID NO: 754987 - RNA, 19 nt, Homo sapiens
  misc_RNA (1)...(19): siRNA sense strand
gcguggagcagcuggagaa

SEQ ID NO: 754988 - RNA, 19 nt, Homo sapiens
  misc_RNA (1)...(19): siRNA sense strand
uggagcagcuggagaacag

SEQ ID NO: 754989 - RNA, 19 nt, Homo sapiens
  misc_RNA (1)...(19): siRNA sense strand
ggauuuccgggucccauug

SEQ ID NO: 754990 - RNA, 19 nt, Homo sapiens
  misc_RNA (1)...(19): siRNA sense strand
gagaugguggauuacaaug

SEQ ID NO: 754991 - RNA, 19 nt, Homo sapiens
  misc_RNA (1)...(19): siRNA sense strand
uagcggagcgcacccacaa

SEQ ID NO: 754992 - RNA, 19 nt, Homo sapiens
  misc_RNA (1)...(19): siRNA sense strand
gggagaaccagggaaagga

SEQ ID NO: 754993 - RNA, 19 nt, Homo sapiens
  misc_RNA (1)...(19): siRNA sense strand
gagccaggccagcauccaa

SEQ ID NO: 754994 - RNA, 19 nt, Homo sapiens
  misc_RNA (1)...(19): siRNA sense strand
gguacuccaggaccaauug

SEQ ID NO: 754995 - RNA, 19 nt, Homo sapiens
  misc_RNA (1)...(19): siRNA sense strand
aaaggagacccugggauga

SEQ ID NO: 754996 - RNA, 19 nt, Homo sapiens
  misc_RNA (1)...(19): siRNA sense strand
gagccagggaucccaggaa

SEQ ID NO: 754997 - RNA, 19 nt, Homo sapiens
  misc_RNA (1)...(19): siRNA sense strand
gaaccagggaaaggagaga

SEQ ID NO: 754998 - RNA, 19 nt, Homo sapiens
  misc_RNA (1)...(19): siRNA sense strand
gauuacaauggaaacauca

SEQ ID NO: 754999 - RNA, 19 nt, Homo sapiens
  misc_RNA (1)...(19): siRNA sense strand
ggucaaccaggaacuagag

SEQ ID NO: 755000 - RNA, 19 nt, Homo sapiens
  misc_RNA (1)...(19): siRNA sense strand
aaggagagaugguggauua

SEQ ID NO: 755001 - RNA, 19 nt, Homo sapiens
  misc_RNA (1)...(19): siRNA sense strand
cagcugggcuuccugguuu

SEQ ID NO: 755002 - RNA, 19 nt, Homo sapiens
  misc_RNA (1)...(19): siRNA sense strand
ccaaagacaucuccaggau

SEQ ID NO: 755003 - RNA, 19 nt, Homo sapiens
  misc_RNA (1)...(19): siRNA sense strand
gagagaugguggauuacaa

SEQ ID NO: 755004 - RNA, 19 nt, Homo sapiens
  misc_RNA (1)...(19): siRNA sense strand
aaagggaccucgcgguaaa

SEQ ID NO: 755005 - RNA, 19 nt, Homo sapiens
  misc_RNA (1)...(19): siRNA sense strand
gaugguggauuacaaugga

SEQ ID NO: 755006 - RNA, 19 nt, Homo sapiens
  misc_RNA (1)...(19): siRNA sense strand
ggauuacaauggaaacauc

SEQ ID NO: 755007 - RNA, 19 nt, Homo sapiens
  misc_RNA (1)...(19): siRNA sense strand
caagggagaaccagggaaa

SEQ ID NO: 755008 - RNA, 19 nt, Homo sapiens
  misc_RNA (1)...(19): siRNA sense strand
ggaagcaggacuagaugga

SEQ ID NO: 755009 - RNA, 19 nt, Homo sapiens
  misc_RNA (1)...(19): siRNA sense strand
caaggcugcuggaacaagu

SEQ ID NO: 755010 - RNA, 19 nt, Homo sapiens
  misc_RNA (1)...(19): siRNA sense strand
gggagaagcaggugucgau

SEQ ID NO: 755011 - RNA, 19 nt, Homo sapiens
  misc_RNA (1)...(19): siRNA sense strand
ggagaacagggaccagaug

SEQ ID NO: 755012 - RNA, 19 nt, Homo sapiens
  misc_RNA (1)...(19): siRNA sense strand
acaauggaaacaucaauga

SEQ ID NO: 755013 - RNA, 19 nt, Homo sapiens
  misc_RNA (1)...(19): siRNA sense strand
gaaaggagagaugguggau

SEQ ID NO: 755014 - RNA, 19 nt, Homo sapiens
  misc_RNA (1)...(19): siRNA sense strand
cuagagguuucccuggauu

SEQ ID NO: 755015 - RNA, 19 nt, Homo sapiens
  misc_RNA (1)...(19): siRNA sense strand
gcaaauggagacggcuauu

SEQ ID NO: 755016 - RNA, 19 nt, Homo sapiens
  misc_RNA (1)...(19): siRNA sense strand
gaaaggcuuccagggagaa

SEQ ID NO: 755017 - RNA, 19 nt, Homo sapiens
  misc_RNA (1)...(19): siRNA sense strand
gcagcugggcuuccugguu

SEQ ID NO: 755018 - RNA, 19 nt, Homo sapiens
  misc_RNA (1)...(19): siRNA sense strand
ggagagaugguggauuaca

SEQ ID NO: 755019 - RNA, 19 nt, Homo sapiens
  misc_RNA (1)...(19): siRNA sense strand
gaugcuggcaacuccauug

SEQ ID NO: 755020 - RNA, 19 nt, Homo sapiens
  misc_RNA (1)...(19): siRNA sense strand
gcguggagcagcuggagaa

SEQ ID NO: 755021 - RNA, 19 nt, Homo sapiens
  misc_RNA (1)...(19): siRNA sense strand
uggagcagcuggagaacag

SEQ ID NO: 755022 - RNA, 19 nt, Homo sapiens
  misc_RNA (1)...(19): siRNA sense strand
ggauuuccgggucccauug

SEQ ID NO: 755023 - RNA, 19 nt, Homo sapiens
  misc_RNA (1)...(19): siRNA sense strand
gagaugguggauuacaaug

SEQ ID NO: 755024 - RNA, 19 nt, Homo sapiens
  misc_RNA (1)...(19): siRNA sense strand
uagcggagcgcacccacaa

SEQ ID NO: 755025 - RNA, 19 nt, Homo sapiens
  misc_RNA (1)...(19): siRNA sense strand
gggagaaccagggaaagga

SEQ ID NO: 755026 - RNA, 19 nt, Homo sapiens
  misc_RNA (1)...(19): siRNA sense strand
gagccaggccagcauccaa

SEQ ID NO: 755027 - RNA, 19 nt, Homo sapiens
  misc_RNA (1)...(19): siRNA sense strand
gguacuccaggaccaauug

SEQ ID NO: 755028 - RNA, 19 nt, Homo sapiens
  misc_RNA (1)...(19): siRNA sense strand
aaaggagacccugggauga

SEQ ID NO: 755029 - RNA, 19 nt, Homo sapiens
  misc_RNA (1)...(19): siRNA sense strand
gagccagggaucccaggaa

SEQ ID NO: 755030 - RNA, 19 nt, Homo sapiens
  misc_RNA (1)...(19): siRNA sense strand
gaaccagggaaaggagaga

SEQ ID NO: 755031 - RNA, 19 nt, Homo sapiens
  misc_RNA (1)...(19): siRNA sense strand
gauuacaauggaaacauca

SEQ ID NO: 755032 - RNA, 19 nt, Homo sapiens
  misc_RNA (1)...(19): siRNA sense strand
ggucaaccaggaacuagag

SEQ ID NO: 755033 - RNA, 19 nt, Homo sapiens
  misc_RNA (1)...(19): siRNA sense strand
aaggagagaugguggauua

SEQ ID NO: 755034 - RNA, 19 nt, Homo sapiens
  misc_RNA (1)...(19): siRNA sense strand
cagcugggcuuccugguuu

SEQ ID NO: 755035 - RNA, 19 nt, Homo sapiens
  misc_RNA (1)...(19): siRNA sense strand
ccaaagacaucuccaggau

SEQ ID NO: 755036 - RNA, 19 nt, Homo sapiens
  misc_RNA (1)...(19): siRNA sense strand
gagagaugguggauuacaa

SEQ ID NO: 755037 - RNA, 19 nt, Homo sapiens
  misc_RNA (1)...(19): siRNA sense strand
aaagggaccucgcgguaaa

SEQ ID NO: 755038 - RNA, 19 nt, Homo sapiens
  misc_RNA (1)...(19): siRNA sense strand
gaugguggauuacaaugga

SEQ ID NO: 755039 - RNA, 19 nt, Homo sapiens
  misc_RNA (1)...(19): siRNA sense strand
ggauuacaauggaaacauc

SEQ ID NO: 755040 - RNA, 19 nt, Homo sapiens
  misc_RNA (1)...(19): siRNA sense strand
caagggagaaccagggaaa

SEQ ID NO: 755041 - RNA, 19 nt, Homo sapiens
  misc_RNA (1)...(19): siRNA sense strand
ggaagcaggacuagaugga

SEQ ID NO: 755042 - RNA, 19 nt, Homo sapiens
  misc_RNA (1)...(19): siRNA sense strand
caaggcugcuggaacaagu

SEQ ID NO: 755043 - RNA, 19 nt, Homo sapiens
  misc_RNA (1)...(19): siRNA sense strand
gggagaagcaggugucgau

SEQ ID NO: 755044 - RNA, 19 nt, Homo sapiens
  misc_RNA (1)...(19): siRNA sense strand
ggagaacagggaccagaug

SEQ ID NO: 755045 - RNA, 19 nt, Homo sapiens
  misc_RNA (1)...(19): siRNA sense strand
acaauggaaacaucaauga

SEQ ID NO: 755046 - RNA, 19 nt, Homo sapiens
  misc_RNA (1)...(19): siRNA sense strand
gaaaggagagaugguggau

SEQ ID NO: 755047 - RNA, 19 nt, Homo sapiens
  misc_RNA (1)...(19): siRNA sense strand
cuagagguuucccuggauu

SEQ ID NO: 755048 - RNA, 19 nt, Homo sapiens
  misc_RNA (1)...(19): siRNA sense strand
gcaaauggagacggcuauu

SEQ ID NO: 755049 - RNA, 19 nt, Homo sapiens
  misc_RNA (1)...(19): siRNA sense strand
gaaaggcuuccagggagaa

SEQ ID NO: 755050 - RNA, 19 nt, Homo sapiens
  misc_RNA (1)...(19): siRNA sense strand
gcagcugggcuuccugguu

SEQ ID NO: 755051 - RNA, 19 nt, Homo sapiens
  misc_RNA (1)...(19): siRNA sense strand
ggagagaugguggauuaca

SEQ ID NO: 755052 - RNA, 19 nt, Homo sapiens
  misc_RNA (1)...(19): siRNA sense strand
gaugcuggcaacuccauug

SEQ ID NO: 755053 - RNA, 19 nt, Homo sapiens
  misc_RNA (1)...(19): siRNA sense strand
gcguggagcagcuggagaa

SEQ ID NO: 755054 - RNA, 19 nt, Homo sapiens
  misc_RNA (1)...(19): siRNA sense strand
uggagcagcuggagaacag

SEQ ID NO: 755055 - RNA, 19 nt, Homo sapiens
  misc_RNA (1)...(19): siRNA sense strand
ggauuuccgggucccauug

SEQ ID NO: 755056 - RNA, 19 nt, Homo sapiens
  misc_RNA (1)...(19): siRNA sense strand
gagaugguggauuacaaug

SEQ ID NO: 755057 - RNA, 19 nt, Homo sapiens
  misc_RNA (1)...(19): siRNA sense strand
uagcggagcgcacccacaa

SEQ ID NO: 755058 - RNA, 19 nt, Homo sapiens
  misc_RNA (1)...(19): siRNA sense strand
gggagaaccagggaaagga

SEQ ID NO: 755059 - RNA, 19 nt, Homo sapiens
  misc_RNA (1)...(19): siRNA sense strand
gagccaggccagcauccaa

SEQ ID NO: 755060 - RNA, 19 nt, Homo sapiens
  misc_RNA (1)...(19): siRNA sense strand
gguacuccaggaccaauug

SEQ ID NO: 755061 - RNA, 19 nt, Homo sapiens
  misc_RNA (1)...(19): siRNA sense strand
aaaggagacccugggauga

SEQ ID NO: 755062 - RNA, 19 nt, Homo sapiens
  misc_RNA (1)...(19): siRNA sense strand
gagccagggaucccaggaa

SEQ ID NO: 755063 - RNA, 19 nt, Homo sapiens
  misc_RNA (1)...(19): siRNA sense strand
gaaccagggaaaggagaga

SEQ ID NO: 755064 - RNA, 19 nt, Homo sapiens
  misc_RNA (1)...(19): siRNA sense strand
gauuacaauggaaacauca

SEQ ID NO: 755065 - RNA, 19 nt, Homo sapiens
  misc_RNA (1)...(19): siRNA sense strand
ggucaaccaggaacuagag

SEQ ID NO: 755066 - RNA, 19 nt, Homo sapiens
  misc_RNA (1)...(19): siRNA sense strand
aaggagagaugguggauua

SEQ ID NO: 755067 - RNA, 19 nt, Homo sapiens
  misc_RNA (1)...(19): siRNA sense strand
cagcugggcuuccugguuu

SEQ ID NO: 755068 - RNA, 19 nt, Homo sapiens
  misc_RNA (1)...(19): siRNA sense strand
ccaaagacaucuccaggau

SEQ ID NO: 755069 - RNA, 19 nt, Homo sapiens
  misc_RNA (1)...(19): siRNA sense strand
gagagaugguggauuacaa

SEQ ID NO: 755070 - RNA, 19 nt, Homo sapiens
  misc_RNA (1)...(19): siRNA sense strand
aaagggaccucgcgguaaa

SEQ ID NO: 755071 - RNA, 19 nt, Homo sapiens
  misc_RNA (1)...(19): siRNA sense strand
gaugguggauuacaaugga

SEQ ID NO: 755072 - RNA, 19 nt, Homo sapiens
  misc_RNA (1)...(19): siRNA sense strand
ggauuacaauggaaacauc

SEQ ID NO: 755073 - RNA, 19 nt, Homo sapiens
  misc_RNA (1)...(19): siRNA sense strand
caagggagaaccagggaaa

SEQ ID NO: 755074 - RNA, 19 nt, Homo sapiens
  misc_RNA (1)...(19): siRNA sense strand
ggaagcaggacuagaugga

SEQ ID NO: 755075 - RNA, 19 nt, Homo sapiens
  misc_RNA (1)...(19): siRNA sense strand
caaggcugcuggaacaagu

SEQ ID NO: 755076 - RNA, 19 nt, Homo sapiens
  misc_RNA (1)...(19): siRNA sense strand
gggagaagcaggugucgau

SEQ ID NO: 755077 - RNA, 19 nt, Homo sapiens
  misc_RNA (1)...(19): siRNA sense strand
ggagaacagggaccagaug

SEQ ID NO: 755078 - RNA, 19 nt, Homo sapiens
  misc_RNA (1)...(19): siRNA sense strand
acaauggaaacaucaauga

SEQ ID NO: 755079 - RNA, 19 nt, Homo sapiens
  misc_RNA (1)...(19): siRNA sense strand
gaaaggagagaugguggau

SEQ ID NO: 755080 - RNA, 19 nt, Homo sapiens
  misc_RNA (1)...(19): siRNA sense strand
cuagagguuucccuggauu

SEQ ID NO: 755081 - RNA, 19 nt, Homo sapiens
  misc_RNA (1)...(19): siRNA sense strand
gcaaauggagacggcuauu

SEQ ID NO: 755082 - RNA, 19 nt, Homo sapiens
  misc_RNA (1)...(19): siRNA sense strand
gaaaggcuuccagggagaa

SEQ ID NO: 755083 - RNA, 19 nt, Homo sapiens
  misc_RNA (1)...(19): siRNA sense strand
gcagcugggcuuccugguu

SEQ ID NO: 755084 - RNA, 19 nt, Homo sapiens
  misc_RNA (1)...(19): siRNA sense strand
ggagagaugguggauuaca

SEQ ID NO: 755085 - RNA, 19 nt, Homo sapiens
  misc_RNA (1)...(19): siRNA sense strand
gaugcuggcaacuccauug

SEQ ID NO: 755086 - RNA, 19 nt, Homo sapiens
  misc_RNA (1)...(19): siRNA sense strand
gcguggagcagcuggagaa

SEQ ID NO: 755087 - RNA, 19 nt, Homo sapiens
  misc_RNA (1)...(19): siRNA sense strand
uggagcagcuggagaacag

SEQ ID NO: 755088 - RNA, 19 nt, Homo sapiens
  misc_RNA (1)...(19): siRNA sense strand
ggauuuccgggucccauug

SEQ ID NO: 755089 - RNA, 19 nt, Homo sapiens
  misc_RNA (1)...(19): siRNA sense strand
gagaugguggauuacaaug

SEQ ID NO: 755090 - RNA, 19 nt, Homo sapiens
  misc_RNA (1)...(19): siRNA sense strand
uagcggagcgcacccacaa

SEQ ID NO: 755091 - RNA, 19 nt, Homo sapiens
  misc_RNA (1)...(19): siRNA sense strand
gggagaaccagggaaagga

SEQ ID NO: 755092 - RNA, 19 nt, Homo sapiens
  misc_RNA (1)...(19): siRNA sense strand
gagccaggccagcauccaa

SEQ ID NO: 755093 - RNA, 19 nt, Homo sapiens
  misc_RNA (1)...(19): siRNA sense strand
gguacuccaggaccaauug

SEQ ID NO: 755094 - RNA, 19 nt, Homo sapiens
  misc_RNA (1)...(19): siRNA sense strand
aaaggagacccugggauga

SEQ ID NO: 755095 - RNA, 19 nt, Homo sapiens
  misc_RNA (1)...(19): siRNA sense strand
gagccagggaucccaggaa

SEQ ID NO: 755096 - RNA, 19 nt, Homo sapiens
  misc_RNA (1)...(19): siRNA sense strand
gaaccagggaaaggagaga

SEQ ID NO: 755097 - RNA, 19 nt, Homo sapiens
  misc_RNA (1)...(19): siRNA sense strand
gauuacaauggaaacauca

SEQ ID NO: 755098 - RNA, 19 nt, Homo sapiens
  misc_RNA (1)...(19): siRNA sense strand
ggucaaccaggaacuagag

SEQ ID NO: 755099 - RNA, 19 nt, Homo sapiens
  misc_RNA (1)...(19): siRNA sense strand
aaggagagaugguggauua

SEQ ID NO: 755100 - RNA, 19 nt, Homo sapiens
  misc_RNA (1)...(19): siRNA sense strand
cagcugggcuuccugguuu

SEQ ID NO: 755101 - RNA, 19 nt, Homo sapiens
  misc_RNA (1)...(19): siRNA sense strand
ccaaagacaucuccaggau

SEQ ID NO: 755102 - RNA, 19 nt, Homo sapiens
  misc_RNA (1)...(19): siRNA sense strand
gagagaugguggauuacaa

SEQ ID NO: 755103 - RNA, 19 nt, Homo sapiens
  misc_RNA (1)...(19): siRNA sense strand
aaagggaccucgcgguaaa

SEQ ID NO: 755104 - RNA, 19 nt, Homo sapiens
  misc_RNA (1)...(19): siRNA sense strand
gaugguggauuacaaugga

SEQ ID NO: 755105 - RNA, 19 nt, Homo sapiens
  misc_RNA (1)...(19): siRNA sense strand
ggauuacaauggaaacauc

SEQ ID NO: 755106 - RNA, 19 nt, Homo sapiens
  misc_RNA (1)...(19): siRNA sense strand
caagggagaaccagggaaa

SEQ ID NO: 755107 - RNA, 19 nt, Homo sapiens
  misc_RNA (1)...(19): siRNA sense strand
ggaagcaggacuagaugga

SEQ ID NO: 755108 - RNA, 19 nt, Homo sapiens
  misc_RNA (1)...(19): siRNA sense strand
caaggcugcuggaacaagu

SEQ ID NO: 755109 - RNA, 19 nt, Homo sapiens
  misc_RNA (1)...(19): siRNA sense strand
gggagaagcaggugucgau

SEQ ID NO: 755110 - RNA, 19 nt, Homo sapiens
  misc_RNA (1)...(19): siRNA sense strand
ggagaacagggaccagaug

SEQ ID NO: 755111 - RNA, 19 nt, Homo sapiens
  misc_RNA (1)...(19): siRNA sense strand
acaauggaaacaucaauga

SEQ ID NO: 755112 - RNA, 19 nt, Homo sapiens
  misc_RNA (1)...(19): siRNA sense strand
gaaaggagagaugguggau

SEQ ID NO: 755113 - RNA, 19 nt, Homo sapiens
  misc_RNA (1)...(19): siRNA sense strand
cuagagguuucccuggauu

SEQ ID NO: 755114 - RNA, 19 nt, Homo sapiens
  misc_RNA (1)...(19): siRNA sense strand
gcaaauggagacggcuauu

SEQ ID NO: 755115 - RNA, 19 nt, Homo sapiens
  misc_RNA (1)...(19): siRNA sense strand
gaaaggcuuccagggagaa

SEQ ID NO: 755116 - RNA, 19 nt, Homo sapiens
  misc_RNA (1)...(19): siRNA sense strand
gcagcugggcuuccugguu

SEQ ID NO: 755117 - RNA, 19 nt, Homo sapiens
  misc_RNA (1)...(19): siRNA sense strand
ggagagaugguggauuaca

SEQ ID NO: 755118 - RNA, 19 nt, Homo sapiens
  misc_RNA (1)...(19): siRNA sense strand
gaugcuggcaacuccauug

SEQ ID NO: 755119 - RNA, 19 nt, Homo sapiens
  misc_RNA (1)...(19): siRNA sense strand
gcguggagcagcuggagaa

SEQ ID NO: 755120 - RNA, 19 nt, Homo sapiens
  misc_RNA (1)...(19): siRNA sense strand
uggagcagcuggagaacag

SEQ ID NO: 755121 - RNA, 19 nt, Homo sapiens
  misc_RNA (1)...(19): siRNA sense strand
ggauuuccgggucccauug

SEQ ID NO: 755122 - RNA, 19 nt, Homo sapiens
  misc_RNA (1)...(19): siRNA sense strand
gagaugguggauuacaaug

SEQ ID NO: 755123 - RNA, 19 nt, Homo sapiens
  misc_RNA (1)...(19): siRNA sense strand
uagcggagcgcacccacaa

SEQ ID NO: 755124 - RNA, 19 nt, Homo sapiens
  misc_RNA (1)...(19): siRNA sense strand
gggagaaccagggaaagga

SEQ ID NO: 755125 - RNA, 19 nt, Homo sapiens
  misc_RNA (1)...(19): siRNA sense strand
gagccaggccagcauccaa

SEQ ID NO: 755126 - RNA, 19 nt, Homo sapiens
  misc_RNA (1)...(19): siRNA sense strand
gguacuccaggaccaauug

SEQ ID NO: 755127 - RNA, 19 nt, Homo sapiens
  misc_RNA (1)...(19): siRNA sense strand
aaaggagacccugggauga

SEQ ID NO: 755128 - RNA, 19 nt, Homo sapiens
  misc_RNA (1)...(19): siRNA sense strand
gagccagggaucccaggaa

SEQ ID NO: 755129 - RNA, 19 nt, Homo sapiens
  misc_RNA (1)...(19): siRNA sense strand
gaaccagggaaaggagaga

SEQ ID NO: 755130 - RNA, 19 nt, Homo sapiens
  misc_RNA (1)...(19): siRNA sense strand
gauuacaauggaaacauca

SEQ ID NO: 755131 - RNA, 19 nt, Homo sapiens
  misc_RNA (1)...(19): siRNA sense strand
ggucaaccaggaacuagag

SEQ ID NO: 755132 - RNA, 19 nt, Homo sapiens
  misc_RNA (1)...(19): siRNA sense strand
aaggagagaugguggauua

SEQ ID NO: 755133 - RNA, 19 nt, Homo sapiens
  misc_RNA (1)...(19): siRNA sense strand
cagcugggcuuccugguuu

SEQ ID NO: 755134 - RNA, 19 nt, Homo sapiens
  misc_RNA (1)...(19): siRNA sense strand
ccaaagacaucuccaggau

SEQ ID NO: 755135 - RNA, 19 nt, Homo sapiens
  misc_RNA (1)...(19): siRNA sense strand
gagagaugguggauuacaa

SEQ ID NO: 755136 - RNA, 19 nt, Homo sapiens
  misc_RNA (1)...(19): siRNA sense strand
aaagggaccucgcgguaaa

SEQ ID NO: 755137 - RNA, 19 nt, Homo sapiens
  misc_RNA (1)...(19): siRNA sense strand
gaugguggauuacaaugga

SEQ ID NO: 755138 - RNA, 19 nt, Homo sapiens
  misc_RNA (1)...(19): siRNA sense strand
ggauuacaauggaaacauc

SEQ ID NO: 755139 - RNA, 19 nt, Homo sapiens
  misc_RNA (1)...(19): siRNA sense strand
caagggagaaccagggaaa

SEQ ID NO: 755140 - RNA, 19 nt, Homo sapiens
  misc_RNA (1)...(19): siRNA sense strand
ggaagcaggacuagaugga

SEQ ID NO: 755141 - RNA, 19 nt, Homo sapiens
  misc_RNA (1)...(19): siRNA sense strand
caaggcugcuggaacaagu

SEQ ID NO: 755142 - RNA, 19 nt, Homo sapiens
  misc_RNA (1)...(19): siRNA sense strand
gggagaagcaggugucgau

SEQ ID NO: 755143 - RNA, 19 nt, Homo sapiens
  misc_RNA (1)...(19): siRNA sense strand
ggagaacagggaccagaug

SEQ ID NO: 755144 - RNA, 19 nt, Homo sapiens
  misc_RNA (1)...(19): siRNA sense strand
acaauggaaacaucaauga

SEQ ID NO: 755145 - RNA, 19 nt, Homo sapiens
  misc_RNA (1)...(19): siRNA sense strand
gaaaggagagaugguggau

SEQ ID NO: 755146 - RNA, 19 nt, Homo sapiens
  misc_RNA (1)...(19): siRNA sense strand
cuagagguuucccuggauu

SEQ ID NO: 755147 - RNA, 19 nt, Homo sapiens
  misc_RNA (1)...(19): siRNA sense strand
gcaaauggagacggcuauu

SEQ ID NO: 755148 - RNA, 19 nt, Homo sapiens
  misc_RNA (1)...(19): siRNA sense strand
gaaaggcuuccagggagaa

SEQ ID NO: 755149 - RNA, 19 nt, Homo sapiens
  misc_RNA (1)...(19): siRNA sense strand
gcagcugggcuuccugguu

SEQ ID NO: 755150 - RNA, 19 nt, Homo sapiens
  misc_RNA (1)...(19): siRNA sense strand
ggagagaugguggauuaca

SEQ ID NO: 755151 - RNA, 19 nt, Homo sapiens
  misc_RNA (1)...(19): siRNA sense strand
gaugcuggcaacuccauug

SEQ ID NO: 755152 - RNA, 19 nt, Homo sapiens
  misc_RNA (1)...(19): siRNA sense strand
gcguggagcagcuggagaa

SEQ ID NO: 755153 - RNA, 19 nt, Homo sapiens
  misc_RNA (1)...(19): siRNA sense strand
uggagcagcuggagaacag

SEQ ID NO: 755154 - RNA, 19 nt, Homo sapiens
  misc_RNA (1)...(19): siRNA sense strand
ggauuuccgggucccauug

SEQ ID NO: 755155 - RNA, 19 nt, Homo sapiens
  misc_RNA (1)...(19): siRNA sense strand
gagaugguggauuacaaug

SEQ ID NO: 755156 - RNA, 19 nt, Homo sapiens
  misc_RNA (1)...(19): siRNA sense strand
uagcggagcgcacccacaa

SEQ ID NO: 755157 - RNA, 19 nt, Homo sapiens
  misc_RNA (1)...(19): siRNA sense strand
gggagaaccagggaaagga

SEQ ID NO: 755158 - RNA, 19 nt, Homo sapiens
  misc_RNA (1)...(19): siRNA sense strand
gagccaggccagcauccaa

SEQ ID NO: 755159 - RNA, 19 nt, Homo sapiens
  misc_RNA (1)...(19): siRNA sense strand
gguacuccaggaccaauug

SEQ ID NO: 755160 - RNA, 19 nt, Homo sapiens
  misc_RNA (1)...(19): siRNA sense strand
aaaggagacccugggauga

SEQ ID NO: 755161 - RNA, 19 nt, Homo sapiens
  misc_RNA (1)...(19): siRNA sense strand
gagccagggaucccaggaa

SEQ ID NO: 755162 - RNA, 19 nt, Homo sapiens
  misc_RNA (1)...(19): siRNA sense strand
gaaccagggaaaggagaga

SEQ ID NO: 755163 - RNA, 19 nt, Homo sapiens
  misc_RNA (1)...(19): siRNA sense strand
gauuacaauggaaacauca

SEQ ID NO: 755164 - RNA, 19 nt, Homo sapiens
  misc_RNA (1)...(19): siRNA sense strand
ggucaaccaggaacuagag

SEQ ID NO: 755165 - RNA, 19 nt, Homo sapiens
  misc_RNA (1)...(19): siRNA sense strand
aaggagagaugguggauua

SEQ ID NO: 755166 - RNA, 19 nt, Homo sapiens
  misc_RNA (1)...(19): siRNA sense strand
cagcugggcuuccugguuu

SEQ ID NO: 755167 - RNA, 19 nt, Homo sapiens
  misc_RNA (1)...(19): siRNA sense strand
ccaaagacaucuccaggau

SEQ ID NO: 755168 - RNA, 19 nt, Homo sapiens
  misc_RNA (1)...(19): siRNA sense strand
gagagaugguggauuacaa

SEQ ID NO: 755169 - RNA, 19 nt, Homo sapiens
  misc_RNA (1)...(19): siRNA sense strand
aaagggaccucgcgguaaa

SEQ ID NO: 755170 - RNA, 19 nt, Homo sapiens
  misc_RNA (1)...(19): siRNA sense strand
gaugguggauuacaaugga

SEQ ID NO: 755171 - RNA, 19 nt, Homo sapiens
  misc_RNA (1)...(19): siRNA sense strand
ggauuacaauggaaacauc

SEQ ID NO: 755172 - RNA, 19 nt, Homo sapiens
  misc_RNA (1)...(19): siRNA sense strand
gggcgaagauggcuuacca

SEQ ID NO: 755173 - RNA, 19 nt, Homo sapiens
  misc_RNA (1)...(19): siRNA sense strand
caagggagaaccagggaaa

SEQ ID NO: 755174 - RNA, 19 nt, Homo sapiens
  misc_RNA (1)...(19): siRNA sense strand
ggaagcaggacuagaugga

SEQ ID NO: 755175 - RNA, 19 nt, Homo sapiens
  misc_RNA (1)...(19): siRNA sense strand
caaggcugcuggaacaagu

SEQ ID NO: 755176 - RNA, 19 nt, Homo sapiens
  misc_RNA (1)...(19): siRNA sense strand
gggagaagcaggugucgau

SEQ ID NO: 755177 - RNA, 19 nt, Homo sapiens
  misc_RNA (1)...(19): siRNA sense strand
ggagaacagggaccagaug

SEQ ID NO: 755178 - RNA, 19 nt, Homo sapiens
  misc_RNA (1)...(19): siRNA sense strand
acaauggaaacaucaauga

SEQ ID NO: 755179 - RNA, 19 nt, Homo sapiens
  misc_RNA (1)...(19): siRNA sense strand
gaaaggagagaugguggau

SEQ ID NO: 755180 - RNA, 19 nt, Homo sapiens
  misc_RNA (1)...(19): siRNA sense strand
cuagagguuucccuggauu

SEQ ID NO: 755181 - RNA, 19 nt, Homo sapiens
  misc_RNA (1)...(19): siRNA sense strand
gcaaauggagacggcuauu

SEQ ID NO: 755182 - RNA, 19 nt, Homo sapiens
  misc_RNA (1)...(19): siRNA sense strand
gaaaggcuuccagggagaa

SEQ ID NO: 755183 - RNA, 19 nt, Homo sapiens
  misc_RNA (1)...(19): siRNA sense strand
gcagcugggcuuccugguu

SEQ ID NO: 755184 - RNA, 19 nt, Homo sapiens
  misc_RNA (1)...(19): siRNA sense strand
ggagagaugguggauuaca

SEQ ID NO: 755185 - RNA, 19 nt, Homo sapiens
  misc_RNA (1)...(19): siRNA sense strand
gaugcuggcaacuccauug

SEQ ID NO: 755186 - RNA, 19 nt, Homo sapiens
  misc_RNA (1)...(19): siRNA sense strand
gcguggagcagcuggagaa

SEQ ID NO: 755187 - RNA, 19 nt, Homo sapiens
  misc_RNA (1)...(19): siRNA sense strand
uggagcagcuggagaacag

SEQ ID NO: 755188 - RNA, 19 nt, Homo sapiens
  misc_RNA (1)...(19): siRNA sense strand
ggauuuccgggucccauug

SEQ ID NO: 755189 - RNA, 19 nt, Homo sapiens
  misc_RNA (1)...(19): siRNA sense strand
gagaugguggauuacaaug

SEQ ID NO: 755190 - RNA, 19 nt, Homo sapiens
  misc_RNA (1)...(19): siRNA sense strand
uagcggagcgcacccacaa

SEQ ID NO: 755191 - RNA, 19 nt, Homo sapiens
  misc_RNA (1)...(19): siRNA sense strand
gggagaaccagggaaagga

SEQ ID NO: 755192 - RNA, 19 nt, Homo sapiens
  misc_RNA (1)...(19): siRNA sense strand
gagccaggccagcauccaa

SEQ ID NO: 755193 - RNA, 19 nt, Homo sapiens
  misc_RNA (1)...(19): siRNA sense strand
gguacuccaggaccaauug

SEQ ID NO: 755194 - RNA, 19 nt, Homo sapiens
  misc_RNA (1)...(19): siRNA sense strand
aaaggagacccugggauga

SEQ ID NO: 755195 - RNA, 19 nt, Homo sapiens
  misc_RNA (1)...(19): siRNA sense strand
gagccagggaucccaggaa

SEQ ID NO: 755196 - RNA, 19 nt, Homo sapiens
  misc_RNA (1)...(19): siRNA sense strand
gaaccagggaaaggagaga

SEQ ID NO: 755197 - RNA, 19 nt, Homo sapiens
  misc_RNA (1)...(19): siRNA sense strand
gauuacaauggaaacauca

SEQ ID NO: 755198 - RNA, 19 nt, Homo sapiens
  misc_RNA (1)...(19): siRNA sense strand
ggucaaccaggaacuagag

SEQ ID NO: 755199 - RNA, 19 nt, Homo sapiens
  misc_RNA (1)...(19): siRNA sense strand
gaacaucgaucgcaacauc

SEQ ID NO: 755200 - RNA, 19 nt, Homo sapiens
  misc_RNA (1)...(19): siRNA sense strand
ugagagaggaugauucuua

SEQ ID NO: 755201 - RNA, 19 nt, Homo sapiens
  misc_RNA (1)...(19): siRNA sense strand
cagcaagucugaaguugaa

SEQ ID NO: 755202 - RNA, 19 nt, Homo sapiens
  misc_RNA (1)...(19): siRNA sense strand
ggagguagcccguuacaug

SEQ ID NO: 755203 - RNA, 19 nt, Homo sapiens
  misc_RNA (1)...(19): siRNA sense strand
ggaagaagaagaagaggaa

SEQ ID NO: 755204 - RNA, 19 nt, Homo sapiens
  misc_RNA (1)...(19): siRNA sense strand
gcacucagccgaagccauu

SEQ ID NO: 755205 - RNA, 19 nt, Homo sapiens
  misc_RNA (1)...(19): siRNA sense strand
caucuucgcuggagacaga

SEQ ID NO: 755206 - RNA, 19 nt, Homo sapiens
  misc_RNA (1)...(19): siRNA sense strand
ggaggaagaggaagaagaa

SEQ ID NO: 755207 - RNA, 19 nt, Homo sapiens
  misc_RNA (1)...(19): siRNA sense strand
uaaaugcaguggacaaaca

SEQ ID NO: 755208 - RNA, 19 nt, Homo sapiens
  misc_RNA (1)...(19): siRNA sense strand
gaagugacccugacgaaag

SEQ ID NO: 755209 - RNA, 19 nt, Homo sapiens
  misc_RNA (1)...(19): siRNA sense strand
gggaggagcuaggguuuga

SEQ ID NO: 755210 - RNA, 19 nt, Homo sapiens
  misc_RNA (1)...(19): siRNA sense strand
ggaagaggaggaagaagaa

SEQ ID NO: 755211 - RNA, 19 nt, Homo sapiens
  misc_RNA (1)...(19): siRNA sense strand
ggaugaaucugagaaucuu

SEQ ID NO: 755212 - RNA, 19 nt, Homo sapiens
  misc_RNA (1)...(19): siRNA sense strand
uaacugaacaacuaaguga

SEQ ID NO: 755213 - RNA, 19 nt, Homo sapiens
  misc_RNA (1)...(19): siRNA sense strand
gcaccaagaccugcgauuu

SEQ ID NO: 755214 - RNA, 19 nt, Homo sapiens
  misc_RNA (1)...(19): siRNA sense strand
ugacaaggaugggcgauug

SEQ ID NO: 755215 - RNA, 19 nt, Homo sapiens
  misc_RNA (1)...(19): siRNA sense strand
gagagaggaugauucuuac

SEQ ID NO: 755216 - RNA, 19 nt, Homo sapiens
  misc_RNA (1)...(19): siRNA sense strand
ggaugauucuuaccucuuc

SEQ ID NO: 755217 - RNA, 19 nt, Homo sapiens
  misc_RNA (1)...(19): siRNA sense strand
ggagagguguacugcauag

SEQ ID NO: 755218 - RNA, 19 nt, Homo sapiens
  misc_RNA (1)...(19): siRNA sense strand
ggagacagagcgaggguuu

SEQ ID NO: 755219 - RNA, 19 nt, Homo sapiens
  misc_RNA (1)...(19): siRNA sense strand
ccaggaauuuaacaagauu

SEQ ID NO: 755220 - RNA, 19 nt, Homo sapiens
  misc_RNA (1)...(19): siRNA sense strand
ggcgauugcuccaggaauu

SEQ ID NO: 755221 - RNA, 19 nt, Homo sapiens
  misc_RNA (1)...(19): siRNA sense strand
gagguguacugcauagaug

SEQ ID NO: 755222 - RNA, 19 nt, Homo sapiens
  misc_RNA (1)...(19): siRNA sense strand
gcccugaggauuacaagua

SEQ ID NO: 755223 - RNA, 19 nt, Homo sapiens
  misc_RNA (1)...(19): siRNA sense strand
guccagaguuuggcuauga

SEQ ID NO: 755224 - RNA, 19 nt, Homo sapiens
  misc_RNA (1)...(19): siRNA sense strand
gaaaaucaccuccaucugu

SEQ ID NO: 755225 - RNA, 19 nt, Homo sapiens
  misc_RNA (1)...(19): siRNA sense strand
gagcuaggguuugacuaug

SEQ ID NO: 755226 - RNA, 19 nt, Homo sapiens
  misc_RNA (1)...(19): siRNA sense strand
gcaaggccaagaagaaaug

SEQ ID NO: 755227 - RNA, 19 nt, Homo sapiens
  misc_RNA (1)...(19): siRNA sense strand
gguggugggugaugacuuc

SEQ ID NO: 755228 - RNA, 19 nt, Homo sapiens
  misc_RNA (1)...(19): siRNA sense strand
ggagcuaggguuugacuau

SEQ ID NO: 755229 - RNA, 19 nt, Homo sapiens
  misc_RNA (1)...(19): siRNA sense strand
gggaaucagucagauagga

SEQ ID NO: 755230 - RNA, 19 nt, Homo sapiens
  misc_RNA (1)...(19): siRNA sense strand
ggaagaagaagaggaagau

SEQ ID NO: 755231 - RNA, 19 nt, Homo sapiens
  misc_RNA (1)...(19): siRNA sense strand
gagaagugacccugacgaa

SEQ ID NO: 755232 - RNA, 19 nt, Homo sapiens
  misc_RNA (1)...(19): siRNA sense strand
ggaggaagaggaggaagaa

SEQ ID NO: 755233 - RNA, 19 nt, Homo sapiens
  misc_RNA (1)...(19): siRNA sense strand
gaccucagaucuggccaaa

SEQ ID NO: 755234 - RNA, 19 nt, Homo sapiens
  misc_RNA (1)...(19): siRNA sense strand
gcaagaaccgggucguaca

SEQ ID NO: 755235 - RNA, 19 nt, Homo sapiens
  misc_RNA (1)...(19): siRNA sense strand
ugaaugggauggucuucug

SEQ ID NO: 755236 - RNA, 19 nt, Homo sapiens
  misc_RNA (1)...(19): siRNA sense strand
ggaggaagaagaagaagag

SEQ ID NO: 755237 - RNA, 19 nt, Homo sapiens
  misc_RNA (1)...(19): siRNA sense strand
gacagcaagucugaaguug

SEQ ID NO: 755238 - RNA, 19 nt, Homo sapiens
  misc_RNA (1)...(19): siRNA sense strand
cgacagcaagucugaaguu

SEQ ID NO: 755239 - RNA, 19 nt, Homo sapiens
  misc_RNA (1)...(19): siRNA sense strand
caacaucagccgcuucauc

SEQ ID NO: 755240 - RNA, 19 nt, Homo sapiens
  misc_RNA (1)...(19): siRNA sense strand
ggaccuucaucugcgagua

SEQ ID NO: 755241 - RNA, 19 nt, Homo sapiens
  misc_RNA (1)...(19): siRNA sense strand
gauugagccuccgcugauu

SEQ ID NO: 755242 - RNA, 19 nt, Homo sapiens
  misc_RNA (1)...(19): siRNA sense strand
cgugguggcugugucuaua

SEQ ID NO: 755243 - RNA, 19 nt, Homo sapiens
  misc_RNA (1)...(19): siRNA sense strand
auacagcauuuccgcauga

SEQ ID NO: 755244 - RNA, 19 nt, Homo sapiens
  misc_RNA (1)...(19): siRNA sense strand
caauguggcucugagaagu

SEQ ID NO: 755245 - RNA, 19 nt, Homo sapiens
  misc_RNA (1)...(19): siRNA sense strand
gguuugcgcuucaacucaa

SEQ ID NO: 755246 - RNA, 19 nt, Homo sapiens
  misc_RNA (1)...(19): siRNA sense strand
gcgcaaggccaagaagaaa

SEQ ID NO: 755247 - RNA, 19 nt, Homo sapiens
  misc_RNA (1)...(19): siRNA sense strand
ggaagaggaagaagaagag

SEQ ID NO: 755248 - RNA, 19 nt, Homo sapiens
  misc_RNA (1)...(19): siRNA sense strand
agaggaagaugaggaguca

SEQ ID NO: 755249 - RNA, 19 nt, Homo sapiens
  misc_RNA (1)...(19): siRNA sense strand
cgacuuagacaacaaggau

SEQ ID NO: 755250 - RNA, 19 nt, Homo sapiens
  misc_RNA (1)...(19): siRNA sense strand
cagaggagccaccgagaga

SEQ ID NO: 755251 - RNA, 19 nt, Homo sapiens
  misc_RNA (1)...(19): siRNA sense strand
ggacaccccucguagugaa

SEQ ID NO: 755252 - RNA, 19 nt, Homo sapiens
  misc_RNA (1)...(19): siRNA sense strand
gcucuaacugaacaacuaa

SEQ ID NO: 755253 - RNA, 19 nt, Homo sapiens
  misc_RNA (1)...(19): siRNA sense strand
gaugaggagucagggaauc

SEQ ID NO: 755254 - RNA, 19 nt, Homo sapiens
  misc_RNA (1)...(19): siRNA sense strand
aagaagaagaggaagauga

SEQ ID NO: 755255 - RNA, 19 nt, Homo sapiens
  misc_RNA (1)...(19): siRNA sense strand
cuacuaugauuccuacucu

SEQ ID NO: 755256 - RNA, 19 nt, Homo sapiens
  misc_RNA (1)...(19): siRNA sense strand
caggacagguggacgucaa

SEQ ID NO: 755257 - RNA, 19 nt, Homo sapiens
  misc_RNA (1)...(19): siRNA sense strand
ggagugccacccugacuuc

SEQ ID NO: 755258 - RNA, 19 nt, Homo sapiens
  misc_RNA (1)...(19): siRNA sense strand
ggaggaggaagaggaagaa

SEQ ID NO: 755259 - RNA, 19 nt, Homo sapiens
  misc_RNA (1)...(19): siRNA sense strand
auucuuaccucuucgacuu

SEQ ID NO: 755260 - RNA, 19 nt, Homo sapiens
  misc_RNA (1)...(19): siRNA sense strand
cuacagcucuaccgaacag

SEQ ID NO: 755261 - RNA, 19 nt, Homo sapiens
  misc_RNA (1)...(19): siRNA sense strand
gaaccgggucguacagagu

SEQ ID NO: 755262 - RNA, 19 nt, Homo sapiens
  misc_RNA (1)...(19): siRNA sense strand
agacagagcgaggguuuga

SEQ ID NO: 755263 - RNA, 19 nt, Homo sapiens
  misc_RNA (1)...(19): siRNA sense strand
ucagggaaucagucagaua

SEQ ID NO: 755264 - RNA, 19 nt, Homo sapiens
  misc_RNA (1)...(19): siRNA sense strand
ugcgagacguccaccauga

SEQ ID NO: 755265 - RNA, 19 nt, Homo sapiens
  misc_RNA (1)...(19): siRNA sense strand
uaugagaacgugcccauuc

SEQ ID NO: 755266 - RNA, 19 nt, Homo sapiens
  misc_RNA (1)...(19): siRNA sense strand
cgggagagcuaccaugacu

SEQ ID NO: 755267 - RNA, 19 nt, Homo sapiens
  misc_RNA (1)...(19): siRNA sense strand
cauaaaugcaguggacaaa

SEQ ID NO: 755268 - RNA, 19 nt, Homo sapiens
  misc_RNA (1)...(19): siRNA sense strand
gcaaugccgccauccucaa

SEQ ID NO: 755269 - RNA, 19 nt, Homo sapiens
  misc_RNA (1)...(19): siRNA sense strand
cauggaggcacccaagauu

SEQ ID NO: 755270 - RNA, 19 nt, Homo sapiens
  misc_RNA (1)...(19): siRNA sense strand
gcauggaggcacccaagau

SEQ ID NO: 755271 - RNA, 19 nt, Homo sapiens
  misc_RNA (1)...(19): siRNA sense strand
ggugaagccgucucggaaa

SEQ ID NO: 755272 - RNA, 19 nt, Homo sapiens
  misc_RNA (1)...(19): siRNA sense strand
caccaagaccugcgauuuc

SEQ ID NO: 755273 - RNA, 19 nt, Homo sapiens
  misc_RNA (1)...(19): siRNA sense strand
gggaugaaucugagaaucu

SEQ ID NO: 755274 - RNA, 19 nt, Homo sapiens
  misc_RNA (1)...(19): siRNA sense strand
cuccaggaauuuaacaaga

SEQ ID NO: 755275 - RNA, 19 nt, Homo sapiens
  misc_RNA (1)...(19): siRNA sense strand
cgauugcuccaggaauuua

SEQ ID NO: 755276 - RNA, 19 nt, Homo sapiens
  misc_RNA (1)...(19): siRNA sense strand
gugcugguaugacaaggau

SEQ ID NO: 755277 - RNA, 19 nt, Homo sapiens
  misc_RNA (1)...(19): siRNA sense strand
gaagaagaagaggaagaug

SEQ ID NO: 755278 - RNA, 19 nt, Homo sapiens
  misc_RNA (1)...(19): siRNA sense strand
gcaucgccuucuucaguuc

SEQ ID NO: 755279 - RNA, 19 nt, Homo sapiens
  misc_RNA (1)...(19): siRNA sense strand
ggauuacaaguacaucuca

SEQ ID NO: 755280 - RNA, 19 nt, Homo sapiens
  misc_RNA (1)...(19): siRNA sense strand
gcagaaggugauccugaug

SEQ ID NO: 755281 - RNA, 19 nt, Homo sapiens
  misc_RNA (1)...(19): siRNA sense strand
gcgaggguuugaggaguug

SEQ ID NO: 755282 - RNA, 19 nt, Homo sapiens
  misc_RNA (1)...(19): siRNA sense strand
ggagucagggaaucaguca

SEQ ID NO: 755283 - RNA, 19 nt, Homo sapiens
  misc_RNA (1)...(19): siRNA sense strand
ccucagaucuggccaaaag

SEQ ID NO: 755284 - RNA, 19 nt, Homo sapiens
  misc_RNA (1)...(19): siRNA sense strand
gaugugagagaggaugauu

SEQ ID NO: 755285 - RNA, 19 nt, Homo sapiens
  misc_RNA (1)...(19): siRNA sense strand
gcgauugcuccaggaauuu

SEQ ID NO: 755286 - RNA, 19 nt, Homo sapiens
  misc_RNA (1)...(19): siRNA sense strand
agaggaagaagaagaggaa

SEQ ID NO: 755287 - RNA, 19 nt, Homo sapiens
  misc_RNA (1)...(19): siRNA sense strand
ccgcaugagugaugauguc

SEQ ID NO: 755288 - RNA, 19 nt, Homo sapiens
  misc_RNA (1)...(19): siRNA sense strand
gugauccgcaugcuacuga

SEQ ID NO: 755289 - RNA, 19 nt, Homo sapiens
  misc_RNA (1)...(19): siRNA sense strand
cugaacaacuaagugaaga

SEQ ID NO: 755290 - RNA, 19 nt, Homo sapiens
  misc_RNA (1)...(19): siRNA sense strand
ggugggugaugacuucagu

SEQ ID NO: 755291 - RNA, 19 nt, Homo sapiens
  misc_RNA (1)...(19): siRNA sense strand
agacgguggugggugauga

SEQ ID NO: 755292 - RNA, 19 nt, Homo sapiens
  misc_RNA (1)...(19): siRNA sense strand
gcgagacguccaccaugaa

SEQ ID NO: 755293 - RNA, 19 nt, Homo sapiens
  misc_RNA (1)...(19): siRNA sense strand
cagggaaucagucagauag

SEQ ID NO: 755294 - RNA, 19 nt, Homo sapiens
  misc_RNA (1)...(19): siRNA sense strand
acuucagucucuacuauga

SEQ ID NO: 755295 - RNA, 19 nt, Homo sapiens
  misc_RNA (1)...(19): siRNA sense strand
gugaagccgucucggaaac

SEQ ID NO: 755296 - RNA, 19 nt, Homo sapiens
  misc_RNA (1)...(19): siRNA sense strand
gcaucaaggugcggcuaca

SEQ ID NO: 755297 - RNA, 19 nt, Homo sapiens
  misc_RNA (1)...(19): siRNA sense strand
uccaggaauuuaacaagau

SEQ ID NO: 755298 - RNA, 19 nt, Homo sapiens
  misc_RNA (1)...(19): siRNA sense strand
uggaggcacccaagauuga

SEQ ID NO: 755299 - RNA, 19 nt, Homo sapiens
  misc_RNA (1)...(19): siRNA sense strand
gaacaucgaucgcaacauc

SEQ ID NO: 755300 - RNA, 19 nt, Homo sapiens
  misc_RNA (1)...(19): siRNA sense strand
ugagagaggaugauucuua

SEQ ID NO: 755301 - RNA, 19 nt, Homo sapiens
  misc_RNA (1)...(19): siRNA sense strand
cagcaagucugaaguugaa

SEQ ID NO: 755302 - RNA, 19 nt, Homo sapiens
  misc_RNA (1)...(19): siRNA sense strand
ggagguagcccguuacaug

SEQ ID NO: 755303 - RNA, 19 nt, Homo sapiens
  misc_RNA (1)...(19): siRNA sense strand
ggaagaagaagaagaggaa

SEQ ID NO: 755304 - RNA, 19 nt, Homo sapiens
  misc_RNA (1)...(19): siRNA sense strand
gcacucagccgaagccauu

SEQ ID NO: 755305 - RNA, 19 nt, Homo sapiens
  misc_RNA (1)...(19): siRNA sense strand
caucuucgcuggagacaga

SEQ ID NO: 755306 - RNA, 19 nt, Homo sapiens
  misc_RNA (1)...(19): siRNA sense strand
ggaggaagaggaagaagaa

SEQ ID NO: 755307 - RNA, 19 nt, Homo sapiens
  misc_RNA (1)...(19): siRNA sense strand
uaaaugcaguggacaaaca

SEQ ID NO: 755308 - RNA, 19 nt, Homo sapiens
  misc_RNA (1)...(19): siRNA sense strand
gaagugacccugacgaaag

SEQ ID NO: 755309 - RNA, 19 nt, Homo sapiens
  misc_RNA (1)...(19): siRNA sense strand
gggaggagcuaggguuuga

SEQ ID NO: 755310 - RNA, 19 nt, Homo sapiens
  misc_RNA (1)...(19): siRNA sense strand
ggaagaggaggaagaagaa

SEQ ID NO: 755311 - RNA, 19 nt, Homo sapiens
  misc_RNA (1)...(19): siRNA sense strand
ggaugaaucugagaaucuu

SEQ ID NO: 755312 - RNA, 19 nt, Homo sapiens
  misc_RNA (1)...(19): siRNA sense strand
uaacugaacaacuaaguga

SEQ ID NO: 755313 - RNA, 19 nt, Homo sapiens
  misc_RNA (1)...(19): siRNA sense strand
gcaccaagaccugcgauuu

SEQ ID NO: 755314 - RNA, 19 nt, Homo sapiens
  misc_RNA (1)...(19): siRNA sense strand
ugacaaggaugggcgauug

SEQ ID NO: 755315 - RNA, 19 nt, Homo sapiens
  misc_RNA (1)...(19): siRNA sense strand
gagagaggaugauucuuac

SEQ ID NO: 755316 - RNA, 19 nt, Homo sapiens
  misc_RNA (1)...(19): siRNA sense strand
ggaugauucuuaccucuuc

SEQ ID NO: 755317 - RNA, 19 nt, Homo sapiens
  misc_RNA (1)...(19): siRNA sense strand
ggagagguguacugcauag

SEQ ID NO: 755318 - RNA, 19 nt, Homo sapiens
  misc_RNA (1)...(19): siRNA sense strand
ggagacagagcgaggguuu

SEQ ID NO: 755319 - RNA, 19 nt, Homo sapiens
  misc_RNA (1)...(19): siRNA sense strand
ccaggaauuuaacaagauu

SEQ ID NO: 755320 - RNA, 19 nt, Homo sapiens
  misc_RNA (1)...(19): siRNA sense strand
ggcgauugcuccaggaauu

SEQ ID NO: 755321 - RNA, 19 nt, Homo sapiens
  misc_RNA (1)...(19): siRNA sense strand
gagguguacugcauagaug

SEQ ID NO: 755322 - RNA, 19 nt, Homo sapiens
  misc_RNA (1)...(19): siRNA sense strand
gcccugaggauuacaagua

SEQ ID NO: 755323 - RNA, 19 nt, Homo sapiens
  misc_RNA (1)...(19): siRNA sense strand
guccagaguuuggcuauga

SEQ ID NO: 755324 - RNA, 19 nt, Homo sapiens
  misc_RNA (1)...(19): siRNA sense strand
gaaaaucaccuccaucugu

SEQ ID NO: 755325 - RNA, 19 nt, Homo sapiens
  misc_RNA (1)...(19): siRNA sense strand
gagcuaggguuugacuaug

SEQ ID NO: 755326 - RNA, 19 nt, Homo sapiens
  misc_RNA (1)...(19): siRNA sense strand
gcaaggccaagaagaaaug

SEQ ID NO: 755327 - RNA, 19 nt, Homo sapiens
  misc_RNA (1)...(19): siRNA sense strand
gguggugggugaugacuuc

SEQ ID NO: 755328 - RNA, 19 nt, Homo sapiens
  misc_RNA (1)...(19): siRNA sense strand
ggagcuaggguuugacuau

SEQ ID NO: 755329 - RNA, 19 nt, Homo sapiens
  misc_RNA (1)...(19): siRNA sense strand
gggaaucagucagauagga

SEQ ID NO: 755330 - RNA, 19 nt, Homo sapiens
  misc_RNA (1)...(19): siRNA sense strand
ggaagaagaagaggaagau

SEQ ID NO: 755331 - RNA, 19 nt, Homo sapiens
  misc_RNA (1)...(19): siRNA sense strand
gagaagugacccugacgaa

SEQ ID NO: 755332 - RNA, 19 nt, Homo sapiens
  misc_RNA (1)...(19): siRNA sense strand
ggaggaagaggaggaagaa

SEQ ID NO: 755333 - RNA, 19 nt, Homo sapiens
  misc_RNA (1)...(19): siRNA sense strand
gaccucagaucuggccaaa

SEQ ID NO: 755334 - RNA, 19 nt, Homo sapiens
  misc_RNA (1)...(19): siRNA sense strand
gcaagaaccgggucguaca

SEQ ID NO: 755335 - RNA, 19 nt, Homo sapiens
  misc_RNA (1)...(19): siRNA sense strand
ugaaugggauggucuucug

SEQ ID NO: 755336 - RNA, 19 nt, Homo sapiens
  misc_RNA (1)...(19): siRNA sense strand
ggaggaagaagaagaagag

SEQ ID NO: 755337 - RNA, 19 nt, Homo sapiens
  misc_RNA (1)...(19): siRNA sense strand
gacagcaagucugaaguug

SEQ ID NO: 755338 - RNA, 19 nt, Homo sapiens
  misc_RNA (1)...(19): siRNA sense strand
cgacagcaagucugaaguu

SEQ ID NO: 755339 - RNA, 19 nt, Homo sapiens
  misc_RNA (1)...(19): siRNA sense strand
caacaucagccgcuucauc

SEQ ID NO: 755340 - RNA, 19 nt, Homo sapiens
  misc_RNA (1)...(19): siRNA sense strand
ggaccuucaucugcgagua

SEQ ID NO: 755341 - RNA, 19 nt, Homo sapiens
  misc_RNA (1)...(19): siRNA sense strand
gauugagccuccgcugauu

SEQ ID NO: 755342 - RNA, 19 nt, Homo sapiens
  misc_RNA (1)...(19): siRNA sense strand
cgugguggcugugucuaua

SEQ ID NO: 755343 - RNA, 19 nt, Homo sapiens
  misc_RNA (1)...(19): siRNA sense strand
auacagcauuuccgcauga

SEQ ID NO: 755344 - RNA, 19 nt, Homo sapiens
  misc_RNA (1)...(19): siRNA sense strand
caauguggcucugagaagu

SEQ ID NO: 755345 - RNA, 19 nt, Homo sapiens
  misc_RNA (1)...(19): siRNA sense strand
gguuugcgcuucaacucaa

SEQ ID NO: 755346 - RNA, 19 nt, Homo sapiens
  misc_RNA (1)...(19): siRNA sense strand
gcgcaaggccaagaagaaa

SEQ ID NO: 755347 - RNA, 19 nt, Homo sapiens
  misc_RNA (1)...(19): siRNA sense strand
ggaagaggaagaagaagag

SEQ ID NO: 755348 - RNA, 19 nt, Homo sapiens
  misc_RNA (1)...(19): siRNA sense strand
agaggaagaugaggaguca

SEQ ID NO: 755349 - RNA, 19 nt, Homo sapiens
  misc_RNA (1)...(19): siRNA sense strand
cgacuuagacaacaaggau

SEQ ID NO: 755350 - RNA, 19 nt, Homo sapiens
  misc_RNA (1)...(19): siRNA sense strand
cagaggagccaccgagaga

SEQ ID NO: 755351 - RNA, 19 nt, Homo sapiens
  misc_RNA (1)...(19): siRNA sense strand
ggacaccccucguagugaa

SEQ ID NO: 755352 - RNA, 19 nt, Homo sapiens
  misc_RNA (1)...(19): siRNA sense strand
gcucuaacugaacaacuaa

SEQ ID NO: 755353 - RNA, 19 nt, Homo sapiens
  misc_RNA (1)...(19): siRNA sense strand
gaugaggagucagggaauc

SEQ ID NO: 755354 - RNA, 19 nt, Homo sapiens
  misc_RNA (1)...(19): siRNA sense strand
aagaagaagaggaagauga

SEQ ID NO: 755355 - RNA, 19 nt, Homo sapiens
  misc_RNA (1)...(19): siRNA sense strand
cuacuaugauuccuacucu

SEQ ID NO: 755356 - RNA, 19 nt, Homo sapiens
  misc_RNA (1)...(19): siRNA sense strand
caggacagguggacgucaa

SEQ ID NO: 755357 - RNA, 19 nt, Homo sapiens
  misc_RNA (1)...(19): siRNA sense strand
ggagugccacccugacuuc

SEQ ID NO: 755358 - RNA, 19 nt, Homo sapiens
  misc_RNA (1)...(19): siRNA sense strand
ggaggaggaagaggaagaa

SEQ ID NO: 755359 - RNA, 19 nt, Homo sapiens
  misc_RNA (1)...(19): siRNA sense strand
auucuuaccucuucgacuu

SEQ ID NO: 755360 - RNA, 19 nt, Homo sapiens
  misc_RNA (1)...(19): siRNA sense strand
cuacagcucuaccgaacag

SEQ ID NO: 755361 - RNA, 19 nt, Homo sapiens
  misc_RNA (1)...(19): siRNA sense strand
gaaccgggucguacagagu

SEQ ID NO: 755362 - RNA, 19 nt, Homo sapiens
  misc_RNA (1)...(19): siRNA sense strand
agacagagcgaggguuuga

SEQ ID NO: 755363 - RNA, 19 nt, Homo sapiens
  misc_RNA (1)...(19): siRNA sense strand
ucagggaaucagucagaua

SEQ ID NO: 755364 - RNA, 19 nt, Homo sapiens
  misc_RNA (1)...(19): siRNA sense strand
ugcgagacguccaccauga

SEQ ID NO: 755365 - RNA, 19 nt, Homo sapiens
  misc_RNA (1)...(19): siRNA sense strand
uaugagaacgugcccauuc

SEQ ID NO: 755366 - RNA, 19 nt, Homo sapiens
  misc_RNA (1)...(19): siRNA sense strand
cgggagagcuaccaugacu

SEQ ID NO: 755367 - RNA, 19 nt, Homo sapiens
  misc_RNA (1)...(19): siRNA sense strand
cauaaaugcaguggacaaa

SEQ ID NO: 755368 - RNA, 19 nt, Homo sapiens
  misc_RNA (1)...(19): siRNA sense strand
gcaaugccgccauccucaa

SEQ ID NO: 755369 - RNA, 19 nt, Homo sapiens
  misc_RNA (1)...(19): siRNA sense strand
cauggaggcacccaagauu

SEQ ID NO: 755370 - RNA, 19 nt, Homo sapiens
  misc_RNA (1)...(19): siRNA sense strand
gcauggaggcacccaagau

SEQ ID NO: 755371 - RNA, 19 nt, Homo sapiens
  misc_RNA (1)...(19): siRNA sense strand
ggugaagccgucucggaaa

SEQ ID NO: 755372 - RNA, 19 nt, Homo sapiens
  misc_RNA (1)...(19): siRNA sense strand
caccaagaccugcgauuuc

SEQ ID NO: 755373 - RNA, 19 nt, Homo sapiens
  misc_RNA (1)...(19): siRNA sense strand
gggaugaaucugagaaucu

SEQ ID NO: 755374 - RNA, 19 nt, Homo sapiens
  misc_RNA (1)...(19): siRNA sense strand
cuccaggaauuuaacaaga

SEQ ID NO: 755375 - RNA, 19 nt, Homo sapiens
  misc_RNA (1)...(19): siRNA sense strand
cgauugcuccaggaauuua

SEQ ID NO: 755376 - RNA, 19 nt, Homo sapiens
  misc_RNA (1)...(19): siRNA sense strand
gugcugguaugacaaggau

SEQ ID NO: 755377 - RNA, 19 nt, Homo sapiens
  misc_RNA (1)...(19): siRNA sense strand
gaagaagaagaggaagaug

SEQ ID NO: 755378 - RNA, 19 nt, Homo sapiens
  misc_RNA (1)...(19): siRNA sense strand
gcaucgccuucuucaguuc

SEQ ID NO: 755379 - RNA, 19 nt, Homo sapiens
  misc_RNA (1)...(19): siRNA sense strand
ggauuacaaguacaucuca

SEQ ID NO: 755380 - RNA, 19 nt, Homo sapiens
  misc_RNA (1)...(19): siRNA sense strand
gcagaaggugauccugaug

SEQ ID NO: 755381 - RNA, 19 nt, Homo sapiens
  misc_RNA (1)...(19): siRNA sense strand
gcgaggguuugaggaguug

SEQ ID NO: 755382 - RNA, 19 nt, Homo sapiens
  misc_RNA (1)...(19): siRNA sense strand
ggagucagggaaucaguca

SEQ ID NO: 755383 - RNA, 19 nt, Homo sapiens
  misc_RNA (1)...(19): siRNA sense strand
ccucagaucuggccaaaag

SEQ ID NO: 755384 - RNA, 19 nt, Homo sapiens
  misc_RNA (1)...(19): siRNA sense strand
gaugugagagaggaugauu

SEQ ID NO: 755385 - RNA, 19 nt, Homo sapiens
  misc_RNA (1)...(19): siRNA sense strand
gcgauugcuccaggaauuu

SEQ ID NO: 755386 - RNA, 19 nt, Homo sapiens
  misc_RNA (1)...(19): siRNA sense strand
agaggaagaagaagaggaa

SEQ ID NO: 755387 - RNA, 19 nt, Homo sapiens
  misc_RNA (1)...(19): siRNA sense strand
ccgcaugagugaugauguc

SEQ ID NO: 755388 - RNA, 19 nt, Homo sapiens
  misc_RNA (1)...(19): siRNA sense strand
gugauccgcaugcuacuga

SEQ ID NO: 755389 - RNA, 19 nt, Homo sapiens
  misc_RNA (1)...(19): siRNA sense strand
cugaacaacuaagugaaga

SEQ ID NO: 755390 - RNA, 19 nt, Homo sapiens
  misc_RNA (1)...(19): siRNA sense strand
ggugggugaugacuucagu

SEQ ID NO: 755391 - RNA, 19 nt, Homo sapiens
  misc_RNA (1)...(19): siRNA sense strand
agacgguggugggugauga

SEQ ID NO: 755392 - RNA, 19 nt, Homo sapiens
  misc_RNA (1)...(19): siRNA sense strand
gcgagacguccaccaugaa

SEQ ID NO: 755393 - RNA, 19 nt, Homo sapiens
  misc_RNA (1)...(19): siRNA sense strand
cagggaaucagucagauag

SEQ ID NO: 755394 - RNA, 19 nt, Homo sapiens
  misc_RNA (1)...(19): siRNA sense strand
acuucagucucuacuauga

SEQ ID NO: 755395 - RNA, 19 nt, Homo sapiens
  misc_RNA (1)...(19): siRNA sense strand
gugaagccgucucggaaac

SEQ ID NO: 755396 - RNA, 19 nt, Homo sapiens
  misc_RNA (1)...(19): siRNA sense strand
gcaucaaggugcggcuaca

SEQ ID NO: 755397 - RNA, 19 nt, Homo sapiens
  misc_RNA (1)...(19): siRNA sense strand
uccaggaauuuaacaagau

SEQ ID NO: 755398 - RNA, 19 nt, Homo sapiens
  misc_RNA (1)...(19): siRNA sense strand
uggaggcacccaagauuga

SEQ ID NO: 755399 - RNA, 19 nt, Homo sapiens
  misc_RNA (1)...(19): siRNA sense strand
ggaaagaaauguuuagacu

SEQ ID NO: 755400 - RNA, 19 nt, Homo sapiens
  misc_RNA (1)...(19): siRNA sense strand
gaagaaauagaccagugua

SEQ ID NO: 755401 - RNA, 19 nt, Homo sapiens
  misc_RNA (1)...(19): siRNA sense strand
guucagccguggaaagaaa

SEQ ID NO: 755402 - RNA, 19 nt, Homo sapiens
  misc_RNA (1)...(19): siRNA sense strand
uaaggaggagcuugaauaa

SEQ ID NO: 755403 - RNA, 19 nt, Homo sapiens
  misc_RNA (1)...(19): siRNA sense strand
gaaauagaccaguguacca

SEQ ID NO: 755404 - RNA, 19 nt, Homo sapiens
  misc_RNA (1)...(19): siRNA sense strand
auaaggaggagcuugaaua

SEQ ID NO: 755405 - RNA, 19 nt, Homo sapiens
  misc_RNA (1)...(19): siRNA sense strand
caaaguggaaugcgaagug

SEQ ID NO: 755406 - RNA, 19 nt, Homo sapiens
  misc_RNA (1)...(19): siRNA sense strand
guaccaaacccagagauug

SEQ ID NO: 755407 - RNA, 19 nt, Homo sapiens
  misc_RNA (1)...(19): siRNA sense strand
ggaaugcgaaguggaagaa

SEQ ID NO: 755408 - RNA, 19 nt, Homo sapiens
  misc_RNA (1)...(19): siRNA sense strand
ggaagaaauagaccagugu

SEQ ID NO: 755409 - RNA, 19 nt, Homo sapiens
  misc_RNA (1)...(19): siRNA sense strand
ggucagccuuacuuuauac

SEQ ID NO: 755410 - RNA, 19 nt, Homo sapiens
  misc_RNA (1)...(19): siRNA sense strand
ucucaggacuucugccaau

SEQ ID NO: 755411 - RNA, 19 nt, Homo sapiens
  misc_RNA (1)...(19): siRNA sense strand
gaaauguuuagacuucaga

SEQ ID NO: 755412 - RNA, 19 nt, Homo sapiens
  misc_RNA (1)...(19): siRNA sense strand
acccagagauugcccagaa

SEQ ID NO: 755413 - RNA, 19 nt, Homo sapiens
  misc_RNA (1)...(19): siRNA sense strand
agccuuacuuuauaccaua

SEQ ID NO: 755414 - RNA, 19 nt, Homo sapiens
  misc_RNA (1)...(19): siRNA sense strand
aggucagccuuacuuuaua

SEQ ID NO: 755415 - RNA, 19 nt, Homo sapiens
  misc_RNA (1)...(19): siRNA sense strand
cugguaccauucauccuuu

SEQ ID NO: 755416 - RNA, 19 nt, Homo sapiens
  misc_RNA (1)...(19): siRNA sense strand
ugccaauccugguaccauu

SEQ ID NO: 755417 - RNA, 19 nt, Homo sapiens
  misc_RNA (1)...(19): siRNA sense strand
aaugcgaaguggaagaaau

SEQ ID NO: 755418 - RNA, 19 nt, Homo sapiens
  misc_RNA (1)...(19): siRNA sense strand
augcgaaguggaagaaaua

SEQ ID NO: 755419 - RNA, 19 nt, Homo sapiens
  misc_RNA (1)...(19): siRNA sense strand
cagccuuacuuuauaccau

SEQ ID NO: 755420 - RNA, 19 nt, Homo sapiens
  misc_RNA (1)...(19): siRNA sense strand
gcgaaguggaagaaauaga

SEQ ID NO: 755421 - RNA, 19 nt, Homo sapiens
  misc_RNA (1)...(19): siRNA sense strand
gccguggaaagaaauguuu

SEQ ID NO: 755422 - RNA, 19 nt, Homo sapiens
  misc_RNA (1)...(19): siRNA sense strand
cccagagauugcccagaaa

SEQ ID NO: 755423 - RNA, 19 nt, Homo sapiens
  misc_RNA (1)...(19): siRNA sense strand
cgaaguggaagaaauagac

SEQ ID NO: 755424 - RNA, 19 nt, Homo sapiens
  misc_RNA (1)...(19): siRNA sense strand
ggcaagccgugucccaaaa

SEQ ID NO: 755425 - RNA, 19 nt, Homo sapiens
  misc_RNA (1)...(19): siRNA sense strand
gaaugcgaaguggaagaaa

SEQ ID NO: 755426 - RNA, 19 nt, Homo sapiens
  misc_RNA (1)...(19): siRNA sense strand
uguuuagacuucagaaagg

SEQ ID NO: 755427 - RNA, 19 nt, Homo sapiens
  misc_RNA (1)...(19): siRNA sense strand
aaauagaccaguguaccaa

SEQ ID NO: 755428 - RNA, 19 nt, Homo sapiens
  misc_RNA (1)...(19): siRNA sense strand
ggaaauaccuggacucuuu

SEQ ID NO: 755429 - RNA, 19 nt, Homo sapiens
  misc_RNA (1)...(19): siRNA sense strand
cuacacaggugaagacuuu

SEQ ID NO: 755430 - RNA, 19 nt, Homo sapiens
  misc_RNA (1)...(19): siRNA sense strand
caaccagccugacaacuuu

SEQ ID NO: 755431 - RNA, 19 nt, Homo sapiens
  misc_RNA (1)...(19): siRNA sense strand
gcagaacagugccaucauu

SEQ ID NO: 755432 - RNA, 19 nt, Homo sapiens
  misc_RNA (1)...(19): siRNA sense strand
gaacuuugguggaaucugu

SEQ ID NO: 755433 - RNA, 19 nt, Homo sapiens
  misc_RNA (1)...(19): siRNA sense strand
uaaagaagaagaaggcuua

SEQ ID NO: 755434 - RNA, 19 nt, Homo sapiens
  misc_RNA (1)...(19): siRNA sense strand
ggucuucccucuggauuua

SEQ ID NO: 755435 - RNA, 19 nt, Homo sapiens
  misc_RNA (1)...(19): siRNA sense strand
gaauagaggaugucaguga

SEQ ID NO: 755436 - RNA, 19 nt, Homo sapiens
  misc_RNA (1)...(19): siRNA sense strand
ggaaacaucuggagugacu

SEQ ID NO: 755437 - RNA, 19 nt, Homo sapiens
  misc_RNA (1)...(19): siRNA sense strand
caacagagaccuacgaugu

SEQ ID NO: 755438 - RNA, 19 nt, Homo sapiens
  misc_RNA (1)...(19): siRNA sense strand
gcuacucgcugaccuuuga

SEQ ID NO: 755439 - RNA, 19 nt, Homo sapiens
  misc_RNA (1)...(19): siRNA sense strand
gcacuggaguucugugaau

SEQ ID NO: 755440 - RNA, 19 nt, Homo sapiens
  misc_RNA (1)...(19): siRNA sense strand
gaggagcccuucacguuug

SEQ ID NO: 755441 - RNA, 19 nt, Homo sapiens
  misc_RNA (1)...(19): siRNA sense strand
gaggagggcuggaacaagu

SEQ ID NO: 755442 - RNA, 19 nt, Homo sapiens
  misc_RNA (1)...(19): siRNA sense strand
ucgcugagguugagaauga

SEQ ID NO: 755443 - RNA, 19 nt, Homo sapiens
  misc_RNA (1)...(19): siRNA sense strand
gaagagccguauacaccuu

SEQ ID NO: 755444 - RNA, 19 nt, Homo sapiens
  misc_RNA (1)...(19): siRNA sense strand
agacagaacuuugguggaa

SEQ ID NO: 755445 - RNA, 19 nt, Homo sapiens
  misc_RNA (1)...(19): siRNA sense strand
ggagacuacugccauccua

SEQ ID NO: 755446 - RNA, 19 nt, Homo sapiens
  misc_RNA (1)...(19): siRNA sense strand
ccacacgccuugagcaguu

SEQ ID NO: 755447 - RNA, 19 nt, Homo sapiens
  misc_RNA (1)...(19): siRNA sense strand
gagaagagacucacacagu

SEQ ID NO: 755448 - RNA, 19 nt, Homo sapiens
  misc_RNA (1)...(19): siRNA sense strand
gcagagacgcaucuagaaa

SEQ ID NO: 755449 - RNA, 19 nt, Homo sapiens
  misc_RNA (1)...(19): siRNA sense strand
ggagaggccucaggacuuc

SEQ ID NO: 755450 - RNA, 19 nt, Homo sapiens
  misc_RNA (1)...(19): siRNA sense strand
gcuacacccucgacuuuga

SEQ ID NO: 755451 - RNA, 19 nt, Homo sapiens
  misc_RNA (1)...(19): siRNA sense strand
gauggagggugaggucuuu

SEQ ID NO: 755452 - RNA, 19 nt, Homo sapiens
  misc_RNA (1)...(19): siRNA sense strand
gaccucugcuucuggagua

SEQ ID NO: 755453 - RNA, 19 nt, Homo sapiens
  misc_RNA (1)...(19): siRNA sense strand
agacgcaucuagaaauuga

SEQ ID NO: 755454 - RNA, 19 nt, Homo sapiens
  misc_RNA (1)...(19): siRNA sense strand
ccuaguggauucuacauug

SEQ ID NO: 755455 - RNA, 19 nt, Homo sapiens
  misc_RNA (1)...(19): siRNA sense strand
cggcagcacuuugacauuu

SEQ ID NO: 755456 - RNA, 19 nt, Homo sapiens
  misc_RNA (1)...(19): siRNA sense strand
ugagaacggucuaccucua

SEQ ID NO: 755457 - RNA, 19 nt, Homo sapiens
  misc_RNA (1)...(19): siRNA sense strand
caacaacaaugcccaagac

SEQ ID NO: 755458 - RNA, 19 nt, Homo sapiens
  misc_RNA (1)...(19): siRNA sense strand
ggacaagccaggcgugaga

SEQ ID NO: 755459 - RNA, 19 nt, Homo sapiens
  misc_RNA (1)...(19): siRNA sense strand
ggagaagcaucuggaguuc

SEQ ID NO: 755460 - RNA, 19 nt, Homo sapiens
  misc_RNA (1)...(19): siRNA sense strand
cgaggcagcgugauccuua

SEQ ID NO: 755461 - RNA, 19 nt, Homo sapiens
  misc_RNA (1)...(19): siRNA sense strand
ggaauucaguggccuacca

SEQ ID NO: 755462 - RNA, 19 nt, Homo sapiens
  misc_RNA (1)...(19): siRNA sense strand
gcagaucugucaggcaaau

SEQ ID NO: 755463 - RNA, 19 nt, Homo sapiens
  misc_RNA (1)...(19): siRNA sense strand
uggcauaacugaucugagu

SEQ ID NO: 755464 - RNA, 19 nt, Homo sapiens
  misc_RNA (1)...(19): siRNA sense strand
ggacagccaucaggguuuc

SEQ ID NO: 755465 - RNA, 19 nt, Homo sapiens
  misc_RNA (1)...(19): siRNA sense strand
agagacgcaucuagaaauu

SEQ ID NO: 755466 - RNA, 19 nt, Homo sapiens
  misc_RNA (1)...(19): siRNA sense strand
caacaaugcccaagacuac

SEQ ID NO: 755467 - RNA, 19 nt, Homo sapiens
  misc_RNA (1)...(19): siRNA sense strand
ggaauggaaacgugaauca

SEQ ID NO: 755468 - RNA, 19 nt, Homo sapiens
  misc_RNA (1)...(19): siRNA sense strand
gaucgugacccaagugguu

SEQ ID NO: 755469 - RNA, 19 nt, Homo sapiens
  misc_RNA (1)...(19): siRNA sense strand
caacgagaccuaugaugug

SEQ ID NO: 755470 - RNA, 19 nt, Homo sapiens
  misc_RNA (1)...(19): siRNA sense strand
gaaacgugaaucagaauca

SEQ ID NO: 755471 - RNA, 19 nt, Homo sapiens
  misc_RNA (1)...(19): siRNA sense strand
caucaguggugcaggagaa

SEQ ID NO: 755472 - RNA, 19 nt, Homo sapiens
  misc_RNA (1)...(19): siRNA sense strand
uuuaaucacuucugaguuc

SEQ ID NO: 755473 - RNA, 19 nt, Homo sapiens
  misc_RNA (1)...(19): siRNA sense strand
agucaacccuuuggcauaa

SEQ ID NO: 755474 - RNA, 19 nt, Homo sapiens
  misc_RNA (1)...(19): siRNA sense strand
gagcaggaguuugucaaca

SEQ ID NO: 755475 - RNA, 19 nt, Homo sapiens
  misc_RNA (1)...(19): siRNA sense strand
gaguagaaguaucaucagu

SEQ ID NO: 755476 - RNA, 19 nt, Homo sapiens
  misc_RNA (1)...(19): siRNA sense strand
caccagguacuccauauuu

SEQ ID NO: 755477 - RNA, 19 nt, Homo sapiens
  misc_RNA (1)...(19): siRNA sense strand
ccagggauccuuccuacuu

SEQ ID NO: 755478 - RNA, 19 nt, Homo sapiens
  misc_RNA (1)...(19): siRNA sense strand
gagaagggcgaguggaaug

SEQ ID NO: 755479 - RNA, 19 nt, Homo sapiens
  misc_RNA (1)...(19): siRNA sense strand
caucuggaguucuuuaugg

SEQ ID NO: 755480 - RNA, 19 nt, Homo sapiens
  misc_RNA (1)...(19): siRNA sense strand
gaaauaccuggacucuuug

SEQ ID NO: 755481 - RNA, 19 nt, Homo sapiens
  misc_RNA (1)...(19): siRNA sense strand
caaacugccuucuggaacu

SEQ ID NO: 755482 - RNA, 19 nt, Homo sapiens
  misc_RNA (1)...(19): siRNA sense strand
cuacugccauccuagaguu

SEQ ID NO: 755483 - RNA, 19 nt, Homo sapiens
  misc_RNA (1)...(19): siRNA sense strand
gcagcacuuugacauuuca

SEQ ID NO: 755484 - RNA, 19 nt, Homo sapiens
  misc_RNA (1)...(19): siRNA sense strand
ccuaugauguguacugcuu

SEQ ID NO: 755485 - RNA, 19 nt, Homo sapiens
  misc_RNA (1)...(19): siRNA sense strand
gaacucaguggugcucauu

SEQ ID NO: 755486 - RNA, 19 nt, Homo sapiens
  misc_RNA (1)...(19): siRNA sense strand
gggaccagaccgucagaua

SEQ ID NO: 755487 - RNA, 19 nt, Homo sapiens
  misc_RNA (1)...(19): siRNA sense strand
ccaacgagaccuaugaugu

SEQ ID NO: 755488 - RNA, 19 nt, Homo sapiens
  misc_RNA (1)...(19): siRNA sense strand
ccaaccagccugacaacuu

SEQ ID NO: 755489 - RNA, 19 nt, Homo sapiens
  misc_RNA (1)...(19): siRNA sense strand
ggagacaggacugaaauca

SEQ ID NO: 755490 - RNA, 19 nt, Homo sapiens
  misc_RNA (1)...(19): siRNA sense strand
uaucaucagucccagaauc

SEQ ID NO: 755491 - RNA, 19 nt, Homo sapiens
  misc_RNA (1)...(19): siRNA sense strand
acagugaccuggccugaca

SEQ ID NO: 755492 - RNA, 19 nt, Homo sapiens
  misc_RNA (1)...(19): siRNA sense strand
gaaugauguucccugcaau

SEQ ID NO: 755493 - RNA, 19 nt, Homo sapiens
  misc_RNA (1)...(19): siRNA sense strand
aauagaggaugucagugaa

SEQ ID NO: 755494 - RNA, 19 nt, Homo sapiens
  misc_RNA (1)...(19): siRNA sense strand
ggaaccaucagccucagaa

SEQ ID NO: 755495 - RNA, 19 nt, Homo sapiens
  misc_RNA (1)...(19): siRNA sense strand
cgaggagcccuucacguuu

SEQ ID NO: 755496 - RNA, 19 nt, Homo sapiens
  misc_RNA (1)...(19): siRNA sense strand
uguagaaacuucagaccau

SEQ ID NO: 755497 - RNA, 19 nt, Homo sapiens
  misc_RNA (1)...(19): siRNA sense strand
guuacugaaccaacuauuu

SEQ ID NO: 755498 - RNA, 19 nt, Homo sapiens
  misc_RNA (1)...(19): siRNA sense strand
gagaucagcgggcuuccuu

SEQ ID NO: 755499 - RNA, 19 nt, Homo sapiens
  misc_RNA (1)...(19): siRNA sense strand
gagaucagcgggcuuccuu

SEQ ID NO: 755500 - RNA, 19 nt, Homo sapiens
  misc_RNA (1)...(19): siRNA sense strand
cagggauccuuccuacuug

SEQ ID NO: 755501 - RNA, 19 nt, Homo sapiens
  misc_RNA (1)...(19): siRNA sense strand
ggugaaaggcaucguguuc

SEQ ID NO: 755502 - RNA, 19 nt, Homo sapiens
  misc_RNA (1)...(19): siRNA sense strand
gaacgacaggaccaucgaa

SEQ ID NO: 755503 - RNA, 19 nt, Homo sapiens
  misc_RNA (1)...(19): siRNA sense strand
caauguaaguggagaaucc

SEQ ID NO: 755504 - RNA, 19 nt, Homo sapiens
  misc_RNA (1)...(19): siRNA sense strand
ccgaggagcccuucacguu

SEQ ID NO: 755505 - RNA, 19 nt, Homo sapiens
  misc_RNA (1)...(19): siRNA sense strand
cacugcagcugucacugua

SEQ ID NO: 755506 - RNA, 19 nt, Homo sapiens
  misc_RNA (1)...(19): siRNA sense strand
aaacgugaaucagaaucaa

SEQ ID NO: 755507 - RNA, 19 nt, Homo sapiens
  misc_RNA (1)...(19): siRNA sense strand
ugaaaccaccucugcauuc

SEQ ID NO: 755508 - RNA, 19 nt, Homo sapiens
  misc_RNA (1)...(19): siRNA sense strand
aaucugggaugguggaugu

SEQ ID NO: 755509 - RNA, 19 nt, Homo sapiens
  misc_RNA (1)...(19): siRNA sense strand
ggaagggagggucuagaga

SEQ ID NO: 755510 - RNA, 19 nt, Homo sapiens
  misc_RNA (1)...(19): siRNA sense strand
gagagguuguagagacuuc

SEQ ID NO: 755511 - RNA, 19 nt, Homo sapiens
  misc_RNA (1)...(19): siRNA sense strand
gaaugggaaccagccuaua

SEQ ID NO: 755512 - RNA, 19 nt, Homo sapiens
  misc_RNA (1)...(19): siRNA sense strand
uuacugaaccaacuauuuc

SEQ ID NO: 755513 - RNA, 19 nt, Homo sapiens
  misc_RNA (1)...(19): siRNA sense strand
ggagcauucuggauuucug

SEQ ID NO: 755514 - RNA, 19 nt, Homo sapiens
  misc_RNA (1)...(19): siRNA sense strand
cuucugggauuacauuugu

SEQ ID NO: 755515 - RNA, 19 nt, Homo sapiens
  misc_RNA (1)...(19): siRNA sense strand
gacauuagugggagagcua

SEQ ID NO: 755516 - RNA, 19 nt, Homo sapiens
  misc_RNA (1)...(19): siRNA sense strand
ugggcaagcuccagaaaca

SEQ ID NO: 755517 - RNA, 19 nt, Homo sapiens
  misc_RNA (1)...(19): siRNA sense strand
gauuucugccucuggauuu

SEQ ID NO: 755518 - RNA, 19 nt, Homo sapiens
  misc_RNA (1)...(19): siRNA sense strand
ggacuccaguggucuuacu

SEQ ID NO: 755519 - RNA, 19 nt, Homo sapiens
  misc_RNA (1)...(19): siRNA sense strand
gugaagacuuuguggacau

SEQ ID NO: 755520 - RNA, 19 nt, Homo sapiens
  misc_RNA (1)...(19): siRNA sense strand
gacuuccgcuggucagaug

SEQ ID NO: 755521 - RNA, 19 nt, Homo sapiens
  misc_RNA (1)...(19): siRNA sense strand
ccucaagccuccuguacuc

SEQ ID NO: 755522 - RNA, 19 nt, Homo sapiens
  misc_RNA (1)...(19): siRNA sense strand
cagagacgcaucuagaaau

SEQ ID NO: 755523 - RNA, 19 nt, Homo sapiens
  misc_RNA (1)...(19): siRNA sense strand
gaaaccaccucugcauucc

SEQ ID NO: 755524 - RNA, 19 nt, Homo sapiens
  misc_RNA (1)...(19): siRNA sense strand
gccagcaccaccaauguaa

SEQ ID NO: 755525 - RNA, 19 nt, Homo sapiens
  misc_RNA (1)...(19): siRNA sense strand
ccuacuacauuuaaagaag

SEQ ID NO: 755526 - RNA, 19 nt, Homo sapiens
  misc_RNA (1)...(19): siRNA sense strand
ggaguucuuuauggcacua

SEQ ID NO: 755527 - RNA, 19 nt, Homo sapiens
  misc_RNA (1)...(19): siRNA sense strand
ggaccagaccgucagauac

SEQ ID NO: 755528 - RNA, 19 nt, Homo sapiens
  misc_RNA (1)...(19): siRNA sense strand
ggaaauaccuggacucuuu

SEQ ID NO: 755529 - RNA, 19 nt, Homo sapiens
  misc_RNA (1)...(19): siRNA sense strand
cuacacaggugaagacuuu

SEQ ID NO: 755530 - RNA, 19 nt, Homo sapiens
  misc_RNA (1)...(19): siRNA sense strand
caaccagccugacaacuuu

SEQ ID NO: 755531 - RNA, 19 nt, Homo sapiens
  misc_RNA (1)...(19): siRNA sense strand
gcagaacagugccaucauu

SEQ ID NO: 755532 - RNA, 19 nt, Homo sapiens
  misc_RNA (1)...(19): siRNA sense strand
gaacuuugguggaaucugu

SEQ ID NO: 755533 - RNA, 19 nt, Homo sapiens
  misc_RNA (1)...(19): siRNA sense strand
uaaagaagaagaaggcuua

SEQ ID NO: 755534 - RNA, 19 nt, Homo sapiens
  misc_RNA (1)...(19): siRNA sense strand
ggucuucccucuggauuua

SEQ ID NO: 755535 - RNA, 19 nt, Homo sapiens
  misc_RNA (1)...(19): siRNA sense strand
gaauagaggaugucaguga

SEQ ID NO: 755536 - RNA, 19 nt, Homo sapiens
  misc_RNA (1)...(19): siRNA sense strand
ggaaacaucuggagugacu

SEQ ID NO: 755537 - RNA, 19 nt, Homo sapiens
  misc_RNA (1)...(19): siRNA sense strand
caacagagaccuacgaugu

SEQ ID NO: 755538 - RNA, 19 nt, Homo sapiens
  misc_RNA (1)...(19): siRNA sense strand
gcuacucgcugaccuuuga

SEQ ID NO: 755539 - RNA, 19 nt, Homo sapiens
  misc_RNA (1)...(19): siRNA sense strand
gcacuggaguucugugaau

SEQ ID NO: 755540 - RNA, 19 nt, Homo sapiens
  misc_RNA (1)...(19): siRNA sense strand
gaggagcccuucacguuug

SEQ ID NO: 755541 - RNA, 19 nt, Homo sapiens
  misc_RNA (1)...(19): siRNA sense strand
gaggagggcuggaacaagu

SEQ ID NO: 755542 - RNA, 19 nt, Homo sapiens
  misc_RNA (1)...(19): siRNA sense strand
ucgcugagguugagaauga

SEQ ID NO: 755543 - RNA, 19 nt, Homo sapiens
  misc_RNA (1)...(19): siRNA sense strand
gaagagccguauacaccuu

SEQ ID NO: 755544 - RNA, 19 nt, Homo sapiens
  misc_RNA (1)...(19): siRNA sense strand
agacagaacuuugguggaa

SEQ ID NO: 755545 - RNA, 19 nt, Homo sapiens
  misc_RNA (1)...(19): siRNA sense strand
ggagacuacugccauccua

SEQ ID NO: 755546 - RNA, 19 nt, Homo sapiens
  misc_RNA (1)...(19): siRNA sense strand
ccacacgccuugagcaguu

SEQ ID NO: 755547 - RNA, 19 nt, Homo sapiens
  misc_RNA (1)...(19): siRNA sense strand
gagaagagacucacacagu

SEQ ID NO: 755548 - RNA, 19 nt, Homo sapiens
  misc_RNA (1)...(19): siRNA sense strand
gcagagacgcaucuagaaa

SEQ ID NO: 755549 - RNA, 19 nt, Homo sapiens
  misc_RNA (1)...(19): siRNA sense strand
ggagaggccucaggacuuc

SEQ ID NO: 755550 - RNA, 19 nt, Homo sapiens
  misc_RNA (1)...(19): siRNA sense strand
gcuacacccucgacuuuga

SEQ ID NO: 755551 - RNA, 19 nt, Homo sapiens
  misc_RNA (1)...(19): siRNA sense strand
gauggagggugaggucuuu

SEQ ID NO: 755552 - RNA, 19 nt, Homo sapiens
  misc_RNA (1)...(19): siRNA sense strand
gaccucugcuucuggagua

SEQ ID NO: 755553 - RNA, 19 nt, Homo sapiens
  misc_RNA (1)...(19): siRNA sense strand
agacgcaucuagaaauuga

SEQ ID NO: 755554 - RNA, 19 nt, Homo sapiens
  misc_RNA (1)...(19): siRNA sense strand
ccuaguggauucuacauug

SEQ ID NO: 755555 - RNA, 19 nt, Homo sapiens
  misc_RNA (1)...(19): siRNA sense strand
cggcagcacuuugacauuu

SEQ ID NO: 755556 - RNA, 19 nt, Homo sapiens
  misc_RNA (1)...(19): siRNA sense strand
ugagaacggucuaccucua

SEQ ID NO: 755557 - RNA, 19 nt, Homo sapiens
  misc_RNA (1)...(19): siRNA sense strand
caacaacaaugcccaagac

SEQ ID NO: 755558 - RNA, 19 nt, Homo sapiens
  misc_RNA (1)...(19): siRNA sense strand
ggacaagccaggcgugaga

SEQ ID NO: 755559 - RNA, 19 nt, Homo sapiens
  misc_RNA (1)...(19): siRNA sense strand
ggagaagcaucuggaguuc

SEQ ID NO: 755560 - RNA, 19 nt, Homo sapiens
  misc_RNA (1)...(19): siRNA sense strand
cgaggcagcgugauccuua

SEQ ID NO: 755561 - RNA, 19 nt, Homo sapiens
  misc_RNA (1)...(19): siRNA sense strand
ggaauucaguggccuacca

SEQ ID NO: 755562 - RNA, 19 nt, Homo sapiens
  misc_RNA (1)...(19): siRNA sense strand
gcagaucugucaggcaaau

SEQ ID NO: 755563 - RNA, 19 nt, Homo sapiens
  misc_RNA (1)...(19): siRNA sense strand
uggcauaacugaucugagu

SEQ ID NO: 755564 - RNA, 19 nt, Homo sapiens
  misc_RNA (1)...(19): siRNA sense strand
ggacagccaucaggguuuc

SEQ ID NO: 755565 - RNA, 19 nt, Homo sapiens
  misc_RNA (1)...(19): siRNA sense strand
agagacgcaucuagaaauu

SEQ ID NO: 755566 - RNA, 19 nt, Homo sapiens
  misc_RNA (1)...(19): siRNA sense strand
caacaaugcccaagacuac

SEQ ID NO: 755567 - RNA, 19 nt, Homo sapiens
  misc_RNA (1)...(19): siRNA sense strand
ggaauggaaacgugaauca

SEQ ID NO: 755568 - RNA, 19 nt, Homo sapiens
  misc_RNA (1)...(19): siRNA sense strand
gaucgugacccaagugguu

SEQ ID NO: 755569 - RNA, 19 nt, Homo sapiens
  misc_RNA (1)...(19): siRNA sense strand
caacgagaccuaugaugug

SEQ ID NO: 755570 - RNA, 19 nt, Homo sapiens
  misc_RNA (1)...(19): siRNA sense strand
gaaacgugaaucagaauca

SEQ ID NO: 755571 - RNA, 19 nt, Homo sapiens
  misc_RNA (1)...(19): siRNA sense strand
caucaguggugcaggagaa

SEQ ID NO: 755572 - RNA, 19 nt, Homo sapiens
  misc_RNA (1)...(19): siRNA sense strand
uuuaaucacuucugaguuc

SEQ ID NO: 755573 - RNA, 19 nt, Homo sapiens
  misc_RNA (1)...(19): siRNA sense strand
agucaacccuuuggcauaa

SEQ ID NO: 755574 - RNA, 19 nt, Homo sapiens
  misc_RNA (1)...(19): siRNA sense strand
gagcaggaguuugucaaca

SEQ ID NO: 755575 - RNA, 19 nt, Homo sapiens
  misc_RNA (1)...(19): siRNA sense strand
gaguagaaguaucaucagu

SEQ ID NO: 755576 - RNA, 19 nt, Homo sapiens
  misc_RNA (1)...(19): siRNA sense strand
caccagguacuccauauuu

SEQ ID NO: 755577 - RNA, 19 nt, Homo sapiens
  misc_RNA (1)...(19): siRNA sense strand
ccagggauccuuccuacuu

SEQ ID NO: 755578 - RNA, 19 nt, Homo sapiens
  misc_RNA (1)...(19): siRNA sense strand
gagaagggcgaguggaaug

SEQ ID NO: 755579 - RNA, 19 nt, Homo sapiens
  misc_RNA (1)...(19): siRNA sense strand
caucuggaguucuuuaugg

SEQ ID NO: 755580 - RNA, 19 nt, Homo sapiens
  misc_RNA (1)...(19): siRNA sense strand
gaaauaccuggacucuuug

SEQ ID NO: 755581 - RNA, 19 nt, Homo sapiens
  misc_RNA (1)...(19): siRNA sense strand
caaacugccuucuggaacu

SEQ ID NO: 755582 - RNA, 19 nt, Homo sapiens
  misc_RNA (1)...(19): siRNA sense strand
cuacugccauccuagaguu

SEQ ID NO: 755583 - RNA, 19 nt, Homo sapiens
  misc_RNA (1)...(19): siRNA sense strand
gcagcacuuugacauuuca

SEQ ID NO: 755584 - RNA, 19 nt, Homo sapiens
  misc_RNA (1)...(19): siRNA sense strand
ccuaugauguguacugcuu

SEQ ID NO: 755585 - RNA, 19 nt, Homo sapiens
  misc_RNA (1)...(19): siRNA sense strand
gaacucaguggugcucauu

SEQ ID NO: 755586 - RNA, 19 nt, Homo sapiens
  misc_RNA (1)...(19): siRNA sense strand
gggaccagaccgucagaua

SEQ ID NO: 755587 - RNA, 19 nt, Homo sapiens
  misc_RNA (1)...(19): siRNA sense strand
ccaacgagaccuaugaugu

SEQ ID NO: 755588 - RNA, 19 nt, Homo sapiens
  misc_RNA (1)...(19): siRNA sense strand
ccaaccagccugacaacuu

SEQ ID NO: 755589 - RNA, 19 nt, Homo sapiens
  misc_RNA (1)...(19): siRNA sense strand
ggagacaggacugaaauca

SEQ ID NO: 755590 - RNA, 19 nt, Homo sapiens
  misc_RNA (1)...(19): siRNA sense strand
uaucaucagucccagaauc

SEQ ID NO: 755591 - RNA, 19 nt, Homo sapiens
  misc_RNA (1)...(19): siRNA sense strand
acagugaccuggccugaca

SEQ ID NO: 755592 - RNA, 19 nt, Homo sapiens
  misc_RNA (1)...(19): siRNA sense strand
gaaugauguucccugcaau

SEQ ID NO: 755593 - RNA, 19 nt, Homo sapiens
  misc_RNA (1)...(19): siRNA sense strand
aauagaggaugucagugaa

SEQ ID NO: 755594 - RNA, 19 nt, Homo sapiens
  misc_RNA (1)...(19): siRNA sense strand
ggaaccaucagccucagaa

SEQ ID NO: 755595 - RNA, 19 nt, Homo sapiens
  misc_RNA (1)...(19): siRNA sense strand
cgaggagcccuucacguuu

SEQ ID NO: 755596 - RNA, 19 nt, Homo sapiens
  misc_RNA (1)...(19): siRNA sense strand
uguagaaacuucagaccau

SEQ ID NO: 755597 - RNA, 19 nt, Homo sapiens
  misc_RNA (1)...(19): siRNA sense strand
guuacugaaccaacuauuu

SEQ ID NO: 755598 - RNA, 19 nt, Homo sapiens
  misc_RNA (1)...(19): siRNA sense strand
gagaucagcgggcuuccuu

SEQ ID NO: 755599 - RNA, 19 nt, Homo sapiens
  misc_RNA (1)...(19): siRNA sense strand
gagaucagcgggcuuccuu

SEQ ID NO: 755600 - RNA, 19 nt, Homo sapiens
  misc_RNA (1)...(19): siRNA sense strand
cagggauccuuccuacuug

SEQ ID NO: 755601 - RNA, 19 nt, Homo sapiens
  misc_RNA (1)...(19): siRNA sense strand
ggugaaaggcaucguguuc

SEQ ID NO: 755602 - RNA, 19 nt, Homo sapiens
  misc_RNA (1)...(19): siRNA sense strand
gaacgacaggaccaucgaa

SEQ ID NO: 755603 - RNA, 19 nt, Homo sapiens
  misc_RNA (1)...(19): siRNA sense strand
caauguaaguggagaaucc

SEQ ID NO: 755604 - RNA, 19 nt, Homo sapiens
  misc_RNA (1)...(19): siRNA sense strand
ccgaggagcccuucacguu

SEQ ID NO: 755605 - RNA, 19 nt, Homo sapiens
  misc_RNA (1)...(19): siRNA sense strand
cacugcagcugucacugua

SEQ ID NO: 755606 - RNA, 19 nt, Homo sapiens
  misc_RNA (1)...(19): siRNA sense strand
aaacgugaaucagaaucaa

SEQ ID NO: 755607 - RNA, 19 nt, Homo sapiens
  misc_RNA (1)...(19): siRNA sense strand
ugaaaccaccucugcauuc

SEQ ID NO: 755608 - RNA, 19 nt, Homo sapiens
  misc_RNA (1)...(19): siRNA sense strand
aaucugggaugguggaugu

SEQ ID NO: 755609 - RNA, 19 nt, Homo sapiens
  misc_RNA (1)...(19): siRNA sense strand
ggaagggagggucuagaga

SEQ ID NO: 755610 - RNA, 19 nt, Homo sapiens
  misc_RNA (1)...(19): siRNA sense strand
gagagguuguagagacuuc

SEQ ID NO: 755611 - RNA, 19 nt, Homo sapiens
  misc_RNA (1)...(19): siRNA sense strand
gaaugggaaccagccuaua

SEQ ID NO: 755612 - RNA, 19 nt, Homo sapiens
  misc_RNA (1)...(19): siRNA sense strand
uuacugaaccaacuauuuc

SEQ ID NO: 755613 - RNA, 19 nt, Homo sapiens
  misc_RNA (1)...(19): siRNA sense strand
ggagcauucuggauuucug

SEQ ID NO: 755614 - RNA, 19 nt, Homo sapiens
  misc_RNA (1)...(19): siRNA sense strand
cuucugggauuacauuugu

SEQ ID NO: 755615 - RNA, 19 nt, Homo sapiens
  misc_RNA (1)...(19): siRNA sense strand
gacauuagugggagagcua

SEQ ID NO: 755616 - RNA, 19 nt, Homo sapiens
  misc_RNA (1)...(19): siRNA sense strand
ugggcaagcuccagaaaca

SEQ ID NO: 755617 - RNA, 19 nt, Homo sapiens
  misc_RNA (1)...(19): siRNA sense strand
gauuucugccucuggauuu

SEQ ID NO: 755618 - RNA, 19 nt, Homo sapiens
  misc_RNA (1)...(19): siRNA sense strand
ggacuccaguggucuuacu

SEQ ID NO: 755619 - RNA, 19 nt, Homo sapiens
  misc_RNA (1)...(19): siRNA sense strand
gugaagacuuuguggacau

SEQ ID NO: 755620 - RNA, 19 nt, Homo sapiens
  misc_RNA (1)...(19): siRNA sense strand
gacuuccgcuggucagaug

SEQ ID NO: 755621 - RNA, 19 nt, Homo sapiens
  misc_RNA (1)...(19): siRNA sense strand
ccucaagccuccuguacuc

SEQ ID NO: 755622 - RNA, 19 nt, Homo sapiens
  misc_RNA (1)...(19): siRNA sense strand
cagagacgcaucuagaaau

SEQ ID NO: 755623 - RNA, 19 nt, Homo sapiens
  misc_RNA (1)...(19): siRNA sense strand
gaaaccaccucugcauucc

SEQ ID NO: 755624 - RNA, 19 nt, Homo sapiens
  misc_RNA (1)...(19): siRNA sense strand
gccagcaccaccaauguaa

SEQ ID NO: 755625 - RNA, 19 nt, Homo sapiens
  misc_RNA (1)...(19): siRNA sense strand
ccuacuacauuuaaagaag

SEQ ID NO: 755626 - RNA, 19 nt, Homo sapiens
  misc_RNA (1)...(19): siRNA sense strand
ggaguucuuuauggcacua

SEQ ID NO: 755627 - RNA, 19 nt, Homo sapiens
  misc_RNA (1)...(19): siRNA sense strand
ggaccagaccgucagauac

SEQ ID NO: 755628 - RNA, 19 nt, Homo sapiens
  misc_RNA (1)...(19): siRNA sense strand
ggaagaagcuggugaaugc

SEQ ID NO: 755629 - RNA, 19 nt, Homo sapiens
  misc_RNA (1)...(19): siRNA sense strand
gaacaagcucauaguauua

SEQ ID NO: 755630 - RNA, 19 nt, Homo sapiens
  misc_RNA (1)...(19): siRNA sense strand
cagaagcucuccaaauuga

SEQ ID NO: 755631 - RNA, 19 nt, Homo sapiens
  misc_RNA (1)...(19): siRNA sense strand
ucacagaccuucuacacaa

SEQ ID NO: 755632 - RNA, 19 nt, Homo sapiens
  misc_RNA (1)...(19): siRNA sense strand
agaacaagcucauaguauu

SEQ ID NO: 755633 - RNA, 19 nt, Homo sapiens
  misc_RNA (1)...(19): siRNA sense strand
gauaaugauuccuacguau

SEQ ID NO: 755634 - RNA, 19 nt, Homo sapiens
  misc_RNA (1)...(19): siRNA sense strand
acaaauggaaccaaucuua

SEQ ID NO: 755635 - RNA, 19 nt, Homo sapiens
  misc_RNA (1)...(19): siRNA sense strand
gaucuuggaugauguuugg

SEQ ID NO: 755636 - RNA, 19 nt, Homo sapiens
  misc_RNA (1)...(19): siRNA sense strand
caaauggaaccaaucuuaa

SEQ ID NO: 755637 - RNA, 19 nt, Homo sapiens
  misc_RNA (1)...(19): siRNA sense strand
ccacagaggccaguuguuu

SEQ ID NO: 755638 - RNA, 19 nt, Homo sapiens
  misc_RNA (1)...(19): siRNA sense strand
aguaauggguccuaaauau

SEQ ID NO: 755639 - RNA, 19 nt, Homo sapiens
  misc_RNA (1)...(19): siRNA sense strand
agcagaagcucuccaaauu

SEQ ID NO: 755640 - RNA, 19 nt, Homo sapiens
  misc_RNA (1)...(19): siRNA sense strand
caagacauccuacaucaug

SEQ ID NO: 755641 - RNA, 19 nt, Homo sapiens
  misc_RNA (1)...(19): siRNA sense strand
acaaugcucuacuacauga

SEQ ID NO: 755642 - RNA, 19 nt, Homo sapiens
  misc_RNA (1)...(19): siRNA sense strand
caugauuagugauggauuu

SEQ ID NO: 755643 - RNA, 19 nt, Homo sapiens
  misc_RNA (1)...(19): siRNA sense strand
aaucugggcuucugaugaa

SEQ ID NO: 755644 - RNA, 19 nt, Homo sapiens
  misc_RNA (1)...(19): siRNA sense strand
gaagcucuccaaauugaaa

SEQ ID NO: 755645 - RNA, 19 nt, Homo sapiens
  misc_RNA (1)...(19): siRNA sense strand
gcagaagcucuccaaauug

SEQ ID NO: 755646 - RNA, 19 nt, Homo sapiens
  misc_RNA (1)...(19): siRNA sense strand
cuacaaugcucuacuacau

SEQ ID NO: 755647 - RNA, 19 nt, Homo sapiens
  misc_RNA (1)...(19): siRNA sense strand
gacaagaguguuacagauu

SEQ ID NO: 755648 - RNA, 19 nt, Homo sapiens
  misc_RNA (1)...(19): siRNA sense strand
ugaugaaacugcagaaucu

SEQ ID NO: 755649 - RNA, 19 nt, Homo sapiens
  misc_RNA (1)...(19): siRNA sense strand
cccagaggcuuccacuuaa

SEQ ID NO: 755650 - RNA, 19 nt, Homo sapiens
  misc_RNA (1)...(19): siRNA sense strand
gagaagcucuggaaaagga

SEQ ID NO: 755651 - RNA, 19 nt, Homo sapiens
  misc_RNA (1)...(19): siRNA sense strand
agauaaugauuccuacgua

SEQ ID NO: 755652 - RNA, 19 nt, Homo sapiens
  misc_RNA (1)...(19): siRNA sense strand
ucccagaggcuuccacuua

SEQ ID NO: 755653 - RNA, 19 nt, Homo sapiens
  misc_RNA (1)...(19): siRNA sense strand
acaagaguguuacagauuc

SEQ ID NO: 755654 - RNA, 19 nt, Homo sapiens
  misc_RNA (1)...(19): siRNA sense strand
cuacacaaauggaaccaau

SEQ ID NO: 755655 - RNA, 19 nt, Homo sapiens
  misc_RNA (1)...(19): siRNA sense strand
ccagaacaagcucauagua

SEQ ID NO: 755656 - RNA, 19 nt, Homo sapiens
  misc_RNA (1)...(19): siRNA sense strand
caugaaggauauaaagauc

SEQ ID NO: 755657 - RNA, 19 nt, Homo sapiens
  misc_RNA (1)...(19): siRNA sense strand
agacaagaguguuacagau

SEQ ID NO: 755658 - RNA, 19 nt, Homo sapiens
  misc_RNA (1)...(19): siRNA sense strand
gagacaagaguguuacaga

SEQ ID NO: 755659 - RNA, 19 nt, Homo sapiens
  misc_RNA (1)...(19): siRNA sense strand
caagaguguuacagauuca

SEQ ID NO: 755660 - RNA, 19 nt, Homo sapiens
  misc_RNA (1)...(19): siRNA sense strand
guaauggguccuaaauaug

SEQ ID NO: 755661 - RNA, 19 nt, Homo sapiens
  misc_RNA (1)...(19): siRNA sense strand
caugauggcauuccuguug

SEQ ID NO: 755662 - RNA, 19 nt, Homo sapiens
  misc_RNA (1)...(19): siRNA sense strand
uggaaccaaucuuaagaaa

SEQ ID NO: 755663 - RNA, 19 nt, Homo sapiens
  misc_RNA (1)...(19): siRNA sense strand
gaccgucuccgcauucuga

SEQ ID NO: 755664 - RNA, 19 nt, Homo sapiens
  misc_RNA (1)...(19): siRNA sense strand
ugcagaagcuguuagagau

SEQ ID NO: 755665 - RNA, 19 nt, Homo sapiens
  misc_RNA (1)...(19): siRNA sense strand
cauaugugacuguggauaa

SEQ ID NO: 755666 - RNA, 19 nt, Homo sapiens
  misc_RNA (1)...(19): siRNA sense strand
cagaacaagcucauaguau

SEQ ID NO: 755667 - RNA, 19 nt, Homo sapiens
  misc_RNA (1)...(19): siRNA sense strand
cagaggcuuccacuuaaua

SEQ ID NO: 755668 - RNA, 19 nt, Homo sapiens
  misc_RNA (1)...(19): siRNA sense strand
agacaaaucugggcuucug

SEQ ID NO: 755669 - RNA, 19 nt, Homo sapiens
  misc_RNA (1)...(19): siRNA sense strand
cuacguaucauucuacaau

SEQ ID NO: 755670 - RNA, 19 nt, Homo sapiens
  misc_RNA (1)...(19): siRNA sense strand
uaauggguccuaaauaugu

SEQ ID NO: 755671 - RNA, 19 nt, Homo sapiens
  misc_RNA (1)...(19): siRNA sense strand
gcauuccuguugucucuuc

SEQ ID NO: 755672 - RNA, 19 nt, Homo sapiens
  misc_RNA (1)...(19): siRNA sense strand
ucuacuacaugaaggauau

SEQ ID NO: 755673 - RNA, 19 nt, Homo sapiens
  misc_RNA (1)...(19): siRNA sense strand
cagaagcuguuagagauca

SEQ ID NO: 755674 - RNA, 19 nt, Homo sapiens
  misc_RNA (1)...(19): siRNA sense strand
ccagaggcuuccacuuaau

SEQ ID NO: 755675 - RNA, 19 nt, Homo sapiens
  misc_RNA (1)...(19): siRNA sense strand
caaggaagaagcuggugaa

SEQ ID NO: 755676 - RNA, 19 nt, Homo sapiens
  misc_RNA (1)...(19): siRNA sense strand
cgaaauuguuugcuucaac

SEQ ID NO: 755677 - RNA, 19 nt, Homo sapiens
  misc_RNA (1)...(19): siRNA sense strand
cagcagaagcucuccaaau

SEQ ID NO: 755678 - RNA, 19 nt, Homo sapiens
  misc_RNA (1)...(19): siRNA sense strand
ggcuuccacuuaauauuga

SEQ ID NO: 755679 - RNA, 19 nt, Homo sapiens
  misc_RNA (1)...(19): siRNA sense strand
caaaagcucgaaauuguuu

SEQ ID NO: 755680 - RNA, 19 nt, Homo sapiens
  misc_RNA (1)...(19): siRNA sense strand
guggauaaucuugguauuu

SEQ ID NO: 755681 - RNA, 19 nt, Homo sapiens
  misc_RNA (1)...(19): siRNA sense strand
guugaaagcuuuugacagu

SEQ ID NO: 755682 - RNA, 19 nt, Homo sapiens
  misc_RNA (1)...(19): siRNA sense strand
cacagaccuucuacacaaa

SEQ ID NO: 755683 - RNA, 19 nt, Homo sapiens
  misc_RNA (1)...(19): siRNA sense strand
uugcugcccuucuccauga

SEQ ID NO: 755684 - RNA, 19 nt, Homo sapiens
  misc_RNA (1)...(19): siRNA sense strand
caguaauggguccuaaaua

SEQ ID NO: 755685 - RNA, 19 nt, Homo sapiens
  misc_RNA (1)...(19): siRNA sense strand
gggagugcauuggguuuca

SEQ ID NO: 755686 - RNA, 19 nt, Homo sapiens
  misc_RNA (1)...(19): siRNA sense strand
aacaauaucagaagaggaa

SEQ ID NO: 755687 - RNA, 19 nt, Homo sapiens
  misc_RNA (1)...(19): siRNA sense strand
caacagcaaagagcagcua

SEQ ID NO: 755688 - RNA, 19 nt, Homo sapiens
  misc_RNA (1)...(19): siRNA sense strand
gaagcuggugaaugcaauu

SEQ ID NO: 755689 - RNA, 19 nt, Homo sapiens
  misc_RNA (1)...(19): siRNA sense strand
aauggguccuaaauaugua

SEQ ID NO: 755690 - RNA, 19 nt, Homo sapiens
  misc_RNA (1)...(19): siRNA sense strand
caucaagacauccuacauc

SEQ ID NO: 755691 - RNA, 19 nt, Homo sapiens
  misc_RNA (1)...(19): siRNA sense strand
auucuacaaugcucuacua

SEQ ID NO: 755692 - RNA, 19 nt, Homo sapiens
  misc_RNA (1)...(19): siRNA sense strand
ugaaacugcagaaucuuug

SEQ ID NO: 755693 - RNA, 19 nt, Homo sapiens
  misc_RNA (1)...(19): siRNA sense strand
gcaaacacccaaggucucu

SEQ ID NO: 755694 - RNA, 19 nt, Homo sapiens
  misc_RNA (1)...(19): siRNA sense strand
ucaguaauggguccuaaau

SEQ ID NO: 755695 - RNA, 19 nt, Homo sapiens
  misc_RNA (1)...(19): siRNA sense strand
cuacaugaaggauauaaag

SEQ ID NO: 755696 - RNA, 19 nt, Homo sapiens
  misc_RNA (1)...(19): siRNA sense strand
gaguguuacagauucagua

SEQ ID NO: 755697 - RNA, 19 nt, Homo sapiens
  misc_RNA (1)...(19): siRNA sense strand
ugcaaaagcucgaaauugu

SEQ ID NO: 755698 - RNA, 19 nt, Homo sapiens
  misc_RNA (1)...(19): siRNA sense strand
cagugucagauucuucuua

SEQ ID NO: 755699 - RNA, 19 nt, Homo sapiens
  misc_RNA (1)...(19): siRNA sense strand
aaaaggacaucaagacauc

SEQ ID NO: 755700 - RNA, 19 nt, Homo sapiens
  misc_RNA (1)...(19): siRNA sense strand
ugucagauucuucuuacaa

SEQ ID NO: 755701 - RNA, 19 nt, Homo sapiens
  misc_RNA (1)...(19): siRNA sense strand
uagagaucauucccuuuua

SEQ ID NO: 755702 - RNA, 19 nt, Homo sapiens
  misc_RNA (1)...(19): siRNA sense strand
gaaaaggacaucaagacau

SEQ ID NO: 755703 - RNA, 19 nt, Homo sapiens
  misc_RNA (1)...(19): siRNA sense strand
gcagaagcuguuagagauc

SEQ ID NO: 755704 - RNA, 19 nt, Homo sapiens
  misc_RNA (1)...(19): siRNA sense strand
uggaucaggaugagaguuu

SEQ ID NO: 755705 - RNA, 19 nt, Homo sapiens
  misc_RNA (1)...(19): siRNA sense strand
caaauugaaaggugaacca

SEQ ID NO: 755706 - RNA, 19 nt, Homo sapiens
  misc_RNA (1)...(19): siRNA sense strand
auaugaagaaggcagauuu

SEQ ID NO: 755707 - RNA, 19 nt, Homo sapiens
  misc_RNA (1)...(19): siRNA sense strand
aucaagacauccuacauca

SEQ ID NO: 755708 - RNA, 19 nt, Homo sapiens
  misc_RNA (1)...(19): siRNA sense strand
gaugauguuugggacucuu

SEQ ID NO: 755709 - RNA, 19 nt, Homo sapiens
  misc_RNA (1)...(19): siRNA sense strand
gugcauuggguuucaguug

SEQ ID NO: 755710 - RNA, 19 nt, Homo sapiens
  misc_RNA (1)...(19): siRNA sense strand
cugcagaagcuguuagaga

SEQ ID NO: 755711 - RNA, 19 nt, Homo sapiens
  misc_RNA (1)...(19): siRNA sense strand
uggcauuccuguugucucu

SEQ ID NO: 755712 - RNA, 19 nt, Homo sapiens
  misc_RNA (1)...(19): siRNA sense strand
gcaaaagcucgaaauuguu

SEQ ID NO: 755713 - RNA, 19 nt, Homo sapiens
  misc_RNA (1)...(19): siRNA sense strand
ugggaagucuguauuagcu

SEQ ID NO: 755714 - RNA, 19 nt, Homo sapiens
  misc_RNA (1)...(19): siRNA sense strand
gugugaagguggaguacca

SEQ ID NO: 755715 - RNA, 19 nt, Homo sapiens
  misc_RNA (1)...(19): siRNA sense strand
aggcuuccacuuaauauug

SEQ ID NO: 755716 - RNA, 19 nt, Homo sapiens
  misc_RNA (1)...(19): siRNA sense strand
gaggcuuccacuuaauauu

SEQ ID NO: 755717 - RNA, 19 nt, Homo sapiens
  misc_RNA (1)...(19): siRNA sense strand
gcugugggaagucuguauu

SEQ ID NO: 755718 - RNA, 19 nt, Homo sapiens
  misc_RNA (1)...(19): siRNA sense strand
caaaucugggcuucugaug

SEQ ID NO: 755719 - RNA, 19 nt, Homo sapiens
  misc_RNA (1)...(19): siRNA sense strand
aauggaaccaaucuuaaga

SEQ ID NO: 755720 - RNA, 19 nt, Homo sapiens
  misc_RNA (1)...(19): siRNA sense strand
acacaaauggaaccaaucu

SEQ ID NO: 755721 - RNA, 19 nt, Homo sapiens
  misc_RNA (1)...(19): siRNA sense strand
cagaccuucuacacaaaug

SEQ ID NO: 755722 - RNA, 19 nt, Homo sapiens
  misc_RNA (1)...(19): siRNA sense strand
uaugaagaaggcagauuug

SEQ ID NO: 755723 - RNA, 19 nt, Homo sapiens
  misc_RNA (1)...(19): siRNA sense strand
ggaaaaggacaucaagaca

SEQ ID NO: 755724 - RNA, 19 nt, Homo sapiens
  misc_RNA (1)...(19): siRNA sense strand
aaaucugggcuucugauga

SEQ ID NO: 755725 - RNA, 19 nt, Homo sapiens
  misc_RNA (1)...(19): siRNA sense strand
agaagcuggugaaugcaau

SEQ ID NO: 755726 - RNA, 19 nt, Homo sapiens
  misc_RNA (1)...(19): siRNA sense strand
aaauggaaccaaucuuaag

SEQ ID NO: 755727 - RNA, 19 nt, Homo sapiens
  misc_RNA (1)...(19): siRNA sense strand
caaccagagacaagagugu

SEQ ID NO: 755728 - RNA, 19 nt, Homo sapiens
  misc_RNA (1)...(19): siRNA sense strand
ggaagaagcuggugaaugc

SEQ ID NO: 755729 - RNA, 19 nt, Homo sapiens
  misc_RNA (1)...(19): siRNA sense strand
gaacaagcucauaguauua

SEQ ID NO: 755730 - RNA, 19 nt, Homo sapiens
  misc_RNA (1)...(19): siRNA sense strand
cagaagcucuccaaauuga

SEQ ID NO: 755731 - RNA, 19 nt, Homo sapiens
  misc_RNA (1)...(19): siRNA sense strand
ucacagaccuucuacacaa

SEQ ID NO: 755732 - RNA, 19 nt, Homo sapiens
  misc_RNA (1)...(19): siRNA sense strand
agaacaagcucauaguauu

SEQ ID NO: 755733 - RNA, 19 nt, Homo sapiens
  misc_RNA (1)...(19): siRNA sense strand
gauaaugauuccuacguau

SEQ ID NO: 755734 - RNA, 19 nt, Homo sapiens
  misc_RNA (1)...(19): siRNA sense strand
acaaauggaaccaaucuua

SEQ ID NO: 755735 - RNA, 19 nt, Homo sapiens
  misc_RNA (1)...(19): siRNA sense strand
gaucuuggaugauguuugg

SEQ ID NO: 755736 - RNA, 19 nt, Homo sapiens
  misc_RNA (1)...(19): siRNA sense strand
caaauggaaccaaucuuaa

SEQ ID NO: 755737 - RNA, 19 nt, Homo sapiens
  misc_RNA (1)...(19): siRNA sense strand
ccacagaggccaguuguuu

SEQ ID NO: 755738 - RNA, 19 nt, Homo sapiens
  misc_RNA (1)...(19): siRNA sense strand
aguaauggguccuaaauau

SEQ ID NO: 755739 - RNA, 19 nt, Homo sapiens
  misc_RNA (1)...(19): siRNA sense strand
agcagaagcucuccaaauu

SEQ ID NO: 755740 - RNA, 19 nt, Homo sapiens
  misc_RNA (1)...(19): siRNA sense strand
caagacauccuacaucaug

SEQ ID NO: 755741 - RNA, 19 nt, Homo sapiens
  misc_RNA (1)...(19): siRNA sense strand
acaaugcucuacuacauga

SEQ ID NO: 755742 - RNA, 19 nt, Homo sapiens
  misc_RNA (1)...(19): siRNA sense strand
caugauuagugauggauuu

SEQ ID NO: 755743 - RNA, 19 nt, Homo sapiens
  misc_RNA (1)...(19): siRNA sense strand
aaucugggcuucugaugaa

SEQ ID NO: 755744 - RNA, 19 nt, Homo sapiens
  misc_RNA (1)...(19): siRNA sense strand
gaagcucuccaaauugaaa

SEQ ID NO: 755745 - RNA, 19 nt, Homo sapiens
  misc_RNA (1)...(19): siRNA sense strand
gcagaagcucuccaaauug

SEQ ID NO: 755746 - RNA, 19 nt, Homo sapiens
  misc_RNA (1)...(19): siRNA sense strand
cuacaaugcucuacuacau

SEQ ID NO: 755747 - RNA, 19 nt, Homo sapiens
  misc_RNA (1)...(19): siRNA sense strand
gacaagaguguuacagauu

SEQ ID NO: 755748 - RNA, 19 nt, Homo sapiens
  misc_RNA (1)...(19): siRNA sense strand
ugaugaaacugcagaaucu

SEQ ID NO: 755749 - RNA, 19 nt, Homo sapiens
  misc_RNA (1)...(19): siRNA sense strand
cccagaggcuuccacuuaa

SEQ ID NO: 755750 - RNA, 19 nt, Homo sapiens
  misc_RNA (1)...(19): siRNA sense strand
gagaagcucuggaaaagga

SEQ ID NO: 755751 - RNA, 19 nt, Homo sapiens
  misc_RNA (1)...(19): siRNA sense strand
agauaaugauuccuacgua

SEQ ID NO: 755752 - RNA, 19 nt, Homo sapiens
  misc_RNA (1)...(19): siRNA sense strand
ucccagaggcuuccacuua

SEQ ID NO: 755753 - RNA, 19 nt, Homo sapiens
  misc_RNA (1)...(19): siRNA sense strand
acaagaguguuacagauuc

SEQ ID NO: 755754 - RNA, 19 nt, Homo sapiens
  misc_RNA (1)...(19): siRNA sense strand
cuacacaaauggaaccaau

SEQ ID NO: 755755 - RNA, 19 nt, Homo sapiens
  misc_RNA (1)...(19): siRNA sense strand
ccagaacaagcucauagua

SEQ ID NO: 755756 - RNA, 19 nt, Homo sapiens
  misc_RNA (1)...(19): siRNA sense strand
caugaaggauauaaagauc

SEQ ID NO: 755757 - RNA, 19 nt, Homo sapiens
  misc_RNA (1)...(19): siRNA sense strand
agacaagaguguuacagau

SEQ ID NO: 755758 - RNA, 19 nt, Homo sapiens
  misc_RNA (1)...(19): siRNA sense strand
gagacaagaguguuacaga

SEQ ID NO: 755759 - RNA, 19 nt, Homo sapiens
  misc_RNA (1)...(19): siRNA sense strand
caagaguguuacagauuca

SEQ ID NO: 755760 - RNA, 19 nt, Homo sapiens
  misc_RNA (1)...(19): siRNA sense strand
guaauggguccuaaauaug

SEQ ID NO: 755761 - RNA, 19 nt, Homo sapiens
  misc_RNA (1)...(19): siRNA sense strand
caugauggcauuccuguug

SEQ ID NO: 755762 - RNA, 19 nt, Homo sapiens
  misc_RNA (1)...(19): siRNA sense strand
uggaaccaaucuuaagaaa

SEQ ID NO: 755763 - RNA, 19 nt, Homo sapiens
  misc_RNA (1)...(19): siRNA sense strand
gaccgucuccgcauucuga

SEQ ID NO: 755764 - RNA, 19 nt, Homo sapiens
  misc_RNA (1)...(19): siRNA sense strand
ugcagaagcuguuagagau

SEQ ID NO: 755765 - RNA, 19 nt, Homo sapiens
  misc_RNA (1)...(19): siRNA sense strand
cauaugugacuguggauaa

SEQ ID NO: 755766 - RNA, 19 nt, Homo sapiens
  misc_RNA (1)...(19): siRNA sense strand
cagaacaagcucauaguau

SEQ ID NO: 755767 - RNA, 19 nt, Homo sapiens
  misc_RNA (1)...(19): siRNA sense strand
cagaggcuuccacuuaaua

SEQ ID NO: 755768 - RNA, 19 nt, Homo sapiens
  misc_RNA (1)...(19): siRNA sense strand
agacaaaucugggcuucug

SEQ ID NO: 755769 - RNA, 19 nt, Homo sapiens
  misc_RNA (1)...(19): siRNA sense strand
cuacguaucauucuacaau

SEQ ID NO: 755770 - RNA, 19 nt, Homo sapiens
  misc_RNA (1)...(19): siRNA sense strand
uaauggguccuaaauaugu

SEQ ID NO: 755771 - RNA, 19 nt, Homo sapiens
  misc_RNA (1)...(19): siRNA sense strand
gcauuccuguugucucuuc

SEQ ID NO: 755772 - RNA, 19 nt, Homo sapiens
  misc_RNA (1)...(19): siRNA sense strand
ucuacuacaugaaggauau

SEQ ID NO: 755773 - RNA, 19 nt, Homo sapiens
  misc_RNA (1)...(19): siRNA sense strand
cagaagcuguuagagauca

SEQ ID NO: 755774 - RNA, 19 nt, Homo sapiens
  misc_RNA (1)...(19): siRNA sense strand
ccagaggcuuccacuuaau

SEQ ID NO: 755775 - RNA, 19 nt, Homo sapiens
  misc_RNA (1)...(19): siRNA sense strand
caaggaagaagcuggugaa

SEQ ID NO: 755776 - RNA, 19 nt, Homo sapiens
  misc_RNA (1)...(19): siRNA sense strand
cgaaauuguuugcuucaac

SEQ ID NO: 755777 - RNA, 19 nt, Homo sapiens
  misc_RNA (1)...(19): siRNA sense strand
cagcagaagcucuccaaau

SEQ ID NO: 755778 - RNA, 19 nt, Homo sapiens
  misc_RNA (1)...(19): siRNA sense strand
ggcuuccacuuaauauuga

SEQ ID NO: 755779 - RNA, 19 nt, Homo sapiens
  misc_RNA (1)...(19): siRNA sense strand
caaaagcucgaaauuguuu

SEQ ID NO: 755780 - RNA, 19 nt, Homo sapiens
  misc_RNA (1)...(19): siRNA sense strand
guggauaaucuugguauuu

SEQ ID NO: 755781 - RNA, 19 nt, Homo sapiens
  misc_RNA (1)...(19): siRNA sense strand
guugaaagcuuuugacagu

SEQ ID NO: 755782 - RNA, 19 nt, Homo sapiens
  misc_RNA (1)...(19): siRNA sense strand
cacagaccuucuacacaaa

SEQ ID NO: 755783 - RNA, 19 nt, Homo sapiens
  misc_RNA (1)...(19): siRNA sense strand
uugcugcccuucuccauga

SEQ ID NO: 755784 - RNA, 19 nt, Homo sapiens
  misc_RNA (1)...(19): siRNA sense strand
caguaauggguccuaaaua

SEQ ID NO: 755785 - RNA, 19 nt, Homo sapiens
  misc_RNA (1)...(19): siRNA sense strand
gggagugcauuggguuuca

SEQ ID NO: 755786 - RNA, 19 nt, Homo sapiens
  misc_RNA (1)...(19): siRNA sense strand
aacaauaucagaagaggaa

SEQ ID NO: 755787 - RNA, 19 nt, Homo sapiens
  misc_RNA (1)...(19): siRNA sense strand
caacagcaaagagcagcua

SEQ ID NO: 755788 - RNA, 19 nt, Homo sapiens
  misc_RNA (1)...(19): siRNA sense strand
gaagcuggugaaugcaauu

SEQ ID NO: 755789 - RNA, 19 nt, Homo sapiens
  misc_RNA (1)...(19): siRNA sense strand
aauggguccuaaauaugua

SEQ ID NO: 755790 - RNA, 19 nt, Homo sapiens
  misc_RNA (1)...(19): siRNA sense strand
caucaagacauccuacauc

SEQ ID NO: 755791 - RNA, 19 nt, Homo sapiens
  misc_RNA (1)...(19): siRNA sense strand
auucuacaaugcucuacua

SEQ ID NO: 755792 - RNA, 19 nt, Homo sapiens
  misc_RNA (1)...(19): siRNA sense strand
ugaaacugcagaaucuuug

SEQ ID NO: 755793 - RNA, 19 nt, Homo sapiens
  misc_RNA (1)...(19): siRNA sense strand
gcaaacacccaaggucucu

SEQ ID NO: 755794 - RNA, 19 nt, Homo sapiens
  misc_RNA (1)...(19): siRNA sense strand
ucaguaauggguccuaaau

SEQ ID NO: 755795 - RNA, 19 nt, Homo sapiens
  misc_RNA (1)...(19): siRNA sense strand
cuacaugaaggauauaaag

SEQ ID NO: 755796 - RNA, 19 nt, Homo sapiens
  misc_RNA (1)...(19): siRNA sense strand
gaguguuacagauucagua

SEQ ID NO: 755797 - RNA, 19 nt, Homo sapiens
  misc_RNA (1)...(19): siRNA sense strand
ugcaaaagcucgaaauugu

SEQ ID NO: 755798 - RNA, 19 nt, Homo sapiens
  misc_RNA (1)...(19): siRNA sense strand
cagugucagauucuucuua

SEQ ID NO: 755799 - RNA, 19 nt, Homo sapiens
  misc_RNA (1)...(19): siRNA sense strand
aaaaggacaucaagacauc

SEQ ID NO: 755800 - RNA, 19 nt, Homo sapiens
  misc_RNA (1)...(19): siRNA sense strand
ugucagauucuucuuacaa

SEQ ID NO: 755801 - RNA, 19 nt, Homo sapiens
  misc_RNA (1)...(19): siRNA sense strand
uagagaucauucccuuuua

SEQ ID NO: 755802 - RNA, 19 nt, Homo sapiens
  misc_RNA (1)...(19): siRNA sense strand
gaaaaggacaucaagacau

SEQ ID NO: 755803 - RNA, 19 nt, Homo sapiens
  misc_RNA (1)...(19): siRNA sense strand
gcagaagcuguuagagauc

SEQ ID NO: 755804 - RNA, 19 nt, Homo sapiens
  misc_RNA (1)...(19): siRNA sense strand
uggaucaggaugagaguuu

SEQ ID NO: 755805 - RNA, 19 nt, Homo sapiens
  misc_RNA (1)...(19): siRNA sense strand
caaauugaaaggugaacca

SEQ ID NO: 755806 - RNA, 19 nt, Homo sapiens
  misc_RNA (1)...(19): siRNA sense strand
auaugaagaaggcagauuu

SEQ ID NO: 755807 - RNA, 19 nt, Homo sapiens
  misc_RNA (1)...(19): siRNA sense strand
aucaagacauccuacauca

SEQ ID NO: 755808 - RNA, 19 nt, Homo sapiens
  misc_RNA (1)...(19): siRNA sense strand
gaugauguuugggacucuu

SEQ ID NO: 755809 - RNA, 19 nt, Homo sapiens
  misc_RNA (1)...(19): siRNA sense strand
gugcauuggguuucaguug

SEQ ID NO: 755810 - RNA, 19 nt, Homo sapiens
  misc_RNA (1)...(19): siRNA sense strand
cugcagaagcuguuagaga

SEQ ID NO: 755811 - RNA, 19 nt, Homo sapiens
  misc_RNA (1)...(19): siRNA sense strand
uggcauuccuguugucucu

SEQ ID NO: 755812 - RNA, 19 nt, Homo sapiens
  misc_RNA (1)...(19): siRNA sense strand
gcaaaagcucgaaauuguu

SEQ ID NO: 755813 - RNA, 19 nt, Homo sapiens
  misc_RNA (1)...(19): siRNA sense strand
ugggaagucuguauuagcu

SEQ ID NO: 755814 - RNA, 19 nt, Homo sapiens
  misc_RNA (1)...(19): siRNA sense strand
gugugaagguggaguacca

SEQ ID NO: 755815 - RNA, 19 nt, Homo sapiens
  misc_RNA (1)...(19): siRNA sense strand
aggcuuccacuuaauauug

SEQ ID NO: 755816 - RNA, 19 nt, Homo sapiens
  misc_RNA (1)...(19): siRNA sense strand
gaggcuuccacuuaauauu

SEQ ID NO: 755817 - RNA, 19 nt, Homo sapiens
  misc_RNA (1)...(19): siRNA sense strand
gcugugggaagucuguauu

SEQ ID NO: 755818 - RNA, 19 nt, Homo sapiens
  misc_RNA (1)...(19): siRNA sense strand
caaaucugggcuucugaug

SEQ ID NO: 755819 - RNA, 19 nt, Homo sapiens
  misc_RNA (1)...(19): siRNA sense strand
aauggaaccaaucuuaaga

SEQ ID NO: 755820 - RNA, 19 nt, Homo sapiens
  misc_RNA (1)...(19): siRNA sense strand
acacaaauggaaccaaucu

SEQ ID NO: 755821 - RNA, 19 nt, Homo sapiens
  misc_RNA (1)...(19): siRNA sense strand
cagaccuucuacacaaaug

SEQ ID NO: 755822 - RNA, 19 nt, Homo sapiens
  misc_RNA (1)...(19): siRNA sense strand
uaugaagaaggcagauuug

SEQ ID NO: 755823 - RNA, 19 nt, Homo sapiens
  misc_RNA (1)...(19): siRNA sense strand
ggaaaaggacaucaagaca

SEQ ID NO: 755824 - RNA, 19 nt, Homo sapiens
  misc_RNA (1)...(19): siRNA sense strand
aaaucugggcuucugauga

SEQ ID NO: 755825 - RNA, 19 nt, Homo sapiens
  misc_RNA (1)...(19): siRNA sense strand
agaagcuggugaaugcaau

SEQ ID NO: 755826 - RNA, 19 nt, Homo sapiens
  misc_RNA (1)...(19): siRNA sense strand
aaauggaaccaaucuuaag

SEQ ID NO: 755827 - RNA, 19 nt, Homo sapiens
  misc_RNA (1)...(19): siRNA sense strand
caaccagagacaagagugu

SEQ ID NO: 755828 - RNA, 19 nt, Homo sapiens
  misc_RNA (1)...(19): siRNA sense strand
ggaagaagcuggugaaugc

SEQ ID NO: 755829 - RNA, 19 nt, Homo sapiens
  misc_RNA (1)...(19): siRNA sense strand
gaacaagcucauaguauua

SEQ ID NO: 755830 - RNA, 19 nt, Homo sapiens
  misc_RNA (1)...(19): siRNA sense strand
cagaagcucuccaaauuga

SEQ ID NO: 755831 - RNA, 19 nt, Homo sapiens
  misc_RNA (1)...(19): siRNA sense strand
ucacagaccuucuacacaa

SEQ ID NO: 755832 - RNA, 19 nt, Homo sapiens
  misc_RNA (1)...(19): siRNA sense strand
agaacaagcucauaguauu

SEQ ID NO: 755833 - RNA, 19 nt, Homo sapiens
  misc_RNA (1)...(19): siRNA sense strand
gauaaugauuccuacguau

SEQ ID NO: 755834 - RNA, 19 nt, Homo sapiens
  misc_RNA (1)...(19): siRNA sense strand
acaaauggaaccaaucuua

SEQ ID NO: 755835 - RNA, 19 nt, Homo sapiens
  misc_RNA (1)...(19): siRNA sense strand
gaucuuggaugauguuugg

SEQ ID NO: 755836 - RNA, 19 nt, Homo sapiens
  misc_RNA (1)...(19): siRNA sense strand
caaauggaaccaaucuuaa

SEQ ID NO: 755837 - RNA, 19 nt, Homo sapiens
  misc_RNA (1)...(19): siRNA sense strand
ccacagaggccaguuguuu

SEQ ID NO: 755838 - RNA, 19 nt, Homo sapiens
  misc_RNA (1)...(19): siRNA sense strand
aguaauggguccuaaauau

SEQ ID NO: 755839 - RNA, 19 nt, Homo sapiens
  misc_RNA (1)...(19): siRNA sense strand
agcagaagcucuccaaauu

SEQ ID NO: 755840 - RNA, 19 nt, Homo sapiens
  misc_RNA (1)...(19): siRNA sense strand
caagacauccuacaucaug

SEQ ID NO: 755841 - RNA, 19 nt, Homo sapiens
  misc_RNA (1)...(19): siRNA sense strand
acaaugcucuacuacauga

SEQ ID NO: 755842 - RNA, 19 nt, Homo sapiens
  misc_RNA (1)...(19): siRNA sense strand
caugauuagugauggauuu

SEQ ID NO: 755843 - RNA, 19 nt, Homo sapiens
  misc_RNA (1)...(19): siRNA sense strand
aaucugggcuucugaugaa

SEQ ID NO: 755844 - RNA, 19 nt, Homo sapiens
  misc_RNA (1)...(19): siRNA sense strand
gaagcucuccaaauugaaa

SEQ ID NO: 755845 - RNA, 19 nt, Homo sapiens
  misc_RNA (1)...(19): siRNA sense strand
gcagaagcucuccaaauug

SEQ ID NO: 755846 - RNA, 19 nt, Homo sapiens
  misc_RNA (1)...(19): siRNA sense strand
cuacaaugcucuacuacau

SEQ ID NO: 755847 - RNA, 19 nt, Homo sapiens
  misc_RNA (1)...(19): siRNA sense strand
gacaagaguguuacagauu

SEQ ID NO: 755848 - RNA, 19 nt, Homo sapiens
  misc_RNA (1)...(19): siRNA sense strand
ugaugaaacugcagaaucu

SEQ ID NO: 755849 - RNA, 19 nt, Homo sapiens
  misc_RNA (1)...(19): siRNA sense strand
cccagaggcuuccacuuaa

SEQ ID NO: 755850 - RNA, 19 nt, Homo sapiens
  misc_RNA (1)...(19): siRNA sense strand
gagaagcucuggaaaagga

SEQ ID NO: 755851 - RNA, 19 nt, Homo sapiens
  misc_RNA (1)...(19): siRNA sense strand
agauaaugauuccuacgua

SEQ ID NO: 755852 - RNA, 19 nt, Homo sapiens
  misc_RNA (1)...(19): siRNA sense strand
ucccagaggcuuccacuua

SEQ ID NO: 755853 - RNA, 19 nt, Homo sapiens
  misc_RNA (1)...(19): siRNA sense strand
acaagaguguuacagauuc

SEQ ID NO: 755854 - RNA, 19 nt, Homo sapiens
  misc_RNA (1)...(19): siRNA sense strand
cuacacaaauggaaccaau

SEQ ID NO: 755855 - RNA, 19 nt, Homo sapiens
  misc_RNA (1)...(19): siRNA sense strand
ccagaacaagcucauagua

SEQ ID NO: 755856 - RNA, 19 nt, Homo sapiens
  misc_RNA (1)...(19): siRNA sense strand
caugaaggauauaaagauc

SEQ ID NO: 755857 - RNA, 19 nt, Homo sapiens
  misc_RNA (1)...(19): siRNA sense strand
agacaagaguguuacagau

SEQ ID NO: 755858 - RNA, 19 nt, Homo sapiens
  misc_RNA (1)...(19): siRNA sense strand
gagacaagaguguuacaga

SEQ ID NO: 755859 - RNA, 19 nt, Homo sapiens
  misc_RNA (1)...(19): siRNA sense strand
caagaguguuacagauuca

SEQ ID NO: 755860 - RNA, 19 nt, Homo sapiens
  misc_RNA (1)...(19): siRNA sense strand
guaauggguccuaaauaug

SEQ ID NO: 755861 - RNA, 19 nt, Homo sapiens
  misc_RNA (1)...(19): siRNA sense strand
caugauggcauuccuguug

SEQ ID NO: 755862 - RNA, 19 nt, Homo sapiens
  misc_RNA (1)...(19): siRNA sense strand
uggaaccaaucuuaagaaa

SEQ ID NO: 755863 - RNA, 19 nt, Homo sapiens
  misc_RNA (1)...(19): siRNA sense strand
gaccgucuccgcauucuga

SEQ ID NO: 755864 - RNA, 19 nt, Homo sapiens
  misc_RNA (1)...(19): siRNA sense strand
ugcagaagcuguuagagau

SEQ ID NO: 755865 - RNA, 19 nt, Homo sapiens
  misc_RNA (1)...(19): siRNA sense strand
cauaugugacuguggauaa
